United States Patent Application Publication US 2019/0348154 A1 - sequence listing, part 67

SEQ ID NO: 253016 - DNA, 1239 bp, Klebsiella pneumoniae
atggctgaattcagtcctgaacgccgttttacgcgtatcgatcgtctccccccgtacgtttttaatattactgccgaactcaaaatggctgcgcgacgccgcggcgaagatattattgacttcagcatgggtaaccccgatggcgcgacgccgccgcatatcgttgaaaagctatgtaccgttgcccagcgccccgatacgcacggttattccacctctcgcggcatcccgcgactgcgccgggcgatttctcgctggtatcaggatcgctatgacgtagagatcgatccggaatcagaagcgattgtgaccatcggttcaaaggaggggctggcgcatctgatgctggcgacgcttgaccatggcgacaccgtgctggtgccgaatcccagctatccaattcatatttacggtgcggtgattgccggagctcaggttcgttcagttcccctcgttgaaggcgtggattttttcaacgagcttgagcgcgctattcgtgagagctatccgaagccgaaaatgatgatcctcggttttccatccaacccgacggcgcagtgcgttgaactggagtttttcgagaaagtcgtcgcgctggcgaagcgttatgacgtactggtcgtgcacgatttggcctacgccgatattgtgtatgacggttggaaagcgccttctattatgcaggttcccggcgcgcgcgatgtggccgtcgaattctttacgctctcaaaaagctacaatatggcaggctggcgtattggctttatggtgggtaacaaaacgttggttaatgcgctggcgcgcattaaaagctaccacgattacggtactttcactcctctgcaggttgcggctattgctgcgcttgaaggcgatcagcagtgcgttcgcgacatcgccgaacagtacaaacgccgccgggacgtgctggtgaaagggttacatgaggcgggctggatggtggagtgcccgaaggcctcgatgtacgtatgggctaagatccctgagcagtacgcggccatggggtccctggagtttgctaaaaagctgctgcaggatgctaaagtctgcgtttcacccggcatcggttttggtgattacggtgatactcacgtacgcttcgctttaatcgaaaaccgcgatcgtatccgccaggccgtacgcggtattaaatcaatgttccgcgccgacgggctgcttccggcagcggctaagttaaccagcgaaagcaacgaataa

SEQ ID NO: 253017 - DNA, 1188 bp, Klebsiella pneumoniae
atgaatcagacgcaacgtaacggcgccatgctgctggtgttggtgcttatcggaatgaatatgcgtccgctgctgacatcgccaggcccgctccttccccagatacagcaggcaagtggtatgagcttcacgcttgcctccctgctcactgcgctcccggtgatcgcgatgggtctgctggcgcttgccggcggctggattaacagccgattcagcgaacgtcaaagtatcgccttcagtctgttaatcatcgccgccggagctttacttcgcgaactggcgccgcagagcgcgctattactcagcagcgcgcttcttggcgggatcggcattggtattatccaggcgctcattcctgcggtaataaaacgcctgtttcatcgtcggacgcctcaggtgatgggactctggtcagcggcgctgatgggcggtggcggtctgggagccgcatttacgccgtggctggcgcagcacagcgctatctggtatcacgcgcttgcgtggtgggcgctacccgcagcgacagcgctcctttgctggtggccgctaagcagaacgttacctgtccagacgccatcgacaatacagctctctgtttttcgccatcgtcgagcgtggatacttagcctctattttggtttgataaacggcggttacgccagtttgatcgcctggctgccaccctactatatgcagtcaggctatagcgcgcagtttagcggtacccttttggcgttaatgaccgtcggccagactggcggagcgctacttctgcctgttctggccaggcatgaagatcggcgaaagcttctgatgctggcgctggcgctgcagctcatcggcttctgcggctttatctggctaccgcagcagctaccgcttgcctgggctatctgctgcggtattggacttggcggcgcgtttccgctctgcctggtactggcgctcgatcacgcgaagcaccccgctatcgcgggtcgcctggtggcctttatgcaaggagtgggctttattattgcaggtatttccccctggctttcagggctgctgcggagcttaaacggcaatttccttccgggctggatgtttcacgccgcctgcgtcctggcgttaatgctcctcacattgcgttttgccccggcacgctatccgcaagagtggcaacatcagaactctgccactcgctaa

SEQ ID NO: 253018 - DNA, 906 bp, Klebsiella pneumoniae
atgttgctgcgacatctcaattacttcattgccgttgctgaacaaggtagttttacgcgggccgcagcgatactgcatatttcgcagccggctttatcgcaacagattcgccagctggaggagtctctgggcgtacggctttttgatcgcagcgggcgtcatacttgtctgacggatgccgggaaggtgtggttgacgtacgcgcacagggcgcggcaggagctcgctgaggggcagcgtgcgcttcatgatgtggaggacctgcagcgcggttcgctacgtattgcgatgatgcctacctttacgacttactttgtggggccgctggtggcttcgttctatcaacgttacccaaatattacgctggatttgcaagagatgacccaggagcgaatggagaccatgttgctcaatgatgagctcgatatcggcattgcttttgaaggcaacgatgcgcgagatattgtttatcagccgctgctttcggaaaccctggcgctggtggtaggccggcgtcaccctctggcgacggccgatcgcgtcaagctggctgcgctcagtcaggaatctctgattctgctcagtcgcgctttcgcgactcgccagcaaatcgaacgttactgccggcagcgtgatattcaaccgaaagttcagatggaggctaactcgattagcgctctcctggccgtggtagaacgcacatcgctggcaaccctgcttccggcgtccattattctggcgcgtgacgatctcactgccattgaactcaccccaccgttactcgcgagaaccgcatgtctgctacagcgaaagggtgcctggcaaagcgccgcggcccgcgaatttatactgatggcgcatcgggctgcgatgaagatcagagaaggtcttacagatactgaataa

SEQ ID NO: 253019 - DNA, 870 bp, Klebsiella pneumoniae
atgaccatggaaagaaaagaacggaacatatggaaactcaacaaccttccgccactggaatattgttcaatctctcgcgctcaaaaattattaaattgtgaattagaagatctgcttcattggcatgatattggtgcaataagcctttgcatcaaattaggcagaaccaacggaacgttaaagagtgctatccgccatcagcagggcggcaacaaaccctatttttttaacacatcaaatattgatgaattgagcagaagcgaaagatcgtggtccccgcactccaaaataaacaaaattttcaaattcaatgaaagtgaaccgaacctggatgcccaatatggaacgcctgttacccagttaaaactccgggtttccgtatctggcctgtggtacagccacacgaggaatttaacggaagtactagaaaaccccgatagcatcattactgaacagcggatcagcatcatttcaccggcaagaaacgtcctcttctgtcacttcacccccgatgaggatgagaagccaaccatcacgatgaataaactttacatcactaatcaggcgattgagaaaatttatgagcatactatcagcagccgccctctggaatttgcagaaaaaccgctaaatattattgaggataaagaggtgcataatccctcaattattcttcaaaataaactgctcattgaattcatcaatcacatcattcaagccaacccacactttggtgataacattctaaacgcaacggaaaacaataaaaataaaatattcaacatcgcaatggatagactaagggcagaaggcgtggtttccagctacggcagcatcaatctcccggcatcagaatacacgctcaaatga

SEQ ID NO: 253020 - DNA, 897 bp, Klebsiella pneumoniae
atgaagccgcaaactcaccatgatagtgaagatgttgaggttgaaagtgaagaaaaacagaatggtgaagaaattgaggtggatgaagaacgcctgccttcacaggcgatggctacgcatgaagtgattcgccaggaaggagagaaagagcttgagcgcgatgccatggcgctcctctggtcagcgattgcagcaggactctcaatgggggcttcgctggttgccaaaggcattttccatgttcatctcagcgagctgcccggcggttttttgctggaaaatctcggctacacctttggctttattatcgtcattctcgctcggcaacagctgttcaccgagaataccgtcaccgccgtcctgccgattatgcataaacccacgctcagcaatatcggcctgctgttacgtttatggggtgttgtactggcgggtaacttaattggaaccgctatcgcagcatgggcgttcgatgtcatgcccgtgttcgatgaaccgactcgcgaagcctttcttaaaatcagcctgaaggtgatgcaaaaccctccgctggagatgtttgccaatgcgattatctccggttggctggtcgcaaccatggtgtggatgtttcccgccgcaggctccgcgaaaattatcgtcatcatcctgatgacctggcttatcgccctggcggacactacgcatattgtggtgggcagcgtcgagattttctacctggtgttcaacggcacgctgccgtggcaggaattcatctggccgttcgcgctcccgacccttgccggaaacatttgcggcgggacctttattttcgcgttattaagccatgctcagatccgtaatgatatgagccacgagaagaaagcccgtgcggctgaagagagaaaaaagcgctaa

SEQ ID NO: 253021 - DNA, 762 bp, Klebsiella pneumoniae
atgaattttcgcctgtcggcgcttgcgcttggcgccacattgctggtggggtgcgccagttctggttctggcgatctaccgcaggggcgttcagatccgcttgaaggttttaaccgaaccatgttcaacttcaactacaatgttgtcgatccttatgttcttcggcctgttgccgtagcgtggcgagattatgttccgcagccggcgcgtaatggtctgagcaattttaccagcaaccttgaagaacctgcggtaatggtgaactccttcctgaagggcgatccctataaaggtatggtgcactttacgcgtttcttcctgaacactctcctcgggatgggtgggctggttgatgtagcgggaatggcgaatccaaaactgcagcgcgttgagcctgctcgcttcggtagtactctgggtcactatggcgtgggatacggcccctatgtgcagttgcctttctacggcagctttacgctgcgtgatgagggcggtgatatggctgatgacttgtatccggttctttcctggctgacatggccgatgtctattggtaaatggatggtagagggagtcgaaacccgcgcgcagctgctggattccgatggcttgctccgtcagtcctccgatccgtatatcctgatgcgtgaagcttacttccagcgtcatgattttatcgccaacggcggtaaactttctccgaatgagaaccccaacgctcaggcgattgaaggcgatctcaaagatatcgattcacagtaa

SEQ ID NO: 253022 - DNA, 1365 bp, Klebsiella pneumoniae
atgagccagaaaacccgctttacccaatctgcccttgcagtggctgtcgcacttgtttccacccaggcctggtcggcaggctttcagttaaacgaattctcttcatcgggccttggtcgcgcctattcaggtgaaggagctattgctgacgatgctggaaacgtcagccgtaacccggcattgattatgatgttcgaccgtccgactttctcgggcggcgctatttttgtcgatcctgatgtcaacgtcaccggcagttcagttatcggtaatgacgccagccaggacaatatcgcaccaaccgcatgggtacccaatctgcactttgtggcgccgattaacgaccagtttggctggggggcttctctgacgtctaactatggtttagccaccgagttcaacaatgattttgccgcgggctcaatgggcggtacaaccgacctcgaaaccctcaacctcaatctgagcggcgcctatcgtctcaacgaccactggagctttggtttaggctttgacgccgtctatgccagagctaaactagagcgctacgcgggcgatttaccggatattatcggcgcacagctaccgggaatggtgaaagccggcaaactctctccggcccaggccgcggcaattggtcaacaggctggcggtatcagccgcgatacgcaaatcgctcgtctgaagggtgatgagtggggcttcggctggaatgcgggtattttatatgaagtcgataaaaacaaccgctacggcttaacctaccgctctgaggtcaaagttgattttgacggagattataagagcagtctgccgtcatccctcaaccctattaactctgccctcggtctgggactgccttacggcactggtggttcgacaatcggcggttctctgacgttgaatctgcccgaaatgtgggaaatctcaggttataaccgcgtagcgccaaaatgggccgttcactacagcctggcttataccagctggagccagttccaggagctgaaagccaccaaaaccagcggcggcgaaacgctgttctacaaagacgaaggttttaaagattcctatcgtatcgctctgggtaccacctattaccatgacgataactggaccttccgtaccggtatcgcctttgatgatagcccggttccggcttccaatcgttccatctctatcccggatcaggatcgcctgtggctcagcgccggtacgacttacgcctttaataaagacgcttccgtcgacgtcggtgtgtcctatatgcacggtcagcacgtcgaatttacagaaggaccgtatacctttaaatcagaaggtaaagcctggctgtacggcgcgaactttaactaccgtttctaa

SEQ ID NO: 253023 - DNA, 285 bp, Klebsiella pneumoniae; identical to SEQ ID NO: 137551

SEQ ID NO: 253024 - DNA, 435 bp, Klebsiella pneumoniae
gtgcgcgacgccgccgatgcggaaccaggccgggtgcatacggaaaccggtaattgcctccaccagatcgtagatcttctggcggtcggtaaaggcaaagaataccggcgtcatcgccccgacgtcctggataaaggtggagatgtacagcagatggctgttgatgcggaacagctcggagagcatcacgcggatcacgttgacgcggtccggcacggtaatacccgccagtttctctaccgccagtacgtacggcatttcgttaacgcagccgccaagatattcaatacggtcggtataaggaatgtagctatgccaggactggcgttcgcccatcttctccgcgccgcggtggtggtaaccgatatcgggcacgcagtcgataatctcttcgccatcgagctgcagaataatacggaacgcaccgtgcgctga

SEQ ID NO: 253025 - DNA, 339 bp, Klebsiella pneumoniae
atgctgcagcgtgcgctctttcggcggcggcgtcgtgagcgggtgatccgccttgaacgggccttccggcatgttatcgaggcactgctgaagaatgcgcaggctctggcgcagctcttccactttcagcatcacgcgggtgtagcagtcggagacgccaccgccggtcgggatctcaaagtcgaagttttcatagccagaatagggacgccatttacgtacgtcgaagccgatgccggtggcgcgcaggcccgcgccggtggtgccccactccagcgcttctttcgcattataggcggcaacccctttcgaacgaccgatcaggatagtgttgcgtag

SEQ ID NO: 253026 - DNA, 1593 bp, Klebsiella pneumoniae
gtgctagtatccagcaacgtcaccatgcagttcggcagtaagccgctgttcgaaaacatttccgtcaaatttggcggcggcaaccgttacggcctgattggcgccaacggtagcggcaaatcgacctttatgaagatcctcggcggcgatcttgagccgacgctgggcaacgtctccctcgatccgaacgagcgtatcggtaagctgcgccaggatcagtttgcgtttgaagagttcagcgtgctggatacggtgattatgggccacggcgagctgtgggaagtgaagcaggagcgcgatcgcatctactccctggcggagatgagcgaagaggacggctacaaagtggctgaccttgaagtgctatatggcgagatggacggctattccgctgaggcgcgcgccggcgagctgctgctcggcgtggggatcccggttgaacagcattacggtccgatgagcgaagtcgctcccggctggaagctgcgcgtgctgctggcgcaggcgctgttctctaatccggacattctgctgctcgacgaaccgacgaacaacctggacatcgacaccatccgctggctggagcagacgctcaacgaccgcgatagcaccatgatcatcatttcgcacgaccgtcacttcctgaatatggtctgtacccacatggcggatctggattacggcgaactgcgcgtttatcctggcaactacgatgaatacatgaccgcggcgacccaggcgcgcgaacgtctgctggctgacaacgccaagaaaaaagcgcagatcgccgacctgcaatctttcgtcagccgttttagcgctaacgcctctaaatctcgccaggcgacctcgcgcgcccgtcagattgacaaaatcaagctggacgaagtgaaagcctccagccgccagaacccgttcattcgctttgagcaggataagaagctgttccgtaacgccctggaagtggaagcgctggctaaaggttttgataacggcccgctgtttaaaaacttcaacctgctgctggaagtgggagagaaggttgccattctgggcgccaacggcgtgggtaaatccacgatgctgaaaaccctggtcggcgatctggcgccagacaacggtaccgttaaatggtctgagaatgcgcagattggctactacgcgcaggatcatgaatatgaatttgaaaacgatctgacggtatttgagtggatgagccagtggaaacaggaaagcgatgatgagcaggcggtgcgcagcatccttggtcgactgctgttcagccaggacgatatcaagaagccggcgaaagtactctccgggggcgaaaaaggccgtatgcttttcggtaagctgatgatgcaaaaaccgaatattctggtgatggatgaacccaccaaccacctggatatggaatcgatcgaatcgctgaacatggcgctggagatgtatcagggcacgctgattttcgtttcccacgaccgtgagtttgtaagctcgctggcgacccgagtgattgaaattacgccggagcgcgttgtggacttcaccggtaactacgaagattatctgcgcagcaaaggtatcgaataa

SEQ ID NO: 253027 - DNA, 783 bp, Klebsiella pneumoniae
atgaccacaatctcccgccatccggccttcttatcgctgcagggcggtatcaactttcgtgacctgggcggccagcgtaccgccgacggccgccgcgtgcggtcggggaagcttttccgctccggctcgctgcatatgatgacgaccgctgacttaacccacctggacgctatcccgctcagccgggtgatagattatcgcgatccgggagaagtgcatcgcagccccgataagctgaacgaaacggcccactatctcaacgccccggcgaatccgcacgttcgcgacgtcaacgctaaagtcaccgagctcagcgccgccacgctcaacgcccttaacggcgagcagtttatgctggagctctatcgccagttgccgttcaacaacgccgcttatcgccagctggccggttggctgatggaacccttcgacggcgcgctgctgcagcactgcgcggtgggcaaagaccgcaccggcgttggctgcgcattgacgctgttcgccctcggctgcgatcgccatacggtgatggaagagtacctgctgacccagggcatgctgactgaggtcgagaatttcatgctcgattccctcggcgatgaactgaccgctcgcggccggcagaacctggcggaaatcatgacggttcatgagtcttatcttgctgccgcgctttctcaaatcgacgaccgctacgccagcgtcgatgcctggctggagaaagactatcagcttacgccgcaggcgcgtgaagcgctccagtcgcggcttctggaggggtaa

SEQ ID NO: 253028 - DNA, 915 bp, Klebsiella pneumoniae
atgaaattatcaacactcttcgcggcagccttcgccatcgtgggcttttgcaacacagcttctgctgtaacttatcctctgcccaccgacggcagccgtctgattggtcagaaccaggtgatcaccattccggaaggcaacaagcagccgctggaatacttcgccgccgaataccagatgggtttatccaacatgctggaagccaacccgggcgtggacaccttcctgccgaaaggcggcaccgtgctaaacatcccgcagcagctgatcctgccggacaccgtgcatgaaggtatcgtcatcaacagcgcggaaatgcgcctctactactacccgaaaggcaccaacaccgttatcgtgttgccgatcggtatcggccagttaggtaaagacacgccggtcaactgggtcaccaaagttgagcgtaaaaaagccggtccgacctggacccctaccgccaaaatgcatgcggaataccgcgcggctggcgaaccgctgccagcggttgttccggccggtcctgataacccgatgggcctgtacgccctgtatatcggccgcctgtacgccattcacggcaccaacgccaactttggtatcggcctgcgcgtcagccacggctgcgtgcgtctgcgtaacgacgacatcaaattcctgttcgaaaacgtgccggtcggcacccgcgttgagtttatcgatgagccggtaaaagcgacgactgagccagacggcagccgcttcattgaagttcacaacccgctgtccacgaccgaagagcagttccagggcggtgaaatcgtgccggttaacctgaccaaatcagtacaggcgattaccagccagactgacgtagaccagagcgtgctcgatcaggcgattcagaaccgttccggtatgccggtgcgtctgaactaa

SEQ ID NO: 253029 - DNA, 717 bp, Klebsiella pneumoniae; identical to SEQ ID NO: 173804

SEQ ID NO: 253030 - DNA, 1377 bp, Klebsiella pneumoniae
atgaacagaacactgccggcagattttttatggggtaactcggtttccagtatgcaaaccgaaggggcgtggaatgagggcggaaaagggatgtcggtttacgatattcgtcagccggcggaatttgcttccgactggaaggtggcgaccgactcctaccatcgctatcgggaagatttcgacctgatgcaggatttgggtatgaactgttaccgcttccagattgcctggagccgcgtttgcccggaaggcgacggtgagttcaatgaagaaggtattgctttctatcaccagtttatcgacgagttaattacccgtggcattgagccgatgatttgcctgtatcacttcgatatgccgctgtcgctggctgaacgctttaatggttttaccgaccgtcgggtgatggaagcctttattcgttacgggcagaagatgattgactgctttggcgacaaggtgaagtggtggctgacctttaatgagcagaatctttaccatatgccggacgcgtttctgatttcaggctatatgcgcggcgagaagaccctgcgcgagctgtatcagatccagcatcacgtgatgatggcccacgttcatctgacgcagtatctgcaccagactaagccgcagtgtctgatgggcgggatgctggcccatgcgctggtctatcccgccacctgcaaaccgcgcgatattctttgcgcccagcagctggacgaatttttaaaccagaacctgctgcgcgcctttgccggggagggctacagccctgaggtcatgcacgtggtcgcccgcgaaggcctggaggatatctaccgagcagaggatctgacgctgatggcgcaggttaaaatcgactatctggcctttagctactatgccagcaaagcgctggatagcgacccgatccctccgggcacgccggtcaactattacatgcagtttggcgataaaaagaatgactatctggaggccaccgagtggggctggcagattgatccgctgggctttcgcaccattattacccgctactacaacgactggcgtctgccggtgttcccgatagaaaacggcattggggtgattgagtcctgggacggcgtaaaccaggtggctgacgactaccgcattgcctatcatcgcgaccatatcaacgccatgaaagaggcgatatttgacgatggcgcgcaggtgattggctacctgggctgggggttgatcgatatcctcagttcgcagggcgatatgcgtaaacgctacggagttgtctacgtgaaccgggaaaaccacgacctcaaggaccttaagcgcgtaccgaagaaaagctatgcctggctgaaacgggtcatccatagtcatggcgcagagatgtag

SEQ ID NO: 253031 - DNA, 1041 bp, Klebsiella pneumoniae
atgcgttatcaaaaattgggtcataccggcctttttgtctctgagctgtgcctgggcaccatgaccttcggtggtgaaggcggcctgtgggggaaagtggggcagctgcgccaggcggaggcagagcagctggtgggcaacgcgctggatgcgggcattaacttcatcgacaccgctgatgtctattcagaaggacgctcggaagagattaccggccaggcgctaaagaatctgaaagtgccgcgtgaaaacgtggtggtggcgactaaagtctttggcgaaaccggcactgcaggcgtgaactcgcgcggcagttcgcgctatcacattatcagcagcgtcaaagagagcctgcgtcgtctgcagctcgatcatatcgatctctatcagcttcatggtttcgatcctgcgactccgatcgaagagacgctgtatgcgctggataatctggtgcagcacggccacgtccgctatatcggggtgtcgaactgggcggcatggcaaatagtgaaagcgctgggcatttccgaacgccttgggctggcgcgctttgcctctttgcaggcttactacacgcttgccgggcgcgatctggagcgcgagctggtgccgatgatgcagagcgaagggctgggcctgatggtctggagcccgctggcgggaggtctgctcagcggtaagtacgatcgcgatgggcagtcggcgagcggcggccgtcgtcaggagtttgatttcccgccggtgaacagagagcgggcttttgactgtattgatgtgatgcgcgagattgccgaggcgaagggcgtttcggtggcacaaatcgcgctggcctggctgctacaccagccggcggtgagcagcgtgattattggcgcgaagcgggtcgaacagcttaccgataatctggcggcgacccgcattgccctgaacgatgatgaactgtcgcggcttgatgcggtcagcgcgctgccgcgggaatatccgggctggatgctggagcgtcagggcgaatatcgtcgcaatcagctcgcacagcagtaa

SEQ ID NO: 253032 - DNA, 1107 bp, Klebsiella pneumoniae
atgaacctcgtctttgttcagtcgctgatccgcgaccgctttctacacctgctgctggttgtcggcgttgttttaagcttctttgtaccgtttgcccctgcaggctggctacacgccattgactggcatacgattatcacccttagcgggctgatgctactgaccaaaggcattgaactgagcggctattttgacgtaatagggcgcaaaatggcgcgccgttttgtcaccgagcgccagctggccatatttatggtgctggcggccgcgctgctatccaccttcttaaccaacgatgtggcgctgtttatcgttgtgccgctcacgctgaccctgaaaaaatggtgcgctattccgaccagccggttaatcattttcgaagcgctggcggtgaacgccgggtcgttgttaacccctatcggtaatccgcaaaatatcctgctatgggggcgctccagcctctcattcccggcctttataggccagatgctgccgctggcagcagcgatgatgatgacactgctggcgctgtgctggttctgtttcccccccaggcatctcaattatcagagcagcgacagggtgccctcctggcggccaaagctggtctggagctgcctggcgttctatgtcgtctttttgaccgccctggagctaaaacaggagctgtggggactggcgctgatcgcgctgggtttcctgctgctcgcgcgggcggtgatcgttaacgtcgactggacgctgctgctggtgtttatggcgatgtttatcgatgttcacctgttgactcagctccccgttctacagcatgcgctcaacggcgttggccagctctcggcgggagggttgtggctgaccacgattggtctgtcgcagtttatcagcaacgttccggcaactattttactgctcaactacgttccaccatcggcgctgctggcctgggcggttaacgtcggcggatttggcctgctgccgggctccctggccaacctgattgcgctgcgcatggctggcgatcgtcgcatctggtggcgcttccatctctattcgctccccatgctgctgtgggcggcgttggtgggatacggcctgctgcagctctga

SEQ ID NO: 253033 - DNA, 474 bp, Klebsiella pneumoniae
atgaaccgtcgcgcaggtaagccaataacaaaaaaagtgacgcagctagtgaatgtcgaagaacacgttgagggatttcgtcaggtgcgcgaggcgcatcgtcgggagttgattgatgactacgtggagctgatttccgatctgataatggaagtgggcgaagcccgccaggtggatatggccgcgcggcttggggtgtcgcagccaacagttgcaaaaatgttaaaaagactggccagcgttgggctgatcgaacagatcccctggcgggggatctttttaacgcctgaaggcgagaagctggcgcatgaaagccgcgaacgtcaccagatcgtggaaaactttttactggtgattggcgttagcccggagattgcgcgtcgcgacgccgaaggtatggagcaccacgtcagcgaagagacgctggcgatgtttaaacagtttaccctcaagcaggggtcatcgggagaatga

SEQ ID NO: 253034 - DNA, 126 bp, Klebsiella pneumoniae; identical to SEQ ID NO: 173799

SEQ ID NO: 253035 - DNA, 1578 bp, Klebsiella pneumoniae
atgaatgtcacgctgaaagaaacgctggtcgcccgcaggccggtactgaacccatggacaggattctactttttacaatcgctgtttattaacctggcgctgggctatgagtttagtctgctctataccgttgcttttgcctgcgtgctacatctgctgtggcggagctttccgcgcgcacaaaaagtagtcgttggcgtctattcactgctggcggccatgtactatccgtttggccaggcctacggcgcgccgaatttcaacacgctgctggcgctgcacgccacgaacatcgaagagtccaccgaaatcctcaccattttcccgtggtacagctatctgctggccgtgtttatctttgcgctcggggtgattgccgtgcgccgcaaaccggaagcgccggcgcgctgggggaaaacagatacgctgggactgctgttctgcatcgctattttctttctgcaaccggtgcaaaaccttgcctggggcggcgtctttaaggtcatcgataccggctaccctgccgtccgcttcgttaaagatgtggtcgtgaataatagtgaagtactggatgagcaggcgcggatggcgcagctggcgaatatgaaagacagctggcacgtgctggcggtaaagccaaagtatcatctgtacgtggtagttatcggagagagcgcgcgccgtgatgcgctcggtgcctttggcggccactgggacaatacgccgttcgccagctcggtcaaaggctatttattcaacgactatatcgccgccagcggttcaacgcagaaatccctcggattgaccctgaaccgggtggtcgatgacaaaccgcagtttcaggataactttgtcaccctcgccaaccgtgccggttttcagacctggtggttctcaaatcaggggcaaattggtgaatatgatacggcgattgccagtatcgccaaacgcgcagacgaagttcagttccttaaaaacggcgattttgaggccaacaaaaacactcaggatgagcagctattaaagctgaccgcgcaggtgcttgccacccgccgtacccagccgcagctaatcgtcctgcatttgatgggctcacacccgcaggcctgcgatcgcaccaaaggcaaatacgccgttttcgtgcagtcgaaagagacctcctgctatctctacaccatgacgcaaaccgatacgctgttgagcaatctttatactcagctacaaaattcgggggaaaccttctcgatgacctatttttccgatcacggtctggcctttaaggagcgcgggaaagaggtgcagtatctggcacacgacgataagtaccagcagaatttccaggtgccgtttatggtgatctccagcgatgataaagcgcataagatcattaaagcgcgacgttccgccaacgactttctcagcttcttttcgcagtggaccggtatcagcgctcaggagatcaccccgcgctatcgctttatctcagagcagaaggctggccctatctacatcaccaacttccagctgaagaaggtcgactacacccatctggggaccgacgcgttcaccgtcaattaa

SEQ ID NO: 253036 - DNA, 513 bp, Klebsiella pneumoniae; identical to SEQ ID NO: 173797

SEQ ID NO: 253037 - DNA, 888 bp, Klebsiella pneumoniae
atgcccggctcgtcccgcaaagtaccggcatggttgccgatactggttattttaatcgccatgatttccattcagagtggcgcatcgctggccaaatcgctgtttccgctcgtcggcgcgcccggtgttaccgccctgcgcctggctctcggtaccttcatcctggtggttattttcaaaccctggcgtcttcgctttgcgccggagcagcgtctgccgctgctcttctatggcctgtcgctgggcgcgatgaactacctgttctatttatcaattcagcgcattccgctaggcgttgccgtcgcgctggaatttaccggccccctggcggtggcgctctttggctcccgccgcccgctggatttcgtctgggtagcgctggcggtgcttggactctggtttctgctgccgctggggcaaagcgttgcccagatcgatcccatcggcgcgctgctggcgcttggcgccggcgcctgctgggcggtctacattctcaccggccagcgcgcaggggaagagcatggtcctgccacggtcgccatgggatcgctcattgctgcgctggtcttcgtgccgatggggatgattcaggccagcgatacgctatttcagtggggactattgttaccgggccttgggatcgccattttatccactgctctgccctattctctggagatggtggccctcacccgcatgcccagcaagacctttggcaccctgatgagcatggagcccgctttggccgcgctttccggcatggtgtttcttggtgaaacgctaactgcaacccagaccctggcgctcggggcgatcattctggcatcaatgggctcgacgctgacaatgcgccgggagacaaaaattcagaaagtcgacatcagctaa

SEQ ID NO: 253038 - DNA, 504 bp, Klebsiella pneumoniae
atgagtaccgcaaaactggttaaaactaaagcaacgaatctgctctatacccgtaacgacgtcgcagatagcgcgaagaaagcgaccgttgagctgctgaatcgccaggtgatccagttcattgacctgtctctgattactaaacaggctcactggaatatgcgcggtgcaaacttcattgccgttcatgagatgctggacggcttccgcaccgcgctcgtcaaccaccttgataccatggctgaacgtgccgtccagcttggcggcgtggcgctgggtaccactcaggtcattaacagcaagagcccgctgaaaagctatccgctggatatccatagcgttcaggaccacctgaaagagctggccgaccgttatgccatcgtcgccaacgacgtgcgtaaagccatcgacgaagcaaaagatgaagataccgctgatatctttaccgccgcttcccgcgacctggatcagttcctgtggttcatcgaagcgaatatcgagtaa

SEQ ID NO: 253039 - DNA, 126 bp, Klebsiella pneumoniae
atgaaaaaatcatgccagttttacaacctgttgttttataacaaccaggataattcctgctgcacgattttgataagggataacgttaaacgcaccgatatggggcgctattttggtgcgtcataa

SEQ ID NO: 253040 - DNA, 747 bp, Klebsiella pneumoniae
atgaagtctgtatttaaagtttcactggctgcactgaccctggcttttgcggtttcttctcacgccgctgataaaaaactggttgtcgctaccgacacggcgtttgttccgttcgaatttaaacagggcgataagtacgtcggtttcgacgttgacctgtgggctgccatcgcaaaagagctgaagcttgactacaccctgaagccaatggacttcagcggtattattccggcgctgcaaacaaaaaacatcgacctcgcgctggcggggatcactatcactgacgagcgtaaaaaagccatcgacttctctgacggctactacaaaagcggtcttctggtgatggtgaacgcaaataataacgaaattaaggatgtcaaagacctgaacggtaaagtggttgccgtgaagggcggtaccggctcggttgattacgcgaaagccaatatcaaaaccaaagatctgcgccagttcccgaacatcgataatgcctatatggaacttggtaccgggcgcgccgatgcggttctgcacgatacgccaaacatcctttacttcattaaaaccgcaggtaacggtaagttcaaagcggtaggcgactcgctggaagcgcaaaactacggtatcgctttcccgaaaggtagcgacgagctgcgtgaaaaagtgaacggcgcgctgaaaactctgcgtgaaaacggcacttataacgaaatttataaaaaatggttcggtactgaacctaaataa

SEQ ID NO: 253041 - DNA, 660 bp, Klebsiella pneumoniae
atgcagtttgactggagtgccatctggcccgccatccccattttgctggaaggcgccaaaatgacgctgtggatttcggtcctcggcctggtcggcggtctgataatcggtctggtagccggtttcgcccgctgtttcggcggctggattgccaaccacattgcgctggtctttattgaaatcatccgcggcaccccgattgtggtgcaggtcatgttcatctacttcgctctgccgatggcctttagcgatttacgtatcgacccgttctccgcggcggtagtcaccattatgatcaactctggcgcctatattgcggaaattacccgcggcgcggtgctgtcgattcacaaaggcttccgggaagccggcctcgccctgggtctttctcgtcgcgaaactattcgctacgtaatcctgccgctggcgctgcgccgtatgctgccgccgctgggcaaccagtggattatcagcattaaagacacctcgctgtttattgtcatcggcgtagccgagctgacccgccagggccaggaaattattgccggtaacttccgcgcgctggagatctggagcgccgttgcggttatctatctgatcatcaccctggtgctgagctttgttctgcgtcgtcttgaaagaaggatgaaaatcctgtga

SEQ ID NO: 253042 - DNA, 723 bp, Klebsiella pneumoniae
gtgattgaatttaaaaacgtttccaagcactttggcccaaccaaagtgctgcatgatatcgatctgaagatcaaccagggcgaagtcgttgtgattatcgggccgtccggctccggtaaatcgaccctgctgcgctgtattaacaaactcgaagagattaccagcggcgagctgatcgtcgatggtctgaaggtcaacgacccgaaggttgatgagcggctgattcgccaggaagccgggatggtgttccagcagttttatctgttcccgcacctgactgcgctggaaaacgtgatgtttggcccgctgcgcgtgcgcggcgccaataaagcggcggcggaaaaactggcgaaggatctgctggcgaaagtgggcctcgcggaacgcgcgcaccactacccttccgagctttcaggcggccagcagcagcgcgtagctattgcccgggcgctggcggttaaacctaaaatgatgctttttgatgagccaacttccgcgctcgatcccgaactgcgtcatgaagtactgaaagtgatgcaggatctggctgaagaaggcatgaccatggtcatcgtcacccatgaaatcggcttcgccgaaaaagtggcttcccgcctgatctttatcgataaagggcgcattgccgaagatggcgatccgcaggtgctggtcaacaacccgccaagcccgcgtctgcaggagtttttacagcacgtcgcctga

SEQ ID NO: 253043 - DNA, 2223 bp, Klebsiella pneumoniae
atggaggtgcctgtgccgcggattttgtttctgctcgctttactcttcaccgctccgctatgggccgcgacgctgcccggcgttccggcaaccacaacggaccactccagcagtagcgaacccgatctggcgcagaaaaaagcggcctacggcgcgctggccgacgtgcttgaaaacgccgatgcccgccaggagcttatcgatcagctgcgtaaagccgccgccacgccgccgccggacagtaccccgacgctgacgccgccggaaattaaagacgaaacgacggtgctggagaacgtcactcagatcagtcgtgaatatggcgaacagctttcgtcgcgcttctcccagctatggcgcaacatcaccggctctccgcataaaccatttaattcgcaatcgttcatcagcgccgcctggcatttcctgctgcttgccggtctggtctttgcattctggtggctggtacgcctggctgccctgccgctgtatcgcaaaatggggcactggggacgacataaaaaccgcgaccgcagcaactggctacagctgccggccacgattgccggcgcatttattttcgacctgcttctgctggccctgacgctgtttgttggccagctattaagcgatcgcctgaacggtaataatcccactatcgccttccagcaaagtctgtttctcaatgcctttgcgctgatcgagtttttcaaagccattctgcggctgattttctgcccacgcatcccggagctacgcccgtttaaccttagcgatgaagcggcgaaatactggaatctgcgcctcagcgcgctcagcagcctgattggctacgggctgatcgttgcggtgccaattatctccaaccaggtcaacgtgcagttcggggcgctggccaatgtggtcattatgctgtgcattacgctctgggccctgtatctgatattccacaataagcagttaattacccaagggcttatccatcttgccgaccgatcgctggccttttttagcctgtttatccgcgcctttgctctggtgtggcactggctggcctgcgcctatttcatcgtgctgtttttcttctcgctgttcgaccccggtaacagcctgaaatttatgatgggcgcgaccctacgcagcctggccatcgtcggcgccgccgcgctggtctccggtattctgtcgcgctggattgcgaaaaccatcaccttgtcgccggaaacccagcgtaactatcctgaactgcaaaaacgacttaacggctggatctccgcatcgctgaaggccgcgcgcatcctgacggtctgcgtggcgattatgctgctgctcagcgcatgggggctgttcgatttctggcagtggatgcataacggcagcgggcaaaaagcggttgatgtgctgattcgtatcgcgctgatcctgttcttctcggcgattggctggacgctgctcgccagcctgattgaaaaccggctggcatcggacattcacggtcgaccgttgcccagcgcccgcgcccgaacgctgctgacgctatttcgcaacgcgctggcggtggtgatcagtaccattaccatcatgatcctgctttcggaagtgggggtgaatatcgccccgctgctggctggcgcgggcgcgctgggcctggcaatttcatttggcgcgcagaccctggtcaaagatattattaccggcatttttattcagttcgagaacggtatgaataccggcgacctggtgacgatcgggccgctcaccgggacggtggagcgcatgtcgattcgctccgtcggcgtccgtcaggataccggcgcttaccatattattccgtggtcttcgataaccaccttcgccaacttcgttcgcggtatcggctcggtggtggccaactatgacgttgaccggcatgaagatctggataaggctaaccaggcgctgaaggatgcggtcgcggaagtgatggcgcaggaagagattcgcgggctgatcattggcgagccatccttcaccggcgtggtaggcttaagcaataccgccttcaccctgcgcgtcacctttaccaccctgccgctcaagcagtggacggtcagattcgccctcgatacgcaggtgaaaaggcattttgacctcgcaggcgtgcgggcgccggtacaaacttatcaggttctgccgatgccagtacccgcaggaccgcctgcccccgccgagcccacgttatag

SEQ ID NO: 253044 - DNA, 915 bp, Klebsiella pneumoniae
atgaaagcccagaaaccggggttacacccgcgtaaccgtcaccatcaacgctacgatctgcccgcgctgtgccaggcccatcctgagctgcaggccttcatcacccttaatccggtgggtgagcagactatcgactttgccaacccgctggcggtgaaggcgctgaataaagcgctgctggcgcatttttacgcggtgaaacactgggatattcccgacggctttctctgcccgccggtgccgggcagggctgactacatccatcacctcgccgatctgctggcgctggatagcgggacgatcccggccaacgccagcattctcgatattggcgttggcgcaaactgcatctatccgctcattggcgtgcacgagtacggctggcgttttaccggcagcgaagtgaacgccgacgcgttcgccagtgcccaggctatcatcaacggcaatccgggtctcactcgccagatccgcctgcgtcgtcaaaaagacgccaacgcgattctgaccggcattattcataaaaatgagacctacgatgcgaccctctgcaacccgccgttccatgattccgccgccagcgcgcaggcgggcggcgagcgtaaacgtcgcaacctgggactgggcgaggagagcgtgctgaactttggcggccagcagcaggagctgtggtgcgaaggcggcgaggtggcctttattacgcagatgattgaagagagcaagccgtttgctcgtcaggttaaatggtttacttcgctggtttctcgcggcgacaacctgccgccgctatatcgcgcgctgaccgacgtcggcgcggtgaaagtggtgaagaaagagatggcccaggggaataagcaaagccgctttatcgcctggacctttatggatgaggccaaacgtcgccgcacgctataa

SEQ ID NO: 253045 - DNA, 615 bp, Klebsiella pneumoniae
atgtacttctaccaaccttcgcaaggacacgggctgccgcacgacccgcttaacgcgattatcggaccacggcctatcggctggatagcttccgtggataatagcggccagcataatcttgcgccgtatagttttttcaactgctttaactatcggccgccgattattggcttcgccagcagcggctggaaagatagcgtgcagaatatcgttgagaccaaagagttcgtctggaacctcgccacccgccccctggcggtcgcaatgaacgaaacctctgccagtatcccgcgtcacgaagatgaatttgtccgcgccgggctcactcccgccgccagccgtctcgtcagcgccccccgggtagccgaaagtccggtcaattttgagtgtcgcctgtcgcaatgcatccagttaaccaccgccgaagggctggcggttgacacctggctggtgctgggcgaagttgtggcagtgcatattgatgagtcgctgctggaggacgggatttaccagaccgccagggctcagccgattctgcgcgcgggcggtcccagcgcctattacgccattgatgaaagcctgcgctttgaccttgtgcgtccggacgcccgctag

SEQ ID NO: 253046 - DNA, 267 bp, Klebsiella pneumoniae
atggcttcaggctgggcaaatgacgacgcggtgcaggaacaaatcgatagcactatcaatgacgcgattgcacgggcgcgaaatgagctgtcatcgggtgagagcaacaaattttgtgaagaatgcggagagccgatccccgaagcgcgtcagcgcgcggtcgcgggcgtgaaatactgcatcaaatgccagcaggagaaagatttacataacaatacattttcaggatataatcgcagaggttccaaagatagccagcttcgctga

SEQ ID NO: 253047 - DNA, 261 bp, Klebsiella pneumoniae
atgaaaaacatgaaatttgctgccgctgccatcgccctttccgctctctcttttggcgcattcgccgcccagccggtgacctcggctcaggcagaaagcatgaataaaattggtgtagtttccgctgaaggcgcgacgacgctggatggactggaagctaaactggctgaaaaagcagaggctgccggcgcgaccggttatagcatcacctcagctaacagcaacaacaaacttagcggtaccgcggttatctacaaataa

SEQ ID NO: 253048 - DNA, 969 bp, Klebsiella pneumoniae
atggactacagcaagattattaaagaagtcgggcgcggaaagaaccacgcccgcgacctggatgtggagacagcccgcgcgctctactcgcggatgcttaacggcgaggtgcctgagcttgagctcggcggcattcttatcgctctgcgcattaaaggcgaaggcgaagcggagatgaagggcttctatgaagcgatgcaggcgcatacgattaagctgactccgccggtcgctaaaccgatgcccattgtgatccccagctataacggcgcgcgtaaacaggcaaacctgacccctctgctcgccgtcctgctgcataagctcggcttcccggtcatcgtccacggcgtgagccacgatccgacccgcgtggtgacggaaacgatttttgaactgatgggtatcccggcgacgcttcacgcgggtcaggcccaggcgcgattggatagccatcagccggtttacgttccggtcggcgcattttgcccaccgctggaaaaacagctggcgatgcgctggcgcatgggcgtgcgcaacagcgcccacacgctggccaagctggcgacaccctttgcggaagaggcggcgctgcgcctgtcgagcgtttcacacccggaatacgtcggtcgggtagcgaaattctttgccgaaatcggcgggcgggcgctgctgatgcacggtaccgaaggggaggtttacgccaacccgcagcgctgtccgcagattagcctgattgatgcatctggtatgcgggtggtaaatgaacgacaggatagcgtagccgcgcaggcactcgccctgccggagtcaaaagatcctgaagtcaccgcccgctggattgagcgctgcatcgtcgggagcgcaccgctaccgcaatcattgcgaattcagttggcctgctgtcttgtggccaccggcgccgtttcgtctcttgaacagggcctggcaaaggtggctgagcgctggtaa

SEQ ID NO: 253049 - DNA, 2145 bp, Klebsiella pneumoniae
atggctttgaccgcagcgctgaaagcgcaaatcgccgcctggtataaggcgcttcaggaacaaattcctgactttattccccggcctccgcagcggcagatgatcgccgatgtggcgaagacgctcgccggagaagaggggcggcacctggcgattgaagcgccgaccggggtcggcaaaaccttgtcgtatctgatccctggcattgctattgcccgcgaagagcaaaaaacgctggtggtcagcaccgccaacgttgcgctgcaggaccaaatctacagtaaagatctgccgctgctgcgcaaaatcatccccgatctgcgctttaccgccgcctttggccgcgggcgctacgtctgcccgcgtaacctggccgcgcttgccagcacggagccgacgcagcaggatttgctggcctttcttgatgacgaactcacgcctaacaaccaggcggagcagaagctgtgcgcaacgctgaaagcggatctcgatagctacaaatgggacggcctgcgcgatcataccgacaaaaacgtggatgattctctgtggagccgcctgagcacggataaagccagctgcctgaatcgaaactgtcactattatcgcgagtgtccgttctttgtcgcccgacgggaaatccaggaagcggaagtggtggtggcgaaccatgcgctggtgatggcggctatggagagcgaagcggtgctgccggagccgaagcatctactgctggtgcttgatgaaggccaccatctgccggaggtcgcccgcgatgcgctggaaatgagcgctgaaattaccgccccgtggtatcgcctgcagctggatttgttcactaagctggttgcgacctgcatggagcagtttcgccctaagaccacgccgccgctggcgaatcccgaacgtctgactggacactgcgaggagctgttcgagctaatctcctcgctgaataatattctcaatctctacatgccggccggccaggaggcggagcatcgctttccgatgggggaactgccgcaggaagtcatggagatctgccagcggctggcgaaactcaccgaaacgctgcgcggcctggcggagctgttccttaacgatctgggcgaaaaaaccggcacgcacgatgtggtgcgtctgcaccgggttctgctgcagatgaaccgcgcgctggggatgtttgaaagccaaagtaaactgtggcggctggcgtcgctggcgcagtcctccggcgcaccggtgactaaatgggttacccgcgatctgcgcgatggtcagatgcatatctggttccactgcgtggggatccgcgtcagcgatcagctggaaaggctgctctggcgcagcgtcccgcatatcgtcgttacctccgcgacgctgcgttcgctgaacagcttctctcgcctgcaggagatgagcgggctgaaagagaaagccggagatcgctttgtggcgctggattcgcccttcaaccacgtcgaacagggtaaaatcgtcattccgcagatgcattatgaaccgcttatcgataacgaagagcagcatattgccgaaatggccgcctatttccgtgaacaggtcgagagcaaaaagcatctcggcatgctggtgctgttcgccagcggacgagcgatgcagcgttttctcgagcacgtgaccgatctgcgcctgctgctgctggttcagggcgataagccccgctaccgactggtggagctgcaccgcaaacgcgttgaaggcggcgagcgcagcgtactggttgggctgcaatcctttgcggaaggtctggacttaaaaggtgagctgttaagccaggtgcatatccataagatagctttcccgccgatagacagcccggtggtgatcaccgaaggtgaatggctcaaaagcctcaaccgctatccgttcgaagtccagagcctgcccagcgcgtcattcaacctgattcagcaggtgggacgcctgatccgcagccatagctgctggggagaggtggtgatttatgataaacgtctgttaaccaaaaattacggtaagcgcctgttgaacgcattacccgtatttccgatagagcagcctgccgtccctgaggttatagtaaaaacgaaagcaaaaccgacgcgtcgcaagcggcgatag

SEQ ID NO: 253050 - DNA, 846 bp, Klebsiella pneumoniae
atgaagatcaccgaagcacaaaaagtcgccgcggcggcgtggcggattcgccgctatgccctgcgcatgggggaggttcagggtcagggctatatcggccaggcattaggctatgcggatgtgctggccaccgcgttcagccacgcgatgacctaccgtccgcaagagccgcagtgggaaggacgtgaccgcttcctgctctctcacggccattacgccatcgcctactatgcggcgctgctggaggcgggaattatcccggaagaggagctggaaacctacggttctgacgacagccgcctgccgatgtcgggaatggcgacctacaccccggggatggagatgtccggcggctcgctggggcaggggctctctattgccgtcgggatggcgctggggctgcggcaaaaagggagcgcatcctgggtctacaactccatgtcggatggggagctggatgaaggttccacctgggaagcggcgatgtcggcggcgcattacggcctgactaacctgatcaacatcgttgacgtgaataaacagcaggcggacggcgattcgcgcaaaattctcggctttgagccgctgcatgaaaaatgggccgccttcggctggtacgtgcagcgcgtcgacggtaacgatctggcggcggtgatggccgcctttgataacgcgaaaaatcatgcgggcaaccagccgcgggtcatcttatgcgacacgttgatgggtaaaggggtcccgttcctcgaaacccgggaaaaaaaccattttattcgcgtcgatgccgatgagtggcaaaaagcgattgcggtgctggacgccaacaaaccggaaggagtgctgtaa

SEQ ID NO: 253051 - DNA, 750 bp, Klebsiella pneumoniae
atgttattaaaagataaagtcgccattattactggcgcggcctccgcacgcggtttgggttttgctaccgcgaagttatttgccgaaaacggcgctaaagtggtcattatcgacctcaatggcgaagccagcaaagccgcggcgacggcattaggcgaaggccatctcgggctggcggcaaacgtcgccgatgaagttcaggttcaggcggcaatggaacagattctggcgaaatatggtcgggtagacgtgctggtgaataacgccggtatcacccagccgctgaagctgatggacattaaacgtgccaactatgacgcggtattggatgtcagcctgcgcggtacgctgctgatgtcgcaggcggttatcccggcgatgcgggcgcaaaaatcgggcagcattgtctgtatctcgtcggtttcagcccagcgcggcggcggtatcttcggcggcccgcactacagtgcggcaaaggccggagtgcttggcctggcgcgagcgatggcccgcgagctgggtccggacaacgtccgcgtcaactgcattaccccggggctgatccagaccgatatcaccgccggtaagctgaccgacgaaatgacggccaacatcctcgccggaatcccgatgaaccgcctcggcgatgcggttgacatcgcgcgcgccgcgctattcctcggcagcgatctctcttcctactctaccggtatcacccttgacgtaaacggcggcatgttaatccactaa

SEQ ID NO: 253052 - DNA, 1332 bp, Klebsiella pneumoniae
atgtcacgtatagatactgttgtctgtactgacgccaggaaaacaaaatatcgtttcgtggttttgacgatgatttttctggtgtatgccataaattacgctgacagaacgaatatcggcgcggtgctgccgtttatcattgatgagtttcatatcaataactttgaagccggggccatcgccagcatgttttttttgggctatgcggtaagccagatcccggcaggattctttattgccaaacgcgggacccgggggttggtttcgctatccattttcggcttttccgcttttacctggctgatgggcaccgtgagctccgtttttggtctgaaaatggtgcgtctgggactgggtcttagcgaagggccgtgcccggtaggactggcttcaaccattaataattggttcccgccgaaagagaaagccacggcgacgggcgtttacattgcagccaccatgtttgcgccgatcatcgttccgccgctggcggtgtggattgcggtaacctgggggtggcggtgggtctttttctcctttgcgataccggggattgtggcggcgatagcgtggtacctgttggttaagtcaaaaccctcagagagcggatttgtctcacctgccgaactggaagagatcaatgccgggcgtgaaaccgataataaccttgtgcgcgaaaatatcttaattgccaatcgttttacctggctggatacaattattcgagtgaagaaaatggcgcctatcgatacggcgaaaggattatttacctcaaaaaatattctcggtgactgtctggcctattttatgatggttagcgtactgtacggattattaacctggatcccgctgtatttagtcaaagagcgcggttttgatgtgatgagcatgggctttgtggcaagtatgccgtgcatcggcggttttattggcgcgatcgccggagggtggatttcagataaagtattaggccgtcggcgtaaacccaccatgatgtttaccgctatttcaacggtggtcatgatgttaatcatgctgaatattccagcgagtaccctggcggtctgcattggtttgttcttcgtcggcttttgtttaaatatcggctggccggcttttaccgcttacggtatggccgtttcggacagtaaaacctatccgatcgcctcttctattattaatagcggtggcaaccttggcggatttgttgccccgatggctgcgggatttttactggaccagaccggcagctttaattctgtatttacttattttggtatctgcgcagcaattggtttgctggttattctctttctcgatgagccacaataa

SEQ ID NO: 253053 - DNA, 924 bp, Klebsiella pneumoniae
atgaatcagccgctgcaaaataaaagtttaccgatgccctccttacgcaatattcaggcatttattgaagtagcggataccggcagtctcaatctggccgcagagcatctcaatattacggcctcagcggtcagccatcagatagccagcctggaacagtatctcggaaagaaaataatttcccgcagcagtaaaggcatggtgttaaccgcaattggtgaaaaatatcttaaagaggtttccggagcgttaaatattattggccaggccaccaatcaggtgattaacgatatccatcaggattatttacgcattcactccgcgcccagctttgggctcctgtggctgatgccccgcctgaacaaatttcgccaggcctggcccgagcttaaaattagcctgacctgctcttatgaaagtatccagttctcccgcgataatattgatatcgatattcgccatgggctctcacaatggccgactctggtggtcaaaaccataaaaaatgaacgcatgctcccctatagctcatcaacttatttagccagccgcgaagttcagaccattgaagacttactgacctgcgatcttatccactccgacagcacgctgatcggctggagcaactggttatcctggcacaaggttcgcggctggaataagagctttatttttaattttgaccgttcctatatgagcattgaggccgcacgcatgggtatgggcattattcttgagagtaatttgctggccggtcagagcgttcggcaacggcacctcgagccggttttttcaagcgacgcgagtatgccggttaacgcccatcacttcgttttgccgcaccctaacgagcaaaaagagaaagtgaagatcttttttaactgggttgccgaagagctcagtcatgagggatttcatatctaa

SEQ ID NO: 253054 - DNA, 678 bp, Klebsiella pneumoniae
atgaccaccacaccgactaccagcaagggagagcaggcgaaaagccagctcatcgccgccgctatcgcccagttcggcgaatacggcctgcacgccacgacccgcgatattgccgcccaggccgggcagaatatcgctgcgatcgcctactattttggctctaaggacgatctctatctcgcctgcgcccagtggatcgccgattttatcgagcacaatttccgcccccacgcgcaggcggcggaagcgctattcgctcagcctcttccggacaaagccgccatgcgcactctgattctgcgcgcctgtcagaatatgattttgctgctgacccaggatgatacggttaacttgagcaaatttatctcccgcgaacagctatcgccgactgcggcctaccggcttatccacgatcaggtcattgctccgctacactgctacctgacccgtttaatcgccgcttataccggccttaaccctgacagcacgcagatggtgctgcacacgcacgcgctacttggcgaagtgctcgcctttcgtcttggccgggaaacggtgctacgccgcgcgggctgggctgaattcgatcggcaaaaaaccgagcaaatttttgaagttattacctgccatatagatttcgttctggaaggattatcgcaaaggggtctggagtcatga

SEQ ID NO: 253055 - DNA, 993 bp, Klebsiella pneumoniae
atgaaaaaaccgctcatcgtcgttgtgctgcttctcctgctggccgctgtcattggcggaggctggtggtggtaccagagcagccagcaaaaagagctcacgctttatggcaacgtggatattcgcaccgttaacctgagctttcgcgtgggcggacggctggcgtcgctcagcgtcgacgagggcgatgcaataaaagccgggcagacgctgggcgagcttgatcgcgcgccctacgaaaacgccctgcagcaggcgcaagccaacgtttccaccgcccaggcgcagtacgacctgatgatggcgggatatcgctcggaggagattgcccaggccgccgccgcggtcaaccaggcgcaggcggcttacgactatgcgcagaacttctatcagcgccagctggggctacgcaaaagcagcgccatctccgcgaacgatctggaaaacgcccgctcctcgcgcgatcaggcccaggcgacgctgaaatccgcgcaggataagctgcgccagtatcgcgcggggaaccgtccgcaggaaatcgcccaggccagagccaaccttgaacaggcgcaggccgcgctggcgcaggcgaagctggacctgcacgataccacgttgacctcgccgtccgacggaacgctgatgacccgcgccgtcgagccgggcagcatgcttagcgcgggcggtaccgtaatgacgctgtcgttaacccatccggtatgggtacgcgcctacatcgatgaaaccaacctgggccaggcccagccggggcgcgaagtgctgctttacaccgatagtcgcccggataaaccctatcgcggcaaaatcggcttcgtctcccctaccgctgaattcacgccgaaaaccgtggaaaccccggacctgcgcaccgatctggtttatcgcctgcgaattgtggtcaccgatgccgacgacgcgctgcgtcaggggatgccggtcaccgtcgctttcagtcatggaaacggccaatga

SEQ ID NO: 253056 - DNA, 1740 bp, Klebsiella pneumoniae
atgagcgaagacgtgattacgctgagcggcctgacccggagctttaccgggatggaccgcccggccgtcgcgccgctggactgcaccattcactccggctatgtgaccggtctggtgggcccggatggcgccggaaaaaccaccctgatgcgcatgctcgccgggctgctgaagcccgacgcaggcagcgcaaaggtgatcggcttcgacccgattgctgacgatagcgccctgcacgcggtgctcggctatatgccgcaaaaattcggtctgtatgaagatctgacggtgatggaaaatctcacgctctacgccgacctgcgcagcgtgaccggcgaggcgcgggagaaaaccttcgcccggctgctggagtttacctctctcggcccctttaccggccggctggcgggtaagctttccggcggcatgaagcagaaactcggcctggcctgtaccctcgtcggcgagccgaaggtgctgctgctggatgaacccggcgtcggcgtcgaccccatctcacgccgcgagctgtggcagatggtacacgagctggcgggcgacgggatgctgatcctctggagcacctcctacctcgacgaggccgagcagtgccgggacgttctgttgatgaacgagggccagttgctttaccagggagcgccaaaagagctgacgcaaaccatggcgggacgcagttttttgatttccagttcccgggagaataaccgccgcctgctccagcgcaccctgaagctaccgcaggtcagcgatggcgtcattcagggtaaatcggtacgcctgatcattaaaaaagaggccagcatcagcgaagtacggaacgctgccgatatgccgccgctggaggtcgctgaaaccgcgccgcgttttgaagacgcctttatcgacctgctcggcggtgccggtaccgccgaatcgccgctgggcaaaattatccataccgtggaaggctcccatgaggacacggtgattgaagcgcagaccctgaccaagaaattcggcgatttcgccgctaccgatcacgtcgattttcaggtcaaacgtggggagattttcggccttctcgggcctaacggcgcgggtaagtctaccacttttaagatgatgtgcggcctgctggtccccacctccggtaaagcgctggttctggggatggacctgaaggtcagctccggcaaagcgcgtcagcatctgggctatatggcgcagaagttctcgctgtacggtaacctttccgttgagcagaacctgcgcttcttctccggcgtatacggcctgcgcggacgggcgcagaacgacaaaatcgccagcatgagcgaggcgttcggcctgaaaagcatcgcccggcaggccgccgacgatctgccgctcggctataaacaacgcctggcgctggcctgctcgctgatgcatgaaccggatatcctgtttcttgacgaacccacttccggcgtcgatcccctcacccgccgcgagttctggctgcatatcaacagcatggtcgataaaggcgtcacggtgatggtgaccacccactttatggatgaggcggagtattgcgatcgtatcggtctggtctatcacggcaaattgatcgccagcggcacgccggacgatctgaaggcgctggcggcggatgaaaaacagcctgacccaacgatggagcaggcatttatcaccctcatccatgactgggataaggagaacgccggtgagcgctaa

SEQ ID NO: 253057 - DNA, 1134 bp, Klebsiella pneumoniae
gtgagcgctaaacggctatcgtggcggcgcgtacgcgccctgtgcgtgaaagagacgcggcagatcgtccgcgaccccagcagctggctgattgcggtggtgatccccctgctgctgctgttcatttttggctacgggattaacctcgactccagcaagctgcgggtgggcgtgctgctggagcagcagagcgaagaggcgctggattttgtccataccatgaccggctccccctatattgacgccaccatcagcgataaccgccaggaactggtgcagatgatgcaggcgggacgcattcgcgccctggtcaccctaccggtggacttcgaccagaagatggcccgtcccggcgacgacgcgccgatccaactcatcaccgacggcagcgaacccaataccgctaacttcgcccagggctacgtcgaaggcatctggcaaatctggcagcagcagcgggcggaagatcgcggtgaaaccttcgagccgctgatcgacgtgcagatgcgctactggtttaacccggccgccatcagccagcattttattatccccggcgcgattaccatcattatgacggtggtcggcgcgatcctgacgtcgctggtggtggcccgcgagtgggaacgcggcacgatggaagcgctgctgtcgaccgaaattacccgcgccgagctgctgctgtgcaagctgatcccctactatttcctcggcatgctggcgatgctgctgtgtatgctggtggcggtgtttattctcggcgtgccgttccgcggttcgctggtgattctgttttttattaccagcctgtttttgctgagtaccctgggcatggggctgctgatttccaccatcacccgtaaccagtttaacgccgcgcaggtcgcgctgaatgccgcgttcctgccgtcaatcatgctctccggatttatttttcagatagacagcatgccggcgataattcgcgccgtgacctacgtgatcccggcgcgctattttgtcagcactctgcaaagcctgtttctggcgggcaatatcccggtggtgctgttggtgaacgtgctgttcctgatcgcctcggcggtgatgtttatcggcctgacgtggctgaaaaccaaacgacgtctggattaa

SEQ ID NO: 253058 - DNA, 1107 bp, Klebsiella pneumoniae
atgtttcatcgcttatggacgttaatccgcaaagagctacagtcgctgctgcgtgaaccgcagacgcgggcgattttaatcatgccggtactcattcaggtgctgctgttcccctttgccgccacgctggaggtgactaacgccaccatcgccatctataacgaagacaacggcaagcacgccgtggagctgacccagcgctttgcccgcgctaaagccttcacccacgtcctgctgctgaaaagccctcaggagataagaccgaccattgacgaacaaaaggcgctgctggtcgtgcgattcccggcagatttttcgcgcaacctcgatacctggcagaccgcccctctccagctgttgcttgatgggcgcaactccaacagcgcgcagatcgccgcgaactatctccagcagatcgtcaaaaactatcagcaggcgttaatggaaggcaaagccaaaccaaacaacagcgagctggtggtacgcaactggtataacccgaatctcgattacaaatggttcgtcgtgccgtcgctaatcgccatgatcaccaccatcggcgtgatgatcgtcacctcgctctccgttgcccgcgagcgcgaacagggtacgctcgatcagctgctggtctcgccgctggcaacctggcagatctttatcggtaaagcggtgccggcgctaatcgtcgcgaccctgcaggccaccatcgtgctgggaattggtatctgggcctatcaaatcccctttgccggctcgctgctgctgttttactttacgatgattgtctacggcctgtcgctggtaggattcggcctgctgatttcgtcactgtgctccacgcagcagcaggcgtttatcggcgtgttcgtctttatgatgccggcaattctgctctcgggctacgtttcgccggtggagaatatgccgcaatggctgcaggatttgacgtggataaacccgatacgtcactttaccgatatcaccaagcagatctatttgaaggatgcgagtctggaaattgtgtggggaagtttgtggccgctactggtcatagcggccaccaccggctcagcggcgtatgcgatgttccgaagaaagatcgcgtaa

SEQ ID NO: 253059 - DNA, 438 bp, Klebsiella pneumoniae
atgaagtggcaacaacgtgtacgcgtcgcaacgggtcttagttgctggcagattatgttgcatctactggtcgtggcagtactggtgatgggttggatgagcggcgcgctggtgcgcgtcggattaggtttgtgcgtgctgtacggcgtcacgttactgtcgatgctgttcttgcagcgtcaccacgatgagcgctggcgcgacgtcggtgatttccttgaggagctcaccaccacctggtacttcggcgcggcggtaatcgtgctgtggctgctgtcacgcgtgctgcacaacaacctgctgttagccctcgccgggctggcaatactggcaggtccagcggtggtttcactgctggcgaaagataaaaacagatacgctaaatcgttcgagctacaacaaggcggcaacgcagcgaatccccagaagcatagataa

SEQ ID NO: 253060 - DNA, 750 bp, Klebsiella pneumoniae; identical to SEQ ID NO: 173770

SEQ ID NO: 253061 - DNA, 1245 bp, Klebsiella pneumoniae
gtgaaatgcagctggcaggaaggaaaccgcattcggctattagaaaatggcgataactattatccggcattatttgccgctattgatcgcgcacagcagcgggtgattctggaatcctttatctggttcgaggatgacgtcggcaggcagctgcatgccgtgttgctcaaagcggcccagcgcggcgtgcgcgtagaagtcctactggacggttacggctctccggatttgagcgaaagctttgtgggcgaactgacgtcggccggggtgatttttcgctactacgatccgcgcccgcggctgctcggcatgcgcaccaatttattccgccgcatgcatcgtaaaatcgtggtgatcgacgacgttaccgcctttgtcggcggaattaactactccgccgagcatatgaccgattacggtcccgaggctaaacaggactacgccgtgcaggttgaagggccggtggtgctcgacattctgcagtttgaactggaaaacctgcccaccagcgaagccacccgccgctggtggcgccgccgtcggcataagcccgaagtcaaccgcaatcccggcgaggctcaggcgctgtttatctggcgggataatcaggatcatcgcgatgatatcgaacgccactatctgaaaatgctgaccaccgcccggcgggaagtgattatcgccaacgcctactttttcccgggctatcggctgctgcatgcgatgcgcaacgctgcccgccgcggcgtacgcgtcaagcttattgtccagggcgaaccggatatcccgattgttaaattcggcgcacgtctgctgtaccactacctggtcaaaggcggcgtgcagatttttgaatatcgccgccgtccgctgcacggcaaagtggcgctggcggacgaccactgggccaccgtcggctccagcaacctcgacccgctcagcctgtcactcaatctggaagccaacctggtgatccacgaccgcgaattcaaccagacgctgcgcgataatctcaatggcttaatcgccaacgactgccgcgaagtggataagcgcattttgtcgaaacgaacctggtggcggctcgggattagcgtgctggcgttccacttcctgcgccacttccccgcgtgggtcggatggcttccggcccatacgcccctgctgtcgcgcgttcagcctccggttcagccagaaattgaaacccaggatcgcgtggacccggaaaaccaggaggtcaaatcctga

SEQ ID NO: 253062 - DNA, 969 bp, Klebsiella pneumoniae
atggcgaaatctcaccctcgctggcggatggcgaaaaaaatcctgacggtgctcttttttatcgccgtcgttgtgctgctggtcgtttacgcacagaaaatcgactggcaggaagtgtggaaagtgattcgcgattacaaccgtacggcgctgctcagcgccataggcctggttatcgccagctacctgatctatggttgctacgacctgctgggacgcgcctactgtggccacaagctggctaaacgccaggtgatgctggtgtcgtttatttgctatgcctttaacctgacgctcagcacctgggtgggtgggattggtatgcgctatcggctctactcgcgcctcggcctgagcggcgcaaccattacccgaattttttcgctgagcattaccaccaactggctgggctatattctgctcggcggcatcatttttagctccggcatggtgaaggtgcccgagcgctggtatatcagtcagtcgtcgctgcaaattctcggcgtcattttgctgctgatttccgcgttctatttatgggcctgcgcctttgcgaaaaagcgccatctgacgataaaaggccagcggctggttctgccctcctggcgcttcgcgatattgcagatggcggtttccagcctgaactggatggcgatgggggcgattatctggctactgctggggccgcaggtggactatttcctcgtgctcggcgtgctgctggtcagcagcattgcgggagttatcgtgcatattccggcagggattggcgtgcttgaggcggtgtttatcgccatgctttccggcgaagagatttcgcgcggcgcgatcatcgccgccctgctcgcctatcgcgcgctgtactacttcctgccgctgctgctggcgaccatcggctacctgattctggagagccgggcaaagcatctgcgggcgaaaaaccagcgcaagctggcgggtgagaagtaa

SEQ ID NO: 253063 - DNA, 705 bp, Klebsiella pneumoniae
atggacagatatcctcgttccggtaccatcgtccaggggcgcagcgggctacaaacttatatggcgcaggtatacggctggatgacggtcgggctgctgctcacggcgtttatcgcgtggtttgccgctaacaccccggcggtgatgatgtttgttttttccagcaaaattaccttctttgggctaattatcgcccagttggggttggtgttcgtgctctcgggcatggtgcagcgcctcagcgccggtatggcgacgaccctgtttatgctctattcggcgctaaccgggctcaccttatccagtatattcctcgtctatacctactcatcgatcgccagtaccttcgtggttgccggcgggatgtttggcgtgatgagcctttacggctataccactaaacgcgatctgagcggcttcggcaatatgctgtttatggcgctcatcggcatcgtgctggcgtcgctggttaacttctggctcaagagcgaagcgctgatgtgggcggtgacctatatcggggtgatcgtattcgtcggcctgaccgcctatgacacccagaagctgaaaaatatcggcgagcagattgatgttcgcgatacgtcgacgctgcgtaaatactcgattctcggggctctgacgctgtatctggactttatcaacctgttcctgatgctgctgcgcattttcggcaaccgtcgttaa

SEQ ID NO: 253064 - DNA, 453 bp, Klebsiella pneumoniae
atgacgcagacgcgtattattgtcagccatgaccgctttaaagtcggcgaggaatatccctggctggccgagcgcgatgaagacggcgcggtggtgacgttcaccggtaaagtccgcaaccacaaccttggcgacagcgtcaaagcgctgacccttgagcactatccgggaatgacggaaaaatcgctggcggagatcgtggaacaggcgcgcgagcgctggccgctgggccgggtgacggtgattcatcgtatcggcgaaatgtggcccggggaagagattgtctttgtcggcgtcaccagcgcccatcgcggcagcgcgtttgcggcgggggagtttattatggattatctgaagacccgcgcgccgttctggaagcgcgaggcgacgccggaaggcgagcgctgggtggatgcgcgagatagcgaccgcaaggcggcagaacgctggtag

SEQ ID NO: 253065 - DNA, 249 bp, Klebsiella pneumoniae; identical to SEQ ID NO: 173765

SEQ ID NO: 253066 - DNA, 489 bp, Klebsiella pneumoniae
atgtcacagctgacccatattaacgccgccggcgaagcgcacatggtcgatgtctcagggaaagcggagacggttcgcgaggcgcgcgccgaggcctatgttgaaatgcaggcgacgacgctggcgatgattatcgacggcagtcatcacaaaggcgacgtcttcgccaccgcgcgtatcgccgggattcaggcggccaaacgcacctgggagctgatcccactttgtcatccgctgatgctgagcaaagtcgaagtgaatctgcaggcgcagcccgagcataaccgggtgcgtatcgaatccctgtgccgtttgaccggtaaaaccggcgtcgagatggaagctctgaccgccgcttccgttgccgcgctgaccatttacgatatgtgcaaggcggtgcagaaagatatggtgattggcccggtgcgcctgctggcgaaaagcggcggtaagtccggcgatttcagagtggaagctagccatgattaa

SEQ ID NO: 253067 - DNA, 513 bp, Klebsiella pneumoniae
atgagtcaggccagcgctgagtttatcccgacccgtattgctattctcaccgtttccagccgacgcggcgaagaggacgacacctccggccactggctgcgcgatgccgcccaggaggcggggcacgtcatcgtcgataaggcgattgttaaagagaaccgctacgccattcgcgcccaggtatcggcgtggattgccggcgatgaggtgcaggtggtgctgattaccggcggtaccggctttaccgacggcgaccaggcgccggaagcgctgctgccgctgtttgaccgcgaggtggaaggcttcggtgaggtattccgcatgctctcctttgaggagattggcacctcgaccctgcaatcccgcgccgttgccggggtagccaaccgcacgctgatttttgccatgcctggttcaaccaaggcctgtcgtaccgcatgggacaatatcattgcgccgcagctcgatgcgcgcacgcgcccttgcaactttatctctcatcttaagaagtag

SEQ ID NO: 253068 - DNA, 990 bp, Klebsiella pneumoniae
atggcttcacagcttaccgatgcatttgcgcggaagttttactatctgcgtttgtcgattaccgacgtatgcaactttcgttgcacctactgtctccccgatggctataagcccggcgccgtcaccaataaaggctttctcagcgtcgatgaagtgcgtcgcgtcacgcgggctttctccgctctgggaaccgaaaaggtgcgcctgaccggcggtgaaccctctctgcgacgcgattttaccgacatcatcgccgccgtgcgggaaaacccctctattcgccagatcgcggtcaccactaacggctaccggctggcgcgggatgttgaaagctggcgcgatgccggactgacggcgattaacgtcagcgtggatagcctcgacgcccgtcagtttcatgctataaccggccaggacaaatttcgtcaggtgatggatggcatcgatgccgcatttgccgctggcttcgaaaaagtgaaggtcaataccgtgctcatgcgcgatgttaaccatcatcagcttgatacctttctcgcgtggatccagccgcgccgcattcagctacgttttatcgaattgatggaaaccggcgaaggcagtgaactgttccgccgccatcatatatccggcatggtgctgcgtgatgaattgctgcgccgcggctggatccatcagatccgccagcgtagcgatggtccggcgcaggtgttttgccaccccgactatgccggggaaatcggcctgatcatgccttatgaaaaagacttctgcgccacctgcaaccgtctgcgcgtctcttccgtaggaaaactgcacctgtgcctgtttggcgaaggcggcgtcgatctgcgcgatctgcttgccgatgagcagcagcagccggcgctggaagcgcggatttccgaagcgttaacccataaaaaacagacccatttcctgcatcagggcaacaccggtattacccagaacctgtcgtatattggcggataa

SEQ ID NO: 253069 - DNA, 906 bp, Klebsiella pneumoniae
atgcgcaatcgtactttcgccgatcttgatcgcgttgtggctctcggcggcggacacgggctgggacgggtaatgtcatcgctttcttcgctgggttcacgcctgacgggcattgtgactacaaccgataacggcggatcaacaggacgtattcgccgcgcggaaggcggcatcgcctggggcgatatgcgcaactgtattaatcagttaattgctgaacccagcgtggcctcggcgatgtttgaataccgttttagcggtaacggcgaactttccgggcataacctcggaaacctgatgcttaaggccctcgatcatctgagcgttcggccgcttgaagcgatcaatttgatccgcaatttgctgaaggtcgatgcgtttctgatcccgatgtcggaacaaccggtcgatctgatggctatcgatcaggacgggcacgaaatttacggcgaagtgaatatcgatcagctggcctgcgtaccgcgcgagcttatgctctccccgccggtgcccacaacccgggaggcgctagaagctatcgccgaagccgatttaatcctcattggccccggcagtttctataccagcctgatgccgattttgctgcttgatgaactggcgcaagcgctgcgccgcacgcccgcgccaatggtatttatcgataacctcggcaaagagcatagcccggcggccagcctgacgctggccgacagggtcgccattatggagcaacaaatcggcaaacgagtaattgacgcgctggttgtcggcccgaaagccgataccgcaggggttgaacagcgggtcatcattcagacgccgctggacgccagcgatgtgccctatcgccacgatcggcagctattacgcaacgcgctggaacaggccattcaggcgttaggttaa

SEQ ID NO: 253070 - DNA, 1644 bp, Klebsiella pneumoniae
atgtcgttattttctttacgtcggccggtactcagccgtacggcctatttgcttctgttcgcctgctatatcggcctcgcgctgaatcttgctttctatcgccaggcatttaccctgctgccggttaacggtctgcataactggctggtattcctcagtatgccgatagtggccatcagcgtgatgaatatcatcaccactctcgcctcgttcctgaagctcgaccgcctcgtggttagcctgtttattttgctcagcgcctcggcccagtattttatctggaccttcggggtggttatcgatcgggcgatgattaccaatattttcgataccacgcccgcggagagctttgcgctactctccgggaaaatggtgctgatactggggctttccggcattctggccgtcgtcgcggcatggtggatcaaaattcgcaaaccgcagacgctttggcgcagtcttgccgtacggctggtgagcatcgcggtttcagcgctgctgattattctggtcgccgccctcttctataaagattacgcttcgctgtttcgcaacaacaaagagctggtaaagtccctgagcccgtcaaacagcattgtggcggtgaattcatggtatgcgcataacagaatggacaatcttccgctggtcaaaattggcgaagacgccgttcagaagccgcagatgcgcagcggaccgcggaaaaatctgaccattgtagtgttaggtgaaacttcgcgggcggccaacttctccctgaacggctactctcgcgagaccaacccgcgtctgaagcaggataacgtgatctatttcgctaatacgacttcctgcggcaccgctaccgcggtttccgtcccctgcatgttctctaatatgccgcgcgcccactatgatgaagagctggcgcatcatcaggaaggcgtgctggatatcctgcaacgggcgggaattaaagtgcagtggaatgacaacgacggcggctgtaaaggggcctgcgaccgggtgccgcacgaaaacgtcaccgatcttaagctgagcggccagtgcatcgacggcgagtgctacgacgaagtgctgttccataatctggatagctatatcgataatctacagcaggacgggattatcgttctgcataccatcggcagccacgggccgacctactacaatcgctatccggcgcagtttaaacagtttacgccgacctgcgataccaatgagatccagagctgcacccagcaacagctcactaatacctacgacaacacgattttgtatgtcgattatgtggtcgacaaagcgataaaattactgcagtcgaagcaggataaatttaccaccagcctggtatatctctcggatcacggagagtcgcttggcgaggatggggtgtatttgcacgggctgccgtggtccatagcgccagatacgcaaaaacatgtgcccatgctgctgtggttgtcagcggattatcaacagcgctatggggtctccagccagtgtttgcagcaaaaagcgaaaacccaaacgtattcgcaggataaccttttctccaccctgctcggtctgctcggggtcagcactcacgagtaccaggcaacagacgatattttaacgccatgtagagaggcaggccgatga

SEQ ID NO: 253071 - DNA, 672 bp, Klebsiella pneumoniae
atgaaaattttagtcattgaagacgatgcgctcctgttacaaggattaattctggcgatgcaaagcgagggctacgtgtgcgacggcgtctctaccgcccacgaagccgcgctctcgctggccagcaaccactacagtctggtggtgcttgacctcgggctgcccgatgaggacggcctgcactttctggcgcgcatgcggcgagagaagtttagccagccggtgctgatcctcaccgcccgcgataccgttgatgaacgtattagcggcctggataccggcgcggatgactatctggttaaacccttcgctcttgaagagcttaacgcgcgcatccgcgccctgctgcgtcgccacaacaatcagggcgataacgagctgactatcggtaacctgcgcctgaacgtcacccggcggctggtctggctcggcgaacagtccctggatctaaccccgaaagagtacgcgctgctctcccgcctgatgatgaaggcgggtagtccggtacaccgcgaaattctttataacgatatctacagctgggacaacgaaccggccactaatacgctggaagtgcatatccataatttacgcgataaggtgggtaaatcgcggatccgcaccgttcgcggcttcggctatatgctggtcgataatacaggagccgaataa

SEQ ID NO: 253072 - DNA, 1098 bp, Klebsiella pneumoniae
atggctctgtttgtcagtaaaaactggaccatgcgccatcggctgctgctgaccattggcgcgatactggcggtttgccagctcatcagcgtgttctggctgtggcatgaaagccaggaacagattcagctgctggtggccagcgccatcgaaggtcataataatcagaagcatattgagcatgaggttcgtgaagcggtagccagtctgctgatcccgagcctgctgattatcggcctggcgctctatatctccctgctggcggtgaaaaaaatcaccaggccgctatcccgcctccagcaggaacttgaaagccgtaccccggataacctgcggcctatcgccctgcaagagtcggtgcccgaagtcaccgcggtcactaccgcgattaatcagctggtctcccgccttaacttaacgctcgatcgcgagcgcctgtttaccgccgacgtcgcccatgagctgcgcacgcccctggccggattgcgtctgcatctggagctgctggcgaaagtgcatggcgttagcgtcgccccgctgatccagcgcctcgatcagatgaccaacagcattaatcaactgcttcagctggcgcgggtcggccagtctttctccgccggcagctatcagcaggtcaggctgaaggaagatgtgatcgagccgctgcggagcgaactggagacgatgctggaacagcgtcagcaaaagctggtggtcagcgacaaagagggtgaagcgatagtgtcaggtgacgccacgctggtgcaggtgattttacgcaatctggtagaaaacgcgcatcgttacagcccgacgggttcgacgattaaagtgtcgatagcccccggccccacgccggttctggcggtagaagatgaaggtccgggcattgatgaggccaaaagcggtgaattgagcaaagcgttcgtccgcatggacagccgctacggtggtatcgggctcgggttaagcatcgtcacccgcatcgcccagctgcacgacgcccagttctttttacataaccgtcagcccgggcccggcgttcgcgcgtgggtgctttttcccgacactgtccgtcagaacgtcagcacccattga

SEQ ID NO: 253073 - DNA, 2016 bp, Klebsiella pneumoniae
atgagtaaaccgttcaagctgcattctgctttccgtccctccggcgaccagccggaagccattcgtcgcctggaagaggggctggaagatggcctggcgcatcaaacgctgctcggggtgaccggctcaggtaaaacttttaccatcgccaacgtcattgccgacctgcagcgcccgacgatggtgctggcgccgaacaaaacgctggcggcgcagctatacggcgagatgaaagagttcttcccggagaacgcggtggagtatttcgtctcgtactacgactactatcagccggaagcctatgtgccaagctcggacaccttcatcgagaaagatgcttcggtgaacgaacatattgaacagatgcgtctgtcggcaaccaaagcgctgctggagcgtcgtgatgtggtggtggtcgcctcggtctccgccatctacggtctcggcgatccggacctctatctgaagatgatgctgcacctgacggtcggcatgatcatcgaccagcgcgccattttgcgccgcctggctgaactgcagtatacccgcaacgatcaggccttccagcggggtaccttccgcgtgcgcggcgaggtgatcgatatcttcccggcggagtctgacgacgtcgcgctgcgcgtagagctgttcgatgaagaagtcgagcgcctgtcgctgttcgacccgctcaccggccacatcgagtcgacgatcccgcgctttaccgtctacccgaaaacccactacgtcactccgcgcgaacgtattgtccaggcgatggaagagatcaaaaccgagctggcggagcgtcgtaaggtgctgctggaaaacaataagctgctggaagagcagcgcctcagccagcgtacccagttcgatctcgaaatgatgaacgagctaggctactgctcggggattgaaaactactcgcgctatctgtcagggcgcgggccgggcgagccgccgcccacgctgttcgactacctgccggcggatggtctgctggtgattgatgaatcccacgtcacgattccgcaaatcggcggcatgtaccgcggagaccgggcgcgtaaagagacgctggtggagtacggtttccgtctgccgtccgcgctggataaccgtccgatgaagtttgaagagtttgaggccctggcgccgcaaacgatctacgtttcggcaacgccgggcgcctatgagctggataaatccggcgacgaagtcgtcgatcaggttgtccgcccgaccgggctactggatccggtcatcgaagtgcgcccggtagccactcaggtcgacgacctgctgtcggaaattcgcctgcgtaccgcgatcaacgagcgcgtattggtcaccacgctgaccaaacggatggcggaagacttaaccgaatatctggaagagcacggcgagcgggtgcgctacctgcattcggatatcgataccgtcgagcgtatggagattatccgcgatctgcgcctcggcgagtttgacgtgctggtagggatcaacctcctgcgtgaaggtctggatatgccggaagtctcgctggtggcgatcctggacgccgataaagaaggcttcctgcgctctgaacgctcgctgattcagaccattggccgcgcggcgcgcaacatcaacggtaaagcgattctctatggcgataaaattacgccgtcaatggcgaaagcgatcggtgaaaccgaacgtcgccgcgagaagcagcaggcctataacgaagagcacggtattgttccgcaggggctgaataagaaagtggtcgacattctggcgctcggtcagaatattgccaaaacgaaaactaaggggcgcggcaagtctcgctcgccggttgaggcggatgtcgtggcgctcacgccgaaggcgctgcagcagaagatccacgagctggaagcgcagatgatgcagcacgcgcagaatctggagttcgaagaggcggcgcaaattcgcgaccagcttcatcagctgcgcgatctgtttatcgccgcttcgtag

SEQ ID NO: 253074 - DNA, 723 bp, Klebsiella pneumoniae
atgttgagtctacgtgccgtgaatcactattacggaagccagcacacgctgtggaatgttgaccttgaactctggccggggaaatgcacctgcgtgatggggcgtcagggcatgggtaaaaccacgctggttaactgtattaccgggcatctgccggtcgccagcggcagtatgacctggcaggacgcgggggcggctccttatgacctgatgccgctctccgcccagtcgcgcagcgctatcggcataggctacgtcccgcaggataaacgtattttttcgcagctaagcgttgaggaaaatctgcatatagcccttgctgcgggcggcgaatccgcatcgggcatggccggagagatttatgagctatttccggagctttacgcgctgcgccaaagtaaagggattaccctgaccgccgacgaccagtaccagctggcgctggcgagggcgttgataacccgcccgcgcctgctgatcctcgacgaaccctcacgcggcggcggcccgcgctttttgcacaagctcggggatttactggtacggttgaaccgcgatattggcctgacggtgctgatcgccgaacaacacctgccgtttatccgtcgggtggcggatcgtttctgtctcctgcactgcggacgcagcgtggcccagggcgacgttatgcagttggatgcgccgctgctggcaaaatggatgacgccggatccagcgcgctga

SEQ ID NO: 253075 - DNA, 723 bp, Klebsiella pneumoniae
gtgattaaacgttttttcgttaccggtaccgacaccgaagtggggaaaaccgtcgccagctgcgcgctgctgcaggcggctaaccgcgcgggatttcatagcgcgggctataaaccggtggcctccggcagcgaccatacgacgcagggattgcgcaatgaagatgcgttggccctgcagcgcaatagccgcgcggtgctgagctacgaacaggttaatccctttacctttgccgagccgacctcgccgcatatcattagcgccgatgaagggaggccgattgacgccgccgcgatctctgcaggtctgcgcgaactggaggaacggtctgattgggtactggtggaaggggcggggggctggtttacgccgctgtcagaaacgctgacctttgccgattgggtacaggcggagcggctaccggtgattctcgtcgtcggggtcaagctggggtgcatcaaccacgcgatgctgaccgctcaggcggtgcagcaggccggactgccgctggcgggatggatcgctaacgatatccagccgccgggcaagcgtcactctgaatatctggcaacgctagagcgcgtactgcccgcgccgctgcttggagaaattccgtggctggcgaatgcgcagcagcgcgaggatctcggccagtatctcgatctcagcgcgctggatccggcgtcatccattttgccagcagcggcgcatccaactgcataa

SEQ ID NO: 253076 - DNA, 756 bp, Klebsiella pneumoniae
atgacggcggtgaataaacgcgcggtagcggcggcgtttggccgcgcggcgggacagtacgcccggcatgacgaattacagcggcgtagcgcctctctgctgctggcgcagctcgatattaaaacctaccccgaggtgctggacgcgggctgcggccccggtagcatgagccgcttctggcttgatgcggggagttgggtgacggcgctggacctttccgtcgacatgctggcagaagcccgccgcggcggctgcgcgcatcgctacgtcgaaggcgacatcgaagcgctgccgctggcgaacggctgcgtcgacctggcgtggagcaacctggcggtgcagtggtgcgacaacctcgtcaccgcccttgacgaactttcccgggtggtgcggcccggcggacgcgtggcgttcagtaccctactggcgggctctttgccagagctgaaccaggcctggcgagctatcgatgagcagccgcacgccaaccgttttctcagcgagcaggcggtgcgtgatgcgctggccggtcgccgcgcgaccggccgcgtccatgccattacgctgccgtttaccgatgcgctcagcgcgatgcgctcgctgaaaggcatcggcgctacccatctgcaccacggacgcagccctgcgccgctcagccgcggtaagctgcggcagcttcagctcgcctggccgcagcagcagggacaaagtccgctgacgtaccaactttttacaggagtcatcgaacgtgattaa

SEQ ID NO: 253077 - DNA, 1158 bp, Klebsiella pneumoniae
atgagctggcagcaccgtatcgaacaagcgctggtggagcggcaggcggcggatgcgttgcgccgtcgcctgccggtgacccagggcgcaggacgctggcttattcgtgaagggcagcgctggctcaatttttccagcaacgattatctgggtctcagtcagcatccggctatcgtcaaggcctggcagcagggcgcggagcgctacggcgtcggcagcggcggttccggccacgtcagcggctacagcgaggcgcaccgcgtgctggaggagcaactggccgactggctgggctatccgcgcgcgctgctgtttatttccggctttgccgcgaatcaggcggtgattgccgctctcgcgggcaaagaggatcggattgtcgccgatcgtctcagccacgcctcgttgctggaagccgccagccttagcccggcgcagctgcggcgttttcagcacaatgactcccgacatctgcgggatctgctggcgaaaccgctatccggtcagcagttggtggtgactgaaggcatttttagcatggacggcgatagcgcgccgctggcggaggttcagcaagcgtcgcgggcggccggggcgcttctgctggttgacgacgcgcacggtatcggcgcgctcggcgaagaggggcgcggcagctgttatagccagcaggttcatccggatttgctgatcgtcaccttcggtaaagcgtttggcgtcagcggggcggcggtcctctgtagcgaagcgctggcggattatctgctgcagtttgcccgccatctcatttacagcacagccatgcccccggcgcaggcagtggcgctcagcgccgcgctgggggtgatacgtagcgacgatggccggcagcggcgggaaaagctggctggccatattgcagattttcgccgtgaaatgacccattatcccggcgaactgacccattctgacagcgcgattcagccgctgatcgtcggcgataacgctcgcgcgctgcggctggcagcctgtctacgcgagcgcggctgctgggcgacggcaatccgcccgccgacggttcccgtcggtagcgcccgcctgcgcctgacgttgaccgctgcgcacgattccgccgatattgcccggctgctggaggtactgcatgacggcggtgaataa

SEQ ID NO: 253078 - DNA, 1041 bp, Klebsiella pneumoniae
atggctcaccacccacgttggacaatgtcgcaagtcactgagttatttaataaaccatttctggacctgctgtttgaagcgcagcaggtccaccgtcaacacttcgacccgcgccaggttcaggtcagcacgctgctgtcgattaagaccggcgcctgcccggaagactgcaaatactgcccgcaaagcgcgcgctataaaaccggccttgaatccgaacgcctgatggaggttgagcaggtgctggaatcggcgcggcaggcgaaacaagccggttcaacccgcttctgtatgggcgcggcgtggaagaacccgaacgatcgcgatatgccgtatcttgagcagatggtgaaaggggtgaaagcgctggggctggaggcatgtatgacgcttggcacgctgaacgagagccaggcgcagcgtctggccggcgccggcctggattactacaaccacaaccttgatacctcgccggagttctacggcaatattattactacccgcacttaccaggagcgcctcgataccctcgacaaagtgcgcgatgccggaattaaagtgtgctccggcggtattgtcgggctcggggaaacggtcaaagaccgtgccgggctgctgctgcagctggccaatctgccgacgccgccggaaagcgtgccgattaatatgctggtaaaggtcaaaggcacgccgctggcggataatgacgacgttgatgcctttgattttattcgtactatcgccattgcgcgcatcatgatgccgacctcgcacgtgcgcctttcagccggtcgcgaacagatgaacgaacagacccaggcgatgtgctttatggccggggcgaactcgattttctacggctgcaagctgctgaccacgccaaacccggaagaggataaagacctgcagctgttccgcaagctggggatcaacccgcagcagaccgcggtgctggaaggcgataacgcccaacagcagcgcctggagcaggcattgatgaacccggataccgaggaatattacaacgcggcggcgctatga

SEQ ID NO: 253079 - DNA, 1308 bp, Klebsiella pneumoniae
atggtttacaagtcgattatgacaacggacgatctcgctttcgatcggcgccacatctggcacccttacacttcaatgacttcaccgctgccggtctatccggtagtggccgcccacggctgcgagctgaccctcgccggcggcgagccgctggttgacggcatgtcgtcctggtgggcggcgattcatggctacaatcacccgcgcctgaatgcggcgatgaaagcgcagatcgaccagatgtcgcacgtcatgtttggtgggataacccacccttcggcggtggccctgtgccgccagctggtggcgatgaccccggaaagccttgagtgcgtgttcctcgccgattccggctccgttgccgtcgaagtggcgatgaaaatggcgctacagtactggcaggcgaagggcgacccgcgccggcgctttcttactttccgcaacggctatcacggcgataccttcggcgcgatgtcggtctgcgatccgatgaactcaatgcacagcctgtggcaaggttatttgccggataacctcttcgccccggcgccgcagagccgcttcgacggcgactgggatgagcgggatatggcgccgttcgcccgactgatggccgcccatcgtcatgaaatcgccgcggtgatcctcgagccgattgttcagggcgcgggcggaatgcggatgtaccatcccgagtggctccggcggatccgcagaatgtgcgatcgcgaaggtatcctgctgatcgccgatgagattgccaccgggttcggccgcaccggtaagctgtttgcctgcgagcacgcggggattacggcggatattctgtgccttggcaaagcgctaaccggcggcaccatgacgctctccgccaccctcaccacgcgtcaggtggcggaaaccatcagcgacggtgaagcgggctgctttatgcacggaccgacctttatgggcaatccgttggcctgcgcggtggcgaccgagagtctgcgtctgctggaaagtggcgagtggcagcagcaggtggcggggatcggagtgcagctcaacgccgagctggccccggcgcgcgaatctgaacaggttgccgacgtgcgggtcttaggggcgattggcgtggttgagacgcatcgaccggttaatatggccgccctgcagcgcttcttcgtcgaacaaggcgtgtggatacgcccgttcggtcgcctgatctatctgatgccgccgtacatcattacgccggagcagctaagccgcctgacgcgggcggttaacatcgccgttcaggatgaaacattttttagcgaataa

SEQ ID NO: 253080 - DNA, 477 bp, Klebsiella pneumoniae
atgaaattaatcagtcatgatttgcaggacggcgagaagctgcctaatcgccatgtcttcaacggcatgggctacgatggcgataatatttcaccgcacctggcgtgggatgaggtgccggccggcactaaaagctttgtggtgacctgtttcgatcccgatgcgccgaccggttccggctggtggcactggctggtggccaaccttcccgccgatacccgcgtgttaccgcagggagccggttccggccaggccgaactgcccgaagaggcgattcagactcgtaccgatttcggtcagaccggatacggcggcgcagcgccgccgaagggcgagacccatcgttatatctttaccgtccacgcgctggacgtcgaaaaaattgcggtcgatgagggcgcaagcggcgcgatggtcggctttaacgtccatttccacagcctcggcagcgcgtcgattaccgccctgtttagctaa

SEQ ID NO: 253081 - DNA, 1383 bp, Klebsiella pneumoniae
atgcaacaacaaaacaagccacacctgctgcgcgggctgaatgcccgtcacattcgttttatcgcgctcggttccgccatcggcaccgggctgttctacggctcggcatcggcgatcaaggccgcaggcccggcggtactgctggcctatctgattggcggcgcggcggtgtttatcgtgatgcgggcgctgggggaaatggcggtacgcaacccggtttccggctccttcagcagctacgcgcgacagtatcttggcccgctggcggggtttattaccggctggacctacacctttgagatggtgatcgtcgccctcgcggacgtgaccgctttcggcatctacatggggctgtggtatcccgatgttccgcgctggatctgggtgctgagcattatcttttttatcggcgccatgaacctgtgcagcgtgcgcgttttcggcgagatggagttctggctgtcgctaatcaaagtggtggcgattattgccatgattgtggcgggcggcagcattattttcttcggattcggtaacgccttcccggcaaccgggttggataacctatggagtcacggcggctttgcccctaacggctgggaggggatcgtggcttcgctcggaatcgtcatgtttgcctttggcggcgttgagatcatcggcgtcaccgctgcggaagcgaagaatccgaacaaggtgatcccgcaggcgatcaatacgattccgctgcgtatcgtgctgttttatgtctgcaccctggcgattctgatggcgattttcccgtggaacagcttcggcgagcgaggtagtcctttcgtactgatcttcgatggcctgggcattccggcagcggccaccattctgaatatcatcgtcatcagcgccagcatttcggcgattaacagcgatatttttggcgcggggcgcatgatgtacggtatggcgaaagaggggctggcgccgaagagcttccagcgcatcgccagcaacggggtgccgtggatgacggtggtggtcatgggcgtggcgctgctggcggcggtggtgctgaattatctgatgccggagcaggtgtttgtgctgattgcctcgctggcggccttcgcgacggtatgggtctggttaatgatcctgctggcccactttgcgatgcgtcgcggtctgtccgctgaggagcgtagcgctatcgcgtttccggtgccgttctggccggttgcgccgctgctgacgctactgtttatgggactggttattgcggtgctggggatggtggaagagacgcggattgcgctgatcgccggtctggtgtggctcggcctgctgacggcggtgtggttcgcgcgggtgcgcaaaaacgccgtgcaggcggtgacggagtcgtga

SEQ ID NO: 253082 - DNA, 1536 bp, Klebsiella pneumoniae
atgaacgctttaacactgattccgggccaactcagcctgtcgcagctgcgcgacgtctacagccagccgctgaacattacgctagacgaaagcgcgttcgcggcgattgatgacagcgttgcctgcgtcaacgcgattctggcggaaggccgcaccgcctacggtatcaacaccggttttggcctgctggcgcaaacccgtatctccaccgaagacctggaaaatctccagcgctcactggtattgtcgcatgcggcggggatcggcgaaccgctggatgacgatctcgcgcgtctgattatggtgctgaaaattaatagcctgtcgcgcggcttttccggcattcgcctgagcgtgattcaggcgctgatcggcctggtcaacgccggggtaacgccgtggatcccggcgaagggatcggtcggcgcgtccggcgatctcgcgccgctggcgcatatgtccttaaccctgcttggcgagggcaaagcgcgggtgcgcggaggggagtggctaccggcgacggaagcgctgcgtcaggcggggcttgagccgattactctggcggcaaaagaggggctggcgctgctcaacggcacgcaggcatcgacggcgtttgccctgcgcgggctgttcgaagccgaagacctgtttgcttccgcagtggtctgcggggcgttaaccaccgaggcggcgcttggatcgcgtcgtccatttgatccgcgtattcatgaagcgcgcggccagcggggacagattgacgccgcggcgctctatcgccacctattgaccgatgacagcgcaatttcccaatcacaccataattgcaccaaggtgcaggacccgtattctctgcgctgtcagccgcaggtgatgggagcctgcctgacccagcttcgccaggcggcggaagtgctgctggttgaagccaacgcggtctccgataacccgctggtatttgccagcgagaacgacgtgatctccggcggcaacttccacgccgaaccggtggcgatggcggcggataatatcgcgctggcgattgccgaaattggctcgctgtccgagcgccgaatcgccctgatgatggacagccatatgtcgcagctgccgcctttcctggtgaaaaacggcggcgtcaactccggctttatgatcgcccaggtgacggcggcggcgctggccagcgaaaacaaagcgctgtcgcatccgcacagcgtggacagcctgccgacctccgctaaccaggaagaccacgtctcaatggcgccagccgccggtcgccgcctgtgggcgatggcggaaaatacccgcggcgtgctggccgtagagtggctggctgccgcgcagggtctggatatgcgtgaaggcctgaccagcagtccgctgctggaagaggcgcgccacctgctgcgcgagcgggtgacccactacaccgaagaccgcttcttcgctccggatatcgaaaacgccattgcgcttctggctgcacgtcatcttacgcggctgctgcctgccgtgctctcagaccaacgctaa

SEQ ID NO: 253083 - DNA, 1689 bp, Klebsiella pneumoniae
atgtcgcaaagcaaataccgccagcaggacgtacgtgcaccgcgtggcacgacgttaaatgcgaagagctggctgaccgaagccccgctgcgtatgctcatgaataacctcgacccggatgtcgccgaaaacccgcatgagctggtggtgtacggtggtattggacgcgcggcgcgcaactgggaatgctacgacgccatcgtgaaggcgttgaaaaacctcgagagcgacgaaacattgctggtgcagtccggcaagccggtgggcgtcttcaaaacccatgaaaactcgccgcgggtgctgatcgctaactccaacctggtgccgcactgggcaacctgggaacactttaacgagctggatgccaaagggctggcgatgtacggccagatgaccgccggcagctggatctatatcggcagccagggcatcgtgcagggcacctatgagacctttgttgaggccggtcgccagcactatcagggtagcctgaagggccgctgggtactgacagctggtctgggcggcatgggcggcgcgcagccgctggccgcgaccttagcgggtgcctgctcgctgaatatcgaatgccagcagagccgcatcgatttccgcctgcgtacccgctacgttgatgaacaggcgacgtcgctggatgacgcgctggcgcgcattaaaaaatacaccgccgaaggtcgggcgatctctatcgcgctatgcggcaatgcggcggaaatcgtgccggaaatggtgaagcgcggcgtgcgtccggatatggtgaccgatcagaccagcgcccacgatccgctgcacggctatctgccgaaaggctggacctgggaagagtatcaggctaaagccgagtctgacccgcagggcactatcctggcggcaaaacgctcaatggccgaccacgtgcaggcgatgctggcattccacgaaatgggcgtgccgacgtttgactacggcaataacattcgccagatggctcaggatatgggcgttgacgacgcgtttgctttcccgggcttcgttcccgcctatatccgcccgctgttctgccgcggcatcggtccgttccgctgggttgccctgtccggcgacccgcaggacatctataaaaccgacgcgaaagtgaaagagatcgttaaagacgataagcacctgcatcactggctggatatggcccgcgagcgtatcagcttccagggactaccggcgcgtatctgctgggtaggactggagtggcggcagaagctggggctggcgtttaacgaaatggtgcgcagcggcgaagtctccgcgccgatcgtcatcggccgcgaccatcttgactccggctccgtcgccagcccgaaccgcgaaacggaagcgatgcgcgatggttccgacgccgtttccgactggccgctgctcaacgctttactgaataccgccagcggcgcgacctgggtgtcgctgcatcacggcggtggggtagggatgggcttttcgcagcactccggcatggttatcgtctgcgacggtaccgatgaagcggcggcgcgtatcgcccgcgttctgcacaacgacccggcgaccggcgtcatgcgtcatgccgatgcgggttacgacatcgccattgagtgcgcgacagaacaaggtttgaatcttccgatggtagcagcaacgcaggggcacgctaaatga

SEQ ID NO: 253084 - DNA, 726 bp, Klebsiella pneumoniae
atgttctcatcgcaacctcgttccgcgcctgcgccattctatgaaaaggtgaaacaggatattagcgaaaagatccacagcggcgtctggcggccgcacgatcgcatcccctcggaggcggagctggtggcgcagtttggctttagccgtatgaccattaaccgggcgctgcgcgagctgaccgatgaaggcctgctggtgcgattacagggagtgggaacgtttgttgcggagccaaaagggcagtcggcgctgtttgaagtgcgcagcatcgctgaagaaatcgcctctcgccatcatcagcaccgctgcgaggtgctgctgctggaggaaactcaggctgacctgattcaggccgcagcgctgaacgtagccgccggaacgcgcattttccattcgctgatggtgcattttgaaaatgagatcccggtacagattgaggaccgctgcgttaacgccgccgtggtgccggactatctgcatcaggactacaccgtcaccactccccacgactatctgtcgctgatcgcccccttaaccgagggagagcacattgttgaggcagtgcaggctacggcggaggagtgcgcgctgctgcatattcatgcccacgacccgtgtctgctgatccgccgccgtacctggtccaccacccatattgtctcccacgcgcgcctgcttttccccggcagccgctaccgtctccagggccattttggctcctga

SEQ ID NO: 253085 - DNA, 957 bp, Klebsiella pneumoniae
atgaagctatggcaaccgacgcccgccgagatttggcagggacgcgacgatagcgcggaggcggccaacgcgctgcgtctgtttcagactatcgcccgcgtcgaacgttttgaaccgcaggcgcagcccggtgacattgctctgctgggattcgcctgcgacgaaggggttcggcgtaataaaggacgaaccggcgctgctaaaggcccggaaatcctgcgccgggcgctggcgaatatggccagccacgacggccacgaccgctgcgtggatatggggagcgtcagcgtagagggcgacgcgctggaagcggcgcagcaggcgctgcgcgaagcggttacggcctgccaacgcgcgggcaagcgtacgctggtgctgggcggcggtcacgagacggctttcggccacggcgccggcgtgctggacgcgtttcccacagatgaggttggcattattaaccttgatgcgcatctggacttacgtattgccgaccgggccagctcgggtacgccgtttcgtcagctggcgctggcctgtgaagcgcagcggcgcgcttttcactacacctgtatcggcgtgagttacgccgctaatacccgggcgctgctggacgaagctgcccgccgcgaggtgacgatcattgacgatttagcggtgctcttcgcctttgaagcgcgggttatcccgcaaatcgagcatcttattgcccgctacgatcgcctgtatctgactatcgatctcgacgtgctgcccgcgcgtgaaatgcccgcagtgtccgcgccggccgcgctcggcgttccgctggcgacgctgctgcgcatcgtcgagccgctgtgccgcagcggtaagctccaggcggttgatctggtcgagtttaacccgcagtacgatattgatagccagggagcccgcgcggcagcgcgtctggcgtggcaaatcgcccattggtggcaatag

SEQ ID NO: 253086 - DNA, 1119 bp, Klebsiella pneumoniae
gtgctgctggtgcgcgatggccgtattgaggccattgtgcccgaaggcgatgcgccagccggccgaagtatcgacctcggcggcaggctgcttacgccggggctgatcgattgccatacgcatctggtttttggcggcagccgggcgcaggagtgggagcagcgcctcaacggcgtttcctaccagaccattagcgcaaacggcggcggcattaacgcgaccgtgcgcgccacccgggaaagcagcgaagcggagctgctggcgctggcccgccagcggctggctcgtctgctgcgcgaaggcgtcaccaccctggagattaaatccggctacgggctggaccttgaaaacgagcgcaaaatgctgcgcgtgatacaacagcttgccgcgacgcatgccgtggagatttcgccaacgctgctttccgcccacgccacgccgccggagtatcaaggcgacccggacggctatatcgatctggtgtgccagactcttctcccggcgctgtgggaagaggggttattcgaaatcgtcgatgccttctgcgaaaacgtcggctttacccccgcgcagactgaacgggtttacagtacggcccaggcattaggtatcccggtaaaaggtcacgttgagcagctctcttcgctgggcggcgccgaattagtgagccgctataaaggcctgtctgccgaccatatcgaatacctgaccccagagggcgcggcggcgatgagccgcagcggcaccgtggcggtgcttctgcccggcgcgttctatttccttaacgaaacccgcaggccgccggttgaactgctgcgcgaatatcaggttccgatggcggtggcgacggactacaaccccggcaccagccccttcgccagcctgcatctggcgatgaatatggcctgcgtgaaatttggcctgacgccggaggaggcgtgggcaggcgtaacccgtcatgcggcgcaggcgctgggccgtcaggcgagccacggtcagctggcggcgggcttcgttgccgattttgctatctgggatgcggcgcatccggttgagatggtttatgagccggggcgcagtccgctctggcagcgtgtggtgcgaggagagatcgtatga

SEQ ID NO: 253087 - DNA, 1284 bp, Klebsiella pneumoniae
atgaacacatattccgtttcccgcctggcgctggcgctggcctttggcgtgacgttgtccgcctgtagttcgacgcctgccgatcaacagccctcaacgcagactgcgccgggcacggcctctcgtcctgttttaaccgccgatgaagcaaaaaactttttaccggcgagctatttccagtctctggatcctaacgctgcggcgtggagcccatccgccatcagcctgccggcgcagccggattttgtcgtgggtcccgcgggcgcgcagggcgtaacgcataccaccattcaggccgcggtggatgcggcgattacccgccactccaaccgtcgtcagtttatcgccattatgccgggcgaatatgcgggcaccgtatacgttccggcggcgcctggcgcgctgaccctgtacggcaccggcgagaagccgattgacgtcaaaatcagcacagcgcttgattcagaaatggatccggtctcctggcgtcaccaggtcaatccgggcggtaaatatatgccgggtaaaccggcctggtatatgtacgacagctgccagagccgacgtgccgccaccgttggcgttatgtgttccgcggtattctggtcgcagaacaacggcctgcagctgcagaatctgaccatcgccaacaaccttggcgacagcgttgacgcggggacgcatcaggcggtggcgctgcgtaacgatggcgatcgggtacagattaacaatgttaatatccttggccgccagaatacctttttcgtgaccaacagcggcgtgcaaaatcgcctgcaggataaccgccagacccgtacgctggtcagcaacagctatatagaaggcgatgtggacatcgtttccggtcgcggagcggtcgtgtttgagaataccgacttccgcgtagtcaactcgcgcacccagaaagaggcttacgttttcgcccctgccaccctgaaaagcgtgacctacggcttcctggcgatcaacagccgctttacggcgtccggcgataacgtcgcgcagctgggccgctcgttagacgttgacggcaataccaatggccaggtcgttattcgcgacagcgtcattaacgaaggttttaacattgccaaaccgtgggctgatgcggtcggttccaatcgtccgttcagcggcaataccggaacggcggatgccaaaggcaacccgcagcgtaatctgaacgacgctaacttcaatcgcatgtgggaatacaataaccgcggcgtggggagcttcgtcgtcgctgaaccgaaacagtaa

SEQ ID NO: 253088 - DNA, 213 bp, Klebsiella pneumoniae
atgcagataaagaacaccattccagcagaatttatatttaactctgcgttgctgaaaaacatcgaacatatggtgcgaatggagaacgaggccgtgagcaatgaacgtttaatcgttgaagttcagcgccgtctgaatgtcgagaaaaatgaaatactcgctgacttatacacccagacgctgcatatgttacgcgcgaaaaatcatcactaa

SEQ ID NO: 253089 - DNA, 555 bp, Klebsiella pneumoniae; identical to SEQ ID NO: 176995

SEQ ID NO: 253090 - DNA, 732 bp, Klebsiella pneumoniae
atggcatattacagcatcggtgaagttgccgaacgttgcggaatcaaccctgttactttgcgtgcatggcagcgtagatacggtctgctgaagccgcagagaagcgagggtggacaccgccagtttgacgaggaggacgttcagcggattgaggaaatcaaacgctggatcgatcgcggcgtctccgttggcaaagttaaggcgcttctggaaggccatcagcctgaaacgcaagacgcagccgtcctgctccaggaagagatgatgacgcttctgcgaggtgtccagccctcaaaattacgcacccgcatcatgtccctcagccatgaatatcccgtagataaacttattgaccggctgtttgtccccgtgcgcagcaagcttaatctcgaccagaacacttccctggctatcatcagtatgctggatggcattttgatagattgcgtggcgtccatccttgcggaatcgcgtaagaaggtgggtaaagagacgctgttagtaggatggggtaatgaagatcgcactcgcctgtggctggaagcatggcgattgtcccagcgcgcctggcacgttaatgtgctggcggaaccgctcgactctcctcgcccggaactgttccctggtcagcacatctttgtctggaccggccgcgcgctgacccctttgcaggcagaattacttagccactggcaaagtcagggctttaccatcgagtttcacggagagtaa

SEQ ID NO: 253091 - DNA, 1224 bp, Klebsiella pneumoniae
atgctcactaccatcatttatcgcagccatatctgcgacaacgtgtcaattaaatcgctcgaaagcatggttgctgcagcaaatgtaaaaaatggtcaggaagacgtgtcgggtattttgctttttaacggcacccatttttttcaactattagaaggacctgaagagaaggttgaggaaatttatcgccatatttgcgaagacccgcggcaccataacctcgttgagctcctcagagaccatgggccgacccgtcgctttggcaaaatcggtatggaactctttgatttacgagagtttgaccgcgatgaagttctgcaggccgtactggataaaggaacctcgaaatatcagctcatctatgacgacagagctctccactttttccgtaccttcgtcgaagccacggaaaaggagaactattacgaaattcctgcggccgaaagctgggactttgtgatagaagacgaggcctggtatcctgaaaccccgctcgagcaggccgagtgcagctttgcttttcagccggtgatcgatccgtttgccaaagaggtcgtctcctatgaagcgctgctgcgcaccaactccggtgaatcgccagcggtctattttgacggactttcgcgagaggaaatctactggacggatctgcacagtaagcgcatcgccttcgccatggcgggacgtttgcatcttcgtggacgcaccttgtcgattaatctgttacccatgacgctggtcaatgttcccaacgctgtcgaatttctgttggctgaaattgaagccagtggtttgattcccgagcaaattattgtggaattcaccgagagcgaagcgatttctcgcgttgatgaatttaccgattcagtacgaaagctaaaatctgcgggaattcgcgtggctatcgatcactttggcgccgggtttgccgggctagtgctgctggcgcagtttcagccggaccgcattaagattaatcgccagctggtcaaagatatccataagcacggcccgaaacaggcaatcgttcaggcgattattaaatgttgtaattccctggaaattgccatttcagcggtgggggttgagcgggcggaagagtggatgtggctggaatcagcggggattacgcatttccagggaaatttatttgccagcccgtgcttcgggggcattccgccggtagcctggccggagaaaaaaatagcctgcgagcttctttaa

SEQ ID NO: 253092 - DNA, 3822 bp, Klebsiella pneumoniae
atgtccatagcgttgacaggtcaagaaaaatatgattttcaggatcttgtttgtgttcgatatgctcttcagttctatcaagaagacagtgctattttttatgtcgaacctcaaggtggggaagatgcagagctgcattttcttgacaaaggtaaaaatgtcaagtgtgaaattcaagttaagggctctgaagagcctgtatctacaatcagattagcggagtgtttggggcatttccctgcctacgggatagaaaattttcttttaaagcgaataattgaagataatagttctagagctgtattcgtcatggccggaagaggcatggactctgttcaaaagtatatacctaaggggcgatgggatggaagtcaacatcgaacaattcggttcacccgagatgatgctcagattatattggatgcagttgtcgagtacacaaattctttacctggaactgctcagaatataaaaaggaaaaaatatgttaatgaatttgttcgtggtgtggatattgatagagtcaaaacttccttaagtagaataatagttctagataatattaatagtgaaaaattgattgatgaatgccgtacaattttacgtaattccttttttattcctgacgatattttcttagacaccgtaaataatcttgttactgttgttaaaaattgtaaatcagcacaaagtgatgctatcgtcaatttaattagtaaattaaatgagcgccctgtattttcagtaatgcccctaaattatgttacacgagggagagaatctgaatggtatgagagattaaagagagaacatgtaattcttctttcaggaataccaagagtagggaaaagcaacacaggaaagtggcttgcagcgcaatatcaaagtataggttaccgaatactagtgacgcagagtattgaggacgctgagcgttttttattagatcctgttaatagtcatagacttgttttacttgatgatcctcttggtggagtacacccagtgatcaaaccaaatgaaaaattagttttactaaagaatcttttgtcacaccttcgatctgaccgtaaacttattgttgctcagggacaggaaaggctattggaaacagtgcaagaagagactcttgagacagctgcgttacgagcacacgagtggatagaccttagtcttttagataataaatttcttgtgaactattggagtaaattgtctgaatctttctcaatacctaaatatttattccagattgtaaatgattttttgcagcaagatacagcctatattgaacctgggtgcttgagttatcttgctgcagaacatgagaaacttcctgcttttaacgatattgagagcatactacgttttgcaaggaaggatgctaatgatttagggagtgcgctcggacaggaagtaggaaagaacttattggtaggacttgcaattgctactagtcatctcgaaaatatacatgatgatgatcttgcttgggttctgactggcaatttagaaaaaaaatatggatattcatcattcttagggacatctattacattgggcagagggaaaacaaatgatagttatatttttcctgtctatgaacctgcccacgttttaacggaaatagagaagaatagccttggtttgctagaaactcgtcagatcatcgaggttgatgataattattgcacaacattttctcatccattttatcgtgctgcggcagagtccttggtgagattttcaaatcgtttcgaattctcttttgctttgggattattaaataatggcatattctgtctttcaccaaaaacagcaagagccactgccagaaatattaactggatatattccagaataaaaaaaagtaaagagaaagaggctgttattgagctggcaatagctggtttaaattctagctatccttccgttcgtgatatttgttttgattttcttattgataatttatcaacatttgacgataaatataaagatgacttgataagttgggtatttaaagttaatgctgataaccttgaatcattggaatggcatgatgagcaaccgtggtatcctatgggagaaaatatcacattagagtcatctgtacttaatattttcagagacttcaaaggtgaggagttaattgaggaaataaataacaataatgtagtaagcatctcttctgaaaaagcttataatttactgaagactatcgagcgcactcctgaaaaactgacgacaattgttatgcagagaattctgagtgtaagcgaaggtctaattcgtgctttggcagcaagaatctgggtaagtgttaatcggcatgatgatgaagaaatactcgaacgtatctttcgtgatactcatccagctgttgctgaatccgtattcaaatcatcaattcgagcttggaatacgtttactgaaaaaaggcaaatattcatatttgaaaatctgaaaaaaatggcaagtcaacccgtattggctcaagcaattataggtgatcttgttgtttttgaacgcgaacatgaaatgggagtctcccccccttgggatgtcttttcaggactaatgcctattgcattagcatctcttcctcttggtgtaaatattaacagagcacggcttttcaatgttgttaaagcatctactacaaaattgtcggtaaatgctattttttcaatttctgaaagttggattttttggctagagaaaataaatgttaagcgtcaagaggatgatttttcattaacggttactgatataatcttagatattgcttgtgagcattcatctattagattagaactaattaaaagattattaaaattacaagggacaggcgccgtatcaagggttatatcggatttggtttattattgggttagactctctgatgaagaaaaaaaattaatctcaaatctcatattgtcaaatcgtggggatgaattatggttaaaatcagccgtattaacttcatttacggcaccgattgagttattgtgcttaatactcccttcttttaatggccagcagttacagccaaaggatattctcgacatggacatgccattactcagttcggcgttgaaaatgtatgttggtcatcctcaaccattgtggtggtacggtactcaccatagggaaaattctgtttggccagaagtcatatcaatcatttcgcatgattttaaacatcctctatttacattggcttttaatgaggtatttgattttggggaaccagaacaactcattgaaataattgataaggcagatagtaatgatgcgcaaaaaatattcaatataatgattgagaaatttattaaaggtaatccgcaacacatgccagaggtatggttttccctattttctaaagtcaatgatgcggccattcattcagaatggatacgaaaaatggtattacatgcttcatctatttttgatgatttatccgaggcgtgccagtttattcctcctggcaatattaaagagttttattcttactttaagtctgatgaactaattataaagtttatttctaaatttaaggaggcatttagttctgatattgtttatgatgatgagattagtgagtttaggaataattttttagctgtcttgtcggaaatttttaattcaagccctcctaaccactatcatatttgtgattatgttatgagttgtctggtaaaaattggttttgataaagacgacataagatttgttgaggtgaaacgtttagaacttttggatgttaagtttgctgatgaaagtaatgttagtaatgaaaaattagaaggttggtattattaa

SEQ ID NO: 253093 - DNA, 681 bp, Klebsiella pneumoniae
atggacaataagctctacacacaagacgattataataaagactttaaatctgaccctgaaattcaaaaaaaagcattagaattcgcattggatattaggaagtttgaaatagatttatattggaaacgtgctgcatatttctgggcttttattgcggcaatttttactggctatattagcgtaagtgctatttctactgatatactcaaaaacaagaacgaaataatattgattctttcatgtttaggtattgtattctctttcgcttgggtactagtaaatagagggagtaagcaatggcaggagaattgggagaaccatgtggatttattggaagacgaagttacggggccgctttataaagtaactctgtcgagaaatcctccgcgtggaaaatatgagaagttttcacatatcttatccggcccttcatttgtctctgtgtcaaaaattaatcaattgattagtctatttattcttatgatatggatgtatatttttataagtaatatacttccatccggagtatatggtggtactagtattcttatatctatcactgtgcttacttgtgttttctttacaatgcctagtgttggaaaaactcattcgggagagcattggcatcaggctaaaaaaagagagtcaacaatttatagaaaaataaaacaacttaaataa

SEQ ID NO: 253094 - DNA, 1416 bp, Klebsiella pneumoniae
atgagcagaaagttccaagtgaaagcggttccaagcacttggctggaaagtaatggacggcggttagactgtggtccttatatgtctggtgcggcagagattcgcgaactcctaaagaaacacaaaactgatgtacttcccgttttgacagcaggtcacgatggtgggatttacaacggccctcagttcgaaaggaattatgttgatgatgcgcaatacggtgttccgtttttaacaaccactttcatgatgcaggctgatttgagccggttacctcttctgagcaagaaggatgcgcactctaggaaactcagctacttgcgggttcatgaagggatgacgttaattacgtgttccggaacggtgggaaggaccatttatgcacgctcagacatgaataatgtttggtccaaccaagacattctgaagatcgttgctgacccgaatcgaatactttcggggtacctgaatgcatatctttgcacgagattcggagtgccctttgttgtttctgggaaatacggttcggtaatcactcatcttgagccaaagcattttgctgatctcttggttccccgtctcggaaaaactatcgaacagaaggctcatgatcttgttgaacagtctgcggcactactcacccaattccaagccaatttaactgaggcaacggagctctacttcgattctgttggtctgaaggacctcactgcaagcgagtggcattcttggggggcagatcttggcttcacagctaaagccggagtcaaatctctacgggcgttaaattttaacccacgttttaaccaactttgtgaccgtattaagcaaggtccttggaaacccttgggtgagctatgcgtttccggtacgcttaaacgcggagttcgtttcagtcgtgtggatgctgaccctgaatatgcatatcgactgatcggacaaaaggaacttttctggttacgtccacaagggcggtggattgggaaaaattttgtcccgggcggcgtactcgttgaagatggctgtgtacttgtggctgctcagggcacactcggtgaatcagaactttattgtcgtgcggaatttgcaaccggtaaggctttggagaacgcatattcagaacatattctccgtgtattggcggatcagagtttgattgaacgtggtgccctctttgctttcatgcgttccgagtctgctttcagaatgcttcgttccatttcggtgggcagtaagcttcaagaccaccattacgcgatgctcccctcgcttcccatcccttatccgtcaagtgacatcaggacgcgctgtaatgaccttgttattgcagcatatgaggcaagggaaaaggctatcgagctcgaagaccaagcccgcgccctggtcgagcgcacaattgaggagggcggtcgctaa

SEQ ID NO: 253095 - DNA, 867 bp, Klebsiella pneumoniae
atgcaaggaacatttattggttttaataccgcatctattaaatatgatgacaaatttttggctttaatgctcaaagtcaaacagagtaatcaactctgtcagtcttattatcttcaggcgccgattcttgcggatctcctgttagttctgcagcacagaatggccatcgtcctgcagcgcttaaatgctgaaggtgaaagttataagaatgaactggtggcctttaatgaacgccttatagaaaatacaccggcgatcgatatacctgaagtacagcaccctaatccggaaaggcgtattatgtcgataacgttaaaacccggcgacacctggtcaacgctcattctggtgctgcaaaatgagcaaattgctacgctgcgtattgatgatatgcaagttgaagcgctgctggtgggcattcagcagtctcttaaacacacgggtgatagcgatctgattaattatttaacttcctcgctggaaggcctgatgctttatgcggtggatttaacgaataccagcaacgttgattatcagcagtatcttcaggatgaatggaagctcaatctgttttcccattatctcggcgtgttgtactgctgtgacacagaggaagggcgaaaaatcatctccggcgcagtgattaaaaccaacgccgctcatccatcagagcaggaaaatatcgttgtaatgcgcttaattgagagaagcccaaagctgaaagaagtgcatacccagcgccagcccagccagatttttagccaaatcatcccttctcagccaggaagaatgatgacgctggaggagtgtctgcgtcctttgcatgcgttctaccagcaaactcaggcgcaactcagcaagcaataa

SEQ ID NO: 253096 - DNA, 1287 bp, Klebsiella pneumoniae
atgttaaaaaatatctatcgcaaggaagcgattgagtacaaaaaaacccactggaaaggaaaggcattattattagcaggcattcccgcgtggctagtcactcttctggcatttatttttcttattgccattgtgctttcactcatattttgcacctttacccagcgtattgatgtacgcggagaggtcattacgctccctcactccgttaacgtctttgccccacagcagggttttgttgtgaatctgcatgtaaaggtgggagacattgtcaaaaaaggccaaccgctttacgagcttgacgtttcacgtaatacgatcggtggcaacgttagcgcggctcagattgaagttatcaatgaaaaaattgctaacgcagaagatattataagcaaactgacgcgtaataaggctgaaacgctcgctgctcttgaaaaacagattaagaccaccagcgcctcgttaacggaaaccaaccgtatgctggctaatactcaggtaggcttaaacaaaatgcataccaacctggccagctatgataaatacttaaaggatggtctgataactaaagatcagtataactatcagcactcgctatattttcaacagcaaagcgcctatcaatccctggtgactcaaaagatgcagctggaatctcagctcacgcaaaccagcagcgataaaatcaccaaagcagcagactttgataatcagatttcaagccagcataaccaaatcaatgattataaaaatcagctggtagaatcgaacgctaacggtaatctgattattaaagcaacgaccaacggtaagattgaatcgctggccgtgactaaagggcagatggtagagaacggcagcagcctggcgcagatcaaacctaccggtgatattgagtattatctgatcctctggttacccaataacaccatcccctacgtgaaacccggggacaccattaatattcgctatgatgctttccctgccgataaatttggccaatttccaggtaaggttgtttctatttcctcagtcccggcgtcacgtcaggagatggcagaatataccaatgtcagcaacggcactaatcagcaggaattagcgctctataaagcaattataaaaatcaaggacaagacctttagctacaatggaaaaacgctcacgctctctaacggtctgaaggctcaggcggtagttttccttgaagaacgcccgctttacatgtggatgtttactcctttctataagatgacgcaaagcgtgagtggcccgatcgatgaataa

SEQ ID NO: 253097 - DNA, 369 bp, Klebsiella pneumoniae; identical to SEQ ID NO: 189193

SEQ ID NO: 253098 - DNA, 1026 bp, Klebsiella pneumoniae; identical to SEQ ID NO: 189192

SEQ ID NO: 253099 - DNA, 2544 bp, Klebsiella pneumoniae
atgtctatttctataaaaaaaaggggaggcgcgctatccggaacctcccacacatttttcgttcttgttcctgcgctagctctcggtttatgcgccaatgctttagctcgtgatttttttgatcccgcatttataaaatcagtcggtcagagcgacccctcttcaataccggacttatccctctacgccacccgcgatgcccaggctccgggggagtatcgcattgacgttattttaaataacagtctgcaagaaacggctgatatccggtttgtggaaaaaaaagatccaacaacagatacgttgaaattagttccctgtttaagcattgctaaattaaccagctatggtttgcgtgctgacgcttttcctggcttaaaagaagatgcgaatggctgcgcagatactcatgttattcctgatttcaccaccgattttaacttcaatactcaacagctgctggtatccataccgcaggcggcgctgtccactatcgcccagggcttcgtttccccagatgagtttgacgacggtattaatgccttactgaccaactatcagtttagttcaggcaaagactatgaagccaataatgagtattacaatcttaacttacaatccggcctgaacctcgggccatggcgcctgcgcaatttgagtacatggaataagtcagcgggggcaaagagcgactgggattccgtatatctctatgcgcagcggagcattgtcccgttaaaaagtactttagtcatgggcgaaagcagctcgctgtcgagcatctttgacagcgtgccgttcaccgggattcagctggcaaccgacacggacatgattcctgaaagcctgcgtggattcgcgcccatcgttcgcggtattgcccgaaccaatgcgcgtatcgtcatcaagcagaatggctaccaaatttaccaggcttttgtcgctccgggcgctttcgaaattaccgacctctactcaaccggcggcaacggtgacctttacgtcaccgtcgaggagtccgatggctcccgacaaaacttcgtggtgccctacgcttctctgccattaatgctccgggaaggccaaatggagtatgagattaccagcgggaaatatcgtccctacgatggcaacgttgacgagaaaccctttacgcaagcaacgatcagctacggcgtattaagcaataccactctctatacgggcgtacaggcggcggccaattaccaggcgctcgctttcggcgccgggcaaaacctcggcgatattggcgcggtttccgccgatgtaacggcggcatggtctaaaaagaaagatgaagagaaaacgtccggccagtcatggcgcattcgctacggtaaaaatatccttgaaaccggcaccaatattaccgtagccggctaccgctattcgacctccgggtacaatacgctaactgatgtgatgaatacctataacaacagctacggcggatatacgccacactcgctgcgtaacagaaccaatattaccgtgagccagagcctgggttcggggctaggtaacctttctgtatccggcatttttgaggattattgggatagcaatcgccgcaataactcgctgaatattggctataacggcgggttccgccgctttaactattacgctggctatagctatagccgctatagctggggaaataatggttccagccgtcacgttgaggatgaccatgttgtttcatttaatatctccattcctttaagcgattggttacctaatgcctatgcgacctataacgtgaccaacagcagtccgggttcaaccgatcagtatgtttctctgagcggcgtcgcgctggaaaaccataacctggactggaacgtccagcagggctacagcaatcgtgaagatgccagcggcggcgtctacggcaactatcgtggttccatgggttcagctaacgctggctacagctatgccaaaaatagtcagttaattaactacggcctgagcggcggcgtgctggttcatgctgacggaataacattaggtcaggaaatgtctgaaaccgccgtattggttaaggcgcccggcctgaaaaacgtccgtctggaaaacgacgcgacgatcgaaacggactaccgcggctatgcgattattccttacgttacgccatactatcgaaccagcgtgactttagatagcacgactttgggagataatatggaattgccaaatacgacgcagaaagtggtgccaacccgtgcagccgtggtacgggcaaatttcgcgggcaatattggccgccgcgcgttccttattcttaagagagcgtcgggtgaaaacgttccttatggcgccacggtaacgttgaccacggataaaaacgcccaggccagcatcgtttctgatggcggtatggtctatttgtccggcctgaaagataacggtgaagtctatgctcagtggggttcaaagagcgggcagcagtgtaaagcgccttataacctggctgcggtaaacgaaggtattgctcaggccactgcggtttgccagtaa

SEQ ID NO: 253100 - DNA, 693 bp, Klebsiella pneumoniae
atgctgaagtcattattaagattagctgcaatttcttttatttctgtcagctttgtggcccagagtggagtcgtggttgattcaacccgccatctttataaagaaggttcgcgagaaatcagtacgaacattgaaaacaaagatgacacgccttatttaattaaatcctgggtagaagcgtctgaaggaatgaaagacagcttttttatggtgactcccccgcttttccgcctggagggcaagcaaaccaacacggtacgtattttccctaacgcgtatatctctaaagcgcctcaggatcgtgaaaccgtctacttctttaacgtaatgtctattccgccaaccagcgacagtgaagcggataaaaacaaactgcagctggcggtacgccatagaatgcgtcttatctatcgtcctcgcgccattcaggatatgaatattaataccgaagctaaaaatctgcagtggcataaatccggtaataagataacgctaaagaatccgacaccctttttcatttattttaagtcgataaaaataaacggcagagatattagcaactcagtcaataacattgatgctttttccagcaaagaatttactttgcctgcaggtataaatggttcagaaatcgagtggaaggtcgccactgataacggaggctcgggttctgcccacacatcatcgatttaa

SEQ ID NO: 253101 - DNA, 561 bp, Klebsiella pneumoniae
atgaaaaaaacaattgtagctgtaatggttgctgcttctgcagttctgagtgctcaggctttcgcggcagggaacagttcttctctgactattctgggtaacgttaccgacactggcgaatcctgtaacgtaacgccgtccgctatgatttccggcggttctttaactctggacgatgttaaagcatctgtactggacgcaatggcagttaacactccgtatatgtcaactgcaaaagatattgagtacaaaatcgaagattgccaaaaaggtgcaactaattacaccggtaacatcaacgtgaccgtaaccggcgactatatcagcggccaggacaacgtgctgaccaacactgctgccagcccggcgactaacgctgcggttaccgtagtgaacaccgacggcactcgcgtaagcttcaccggtacgactcctaaagttgttgcttataccgcgggtactccgtcttacctgcgttataaagctgcatacgttaaaactgcaaatggcgttaccgatggtgcagttaaaggtgtagccacctttactattagctactaa

SEQ ID NO: 253102 - DNA, 567 bp, Klebsiella pneumoniae
atgatattcaatgaatatatcattaacaatgaagttatttttaatgtaaatatgaatgagctgcagcccgtgggggaaaatggtgagagcgtgacgctgaacgcgccgactgcacgctgcctgcaacttttactggaaagcaatggaaaaattatatcccgagaagagtttctggatagtgtctggaaaaccagaggggttgtcgtttctcagaatactttttatcaaaacatatcattgttaagaaagtcgttagtgaaagcaggattatcgcaagatattattgttacagtcaggcagcgcgggtttgttctcgccgcaggctcaaatattgcctcattcttacgctcggaagaaaaggaaccggaaaactctgaaagtgtgcaggttaccgcaagtacctcttcgcctccgattgagaaaaatgtgatgaataattccgctgtccgcgaagatgcgcaaaaaatttccccagacgataaagcaacagtatttaaattacctggatggattttgcctctgttattggtgatgaccgcagcaaacatcctttctctttttttgtaa

SEQ ID NO: 253103 - DNA, 1029 bp, Klebsiella pneumoniae
atggcgcatattgtaaccctaaataccccatccagagaagattggttaacgcaacttgccgatgttgtgaccagtcccgatgaactgctgcagcttttaaatgtagacgctgatgcgaatctattggcaggacgcgacgctaagcgcctgttcgcactgcgtgtcccacgggcatttattgctcgaatgcaaccaggaaatccaaacgatcctcttctccgtcaggtacttacctcccaggaggagtttattcatgctccaggatactccaccgatccgctggaagaacagcatagcgttgtgccaggtctgctgcataaatacagcaaccgcgctttactgttggtgaaaggcggctgcgcggtaaattgtcgatattgtttccgtcggcacttcccgtacgcggaaaaccagggcacgaagcgcaactggcagaaggctatggaatacatcgcgtctcatccagagctggatgaaattattttttccggcggtgacccgttaatggcgaaggaccatgaactggactggctgcttacccagctggaatccattccacatattaaacgcctgcgcatccacagtcggttacccattgtgatccctgcgcggattaccgataccctggttgcgcgcatctctgtatcctcgttgcaggtgctgctggtgaaccatattaaccatgccaacgagattgataccgcgtttcgtagggcaatgaagagcctgcgtatggctggcgtcaccttactcaatcaaagcgtactgttacgcggtgtgaacgataatgcgcgcacgctcgccgatctgagcaatgcgttattcgatgccggggttatgccttattacctgcacgttctggacagagtgcagggagcagcgcatttcatggtcagtgacgaagaggcccgggtaatcatgcgcgaactactcactctggtctccggttatttagtccctaaacttgcacgggaaatcggcggagaacccagcaagacccccctggacttaggattgaagcaacgatag

SEQ ID NO: 253104 - DNA, 567 bp, Klebsiella pneumoniae
atggcgacttactatagcaacgattttcgtgccggtcttaaaatcatgatggacggcgaaccttatgcagttgaagccagtgaattcgttaaacctggcaaaggccaggcttttgcgcgcgttaagctgcgccgcctgctgaccggcacccgcgtagagaaaaccttcaagtctacagattctgctgaaggcgcagacgttgtcgatatgaacctgacttatctgtacaacgacggtgagttctggcacttcatgaacaactcgacgtttgaacagctggccgcagattctaaagccgttggtgataatgctaaatggctgctggatcaggctgaatgtatcgttactctgtggaacggtcagccgatctccgttaccccgccgaacttcgttgagctggaaatcgttgaaaccgatccaggtctgaaaggcgatactgctggcaccggcggtaaaccggctaccctgtccactggcgcagtggttaaagttcctctgttcgttcagattggcgaagtcatcaaagtggatactcgctctggcgaatacgtatcccgcgtgaagtaa

SEQ ID NO: 253105 - DNA, 147 bp, Klebsiella pneumoniae
atggtaaaaaaagcgattgcagcggtctttacggttttggtcctctcctcagcattgaccggatgtaacaccacgcgcggtgtcggtcaggatatttcagatggcggcgatgcgatttctggcgccgcaaccaaagctcagcaatag

SEQ ID NO: 253106 - DNA, 318 bp, Klebsiella pneumoniae
atgtcctggttaattctgtttatcgcggggctgctggaagttgtctgggcagtcggcctgaagtatacccatggttttagtcggcttgtgccgagcgtaattacgattgccgccatggttatcagtatggcgcttttatcatgggcgatgaaaacgctgcccgtgggaacggcttacgccgtctggaccggtattggcgcggttggcgcagcggtcacggggattatcctgctaggagaatccgccagcccgatgcgcattgccagcctggcatgtattgtcattggcatcattggcctgaaaatgagcgctcattaa

SEQ ID NO: 253107 - DNA, 531 bp, Klebsiella pneumoniae
atgcgtctgctccccgtcatggcggttgttgccgcttcatttctgcttatcgcctgtagcacgccgacgccgcctaccggcgtcaccgtggtcagcccattcgacacgcaacgctatctcggtacctggtatgaaatcgcccgtttcgatcacaattttgagagtggcttagaaaaggtcaccgcaacgtatagcctgcgcgatgatggtgggctgaacgtggtaaataagggatataaccccgaccggggtatgtggcagaaaaccgacggcgtcgcttactttaccggcgatcccacgcgcgccgcgctgaaggtctcatttttcggccctttctatggcggctataacgtcatttcactggataaggattatcgctatgcgctggtttgtgggccagatcgcgactatctctggctactggcgcgtgcgccgaaaatcccgccggaagtgaagcagcagatgctggatatcgccagccggcagggatttgacgtgagcaagctcatctgggtcaatcaacgctattaa

SEQ ID NO: 253108 - DNA, 360 bp, Klebsiella pneumoniae
atgatcaatcctaaaccaaaacgttctgatgagcccgtattctgggggctgtttggcgctggcggcatgtggggagcaattgtcgctcctgtcatcgtactgctggtaggtattatgctgccgctgggccttgcgcccgcagatgccttcagctacgaacgcgtgctgggctttgcccacagcttcattggccgtgcgtttatttttctgatgattgtgctgccgctatggtgcggacttcatcgtattcaccatgcgatgcacgatttaaaaattcacgtacccaacggtaagtgggtcttctacggcctcgcggcgattctgaccgtcgtcacgctggtcggaatattgttcatctaa

SEQ ID NO: 253109 - DNA, 396 bp, Klebsiella pneumoniae; identical to SEQ ID NO: 175194

SEQ ID NO: 253110 - DNA, 978 bp, Klebsiella pneumoniae
atgagcgaaacggcaacctggcagccgagcgcatccattccaaacctgttaaaacgtgcagcggtgatggcggaaattcgtcgtttctttaccgaccgcggcgtgctggaggtggagacgccctgcatgagtcaggcgacggtgacggatatccatatggtcccgtttgaaacgcgtttcgtaggaccgggtcattctcaggggctgaatctgtatctgatgaccagcccggagtatcacatgaagcgcctgctggcggccggttgcggcccggtttttcagctatgccgtagcttccgcaatgaagagatgggtcgccaccataatccggaattcaccatgctggagtggtatcgtccgtgctatgacatgtaccggctaatcaacgaagtagacgatctgctacagcaggtactcgactgccagccggccgaaagcctctcttatcagcaagccttcctgcgtcatctggaaatcgacccgctgtcggcagataaaacgcagctgcgcgaagtggcggctaagctcgatttgagcaatattgccgatacggaagaggatcgggacacgctgcttcagctactttttgtcatgggcgttgagccgcatattggtaaggatcgtccgacgtttatctatcatttcccggccagccaggcgtcactggcgcaaatcagcaccgaagatcatcgcgtagcggaacgtttcgaggtctattacaaaggcattgagctggctaatggttttcatgagctcaccgacgcccgagaacagcggcagcgttttgagcaggataaccgcaagcgtgcggctcgcggtctgccgcagcagccaatcgatcatcatctgctggccgctctggaagccgggctgccggattgttccggcgtagcgctgggcgttgaccgggtggtgatgctggcgctgggcgcagaaagcatcggcgacgttatctcgtttaccgtcgaccgcgcctga

SEQ ID NO: 253111 - DNA, 423 bp, Klebsiella pneumoniae
gtgccgaacaaggcgttcatcaccgaacagttcatcaactggtcgttgtcggattctgtaacccgcgtggtgttaacggtgcctgccccggtggatgccaataccgaagaggtggcgcagatcctgctaaatgccgcgcaccgctgttcgttggttatcgataccccggcgccggaagcgtttcttgttgacctgcagcaggggatccagattttcgagctgcgtatctacgccgccgaaatgggtcaccgtatgccgctacgccatgagatgcatcagctgattctggccggattccgcgagcacggtatcgatatgccgttcccgccgttccagatgcgcctggagagcatcgatggcagaaaaagcagcagggcgctgacctcggcagggaaaaccagtcgcgcgcccggcagtctgtaa

SEQ ID NO: 253112 - DNA, 3018 bp, Klebsiella pneumoniae
  misc_feature (2910)..(2919): n is a, c, g, or t
gtgcgcctgatatacactttcctgttggcctggtgcctcagtttcggggcgtacgcagcgacagccccggatgctaaacagatagcccaggagctggaacaggcgaaggcggcaaagcccgcccagcctgaaaccgtcgaagtcctgcagtctgccctgaatgcgcttgaggagcgtaatgcctcccttgagcgcgcccgtcagtatcaggacgttattgataactttcccaaactgtcgcaaaccctgcgcgcgcagctcaacaatctcagcgatgagccgcgccaggtctccactaccctctcctccgatgccctgaaccaggagattctccaggtcagcagccagctgctggaagccagtcgtaaagctcagcaggagcaggaccgcgcccgcgatatcgccgactcgctcaaccagctgccgcagcaacagagcgatgcccgccgccagctgaatgaggtcgagcgccggatcggcgcgcaaagcagcaatacgccgctggcgcaggcgcaaaatcttggtttacaggcggagtccgcgcggctgaaagcgctggtcgatgaactggatctggcgcagctttccgccaataaccgccaggagctatcacggttgcgatccgagctggcgcagaaagagagtgagcagctcgacgcctggctacaggcattaagaaatcagctcaataaccaacggcagcgcgaggcggagaaagcgctggaaagcaccgagctgctggcggaaaacagcgaaaacctgccgccggatattgtggcgcagttcaaagtgaaccgcgagctgtcgcaagcgctaaaccagcaggcgcagcggatggacttgatcgcctctcagcagcgccaggcgaccaatcaaaccctgcaggtgcgtcaggctttaaacacgctccgcgagcagtcccaatggttaggttcttccaatctgcttggcgaagccctgcgtgcgcaggtggcgcgtctgccggaaattccgcgaccgcagcagctggataccgaaatggcgcagctgcgcgtgcagcgcctgcgctatgaggatcagctcggcaagcagccgcagttaagacaaattcgtcaggccaacggtgaacccctcaccagcgagcagaaccgcattcttcaggctcagatgcgcacgcagacagagctgctcaactccctgctgcgcggcggcgatacgcttatgctcgaactgaccaagctgaaagtcgccaacggccagctggaggatgcgctcaaagagatcaacgaagcgacccaccgctatctgttctggacctccgacgtcagcccaatcggcttctcctggccactggagattgttcaggatttacgccgtctgatctcgctcgataccatgagccagctcggtaaggccagcatgatgatgctgaccagcaaagagaccctgctgccgctcttcgtcgcgctcattctggtagggttcagcgtcagctcgcggcgccatttcaccagcttcctggagcgttccagcgcgcgcgtcggcaaggttacgcaggatcacttctggctcaccctgcgaacggtgttctggtctatactggtggcctcgccgctgccggtactgtggatgacgctgggctacggtctgcagtctgcctggcctttcccgctggccgtggcgattggcgatagcgtcaccgcaacggtgccgctgctgtgggtggtaatgatttgcgccacttttgcccgcccgaacggtctgttcatcgcccactttggctggccgcgcagtcgggttagcaaggcgatgcgctactatctgatgagcatcgggctcattgtgccgcttattatggcgctgattacttttgataatctcaacgatcgcgagttctccgcctcgctgggtcgcctctgctttatgctgatttgcggcgcgctggcgatggtgaccctgagcctgaaacgcgccggcatcccgctgtatctcgataaagaaggcagcggcgacaatatgctgaaccgactgctgtggaatatgctgctcggcgcgccgctggtggcaatgctggcggcggcaatcggctatctcgctacatcgcaggcgctgctcgccaggctcgaaacgtcggtcgccatctggttcctgctgctggtggtttatcacatcattcgccgctggatgttgattcagcgccgtcgcctggcgttcgatcgcgctaagcaccgtcgggcggagatcctcgcccagcgcgcgcgtggcgaagaggacgtccagcataccagcagcccggaaggttcaatggaagccgaggtcagcgaggtcgatctggatgctatcagtacccagtccctgcgtctggtgcgctccctgctgatgctgatcgcgctggtgtcggttatcgtgctatggtcagaaatccactccgcatttggcttcctggagaatatctcgctgtgggacgtgacctccacggtgcagggcgttgagagcctggagccgatcaccctcggcgcggtgctgattgctattctggtgctgattattaccacccagctggtgcgcaacctgcccgctctgctggaactggccatcctccagcacctggaactgacgccgggcaccggctacgccatcaccaccatcaccaagtatctgctgatgctgattggtggtctggtcggtttctcgatgattgggattgagtggtcgaaactgcagtggcttattgccgcgctcggtgtaggtctcggttttggtttgcaggagatcttcgccaacttcatctccggcctgattattctgtttgaaaaaccgatacgcattggcgatacggtcaccattcgcgatctcaccggtagcgtgacgcgcattaatacccgcgccaccaccatcagcgactgggaccgtaaagagattatcgtgccnnnnnnnnnngcaccaccatcagcgactgggaccgtaaagagattatcgtgccgaacaaggcgttcatcaccgaacagttcatcaactggtcgttgtcggattctgtaa

SEQ ID NO: 253113 - DNA, 963 bp, Klebsiella pneumoniae
ttgttaaacgatcttaaactttcactgcaatacattctgcctaaactgtggctcacccgcctcgcaggctggggtgcacgcaagcgggcaggctggctgacaaaactggtcatcgatctgttcgtgaaatattacaaggtcgatatgaaagaggcgcaaaagcctgatactgccagctaccggacctttaacgacttttttgttcgcccgctgcgcgatgacgttcgtccattaaatactgacccgaacgttctggtgatgcccgccgatggcgtcatcagccagctcggcgctattgaagacgataaaattttgcaggccaaaggccacaactacagtctggaagcgctgctggccggtaactaccagatggcggatctgttccgaaacggcagctttgtcactacctatctttccccgcgcgattaccaccgcgtgcacatgccgtgcaacggtattctgcgcgaaatgatctacgtaccgggagatctgttctccgtaaatcatctgaccgcgcaaaacgtgccgaatctgtttgcccgcaacgagcgcgtcatctgcctgttcgatactgagtttggccccatggcgcagatcctggtcggcgccaccatcgtcggcagcatcgaaaccgtgtggtccggtaccgtcacgccgccgcgtgaaggtatcattaagcgctggacctggcctgcgggcgagagcgaaggttccgtcgccctgcttaaaggccaggagatgggccgctttaagctgggttccacggtgattaacctgtttgctccgggtcaggtgaagctggttgagcagttacaaagcctgtcggtaaccaaaataggccagccgttggcgatcgcgcctgaagccgtgacgccggtcgagcccgctccgctggcagccgaagaagtccgcgctgaacacgccgccagtccgctggttgacgataaacaagacgaaggttaa

SEQ ID NO: 253114 - DNA, 546 bp, Klebsiella pneumoniae
atgagtgcagatgaaaacaacctgatttggatcgatcttgaaatgacggggctggatccggagcgcgatcgcatcatcgaaatcgccaccctggtgactgacgcgaatctgaacattctggcggaagggccgacgattgccgtacatcagtcagacgcgcagctggcattaatggatgagtggaacgtgcgtacccataccggtagtggactggtggagcgggtgaaggcgagtacccagggcgatcgtgaggcagaactggcgactatcgaatttctcaaaaagtgggtgccggcgggtaagtcaccgatctgcggcaatagcatcggccaggatcgccgattcttgtttaaatatatgcctgagctggaagcctatttccactatcgctatcttgacgtcagtacgcttaaagagctggctcgtcgctggaagccggaaattctcgacggctttaaaaaacaaggaacgcatcaggcgatggatgatattcgcgaatcggtagcggaactggcttactaccgcgagcacttcatcaagctctaa

SEQ ID NO: 253115 - DNA, 831 bp, Klebsiella pneumoniae
atgactttttccgggctcgctaaaggcgcaaaatcactcaagtttacaggcggatatcgcccgctgacggtcaacaacgatgataaccagggaaataaaatgaaaaaagcgcttaccgtcctgctgctggctacgcttgccacaggaacagcatcggcaacaacgctacattttggaacaacgacggccaacccgccgtttgaaaccgtcagtggcaaaaaccaacccacgggttttgatatcgatttggccaacgcgttgtgcaagcagatgcaggtcgaatgcaaatttactccccagggcttcgatactctcatcccggcgctgcgctttaagaaattcgacgccgtgattgccggtattgaagtgatcccaatgcgagaaaagcaggttgcattcagccatccctatcgccaggagctctccggtgcaatagtcacagcgaaagacgctgcccatacctttgccgatctcaaagataaaaaactcggcgtcgtaaagggcaccattcatcagcactacctgcgtgataaacaaaaagccgtgcacgtgctgccttatgacagcgatgaaagcgccctgaacgcgctgaaagaaggtgtgattagcggagtgatgggcgatcaggagaccttaacgaaatggctcgaggataatcccgaatacgcgattatggacgagcgcgccacagatcccagctactacggtaagcagtacgccattgcggtgcgtaaagatgatcctgaactgctgaataatatcaatgccgctctggatgtcgtcaaagcctcgccggaattccaggcgatggaacagaagtggtttaaatag

SEQ ID NO: 253116 - DNA, 888 bp, Klebsiella pneumoniae; identical to SEQ ID NO: 203102

SEQ ID NO: 253117 - DNA, 1062 bp, Klebsiella pneumoniae; identical to SEQ ID NO: 203105

SEQ ID NO: 253118 - DNA, 813 bp, Klebsiella pneumoniae
gtggctctggccgcggctgatctggatgtagtagccgtggacggcgttgtagccgactttcagggtatcgaggcccagccgctcgcgctcgcggatctccagtttatcgagataatcggtggcgccatcggccagcgcccgccactcgtccagctcttcgctatagcccggggcgatgaccccgccgtcgcggaccagcaccggcggggcgtcgatcaccgcgcgctccagcagttcgcgcagttcggtgaactcgcccattttctcgcgcaatttttgcaccggctgactgtcaacgtcggccagcagctcacgcagcagaggcagttgctgcagggcatgacgcatgcgggcaagatcgcgcggccgggcggtacgcagcgccagacgcgccagaatacgctccagatcgccgacctggcgcagcaccggctgcagctcggtatagcgctcctgcagcgcgccgatggtctgctggcgctccaccagcacggcggtatcgcggaccggcatatgcagccagcgcttgagcatccggctacccatcggcgtcaccgtacagtcgagtaccgaggccagggtgttgtcggtgccgccggccagattctgggtgatctcgaggttacggcgggtggcggcatccataatgatgctgtcctgctggcgttccatggtgatggagcggatgtgcggcagcgaggtacgctgggtgtctttgacatactgcagcaggcagccggcggcgcacaggccgcgcggggcgttttcgacgccgaagccgaccagatcgcgggtgccgaactgcaggtttag

SEQ ID NO: 253119 - DNA, 795 bp, Klebsiella pneumoniae
gtgcggcgcgtcgacgtccagctttttcattacccggacaatcttcttcagctcttccatcaggtgcgatttattttgcaaacgcccggcggtatcggcaatcagtacgtcaacatggcgcgccttcgccgcctgaatggcgtcgaaaattaccgaggcggagtcggcgccggtgtgctgggcgatcaccgggatattattacgctggccccagacctgcagctgttccaccgccgccgcacggaaggtatcccccgccgccagcatcaccgacttaccctgctgttcaaactgacgcgccagcttgccgatggtagtggttttccccaccccgttcacgccgaccatcagaataacaaatggcgttttgccttcaacgttcagcggctcgtctactttggcgagaatctcgcccatctcttctttcagcaggccgtacagcgcttccgcatcgcgcagctgcttacggctggcgccttccgtcaggttggtaatgatcttgcgggtggtttccaccccgacgtcggcgatcagcagctgttcttccagctcttcaaacagatcatcgtcgatcttcttaccgcggaacaggctgataaatccggaaccgagattttgcttcgttttcagcaggctacgtttgaggcgggcgaagaaaccttcttttgtcggtttttcctgctcctgagccagcgcttcaagcggcgcctcgtcctcgggcgccggcaccactaccgccgcctcttctgccgcttcggccgccagcgcctgcgcttccagctcttcatcgcttaa

SEQ ID NO: 253120 - DNA, 771 bp, Klebsiella pneumoniae
ttgaatgttgattatcagattgacgggccgcaagacgcgccggtcatcgttctctctaactcgctgggtaccacccgggcgatgtggcagccgcagatcgaggcgttgacgcagcattttcgcgtgctgcgctacgatacccacggtcatggcgccacgcgtaaaaatggtaaagtgacgctggcgcagctcggcgaagatgtggttgcgctgctcgatcatcttaatattgccaaagcctggttttgcggaatttccatgggcggtctgaccggtctgtggctgggacgctttgctccggaacgtttttacgggctggtcgtcgccaacaccgccgcgcgtattggtgaccaggcaagctggctgtcgcgcgcccgcgcggtgcgtcaggaaggtatggaagtggtggccgcaggcgcggcggatcgctggtttacccacgcgtttcgtcagaagacgccggaagtggtggcagcgctctgtcaccagttgacccatatcgatgcggaaggctatgcggtctgctgtgaagcgctggccgccgccgatctgcgcgctgaggtcgggcagattgccgttccggtgctgatcgttgccggtgaaagtgaccctgtcacgacagtggccgatgcgaactttctgcatcagcagatcgcggcctctgaggtagtggtgctggcggcatcgcatttatcgaatatcgaagcgccgcgggcgtttagctcggcgctgctgggctttattgagggggaacaacagcatggacgataa

SEQ ID NO: 253121 - DNA, 1353 bp, Klebsiella pneumoniae
atgagtttgttgaccccgatgctgcgtaccagcccgctgacagactggttcagcgatgtacagcgggtgcaggggatgctggactttgaggccgctctggttcgcgccgaggtcgaatgcggcctcgtgccgcagacggcgctcaatcccatcatcgagagctgccggcacgaaaaaatcgacttttccgcgctggggcaggccgccgccagcgccgggaatctggcgatcccgctggtcaaacagctgaccgctcgggtcaaagagcggaatgaggcggcagcgcgctacgtacactggggggccaccagccaggatgctatcgataccggttttattctacagctgcgcggcgcgctggcggaaacggaatctctgttacagcgtctgctcgacgcattagcccgtcaggcggagcgccatcaggatacggtgatgcctggccgtacctggatgcagcatgcgctgccggtcactttcggcctgaagcttgccgggacgctggatgcgctgctgcgctggcaggtgcgtctgcgagagatgcgggcaagggtgctggcgctgcagtttggcggcgcagcgggcaccctggattccctaaaaacgcaggcgccgccgatcgccgccgcgctggcgaaagcgctcgacctgcagcttccggacgcgccctggcacagccagcgcgaccggctgctggaagtcggggcatggtacgcaggcgtctgcggtacgctgggtaaattcgcgaatgatttttctctactgatgcaaaccgaagtggcagaggtgggtgaaccggttgccgaaggtcgcggcggttcgtcaaccatgccgcacaaacgtaacccgatctcctgcgccgctattttgaccgccgctcagcgaacgccgggcctggtggcgacgctgtatgctggccagatccagcagcatgagcgggcgttgggcggctggcaggcggaatgggaaacgctgccggagctcatcaccctcgtcggcggcgcgctgacgcagagcgaggcgctggtcagcgacatgcaggtcttcgcgcacaagatgcgcgccgaccttgagatgacccacggcctgattatggctgaggccgttaccctggcgctggcggaatttatcggtaaagccgaggcccatcaccgggttgaagcgctgtgtcgtcaggcgctggatacgtctcgctcattgctgagcgtgctggaaaacgatccgctggtcagcgagcatctttccgccagccgcttaacccaactgctggagccggcaacggcgaccggcagctcagcactcttcgtgcgccaggttgtggcgcgatataaggagcaacgtcttgaatgttga

SEQ ID NO: 253122 - DNA, 1203 bp, Klebsiella pneumoniae
atgaatcaggcatttatctgtgatgcggtgcgtacgccgtttggtcgctttggcggtactcttgccaccgtacgcgccgacgatctggcggcactgccgctcaaggcgctactggagcgcaacccgggcctcgatccggcgcgcattgatgatgtgatttatggctgcgctaaccaggcgggtgaagataaccgcaacgtcgcgcggatggcgctgctgctggctggcttgccggaaagcgtgccgggcagtaccgtcaatcgcctgtgcggttccagcctcgatgcgatcggcatcgcagcgcgcgcgattaaaagcggcgaaactcagttgatggtcgccggcggcgtggagagcatgtcgcgggcgccgtttgtgatgggcaaggccgaaagcgcctttagccgcacgatgcagatggaagataccaccatcggctggcgctttatcaacccgcagatgaaagcgctgtacggcgtggattcgatgccggaaacggcggaaaacgtggccggtgatttcgccatttctcgtgccgatcaggatgcgtttgcgctgcgcagccagctgcgcacggcggcggcgcaggaagcggggcgatttgccgacgagctgatcgccgtctcggtgccgcagcgtaagggtgaaccgctactctttagccgcgacgagcacccgcgcagcaccacggcggaggcgctggccaggctgcgcggcgtggtgcgcgccgacggtacggtgacggcaggcaacgcctccggagttaacgatggcgcctgtgcgctgctgttagccagcgagcaggcgctgaccgccaatgatttacagccgctggcgcgcgtagtgggcgtcgcgacggcaggcgttgcgccgcgaattatgggatttggtccggcgccggcggtgcgtaaagtgctggcgcaaaccgggttaacgcttgggcagatggacgtcattgaactgaatgaagcctttgccgctcaggcgctggcggtcacgcgcgatctgggtttgcccgacgatgcggcgcacgtcaatcctaacggcggcgccattgccctcggtcatccgctgggcgcctccggcggtcgtctggcaatgaccgcagcgtatcaactgcgtcgtaccggcgggcgctatgcgctgtgcactatgtgtatcggcgttggtcaggggatcgcgctgataattgaacgcgtttaa

SEQ ID NO: 253123 - DNA, 657 bp, Klebsiella pneumoniae
atgcaaaaactgactcgcgatgagatggcccagcgcgtggctcgcgatatacctgaaggcgcttatgtcaatctggggatcggcttacctacccgcattgctaactatcttcccgctgataaagaaatctttctgcacagcgaaaatggcctgctggggatggggccgaaaccgctaccgggggaagaggacccggagctgattaacgccggaaaagagtatgtgactttgcttgaggggggctgctatttccatcacggcgactccttcgccatgatgcgcggcggtcatctcgatatctgcgtactcggcgcttaccaggtctccgccagcggcgatctggcgaactggagtaccggcgcgcccgacgcgatacctgccgttggcggggcgatggatctggccattggcgctcgtcaggtcttcgtgatgatggatcacctgacccgcgacggtgaatgcaagctggtagagcactgcacctatccgctgaccggcgtcggctgcgtaagccgcatctataccgacctggcggtcatcgatatcagcgaaagcggcccggtggtacgggaaatctttaacggcctctcttttgaggaactgcagcgcatcactccggtgacgttgacttttgcacaactggcggaaagcgcgtaa

SEQ ID NO: 253124 - DNA, 807 bp, Klebsiella pneumoniae; identical to SEQ ID NO: 174374

SEQ ID NO: 253125 - DNA, 564 bp, Klebsiella pneumoniae
atgaaccttgacgacaaatccctatttcttggcgccatggaggacgttcagcctctgaaacgcaacaacgatgttcactggcatcccgagcggaaaacccgcgtcgtacagcgggttgacaccctgcagctggataactttttgaccaccggttatctcgatatcgtgccgctggccaccgcgctggagtttaaacgcgaagggctgcaaagcggcgtgctggagaagctccggcgcggcaaatatggccagcaggcgagccttaatctgctgcgtcagccggtggaaaagtgccgacagatgttatttgcttttgtggttcaggcgcaaaaagaggggctgaggaatctgctgatcgttcatggcaaagggcgcgacgacaacgcgcacgccaatattatccgtagctacctggcgcgctggctggtggagctaccggaagtccaggcgttctgcgcggcgctaccgcaccacggcggcagcggcgcctgttacgtggctctacgaaaatcgcccgaggctaagctggagaaccgggagcgccacgccaagcgcagccgctag

SEQ ID NO: 253126 - DNA, 909 bp, Klebsiella pneumoniae
atgtcatttcagattaaatttcatcagattcgcgcctttgttgaggtcgcgcgtgaaggcagtattcgcggcgccagtcgggcgttggcgatttcgcagccggcattaactaaagcgattaaagagctggaagaagggctctccgcacagctgtttgtgcgccgtagccagggggtggcgctgactgaaaacggcgaaagcttttatcaacatgcgagcctgattctggaagagctacgggcggcgcaggatgagttgctgcagcgccagggagaaaaggccgggcagattaatatcggccttggcgccagcgtagcgcgatcgctgatgccttcggtcatttgccgttttcatcagcagcatccgctggtgaaggtgcggattatggaaggtcagctgctggcgatgattaatgaactgcggcagggtgagctggacttcactatcaatacttactatcccggtccgtacgatcatgaattcagttttgagaagctatttgagaaaccctttgcggtattcgcccgcgccggtcacccggcggcaaaagcgacttcactcaaggcgttgctcgaacatcactggacgatgccgacgccgcgtggcagctatttcaaacagttacaggaaatgtttaaccaggccggactggcgccgaaagtggatatcgtttgcgagactttctcttcgtgcatcagtctggtggtgaaaagcgattttctcagcattctgccggtagaactgggtaacgacccgatgatggcggataagctggtgatgatccccatctgcgaagcattacccaaagccacctactatctgattcagcgccgcgatatgcggcaaacgcctttgacggcatcattaatcaccctgtttcgtcgccaaagccgtcaactgtttccctaa

SEQ ID NO: 253127 - DNA, 1446 bp, Klebsiella pneumoniae
atggaacaggtttatcaatttgtcgatgacattattgaggggcggcgcaacgatttttgcgcgattgccgatgatatctgggatcatccggaaacccgctttcaggagttctggtccgccgcgcgtttggccgatgcgctggaagcggaaggttttcaattgacccgcaatgcgggcgggatccccaacgcctttatcgccagttttggtgaaggccaaccggtaattgccctgctcggcgaatttgacgccctggcggggctcagccagcaggcttacagcgcagcgcccgcatctccaacgccgggggaaaacggccacgggtgcgggcataacctgcttggtacggcggctttcgccgcggcggtcgccgccaggaactggctgctgcaacaaggcggcgtcggcacgcttcgtttctacggatgtcccggcgaggaaggcggttccgggaagacctttatggtccgcgaggggttattcgatgacatcgacgccgccctgacctggcacccggaagcctgggccgggatgttcagcaccagtacccttgccaacattcaggcggcatggcggtttaccggcaccgcggcgcacgcggcaaactctccgcatcttggccgcagcgcgctggatgccgtgacgctgatgaccaccggcagcaacttccttaacgaacatattatcgaaaaggcgcgggtgcactacgccatcaccgataccggcggcgtctctcctaacgttgttcaggcgcaggcggaagtgctgtatctcattcgcgccccggaaatggccgacgcacagcaaatcttcgcccggatcgaaaaaatcgcccagggcgccgcgctgatgaccgagaccagcgtcagttgccgcttcgaaaaagcctgttccagctatctccccaaccgcaccctggaagcggcgatgtatcaggcggtatgccattacggcacgccgcactggagcgaggaagagcgcgctttcgccgacgaaattcgcgcgaccttaagcgctaacgatattcataacagcctgaaaaacatcgccgataccagcggagacgaggggaaagcattcgcccgccgccaccgcgagacgatccttatcgatgaagtggcgccgtgggcggctaccgataacatccttgcgggctctaccgacgtcggcgacgtaagctggaaagctcccgtagcccaatgcttcagcccctgctttgccgtcgggacgccgctgcatacctggcaactggtgagccagggcagaacctccatcgctcacaaagggatgcttctggcggggaaaatactggcggcaacggccattcgtttgttcagcgacaggtcgctactgactaccagtcggcaggaactggcacaggttttagccgaaaggccctaccggtgtccgatcccgcaggacgttaaaccttcgattttaaaataa

SEQ ID NO: 253128 - DNA, 1527 bp, Klebsiella pneumoniae
atgagtatgtcatccataccgtcgccttcccccaccggtaagctctatggctgggttgaaaaaattggtaataaggtcccgcatccgtttttactgtttatctatctgatcgtggtattaatggccgccaccgccatcctgtcggcgctgaacgtcagcgtccagaaccccaccgacggctcgcgagtggtggtgaaaaatctgctcagcattgaaggattacattggtttttgccgaacgtgattaaaaacttcagcggtttcgcgccgctgggagccattctggctctggttctgggggctggatttgctgaacgagtgggcctgctgccttcgctgatggcaaaaatgtcatcacacgttagcgcccgttacgccagctatatggtgctgtttatcgccttctttagccatatctcttccgatgccgcgctggtgattatgccgccgttaggcgccctgatgttcctcgccgtcggccgccacccggttgccgggctgctggcggcaatcgccggggtcggctgcggcttcacggccaacctgctcatcgtcaccaccgatgtcctgctctcaggaatcagtaccgaagcggccaaaacccttgacgcctcgctgcacgtcagcgtgatcgataactggtactttatggcaacttcggtgatcgttctcactctggtcggtggattgattaccgataagctggtcgagccgcgcttaggtcaatggcaaggcaaaagcgatgaaacgctgcaatcgttaacgccagaacagcgcttcggcctgcgcgtggccggtattgccgcgctgttattcatggcggtcatcgcgctgatggtcgtgccggaaaacggtattttgcgtgaccccattaagcataccgtgatgccttcgccatttataaaagggatcgtcccgctcatcatctttttcttcttcgtcgtctcactggcttacggcattgccaccggcaaaattcgccgccaggccgatctgcctccgctgatgattgaacccatgaaagagatggcaggttttatcgtgatggtcttcccgttggcccagttcgtcgccatgtttaactggagcaatatgggaaaatttatggccgtcggtttaacggacctgctggagagcgcgggaatgagcggcgtgccggcgttcgtcggcctggcgctgctatccgcctttttgtgtatgttcatcgccagcggttcggcaatctggtcgattctggcgccgatcttcgtgccgatgtttatgctgctgggctttcacccggcattcgcgcagattctgtttcgtattgccgactcatcggtgctgccgctggcgccggtatcgccgtttgtgccgctatttctcggcttcttacagcgctaccggcccgaggctaaactggggacctactactcgctggtcttgccttatccactcattttccttgtcgtctggctactgttgctggtggtctggtatctcgcgggactccctatcggaccgggtatttatccgcggttgccttaa

SEQ ID NO: 253129 - DNA, 516 bp, Klebsiella pneumoniae; identical to SEQ ID NO: 174380

SEQ ID NO: 253130 - DNA, 753 bp, Klebsiella pneumoniae
atgatcccggaaaagcgaattatacgacgcattcagtctggcggttgtgcaatccattgccaggattgcagcattagccagctttgcatcccttttactctgaacgagcatgagcttgatcagcttgataacattatcgagcggaaaaagcctatccagaaaggacagaccttgttcaaagccggtgatgagctgaaatcgctgtatgcaattcgttctggcaccattaaaagctacaccattaccgaacagggtgatgagcagatcaccggtttccatcttgcgggcgatctggtcggctttgacgctatcggcaccggccaccacccgagctttgctcaggcgctggaaacctcaatggtctgcgaaattccgttcgaaacgctggatgacctttcaggcaagatgccgaatctgcgtcagcagatgatgcgtctgatgagcggtgagatcaaaggcgatcaggatatgatcctgctgctttctaaaaagaacgcagaagagcgcctggcggccttcatctacaacctgtctcgccgttttgcacagcgtggtttctccccgcgtgagttccgcctcaccatgacgcgcggcgatatcggcaactatctgggcctgacggttgaaaccatcagccgcctgctgggtcgtttccagaaaagcggtatgctggcggttaaaggaaaatacatcaccatcgaaaacagcgacctgctggcgcagcttgctggtcaggcccgcaacgtcgcctga

SEQ ID NO: 253131 - DNA, 951 bp, Klebsiella pneumoniae
atggcgaagtatcagaacatgctggtagtaatcgaccccaatcaggacgaccagcctgcattgcggcgtgcggtgtatctgcaccaacggattggtggacgcatcaaagcctttttgccgatctatgatttttcctatgaaatgaccacactgctctccccggacgagcgtaccgctatgcgccagggcgtaatcgggcagcgtaccgcctggattcgcgagcaggccaaattttatattgagtccggcgtacccattgacatcaaagtggtgtggcataaccgccccttcgaagccattattcaggaaatcataagcgagaagcatgatttggttctgaagatggcgcatcagcacgacaagctggaagcggtgattttcacgcctacggactggcatctgctgcgcaaatgtccgtgcccggtctggatggttaaagatcagccgtggccggaaggcggcaaagcgctggtggcggttaatctcgccagtgaagagaactaccacaacgcgctcaatgaaaagctggtaagagaaaccattgagctggcggaacaggttaaccatactgaggtccatctggtgggcgcctatccggttacgcctatcaatattgccattgagctaccggattttgaccccagcgtctacaacgacgccattcgcggccagcacctgctggccatgaaagcgctgcggcagaaattcggcatcgatgaaaaccgtactcatgttgaaaaagggttacctgaagaggtcattccagacctgtcggagcatctccaggcggggatcgtggtgctgggtacgattggccgtaccgggctttcagcggccttcctcggcaatactgctgaacaggtaatcgaccacctgcgctgcgatctgctggcgctgaaaccggatcagtatcagacgccggttgagcttgatgacgaagaagacgattaa

SEQ ID NO: 253132 - DNA, 189 bp, Klebsiella pneumoniae
atggataccgagttaacccccacgcaactggctatcgaatttctgcgtcgtgaccccgctgcactaacccccgcgcagtatctgaaaaagctgaaactactggaacttgagtttgctgatttgatggcgctctcatccatggagcttaaagaagagatcgatcacgcctggcgtttaggtatccactaa

SEQ ID NO: 253133 - DNA, 1389 bp, Klebsiella pneumoniae
atgtctggtggattagttacagctgcatacattgttgccgcgattctgtttatttttagcctggcggggctttccaaacacgaaacctcccagcagggcaactactacggtattgccgggatggcgattgcgctggtggcgaccattctggggccggacagcagcaacgtcgcgtggatcctgctggcgatggtcatcggcggcgctatcggtattcgtctggcgaagaaagtcgaaatgaccgagatgccggagctggtggcgattctgcacagcttcgttggcctggcggcggtgctggttggctttaacagctatctgcagcacgaaaccggtatggaacagattctggtcaatattcatctgaccgaagtgttcctcggcatcttcatcggtgcggtcacctttacgggttccgtggttgcctttggcaagctgtgcggcaagatgtcctctaagccgctgatgctgccgaaccgccacaagctgaacctggcggcgctggtcgtatccttcctgctgctgatcgtcttcgtgcgtaccgacagcattggcatgcaggtgctgtgcctgctggtgatgaccgtcatcgcgctggcctttggctggcaccttgtggcctccattggcggcgcggatatgccggtggtggtgtcaatgctgaactcctactccggttgggcggcggcggcggcgggctttatgctcagcaacgacctgctgattgtcactggtgcgctggtgggttcttccggtgcgattctgtcttatatcatgtgtaaggcgatgaaccgttcgttcttcagcgttattgccggtggttttggttctgacggtacggcgtccacaggagatgaagaagtgggcgagcatcgcgaaatcagcgctgaagaaaccgctgagatgctgaaaagttcccagtcggtcattatcactccgggctacggcatggcggttgcgcaggcccagtatccggtagcggaaatcaccgaacgactgcgcgcgcgcggaatcaaagtccggtttggtattcatccggtcgccggacgtctgccgggccatatgaacgtcctgctggcggaagcgaaagtcccgtatgacatcgtgctggaaatggacgagatcaacgatgatttctccgacactgacaccgtgctggttatcggcgctaatgataccgttaacccggcggcgcaggacgatccgggcagcccaatcgccggtatgccggtgctggaagtgtggaaagcgcagaacgtgattgtattcaagcgttcaatgaacaccggctatgcaggtgtacagaacccgctgttcttcaaagagaacacccacatgctgtttggcgatgccaaagccagcgtcgatgcgattctgaaagcgctgtag

SEQ ID NO: 253134 - DNA, 1530 bp, Klebsiella pneumoniae
atgcgtattggtgtaccaagagagagactcgccctggaaacccgggccgccgcaacgccgaaaacggtggagcagctgctgaaactcgggttcagcgtcgcggtagaaagcggcgccggtaaactggccagtttcgacgacgaagccttcgttcaggctggagcggagatcgtgagcggtaatgacgtgtggcagtctgacgtcattctgaaagttaacgcccctgatgacgatgaaattctgctgctgaatccgggcacgacgctgatcagcttcatctggcccgcgcaaaatccgcagctgatggaaaaactggcggcgcggaatattaacgtgatggcgatggattcggtgccgcgtatttcgcgcgcgcagtcgctggatgcgttaagttcgatggccaacatcgccggctaccgcgcgattgttgaggccgcccatgagtttggtcgcttctttaccgggcagattaccgcagcaggtaaggttcctcctgcgaaggtaatggtcatcggcgcaggggttgccgggctcgcggccatcggtgcggcgaacagcctgggcgcgattgtccgcgcgttcgatacccgcccggaagtcaaagagcaggtgcagagtatgggcgccgagttccttgagctggattttaaagaggaggcgggcagcggcgacggttatgccaaagtcatgtctgaagcctttatcaaagccgagatggcgctctttgccgcgcaggccaaagatgttgatattattgtcaccaccgccctgattccgggcaaaccggcgccgaagttgatcacccgcgaaatggttgactccatgaaaccgggcagcgtagtggtggatctggcatcacaaaacggcggcaactgcgaatacaccgtaccgggcgaagtggtcaccaccgctaacggcgtgaagatcatcggttataccgatctgccaggacgtctgccgacgcagtcgtcgcagctgtacggcactaacctggttaacctgcttaaactgctgtgtaaagagaaagacggcaatgtcgttatcgattttgatgatgtcgttatccgcggcgttaccgtggttcgcgagggtgaaatcacctggcccgctccgcccattcaggtttctgctcagccgcaggcggcagcgaaaaaggttgaagcgccaaaagcagaggagaaaccgagctcgccgctgcgcaagtatgcgctgatggcgctggcgattattctgttcggctggctggcaagcgtcgcgccgaaagagtttctcggccactttaccgtcttcgcgctctcctgcgtggtcggttattacgtagtctggaacgtctcccatgcgctgcatacgccgctgatgtcggtcaccaacgccatctccggcattatcgtcgtcggggcattattgcagataggccacggcggctgggtcagctttctgagctttatcgcggtgctgatcgccagcattaatatttttggtggtttcaccgtcactcagcgcatgctgaaaatgttccgcaaaggataa

SEQ ID NO: 253135 - DNA, 1383 bp, Klebsiella pneumoniae
atggaaaagaaactgggccttagcgccctgaccgcgctggtactcagctcgatgctgggcgcgggtgtattcagtctgccgcaaaacatggcagccgtcgccagtccttccgcgctgctgattggctggggcattaccggcgtggggatcctgttcctcgccttcgctatgctgctgcttacccgcatccgccccgacctcgatggcggcatatttacctacgcccgcgaaggcttcggtgaactgattggtttctgctccgcctggggctactggctgtgcgcggttatcgcgaatgtttcctatctggttatcgtgttctcggcgctaagcttttttaccgatactcccgagctacgcctgttcggcgatggcaacacctggcaagctatcgtcggcgcatccgcgctgctgtggattgtccatttcctggtgctgcgcggcgtccagacggcggcgggtatcaatctcgccgcgacgcttgccaagctgctgccgctcggcgcatttgtcgcgctggccgcctttgcgtttcgcatggagaccttccggattgattttagcggtctggcgctgggcgtgccggtatgggagcaggtgaaaaacaccatgctgatcaccctgtgggtattcatcggcgtggaaggcgcggtcgtggtttccgctcgcgcgcgtaataaacgggatgtcggacgcgcaacgctgctggcggttctctccgcgctggcggtctacctgctggtgacgcttctctctttaggcgtcgtaccgcggagcgagctggcggaaatacgcaatccgtcaatggccgggctgatggtgcaaatgatgggcccgtggggcgagatcgtgatcgctgccgggctgattatctccgtctgcggcgcttacctgagctggacgataatggcggcggaagtcccctacctggctgcaacccataaagcctttccgcgtctgttcgcgcgcaccaacaaaaacaatgcgccgtcgtcttcgctgtggctcaccaatatcagcgtgcaggcttcactggtattgatttggttgaccggctcggattacaacacgctgctgacgatcgcctcagagatgattctggtcccttattttctggtcggcgcatttctgctgaagattgcccggcgtccgctgcacaaggcggtaggcgtcggagcctgcatttatggcttatggttattatatgcgtccggccctgtgcatttattgttgtcagtgatactttacgctccgggtcttctggtgttcctgtatgcccgtcgtacacaccagcacgatcgcccgcttaaacgccgtgacctggcattaattggttttttgctggttgccgccgtaccggcaacgtggatgttggtagggtaa

SEQ ID NO: 253136 - DNA, 726 bp, Klebsiella pneumoniae; identical to SEQ ID NO: 174388

SEQ ID NO: 253137 - DNA, 336 bp, Klebsiella pneumoniae
atggggctgttgataaaagcgctgctcggcgcgctggtcgtcgtgttgatcggcgtactttctaaaacgaagaattactatatcgccggcttgattccgctctttcccactttcgccctgattgcgcactatatcgttgccagcgagcgagggatcgaggcgctgcgaaccaccatcgtattcgggatgtggtcgatcattccgtactttatctatttgctttcgctatggtatttcaccggcatcatgcgcctgccgtttgctctggcaggcgcggtggtgtgctggagcctgtgcgcgtggctgttgattatcggctggagccgttttcactag

SEQ ID NO: 253138 - DNA, 348 bp, Klebsiella pneumoniae
atggagtggaatattgaaaatagtcttgtatgtcctttaactggaacaggattttcagttgcggccagtgccagaaatctgaaattaattatatggtataatggagattattttttgaacatcggttcggttattaacatcacgcaagatgacgtcttcataaacggtgagcccggcgacttacaggttattcatgcttttccctatagcgaaaagctatggtcaacgctgacaaagtttatccagtgccccggcaatcaaaatccaacgctgctaatttgcaaccgaagaagcatctgcaaattcgtcctctgcccctacggtgccaggcaaaagagcatggaataa

SEQ ID NO: 253139 - DNA, 720 bp, Klebsiella pneumoniae
atgaataaaattgttttcgttgaggatgatgccgaagtaggcgcgctgattgcggcctacctcgggaaacatgatatggacgtcgtggttgagcctcgcggtgaccgtgccgaagaggttatcgcgcgcgaaaagcccgatctggtgctgctggatatcatgctgcctggtaaagatgggatgacgttgtgccgggatttacgcggccagtggcaagggcccatcgtgctgcttacgtcactggatagcgatatgaaccatatcctgtcgctcgaaatgggcgccagcgattatattctgaaaacaacgccacccgcggtgctgttagcccgactgcgtctgcatttgcgccagcatgtccccccccaggacagtagcggcgtcccctcctcgctgacgccgcataaagcgatcgcttttggttcgctgagtatcgatccggtcaatcgtcaggttatgctcagcggggaaaacgtcgcgttgtccaccgcggatttcgatctgttatgggagctggcgacccacgcaggacaaattatggatcgggatgcgctattaaaaaacctgcgcggcgtaagctacgatggtatggaccgcagcgtcgacgtcgccatttcgcgtttgcgcaaaaagcttctcgacaacgcgactgagccttatcgcatcaaaacggtacgcaataaaggctatttattcgccccgcacgcgtgggacaattaa

SEQ ID NO: 253140 - DNA, 933 bp, Klebsiella pneumoniae
atggccagctatgacctcgttgaacgtctgaacgacacctttcgccagctcgagcgtgaactgcaggcgcttaaacaggccctgagccagtgccgtctgctggctgcgcgcgtctttgagctgccgccggtcagcaaagatgccgaacaccagccgctggagaacatcaacgtggttcagcacaccggtaaacccgcgctggagatggcgctcaaacactatagccacctgtttatccagcagcagtcggaaacccgcagcagtaaggctgccgtgcgtttgcccggcgcgatctgcctgcgaactgaggcctgcgagcaggcagaactattacgcaagatcgcccatatcaacgttcttaaagcgaccttcgagaagattatcaccgtcgattccggtcttcccgctaccgcacgatttgagtgggtccatcgccacctgccgggactgatcacgctgagcgcctatcgcacgctcaccccgttaattgacccgagcactatccgcttcggctgggccaataagcatgtgattaaaaatctcacccgcgaccaggttctcatgcaactggaaaaaagtcttcagtcgccccgcgcggttccgccgtggacgcgcgaacagtggcaaagcaagctggagcgagagtaccaggatattgccgccctgccgcagcgggcgaagctgaagataaagaggccggtaaaggttcagcctatcgccagggtgtggtatagcgggcagcaaaaacaggtgcaatacgcctgtccagggccgatgatcgcgctgatatccggcaagcagggcgttagcgtgccggatatcggggagcttctgaactatgacgccgggaacgtgcagtatcgttataaaccgcaggcgcaatcgctcaggctaatgattccgcgactgcacctgtggctggctagcgaatag

SEQ ID NO: 253141 - DNA, 1401 bp, Klebsiella pneumoniae
atgacaacgcatcgcagtgaaaaagactctatgggcgcaatcgatgtgcctgccgataggctttggggcgcgcagactcagcgctcgctggaacatttccgcatctcgactgaaaaaatgccggtcgagcttattcatgcgctggcgctgaccaagcgtgcggcggcgaaggtgaataacgatctcggtcttctgagcgcagaaaaagcgcaggtgattattcaggctgcggatgaagtgctggcaggcaagcatccggacgagtttccgctggcaatctggcaaaccggctccggtacgcaaagcaacatgaatatgaatgaggtgctggctaatcgtgcgagtgaactgctgggcggggtacgcgggatggagcgtaaggtgcatcctaacgatgatgttaacaagagccagagctctaacgacgttttcccgacggcgatgcacgtagcggcgatgattgcgcttcgggtaaagctgatcccgcagctcaacattctgaagcaaacgcttaatgataaatccctggccttcaacgatattgtcaaaatcggccgcacccacctgcaggatgcgacgccgctgacgctcggccaggagatctcaggatgggtcgccatgctcgagcataacctccggcatattgaccatagcttgccccatctggcggaactggcgctgggcggcacggcggtgggaaccgggcttaatacccatccggaatacgcggtacgcgtcgccgccgagctggcggccctgagcggccaaccgtttgtgaccgcgccgaacaagtttgaagcgctggcgaccgttgatgcgctggtgcatgcccacggcgcgctgaaagggctggccgcttcgctgatgaaaatcgccaacgatgtgcgctggctggcctccggtccgcgctgcggcatcggcgaaattgcgatcccggaaaatgaaccggggtcgtcgattatgccgggcaaggttaacccgacccagtgcgaggccctcactatggtctgctgtcaggtgatgggtaacgatgtcgcggtaaacatcggcggcgcttcgggcaactttgagctcaacgtttaccgcccgatggtgatccacaatttcctgcaatcggtgcggctgctggctgatgggatggcgagctttaatgagcactgcgcgtcaggcattgaacctaaccgcgagcgcatcagccagttgctcaatgagtcgctgatgctggttaccgccttgaatacccatattggctacgacaaagcggcggaaattgccaaaaaggcgcataaagaagggttaacgctcaaggcctccgcgttggcgctcggctacctgacggaagaggaatttgaccgctgggtgcgccctgaagagatggtaggcagtatggctattcgctag

SEQ ID NO: 253142 - DNA, 954 bp, Klebsiella pneumoniae
gtgattggcggcacgtcggcggagtctactctgaaaaccgttaagctggcctcaacgaagtattacgatggtctgccgaccgagggcaacgagcacggccaagctttccgcgatattcagctcgaaaacgagctgttgctggaagcgcagaaccttggcctcggtgcgcagtttggcggtaaatatttcgcccacgatattcgcgtcatccgcctgccgcgccacggcgcctcctgtccggtgggcatgggcgtttcctgctccgcggatcgcaacatcaaagcgaagatcaaccgcgaggggatctggattgagaaactggagagcaatccgggcaagtatattcccgagcatctgcgtcaggccggcgagggagaagcggttaaggtcaatctgaaccagccgatgagcgatattctggcgctgctgtcgcagtacccggtgtcgacccgcctgtcgctgagcggtacgattatcgtggcgcgcgatatcgcccacgccaggctgaaagagctcatcgataatggcgaggaattgccgcagtacgtcaaggaccacccgatctactacgcgggcccggcgaaaacccctgacggctacgcttccggttctcttggcccgaccaccgcaggccgtatggactcctacgtcgatctgctgcaggcgcatggagcgagtaaaatcatgttagccaaaggtaaccgtagccagcaggtgaccgacgcctgtcacaagcacggcggtttctacctcggcagcatcggcggtccggcggcggtactggcgcagcagagcatccgtagtctggagtgcgtggcctggccggagctggggatggaggctatctggaaaattgaagtggaagacttcccggcgtttatcctcgtggatgataagggcaatgacttcttccagcagatccagagttcgcagtgcgcccgctgcgtgaaataa

SEQ ID NO: 253143 - DNA, 708 bp, Klebsiella pneumoniae
atgtcgaataaaccctttgtatatcaggatccttttccactgaaaaaggacgataccgagtattacctcctcagcagtgattacgtctccgtcgccgaattcgccggccaggaagttctgaaagttgaacctcaggcgctaactttactggcacagcacgctttccacgacgcctcctttatgcttcgcccggctcaccagcagcaggtcgccgatattctcaacgacccggaagccagcgacaacgataaatacgtggcgctacagttcttgcgcaactcggatattgccgccaaaggcgtgctgccgacctgccaggacaccggtaccgcaattatcaccggcaagaaaggtcagcgcgtgtggaccggcggcggcgatgaagccgcgctggcgcagggcgtgtacaacacctatatccaggataacctgcgctattcgcagaacgcgccgctggatatgtataaagaggtcaacaccggcactaacctgcctgcgcaaatcgacctctacgctaccgacggcgaggagtacaaattcctctgcatcgccaaaggcggcggctcggctaacaaaacctatctgtatcaggaaaccaaggcgttaattactccggcgaagctgaaaaattacctcgtcgagaagatgcgcacgctggggaccgcggcctgcccgccgtaccatattgcttccatattgcttttgtga

SEQ ID NO: 253144 - DNA, 1179 bp, Klebsiella pneumoniae
atgcaaaaactcatcaactcagtgcaaaattacgcctggggaagtcataccgccttaaccgaactttatggcattgctaacccaaacaacctgccgatggcggagctgtggatgggcgcgcatccgaagagcagctcgcaaattctcgatgacgccggaacgccgcgttctctgcgcgatgcaatcgacagcgataaaacgaccctgcttggcgccaaagttgccgagcgttttggtgaactgccgttcctgtttaaagtgctgtgcgccgcccagccgctctctattcaggttcacccgaacaaacgggcctcggaaatcgggtttgccaaagagaatgccgccgggatcccgcttgatgccgccgaacgtaactataaagatccgaaccacaagccggagctggttttcgcgttaacgccgttccttgccatgaacgccttccgcgagttttccgaaatcgtgaagctgctgcagccggtagctgaagcacatccggcaatagcgcagttcctggcgcagcctgacgccgcccatctgagccagctgtttgccagcctgctgaacatgaaaggcgacgaaaaagcgcacgccctgagcgtactgcagagagcgctggacagcgagcagggagaaccgtggcagactatccgcctgatcgccgagttctatccggacgatagcggccttttctctccgctactgctcaacgtggtcaagctgaatcccggcgaggcgatgttcctgtttgcggaaacgccgcacgcctacctgcagggcgtggcgctggaggtgatggccaactccgataacgtcctgcgcgcgggattgacgccgaagtacattgatattccggagctggtggcaaacgtcaaatttgaacccaaacccgctggcgaactcctgacccagccggtcattcacggcgcggagctggacttccccatcccggttgacgattttgctttctcgctgcacgacctttcagcgcaggcgtcaaccatcgcccaggatagcgcggcgatcctgttctgcgtcgagggtgaggcgacgatcgtgaaaggcgaacagcgcctgacgctgaagccgggcgagtcggctttcgtggcgcacaacgaatcaccggtacaggtcagcggcagcggtcgcgtggcgcgcgtctttaataaggtccagtaa

SEQ ID NO: 253145 - DNA, 1548 bp, Klebsiella pneumoniae
atgaaaaaatcgctggtcgcagcaggagttatcatcgcgctgggcgtcgtctggacgggcggcgcgtggtacacagggaagcagctggaaagccgcattgccgatatggtgcagcaggcgaatgctcagctgcaaagcagcgcgccgcaggctggcgtagagctcacctatcaggactatcagcgcggtctgttcagcagccgtttacaactggtcctgaaacccatcgccggcaaagcgccccgctggctggccgccggacagtcgctggtgtttgacgaagttgtcgatcacggccccttcccgctggcttcactgaaatcctttaacctcgccccggcgatggcatccgtcaaaaccaccttagtgaacaacgaggccagcaagtcgctgtttgacattgcaaaaggcgaaacgccgtttactatcgatacccgcatcgcctacagcggcgacaaccagtccgctatcgtgctgaaaccgcttgattacgcgaaagacgacgagaaagtcacttttagcggcggccagttccagcttaacgccgatcgagagggaaaaaccctcagcctgagcggcgaagcgggcagcgggcaaattaacgcggtcaacgaatacaatcagaaggtacagctcacctttaataatctgaaaaccgacggttccaccgaaatggccagcttcaacgagcgtattggcaagcaggccatctcgctggaaaaactggcgattggcgttgaaggaaaagagctggcgctgtttgaagggatgaaaatcgacggcaactcttcgctgaccgctgacggcaaagggattaacagccagctggactacaccgtcaacagcctgaagctgcaaaatcaggatatcggtagcggcaggctgaccctgaagctggacaatattgatggtgaagccttccatcagttcagccagaagtacaattccgacgcccaggcgctgatggcggaccctcagctggcgcagaatcctgagctgtaccagcaggcgctaacgcaaaccttctttagctcactgccgatgatgctgaaaggcagcccgtccctgaccatttctccgctgagctggcgcaacgcgaagggcgaaaccaccctgaatctatcgattctgctcaaagatccgtcgctgactaccactccgccgcagacgctggccgaggaagtggatcgtagcgtcaaatctctcgacggcaagctggtgatcccggtcgatatggcgacggcgtttatgactcagattgccgggctggaaggctatcaacccgccgacgccgctaagcttgcagagcagcaggtgaaaggcctggcggcgatgggacagatgttccgtattaccactatggaagataacgccatcacctccagcctgcagtatgctgacggccaggtgacgctgaacgggcagaaaatgccgctggatgagtttgccgggatgttcggtttagcgcttccccctgtcccggcgcccgctgagccgcaggagacgctgccgcaagaagtggtaccgccagtcgcgccgcagcaataa

SEQ ID NO: 253146 - DNA, 1029 bp, Klebsiella pneumoniae
atggctatcgcgaaaaaaattaccattaatgatgtcgcgcaggcggcgggggtatccgtcagtaccgtctcgctggtactgagcggcaaggggcgtatttcgttggcaaccggcgagcgcgtcaatcacgccattgaacagctgggctttgtgcgtaaccgccaggcggcgtccctgcgcggcggccagagcggggtgattggcctgatcgtcagcgacttgtcgaagcctttctacgcggagatgaccgccggattgaccgatgcgcttgagtcgcagggcagaatggtcttcctcacccagggcgggcacagcggagaaaaaatgctccagcgttttgataccctggtttcacagggggtcgatggcgtagtgattgccggcgccatcgatcgggggggcgaactgcgcgatcgcgcggcggaagccggaatgccgctggtcttcgcctcccgcgccagctatctcgacgatgtggacctgatccgcccggataatatgcaggcggcgcaaattgtcaccgagcacctgatccgacgcggtcatcagcgcattgcctggctgggagggcaaagttcatccctgacgcgcgccgaacgggttggcggctactgcgccaccctgctgaaatatggcctgccgtttcatagcgagtgggtggtggagtgcggctcaagccagaagcaggcggcggaggcgatgacggccctgctgcggcaaaacccgaccattagcgccgtgctctgttataacagcgtgatcgcgaccggggcgtggtttggcctgatgcgcgccgggcgacagagcggagaggatggcgttgaaagctatttcgaacagcgggtcgcgctggcggcatttgcggaattacccgaggaggcgctggatgatctgccgctgacctgggttacgactcccgcccgggagatggggcaaagcctggcggagtgtattttacggcgtatggaagaggggcagggagcggcgcgaaaccagatcatctctcctcggctgattacgcgtaaatag

SEQ ID NO: 253147 - DNA, 1593 bp, Klebsiella pneumoniae
atgacggcgaaaacagcaaacaaaattaccttgtgggagtttttccagcagctcgggaaaaccttcatgttacccgtagcattactctccttttgcgggatcatgctggggatcggcagctctctgagcagccatgatgtcctgacgcttctgccgtggctggacgtgccgctgctgcaggccgttttcgtctggatgggcaaagtcggctcctttgccttcagctttctgccggtgatgttttgtatcgccattccactgggtctggcgcgagaaaacaaaggcgtcgccgcgtttgccggttttgtcggctacgcggtaatgaacctggcggtaaacttctggctgacggccaaaggtattctgccgaccaccgatgccgccatcctcaaagccaataacatccagaacattatcggtattcaatcgatcgacaccgggatcctcggcgcggtgatcgccgggatcatcgtctggatgctgcacgaacgtttccataacatccgcctgcccgacgcgctggccttttttggcggtacccgctttgtgcccattattacgaccgtggttctcggcctggtcggtctggtgatcccgctaatatggcccgttttcgccatggggattaacgcactcggccaggtcatcaatagcgcaggtgatttcggaccgatgatcttcggcaccggtgaacgcctgctgctgccttttggcctgcaccatattctggtggcgctgatccgctttaccgaagcgggcggcaccctggacgtttgcggtcatagcgtcagcggcgcgctgacgattttccaggcccagctaagctgcccgaccagccacggcttcgccgagagcgcgacccgcttcctgtcacagggtaaaatgccggcattcctcggcggcctgccgggcgcagcgctggcgatgtatcactgcgcgcgtccggaaaatcgccataagattaaaggcctgctgatttccggcgttatcgcctgcgtggtaggcggcaccaccgaaccgctggaattcctgttcctgttcgtcgcgccggttctctacgttatccatgcgttactgaccggcctgggctttaccgtaatggcgatcctcggcgtgacaatcggcaacaccgacggcaacgttatcgactttgtggtattcggcattctgcatggtctgtccaccaggtggtacatggtaccggtggttgcggccatctggtttgcggtttattacggtatcttccgtttcgcaatctcccgctttaacctgaaaacgccgggacgcgatattgaaacaacgagcgcatttgagaaggctgtcaccggcgtgaccggcaaatcagggtataacgttccggcgattctggccgcgctcggcggcgcggaaaatatcgtttcgctcgataactgcattacccgcctgcgtctgtcggttaacgatatgagcaaagtcgacagcgccgcgctgaaagcgaatcgcgccatcggcgtggttcagctcaaccagcataacctgcaggtagtgattggcccgcaggtgcagtcggtaaaagatgaaatggctgtcctgatgaataccgtcgaggcataa

SEQ ID NO: 253148 - DNA, 1173 bp, Klebsiella pneumoniae
atgtttgatttttcaaagcagatcgaccgtcacggtacctggtgcacgcagtgggattacgtcgccgaccgttttggcgtagccgacctgctgccctttacgatctccgacatggatttcgccaccgccccctgtattcttgatgccgtcagcaaacgtctggggcacggtgtttttggctacagccggtggaaaaatgatgaattcctcggcgcggtgagccactggttcgccagccgttttcatagcccaatcaaccgcgaagcgattgtttacgggccatcggtgatctatatggtcgcggagatgattcgtcagtggtcggcagtgggcgacggcatcgtggtacacactccagcctacgatgccttttataaaaccattgaaggcaaccagcggcgcgtcgcggccgtgccgctctctctcgacaaccatcactggcgctgcgatatggcggccctggagcgggtactggctcagccgcgtaataccgttctgctgctgtgcagcccgcacaaccccaccggcaaggtctggacccgtgaagagctggaaaccatggcgcagctgtgtgataagcatggggtaaaagtgattagcgacgagatccatatggacatggtctgggacgggcagcagcacatcccgtggtgcgacgtggcccgcagcccctgggcgctcttcacctccggctcgaaaagcttcaacattccggcatttaccggcgcatacgggttgattgacgatcccgccgtgcgcgaaagctatctgcacgcgctgaagagccgcgatggcctctcatcaccttccgtgccggcgctggtcgcccatattgccgcctatcgcgagggggcgccctggctggatgccctgcgcggttatttgcaggaaaatatgcgcttcatcgctggcgaactgaatcaggcgtttccggagctagactggcagccaccgcaggcgacttacctggcgtggattgacctgcgcccgctggccgttgacgatcgcgccctgcaaaaagcacttatcgaggagcagaaggtcgccattatgcccggctacacttacggcgaagagggtaagggctttgtccgtctcaacgccggttgcccacgcgagaagctggaaaaaggcgtgcagggattaatcgccgccctgcgttcgctgcgctaa

SEQ ID NO: 253149 - DNA, 204 bp, Klebsiella pneumoniae; identical to SEQ ID NO: 174401

SEQ ID NO: 253150 - DNA, 1212 bp, Klebsiella pneumoniae
atgacatggcaacaattcaaacagacgtggctgattaaattctggtcacccgttcccgccgttatcgccgcggggattctctcaacctactacttcggcattaccggcactttttgggccgtcaccggcgaatttacccgctggggcggacaattgctgcaacttatcggcgtgcacagcgaagagtgggggtactacaaactcattcatcttgagggcaccccgctcactcgcatcgacggcatgatgatcatcggcatgttcggcggctgtttcgccgctgcgctgtgggcgaataacgtgaagctgcgttttcctcgcagccgggtgcgtattctgcaggccgtcgccggaggcatcattgccggcttcggcgcccgtctggcgatgggttgtaacctggccgccttcttcaccggtatcccgcagttttctctgcacgcctggttctttgccatcgcgacggctatcggcacctggttcggcgcgcgttttaccttactgcccatcttccgtattccggttaagatgcaaaaagtgtcgcaggcgtcgccgctgacgcaaaaacctgaccaggcgcgacgccggttccgtctcgggatggtggtcttttttgccatgatcgcctggggtctgctcaccgcggctaaccagccgaagctcggcctggcgctgctatttggcgtcgggtttggcctgcttatcgaacgcgcgcagatctgctttacctctgcctttcgcgatatgtggatcaccggacgcaccaatatggcgaaggcgatcattttcggtatggcagccagcgccatcgggatcttcagctacgtgcagcttggcatggaaccaaaaattatgtgggccggccccaacgcggtcatcggcggcctgctgtttggctttggaatcgtcctggcgggcggctgcgaaaccggctggatgtaccgcgcggtggaaggccaggtgcacttctggtgggttgggctgggcaacgtgataggttcaacgctcctggcatactactgggacggactctccccggcgctggccacaagctgggataaaatcaacctgctggcgacattcgggcctttcggcggcctgctggtgacctatctcctgctgctgatcgcgctgggtttggttattggctgggaaaaacgctttttccgccgcaaatctctcgccacctcgacggttaaggaaagcgcatga

SEQ ID NO: 253151 - DNA, 234 bp, Klebsiella pneumoniae; identical to SEQ ID NO: 174403

SEQ ID NO: 253152 - DNA, 816 bp, Klebsiella pneumoniae
atgatctttatgttaaaaaaaattgcagtaccgctggttgtcgcaagctcgctgctgctggcagcctgcaaacctggcgagcaggaccctaaccacatcaaagtgggcattagcgcaggcgttgaccaggaggtctgggcggtggcgcaaaaagtggcaaaagagaagtacaatctcgacgtcgaagtggtgacgtttaatgatttcgtcctgcccaacgaagcgctgaacaacggcgatcttgatgctaatgctttccagcataagccttatctggataaacaaattcaggagcgcggctataagctggttcaggttggcacgacgttcgtttatccgattgccgcctattcgaagaaaatcagttcggtcgaccagctgcccgatggcgcgcaggtggccgttcccaacgatccaactaacctcggacgctcgctgctgctactgcaaaagcaggggctgattacattgaaggagggcaccggtctgctgcccacttcgcttgatatcattaataacccgaaaaacttaaaaatcgtcgagattgaggcgccgcagctcacccgcgcgctggacgaccagcagataactatggcgataattaataccactttctcaagccaggtgggcctgtcaccgtcgcgcaacggcctgtttgtggaaagcaaagattcgccctacgtcaatatctttgccagccgcatcgaaaacaaagatagcgaaaaggtaaaaaatctggtgaaggcctaccagagcgatgaggtggccgcggcggcagaacagctttataaaggcgatgcggttaagggctggtaa

SEQ ID NO: 253153 - DNA, 1002 bp, Klebsiella pneumoniae
atgattgatttaactttgccattaaccgacatccatcgccatcttgacggtaatatccgggcccaaactattctcgatcttggccgccagtataacctcgcacttccggcaaatacgctcgaaacattacgtcctcatgtacaggtcaccagcaatgagcccgacctggtcagcttcctctctaagctggattggggtgtaaaaatgctcgcttctctggatgcctgccgccgcgttgcctatgaaaaccttgaagatgccgcgcgcaacggactgcattacgtcgaactgcgtttctctccgcgctatatggcgatgacccaccagctgccggtagcgggcgtcgtcgaagcggtgatcgctggggtaaaagaaggcagccgcgactttaacgttgaagcccgtctgatcggtattctgagccgcaccttcggcgaagcggcgtgcgaggaagagctcgaagctctgctcgcccaccgcgacggcattaccgccctcgacctcgccggcgatgaacttggcttcccggggaatctgtttatggagcacttccgccgcgcgcgcgatgcgggctggcggatcacggtccatgcaggcgaagccgccggtccggaaagtatctggcaggccattcgcgagctgggagccgaacgcatcggccacggtgtgaaggcggtgcaggacccggcgctgatggactatctcgccgcgcagcgcatcggcattgagtcctgtctgacctccaatatccagaccagcaccgtgccgtcgctggcccggcatccgctgaaaactttcctcgagcacggcgtgttggcctgcattaataccgacgaccccgccgtccagggcgtcgatattatccacgaatatacggttgccgctccggctgccggcctgagccgcgagcagattcgccaggcgcagatcaacggcctggaactcgcctttttaagcgccggggaaaaagcagcgctgatgcagcgcgttcagcaggcttga

SEQ ID NO: 253154 - DNA, 1041 bp, Klebsiella pneumoniae
atgagtgatgctatccgggtaggattaatcggttatggctacgcgagcaagacctttcatgcgccgctaatcagcggcacgccagggatgacgctggccgctgtggccagcagcgatgaaaataaagtgcatgccgattggcctgcaatgccggtggttagcgggccagagcggattttgaacgaccccaatatcgatctggtggtgatcccgaccccaaacgacacccattttccgctggcaaaggccgcgctggaggcgggcaagcacgtagtcgtcgataaaccctttaccgtgacactgtcacaggcgcgtgagcttgaagcgctggcaaaaagcggcgggcggctgctgtcggtattccataaccgccgctgggacagcgattttctgacggtaaaagcgctgatcaacgaagggctactgggggaagtaggatactttgagtctcatttcgatcgctatcgaccgcaggtgcgtaatcgctggcgtgaacaaggcggaccggggagcggcatctggtacgatcttgccccgcatctgctggaccaggtggtaaatctcttcggcctgccggttagcatgcaggttgatctggcgcagttacgtccgggctcccagtccaccgactattttcatgcggttttagcctggccgcagcgtcgcgtcgtgctgcacggaactctggtcgctgcggcggaaacggcgcgctttattatccacggttcgcgaggaagctatgtgaaatacggtctcgacccgcaggaggagcggctgaaaagcggcgaacgcctgccgcaggaagactggggatacgatatgcgcgacggggtgctgacgcgagcggagggcgaggacataaccgaggagtcgtggctaacgctgccgggtaactatccggcctattatgccgctattcgcgatgcacttaacggaagcggcactaatccggttccggcaagccaggcgattcagattatggagctgattgagcttggcctcgagtcggccagacatcgaacgacgctgtgtctgaattag

SEQ ID NO: 253155 - DNA, 216 bp, Klebsiella pneumoniae
atgaccgttcaggactacttattaaaatttcgtaaaatcagcacgctggaaagtctggaaaaactttttgatcaccttaactattccctgaccgataacgaagagatcgtcaacatgtatcgcgccgcagaccatcgtcgggcggagctggtttctggcggcaaattgttcaacattggcgaggtgcccaagtccgtctggcgctacgtgcaataa

SEQ ID NO: 253156 - DNA, 441 bp, Klebsiella pneumoniae
atgtcctctgactctgtggaacgtattggcggatggcttctggcgccgctggcatggctcctggtggccctgcttagcgcctcattgtcgctgctgttttttgctgatgctctgatgtcttcccagacgtataccctgctgcgcaatatgagtactgaacatctcgccttgtggattgcttcgctggccttcgcgatcgccatgtggtactacacgctgtggttgaccattgcctttttcaagcggcggaaaggggtgccaaagcattacattatctggctgctgattacgcttctgctggcggtaaaagcatttgccttttccccaatatcagacgctctggcgctgcgccagctgctgtttccccttctcgctgcggcgctgctggctccctatttcaagcgttctgaacgggttaagcggacctttgtgaatccgtaa

SEQ ID NO: 253157 - DNA, 582 bp, Klebsiella pneumoniae; identical to SEQ ID NO: 174410

SEQ ID NO: 253158 - DNA, 579 bp, Klebsiella pneumoniae
atgaatgctgtctggatagccgtggttgccattagcctgctggggctgattttcggcttaattctggggtacgcttcgcgccgttttgaggtggaagatgacccggtggtggaaaaaattgacgccctgctaccgcagagccagtgcggtcagtgcggttaccccggctgtcgtccctacgcggaagccgtaggcactcagggtgagaaaattaactgctgcgcgcccggcggcgaagcggtgatgctcaaaatcgctgagctgttgaacgtcgacccgcagcctacggacggcgatgcgcaagaagccgtacctgcgcgaatgctggcggtgatcgacgaagcgaactgcatcggctgcacaaaatgcattcaggcctgtcctgtggatgccatcgtcggcgccacccgtgctatgcatacggtgatgagcgacctctgcaccggctgtaatctttgcgtcgcgccttgtccgacgcaatgtattgaactgcgcccggtggcggcgacgacagaaacctggaaatgggatcttcaaaccatcccggtacgcattattcccgtggaacaacatgtttaa

SEQ ID NO: 253159 - DNA, 1053 bp, Klebsiella pneumoniae
atggttttcagaatcgcaagttccccctacacccacaatcagcgccagacttcgcggattatgctgctggtgctgctcgccgccgtacccggtattgtggttcagacctggtttttcggctggggtaccgtactgcaaattatcctcgccgccgtcacggcgtggggagccgaagcggccattcttaaactgcgcaaacaaaatatcccggcgattcttgccgataactcagcgctgctgaccggcctgctgctggcgatcagtattccgccttttgcgccgtggtggatggtcgtgctgggcactgcgtttgcggtgattatcgccaaacagctgtacggtggactgggtcacaatccttttaacccggcaatgattggctacgtggtgctgctgatctctttcccggtgcagatgacctcctggctcccgccccatgagatagccgccaatgttcccggttttagcgacgcgctgaggatgattttcactggtcatacggctaccggcggggacatgaacagcctgcgaatcggcattgacggcatcagtcaggcaacgccgctggataccttcaaaacctcgctccatgccggtcatgcggtgcaagagatcctccagtatcctgtctacggcggcgcactggccggtctcggctggcagtgggttaacgtggcttatctggcgggtggtctgttcctgctatggcaaaaagccattcgctggcatattccgctgagcttcctgctgagccttgccgtttgcgccaccctgggatggctattctcaccagaaagcctcgcctcaccgcaaattcatctgctctccggcgccaccatgctgggcgccttctttatcctgacggacccggtgaccgcttccaccaccaatcgcggtcgcctgatcttcggcgcgctggcggggttactggtgtggctaattcgcagctttggcggctacccggatggggtcgcctttgccgttctgctggctaatattaccgttcccttgatcgattactacacgcgcccgcgcgcgtacggccaccgctga

SEQ ID NO: 253160 - DNA, 621 bp, Klebsiella pneumoniae
atgttacaaagcatgcgtaaacacggcatcaccctggccctctttgctgcgggttcgaccgggctgacggccgccattaacgaactgactaaaagcaccattgaagaccaggccgcccagcagcaaaaagccttattcgaccaggttatgccggccaatttatataacaacgacttgctgaaaagctgttatcgggtaaccgcgccggagctgggaaaaggcgagcataaggtatggattgctcagaatggcgataaagcggttgcagcggtgatggaagctaccgcgccggacggctattcaggagccattcagctactggttgccgccgactttaaaggtaccgtgctgggtacccgcgtcaccgagcatcatgagacgccgggcctgggcgataagatcgagcttagaatttctgactggatcaccctctttgccgataaagtgattcatgggcaaaacgatagccactgggccgtgaaaaaagatggcggcgatttcgatcagtttaccggggctaccattactccgcgcgcggtggtcaatgccgtcaagcgcgcgggcctgtatgcgcaaactctgcccgcgcagatttctgctttcactccctgtggagactag

SEQ ID NO: 253161 - DNA, 699 bp, Klebsiella pneumoniae
atgagcgaagtaaaagacgttattgttcaggggctgtggaaaaacaactccgcgctggttcagctgctggggatgtgtcctctgctcgccgtgacctctaccgccaccaacgctcttgggcttgggctggcgacgacgctggttcttaccctgactaacctgaccatttccagcctgcgtcgctggacgccggcggaaatccgtattccgatttacgttatgatcatcgcttcggtggtgagcgtcgtccagatgctgatcaacgcttatgcgttcggcctttatcagtctctggggatttttatcccgcttatcgtcaccaactgcattgtggtcgggcgcgctgaggcctttgccgcgaaaaaaggcccggcgctatcggcgctggatggtttttccatcggtatgggggcgacctgcgcgatgtttgtcctcggctcgatgcgggaaattctcggcaacggtaccctgtttgatggtgccgatagcctgctcggcagctgggcaaaggttctgcgtatagaagtatttcataccgatacgccgttcctgctggcaatgctgccgccgggcgcatttattggcctcggcatgatgttggcggtaaaatacctcattgatgaacgtagcaaacagcgcaaagccaaagcggcgcaggccgggatcgttgcgccctctgatgtgacgggaaaagcatag

SEQ ID NO: 253162 - DNA, 636 bp, Klebsiella pneumoniae
atgaacaagagtaaacgcctggagatcctcaccaggctcagggataacgacccgcaccccactacggagctgaattttaactcgccgtttgaattattgatcgccgtgctgctctcggcgcaggctaccgacgttagcgtcaataaagctacggcgaaactctatccggtcgccaacacgccggcggcgatgctggcgctgggcgtagagggcgtcaagtcgtacattaagaccatcggcctgttcaacagtaaagcagaaaacgtcattaagacctgccggatcctgcttgagcagcataacggcgaagtaccggaagacagagccgcgcttgaggcgcttcccggcgtcgggcgcaaaaccgctaacgtcgtgttgaacaccgccttcggctggccgacaatcgccgtcgatacgcacattttccgcgtttgcaaccggacacaatttgcgcctggtaaaaacgttgaacaggtggaagagaagctgttaaaggtggttccggcggaattcaaagtggactgccatcactggttgattctgcacggccgttatacctgtatcgcccgtaaaccgcgctgcggttcctgcctgattgaagatctttgcgagtttaaagagaaggtctactcctga

SEQ ID NO: 253163 - DNA, 606 bp, Klebsiella pneumoniae
atgaaactgttctataaatccggcgcttgttctctagcctcgcatatcgcgctacgcgaaagcgggctggactttaccctgcagggcgttgacgtgatgagaaaacgccttgaaaacggggaggattatttgctggttaaccccaagggtcaggtaccggcgctgctgctggacgatgacgtgctgctgacggaaggcgtggccattatgcagtatatcgccgatcgcgtaccggaccgccagctgctggcgccggtaggaagcatcgcccgctaccagaccctggagtggctaaactacgtggcgacggaactgcataaaggctttacaccgctgtttcgcccggatacgccggaagatttcaaacctatcgcccgcgcgcagctggataagaaaatgcagtacgtgaacgaatgtctgcaggataaagagtggattaacgggcatcgtttcaccattgcggatggctacctgttcaccgtactgcgctgggcctacgccgtgaagctgaatatggaaggttatagcaatatcgcggcctggatgaaacacgttgccgcgcgcccggccgtagccgctgctcttgaggctgaagggctgaagtaa

SEQ ID NO: 253164 - DNA, 861 bp, Klebsiella pneumoniae
atgaagaacatcctcgccatccagtcccacgttgtgtttggccatgcgggcaacagcgccgctgaatttccgatgcgccgccttggcgccaacgtctggccgcttaataccgtacaattctccaatcatacccaatacggtaaatggaccggctgcgtgatgccgccagcgcatttgacggagattgttcaggggattgccgatattaaccaactgcagcgctgtgacgccgtgctaagcggctatctgggatcggctgaacagggcgaacatattcttggcatcgtgcgtcaggttaaagccgccaatccggctgcgaaatatttctgcgacccggtaatgggtcatccggaaaagggctgcatcgtggcgccgggcgtagcggagtttcacgtacgctacgcgctgccggcaagcgatattattgcgccaaatctgattgagctggagatcctctgcgggcatccggtggcaaacgttaacgaggcggttttggccgcgcgcgagctgattgctcaggggccggaagtggtgctggtgaagcatctctcgcgtgccggactgagtatggatcgttttgagatgctgctggttaccgcgcaggaagcctggcatatcagccgtccgctggtggattttggcatgcgccagccggtaggcgtcggtgacgttacaagcgggctgctgctggtcaaactgctgcagggcgccactctgcgcgatgcgctggagcacgtgaccgccgcggtttatgaaatcatgctggcgactaaaaacatgcaggaatatgagcttcaggttgtggcggctcaggatcgcattgcgcagccggagcactactttagcgccacccagctttaa

SEQ ID NO: 253165 - DNA, 1275 bp, Klebsiella pneumoniae
atggcaagcagtaacttgattaaacaattgcaggagcgggggctggtagcccaggtgacggacgaggaagcgttagcagagcgactggcgcaaggcccgatcgcgctctattgcggcttcgaccctaccgccgacagcttgcacttggggcatcttgttccattgttatgcctgaaacgctttcagcaggcgggccataagcctgttgcgctggttggcggcgcgacgggtctcattggtgacccgagctttaaagccgctgagcgtaaactgaacactgaagataccgtgcaggagtgggtagataaaattcgcaaacaggtcgcgcctttcctcgactttgattgcggtgataactctgccatcgccgcgaataactacgactggtttggcagcatgaacgtgctcaccttcctgcgtgatatcggcaagcacttctccgtaaaccagatgatcaacaaagaagcggtgaagcagcgtctgaatcgcgacgaccagggcatctcttttaccgagttctcctacaacctgctgcaaggctacgactttgcttgtctgaacaagctgcacggtgtggcgctgcaaatcggcggttctgaccagtggggtaacattacttccggtatcgacctgacccgtcgtctgcaccagaatcaggtctttggcctcaccgttccgctgatcaccaaagccgacggcacgaaattcggtaaaaccgaaggcggcgcagtgtggctcgatccgaagaaaaccagtccgtataagttctaccagttctggatcaacaccgcggatgccgatgtttatcgcttccttaagttcttcacctttatggacatagccgaaatcaatgccctggaagaggaagacaaaaacagcggtaaagcgccgcgcgcccagtacgtgctggccgagcaggtgacccgtctggtgcacggtgaagaaggcctggtggcggcaaaacgcattaccgagagcctgttcaacggcaacctgagcgatttgagcgaagccgatttcgaacagctggcgcaggatggcgtgccgatgatcgaaatggataaaggcgccgatctgatgcaggcgctggtggattctgaactgcagccgtcccgcggtcaggcgcgtaaaaccatcgcatcgaatgcggtgaccatcaacggcgaaaaacagtccgacccggaatacgtatttgtcgatgccgaccgtctctttagtcgctacaccttactgcgccgcggtaagaaaaattactgtctggtctgctggaagtaa

SEQ ID NO: 253166 - DNA, 675 bp, Klebsiella pneumoniae
atgactttctcaattgccatgtctgataacgacgaattgcagcaaattgcgcatctgcgccgtgaatatacccgtggtggcctgcgtcgccacgaccttcctgccgaacccctggcattatttgaacgctggctgcggcaggcctgtgatgcgaagctcgctgacccgacggcgatggttgtcgcgaccgttgatgaaaactcgcagccttaccagcgcattgtgttgctcaagcactacgatgagaaaggcctggtgttttataccaacctcggcagccgcaaagcccaccagattgaaaaaaatccccgcatcagcctgctgtttccatggcatatgctggagcgccaggtcatggttatcggtaaagcggaacgcctgtcgacgctggaagtagtcaaatatttccacagccgcccgcgcgacagtcagattggcgcctgggtatcgcagcagtccagccgtatttcggctcgcggcatcctcgaaagtaagttcctcgagctgaagcaaaagttccagcagggcgaagttccgctgccgagcttctggggcggattccgcgtcagtattgaacagatggagttctggcagggcggagagcatcgtctgcacgatcgttttctctatcagcgccaaaacagcggctggcagatcgaccgactggcgccataa

SEQ ID NO: 253167 - DNA, 360 bp, Klebsiella pneumoniae
atgccttcccggaccgggaaagtcgaaggcatactgatgaaaaaaaaacttattcttgctgtaccttttatgctcgcaggctgtagctactacaaccagtttgttgagcggatgaacacggataccctcgagtaccagtgcgagcaaaaaccgttaaccgtccatctcaataatactcgccagcaggtcagcttcatttacgacaaccagcagttaaatttacagcagggtctctccgcctccggcgcgcgctataccgatggcgtatacgtcttctggtctaaaggcgatagcgccaccgtttataaacgcgaccgtattgtgctggaaaactgtcagctgcaaaccgccaaacgttga

SEQ ID NO: 253168 - DNA, 1125 bp, Klebsiella pneumoniae
atgaaatcaggccgctttatcggcgtcatgtccggcaccagccttgatggtgtggatgttgtgcttgcagcaattaatgaagatctggtcgcccagcaggccagcctgacgtatcccatccccattgcgattaaagaacagattctggctatctgtcaggggcagccgcttacgctttcgcagctagggcggctggatacgcggctggggcggctgtttgccgatgcggttctggcgctaatggctcaggaaaagctacaggcagcagatatcatcgccatcggctgccatgggcaaacggtctggcatgagccaacgggtgatgcgccgcacactatgcagataggcgacaataatcagattgccgcgcgcaccggcgtaaccgtggtcggagactttcgccgccgcgatatggcgctcggggggcagggggcgccgctggttcctgctttccatcatgcgctgctggcgcatccggtagagcgccgcatgattctcaatatcggcggtattgccaatctctctttactggcgccggggcagccggtacgtggatacgacacggggccaggcaacatgctgatggacgcgtgggtctggcgccagtgcggcaaaccctatgataaagacgcgcagtgggccagcgaggggaaaattgtgctgccgctgctgcaggatatgctcagcgatccctggtttgccctgccggcgccgaagagtaccgggcgcgaatactttaactacggctggctcacgcagcatctggcgcgttatccggggcttcgtgcccaggatgttcaggcgaccctggccgaactgactgccgtcagcatcagcgaacaggtgctgctaagcggaggctgcgagcgtctactggtatgcggcggcggtgcgcgtaacccgctactgatggcgcgtctggcggcgctgttgccgggaaccgaagtgtcgacgaccgatgaggcgggcattagcggtgatgatatggaagcgctggctttcgcgtggctggcgtggcgtaccctcgccggcttacccggcaatctcccttccgtgaccggcgcgtcgcaggcaaccgtactgggcgcgattttcccggccaatccgcagcaaaatcagagttaa

SEQ ID NO: 253169 - DNA, 384 bp, Klebsiella pneumoniae
ttgtttctgcaccaccatgatggtgttgccatcatctttgcgaatttccagctcaacgccctgggttttgttcattgcgccctggacgccctgaccggctacgccgcccgcgacagcgccagctgcggttgccagagagcgacccgtgccgccgccgatggtgttacccaggaaaccaccgagcaccgcgccgccaatggcgccgatagcattgctttcatctccgccctgaatctgaaccgcgcgggtatgcacaatggtgccgtaggtcacactttggacctgtttggcttcggatgcggagtaaacatcgccggacaggccgctgttgctgacgcaacctgcaagcgtaaaaccaatcatcgagacagccaaaacacgtaa

SEQ ID NO: 253170 - DNA, 624 bp, Klebsiella pneumoniae
ttgcgacatggtgatgtcgaccagcttgcgccacatttcgcggaaatattcgtcgccgccctgcagcttaacgacgtagctgcgcgcgcgctcggcgaaggcttcatcttcatcgtagtgttttttcgcttcacgatagaaaccttcgaggtcggccagcgccatttcaccggcgttctcctgctgctgtttttccaggtacgcgataagcataccgaactgggtaccccagtcgcccacgtggttagcgcggatcactttatgcccgagaaactccagcgtacgcaccgcggcatcgccaatgatggtggagcgcagatggcctacgtgcatctctttcgccacgttcggcgcagagtaatcgaccactacggtttgtgccggcggctgagccacgcccagacgttccgatttcagcgcgctgctgacattttccgcgaggaaggccggatcgaggaaaatattaataaagccagggccggcgatctctaccttattggcaatcccgctcagatcgagatgagacagtacctgctctgcaagttgtcgcggcgccatgcccagttttttggcaacggccatcacgccgttggcctgatagtcgccgaactggacttttgctga

SEQ ID NO: 253171 - DNA, 570 bp, Klebsiella pneumoniae
atggcgaactggcagcagattaatgaattaaacgatatttccgcggacctgccgcgctttaccgaggcgctaaacgcgcttgctcatcggcttggtctcgatattacgccacttgatgccgaccatatttccctgcgctgtcaccagaacgccacggcggagcgctggcgtcgcggctttgagcaatgcggcacgctgctgtcggaaaatgtcattaacggccgccccatctgcctgttcaggctggatgagccggtggtcgtggcgcactggcgttttagcattgttgaactgccgtggccgggcgaaaagcgctatccgcatgaaggctgggagcatattgaaatcgttctgcctggcgagcccgaaacgctcaatacccgcgccctggcgctgctttccgataatggattgagccaaccgggcatttttgtaaagaccagcgcgccaaaaggagagcatgagcgcttgccgaatccaactctggcggttaccgatggcaaagtgacgatcaaatttcacccgtggtcgattgagcaaattgtcgccagcgaacaatcagaacgataa

SEQ ID NO: 253172 - DNA, 744 bp, Klebsiella pneumoniae
atgaccttactggaagtctgctgttacagcatggagtgcgcgctggaagcccagcgctgcggcgccgaccgcatcgagctatgcgccgcgccgcaggagggggggctgacgccttcctcgggcgtccttaaaacggtgcgtgagtcggtgaccatccccgttcatccaattattcgtccgcgcggcggtgacttttgctataccgctggcgaatttgccgcaatgcttgatgatgtggctgcggtgagagatctcggctttcccggcatggtgatcggcatcctggacgccgacggtcaggtagatagggcgcgaatgaaaaaaataatggcggcggcgggaatgatggccgtcacctttcaccgtgcctttgatatgtgcgccaacccgcgccaggccagcgttgagctggctgatctcggcgttcagcggatcctgacttcgggccagcagccgtctgccgaaaaaggaatttcattaatcagggaacttatttcccaaagcgacactcctattattatggccggcgcaggagtgcgtgccgccaacctgccgctgtttttgcaggctggggtaaaagaggtccacagctcggcaggccagtggctactgtccccgatgcgctttcgtaatcccgggttgtcgatgtctacggatgccgatgctgatgaatacttacgctacgccgtcaatggcgaagcggtagcggaaatgaagaagattatttccgcacagagagattaa

SEQ ID NO: 253173 - DNA, 1023 bp, Klebsiella pneumoniae
atgattgatttcagcaacttttatcaattgattgccaaaagcccgctgtcacactggctggagacgctacccgctcaggtcgcggcctggcaacgtgaagcgctgcacggcaaataccgggagtgggaacgggccgtcgagtttctgcccgagtttgcgccctaccgcctcgacctgctgcatagcgtcactgctgagagcgaaacgccgctcggtgaaggccagcgcctgcgcattgaaaacctgctgaagaatctgatgccctggcgtaaagggcccttctccctttacggcgtgaatatcgataccgaatggcgttccgactggaagtgggagcgcgtactgccgcacctttccgacctgaccggacggactattcttgatgtcggctgcggcagcggatatcacatgtggcggatgattggcgccggcgctcatctggcggtaggcatcgatcccacccaactgttcctttgccagtttgaagccgtacgtaaactgctgggcaacgaccagcgggcgcatctgctgccgctgggaattgaacagcttccggcgctgaacgcctttgataccgttttttcgatgggcgtgctgtaccatcgtcgttccccgctcgatcacctgtggcagctaaaagatcagctggttcccggcggcgagctggtgctggagacgctggtcgttgaaggcgacgaaaatactgtgctggtgccgggcgatcgctatgcgcagatgcgcaacgtctactttattccctctgccgccgcgctgaagcagtggctggagaagtgcggatttgtcgatgtacgcatcgtcgatgcgtgcgtgacctcgaccgaagagcagcgccgcaccgagtggatgaccaccgagtcgctggccgacttcctcgatcccgaggacagtagcaaaacccgcgaaggctatcccgccccgctgcgcgcggtgattattgccaccaaaccggaaacggaacagtctctggcagcgaaaaaacgtgccgacaagcgggccggttga

SEQ ID NO: 253174 - DNA, 744 bp, Klebsiella pneumoniae
atgtctcaccgcgatacgcttttttccgcgccgattgccagtctcggcgactggacctttgatgaacgggttgctgaagtcttcccggatatgatccagcgctctgttcccggctattccaacattatttcaatgatcggcatgctggcggaacgtttcgttcagccggatacccaggtttacgatctcggctgctcgcttggcgcagccacgctgtccgtgcgccgcaacattgcccatgccggctgtaaaattatcgccgttgataactcaccggcgatggtcgaacgctgccgtcgccatattgacgcctataaagcgccgacgccggtcgaagttattgaaggcgatatccgtcacgtcactatcgaaaatgcttcgatggtggtgctgaatttcaccattcagtttctcgagccgggcgaacgccaggccattcttgataaggtttatcaggggctgaatccgggcggtgcgctggtgctatcagaaaaattcagtttcgaggatgacaacgtcggcgaacttctgttcaacatgcatcacgacttcaagcgcgccaacggctacagcgagctggaaatcagccagaagcgcagcatgctggaaaacgtcatgctcaccgattccgtggaaacccacaaagcccgcctgcgcaaggccggtttcgaacatgccgaattgtggttccagtgctttaacttcggatcgttaatcgccgtaaaatccggggaaccggcatga

SEQ ID NO: 253175 - DNA, 396 bp, Klebsiella pneumoniae; identical to SEQ ID NO: 176099

SEQ ID NO: 253176 - DNA, 819 bp, Klebsiella pneumoniae
atgatctatattgggcttccccaatgggcgcacccgaagtgggtgcgcctgggtatcaccagccttgaagagtatgcccgccactttaattgcgtggagggcaacaccaccctgtacgcgttaccaaaagcggagattgtcagccgatggtatgaacagacccacgacgattttcgcttctgcttcaagtttccggccaccatttcgcaccaggcggcgctgcgcaactgcgacgacttaagccaggagttttttactcgtctggcgccgctgtcttcgcgcatcggccaatactggctacagctgccggcgacgtttggcccccgagaccttcccgccctctggcacttccttgatagcctgccgcgtgaattcagctacggcgtcgaagtaaggcatgcggaatttttcgccaagggggaagcggaacagcagcttaatcgcggcttgcatcagcgaaacgtcaaccgcgttatcctcgatagccgcccggttcacagcgccatcgcccgcagtcaggcaatgatcgaagcacaaaacaaaaagcccaaagtccccgtccatgcgctggtgacagcccggcacccgatggtgcgctttattggcagcgacgatatggcgcaaaatcgcgagctttttagcgtgtggataaggacgctgccaaaatgggcgcaaaccacaacgccctacctgttcctccacacaccggatatcgcccaggctccgcagctggtcgacatcctgtggagcgatctgcgcgccgccctaccggaaataggtgatgcgccgtcaattccgcagcaaacctctcttttctga

SEQ ID NO: 253177 - DNA, 567 bp, Klebsiella pneumoniae
atgttagaactcaatgcaaaaaacaccgcgctggtcattattgacctgcaggaaggtattttaccgtttgccggcggccctcatcgcgctgatgaagtggttgagcgggccgcgaagctggcgaaaaagtgtcgccagcagggctcccccgtagtgatggttcgcgtcggctggtcagcggatttcgccgaagcgctgaaacagccggtcgatgccgaggctggcgcccatacgctaccggaaaactggtggacctacccgctcgcgctggaaaaacaggaaagcgatatcgaagttactaaacgtcagtggggcgctttttacggcactgacctcgagctgcagcttcgccgtcgcggcatcgacaccatcattctgtgcggaatatccaccaacatcggcgtcgaatccacggcgcgcaacgcctgggagctgggatttaatctgattctggttgaagatgcctgcagcgcggcgtcggccgaacagcatcagggcagcatgacgcacatcttcccgcgtattgcccgcgtgcgcagtaccgaggaggtacttgccgccttatga

SEQ ID NO: 253178 - DNA, 1788 bp, Klebsiella pneumoniae
atgcgtacagaatattgcggacagctcggtctgtcccacgtagggcagcaagtgactctgtgtggttgggtcaaccgtcgtcgtgatcttggtagccttatctttattgatatgcgcgaccgcgaaggcatcgtgcaggtgtttttcgatccggatcgcgcggatgcattaaagctggcctccgaactgcgtaatgagttctgcattcaggtcaccggtaccgtgcgcgcgcgtgacgaaaagaacgtcaataatgatatggccaccggcgccattgaagtgctggcaaccgacctgacgatcatcaaccgtgctgaagcgctgccgctggattccaaccacgtcaacaccgaagaagcgcgtctgaaataccgttacctggacctgcgtcgtccggaaatggcgcagcgcctgaaaacccgcgcgaagattaccagcctcgttcgccgttttatggacgaccacggtttcctcgatatcgaaaccccgatgctgaccaaagcgaccccggaaggcgcgcgcgactatctcgtgccttctcgtgtgcataaaggcaaattctacgcgctcccgcagtctccgcagctgtttaaacagctgctgatgatgtccggttttgaccgctactatcagattgttaaatgcttccgcgacgaagatctgcgcgctgaccgccagccggaattcacccaaatcgacgtcgagacttcctttatgaccgccccgcaggtgcgcgaagtgatggaagcgctggtgcgtaatctgtggcaggaagtgaagggcgtggatctgggtgattttccgatcatgacctttgccgaagccgagcgccgctatggttctgacaaaccggacctgcgtaacccaatggagctggtggacgtcgccgatctggtgaaagcggtggaattcgccgtctttgcgggcccggctaacgacgccaaaggccgcgttgccgcgctgcgcgtgcctggcggcgctgcgctgagccgtaagcaaatcgacgaatacggtaagtttgtccaaatctacggcgccaaaggtctggcatacattaaagtcaacgaacgggcgaaaggccttgaaggtatcaacagcccggtggctaaattcctcaacgccgacatcgttgaagcgatccttgagcgcaccggcgcgcaggatggcgatatgatcttcttcggcgcggataacaaaaaagtggttgccgatgcgctgggcgcgctgcgtctgaagctgggtaaagatctgaacctgaccgatgaagagaaatgggcgccactgtgggtgatcgacttcccgatgtttgaagacgacggtgaaggcggcctgaccgcgatgcaccatccgtttacctcgccgaaagatatgaccgccgcagagctaaaagccgcgccggaagatgcggtagctaacgcttacgacatggtgattaacggctatgaagttggcggcggttccgtgcgtattcacagcggtgagatgcagcagaccgtattcggtattctgggaattaacgagcaggagcagcgcgagaagtttggcttcctgctggatgcgctaaaatacggtactccaccgcatgcgggtctggcttttggccttgaccgtttgaccatgctgctgaccggcaccgataatatccgtgacgttatcgccttcccgaaaacgacggcggcggcctgcctgatgaccgaagccccgagctttgcaaatcctgcatcgctgagcgagctcggtattcaggtggtggcgaaagaggcaaaagagtctccggagaataagtaa

SEQ ID NO: 253179 - DNA, 444 bp, Klebsiella pneumoniae
atgtcattcaagctccccgtttccgttctggtggtgatttatgccgaagatacgaagcgggtgctgatgttgcagcgtcgcgacgatcccgccttctggcagtcggttaccggcagcctggaggagggggaaaccgcgccgcaagctgccgcgcgtgaagtaatggaagaggtcgccattgacgttgcctgtgagcagctggctttggttgattgtcagcgaacggtagagttcgagatattttctcatttacgtcatcgctatgcgccgggcgttgagcgcaatacggagttttggttccgtcttgcgctcccccatgaacgccagattgtctttacggaacatctggactatcgctgggttgatgcgacggaagccgccacgttgaccaagtcctggagcaaccggcaggcgattgaagaatttgtaattaacgccaactaa

SEQ ID NO: 253180 - DNA, 741 bp, Klebsiella pneumoniae
atggcaggtcatagtaaatgggccaacaccaaacaccgcaaagcggcacaggatgccaaacgcggtaagatctttacgaaaattattcgcgagctggtcaccgcggcccgtcttggcggcggcgatgcgggctcaaacccgcgtctgcgcgcagcgatcgacaaagcgctgagcaacaacatgacccgtgacaccctgaaccgcgctattgcccgcggcgtcggcggcgatgatgatgcgaacatggaaaccatcatttatgaaggttacggtcctggcggtacggcggtaatggttgaatgtctgtccgacaaccgcaaccgtaccgttgctgaagtacgtcacgcgttcagcaaaaccggcggtaacctgggcaccgacggctccgtttcctacctgttcagcaaaaaaggcgtcatctccttcgagcaaggcgatgaagatgcgatcatggaagcggcgctggaagcgggcgcggaagacgtggtgacctatgacgacggcgcaattgacgtctacaccgcctgggaagagatgggtgcggtacgcgatgcgctggaagctgccggtctgaaagcggacgccgctgaagtctccatgatcccgtcaaccaaagcggatatggacgcggaaactgcgccgaaactgctgcgtctgatcgatatgctggaagattgcgacgacgtgcaggaagtttatcataacggcgagatctctgatgaggtcgccgcaaccctgtga

SEQ ID NO: 253181 - DNA, 522 bp, Klebsiella pneumoniae
atggctattattctcggtattgacccggggtcgcgcgtcactggttatggcgttatccgtcaggttggacgccagctgagctacctcggcagcggctgtatacgcacgaaagtggatgatttaccgtcccgcctgaagcttatctatgccggcgttacggaaattatcacccagttccagccggactacttcgccatcgaacaagtttttatggccaaaaacgccgactcggcgctgaagctcggccaggcgcgcggagtggccatcgtcgcggcgacgaatcaggacctgccggtctttgagtacgccgccaggcaggtgaagcagaccgttgtcgggattggcagcgcggaaaagagccaggtgcagcacatggtgcgcacgttgctcaagcttccggccaacccacaggcggatgcggcggatgctttagctatcgccatcactcattgccacgtcagccagaacgcagctcagatcagtgaaagccgcctgaacctggcgcgcggacgcctccgctaa

SEQ ID NO: 253182 - DNA, 663 bp, Klebsiella pneumoniae
atgatgaaaatccgggtggtgaaatctctcttttttatgctgctaattatcgtcagtggatattatttactgaccgaatatcagtattaccatcagagttcgacggttttcggcacagtcgtcaatacccgcaccgtcagcagcgcagagcggcgcctggccgacgcctgcaccacatttcgcggacgcgaagattgttccgcgctctttgagtatgatattacctggcggtcaggcggtcactcctacctctatcacgttgcaaaggcctggtctccgcccgcagacagactttgtatgaatatcgtgcagggaaaacccgctattgccaaaccatgtgacgctctcttttttaacgtcagccggctcccgggtctgatagctatctgggctatcgtagcttttattactttgacgctatttttataccgtaagcgttacgccatttctcgtcagtggcctgcgcagacgctttatcggatttatcaccgcaggcacaggctgatgctggaaaccccggatgaacaagaagcgctaaagttcatcaacagcggttatcgaataagcgaaactttccaccatcagaaagtcgttgggtcgggtcgtcaaagacgcgtcattcactacatcatctaccttgtgcggggtaaaaagagcgcataa

SEQ ID NO: 253183 - DNA, 612 bp, Klebsiella pneumoniae; identical to SEQ ID NO: 176091

SEQ ID NO: 253184 - DNA, 516 bp, Klebsiella pneumoniae
  misc_feature (495)..(504): n is a, c, g, or t
atgatagaagcagacaggctggtatcggcagacagcagcggctttgaagaggcggcggaccgcgcaatccgccccaaactgctggaagagtatgtaggccagccgcacgtccgttcgcaaatggagatctttatccaggcggcgaaactgcgcggcgacgcgctcgatcacctgctgatttttggtcctccagggctgggaaaaaccacgctggcgaacatcgtcgctaacgaaatgggcgttaacctgcgcacgacctccggcccggtgctggagaaagcgggcgatctggcggcgatgttgaccaaccttgaaccacacgacgttctgtttatcgacgagattcatcgcctttcaccggttgtcgaagaagtcctgtatccggcaatggaagattaccagctggatatcatgattggtgaagggcctgcggcgcgttcaatcaaaatcgatcttccgccgtttaccctgattggcgcgaccactcgcgccggnnnnnnnnnnccggctcgctga

SEQ ID NO: 253185 - DNA, 414 bp, Klebsiella pneumoniae
atggggctggagatgagcgaagagggagcgctggaagttgcgcgtcgcgcgcgcggtacgccgcgaatcgctaaccgcctgctgcgcagggtgcgcgattttgccgaagtccgctacgatggacgtatctcagaggatattgccgctcaggcgctggatatgctcaacgtggatgccgaaggatttgactatatggaccgtaagctgctactggcggtcatcgataaattctttggcgggccggttgggctggataatctggcggcggcaataggtgaagagcgtgaaaccatcgaggacgtgctggaaccgtatctgattcagcaaggttttctacaacgcaccccgcgcggacgtatggcgacggtacgggcctggacccactttggcattacgccacctgaaatgccttaa

SEQ ID NO: 253186 - DNA, 786 bp, Klebsiella pneumoniae
atgattgaattactgctccccggctggctggccgggataatgctcgcctatgcggcgggtccgctgggatcgtttgtcgtctggcgccgcatgtcctactttggcgataccctggcccatgcctctctgctcggcgtcgcttttggtttgctgctgaacgttaatcctttttatgcggtcatcgtggtgacgctgctgctggcgggcgggctggtatggctggaaaaacgtcctcatctggcggtagatacgctactcggtatcatggcccacagcgcgctgtctttgggcctggtggtagtcagtctgatgtcgaacgtgcgcgtcgatctgatggcctatctgtttggcgacctgttggcggttacgccggtggatttaatatccatcgcgattggcgtagcgatcgtgctggcgatcctgctctggcagtggcgtaatctgctatcgatgactattagtccggatctggccttcgttgacggcgttaagctacaaagggttaaactgctgttgatgctggtcaccgcgctgaccatcggcgtggcgatgaagttcgtcggggcgctgatcattacgtctttgctgattattcccgcagccacggcgcgtcgctttgcccgtacgccggagcaaatggcgggtattgcggtaggaatggggatgattgccgtcaccggcggactgaccttttcagcgttttacgacacgccagccgggccttccgtggtgctgtgcgctgcggtgctgtttatcatcagcatgagcaagaagccggccgcctga

SEQ ID NO: 253187 - DNA, 753 bp, Klebsiella pneumoniae
atgacaaatcttgtaactctggaaaacgtcgcggtcgtttatggccaaaggcgcgtgctgtctgacatttcgctcacgcttaagccgggcaaaattttaactctgctgggccccaacggcgccggtaaatcgaccctcgtcagagtcgttcttgggctggtagcacctacagaaggggttatcaaacgcgagggacatctgcggataggctatgtcccgcaaaagctgcaccttgatgccacgatgccgctcaccgtcagccgctttatgctgttgcggccaggaacgcacaagcgcgacatactgccggcgctgaagcgcgtgcaggccggtcatctgattgacgcgcctatgcaaaagctttccggcggcgagactcagcgggtacttctggcgcgcgcgctgctcaatcaaccgcagctgctggtgcttgacgagccaacgcagggcgttgacgtgaatggtcaggtggcgctgtacgatctgattaatcagctgcgccaggagcttgattgtgccgtgctgatggtttcccacgacctgcacctggtgatggcgaaaaccgatgaagtactgtgtctcaatcagcatatctgctgctccggcgcgccggaagtggtctccatgcatccggaatttatctcaatgttcggccagcgcggcgcggaacagctgggtatttatcgccatcatcataatcaccgccacgacctgcaggggcggattgtactgcgtcggggaaatgaccgttaa

SEQ ID NO: 253188 - DNA, 960 bp, Klebsiella pneumoniae
atgattagacgcattatgttacataaaaatacgcttctttgcgctggacttagcgccgcttttttgttcgctcatgcaccgctggcaagcgccgcggtcgtcacctcgcttaaaccgctgggcttcatcgcatcagccattgctgatggggtaacagagacccaggtactgctgcctgacggggcatcggagcatgattattcactgcgtccatcggatgcaaaacgcttacagaacgcagacttagtggtctggattggtccagagatggaggcgtttatggataagtcaacgcaaagcattgcgccgaacaaaaaggtgacgattgccgagcttgacggcgtgaaaccgttactcatgaaaggcgtcgacgacgacgatgaccatcacggtcacgatcatggcgccggggaaaatagtgacgacgatcaccatcatggcatctataacatgcatctatggctttccccagagatagcgcgcctttcggcggttgcaatccacgataaattattggaacttatgccgcagagtcgagccaaactcgacagcaacctgcagcagttcgagaccgcgctggcggcgaccgacaagcaggtgagcaatgagctggcaccgctgaaagggaaggggtatttcgtttttcatgacgcctacggctactttgaaaaacactacggtttgacctccttaggtcattttactgtcaaccctgaaatccagcctggtgcgcagcgtttacacgaaatcagaacacagctggttgagcaaaaagcaacttgcgtttttgctgagccacagttcaggccagcggttatagaagctgttgccagggggacgtccgtgcgcatgggaaccctggatccacttggaatcggaattaagctgggtaaagagagttatccgcaattcctgagccagatggcaaatcagtattcaagctgcctgaaaggagaataa

SEQ ID NO: 253189 - DNA, 945 bp, Klebsiella pneumoniae
  misc_feature (733)..(742): n is a, c, g, or t
atggaaacgaaaaaaaataatattgagtttattccaaaatttgaaaaatcctttttactgccgcgctactggggcgcgtggttcggcgtttttgccttcggcgcaattgccctgacgcccgcgtctttccgcgatccgatcctgggtaaactggggcgttttgttggtcgtctggcaaagagttcgcgccgccgggcgcaaattaacctgctgtactgctttccggaaaaaagcgagcaggaacgtgaagaaataattgatgccatgtatgcctccgcgccgcaggcgatggtgatgatggccgagttaggcctgcgcgatccgcagcggattctttcccgcgtcgactggcagggcaaagaaatcatcgatgagatgcagcgcaataacgagaaagtgatcttcctggttcctcatgcctggggagtggacatcccggcgatgctgatggcgtccggcgggcaaaaaatggcggcgatgtttcataaccagggcaacccggtattcgattacgtctggaataccgtgcgtcgtcgtttcggcggtcgtatgcacgcgcgcaacgacggcatcaaaccctttattcagtcggtacgtcagggatactggggctactatctgccggatcaggatcacggggccgaacacagtgaatttgttgatttctttgccacctacaaggcgacgctcccggcaattggtcgtttaatgaaagtatgtcgcgcccgggttnnnnnnnnnntgacggtgctggtgcgcccgccgatggacgatctgctggaagcggacgacaataccattgcccgaaggatgaatgaagaggtagagattttcgttaagccgcataccgagcagtatacgtggatccttaaactactcaaaacgcgcaaacccggcgaaatcgaaccgtacaagcgcaaagagctgtatccgaagaagaaatag

SEQ ID NO: 253190 - DNA, 1443 bp, Klebsiella pneumoniae
atgtccagaaggcttcgcagaaccaaaatcgttaccaccttaggcccggctaccgatcgcgataacaaccttgaaaaggttatcgccgcaggcgctaacgtggtacgtatgaacttctctcacggcaccgcggaagatcaccagctccgtgcggataaagtccgtgagattgcggcaaaactgggccgtcatgtcgctattctcggtgaccttcaggggccgaaaattcgcgtctctaccttcaaagaaggcaaaattttcctcaatatcggtgataaattcctgctcgacgcgaacctgggtaaaggcgaaggtgataaagaaaaagtcggcatcgattataaaggcctgccggctgacgtggttcctggcgatatcctgctgctggacgacgggcgcgtgcagctgaaagtcctggaagttcagggcatgaaagtgttcaccgaagtcaccgtcggcggaccattgtctaacaacaaaggtatcaacaagctgggcggtggcctctctgccgaagcgctgactgaaaaagacaaagcagacatcatcaccgccgccaaaatcggcgtcgactatctggccgtctccttcccgcgctgcggcgaagacctgaactacgcgcgtcgtctggcgcgcgatgcgggctgcgatgcaaaaatcgtggccaaagtagagcgtgcggaagcggtatgcgatcaggacgcgatggatgacgtgatcctggcctccgacgttgtcatggtagcccgcggcgacctcggcgtagaaattggcgacccggagctggtcggcatccagaaagcattaatccgccgcgctcgtcagctcaaccgctcggtcattaccgcgacgcagatgatggagtcgatgatcaccaacccgatgccaacccgcgccgaagtgatggacgtggcgaacgccgtgctggatggtaccgacgccgtcatgctgtctgcagaaaccgccgcgggccagtatccgtctgagaccgttgccgcgatggcgcgcgtttgccttggcgcggaaaaaatccccagcctcaacgtctccaaacaccgtctggacgttcagttcgataatgttgaagaagccattgcgatgtcggctatgtacgcggcgaaccacctcaagggcgtcaccgctatcattaccatgacggaatccgggcgtaccgcgctgatgacttcccgtatcagctccggcctgccgattttcgcgctgtctcgccacgagcgtacgctgaacctgactgcgctgtatcgcggcgtgactccggtttatttcgatagcgcaagcgacggcgtcgccgccgcgcacgacgcggtaacgctgctgcgtgataaaggctatctggtgaccggtgacctggtaatcgtcactcagggcgacgtaatgagcaccatcggcagcaccaacaccacccgtattctgaccgtcgagtaa

SEQ ID NO: 253191 - DNA, 933 bp, Klebsiella pneumoniae
  misc_feature (92)..(101): n is a, c, g, or t
ttgctaaaacgcctgatgatttcacccattaatgaaatcgtttccattgatgagcgcctgattacccatgaatatgctggaaaaaatccagnnnnnnnnnnccttagcaaatctgaacgcaaagtggcggaagtcattcttgcaacccccgcgcaggccattcattcaagtattgctgccctggcgctggaagccggcgtcagcgagcctacggtcaaccgtttctgccgcagtctggaaacccgcggtttcccggatttcaaactgcatctggcgcaaagcctggcgcacggtaccctctatgttaaccgcaacgtcgatgaagacgacagcgttgagtcctatacgggtaagatatttgaatcggctatggccagtttagatcaggtccatcattctctcgatatgtcagcgatcaaccgggcagtggaccttctcactcaggccaagaaaatcgccttcttcggcctgggctcatcggcagccgtcgcccacgatgcgatgaacaaatttttccgctttaatgtgccggtgatttattccgacgacatcgtcctgcaacgcatgagctgtatgaactgtaatgacgatgacgtggtggtgattatttcgcataccggcaggaccaaaagcctggtagagctggcgcagctggcgcgcgaaaatgatgcgatggtgatcgccattacttcgccgggcaccccgctttctcgcgagtcgacgctggccattacgctggatgtcccggaagataccgatatctatatgccaatggtttcccgcttagcgcagctgacggtgattgacgtactggcaaccggctttacccttcgtcggggagcgaaattcagagataacttgaagagggtcaaggaagcgctgaaggaatcgcgctttgataaagagctcagcttacacagtaatgaccaataa

SEQ ID NO: 253192 - DNA, 1476 bp, Klebsiella pneumoniae
atggcggtaacgcaaacggcccaggcatgcgatctggtcattttcggcgcgaagggtgacctggcgcgacgtaaattgctgccttccctgtatcagcttgaaaaagctggccagatccaccctgacacccgcatcatcggcgtcgggcgtgccgactgggataaagacgcttacaccaaggtagtgcgtgaagcgatggaaaccttcatgaaggagaaaattgatgaaggtttgtgggagaccctgagcgggcgtctggatttttgtaacctggatgtcaacgataccaaagcgtttactcgtctgggcaaaatgctcgatcagaaagagcgggtgacgatcaactatttcgccatgccgccaagtaccttcggcgcgatttgtaaaggcctgggcgaagcgaagctgaacgccaagccggcccgcgtggtgatggaaaaaccgctgggtacctcgcttgaaacgtcccgcgagattaacgatcgggtgggcgagttcttcgaggagtgccaggtctatcgcatcgaccattatctgggtaaagagacggtgttgaacctgctggcgctgcgctttgctaactcgctgttcgtcaataactgggatagccgcaccatcgatcacgttgagatcaccgtagcggaagaggtaggcattgaaggtcgctggggttacttcgatcaggccgggcagatgcgcgacatgatccagaaccacctgctgcagatcctgtgcatgatcgccatgtccccgccgtcggatctgagcgccgacagcattcgcgatgaaaaagtgaaggtgctgaaatctctgcgccgcatcgaccgcacgaacgtgcgtgaaaaaacggtgcgtggtcagtacaccgccggcttcgcgcagggcaaaaaagtgcctggctacctcgaagaagagggggcgaataaatccagccatacggaaactttcgtggccatccgcgtcgatatcgacaactggcgctgggcgggcgtaccgttctacctgcgcaccggtaaacgtctgccgaccaagtgttctgaagttgtggtgtactttaaaacgccggaactcaacctgttcaaagagacctggcaagagctgccgcagaataagctgaccattcgtctgcagccggatgaaggggtggatattcaggtacttaataaagttcctggccttgaccataagcacaatctgcaaatcaccaagctggatctgagctactcagaaacctttaatcaaacccatctggcggatgcctatgagcgtctgctgctggagaccatgcgcggtatccaggcgctgttcgtccgtcgcgacgaagtggaagaggcgtggaagtgggtcgattctatcaccgaagcctgggctgccgatcgcgattcgccgaaaccttatcaggcgggcacctgggggccggttgcctccgtggcgatgatcacccgcgatggtcgttcgtggaatgaatttgagtaa

SEQ ID NO: 253193 - DNA, 1812 bp, Klebsiella pneumoniae
atgaattctgaaatgttacgggtaacaaatcgcatcatcgaacgttcgcgcgctacccgcgaagcctacctcgcgcggattaaccaggccaaaactgacaccgttcatcgcgcccagctggcatgcggtaacctggcccacggtttcgccgcctgccaggcggatgacaaagcctcgttgaaaagcatgctgcgcaataacatcgctatcatcacctcctacaacgatatgctttccgcccaccagccctatgagcgctatccggagattattcgcaaagcgctgcactccgcgaacgcggtaggccaggtcgcagggggcgttccggcgatgtgtgatggcgttacgcagggacaagacggaatggagctgtcgctgctcagccgcgaagtgattgccatgtccgcggcgattggtctgtcgcacaacatgtttgacggcgcgctctatctcggggtctgcgataaaattgttcccggcctggcgatggctgcgctctccttcggccatctgccgtctatctttattccttctggtccgatggccagtggcctggcaaataaagaaaaagtgcgcattcgccagctgtatgcggaaggcaaagtggatcgtatggcgctgctggagtccgaagctgcgtcttaccatgcgcctggcacctgcaccttctacggcaccgccaataccaaccagatggtggttgagtttatggggatgcagttgcccggatcgtcattcgtgcatccggatgcgccgctgcgcgaagcgctgaccgccgctgccgcccgccaggtgactcgtctgaccggcaacggtaatgagtggatgccgctgggcaaaatgtttgatgaaaaagtggtggttaacgggattgtcgcgctgctggcaaccggcggctccaccaaccacaccatgcacctggtggccatggcgcgggcggcggggatcatcatcaattgggatgatttctccgatctctctgacgtggtgccgctgctggcgcgtctctacccgaacggcccggcggatattaaccacttccaggcggctggcggggtaccggtgctggttcgcgaactgctgaaaggcggactgctgcatgaagatgttcacaccgtggccggcttcggcctctctcgctacaccctggagccctggcttaataacggcgaacttgactggcgcgaaggggcgaccgctccgctggacgaacaggttatcgccacctttgacaaaccgttctctcgccacggtggcaccaaagtcctgagcggcaatctcggccgcgcggtcatgaaaacctccgccgtgccggttgaaaaccagattatagaagccccggcggtcgtcttcgagagccagcatgatgtgctgcctgcctttgaagcgggcctgctcgacaaagattgcgtggttgtcgtccgccatcagggaccaaaagcgaacggcatgccagaattacataaacttatgccgccacttggtgtattattggaccgccgtttcaaaatcgcgctggtgaccgatggtcgactctccggcgcgtcaggcaaagtaccatcggcaatccacgtgacgcctgaggcgtacgatggtggcctgctggcgaaggtacgcgatggcgatatcatccgcgtcaatggtcagacgggcgagctaacgctgatggtcgatgacgctgagctggccgcgcgtcagccccatattcctgacctgagcggttcgcgtgtgggaaccggccgggaaatgttcggtgcgctgcgtgagaaactctccggagctgaacagggcgcaacctgcatcaatttttaa

SEQ ID NO: 253194 - DNA, 642 bp, Klebsiella pneumoniae
atgaaaaactggaaaacaactgcagaagcaatcctcacctccggcccggttgtaccggtaatcgtggtgaaaaagctggaacacgctgtgccaatggcgaaagcgctggttgcaggcggcgtacgcgtactggaagtcaccctgcgtaccgagtgtgcgatggacgctatccgcgcaatcgccaaagaagtcccggaagcgatcgtcggtgccgggaccgtcaccaatgttgagcagttgaaagaagtgaccgaagcgggcgcgcagtttgctatcagcccgggcctgaccgaatctctgctgaaagcggcgaccggcgaaggcaccattccgctgatcccggggatcagcaccgtatccgagctgatgctgggtatgcagtatggcctgaaagagttcaaattcttcccggctgaagcgaacggcggcgtgaaagcgctgcaggcgattggtggcccgttcgcgcacattcgtttctgcccgactggcggcatctctccggcaaactatcgcgattatctggcgctgaacagcgtactgtgcatcggcggttcctggctggttccggcggatgcgctggaagccggtgattacgaccgtatcaccaaactggctcgtgaagcggtagaaggcgcgaagtaa

SEQ ID NO: 253195 - DNA, 1179 bp, Klebsiella pneumoniae
atgactgtattaggtacggcgctgcgccctgcggcaacaaaggtgatgctgttaggttccggcgagctgggtaaagaagtggccatcgaatgccagcgcctgggaattgagaccatcgccgtcgatcgttaccctgatgcgccggccatgcaggtcgcgcaccgctcacacgtcattaatatgctgcacggcgaagccttacaagcgctgattgagcaggaaaagcctgactttatcgtgccggaaatcgaggccatcgccaccgataccctggtggcgctggaacaggccgggcaaaaagtcgtccctaccgcgcgcgcggcgaagctcaccatgaaccgtgaagggatccgccgcctggccgctgaggaactgaagctgccgacctccgcctaccgttttgccgatagcgaatccgccttccgcgaggccgtcgccgagacaggactgccgtgcatcgtcaagccggtaatgagctcctcgggaaagggccagagctttattcgtacccacgaacagctggctgaggcctggcagtatgcgcagcagggcggccgtgccggggccggtcgcgttatcgttgaaggcgtggtgaattttgattttgaaattacccttctcaccgtcagcgccgtggacggcgtgcacttctgcgcgccggtcggccaccgccaggaagatggcgactatcgtgaatcctggcagccgcagcagatgagcgcgctggcgcaggaacgcgcgcaggacatcgcccgtcaggtggtgctggcgctgggcggttacggcctgttcggcgttgagctattcgtctgcggcgatgaggtgatttttagcgaagtctcgccgcgcccgcacgacacaggtatggtcacgctgatttcgcaggatttatccgagttcgccctgcacgtccgcgcctttctcggcctgccgattggcgcgattcgccagtacggcccggcggcctctgcggtcattctgccgcagatgaccagccagaacgtcaccttcagcaacctccaggcagcggtcggcgcgggtctgcagctgcgtctgttcggtaagccggaaattgacggctcacgtcgcctgggcgtaacgctggcgatagccgataacgtcgaagaagcggttgcgcgtgctaaagcggcggcttcagcggtcgtcgtcgaaggataa

SEQ ID NO: 253196 - DNA, 363 bp, Klebsiella pneumoniae
atggcggttgaaattaaatatgtagtgattcgtgaaggtgaggaaaaaatgtcttttgccagcaaaaaagaggccgatgcttacgacaaaatgctcgatctggcggaagtactgaacgactggttggttgagtgcccgcttacgctcgatgaagagcagcgcgatagcatggcgatgtggcttgccgagcgcaaagacaccctcaaccatattctgcgttccggtaagctgccggaagctgagggcagcgccgatgcgccagccgcgcgcgcagaagaagcagaagagggtgacaaacccgaagaggtcgtcgaatcggcagcctcggcaccggccaggccgcgcaaagcgaaagccgcctga

SEQ ID NO: 253197 - DNA, 681 bp, Klebsiella pneumoniae
atggctaactggcttaatcaactgcagtctttgctgggtcagcaagggcaatcttcttcatctgacgatcggtcacgcggcaaagacttcctgctgcccggcgcgcttggcggcctggccggactgctggttgccagcaaatcatcgcgcaagctgttagccaaatacggcaccggtgcgctgctggtcggcggcggcgcggttgcaggcagcgtattgtggaataaatatcagcagaaattgcgtaccagcgggcagcagacatcggcggcgcccacgcccgcacctgcggcctcctccgcgccagccgaacttgatgcccgcagcgaaaggctgattatggcgctggtcttcgctgctaaaagcgatgggcatattgacgaacgcgagcgggcaaatattgaagcgcagctgcgcgcggcgaacgttgacgtgcaggggcgggtgttaattgaccaggcgctggcgcagcccctcgacccgcagagcctggcgcagggcatcagcagcgagcaagaggcgctggaagtttactatattagctgcgcggtcattgatattgaccattttatggaacgcagctatctgaacgccctcggcgaagcgctgaagctcccgcaggaagtgcgtgaagatatcgaacgggatatccaggcgcaaaaacaggccgtaacgctctaa

SEQ ID NO: 253198 - DNA, 2115 bp, Klebsiella pneumoniae
gtgaagcagcctgaaaattttagtactcaatacaagccgcagaagaataagcagatgccaccaaaagcgaaacggatcccccatgccatgacattacatggcgacacgcgaatcgataattactactggctgcgcgatgacgatcgcgcacagccggaagtgcttgattatctgcgccaggaaaatgagtacggtaaaaaagtgatgtcttcgcaaagtagcctgcaggacagggtactcaaggagattatcgaccgtattccgcagcgcgaagtgtcggccccctatagcaaaaatggctaccgttaccggcaggtctatgagcctggctgcgagtatgcgatttatcaacgccagccggtcgtaaaagaagagtgggatgaatgggaggtcctgcttgacggtaaccagcgcgcggccggcagcgaattttacaccctcggggggttaggggtttctcctgacaacaacatgatggcggtggcggaagactatctctcccgccggcaatatagcctgcgcttctaccctttaaacgacggcgatgaatttgcggaagttcttgagaacgtctcgcctgattttgcctggagtaatgattcgcagaccctgtggtacgtgcgtaagcatcctaccacgctgctgccgtatcaggtctggcgccatcgccttggcacgccggccagtgcggatgttctggtgtatgaagagcaggacgatactttttacgtcagtgtacacaagacgacttcccagcagtttgtggtgatttatctggccagcgcgaccaccagcgaagtgctgctgcttaacgcggaaatgaccgacgccgagccggtctgttttctaccgcggcgcaaagaccatgaatatagcctcgatcactatcagcacgctttttatctgcgatccaaccgtgaagggaaaaacttcggcctttatcgcactaccctgcgcgatgagcagcagtgggagaccctgatcgcgccgcgtcaggaagtgatgctggaaggatttactctgtttaccgactggctggttgtggaagagcgccagcgggggctgaccagcctgcggcagatcaatcgtaaaacaagagagtcccagggcattgcctttgacgatccggcctatgtgacctggcttgcctataatccagagccggaaaccgctcgtctgcgctacggctactcctccatgacgacgccggatacgctatttgaactggatatgaataccggcgagcggcgggtactaaaacagcaggaagtcaaagggtttgatgccagccattatcgcagcgagcatttgtggattaaagcccgcgacggcgtcgaagtcccggtctcgctggtctaccgtcatgaacatttccgtaaaggcgccagtccactgctggtgtacggctacggctcctatggcgcaagcatggatgcggatttcagcgccagccgcctgagcttgctcgaccgcggttttgtgttcgctatcgcccatattcgcggcggcggcgaactgggccagcagtggtatgaagacggaaagtttttgtgcaaaaagaacaccttcaacgattatctcgacgtctgcgatgcgctgctggcgcagggctatggcgatccgcgcttttgctacggcatgggcggcagcgccggcggcatgctgatgggcgtcgcggtgaaccagcggcctgagctctttcacggcgtggtggcccaggttccctttgtcgatgtcctcaccaccatgctcgatgagtcgattccgctaaccaccggtgagtttgaggagtgggggaatccgcaggatgaagagtattaccgctatatgaaaagctacagcccgtacgacggcgtgcaggctcaggcgtatccgcatctgctggttaccacgggcctgcatgattcgcaggttcaatactgggagccggcaaaatgggtggcaaaactgcgcgagctaaaaacggatgataacctgctgctgctctgtaccgatatggattccggccacggcggtaaatccggacgcttcaaaagctatgaaggcgtggcgctggagtttgcgtttctgattggcctggcgcaggggacgctgccgggccaggcggaggtatag

SEQ ID NO: 253199 - DNA, 660 bp, Klebsiella pneumoniae
atgctgcgcgtaatcgatacagaaacctgcggattgcagggaggcattgttgaaatcgcctcggttgatattgtcgacggacaaattaccaatcccatgagccatctggttcgccccgaccgccccatcagtccgcaggcgatggcgattcaccgtatcaccgaagagatggtcgccgataagccgtggatcgaggagattgtgccgctgtatatgggcagtccgtggtatgtcgcccataacgccagctttgaccgtcgggtgttgccagagatgcagggcgagtggatctgcacgatgaagctggcgcgccgcctgtggccaggcatcaagtacagcaatatggggctatataagtcgcgcaagctcagcgtcacgacgccaccgggactgcatcatcaccgggcgctttatgattgctatatcaccgccgccctgctgctcgatattatcaacacctccggctggacgcctgaggaaatggcgaccattaccggccgcccggcgctactatccaccttcaccttcggcaaatatcgcggcaagccggtttccgaggttgcggaaaacgatcccggctatttacgctggctgttcaataacctggagcgtatgagccccgagctgcgcctgacgctgaagcactatctcggggagtaa

SEQ ID NO: 253200 - DNA, 231 bp, Klebsiella pneumoniae; identical to SEQ ID NO: 176074

SEQ ID NO: 253201 - DNA, 375 bp, Klebsiella pneumoniae
atgccaatcatcgccggacgcgcgctgcgtctgtctctgtttctcgccggttgcctcagcgcagcaggtgcattcgcccacgcccatttgcaacagcagcttccggcagccggcgcggtggtggcggcttcaccccaggcgctgaccctcaacttctctgaaggcatcgaaacgcagtttagcggcgtgaccctcaccgggccgcagcagaagaccatcacccttggtaaacctgtccgcagcgacagcaataaggccgagctgacggtaccggttgagcaggcgctgacgccgggcgaatataccgttgactggcacgtggtctccgttgatggccataagacgaaaggacaatacacctttaccgtgaagtaa

SEQ ID NO: 253202 - DNA, 870 bp, Klebsiella pneumoniae
atgctgagtggagtctatgtcagcttacgctttatccattttatctcgctgatcgtcgctttcggctgtgtcctctatgggacatggtgggcgccggtaaccttgcgccgcttaatgatgcagcgtttctacccgctaatgcgccatttattgctggcgagcgcgctgtcggcgctgctgatgctgatggcgcagggtgggctgatgggcagcggctggccggacgtctggcagccggctatctggcaggcggttgccggaacgcagttcggtagcgtgtggatatggcagattttactcgcccttgtggcgctggcggtggtctggctgaagccccgacgatcgggacgtttgctgctggtcctgttttgcgcacagctgctgctgttggccggcgtcggtcatgccgcgatgaacgacggctggctggggatagtgcagcggaccaaccatgctattcatctgttttgtgttgccagctgggttggcggtctgctgccgtttatctactgtcttcgcctggcgcacggtcgctggcggcaggcggcgattgccaccatgatgcgtttttcacgctacgggcatctggcggttgctggcgctatcgccagcggcgcagtgaatgcgctgttgatccagggcgggctcatcagcgcctcgccctgggggcgtatgctgttgctcaaatgtgcgctggtggcggcaatggtggtaattgcgctggtgaaccggtatgttctggtgccacgcatgtcggcaggcggaacgcgagcggagcagcttatcgtgcggaccacgcagatagaaattgcgctgggggcgctggcgctatttgccgtcagcctgtttgccacctgggaacctttctga

SEQ ID NO: 253203 - DNA, 339 bp, Klebsiella pneumoniae
atgaaaaaaatcgttctgacaatgttgttattggcaagttctggcgctgcgctggcggcgccgcaggtgattaccgtgagccgctttgaagtcggtaaggagagctgggcgtttaatcgggaagaggtgatgctgacctgccgtccgggcaacgcgctgtttgccatcaatccgagcacgctggtgcagtacccgttaaacgacatcgccgagcagcagatgaaagacggtaagaccaacgcgcagccgatttctgtgatccagattgacgatccgcagcagccgggacaaaaaatgagccttgcgccatttattgagcgcgcgcagaaactctgctga

SEQ ID NO: 253204 - DNA, 960 bp, Klebsiella pneumoniae
ttgaaaaatattatccgggtattcgtgatgcttttagcgcttgggcaagccagcaacgcgctggccgcctgcagcatcaaaaccagtgcgccagcgatcggccctgtcgattcctttgcgctctacagcgcgcctcagggcgtgatggcgggcgcagggttttactgcaccccggaactggtggcgctgaactcgaccaacacgctaagcgctaccctggcgtcggccaaccagagcaacagagtgccccggctgcttaacggcgccggcgatgctatcccttacagcatctgttctgacgcatcctgctcgccggcctatcaggatggcggcgtaataagctggtccaggacaacgctgcttgagctgctggggctatttaactcgagcgatggcaccatgccgctctacttcagaaccaccccgggagccaacgtgcccgccggaacctatagcgatgtcttaaccattacctgggtgtatcgtttttgctacgtcgggctcgatctactgggcattaagatatgtattccgaataacggcaccctggtctctacggtcaacgtatcggtgagggtgaccaatttttgctatatcgacagcgcgccggacgtcgagtttgcccctgccgccctcccgtccggttttagttcctacagcggccagcttgccattcgctgcacaaaaaacgcggcctacaccgtcaatctcgccagtactaacgccagcgtcggcgactggcggcagatgagccagcccatcgctaaccaaccgactgcctttttgcagtatcaattttaccagcccaacggcagcgcctggacggaaaataacaatctcagcgtgaccggctccggcgccgcgcaatctgcaagctacaccctgaagattaacccgaaccagagcaaccagcctgcgggaacctacagcgataccgtcctggtgacggtgagctattaa

SEQ ID NO: 253205 - DNA, 2334 bp, Klebsiella pneumoniae
atgcgcgatctgaaaagggcagcgaccggagggctgttggcactagcgtcggtaacggcctgcgctgcgacctatgattcgttgcctgcgccagcagcttcatacagcgataagcaggagtatgagctgtatctcagcatatcggtcaacgggaatctcgtggcgagcgccgctccggtaaaggttattacgggtcgctattggatcgccgccgacattttgcgccaggcgcatattcccttacagacccaagatgcgctggttgacgtgacgacgatcccctcggttaaagtggaatacgatcggccggggcaaatgctcaatctccgggtgccggacaattggcttcccgagcagcgcatcggggagacgacgggacaaaactaccaggccgcgataagcagtcccggcatgttatttaactatgacgcttacagcctcttctcgtccggcggaacgcaaaccaccagcacctataccgagacgcgcctcttcgggccgccaggcgttctttctaacaatgccgtcatccggcaaaactggtcttcgacgggctacgagcagcagggctttatgcgttacgacaccctgtggaaatacagcgacagcgaacagatgattagctaccaggccggggatgtggtcagtaacgccctgacctggagcagttcagtacgtatgggaggactccggctgagccgtaacttcagcgttcgcccggatctggtgacgtatccgctgctcaatttatccggcagcgcggcggttccttcaagcgtcgatctgtttattaacggctataaaaccagctccgcgcaaatcaatggcggcccctatacgctgaccaacgttccctggatcagcggcgccggcgaagctaccgtggtgaccaccgatgccctgggtcgtcaggtgtccaccagcattcctttttatgtctccaacaccctgctgcgcgaaggcctgagtgattttgatttcacccttggggccctgcgcaacaactacggtatcaagagtgccgattatggcgccggcgcgctgagcgcaatttatcgctatggagtcaacaactggctcacgctgtcgacgcatacggaagaccgcaaaggattaaccaatgccggaataggcagcgatatcggcgtggggaacctgggcaccctcagcctgtcgaccagcgccagccggggcgacggcagcggcaatcaactcaccgccggatactcttattacgccagcagctggggagtgaactatcagcatattcgccgcagcgccgactacaacaacctcagcacctacggttctgtcgccgcattaagccgtcagtcagatcaggcgacgctgagcctgagcccatgggacagagcgctcggatctttcagcattggctattttgatatcaaagccgaggataattcacatacccggctcatgaacctctcctggagccgcagcctgtggcaaagcagcagcctcaacctgagcgtaaaccgcgatctgcaggacaatagctacgccagcatgttgcaaatcattatccctttcgattcgcaaagctccgtgcagctaagcggtcaacgatccagctcaggccaatggggggaaaatatcaacgttagtcgctctgccccggcggaaggcgggctgggctggaacctcgcccattcgatcggcggcaataactatagtcaggcggatctgacctggattaatcgcgtgtccacgctgagcggtggctattacgggtcgcgtgacgatcatcacagctggtttgaggccgcaggctcggtcgtgctgatggataacagtctgtttttcgcccggcaaattaacgacgcctttatcgtcgtttctaccggcaactatccaaacattgcggtgaattatgaaaaccgcaaagtcggcgtgaccgataaaaatggtcatctgctgatcccctgggcttcggcctggtatccgggaaaggtcaccctcgatacgctgccgttgcccacggataccgaagccgtcacggtggaaaaacgcatcgccgtacgcgaaggcagcggcgcgctggttgatttcccggttaaccgcgtgcgctcggcaacgctcatcttcgtcgatgctcagggacaaccgctaccggtcggtacgccggtggaggaagttaatagtcaacagcgcgccctggtgggctacgacggcgtggtctggttctcgcacctcgggcgcattaacgaagtcaaaataaatgccggagagcttcgatgcagcatcccgttcgagcttccggagaccacgccggttccgcagcggataggcccggtcagctgtccctcttcatag

SEQ ID NO: 253206 - DNA, 765 bp, Klebsiella pneumoniae
atgattcgctgtagatttgcgctgtttacattcgctttatctctcccctgctccgttatggccgcaagctccgtcctcgtttggcccatcttccagactatcgaaagccacgaaaaggggtcagagctgtggctggaaaaccgcggcgctaccccggttaatttacagctgcgggttttttcctgggaccaaaaagggtcgtccgatgcctatgccgatcagcgtgacgtcgtcgccagcccaccttttaccaccgtcgcgcccggccagcgtcagctggtacggttgatgcgcatcgcccccgtcacggctggcaaagaacaatcctaccgtattgttatcgatgagattcctgccgctgaaccgacggcgcagaaggaacagaattccgccggactgaaaatgcgcatgcgctatgtcctgccgttgtttacctacggacagggcatcaacccgctgaagaacaatggatccgtggaagcggtaagaaccacgctgcgctggtcgctctcgcggcaaaatagccgccagacgctgtgcatcgacaataccggcaatcagcatgcccggctcagcgcggtttactgggccaatgccggtggcaagggccagatagctcaggccaatggcctgctcggctacgtgctggcgcagaaaaagagctgtttcccgctggtgggaaacgcttcagtcccctcaggcatgcacctgttcgcgaaattaacggataacggccaggcggtggaaattccggcggatcgttga

SEQ ID NO: 253207 - DNA, 519 bp, Klebsiella pneumoniae
atgcttcgaccagagtggcttgcattaattctgctttttacctcgggcgcccacgccgctactgtccagaagaccttcaaagtctccgcgcagataaccgctggctgtgcgcttggcgcgggggatggctcccaaacgacggatttcggcaccttgagttttggcactctgtcatcactttataacaatgttgatgtcgccagtacttccggcgccggctcaatcatcgtgacctgtacccccggcaccgctatctcaatcgctctcgactatggcgtaaacggcggttcggccacccggcgctatatgtcgaacggcggcggcaacacgctggcctatcagctttatcaggatgccaaccgcgctaacgtttggggcaacagtacgctggccctgagcgttgcatcatttccgagctccacgcaaacctatacggtttatggccgcctttttgccacgaatggcttcccggcggtgggctcctataccgacacggtcaccgtcacgctgacctattaa

SEQ ID NO: 253208 - DNA, 552 bp, Klebsiella pneumoniae
atgaacgtgaaaacgatatcgcgcagtatcctgggcggcttactgagcgccatagttcttacgcaaccggcttccgcagcgggaacattaagcggccagattagtgttcaggtcacacttggcagcggctgcagcgtatcgaacgtccggaatggagaaaacaaccgctggggcacgattaatttcggcgcctacggtgatttagccaactccattgatgcaagcgtcaccggaagcggcggaggtaacgcgcttaccgtgacctgtaccgaagatcttgactcaacgctgacgcttgacggcggccagtatggcgatgctgctctgcgttacatgaaaaacgcggcaggcaaccagcagattgcttatcggctttatgcggatgccgcccgcagtcaggaaattttacccggcggaacaatcgctattgtaggcacaggcaacccgcaggctatccccgtttttgcccgtattcgccccgaagaccagagcgtcaacgcgccgacagccgatgtgtatgacgacatcgtaaccgcaacgttaacctggtaa

SEQ ID NO: 253209 - DNA, 945 bp, Klebsiella pneumoniae
gtgacggataacagcctgcattcagccggggtcgttgaacgacgccccaatcttattgccgacctggtgatggggcgactcacccctgcacccatctggcaaaaacgtaattaccggctgaagtttttactgcgcacggcattattttatgcgccaacgcgcagcatgctggagagcctgtcggcgcgcgcggacttcaatcagctgctgaccgctcaggtgactctgccgggcaaggttcatcgtcagtatttaacccgcgggctcaacgccagccagcgcgcgcacgcgattatcagccactaccagtttgtcgactcgctgggcggatcgcgcctggctgatgccatgaccgcagcgaatgagctgccgctgcttgagctggcaggcaaggacgacagccggttttcgctttccgcctcctcggcgggcaaagctgaacgcgagggtgaaacgaccctatggctgcgcgatggcgatgggatcgtgctcgccagcgcgacttttagcgtttcccgtcagcaggatcgctggcagttaactattggcggcctgcaggggccgcgtagcaatatttcgcatgaagtgattaaacgagcaacccgcgcctgctacggtctgttcccgaaacgcctgctgatggagtttatctggctaatggcggcgcgttgcggcattcaacatatttacggagtcagcgataacggtcacgtcttccgcgcgctgcgctatcgtctgagcaaagggcgccatttccacgccagctatgatgaattctggcaatctatcgaaggggtagccgacggtgcatggcgctggcgcttgccactgaagctggaaagaaagacgcttgagagcattgccagtaagaagcgcgctgaatatcgtcgccgcttccagctgctggatgatatggctgcgcagatgacaattctcatggattaa

SEQ ID NO: 253210 - DNA, 654 bp, Klebsiella pneumoniae
atgtatcagcgtattaacggttccgcctggcgtaatatctggctggttggcgacctgcacggctgctttgcgcggctgatggaagcccttcgcgagcgcaggttcgatccttaccaggacctgcttctttccgtgggcgatctgatcgatcgtgggccgcaaagcgcggagtgtctggatttactgcgctatcgctggtttttcgcggtgcgcggcaaccatgaacagatggcgctggatgcgcttgccgatggcgaaccgatgctctgggaaatgaacggcggcgactggtatacgcaacgctcagaacagcagaaagagcgcctcgcgcctcttatcgcccgctgccgtcatctgccgctgattattgagctccacagcgctgagcaggtacatgttatcgcccatgcggattatccggcgacgctttatcgctggcagcaggcggtggatgagcatcaggtgctgtggagccgacagcgtcttaccgatcatctctccgggcgtcacggcgcgattgccggtgctgaccacttctggttcggccatacgccgcttaaacggcgttacgactacgataatcagcactatattgataccggggcggtatttggcggggagttaaccctggcgtcgctacagaggacgggctaa

SEQ ID NO: 253211 - DNA, 192 bp, Klebsiella pneumoniae; identical to SEQ ID NO: 175474

SEQ ID NO: 253212 - DNA, 240 bp, Klebsiella pneumoniae; identical to SEQ ID NO: 175473

SEQ ID NO: 253213 - DNA, 1476 bp, Klebsiella pneumoniae
atggtaaactacgcccccttttttcgttgtggtgcgctccccgtggctcaaaacgctgtctatcttcctgaagaattcctcgctcaaatgcgtacggcaatgccgacgcatctctctttcgctgactttatcgccgcctgccagcgccccctgcgccgaagccttcgcgtaaatacgctaaaaatcagcgtggctgactttttgcagctggtcgccccttacggctggcagctaacgccggtaccctggtgtgaggagggtttttggatcgatcgcgaggaagaagacgccctgccgctgggcagcaccgctgaacatctcagcgggctgttttacatccaggaagcgagctccatgctgccggtcgccgcgctgtttgccgacggaaatatgccgaaccgggtgatggacgtcgccgccgcgccggggtcaaaaactactcagatcgccgcgcgcatgggcaataaaggcgggatcctggccaacgaatattccgccagccgggttaaagtgctgcacgccaatatcagccgctgcgggatcggcaacgtggcgctgacccattttgatgggcgcgtattcggcgccgcgctgccggagtgttttgatgcgattctcctcgacgccccctgctccggcgaaggcgtggtacggaaagaccccgatgcgttaaaaaactggtcgccggaaagcaacgccagtatcgccgagacccagcgcgagcttatcgacagcgcgtttcatgcgcttcgccccggcggcacgctggtctactccacctgtaccctgaaccggcaagaaaacgaagacgtggtcaacggactactggcgcgctatccgcaggcggcagaggtactgccgctcggttcgctgttcccgcaggccagcgaggcgctaaccgaagaaggtttcctgcacgtgttcccgcagattttcgattgcgaaggcttcttcgtcgcccgtctgcgtaaaaccgccgccatcgcaccgctgccgacgccggtttataaggtcggtaaattcccctttatcccgcttaaaagccgcgaatcggccgccattgcgaccgccgctgccgccgttggcctgcattggggcgctgaccatacgctctggcagcgggataaagaaatctggctattccctcaggcgctcgagtcgctattcggcaaagtgcgcttttcccgcatcggtatccgtctggccgaaacccacaacaaaggctatcgctggcagcacgaagcggtcattgcgcttgccgcgcctgatgccccctttgagctgacccaggccgaagcggaagagtggtaccgcggtcgtgacgtctatcctgcagtaccgccgcagcaggatgatgttattgtcacgtttcagggcgcgccgctggggctggcgaaaaaaatcggctcgcgtttaaaaaacagctatccccgtgaactggtgcgcgacggaaagctttttagcactaaagcgtga

SEQ ID NO: 253214 - DNA, 2634 bp, Klebsiella pneumoniae
atgagtcaggaaacgcccgcttcgccgactgaagccaagattaaaactaaacgccgcatttcaccgttctggctgctgccggtcatcgcgctgctgattgccggttggctgatttggaccagctatcaggatcgcggtacgacgatcgtcatcgacttccagtcggccaacggcatcgttccgggacggacgcctatccgctatcagggggtagaagtcggtacggtcgagaatatctcgctaagcaaagatctgagtaaaatcgaggtttctgccagcgtcaaaggcgatatgaaagatgcgctgcgcaaggagacccagttctggctggtgacgccgaaagcctcgcttgccggcgtgtccggcctggatgcgctggttggcggcaactatatcggcatgatgccaggccagggcgagcccgaggatcactttgtcgccctcgatacccagccgaagtaccacattaataacggcgagctgatgatccatctcaagtcagcggatttaggctcgttaaccagcggctcgctggtctacttccgtaagattccggtcggccgggtgtatgactacgccattaatccgaacaatcagggcgtcacgattgatgtactgatcgagcggcgtttcaccaatctggtgaaaaaagagagccgcttctggaacgtatccggcgtaaaggcggacgtcagcctgagcggagctaaagttcagctcgacagcctctccgcgctggtgaacggcgctatcgcctttgattcccccgatgattctccgcaggctcagcagaataccgattatcacttatacgaagacctggcgcacagccagcgcggagtggtggttaaactggaccttccggacggcgcagggttaaaagcgggctctacgccgctgatgtatcagggtctggaggtcggccagctcagtaaactaaatctcaatgctgacgggaaagtcaccggcgaaatgaccgtcgatcccagcgtcgtcagcttgctgcgcgagaagacgctgattcagatgaagaagccgaaaatctcgctggataatcccagcgtcagcgccctgctgaccggtaccacctttgagctggtccccggcgagggtgaaccgcgcaaccagtttgcggtgctgccagccgataaatccatcctggaagagccggatgtcgcaaccgtcacgctcaccgcgccggaaagctacggtattgatgccgggcagccgctgatcctgcacggcgttcagattggccaggttctggagcgcaagctaaacgccgacggcgtcactttccaggtcgcagtcatgcccgagtaccgttcactggtgcgcggcgacagcaaattcgtggtcaatagccgtatcgacgtcaaagtcggtattgatggcgtggagttcctcggcgccagcgccagcgaatgggtcaacggcgggatccgcattattccgggcgacaaaggggcgatgcaaagccgctatccgctgtacgccaaccaggaaaaagcgctggaaaacagcatgagcgatctgccgaccaccactctcacgctctcagctgagacgctgccggacgtccaggcaggatccgtggtgctgtatcgtaaattcgcagtcggggaaatcatcaccgttcagccgcgcaagaacgcttttgagatcaacatccatatcaaaccggaatatcgccatctgctcaccagtaacagcgtgttctgggccgaaggcggcgcgaaagtgcagcttaacggcagcggcctgacggtacaggcatcccccctctcccgcgcgctgaaaggcgcgataagctttgataatctgagcggcgccagcgccagcgcgcgtatcgataataaacgcgtgctgtatgcgtcggaaaccgccgcccgcgcggtgggtggccagataaccctgcacgcctttgacgccggtaaaatcgccgaaggtatgccgatccgctacctggggattgatattggccagatccaatcgctgaatttaattaccgcgaaaaacgaagtgcaggcgaaagcggttctctatccggaatacgtcaacaccttcgcccgcgccggcacgcgtttctcggtgattactccgcagatttccgcagcgggcgtcgagcatctggatacgctcttccaggcctatattaacgtggagccgggacgcggtgcgccgcgccgtgattttgaaattcaggaaaccacgattagcgactcacgttatatcgacggcctgagcattatcgtcgaagtacccgaagccggttcgctgggtatcggcacgccggtgctgttccgcgggcttgaagtcggtacggttaccggcctgatgctcggttcgatgtcggatcgcgtcatggtacagctgcgtatcagtaaacgttatcagtatctggtgcgcaacaactcggtgttctggctggcttccggctatagcctcgactttggcctgatcggcggcgtggtgaaaaccggtaccttcaatcagttcattcgcggcggcatcgcttttgcgacgcctccgggtacgccgctggcgccgaaagcgcaggatggtaaacacttcctgctgctggagagtgaaccgaaagagtggcgcgaatggggtaccgccctgccgcgctaa

SEQ ID NO: 253215 - DNA, 1245 bp, Klebsiella pneumoniae
atgatcgtctactcggtcagcgcccctgttgcgcacgctcactatcagcgctgcccgcagtgcgacctgctgtttagtttaccggtcctcaaaaagaatcaaagcgcctggtgccctcgctgcaacgccaaagtgcgcgatggccgcgactggtcgcttacccggctgggcagcatggcgatcgctatgctgctgctgatgccttttgcgtggagcgaaccgctgctacgtttgcatctgctgggcgtgcgtatcgacgctaacgtccttcagggcatctggcaaatgaccggccagggcgatccgctcacggcggcgatggtgctcttttgcgcggtcgtcgcgccggtgctgctggtggtgtcaatcgcctacctgtggttgggcaacgtgctgggcatgaatctgcgaccgatactgctgatgctggagcggctcaaggagtgggtaatgctggatatttacctggtcggcatcggcgtcgcctccattaaagtgcaggattacgccttcctgcagccgggtatcgggcttgtcgcctatatttccctcacgctgctcagtatcctgacgcttatccatatgaacgttgaagagctctgggagcgtttttatccccagcgcccggcgctgcgcccggatgaaaatcttcaggtctgtctgggctgccattataccggacatcgcgatgcgcgcgggcgctgccgccgctgccacacgcctttgcgccatcgacgccggcaaagcctgcaaaagagctgggctgcgctgattgcatcactggttttcctgcttcctgccaacctgctgccgatctcgatcatctacgtcaacggcgcgcgtcaggaagacaccatcctttccggcattatgtcgctggccagcagcaacgtcgccatcgccggggtggtgttcatcgccagtattctggtcccattcaccaaagttattgtattgtttaccctgctggtcagcatacaattcaagtgtgaacaggggctacgtacccgcatcctgctgctgcggctgattacctggatcggccgctggtctatgttggatctttttgtcatcgcattaaccatgtcgctgatcaaccgcgatcagctcctcgcgtttacgatggggcccgccgcggtctattttggcgccgcggtaattttaactatccttgctgttgaatggctggacagccgcttactttgggacgcacatgagtcaggaaacgcccgcttcgccgactga

SEQ ID NO: 253216 - DNA, 564 bp, Klebsiella pneumoniae
atgcatttaaagcttattttattaggctgtaagtgtaaggcagtaagacaactaagcgatcatataatgaacaaatcagaattctacgcggatttaaaccgcgattttcagacgttaatggcaggcgaaaccagcttcctggcgatgatctcaaataccagcgcgctgttatttgaacgactggcggaagtgaactgggccggtttctatctgctggaaggcgatactctcatcctcgggccgttccagggcaagctggcctgcgtgcgtattccggtaggacgcggcgtatgcgggactgccgtcgcgcagaatcgcgtgcagcgggtcgaggatgttcacgcctttgatggccacatcgcctgcgatgccgccagcaattcggaaattgtcttcccgctacgggtgaacaatcaaaccatcggcgtcctggacatcgatagcacggcgcattcccgcttcaccgttgaagacgagcggggtctggcagaactggtctcgcatctggaaaaactcatttctgccacggattatcaaaaaatattcacccgcgtcgcaggataa

SEQ ID NO: 253217 - DNA, 882 bp, Klebsiella pneumoniae
atgatgcgaatcgcgcttttcctgctgaccaacctggcagtgatggtggtgttcgggctggtgctaagcctgacgggaattcagtcaagcagcatgaccgggctgctgatcatggcgctgttgtttggcttcggcggttcaatcgtttcgctgctgatgtcgaaatggatggcgttgaaatcggtgggtggggaagtcattgagcagccgcgtaacgaaaccgagcgctggttggtgaataccgtcgcgcagcaggcgcgccaggcgggaattgccatgccgcaggtcgcggtctaccatgcgccggatattaacgccttcgcgaccggcgcgcgccgcgatgcgtcgctggttgcggtcagcaccgggctgttgcagaacatgagccgtgatgaagcggaagcggttatcgcccatgagattagccacatcgctaacggcgatatggtcaccatgacgctgattcagggggtggtgaacaccttcgttatctttatctcgcgcgttatcgcgcagattgcggcgggcttcctcggcggcaaccgcgatgaaggtgaaagcagcaacggcaacccgctgatctactttgcggttgctacggtgctggagctggtgtttggtattctggccagcatcatcaccatgtggttctcccgctaccgcgaattccatgcggacgctggctcagcgaaactggtggggcgtgagaaaatgatcgctgcgctgcagcgtctgaaaaccagctatgagccgcaggaggccagcagcatgatggcattctgcattaacggtaaagcgaaatccatgagcgagctgtttatgactcacccgcctctggataagcgcattgaagccctgcgcagcggcgaatatctgaagtaa

SEQ ID NO: 253218 - DNA, 1374 bp, Klebsiella pneumoniae
atggataaaaacctccccgatgggctgccagcaccgcagcgttacggcgccatcctgaccattgtattaggcctgacgatggccgtgctggacggcgctatcgccaacgtagcgcttccgacgatcgccagcgatttaaacgcgtcaccggcatcctcaatctggatagtaaacgcctatcaaattgccattgttattgcgcttctgccgctctctttcctcggcgatatggtcggctatcggcgcatttataaaatcggcctggtcgtattcaccttcacctctttagcctgcgcgctctcccgcagcctggaaatgttgacgctggcgcgcgttgcgcagggtcttggcggcgcggcgctaatgagcgttaataccgcgctgattcgcctgatttatccccgccgctttctcggccgcggaatggggatcaactcttttgttgtcgccgtctcatccgctgcgggcccgaccattgccgccgctatcctgtcgatggcttcatggcaatggctgtttctcattaacgttccgctgggcgttatctcactggttctcgcgatgcgctacctgcccgccaatgtcggcgggagcaaggtcacccgcttcgatctgcccagcgccatcatgaatgctctcactttcggcttattaattaccgctctcggcgggttcgctcagggccaatccggcgagctggtgctggcggaggttattgcgatgctggtcgttggattcttttttgtccgccgtcagctcagaatgccggttcccctgctacccgtcgatctgctgcgcattccgattttttccctgtccatctgcacctcgatatgctccttctgcgcccagatgctggccatggtttcgctaccattcttcctgcagtcgatgcttggacgcagcgaggtggaaaccggtctgctcctgacgccgtggccgctggcaaccatggtaatggcgccgctggcaggctatttgatagagaaatttcacgccggtctgctgggggcgattggtctgctggtaatggcctgcggcctgttcggtctggcgatgctcccctccacacccacggatctggatattatctggcgaatggcgctctgcggcgcgggctttggcctattccagtcacccaacaaccatacgatcgtctcttcagcgccggctcatcgcagcggcggagcaagcggcatgttgggtaccgcccgtctgcttggacagagtacaggcgccgcgctggtggcgctgctgtttaacctgctgggcaatagcggaactcataccgcacttctgctggccgggatccttgccgtcgtcgccgccgccgtcagcgggctacgcgtcacgcagccgcgcgccaggctgtaa

SEQ ID NO: 253219 - DNA, 792 bp, Klebsiella pneumoniae; identical to SEQ ID NO: 175464

SEQ ID NO: 253220 - DNA, 240 bp, Klebsiella pneumoniae
atgcgattgatcattcgtaccattgtggtgctggctatcttatggattggcgtattattaagcggctacggcgtgttaataggcagcagtgagaatgccggtgggttaggattgcagtgcaaatatctcaccgctcgcggcatcagcaccgcacaatatgttcactccagcagcggtattatcggcattaccgattgccctgttctgcgaaaaagcgtcacggtagtggataacggctag

SEQ ID NO: 253221 - DNA, 291 bp, Klebsiella pneumoniae; identical to SEQ ID NO: 175462

SEQ ID NO: 253222 - DNA, 210 bp, Klebsiella pneumoniae
atggcaaagattaaaggtcaagttaagtggttcaacgagtctaaaggttttggcttcattactccggctgatggcagcaaagatgtgttcgtacacttctccgctattcagggtaacggcttcaaaactctggctgaaggccagaacgttgagttcgaaattcaggacggccagaaaggtccagctgcagttaacgtaactgctatctga

SEQ ID NO: 253223 - DNA, 1746 bp, Klebsiella pneumoniae
gtgcaaaagaacaaacttaagtcagccgccaactttacccctttgcggttcgggttgctatgcgtggccattctttgctgtatggggctgctgctggtccgggtaggctggctgcaaattgtctctcctgacaatttggtgaaacaagaagatatgcgctccttgcgcgaagagcctatcgacgtgcagcgcggcatgattagcgatcgcgagggccgcccgctggcggttagcgttccggtgagcgccatctggatcgatccgcaaacaacgctcgcaaaaggcggcgtcggatatggcccgcgctggcaggccatggcgcaagctttacatctcaaccttagcgagctggctcatcgcgtgcaggcgcatcctcacgcgcgctttctctatctcgcgcgccagataaatcctgagcaggcagagtggatcgacaagctgcgcctgccgggtatcaatctgcgcgatgagtcgcgtcgcttttatcccgctggacacgttgccgctaacctgctgggctttaccaacatcgataatcaggggatcgagggagtcgagaaaagctttaatgctcagctgaccggtcaacccgggcgtcggctggtgcgcaaagatcgtcacggcaacgtcatcgaaaatatcacggaagttccggcagtcccggcccataatttgcagctcagtatcgacgagcgtctacaaacggtgaccgaagacgcgttggataacgccgtgcgctggaacaaagcggaatcgggggcggcggtattaattaaaattgataccggggaaattctgtcgatggccagctaccctgatttcaaccctaacaatcgcgatgatgcaaagctggatgatttccgcaatcgcgcgattagcgatactttcgagccggggtcgacggttaaaccgctggtgctgatgactgccctccagcaaggcattgttcagccggatagcgtggtggatacccatccgtttatcctcgacggccatcgcattcgcgacgtgggttactatccagaattaaccctcaccggcatcctgcaaaaatccagcgataccggcgtttcacatctgtcgctggcgatgcccattcagcatctcatcgatacctataaagcgttcggtttcggcgattctaccggcctgggattaaccggtgaaagcgccgggctgatgccgcagcgccgctattggggacagctcgaccgggcgaccttcgccttcggctatggtctgatggtcacgccgctgcagctggcgcacgtatacgctaccatcggcagctacggtattgaacgtccgctatcgatcacgcgtatcgatccgccggtcatggggacccgagtgatgccggagcagatagtgcatgaagtcgagcatatgatggagagcgttgccttgccgggcggcggggggaccaaagcggcggtgcgcgactatcgggtggcggtaaaaaccggtaccgccaagaaaatcggccctgacgggaaatatatcgacaaatacgttgcctataccgcaggcgtcgcgccggccagcaatccgaaattcgccctggtggtggtgatgaacgaccccagcaacggttcatattacggcggagcggtgtcggcgccggtattcagtcaaattatgggcgatgtgctgcgcctggaaaacgtcatgcccgatggaatgccggagggctcggaaaacctgatcgtcatgcatcacgacggcgttctgccgcctgcgctgtaa

SEQ ID NO: 253224 - DNA, 795 bp, Klebsiella pneumoniae
atgtcttacagttgccctctttgccacgcgccgcttgcgcgccgcgataatagctttatctgcccgcagcggcatcagttcgatctggcgaaggaagggtacgtcaatttgctgccggtacagtttaagcgctcccgcgatccgggcgacagcgccgaaatgatgcaggcgcggcgagagtttctcgatgcgggtcattaccagccgcttcgtgaggcggtcagcgcttatctgcacaccttcgcgccaacggatttactggatataggctgtggggaaggctactacactcatgccttcgccgctatcgccggccgctgttggggactggacgtgtcgaaatcggcgattcgcgcggcggcaaagcgctatccgcaggtcagcttttgcgtcgcctccagccagcgattaccgtttgaggatgcaagcctggatgcgatagtgcgtatttatgccccctgtaacgcgcttgaactggcgcgcgttgtccgtaccggcggctgggtcatcaccgcgacgccgggacctcgtcacctgatggaactaaaagggttgatctacgacgaagtgcgtttgcacgagcaaaacacggaagcgcttgagggtttcacgctatgtcatcagcagcagctggcctatccgatgcgcctcaaaggcagcgaggcggaagctttactgcaaatgacgccgtttgcgtggcgggcaaaaccgccggttcgggaaacgctgcgccagcaggcgctattcagctgccagaccgattttatgattcactgctggcagcgcgacgcctga

SEQ ID NO: 253225 - DNA, 567 bp, Klebsiella pneumoniae
atgaatgtatccgctacaattcttcttgccttcggcatgtccatggacgccttcgcggcctctattggtaaaggcgcgactctccataaacctaaattttccgaagccctgcgcaccggtctcatctttggcgctatcgaaacgctcactccgctgttcgggtggggaatggggatgctcgccagccagttcgtgctcgagtggaaccactggatagcctttgtattgctggtatttctcggcggccgaatggttatcgaaggggttcgcggcggcgatggcgaggagtgtgaagctccgcgccgtcacggtttctggctgctggtcaccaccgctttcgccaccagccttgacgctatggccgtcggcgttggcctggcgtttttgcaggtcaacattatcgccaccgcgctggctatcggctgcgcgacgctgataatgtcaacgctgggcattatggtaggacgttttatcggcccgctgctcggcaaacgggcggaaatcctcggcggtatcgtgctgatcggcatcggcgcccaaatactctggagccattttgccggctaa

SEQ ID NO: 253226 - DNA, 2259 bp, Klebsiella pneumoniae
atggcgattctttctccccgcaaaacggctctggcgctggctgtcgccctgttttgcgcctggcaaggcccggcgttcgcccacggcggcgaagcccatatggtcccgatggataaaaccctgcaggatttcggcgcagacgttcagtgggatgactacgcgcagatgtataccctgatcaaagacggcgcttacgtgaaggttaaaccgggggcgaaaacggccatcgtcaatggtaaaaccctggagctgcaggtgccggtagtgatgaaagacggcaaagcatgggtttctgacacctttattaacgacgtttttcagtccggtcttgaccagaccttccaggtggaaaaacgcccgcatccgctgaattcgctgtcagcggcggaaatcagcgcagcggtcgctatcgttaaagccgcggcggatttcaaacctaatactcgctttagcgaagtctccctgcgcgagcccgataaagccgccgtctgggcctttgctcttcagggcacaccggtcgacgcccctcgcgctgccgacgtgattatgctcgatggcaagcacgtcattgaagccgtagtcgatctccggaataagaaggtcctctcatggacgccgattaaagaggcccacggcatggtactgctggacgatttcgccagcgtgcagaacatcatcaattccagcagcgaatttgccgaagtgttgaaaaaacgcggcatcgatgacccaagcaaggtggtcaccacgccgttaaccgtcggctatttcgacggcaaagatggcctcaagcaggatgcgcggctgctgaaagtggtcagctatcttgacgttggcgacggtaactactgggcgcatccgattgaaaatctggtcgcggtagtcgacctcgaacagaagaagattattaaaattgaagaaggtccgacgatcccggtaccgatggcagcccgcccctatgacgggcgcgaccgcgtggcaccgaaggttaaacccctcgatatcatcgagccggaaggcaaaaactacaccattaccggcgatgtgatccactggcaaaactgggatttccacctgcgcatgaactcccgcgttgggccgattctctccaccgtgacatataacgataacggcaagaaacgtcaggtgatgtacgaaggatcgctcggtggaatgatcgtgccctacggcgacccggacgtgggctggtactttaaggcctatctcgattccggcgactacggcatgggcaccctgacctcacctatcgtccgcggtaaagacgcgccgtccaacgcggtcctgctggatgaaaccatcgccgactataccggcacacccactaccattccgcgcgcgatcgctattttcgaacgctacgccgggccggagtataaacatcaagagatgggcaagccgaacgtcagtaccgagcgccgcgaactggtggtgcgctggatcagtaccgtcggcaactacgactatatctttgactgggtattccacgaaaacggcacaatcggcattgacgccggagccaccggcatcgaagcggttaaaggcgtgaaagcgaagactatgcatgacccgagcgccaaagaggacacccgctacggcacgctgattgaccataatattgtcggcaccacccaccagcatatttataacttccgcctcgatcttgacgttgacggagagaacaacacgctggtggccatggacccggaagtgaagccgaataccgccggcggcccgcgcagcagcaccatgcagatcaatcagtacacgattgatagcgagcagaaagcggcgcagaaatttgacccgggcaccatccgtctgctaagcaataccaccagggaaaaccggatgggtaatccggtgtcgtatcagattatcccttacgcgggcggcacgcatccggtcgctaccggggcaaaatttgcccctgatgagtggatttaccatcgcctgagctttatggataaacagctgtgggtcacccgctatcatccgaccgaacgcttcccggaaggtaagtaccctaaccgttcaattcacgacaccggcctcggccagtacgcgaaagatgatgaatccctggacaaccacgatgatgtcgtgtggatcaccaccggtaccacccacgtggcccgcgccgaggagtggccgattatgccgaccgagtgggcgcatgcgctgctgaaaccgtggaacttctttgacgagacgccgacgcttggcgagaagaaggagtaa

SEQ ID NO: 253227 - DNA, 426 bp, Klebsiella pneumoniae
atgctggcttatatcactataggtacaaataactttcagcgcgccgtggacttttatgacgctatttttaaggttcttggctactcgcgattgcctgcctggacagaaagctgggcaatgtggggagatgaaaataatccggatgaggtattcaacttctgcatctgtcctccttttgaccgccatcccgcaacggcgggaaacgggacaatgttcgcatttcatgcagataatgctgacattgtcagacgattccatgcagcaggtctccttgcgggaggggagagtgaaggcgagccaggtacacgtcccgcatacggacccgacttttatgttgcttatctgcgcgatcctgacgggcataagctggcatgcgtttatcagcgctattctcctgaagccgataagttcgtaaatgaaccttag

SEQ ID NO: 253228 - DNA, 270 bp, Klebsiella pneumoniae
atgattagacaaaaagtacgcgtcatgaacagtaccggattacatgcccgacccgctgcaagcctggcccggatcgtcaaaaaataccagtcttcattgatactggttaataatgacaaagaaatccccattaaaggaatgatgagcattctgggtgctggtgtaaaaggaaatacgatgattgacctcatttgtgatggacaggatgaactggcctttatggatgaattgaaatctgcctttgctgctggttttggtgagtccgaatag

SEQ ID NO: 253229 - DNA, 861 bp, Klebsiella pneumoniae
atgcctttagttaatggtaggatcctgctcaattgcattcaggaaaagcaggtgctggctggtgcatttaatacaacaaacctggagacgacaatttctattcttaatgcaatagaacgctcggggttacctaattttattcagattgcgccaactaatgcgcagctttctggttacgattacatttacgaaattgtaaaacggtatgctgacaaaatggatgtcccggtgagcctgcatctggaccatggtaaaaccctggcagatgttaagcaggcggtaagagccgggtttacctcagtaatgattgatggcgcggctttaccgtttgaagaaaatattgcttttacaagagaagcggttgatttctgtaaatcatttggcgtacccgttgaagcggaacttggcgctattttgggtaaagaagacgatcacgttagcgaggctgactgcaaaaccgaacccgagaaagtccagcgcttcgttgaagaaacagggtgtgacatgctggcagtgtcaatcggcaatgtccacggactggaagatatcccacgcatcgatatcccgctactgcaacgcattgcttccgtttgcccggtccccctggttatccacggtggctctggtattgatgaagagattcttcgcagctttgttaattataaagtggcaaaggttaatattgcgagtgatttgcgcaaagcctttattactacagtcggaaaagcctgggtgaacaataataacgaggctaatcttgctcgcgtaatggcaaatgcaaaacaggcggttgaagatgatgtgtattctaaaattcagatgatgaataaacttcatcctgcatttcgcaaagcgtgttaa

SEQ ID NO: 253230 - DNA, 1509 bp, Klebsiella pneumoniae
atgcctgattaccgcgccgcgcttgtcatcgatattggcacaactaactgcaaagtcagctgttattcctgtcatgacgcgtcagttttggatgtccgcaaatttcctacacctaccagggcgtcggagaaaggcggggtagatttcgatatcgaagcgctgtggcaggccctgcggcaggtaatggctgaactggtagcttctgcacctttcccggtgaaagatatcagtattgcgagtttcggtgagtctggtgttttcgttgatgagcacggtgacattcttaccccgatgctggcctggtacgatcgtcgtggtgaatcttatctgtctttgttaagcaaatcagaggctgaagagctgtacgctattacaggacttccgcctcacagcaattattcagccttcaaaatgaaatggttgcttgataactactcattacatgaacgaagagatatttgctggttacatgcacctgaagtactgctgtggagaatgacgggtgagaaaaagacggaagtctcaatggccagcagaacgttgtgcctggatgtcagccgacagacctggtctcgtaaagctgccgggatcctcggtataccatttgatgcgctggcaccattgataaagccgggtgaagtcgcgggttggatgaccgccacgctcagacaagagcttggattctctcatgaagtcaaaatcacgattgcgggacacgatcatatggtcggagcccgggcattacagatgcaacccggtgaggtgttgaattctaccgggacgacagagggtattttgctgctggatactcagccaacactcagtgaccagtcacggagggataaactggcaaacggctgttattccgatgctgaatttttcacgctttttgcatcacttcctgttggcggttatgcgcttgaatgggtgagaaaaacgtttcgtttgacggatgaggaaattcaaacaggcctggaaaaagcacgcgagcgctatgtccagccttcctggtctgccgaagacattcccgtgttcattcctcatttgcgggggtctggttcgccaaataaaaatcggcacacgcgcggtctgatttttggtctgacggattcactttcgccagcaactctgcttgagagtgtctttatcggtctggcgatggaattttctctctgttatgagtgctttaacatccaggctggcaggagtgtaaaagtaataggccctgcggtgagaaacccgtactggctccagttgaaggctgacatccttcaatgccccattgaggccattgcttttgatgaagccgtatccgttggggcattattgatagcctgcccggagattgcccctccctctgttcctgtggccgggcgttatattcctgacgtaatacggtcggagaagttgcaaaaatatcagcagcaatggctagccttttaccgatttaaattaatgcaggaaggagtatttattggtgaggaggataatagctcagtagttcgataa

SEQ ID NO: 253231 - DNA, 1359 bp, Klebsiella pneumoniae
atgaatgatatagcacacaccctctataccgttgtgcaatatgtcctggggtttggccctacggttttattaccgctggtgctgttcttcctggcattgttctttaaggtaaaaccagcaaaagcacttcgttcatcgttaattgtcggaattggttttgtcgggatttatgccatctttgacattctcaccagcaatgtgggtccggctgcgcaggcaatggttgagcgtaccggtatcagtcttccagtggtcgatttaggctggccaccgctggctgcgattacatggggttcgccgatcgctccctttgttatcccgctgactatgctcattaacgtcgccatgttggctctgaacaagacacgcactgtcgatgttgacatgtggaactactggcactttgctcttgccggaacgctggtttactacagcacggggagttttgtgttagggctctctgccgctgctattgctgcgatagtcgtgctcaaagttgcggactggtcagcgccattagtcgctaagtactttggtctggaaggcatttcgcttcccactctgtcatctgtcgtcttcttcccgattgggctattgtttgacaaaattatcgacaaaatccctggtcttaaccgtattcatatcgatccggaaagtgtgcagaaaaggctcggaatctttggtgaaccgatgatggtggggacaattctgggtatcttgctgggtattattgccggttacgattttaaacatatcctgctgctgggtatcagcattggtggcgttatgtttattctcccgcgcatggtccgtatcttgatggaaggtttattaccgctgtcagaggctatcaagaaatatctgaatgcaaaataccccggtcgcgatgatctctttatcggtctggatatcgcagtagcagtcggtaatccagctattatctccacggccctgatcctgacccccatctctgtctttattgcatttctccttcccggcaataaagttttgccacttggcgatctggcaaatctggctgtcatggcttcaatgattgtcctggcttgtcgaggtaatattttccgggcagtgattaccgcgattccggtgatcatcgctgacctgtggattgcgactaaaattgcgccatttattaccggtatggctaaagacgttaatttcaaaatggccgaaggatcaagtggtcaggtatcaagcttcctggatggtggcaaccctttccgttactggctgcttgagatatttaacggaaatatgattgctattgggctggtcccggtaattgctctgattatttacgctatctttcgtctgacaaaaggaactgtctatgcctga

SEQ ID NO: 253232 - DNA, 288 bp, Klebsiella pneumoniae
atgagtcaaatgatactgtttgtttgtgcaacgggtgttgctacttccacagccgtggcagaaaaggtaatggaatattgtaaagagaatgggcttgatgttaattactcacaaactaatgtcgcctcactcccaaataatactgatggtgcagctttagtggtatcaacaacaaaagtgccttatgaactggatatcccggttgttagtggcctgccaattattaccggaataggtgaggataaagtactggaaaaaataatttcaattcttaaaggccaggcctga

SEQ ID NO: 253233 - DNA, 474 bp, Klebsiella pneumoniae
atgcaggatattaattttcgtcgtcattacgtgcgacaccttccaaaggaggtcagccatcaggacattatcaggactctcgccagtccactcattaacgatggtatggtcgtgtctgattttgccgatcacgttattgagcgggaaaaaagttttccaacaggtctggctgttgaacctgtgggtgtcgctattccccataccgatcaccaacatgttcgtcagaatgcgatcagtattgggatattggcagaatccgtcaatttcgaagatatgggcggagagccagaacctgttccagtcagggtagtattcatgcttgcattaggtgaaagcaacaagcagctcaatatcctgggctggattatggatgtcatccaggatggggattttatgcagcagttgctggtcatgaatgatgatgaaatttatcaatcaatttacatacgattatctgaaagaggtgagttatga

SEQ ID NO: 253234 - DNA, 747 bp, Klebsiella pneumoniae
atgaaaacattaattaaaagttcacaaattccgctttatcagcaggttgtggagtggataagagaaagtatctatagcggggaacttgttgaggatgaccgcataccttcagagtttcaaatcatggatatgcttgaagtgagtcgcggtaccgttaagaaagcggtggaccaactggtaagagaaggtgtccttgtgcaagttcagggtaaaggcacctttgtgaaaaaggaaaatgttgcttatccgctgggtgaaggtttgctctcttttgcagaagccctggcaagccagaaaataaacttcaccaccagcgttattacttcccggctggaaccagccaatcgcttcgtggctgaaaagctcggaatccacccggggcaggatattctgtttcttgaacgccttcgctctattggtgatgaaaaagtgatgttgattgaaaatcgtatcaacattgagctttgtcccggtattgtggatgtggattttaccagggaaaatttatttccaacgattgagcgattatctcaaaagaaaataagtttctctgaaagtcgttacgctgccagactcattggtaatgaacgaggacattttctggatattggtgaagatgcgcctgttttacatttagaacagttagtgtttttctccagaggattgcccgttgaatttggaaacgtttggctaaaaggcaataaatattatcttggcaccatattgcagcgccgggatgctaactag

SEQ ID NO: 253235 - DNA, 765 bp, Klebsiella pneumoniae
atgttcaatgcatcacttctgagactgaacatcctggtcagctacacttattgctgtttttcatccagagcagaaatatcctaccctattaaagggataggtttggtctttagcattttcatcaataacacacatggccctttaatgatgcaagtgatacttgttcgacacgcggaaaccgagtggaatgtgagagagattctacaaggacagagcgatagcgcattgacctcccgggggaaacgccagacatcagctttactcgcggcgtttgcagcgtgtgattaccgggtagaatgtgtctacgcttctccgcttggtcgtgcctggcaaatgggacagagcctggctgaaagcttttgttgctcactgatagctgagcctgccctgaaagaacaagcatttggtcaatttgaaggcatggcaacagtgcagctcctgaagcatagtccggacgctgcagaagcgttattcaaacttgatgccaagtattgtccgcccggaggcgagtctctctcatatgcctctcagcgtatgatgcattttttatacgctctggaaaaaaaccgccatcatcaaacgatatgcattgtgtcgcacggacatgtcattcagggcgttctttcgattctaaaaagtgggactgtcgatgatttcccgcggtatgcacaacccaacgcgagttactcagttttcgacctgattgatggacgatgtgccgcccttagatggggaattgcaacgcatttacggctacgggattag

SEQ ID NO: 253236 - DNA, 711 bp, Klebsiella pneumoniae
atgagctcatcgaagaacgcagagaaccttcctgttgtacttattccaggatttatgcttgatgaaacgttgtgggacgattttatcgcggcatttcccgacagcaggccctttatacctgctagcctgaatgagggaacaacaatccaggatatagccgccagtatagcccagaaactatctgagcgttttgtcctggtcggtttttcactgggtggctacgtagccagagctatttatgaagctattccggaacggacagcggctatgatccttattgccacttctctcagagaagattcggcagaacaaaacaaaacacgtgtagtggctgcgagtactccttcctccagagaattccgtggactgagcacaatagcaattaagaaatcgattcatgaggatctcgccgataatatcaccatcattgagaaaatccggaacatgggaaagaggctgggagcaaatgcgttcagagtccagtcagggctaaaccgtgagcgaataacgttaaaaccagtttcatgccctgcatacgttattgctgctaaacatgaccggctgcgttcaaaagatgaggcagaagagttggccaggctaaccggcacctgtgcggattatgttgacggctgtgggcatatgattcctctggaaaaaccggatgaactggcccaacttgtattcacatggctcactaaaaaaggcctttaa

SEQ ID NO: 253237 - DNA, 984 bp, Klebsiella pneumoniae
atgacgcatatctacgaatctaccaatattagtaatcaggaaacagccagacctttgcctgtcggcggggtaaatagcgcgagcgcggtatcatggggagctatatttgcaggcgcagccgcagcggcttcgctggcgttgatgctgcttatgcttggcgcaggcttaggcctgacgtccatttctccttgggaaaatcacggtctggcagcaggtaccgtgggtattgtcgccattgcctggctgacgtttacccaaattgtggcgtcaggaatggggggatatctggccgggcgtttgcgcaccaaatgggttgatactcataccaatgaaatctattttcgcgatacagcgcatggttttctgacctgggccgttgcattgctggtatcggctgtgcttttgaccaccactgtcagctcactcatcggcggcagcgcaaaagtgattggctccgttgccgggggcgcgacggcaaccgcgatgagtaacgcgggagacgaatcttccgtgctgtcgaagtcatcgatggaatattttacccgctcgctgttccggtcgaccgcttccgctccggcagataacggcggacttccggctaatacatcaggcaatgacgcgatggcaatgaatcagcccgtaccgccaaaggccgaatctccagcgcaattagcagaggttacgggtatttttgctaacagcatttatactggcgcgcttccgcaggaagatctgacttatgtagcgcagttagtttcgcagaataccggcatcagtcagcaagaggccgagcagcgggttcaggctgtttatgataaagcgcaggccaatttgaaagaggcaaaaaataaagcacagcaggccgcagatgctgccagaaaagccacgagctacgttaccctgtggtcatttatttctctgttaatcggcgcattcgttgccagcctctgtgcaacctatggcggccgtcagcgtgacttataa

SEQ ID NO: 253238 - DNA, 1176 bp, Klebsiella pneumoniae; identical to SEQ ID NO: 196018

SEQ ID NO: 253239 - DNA, 345 bp, Klebsiella pneumoniae
atgaacactggcgcattcattcacgatttactcgactggatcgacaacaatcttgatagccgcctggacattgagaccgtcgccaggcgagccggttattcgaaatggcacctgcagcggatattcaaagagcataccggttatcctctcggcgagtatattcgcacgcaaaagctgcaaaaatcggtcgagcgcttagcccacagcgatgaaccgattttgaacgtggcgatcgccctcggctttgactcccagcagtccttcaaccgcagcttcaagcgtcagttcggccaggcgcccggcgcatggcgacgaagcatcggcagcgcggagacacagcgatga

SEQ ID NO: 253240 - DNA, 1500 bp, Klebsiella pneumoniae
atgtccacatcagaggtcgcgctactcgccagcgtacagcagtttttagacaggcagcatggtttatatctcgacggcgcacagcaggcggcagagagtgaaaagcgcttaaccgtctggaacccggcaaccggccaggctatcgccagcaccgtggacgccagtgccgccgatgtcgatcgggcagtgatgtctgcctggcgcgccttcgtttcccgcagctgggcagggcgaacgcccgccgatcgcgaacgtatcctgctgcgcttcgccgatctggttgagcagcatggcgaagagctggcgcagctggagacgcttgaacaggggaaatcgataaacatttcccgtgccttcgaagtgggctgtaccctgaactggatgcgctataccgccgggctgaccactaaaatcagcggacggaccctggacgtgtcgattcccttcccgttgggtgcgcgctatcaggcgtggaccaaaaaagaaccggtgggggttgtcgccgggatcgtaccgtggaacttcccgctgatgatcggcatgtggaaagtgatgcccgcgctggctgcaggctgttctatcgtcattaagccgtcggaaaccacgccactgaccctgctgcgggtagcggagctggcaaccgaagccggcgtgccggacggcgtctttaacgtggtgactggtagcggggccgggtgcggtgcggcgctgacctctcacccacacgtcgctaaagtcagctttactggatcaacggagacaggcaaacaaattgcccgcgtcgccgccgaccgtctgacccgggtcacgctggagctgggcggtaagaatccggctatcgtgctgaaagatgccgatccgcaatgggttattgagggactcatgaccggtagctttctcaatcaggggcaggtatgtgccgccagttcgcgaatttatatcgaagcgccgctgttcgatacgctggtgagcggcttcgagcaggcagtgaagtcgctccaggtggggccaggcatgctggagagcagccagattaacccggtagtgtcgcaggcgcattgcgccaaagtggcggcctatcttgatgaagcccgtcagcagaaggcagaactgattagcggtaatatagggccggatgcccaaggatactatattccccccacgctggtgattaatcccgacgccgggctgcgcctcagccgggaagaggttttcggcccggtggtaaacctggtgcgcgtggccgacggcgaagaggcgctgcgcctggccaacgacagcgattttggcctgaccgccagcgtctggacccgcgacctgagccaggcgctgagctataccgatcgcctgcaggcgggaacggtgtgggtcaacagccatacgctgatcgacgctaacctgccgttcggcggcatgaagcagtccggcacaggccgtgatttcggtcccgactggctggatgactggtgcgaaacgaagtcggtctgcgtgcgctactag

SEQ ID NO: 253241 - DNA, 909 bp, Klebsiella pneumoniae
atgagtacggcaaatcgtggacaggattaccagcattggttagcaaaaatcaatcaggtgtgcggccagttcgccgctcgcccgctggatgataattttcacggtgagatagacgccagctatgcgggcgacctgaaagtcagcacggtaaccgctcgcggcatcaacctctaccgtacccggcaggagatccggcgcgataacgacgcctggttttataccgtcttccagctctcaggtcaggcgacaatcgagcaggatggtcgccaggcgatgctggagagcggcgatatcaccctgattgatgcttctcgcccctgttcaataatctggcagcaaacctcgcgtcaggcttccctgctgctgccaaggtcgctgctggaacagcagctgcgcggcagtgaaatcagcattgccacccggctggcaaaagccctgccgatggtccagctcagtcagcggctgctgcatgagagcatgaacagccccgagctatcggccagcgaaagcaaagcggcgctggaggcgattgtttgcctgctgcgccccatgctgcaccatcaggaggcccagcccacccggcgcgataaacagtttcagaaaatcatggcgttaatcgatgagtcgattcaggcggaacatctgcgcccggagtggctggccggcgaaaccggtatgtcggtgcgcagtctttaccgcctgtttgcggaaaaggggctggtggtggcgcaatatatcaagaatcgtcggctcgatctctgcgcccgcgcgctggaaagcgcccatgatgatgaaaagctggcggggatcggctacagctggggtttcagcgatcatagccatttttccaccgcctttaagcagcgcttcggcgtctcgccgggggagtatcgcaagcgctgccgatag

SEQ ID NO: 253242 - DNA, 324 bp, Klebsiella pneumoniae
atgagaaaacgatggttaatcgcgacgctggcgctggcgttgttgagtactcaggcgctggcgttaaccctaagcgaagcgcgtcagcaggggcgagtcggcgaaacgctgaacggctatcttcaaccgctgcgccaggataaagaaaccctggcgctggttaaacagatcaacgccgcccgcagcgacagctatcagcaactggcggacgacaacaacctgccggtggatcaggtggcgaaaatggccgggcagaagctcgtcgccagggcgcagcctggcgagtatgtgcagggccttaacggcaaatggctgaaaaaatag

SEQ ID NO: 253243 - DNA, 186 bp, Klebsiella pneumoniae; identical to SEQ ID NO: 172399

SEQ ID NO: 253244 - DNA, 2640 bp, Klebsiella pneumoniae
atgaagggtaaatataaagccgccatcgcgctattattagcactcgtgctgctaccgctggctttgctgttgacgctcacccactgggtgcccacgctggctggcatctggctacctgcgggcacccgaatctctctcagcgagagcccgcgcctgacgcgctcttccctgcgtattccggatttacgctacctggtaggcgactgcgaaatcgcgcgtgtcactaacgccgagctctcccgccccagccgctggcgtttacatatcactgagctggatattaacagcgcctgcctgaataaattaccgcacagcgaagccgcgccgggggcgccgaaaacccttgccgagtggcaatcgatgctgccatacagctggctgacgattgaaaatctgcgtctgtcgccgtgggagaaatggcaagggcgtctggtgatgtcgttgaccccgcagcagcaggatatcggttacgccggagaagaggtctctctccaggcgcgcctgcgcggccaggcgctgacggtcagcgacttttccgcgcgtctggtagaaggccaggcgccggtgaagctggtgggcgagcttcagatgccgctggtgccggacggtttgccggttgatggtcatctgtttagcacttttgaatttcctcagacacccggccttgtcgacgccgaactggagtggcatgagaatcgcgggcagctgttggtcacgccgcgtggtgaagtggagccgattctcgatctgccgtgggaaatcaccccggatcgtatcgctatcagcgatggccgctggcacaccgagtatgcgggcaatgcgttaagcggtcgcgttgcgctttcggtgggtaactggcaacagggcaccgaacagatgcaggtcagcgggcggttgaacgtgcttacccagggtcaggccggtaagggtaatgccgtgctcaatattggccccggtaagctgagtatggacagcagcgacatgccgctacagctgaccggcgaggccaaacttggcgatctgattttttacgccagactgcccgcgcagctgagcggtccgcttatcgcgccggtactcaactttcatcccggggcgctgctgcgttcgcgcgggcgggtcatcgactcactgaacatcgatgaaattcgctggccgctggcgggcgtcaccgtgacgcagcagggcgtggatggccgcctgcaggccattctccgcgcccatgagcaggagatgggggattttaccctgcatctcgacggccaggccgacaattttatgcccgaccgcggccgctggcagtggcgctactggggcgatggccattttaccccgatgcaggcgcgctgggacgttaaaggcgcgggtgaatgggttgatagcgccatcgtgctcaatagcctgtcgaccggtttcgataagctgcagtatggttccatgctggtgagcacgccgcgcctcaccctggataaaccgattcactggctgcgcgatgagcagcatccgcgactgaccggcgcgctgtcgctggatgccggaaaaaccaccttcagcggcggcagcgaactgccgccgtcaacgctgaaatttaacgttgagggtcgcgatccaacctggttccagttcaatggttccctgcatgcgcaaaaaattggccccgtccgcgtcaccggacgctgggacggcgagcgcctgcgcggacaggcgtggtggccgaaacagtcattaaccgttttccagccgctggtgccgccggaatggaagatgaacctgcgcgaaggttcactgtacgcccaggtcgcgttctctgccgccgccggtcagggctttgaggcgggggggcacggggtgctcaaaggcggcagtgcctggatgccggataaccagatcaacggcgtcgattttgtgctgccgttccgctttagcgaaggcacctggcagcttggcacccgccatccggtttcgctgcgcattggcgaagtcgtcaaccagtttacggcgcgcaatctgacggcagatctccagggagcctggccctggagcgaagacgctcctttacagttgagcaacgtcagcgtcgatattctcggcggcaagctgaccatgcagcagctgcggatgccgcagcacgacccggcgctgctgcgcctgcagaacatctccagcagcgaattaattagcgccattaaagtgaagcagttcgccgtttccggcccgttcaacggtgcgctgccgctgtggctggataacgataaatggatcattaaggacggctggttcagcaatccggggccgatgacgatgcgcctggataaagacaccgctgacgcgctggtggccgacaacgtctccgccggggcggccattaactggctgcgctatatggaagtggccacctcgtggacgcggatcaatctcgataacctcggcgtactgacgctgaaggcgaccatcagcggcaccagtcgggtagagggcaaaagcaacacggtgcacttaaactactcccatgaagagaatatttttgacctgtggcgcagcttgcgtttcggcgacaatctgcaggcgtggctggagcagaacgccagactgcccgcccagcgctgccaggacagtcatacctgtaaggaacaacaataa

SEQ ID NO: 253245 - DNA, 501 bp, Klebsiella pneumoniae; identical to SEQ ID NO: 172401

SEQ ID NO: 253246 - DNA, 441 bp, Klebsiella pneumoniae
atgaacaagattgctgcgctgctggcggcgggaatgttgctatcgggctgcgtttataacagcaaagtgtcgaccagagcggaacagcttcagcaccaccgttttgtgctgaccagcgtcaacggtcaaccgctgaaagccgccgataagcctctggagctgagctttggcgaaaagatgccaataacaggcaaaatgtacgtttcaggcaatatgtgcaaccgctttagcggcacgggtaaagtctctgacggcgagctgaaggttgaagagctggcgatgacccgcatgctctgcacggactcgcagctgagcgcgctggacgccacgctgagcaaaatgctgcgcgacggtgcgcaggtcgacctgacggaaacgcagctgacgttggcaaccgccgaccagacgctggtgtataagctcgccgatctgatgaattaa

SEQ ID NO: 253247 - DNA, 273 bp, Klebsiella pneumoniae
atgcgagctgcgtttttagtgggatgtgctgcgctgttactgtcggcgtgtagtagcaatgatgaacctgttcagcaggcaacggcggcgcacgtgtcgccagggatgcgtgccgcgatgagcagcagcgggcaggcgaactgcgccatggtcggcggctcgttatccgtagcccgccagcttgatggctccgctatcggcatgtgcgcattaccgaacggcaagcgctgcagcgagcaggcgctggcaggcggaagctgcggtaactattaa

SEQ ID NO: 253248 - DNA, 366 bp, Klebsiella pneumoniae
atgcaattcatagcactgccgtgggcaactttgcaggctatctacagagcaaaaaatggtgaggttgttgaagggaaatatgtccgtgtggcagggaacttcattaacctttgggacccctctaatgaaagtgcagatcgcgtcaatattacgccggtctttcagatggtttttcgcaatcttgatgatggtattctttatttttccgggcgtgtgatgttttttgataaagctaaatcagagcacgatgcctatttccgtcatccgtttgatgatgtcgattcaagcgtgatgacgcaagcctatgcggtaaccgatacgcaatatctggccggaacattctattctggagttgtgccaaattaa

SEQ ID NO: 253249 - DNA, 543 bp, Klebsiella pneumoniae
atgaataaagatgagatttttaacgccattttggataaggagggcggttatgtaaatcatccggacgatcgaggtggcccaacaaattgggggattactcaggccactgcccgcgcgcatggttatgatggatctatgcaaaaactgacgcgccagcaggcgctggatattctcaacgcggactactggattgcgccccggttcgaccatgttgctgagatatctaccccgcttgctgaaaaactgtgtgatgccggggtcaatatgggcaccattctgccgggtaagtggcttcagcgatggctaaatgcctttaatcatcgcggagtgctgtatccggacctcatggtcgatggtgctatcggccccagaacgattaacgccttaagccagtatcttattcgcagaggcagtgaaggtgagacggtactattacgagcattaaactgtagtcaagggcaatattatctggagttggctgaaagaaacgatgctaatgaatcctttatctatggttggctcagggttcgagtaatgagttga

SEQ ID NO: 253250 - DNA, 273 bp, Klebsiella pneumoniae
atggaaaatgaactgccggcgctgattaacgcaattgtctgcgctttgatcactctgaacttgatgttttatcgccgcgcgtgctaccgaagacatcggccatggatatcatacacggcatatttactggtacttacctatgccagcataccgtttcgctatctttttggcctgtatgaatcgacccattggttagtcgtcagcgtcaatttttttatacttattaccgtattcctggtcagggggaatatcgcgcatttaatcgataaatga

SEQ ID NO: 253251 - DNA, 345 bp, Klebsiella pneumoniae
atggcagcgagtctatttggcctgatcgcaggtattgattatggcgttgtgttcggcgcatttgctggcgccgtgttttatgtggcgaccgcagtaaatatttcacgtttcagactggctgcctattttatgacttcctttattgtcggcgtattgggtgccgggttaattggtacgaagctggcaatctggaccggatacagtgaacggtctttagacgcgttaggcgccgtactgctatccgcgctgattattaagatactcacatttctgaataatcaagatctcaccgaattgtacaaaatactcacccgcaacaatagtgaacggccaaatggaaaatga

SEQ ID NO: 253252 - DNA, 363 bp, Klebsiella pneumoniae
atgtcccgtaaaaccgcgtttcatggttccgctgccggtcgtcgccgtgcgcagcgctcacatttacaaaatccacaagccctcagttcagaacgcctccaccggcctacgccttctcgcgctcagattcaggctaagggaaagcaccatacgccagcgcgtatcgaggacgcattgcccattaactttgttgcccaggatattttttggctgcttgaggaatataaacggcaaattgcgcgtgccaccattgtttatcagcaagaattttcacaccactatgcgcaacctgggacctggctctgtcacagggccatctatgcgccaggtttgcaaaaaagaaaaaagattacggcaaagtaa

SEQ ID NO: 253253 - DNA, 1446 bp, Klebsiella pneumoniae
  misc_feature (1417)..(1426): n is a, c, g, or t
atgatcactattgacggtaatggcgcggttgcttcagtcgcgtttcgcaccagtgaagttatcgccatctacccgatcacgcccagctccacgatggcggagcaggcggatgcctgggctggcaacgggctgaaaaacgtctggggcgatgtcccccgcgtagtcgagatgcagtcggaggccggggcgatcggcgccgtacacggtgcgctgcagaccggtgcgctctcaacctcttttacttcatcgcagggtttactgctgatgatcccgacgctgtacaaactggcgggccagctgatgccgtttgtgctgcacgtcgccgcccgtaccgtggccacgcacgcgctctctatcttcggcgatcactccgacgtgatggccgtacgtcagacaggctgcgcgatgctctgcgccagcagcgttcaggaagctcaggattttgcgctgatttcacatatcgccacgctgcaaagtcgggtgccattcattcatttctttgatggcttccgtacctcgcacgaaatcaacaaaattgctccactggcagacgataccattcgtagcctgctgccgcaggatagaattgatgaacatcgccagcgcgccctgaacccggaacatccggttatccgcggcacctcagctaatccggatacgtatttccagtcacgtgaagcgacgaatccgtggtacaacgcggtctatgagtgtgtcgaaacggcaatggatgattttgccgccgccaccggacgtcagtacaaaccctttgagttttacggtcatccgcaggctgagcgcgtaatcgtcattatgggctccgccatcggtacctgtgaagaagtggtcgatgagctgctgagccgcggtgaaaaagtcggcgtgctaaaagttcgtctttaccgccccttctctgccgcgcacctgcttgaagccttaccgccgagcacccaagccgtggcggtgctggaccgcaccaaagaaccggggtcccaggccgagccgctctatctcgacgtcatgaccgccctggccgaagcctttaaccgcggcgagcgagaaacactgccgcgcaccattggcggacgctatggcctctcttcaaaagagttcggtccggagtgtgtcctggccatcttcaaggagctgagcgccgctaaacccaagccgcgctttaccgtcggcatctacgatgacgtcactaatctttccctgccgctggtcgaaaatacgctcccctcggaagcgaaactggaagccctcttctacgggctcggcagcgacggtagcgtctcggctacgaaaaataatatcaagattatcggtaactctacgccgtggttctcgcagggttatttcgtctatgactcgaaaaaggccggcgggctgacggtttcacatctgcgcgtcagcgagnnnnnnnnnngattcgttcttcttatctga

SEQ ID NO: 253254 - DNA, 1107 bp, Klebsiella pneumoniae
atgaaaagaaaagtactggccctcgttatcccggcattattagctgctggcgctgcacactccgctgagatttataataaagacggaaataaactggacctttatggcaaggtggacggtctgcattatttctctgacgatgcatcaaaagatggcgatcagtcatacgtccgtcttggcttcaaaggcgaaactcagattaacgatcagctgaccggctacggtcagtgggaatataacgtccaggcgaacaacaccgaaggcgcggacaaccagtcctggacccgtctggcgttcgctggcctcaagttcgctgattacggttcattcgattatggccgtaactacggcgtgctgtacgatgtagaaggctggaccgatatgctgccagaattcggcggcgactcttatacccaggcggataactttatgaccggccgcgccaacggcgtagcaacctaccgcaataccgacttcttcggtctggttaatggcctgaactttgccctgcagtaccagggtaaaaacgaaaatgccggcagcggagaaggcaccaacaatggcgatcgcagcgtacgtaacgctaacggcgatggttttggtctatccacttcttatgatttcggtatgggtatcagcgccgctgccgcctacacctcctctgaccgtaccaacgatcagatgacccagaccaccgcgcagggcgataaagcggaagcctggaccaccggcctgaaatatgacgccaataacatctatctggcgaccatgtattccgaaacccgcaatatgacgccttacggcaacggtaacggcgtagccaacaaaactcagaactttgaagtgactgctcagtatcagttcgacttcggcctgcgcccggcggtctctttcctgatgtctaaaggcaaagatctgaccaataccgatggcgacaaagatctggtgaaatatgctgacatcggcgcgacttattacttcaaccgcaatatgtctacctatgtcgattacaaaatcaacctgcttgacgaagacgacagcttctattccaacaatggcatctctaccgatgacgtggttgctttaggcctggtttaccagttctaa

SEQ ID NO: 253255 - DNA, 213 bp, Klebsiella pneumoniae; identical to SEQ ID NO: 172414

SEQ ID NO: 253256 - DNA, 435 bp, Klebsiella pneumoniae; identical to SEQ ID NO: 172415

SEQ ID NO: 253257 - DNA, 936 bp, Klebsiella pneumoniae
atgcttgataatcagcaagttacaaagaaagaaaaatacaatatcgacaaattgcagaagcgcttgcgccgtaacgtcggcgaggcgatcgctgattttaatatgattgaagaaggtgaccgcatcatggtttgcctctccggcggtaaagacagctacaccatgctggagattttgcgcaatctgcaaaaaagcgcgccgatatccttctcactggtggcggtgaacctcgaccaaaaacagccgggcttcccggaacatatcctgccggaataccttgagcagttgggcgttgaatataagattgttgaagaaaatacctacggcatcgttaaagaaaaaattccggaaggcaaaaccacctgctctctctgttcgcgcctgcgccgcggcattctttaccgcaccgcgactgagctgggcgccaccaaaatcgcccttggccaccaccgcgacgacatcctgcagaccctgtttctgaatatgttctatggcggtaagatgaaagggatgccgccgaagctgatgagcgacgacggtaaacatatcgttattcgcccgctggcctactgccgtgaaaaagatattgaacgtttctctcaggcgaaaggtttcccgattatcccgtgcaacctgtgcggttcgcagccgaacctacagcgtcaggtgattgccgatatgctgcgcgattgggacaaacgctatcccggacgcatcgaaaccatgtttagcgcgatgcagaacgtggtgccttctcatctcagcgacgttaatctgttcgacttcaaaggcattcatcacggctctgcggtcgttgacggcggcgacctggcgttcgatcgcgaagagatcccgacgcagccggccggctggcaaccggaagaagatgatgcgcagctggacactctgcgtctgaacgtggtggaagtgaaataa

SEQ ID NO: 253258 - DNA, 984 bp, Klebsiella pneumoniae
gtggacgccataaaaggatcggaactgaacgtgccggatgccgtttttgcatgggtgttcgacgggcagggcggcgtaaagccgctggtcgacagcgataccattgataaagagcatccttgttggctgcatctcaattatacccatgttgatagcgcggaatggctggcatcgacgccgctgctgcctaataacgtacgcgatgcgctgggtggggagagcactcgtcccagagtgacgaggattggcgatggggcattaattacgctgcgctgtattaacggcagcaccgatgagcgcccggaccaattggttgcgatgcgtctctatatggacgagcggttaattgtttctacccggcagcgcaaagtgctggcgctggacgatgtgctcggcgatttgcgtgagggcaacgggccggttgacggcggcggctggctggtggaagtctgcgatgcgctgaccgatcacgccagcgaatttattgagcagctccatgaccggattatcgatctggaagatgatttactcgatcagcaggtgccgccgcgcggctttctggcgctgttgcgtaaacagcttatcgtcatgcgccgttatatggcgccgcagcgtgatgtctatgcaaggctggccagcgagcggctgccgtggatgaccgatgaccatcggcggcggatgcaggatattgctgagcgtcttggccgcggtctggatgaaattgatagctgcatcgccagaacggcgattatgagcgatgagatcgcgcagattatgcaggagtcgctatcgcgaagaacctacacgatgtcgctcatggcgatggtttttctgcccagtacctttttaaccgggctgttcggggttaacctcggcggcattcccggcaatagctggcatatgggtttttctattttctgcataatgttagtcgttctcattggaggtgttacatggtggttgcatcgtagtaaatggttgtaa

SEQ ID NO: 253259 - DNA, 621 bp, Klebsiella pneumoniae
gtgaccatgctgaatgtcatttataaaaatgataataatttttttaaattaggttttaacgctctgctggagagtttattccctgcggctatgtttagctcgttggcagtgaataaaatatataaggggaaagataccgcaaccgatattatggtgctgagtttatgccgcggggaggagtacatttgtcatcccgagttacagcatcgccggggaggcatccttattggcctggtaggtaagcagttccgctggcgcggagggatcttgccctcatgcctgaaggagatgatatttattcagcaggatgagaaaatttaccggatgattgcgcaaattaagcgggcccggatgcaggaggcgactccctcgatgaatcaatccgatattcgctgtcatgattgtcgtcatcgcaagctctcaagacagcaggaaaaagtggccgcagcactactggcggggctttcggtcagagagattgccggcaagctggcgctgagcgaaaaaacggttttctcccataagcgcatcatcatgtcaaaattcaagttacgccatgatgtcgacctcgtgctgctgttaaattatttgcgcagaagctcagcgggccataatgactaa

SEQ ID NO: 253260 - DNA, 519 bp, Klebsiella pneumoniae
atgatcgccaaattacatgatttatgtctggttctggtattgttttccgctccgctactggccggcgatgtggtttcgttgaatatcaagggtaaaatagttgccgccccctgccagatcagcagcgatagtgttgcaagaacaatttccttgaccgattcgcagggtatccgggcgtcttctctctatacgcctggctccgcgacggagtgggtaccctttgattttaatattgaacgctgtcccgcgggaacgacaacggccacgatgcagttttccggtaatgctgataacgctggcccggacgatctttatcagaatagcggtagcgcaggcaatattgccatacagctacaaacggcagaagggcagcctttaggtaaggataaaacggtaagcgggacgattgtgaataatcaatatcgctaccgcctgcgcgcgcgggcattcagcccgcgaggtggtgttacgcccggtacgattaatgcagttgtcaccgtgacctttacctggcaataa

SEQ ID NO: 253261 - DNA, 933 bp, Klebsiella pneumoniae
atgagaaagtttatatctctcattattttaatgttgagtttaacggctggctgctgttccgcggtgacctgtgaggtattactggcgcagatcaataccgttggttttggtacggtgaatgttcaacgcgatatcccggtaggggcgactatcgcttctaccgtctccccgggctatgcgcaagctgccattacttcggataatggagagtcttgccccggaaattattccatggtgtatttgtcgggtattgaatcgccagtcagcggcgtttatcaaaccaaccttgaaggggtagggatcaaagtaaatggcatgcccggagattttagcttacctccggtaaccgcaaactacattttttacctgggatattatacggtgtcgctggtgaaaaccggaaatatcacctccggacaattaacgccagggttaattgctcaggcgtggtttggttctcctggcaattattttaccaaaatctccctggacgccagttcacaggtaaatgtgcttagctgctctatttcgagccaggtattgagttttgatctcggcagcgtaagcgcggccgagtttgggtctgctgcgggtttttcgcctccgcacacggacacgcagaatttgggacttaattgcaacgccggagcaaatatccatatacaactccaggggacgcagaatccggacgccagcggcgaccgcagcgtgctggcgttaaccggccagggcagcgagaccgttgcggatggcgttggcgttcagctgctttataacaatgcgccagtgcagctgaataatcgcctgatgctaaagcaatcctcgggcggcctggaaagtttgccgattacggctcgttattatcagaccaagccggtggttaaagccggcgaagctaacgcgaccgcaactctggatatgacttatcaatag

SEQ ID NO: 253262 - DNA, 2532 bp, Klebsiella pneumoniae
atgaaagcacaaaagcgaaagccggagcattatccagcatacctggtggttggcgtcacgctgttattctccgttatgggaaatgacgcgcagggccgtgatttttttaacccggcgctgcttgaaattgataaccccgaaatgaaaggggccgacctttcagcttttgaaaacggcgctcaggcaccgggtacttatcatgtcgatgtgattataaatgacaaggtggttgatgcgcgggatatcgccttttatgccgttgagcgccagggcggagtgccagaactaaaaccttgcctgacggtggacctgctacagagctatggggtgaaaacggcgcaatttgccgccttatccggcaccgggaaatgtgcggatctctccgctatcccgcaggcaacgtccgaatttctgtttagcacgcaaaaattgcgattaagtattccgcaagctgcgctttcaccggtagcacgaggttatgtccccccggaacgttgggacgaaggtattaacgctgtcatgctgaactatatgcttagcggagccaacgattgggggcgccatcaggacgaaaagagcagcagtcaatatgccaacctgcgtccgggcataaatttgggaccgtggcggctgcgtcactactccacctggaatcgtgatagccagggggaagagaagtgggagacgatttacagctacgcgcagcgcaatattattgcgttaaaagctcagctgacgctgggcgacagtacggcgccagcggatattttcgatagtatgccttttcgcggcggccagcttgcgtctgatgatgacatgctgccggagtcgatgcgcggctatgccccggtggttcgcgggatagcaagatcgcatgcgcagatcgttattcgccagaatggttatgttatataccaggactacgtagctcccggcgcatttgaaattaatgatatgtatcccaccggcggttccggggatctgaacgtgatcattaaagaagccgatggcagcgagcaaaattttattgttccctatgcttcgttaccgattctgcaacgcgaaggacgattaaaatatgccctgacggccggccagtaccgctcctgggaccgccgcgtcgataaaactccctttggccagatgacgggtattttgggggcaggcggtgggttcacgctatatggcggctttcaggaatcagccaaatatcagtcaattgccggcggcttaggaagaaacctcggcgatatcggcgcgctctccagcgatgtgacgcaggcctggtcgcatcctcagggggagaagaaacaggccggacaatcgtggcgcatacgctacagcaaaaatatgctcgccaccggcaccaatttcgctattgcgggatatcgctactctaccggcggttactacgctatgcaggaaacgctggactcgtgggggaatcccggcgcggtgaacgaacatcggcgcaacagaatggagatgacgctgagtcaggcgctgggtgagcgcgcagggtcattaatgatgagtgcgatccgtgaagattactggcatgccagtcgctcagcctcatcgctgagcgccggttataacaacgcctggcaagggactagctacggcattaactggacgcgaagtcaaaatggcggagcatcgggtggacaaaaccgcagtacagggagcgccgaacagcttatttcactgaatatcagcgttccgttgccgcgtctggccagcaatacctgggcaaattatgccctgaatagcagcaagagcggcggtgcgacccattccgtcggaataaacggcattgccctggaaggcaattcgctgaactggagcgttcagcaggggtatggttccggaggcgacggatacagcggcagcgcgaatgcagattatcgaggcacctatggtgaactgacgagcggctacagttatgacagaaatagcgagcggctgagctatggcctggcgggcggggttctggcgcatgccgacggcatcacgttctcgcaaccgttgggtgaaacgaatgtgctggtaaaagctcctggcgcctccggcgtcgacattaataatcagaatggcgcgaagaccgattttcgcggctataccgtaacgaataatgtatcaccctatcgtaaaaacgatattggcctgaatacgacgaccttaccggagaatgtcgatttgtcgattaccaataaaacggttattccgacgcggggagcggtggtccgcgccgattatattgctaatgtgggtttgcgggcgctgttaacgctaaaacagaataatcaacagccggtgccatttggcgcgctggttaatctgatgggtaatgaagggcgcagcgctatcgtcgatgaggcaggtcaggtctatttaaccggcatgccgccgcagggaaccttagacgttgcctggggccagaaaaactcgcagcgctgtcaggtggattattctctggctgcagataatagcattagcggaattagcatggcgcagtttacctgtcgctag

SEQ ID NO: 253263 - DNA, 672 bp, Klebsiella pneumoniae
atgaagttttttaccgcaatggcgacgatggcgcttttaacccttacttcaacatcttacgcgggggtgattatcggcgggacgcgggtgatctatgcgggtgataaaaaagaggcttcattgagcgtgaccaatcctgacggcctggcttatctcatccagtcctgggtcgaaccttcaataccgggtgggaataaagccccttttattattacgccgccgctttatcggctggataaaaatcagcagaacgtgatgcgtattattctggccggacagttatctcaagatcgcgaatcaatgtactggctaaacattaaatctattccgtcggtgacgcctcgggataatactttacaggtggccgtaaaaacacgaataaagctgatttatcgtcccgcggcgctgaaacaaagtagtcctgaagaacaggcggataaactcagatggcagcgaacgggcgatcgacttcaggtcaccaatcccactccgtactatatgaattttaatgaaataaaagtaggaacagtaaagatagacgatgtgacattcgtcgcgccaggtgcaacccgttcatacgctattccctcaggcggaacctctacgccagttgcatttaagctcattaatgactatggcggaattggggtaatacataacgtcatgccgtaa

SEQ ID NO: 253264 - DNA, 531 bp, Klebsiella pneumoniae
atgaataataaaataatcatggcgacatttgctatcagcgccgctctgtcggcggcaggcgctcacgctgctgatggcaccattaactttaccggtgaaattcttgaccaggcctgcaccgtagatatcggcagtaataatacgatgacggtcgatttgggccgcgtggcgcgctcctcattccagagtacaggagatgagtctgacgcaactaaattcacgattaagctgattaactgcccggcgagcgttaactcagcgaaggtgaaatttgatggtgccaatgacttaaacaatagcgatcttttagctattacccaggggccggctgcggcaagcggcgtcgccattaagctgatgacggcggataaaagtttgcaagggctaaatcaggtcaatagctatagctacccgttggtcaccacggctgataacaatcttgatttttatgcctcttatcaggcgactcaggcagttgttactgccggtccggcaaatgcggttgccaactttaccgttaactacaactaa

SEQ ID NO: 253265 - DNA, 663 bp, Klebsiella pneumoniae
gtgtctgatagtataaacacagtgaaaacaagtatgtatggggctttatcttacaaaccaacgtcgcatattgaaaatcttattactcacctcaagcccgggtctaacatatttgaaacacatcccagacaaaaaattaactacgagaatgatagttctcgtaaatgttacttactgctctccggcagtattgcgctttttcgcacccgggatggttttatgatgaactcagagtccgcgccttacgtttttggcctaagcaatcagctggccgcagccgactatctttatatgcaaacgatggggccttctcgtatcgccagcctgtctttatttaccgccaataccattattgccgaaaaagacctgtgggaaagcctcgcgcatttacttatttatactgccggacgcgtttacgatcactgtacccgcatttccgcaccaagctcatacgcgattatccgttcacaattatatgagctgatgcaggagtccgctgagattcggcagagcattactgcggcaaactatatccagtcgcggacatttctctctcgcagcagcattatgaaaatccttgccgaactaaaaaaaggcagttatatcaccaccgaacgcgggattttgttgcagatcaaacagggaatcccgttgaaatactga

SEQ ID NO: 253266 - DNA, 633 bp, Klebsiella pneumoniae
atggctgcgcgcggtcgtcatatcgatatcaaagtaccgtcacctcatctgacgcctctgcttgccgcgataacccacgatgaggattaccgcctatggaaaaaaagcagcaaactttttttccgccgtggatcgcaacctttatgccacttcgtgcgtaaaggcagtgtgctgatcgtgcgcaatgaagatgccttctccctcggcattctttccgccccgctggcgttgggttttaccgttccactgtcggaacaccttcatttgcgtacgatggctgaatctgaaatcgctacgcttccctatgaacaggtgatggcgatagtcgaagaaaagcagatttgggacctggttgctaaacacgttatgtttgtgacaaataaaattttcatttataacgagatgctgacggcgcccaccagctttgatattttgcgttatcagttgctgatgctgattcaggaacccgacgaaatccgcgccagtacagccgcctatcagtatattcttgaccgtactcggttatcacgcagcagtattatgaaaatgctcgccgaattaaaaaaaggtcactatatccagctggaaaatggcaaactcctggccatacaccacctacctacccgattttaa

SEQ ID NO: 253267 - DNA, 783 bp, Klebsiella pneumoniae
atgcgagttattgcagcattttgcggggtcataatagtgcataaaacggccagacaaaaatacctcattgatatccttagtgaaaaaggccaggtcaccatcagcgaactggttgataaactgcaggtatctgcggatacgctgcgccgcgatcttagcgaccttgaaaaacaggggcttgcacagaaaaaccacggcggcgctatcgcgcttaatctctcgataatgaatcgccagaaccgcaatacgctgctggcggataccaagcagcggatcgggaaaatggtggcggagaagatccccggcggatcgacgctgtttcttgatgcgggtagcaccgtgctggccgtcgccgcctggatacagggcccgatgacggtcatcaccacctcattggatattgcacaacacttcagcgatcgcgcggatattgagctgattttactgggtggaaaatgggaccgacagcagcgcctgtttgccggaagcgcgacggtatctctgctggaacgctatcgggcggatatcgcgatcctcggcgcctgcgcactccacgccgacctcggccttagcgccagtcaggaagcggatgctgaagtcaagcgcgccatgctggcggccagcgcagaacactggctggtcgccgatcatctgaaactgaatcactgcgagccctggctggttgccgggctcgccgacatccatcagctctttctcgaccggccatgggaagaattgcaggacaacggctcaacacaacttaatatcgctgagactaaataa

SEQ ID NO: 253268 - DNA, 1068 bp, Klebsiella pneumoniae
atgagtaacgctaagactattaatattgccctgattggctacggcttcgtcggcaagactttccatgcgccgctgattcagtccatcgaaggcctgaatctggcgattgtcgcctcgcgcgatgaagagaaagtcaaacgcgacctgccggacgtcaccgtcatcgcatcgcctgaagcggcgattcagcatccggatgtcgatctggtcgtcatcgcctcgcctaacgcgacgcacgctccccttgcccgtctggctttaaattccggtaaacatgtcgtcgtcgataaaccgtttaccctggatatgcaggaggcccgcgaactgattgcgctggcggaggagaaacagcgggtgctgtcggtgttccataaccgtcgctgggatagcgactatctgggagtgaagcaggttatcgaacaagggcttatcggcaaagtgaaacattttgagtcccatttcgaccgattccgcccggaagtacgtgtccgctggcgggagcagaacgtaccgggaagcggcctgtggtttgacttaggtccgcacctgatcgaccagacgctacagctattcggtctgccgcagtcggtccagggaaatatcgctaccctgcgtgaaggcgcggaaatcaacgactgggcgcatgtggtcctcaactatccgcagcataaagtcgttctgcactgcagcatgctggtggcaggtggggtggcgcgctttaccgttcatggcgataaaggcagcgtcgttaaacagcgcgctgatcggcaggagagccaactgctggcgggggtgacgccggggagccaggactggggtcaagacgacgatagtctggtcctgtacgatgctgacctgcagtcacgtgaaatcagcgccccgcaaggggatcagcgccagtactatattcacgtccgcgacgcgctgaccggcaaaatcaacaatccggtatcgccgttagaggcgctggcggtaatggctgtgctggaagccgcggtaaaatcggccgagagcggaacgacgcaaaccttagcgctgaccgcagaggaactggcaggtctgaagtaa

SEQ ID NO: 253269 - DNA, 1266 bp, Klebsiella pneumoniae
atgtttgctctggtcgatgtgaattcattttatgccagctgtgaaatggtctttcgtcctgatttacgtgggcgccccgtggtggtgttaagcaataacgacggctgcgtaatcgcgaggaatcacgaggctaaactgctggagatcccgatgggcgcgccgtatttcaaaatgaaatcacagtttgagcgtcatcaggtggcggtatttagcagcaactatgcgctttatggggatatgtcccagcgcgttatgacccttcttgaggagctgtctcccgcggtgtatcaatattccattgatgaagcgtttgtgaatctcagcggcatccatcgcactgaggagcttgaagcattcgggcgccacgtgcgaagtacgctgctgcagtgtacaggattgacggtcggggtcgggatcgggccgacgaaaacgctggccaagctggctaattatgcggccaaaagatggccaaaattcgagggtgttgtcgatctctctttacaagccaggcagaggaaactgttggcgaaggttgccgtcggcgaaatctggggggtggggcggcgcatggcgaaaaagctgaatgatatgggaattaccacggcccttgaacttgccgaaatgcccgcttccctcatcagaaaacatttcagcgtggtgatggaacgcaccgtgcgtgagctacgaggtgagtcctgccttgaacctgaagagtatatgcccacgaaacagcaaatcattagttcgcgttcattcagtcagaaggtaagcgaatatgggccgatgcgcgaagccatatgcagccatgcggtacgcgcggcggaaaggctgcgcgcgcagcatcagtattgccgctatgtttcggtattcctgaaaaccagtcctttcgccggcaatgacgtctattacggtaacgatgccgggacagaaattcacattccgactcaggatagccgggatatcgtcgccgcggcggtaaaatgcctggagactatctggcgggagggacaccgatatcaaaagtgcggtgtgatgctgggtgatttctttagccggggcgtggcccagttaggcctgtttgatgactatcgcccgcgcgccaacagcgaacagctgatggaggtgcttgattttgtgaatcggcgtgaaaaaggtcggctctggtttgccgggcaggggattacgcgtagctgggagatgaaacggcacaggctgtctccagcctacaccacccggttcagcgacctgctgcgggtcaaactgtaa

SEQ ID NO: 253270 - DNA, 423 bp, Klebsiella pneumoniae
atgatgttcagtaaaccggctgaaatgcgtgaaatcttgtcgattccgatgtttagcgaccttgtgtcgtgcggctttcccagcccggcgcaggattacatcgagaaggggatagacctcaatgagctttgtatcagccatcctgcggcaacctattttgttctggcgaccggcatgtcgatggtagatgccggcatttatgaaggtacgttgctggtggtggatcgcggcctgaaggcgaagcatggtgatatcatcattgccgctatcggcggcgaatacacggttaaacgcctgtgtacgcaccctacgatgcaactgctgccgatgaatccggattttccgccgattgtgctgcacaacgacggtgaagagctggagatttttggcgtagtcactttcagtatcaacaggctgcgctga

SEQ ID NO: 253271 - DNA, 492 bp, Klebsiella pneumoniae
atggccggcggcaaggttatcccgatggcgagcagatcggaattattgtcaacgccagccagtctgatattacccggaaatgcgaaagagaactttcgttttttttacaaagggccacaggataatcaggagcgttattaccgcatatcctggaccgatgagccggtgaccgagtttgaagccagtaaaaagaaaaaacagggtgaggcaacgacctctgccattattggtaccattctggtggtcgcgccgcgcgaagaaagattcgactatcgtcgagataatgacacggtaaccaataccggtaacgcttcattccgcgttatctcctatggaccctgtcgtgataaagcgaaggatgaggggcaaggctgtcgtgaacgctattatgtcatgcctggtatcagcgtaaaaataaagcataccgatctcaccaacaaaaaaacgcgaattggaatatggcacggtgagcaatatataaatgtaaactga

SEQ ID NO: 253272 - DNA, 2538 bp, Klebsiella pneumoniae
atggataatcttggttatgtcaaagggacgttgttcgctgggttattaattacggtaaaccagggttgggcagctaatgctacagcgccagtcaaagtcagtaactatgttattccttcggtatttgctaacgcgttatatcagggcatgtcggtccctgtttttattcgttatgaaggcgataatagtacccaacgcagccagcaaaaaatcgctgatgccatccttaccatcaaggataatgagtttcgcctgaatcagatcaccctcagcgatctccctgagcgaactgaattatcgcctcagataaaatcgctgattaacgagatgcaggacaaaagcatcggcgacggtcagcgcgtttatatcaacaaagacgcctcgctttcactcgatacgcgttccttttatcttgagctgacggttaaccgggcagccatgcaggccgctattttgccgcgtaccaacatgcttggggaatccactgctcagaatctctcgagcgtgctgaattactcgatggggagctattacaataaatatgagaataccgataacgccagcagctatctgacgctggacaatacctggtcgctgcgcgagcaccatctgaactttaacggttccctctacggtataggtaccagtaaccagcagagcaaattgtatcgctcgatgtacgaacgtgactatcaggggcgccgcctggcaatggggatggtggatacctggaatctgcaatcgatcgccagcatgagcgccctgaactccagccgcatttacggcatcagctatggcaataaaagcagttcacaaacgcaggacaacacgcttgccctggtgcccgtaacggtgttcctcccggccgccggtgaagtgcacgtgtaccgtgacggtaaactgctcagcattcaaaacttctcgatgggcagctacgagctcgatacgtcgcgcctgccgtttggtatctacaacgttgatatacaggtggtcgttaacgggcgcgtggtcagcagccggatggcgaacatcaataaaacgttcgctagaaaatccagcgttaccggcgatctctcatggcaaaccttcgcgggcagcctcgaatacaacaagatggactatcgccacaactacaacatcaattatggcacacggaatacgtggattgccggggtcgccgctgcaaccagccaaccctggctttccggcgtgaatctgaaaactacgctctacggttttgacaataacggtgtcaatgaaacggaagcgaacgtgattttcaacaacgcgttcagctttaaccagcaggggctgctcgctaccgacggcagctggcagagtacctccaccttcaacatgagtttaccggacgggtatggcaacctgtgggggtcgcgccagtacagttccatcggtaacgcgctaccgatgcagcaaaacgactatgtgaccgtcggcgccaacgctaacctgcgcaaaattgcgccgttcctcggtacgctgagcgtcagccgcaccaataacaaatataccgggagcacctataccaacgtcgattacgatcaatccttgttagctaatcgctacgcaaccgtcacgctacgcgccggtattcagaactatcagtacaacaaccatgaaaatctgcgcgataagtacgtcaatattgatgtctctatccccttctccacctggctcagcaccggagtgtccagccagaacggaaacatgctggcgaacgccacgctgcgcaaaagctttgacaacagcgccattacccaggtgggggcgtcggtttcgaaacagattaaacagaataaaaatgacgatagcagctatcgttccgacgattacgccgccaatggttacgtcagctatgacaccaaatataacgctggcaccgtctccgtcagccgctcatcgcagcacagttcaaactacagcctgagttcgcagggcagcgtggcctggacgcaaaaaaatatctatgccggaaaaggtacccaaaccgcaggcctggtggtcaacaccaatttcagcggcaagggccggatgatggcgcagatcaacggccagaactacccgctgaccggcaaaagcaatttcatcagtcttccgccctacgcggaatataaagtggagctgatgaacgacaaaaactcagaagacagcgtcgacatcgtgaccgaccgccgcagcaaagtcgtgctctatccgggcaacgtcagcgtgattaatccggaagtcaaacagctggtcaccgtctttggccgggtgaaagaccgtcgcggcggttactacgccaacgccgatattcataaccacattggtaaaacccgaaccgacgaactcggtgagttcgccatggacgtcgataagcgttatccagtgattaccctggtggataaattcggcggcatttgcgaagtggatctggatctgaatgaagcgaaaggcgccgtatgggtcggtgagatcccttgtgagatccaacaacaaacggcatcagtgactggagatgttaagaatgtctattaa

SEQ ID NO: 253273 - DNA, 1620 bp, Klebsiella pneumoniae
atgtctattaaaccccagagcatcatgctgctggccggctggctgctggctgcgccggctatggcgctcacccccagtaacagcggaagcggcagcaactcctatatgtttatcgacaatgatgttgatgacgaatatttcatcaccaccagctccctcgacccgcgcttcaccggagccaacgtctggacaaaatatccgactaaccagcgaagtctgggatatataacctacataggctgggcttacgccaaccgctacttcgacctgtggatcgagaattcgcccattaaccagccgtttcttgggatccgttgcatgtctacgggcgcaaactgcccggcgtctggctatatttctcccgatgtcatcgataaagacggcttctatcacgcgatgtccggcaacaccgtagcaaacggttactacggtgcgggagcgctaagccagtcagcctatgagtattttcgcgatcggccggtggggaccatcgattctttgcagcttaatctttgctacatgaataccaataccgattatgactttgcctccggcgttcgctgtaaagatctccccagcgggggaacatggcgctactacacgttcaacctcgaaaaggtctcgcatctgaagttaaacagtaccggtgctctggcagaagtgtggattgccagcgatggcacgccaagcgtcaacctcggctcggatttgtgtcaaatgggtgtggtcgggagcgcttcggggatcatctgtaaaatggtgtcttacaattttcaggagactaaaactctcaccaccttacttgatttccggatggtgattgacacggcgatgctgggattttctccttctacgtctgacgtaaagtacagcggtgatggggcaagctggaccaattttggtacggtcagcacctataacaaggttttcaaaccgtcaggcgagtacgtgtacgtattcctgtccaacgccttttttcaaaaagtcctcaaggcaggaacggatttaaccaacaaggatgctctgtttaccttctattttgataactccgtcaccccacaatcgggttattatcagttcacgccatcaacattaattaacatcatcccgcgggaatacggcatcagcattgttgccagcgacgggcgttcgcatccacaagcatccggcaagattggtagcgaagagcccatcacctttgaatataaagtcaccacctccgcgtcgcgtcaggccgacagtattaccgcccaggtgattggcgactccgtcaacatgtatggtttgccgttctgcctgtttacctcagcggacgagacgctaaaagtgccggtcccggcctacctcgaatggacatccgctaccggtaaagcggtaaaagtccgcaacagctgcggcgaagatcctgtcgatatgaccaacgccgtttgggtacagacggcctggaacgccaacgtcaacgatggtttcttttttaccaccacgctgaaactgctgtttccgatggatgacccacattcacaattcaccaccaatggtcatgactggatggggaccgtcagcgccaccggcgatgtaaaagtgaccgccacgtggattggcgtcgagcgggggggatga

SEQ ID NO: 253274 - DNA, 684 bp, Klebsiella pneumoniae
atgatgaaaaacatccttgtcatcggattatgcgggctgtgtattcagcccgcttccgcggtgtactttgattccatcatttatgatatggatgccaggaaagattttatctcccggccaatagtcaatgatacaaaaaacaacaatttgtataccatatcggcttataaaatctcccatccgggcaacggagatgaaagacccgttccaggccaggataaagacctggtctggtcgccgctgcagttcaccgtgcaggccaatggccaggaatattttaaactctattaccgtgggcctaaagatgacgttgagcgctattatcgggtgatctttaaggagacgcccgtcacagttttcccctggcgtcaggatcagaaaaaactggatatagtaccttcggtatcgatgagtacgattctcatcgtgcgcccgcgtaagacgcgattccagtatgaaattaatgaagccacaggcaccattaaaaatactggcaatacctattttagagtcattctgcagaaaggctgcaatggtgacgatgaaagttcaacgcaattttatatgttgccaggggagagctggacaggccccgaggcgaagaatagcaacaggaaatacattgtcgcattaggccgctatcatcagttaggaaagggctgttttatgagttcgccgggctaa

SEQ ID NO: 253275 - DNA, 636 bp, Klebsiella pneumoniae
atgccggaagataaccatcagattaaatgtatggcgtgtggtttaaactgccctattgaagcggaagataaaatggagcgatccctttgcggagagaggaagttttctgtatggccagataaaaactatttttttaagcgagcggttaatgatttggtttttcgtgaaattacctgttttctgcctgaaggaatggtgctggtggatttctccctcgacaatattttgtattttctgcatgaggggtgggttgaaaaactgcaggagaccgggctgaaagttattttactcgcggataagagcatgctacccatggctaatttttggatgctgcgttccgggttattatggtcggtggtagaggtcaacgatggcttaagcagcttaatcaagaaaataaaacgcatcatgctggggcgaaatcttcgctgccggcgcacaccgtcgctgacggatcatgaaatgaagacgctgcgcctgctggcagatgggtactccagtcaggatatcgcccgcatcatggcgtgcgatacccgcagcgtctaccgctttcaatactctttatgcaagaagttcggcggactcaaccgcctgcgcgagctgcgcttcaggcataatatccccgctctggattag

SEQ ID NO: 253276 - DNA, 930 bp, Klebsiella pneumoniae
atggatcggttttcagcccttaaagtttttacgcgcgttgtcgaagccaacagttttacccgggccgcagactccctgaatatgcccaatgccaccctgagtaaagcgattcaacagcttgaatcgcatcttggcgtgtgcctgctgcagcgcacgacccgacgcattaccgtcacgccggaagggcgtgaatactatgaaaaagcggtgcggattctgaaagaactggatgaggtggatgcctcatttcgcgctgcccgcaataaaccaaaagggcatctgcgcgtcgcggtaggcggctccaccgctcgcgacgtgctgatcccgctgttggctgattttatggcaacctatccggatattcgtatcgacctggcggttgccgacagcccctcggaccttatcagcggcaatatcgactgcgcgatcagaggaggtccgctggacgactcgacgctgatcgcgcgcaaaatcggcgaagcgacgatcgtgacctgcgccacgccgggctatttcaggctttatggtgttcccgcgtatcccgatgagttgaagaacggacatcggctggtcggctatttatctcccgccagcggaagagccttcccgttccgctttctggctaacggcatcgcgcaagagatcaaaacggaacatcaccttggcgtaaatgagagcaacgcgcatattgcggcagcggaggctgggctggggattgttcagaccttctcatattcgctgagaaatgcgctggcgaacggattactggtggaaatattgaataaatggcgtccggctccttatccctttcatgtggtttatgcgcagaatcgccatgtcacatcccggctgcgcgtatttatcgactggctggcggagacattcccggcggcggtgaaggggtcattgcccacaagaaccaaagaatga

SEQ ID NO: 253277 - DNA, 750 bp, Klebsiella pneumoniae
atgagtaaaaaactttcggcaaaaatcgcgttagtcaccggcggcacctcgggtatcggcctggcatcagcccgggagctggcctcgcagggagcgacggtctatatcaccggtcgccgtcaggaagagcttgatgcggcggtcgcgttaatcggtcccaccgccagcgggatccgcgccgatgcctcgatattaagcgacctcgatagggtgttttcgaccattgccagagaatcagggcgactggatgtgctttttgccaatgcgggcggcggcgatatgatgccgctgggcgccataacggaagagcacttcgatcgcattttcgctaccaacgtgcgcggcgtgctgttcaccgtccagaagtccttgccgctgttgacccagggggcttccatcatccttaccggctcgaccgcggcggtgaaaggcaccgcgaacttcagcgtgtacagcgccagtaaggccgccgtgcgtaacctggcccgctcatgggcgctggacctgaaggcgcgcggtatccgcgtgaatgtggtcagcccggggcccgtccgtacgcccggcctgggaggacttgtcgcggaagagcagcgccagggactctttgatatgctggccgccgacgtcccactgggccgcattggcgagcccgaggaggtcgctaaaaccgtcgcttttctggcgtcagacgacgcgagctttattaacgccgctgaaatctacgttgatggcgggctggcgcagatctaa

SEQ ID NO: 253278 - DNA, 417 bp, Klebsiella pneumoniae
atgaaactcaaaatagcgcttatcgcgctcggctgttcgctcaccgccctttccggttgtacctcctcaaaatcttccccggaacgccacgcttactattttgtctcacaccgcagcgatttcgtcggcggtaacttcgccactaaccgtcaggaaaactaccgcttaaatctgccgacctttaccgaaatctatgcccgtggccagcaggacaaaaaatcgggaatgagcgaaagcgatgcccgtcgcaccgccgacgctatcaggcagcaggtggctgagggcacaaaaacccagcacgcgttcaccggtaacgccagcgataaatgggacaacgaaatggaaaataaggatgccgtattgttcggtaacgaactggccgggacgtatcttgatggctattttggcgtgaaataa

SEQ ID NO: 253279 - DNA, 1029 bp, Klebsiella pneumoniae
atgaaaaccattaaaggaccgggcatttttctggcgcagtttatcggcccgcaggcgccgtttaataccctggagggcgtggcgcagtgggccgcaggtttgggctatcaggcattgcagatcccctgcaattatccggcgattttcgacgttgaacgcgccgccgcaagtcagagctactgcgatgaggtgagcggcatactggcggaacagggcctggcgatcagcgagctgtccactcatcttgagggacagctggtggccgtccatccggcttatgataaggcctttgacgcgtttgcgcccgccgcgctgcgcggtaacccgcaggcgcgccagcagtgggcggtcgagaaagtgcgccaggcggcggtggcctcggcgcgtctggggctgaaggcgcacgccaccttttccggcgcgctggcgtggccttatttttatccgtggccgccgcataatcagccgcttctcgatgaggccttcgatgaactggcccggcgctggcgaccgctgctggacgtttttgacgagcagggcgtggatgtctgctacgaaatccatcccggcgaagacctgcatgatggcgtgacctttgagcgtttcctgcagcgggtcgataaccatccgcgctgtaatatgctctatgaccccagccatctacatcttcagcagatggactacctgggttacatcgatatctatcattcgcggatcaaagcgtttcacgtcaaagatgccgaattccgccgcagcgggcgcagcggggtctacggcggctatcagaactggcagcagcgggcggggcgttttcgttcgctgggcgacgggcagatcgatttcaaaacgattttcagcaagctcaccgagtatgattttgacggctgggcggtgctggagtgggagtgctgcctgaaggacgcggaggttggcgcgcgcgaaggcagcgagtttatccgccgccatatcatcccggtctccgggcgggcgtttgatgactttgccgcaggcaaggagggggaagaatga

SEQ ID NO: 253280 - DNA, 1242 bp, Klebsiella pneumoniae
atggtcacaacaaccgaaggtcgtgaaacaccccgcgtagcccaccgttttctggtgccgcggctgtcgttaatgatgtttatgcagttttttatctggggaagctggtcggtgacgctggggttggtgatgacccgctatgagatgtcgctgctgattggcgatgccttctccgccgggccgattgcctctattctctcaccgtttgtgctggggatgctggtcgatcgctttttcgcttcgcagaaggtgatggcggtgatgcatctggccggtgcggttattctgtggtttgtcccgcaggcgctggtggcgcaaaacggcgcgctgctgatcggcctgctgttcggctataccctgtgctatatgccgacgctggcgctgaccaacaatatcgctttccacagcctggcgaacgtcgataaaaccttcccggtggtgcgcgtcttcggcactatcggctggatcatcgccggtatctttatcggcgtcaccggtatctctgataccaccggcatttttaccctggcggcgctctgctcggtggcgctggccgtttatagcctgacgctgccgcatacgccggctccggcgaaggggacgccggtacagtttcgcgacctgctgtgcgccgacgctttcgcgctgctaaaaacgcgccacttcctcattttctccctctgcgcgacgctgatttcgattccgctcgggacctactacgcctacaccgcctcttatctggcggatgccggggtggcggacgtcagcaccgcgatgtctttcggtcagatgtcagaaatcttctttatgctggtgatcccgctgctgttccgccgcctgggggttaaatacatgctgctgatcggcatggcggcgtggttcgtacgctacgccttctttgcccttggcgtcagcgaagaggggcggttcctgctctatctgggcatcctgctgcacggcgtctgctacgactttttctttgtagtcggctttatttataccgatcgcgtggccggtgagaaggtcaaaggccaggcgcagagcatgattgttatgttcacctatggcatcggtatgctgctgggatcgcagatctccggcgcgctgtataaccatctggtcgccggccagagcgtgccgcaggcgtgggtgaccttctggtggatcccggcggtggccgctgcggttatcgcgctgattttccttttctctttccagtacaacgagaaagagcagcgttaa

SEQ ID NO: 253281 - DNA, 1377 bp, Klebsiella pneumoniae
gtgaaagacgcgtcaacgccgtcggatgccgtagaggaaagcggcccgacgcttcaccgcggtttacagaaccgacatattcagcttatcgcccttggcggcgccatcggtaccggcctgtttctcggcatcgggccagccattcaaatggcgggaccggccgtactgctcggctatgccgtcgccggcatcatcgcatttctgatcatgcgccagcttggcgaaatggtcgtcgaagaaccggtttctggttcctttgcccactttgcttataagtactgggggccgttcgccggctttctttccggctggaactactgggtaatgttcgtgctggtcgggatggcggaactgaccgccgccgggatctatatgcagtactggctgccggacgtgccgacgtggatctgggccgctgcttttttcatcattatcaacgccgtcaacctggtgaacgtgcgtctgtacggtgaagcggagttctggtttgcgctgatcaaggtgctggcgattatcggcatgatcggctttggcctgtggatgctgttcggcggccacggcggcagcaaagcgggcatcgataacctgtggaaacacggcggtttcttcgccaccggctggcacggcctgatcatgtcgctggcggtcattatgttctccttcggcgggctggagctcatcggcattaccgcggcggaagcccacaatccggaaaagagcatcccgaaagcggttaaccaggtggtataccgtatcctgctgttttatatcggctcgctggtggttctgctggcgctctatccgtgggtggaaattaaatccgacagcagcccgttcgtgatgatctttcataatctggacagtaacgtggtggcttcagcgctaaacttcgtcattctggtagcgtcgctgtcggtctataacagcggcgtttattccaatagccggatgctgtttggcctgtcggtacagggcaatgcgccgaagtttctcgcccgcgtcagcaagcgcggcgtgccggttaactctctgctgctatcgggagtcattacctcgctggtggtgctgcttaactacctgctgccgcaaaaagccctcggtctgctgatggcgctggtggtagcgacgctgctgctgaactggattatgatctgcctggcgcacctgaagttccgcgccgcccagcggcgcaaagggcgcgaatcgaagtttaaagccctgctgtcgcccgccagcaactatatctgtatcgcctttcttgggctgatcctggtgctgatgtgcacgattgacggtatgcgcctgtcggcgattctgctgccggtctggatcctgttcctgtttgtggcctttaaaaccctgcgccgttcggcgtag

SEQ ID NO: 253282 - DNA, 2202 bp, Klebsiella pneumoniae
atgcgtagctcctgctctccggccttcccactgcgaaaaacgctgctggcgttaaccgttggcgcgatcacccattcagccgctgcggtagaaaacgacgccggcgaacgtcagaaaaacgaagaaaccatggtcgttcaggcgacgcccgacagccgctttagagccggcggcgacctggtggtgcccgcctatctcgacggccaggtcgccaacggtggccgcctcggaatgctcggcgaacaaaacgcgatggacgttccgttcagcattatcggctatacctcgaagctgattcaggatcagcaggcgaaaaccatcaccgatgtagtgagtaacgatgccggggttcagccggtgcagggctacggtaactacgctgagacctaccgcattcgcggccttaaatttgacggcgacgatatgaccctgagcgggctggcgggcgtggtgccgcgtcaggtagtggataccgccatgcttgagcgggtcgaaatttttaaaggcgccaatgctctgctgaacggcgcagccagttccggcgtcggcggcatgatcaaccttgaacccaagcgcgcggaagatatcccgaccgctcgcgtgggcgtggactatacctcagattctcaggtcggaggctcgctggatttgggtcgccgctttggcgacgataaccagttcggcgcgcgggtgaacctggtgcaccgcgaaggcgaggcggcggtggagagtgataaacgcagaaccacgctggcttctattggtctcgattatcgcggcgaacgcatgcgcagctcgtttgactttggctatcagaaaaaaaccttccacggcggcccgatggggatcaacatttcgggcgtcgattttattccgcgcctgccggataacacccacaactacacgcaaaaatgggcttacagcgatatcgaaaatgagtttggtatgcttaggatggaatacgacattgtcgataaatggaccgcctatgcctctttaggcgcgcagcacgcccatgaaatcggcttatatagcgcgtcgaagctcattgaccgggcgggcaacgccacggcggggcgcctggataccaaccgctatattgataccgccagcggtatggccggggtacgcggcgagttcgccaccggttttgtatcgcacaaggtcaacgtcggctattcggcgaaaacccaaaacgataaaaccgcatggcggatgtcgaaggcggcggataacccgctggtgaatatctacgatactcagcaggttgcgcctccagcgaacgcttccttcggcggcgattattacgatccgctgaccagcggccgtacccgttcccagggctggctgctgagcgacaccctcggcgtgctggatgatacgctactgttcaccgttggcgcgcgtcatcaaaaagtggtggtgcgcaactacgataaaatcaccggcctgcaaagcgatgcgtatgacgacagccgctggatgccaacctatggagtggtctacaagccgtggcaggttatctctctatacgccaaccataccgaagccctgcagccgggtagcaacgcgccgacctccgccgctaactatggggaaagcgtcggaattattcactccaaacagaacgaagtcgggatgaaggcggattttggccgcattggcggctcgctggcgctgtttgaaattaaaatgccgtcagcattcctcgatagccagaaacgctatggccttaacggcgagcagcgtaatcgcggtgttgaatttaatctcttcggcgaaccgctgtacggtctgcgccttaacgccagcgcgacctggctgaaagccgaactgtcgaaaaccaaggatggtatcaacgacggtaaaacagcgatcggcgtaccggggttctacgcggtgcttggggcagagtatgacatcaagcccatcgacggcctgaccgccaccgcgcgcctcaaccattccggttcgcagtatgccgatcaggcgaacagcaagaagattgatagcttcacgaccctggatctcggcgtgcgctatcgcctggcgcttaatgaaaatcagaaccagatgacggtgcgtgcgggggtggataacgtgacggatgagaactactggtccggcgcggatgacagcggaacctatctgttccgtggcgaaccgcggacgttcaaggtttcggtcggctacgagttctaa

SEQ ID NO: 253283 - DNA, 1083 bp, Klebsiella pneumoniae
atgaaatgcactctcccggcgctggcgctggctatttctgctgtcttaagcggctgcgccgccacccataccgttccggcttctcaacacgtggctgaaaaaaacgcggttacccccgcacagccgctgaagcgcgagctggcggaggggctgtatgaaatggcgctcagcccgaaaggcgatgcgctatacgtggccagcgctgaaggctttaaagatgtgcagggcggggcggtctataagctggacccgacgaccctgaaaaccctcggcatgacccacacagacctgaaaaactttgccgtacagcttagtccggatggcagtacgctgtacgtgaccaactcgctggacggcggcattagcgccattgataccgccagcggcaaagtcaaaaaacgcctgctgttcagcgagcgtaacaaagagggattcccgtacggcgcgcggcagatcctgttgctcaataacacgctttatgtcggcgcggtggccgatccggcacaaatctgggtcgtcgatgccgacacgctgaagctgaaaacgcggattaaaaataccggcaaatggatgaccggcctgcactactctgcgcaaaccgcacgtctctatgcggcaaacggcagcggcgaggtgttggtgattaacccaagcaacaaccgtatcgagcagcgctggaagccgctgggcgcaaagccagccctgctgctgaatatggccgaagatagcgccaccggccgcctgttcgtcaccgacaactcgcaagcgaaaaccacgctggtgcttgatatccataccggtaagctgattaagcagctggaagtgggcgattcgctggcggtgcagttcaatccaaaacgcaacgagatttatatttcccagcgtgaatccggcaaagtaatcagcctggatggcagcagctacgcgttgaaaaaaacatgggatattccggctaaccccaacagcctgctgatctccgccgacgggcagacattgtttgtcaccgtcaaacagccgttcaataaagatcattcgacgaaagggccagacagcgttgtccgcattgacctgaccgcaaaataa

SEQ ID NO: 253284 - DNA, 954 bp, Klebsiella pneumoniae
atgatcacacgtcccctgggcaaaaccggattttccatcgccccgctggtgtttggcggtaacgtttttggctggaccatcgatgaaaaaaccagttttgccattcttgatgcgtttatagaccacggcttcgatgctatcgacacggcggatgtttactcccgctgggcggatggcaaccggggcggcgagtctgaaaccattatcggccgctggctacaggcgcggccaggcatgcgcgagaaggtgaagatcttcaccaaagtgggttccgatttaggccttcctggccataaggggttgaaaaaagcctggatccagcaggcggtagacgattcgctccgtcgcctgaacactgattatattgacctctattttgcccactggccggacccggaaacgccggtcgccgaaacgctcgaagccttccacgccctgcagcaggcgggtaaaatccgcgcgatgggcgcctcgaaccttgacgcgcagcagctgtcgagcgcgctggaggtgtcgcgtaaaagcggcctgccggcctggcaggtactgcagccggaatacaatctttatcatcgctcggcttttgaaggcgcgctctgcgacctgtgcgtcagccgcgagatcggcgtggtgacctactacagcctggcgtccggcttcctgaccggtaaataccgccagcagtccgatctggcgcaaagccagcgcggcagcggcattggtaaataccttaatcctcgcgggctgcgtattattgatacccttgctgaggtcgcggagcaaaacggcgctaaacctgccgaagtcgctctggcctggctgatgacccgcgaaggcgtgacggcgcccatcgccagcgccaccagcattgcacaagtagagagctttgcccgcgccgccgcgctgagcatcagtgctgaacagctggcgcgcctggacaccgccagcgcgtag

SEQ ID NO: 253285 - DNA, 777 bp, Klebsiella pneumoniae
atgaaaaaatctcttctgctgtgggtcgcgctgatggcctcaacctcagccctggccgcagaaaataaggaaattcgctttggcgtcgacccgaccttcgcgccgtttgaatggaaagatccgcagggtaagctgcagggttttgatattgacctaggcaacgcgatttgcgcacagctgcaggcgaagtgcgtgtgggtggaaagcaatttcgacggtattatcccggcgctgaaggcgcgtaagttcgatgcgatcctctccggcatgtatatgaccgagaagcgcaaagagcagattggctttagcgacaagctgtacaacggcccggtattccttgtcgcgcgtaaaaacaccctggccggaaacaccgtcgagcagttgaaaggcaaaaccatcggcgtcgagcagggatcggcgcaggagacttacgttaatcagcactggcgtccggcaggaatcaatatcgtcgcctatcagggggcggatcgcgtggttcaggatctggagtccgggcgtattgacggcgccgtgctttccggcatgatggccgactacagcttcctgcagcagccgcaggggaaagattttgccttcgttggcggacacctgaaggacgacaagctgttcggcgccggcgcggcgattggcctgcgcaaagaggacgatgctctgcgccaggagattaacggcgcgattgccactattcttgccgacggcacttataaaaagctcgccgggaaatattttagctttgacgtctattccgggacataa

SEQ ID NO: 253286 - DNA, 1179 bp, Klebsiella pneumoniae
atgaccgactgtgtaattcccgaaattaaagccactgaagaagaaatgattgcgatccgtcattatttacacgccaatccggaattaagtctggaagagtttaataccagcgagctggtggccggaaaactgaccgagtggggctatacggtaacccgcgggctggcgaaaaccggggtggtcggaaccttgagcaaaggcgattctccacgcactatcggcctgcgcgccgacatggacgcgctgccgattttcgaagcgaccgatctcccgtgggctagcaccgttgccgggaaaatgcacgcctgcggccatgacggtcataccaccattctgctggcggcggcgaagtatatcgcctctccggcctgtcagttcaacggcacggttcacctgatattccagcctgccgaagaagctatcggcggcgcggatttaatgattaaagacggcctgtttgagcgctttccctgcgagcgcatcttcggcctgcacaatatgccgggcctgccggtagggaaagttggcttttacgccggtaattttatggcctcggcggatacggtaaaaattaccattaccggctacggcggccacggcgcgcaccccgagcgcaccgtcgatccgattgtcaccggcgcggcgctggtgatgaatctgcaaagcatcgttgcgcgtaacgtaccgccgggcgaaaccgcggtagtgagcgtcggcactttccaggcgggcattgcatcgaacgtcattccggagaacgtggtgatggagctgagcgtgcgggcgatgaagccggaaatccgtgacctgctgattaaacgcatcaaggagcttgctgattttaccgccaaaagctacggcgccagcagcgaggtagaggtctttgactcttatccggtactgaccaacagcgttgaagagaccgaattcgccaaagcgctggcgctggaagtctttggcgaggagggcgtgctggaatccatctcgccgatgaacgccagcgaagattttgcctttatgctccagcagcgccccggctgctacttcctgctgggcaatggcgagaaaggcgggaagggcagctgtatggtgcataaccctggctatgactttaatgacgatattatttccaccggcgcgacgctgtttgcccggttagttgaaacacactgccgttga

SEQ ID NO: 253287 - DNA, 558 bp, Klebsiella pneumoniae
atgactaatcagttcaagaagatagcaattatcgctgctttcggtatgttgccttgcgcagcttttgctaccccaaccgttacctttcaaggggaagtcaccgaccagacctgttctgtcagcattaacgggcaaaccagctctgtcgtcatgctgcctaccgtagccacaactgacttcggtcctacccttgccaatggacaaacggctggactgaccccattcaccgtttccatcagcgattgtactgcgccggcgaccgatattaacattgccacgaaattccttggctatgatgtggataccggctccggcgttctgggcaaccgcgcaaccagcaatgccgccgtcggatttggtattcagctaacggcttcaagcgatggttcaaatccggtagtgctctctggcccaacggctgttaacggactggtactgaaagcaaccaaaactgaagcaagctacgagttcggtgcacgttattatgtcgttaaagcgacaggcgctaccccgggtaaaattacctctgtagccgaatatacgctgagctacttctaa

SEQ ID NO: 253288 - DNA, 711 bp, Klebsiella pneumoniae
atgcgcatttatttctcattagtagcaatgcttcttttatgcctgagtcatcatgtctgtgctagcgtagtgatgaccgggacgcgtattatttatcctgctcaggctagcaataaatctatccagctaaaaaatccggaccagcaaccttatattgttcaggttcaggtcgacgatggcagtgaaaagaaaccagctgatgaagaagatagcaacttcctgctgacgcccaatatatttcgcatggagccgggcagcgcgcaaacggttcttctaaagtatattggcaatagtctaccgcaaaataaagaatcaattttttatatgaatttcacccaacttccggcgacaaaatcggaaaaaagtgggagtaatcagctcgttttagccatcaccaatcgggtcaaaattttttatcgccctcagggaatagaaggaaccccgggagagacggcgcagaaaatgaccttttcgcttagcggcaaaaaaataaaagtcactaattccgctgggtactttgccgttgtccgtcgcgccagtttagtgattaacggtcgcgaaattaagctagctgataggcaaatggtcgcgccgcaatcatccgcagagtggttaccctcagccccggtgtccggcctcaagggcgcacgtctgcggttagttttggtcaatgattacggcatagatgtcatcaacgagcgcaccttatag

SEQ ID NO: 253289 - DNA, 2529 bp, Klebsiella pneumoniae
gtgaaatacactcttgttttatgttctgtaatagcatcaatctccggatcgtacgcagcggatagcactccggaaaatgcattgtccgactcatctgcggccgatgattatattttcgagcctgaattatttcgcggtggaagattcagccagtcggctctcgcacagctggtgaagaaaaatagcatcgctccagggaaatacagagtcgatgtctctgtaaatagccactttgtcgataatattgaagttgaattcatcaaactcaatgacgattcggtttctccttgcttacctgagacctttttcaaaagtgcgggtattaaaattacgccgccaacagccgccaattcatcatcagccccccgctgctattttttaaagcaggtagtaaaaggcggtagcgtggatatgaacgttgcgcagctacgtcttaatctcagcgtcccccagacagaaatggacagagcgcctcgcgggtacgttgacccggaagagctggattcggggacttcagtcggtttcgtaaactatatcagcaactattatcatgtttcctattccggaaagaatagcggcaatcaggactcggcctgggcttcgctaagtggcgggatcaatcttggaaaatggcagtatcggcagttatccaatttaaactggagccgcgatggcggtagtacctggaaaaatatccgtagcttcctgcagagacctctacccgaatatggcagccaactcacggcgggcgagctggtcacggcaggtcgtttcttttccggtctgaactaccgcggcttcagccttgctacagatgaccggatgctgcctgattctcaacgcggctacgctcctgttattcgtggcgttgccgtcactaacgccaaagtatccgtccgtcaaaatggtcaggaaatctaccagacaacggtcgctccgggaacgtttgaaattacagacctctatccgacgagctatagcggcgatctcgacgttgaggtgagcgaagcggacggatcggtcagccgcttcagcgtccccttctccgccgtaccggaatcgatgagggcgggcatatcccgctacaacttcgagctggggaaaacccgcgataccggcgaggaatcgctattcggcgacataacctggcagcgaggcctcagtaacgccatcactatgaacagcggtttgcgcatcgcagactcctaccaggcaatcatgttcggcggcgtttacggtagctggctgggggccctgggcatggacctcacctggtcgcatgcaaaggtgcccgatagcggctataccgaaggctggatgacgcacctttcctggagcaaaacgtttcaggagacggatacgacggtctcccttgccggataccgctattcgaccagcggctatcgcgaccttagcgatgtgctcagcctgcgcgatagcacacattatggcgatagctggcaatcgtccacctacagccagcgttcccgattcgatatttcattgagccaaagcattggccagcttggcagcctgtatttgtcgggttcgacgcaggattaccgtgatggccgcaatcgagatacgcagttacagtttggctatagcaacagttttcacggcatcagcaccaacctgtccgtcggccgtcagcgtatgggcagctatggcgataacggtagcatgcaaaccatcacctcgctctcattctcaataccgctgggcacctccagcacgcgagcgccgacattaagcacctcctggactcattcgaccgatggcggcgatcagtatcaaagttcgctgaacggggtgattgatgaacagcaaacggccagctatggcctgaatatcagtcgcgatcagcagtaccgcaacaccgtcttcagcggcaacctgcaaaaacggttctcggataccaccgttggagtgaacgcttcgaaaggcgacgggtactggcaggcatccggcagcgcccagggcgcactggctattcactccggcggcctcactttcggcccgtatctgggcgacacttttgccctcgttgaagcgaaaggcgcagcgggagcgaaagtgcttaacgctcaacaagtgacgattgataaccagggttatgcgctggtcccttcattgacgccatatcgctacaaccgggtcacgctggatccgcaaaatatggacggtagcgccgagctggtggacagcgaaaaacgcgttgcccctctggcaggctccgtcagcaaagtggtttttcgcacccgtagcggtacagccttgttaattaaagcccgattagccagcggcgaatcattgccgccgggttcggatgtcctggatgagggcggcaacgtcatcggtatggcgggccagggaggacaaatatacgtgcgtagcgaaaaaagccaggggcactttgtcgtccgctggggagataagccagaagaacgctgcacgctgccttttgatatttctggcgcgcagccagagcagccgatggtcagattatcctcagtctgttcacgttaa

SEQ ID NO: 253290 - DNA, 1332 bp, Klebsiella pneumoniae
atgaaaaatatcattaagctgggtatcactctgatgctactcctggctgccgcgccaggctggagccgatgcaccaaaaccagcgcgcctcaaacggaagatgggcgaacggcaatcattccgtttggaaaaattaacctgactgatgaatattttatgccggtgggctcgttactggccagcatcgtcgttcctcccactaactatacctatggcggagcaacagcctctacggtgctctgggagtgtgatgaggcagatctttccggtatatatttcctcgtggcgaccaacggtgacgatcggattggcggttactatgatattggcggtcctgatgggttaagcgatgtctatgcgacgtggttcgcctacgttggcatccgtcagacaatgggcggcgtcaccttaacccgctactggaagaaattaccgctctccagctggaataccacttctaacggtaagatccaaattcgcctgcaggatataccgccgctgcaggccgagttgtatcgggtcagcacgctgccgggcaaatccgccagttccgcctattgtggcaacaacaataatagcggaagcggtattgcctttggtaaagccgttggagcgatttatacctgtacgcagccaaacagctatattcagcttgctggcgacgcctcagtctctttttcctttagtcatgacaaagtgggtgaggacagcgcatcaaaatttgatttctggggcgcagataatggatttggttacggcatgcgtacgggcagcgccatctacagcgttcccacgtgcgtcgcccgtagcgccacgcccatcgtgatgctgccgacaatttcggtcccggaactggaagcgggaatgaaagccacctcctccttttcagtacaagttgaatgcagtgataccgttcagtccggcattggcgacacccaaacagcgatgggtttccaggtttctgaaggtgcatacagcgcagcgcagtctctcgggctggttaacggcagcggcggcgtcagcgcgctggtatccgacaactacttttccgctgatatggctaagggcgtaggcattacgcttgcccatagcaacaagcctggcgaagagcttatttttgttggccagcccggtttttccagcttaacgccgggaggcaataatgcgggctggtacccggtcatgcagggcgcaacccaggccggaagcgttaaaagcggttatacctattacacttactcactcattgccagcctgaaaaagctaaacgggcaaagcatcacgccgggtaaagtctacgctacagcttatgtactggtgaaaatgcaatga

SEQ ID NO: 253291 - DNA, 726 bp, Klebsiella pneumoniae
atgatgaagagcgcccttatctgcttgctgggcatgctttctgccgcgccgctttatgccgggatcatgcctgccgccaccaggatggtctatacggaaggacagcgcgaaaaaacgctgatgctggcaaataccaatgcctatccggtgattattcaaagctggatcgacgatggtgcgggccatcctgattttgaacaggcgccgtttgtcatcctccccgccgttttccgtctggaacccggagagcggcaggggctgcgcattatatataaccaggatcccttgccgacggatcgtgagtcggtgttctggattaatctctatgagatccctccgctggagggaaaaaagtcgcaggatgctcgcctgacgctggcaatgaatacccagttaaaactcttctggcgaccgaaggcccttgcaacttcgcttgaagagtcaacagcaaagctgaactttcggctgcggcaggaaaatggcggttggggaatagaatgtgataatccttctcctctcaacgtttcatttacctctattactctgttaaacggtggtcaggaaaaaggggtcaaagcgcagatggatatgatgacaaaagcctatagccgtcgcatctatccgttggaggcattcgctaacccacccacaggccaaaaaatccgctttcgttatttaaatgatgacggcgcttctgttgaacacaccgtcttacttaagccctaa

SEQ ID NO: 253292 - DNA, 498 bp, Klebsiella pneumoniae
atgaaaaagattctttcactggcaattattttatcgtgtgcttttacttccgcctcatgggcggatggccctggcggcaacagccacggtcagcagcaggtctggcagcaagacgccggccgcggcggcccggacggcaaccaccagcagggggcgcaggccaacaaccatcagggcaataatcatcaggggaacggtgataaccgtggcccggatcgcggcgataaagggcgcgggggccaggcgcatgatagccgacctcaggcgcgtcatgagcaggatcactttgcgtggaacgggcacgatttccgcaaaggtcagccggctccggaacgtttccgcggtaatgattatcggattaacgactggaacgatcgcggattaccggcaccgccgcgcgggcagcactggtcgtatattgacggcaactatgtgctgattgccgccgcgaccgggattattacgtctatcctgattaacggcgcgctgaataactaa

SEQ ID NO: 253293 - DNA, 390 bp, Klebsiella pneumoniae; identical to SEQ ID NO: 173222

SEQ ID NO: 253294 - DNA, 924 bp, Klebsiella pneumoniae
atgaatgcaaaagtttgggttctgggcgacgcggtggtggacctgctgccggagagcgaaggccgcctgctgcagtgccccggcggcgcgccggctaacgtagcggtaggcgtcgcccgccttggcggaaacagcgggtttatcggacgcgtcggcgacgatccgtttggccgctttatgcgtcataccctgcaacaggagcaggtcgacgtcagccatatgcacctcgacggccagcaccgcacctccaccgtagtagtcgaccttgacgatcagggggaacgcacctttacctttatggtgcgccccagcgcggacctgttcctcaccgaagaagacctgccgccgtttgccgccgggcagtggctgcacgtctgctctattgcgctcagcgccgagcccagccgcagtaccaccttcgcggctatggagcgcatcaaatatgccggcggtcgggtcagctttgaccccaatatccgcccggatctctggcaggatcaggaactgctacacgcctgcctcgatcgcgctttgcggatggccaacgtggtgaagctatcggaagaggagctggtattcatcagcggcagtgatgatttagcgcatggaatcgccagcataaccgagcgctatcagccggaattgctgctggtgacccagggtaaagcgggcgtgcttgccgccttccagcagcagtttacccatttcagcgccaggcccgttgtcagcgtggacaccaccggcgcgggagacgcatttgtcgccggactgctcgccagccttgccgccaacgggatgccgacggatatcgccgcgctggaaccgaccctcacgctggcgcaaacctgcggcgccctggcgacaacggcgaaaggcgcgatgaccgccctgccttatcagcgcgatcttaatcgccagttttga

SEQ ID NO: 253295 - DNA, 1518 bp, Klebsiella pneumoniae
atgtatagaaaaagcacacttgcggttcttatcgctttgctaaccggcgccgcctcagcccacgcgcaaacggacctcagcaccattgaagcccggctcatcgcgctggaaaagcgcctgcaggaagcggaaaacagggcgcaaacggcggaaaaccgcgccgagtcggcggagaaaaaagtccagcaactcaccgcgcagcagcaaaaaaaccaggacacgactcaggaagtggctcagcgtaccgccaaacttgagaaaaaggccgatgagaaaagcggctttgagtttcacggctacgcccgctccggcgtaataatgaatgattccggcgccagcaccaaatccggagcctacatgacgccagcgggggaaaccggcggagcaatcggccgtctgggaaaccaggccgatacctatgttgaaatgaaccttgaacataagcagaccctggataacggggccaccacccgcttcaaagtgatggtcgccgacgggcaaaccacttataacgactggacggcaagcaccagcgatctgaacgttcgtcaggcctttgtcgaactgggtaacctgcctacgttcgccgggccgtttaaaggctccaccctgtgggccgggaaacgttttgaccgcgacaactttgatattcactggatcgactctgacgtcgtgtttctcgccggtaccggcggcggtatctacgacgtgaagtggaacgacagcctgcgcagtaatttctccctttacgggcgtaacttcggcgacatcgatgattccagcaacagcgtgcagaactatatcctcaccatgaaccacttcgccggtccgctgcagatgatggtcagcggtctgcgggcgaaagataacgacgagcgtaaagataccaacggcaatctggtgaaaggcgatgcggcaaataccggcgtacacgcgctgctcggcctgcataacgacagtttctacggcctgcgcgacggtagcagcaaaaccgccctgctctacggtcacggcctgggcgcagaggttaaaggtatcggctctgacggcgcccttcgttcgggagccgacacatggcgcattgccagctatggtaccacgccgatcggcaaaaactggtctatcgccccggcgatcctggcgcaaagcagcaaagatcgctatgtcgatggcgatagctaccagtgggcaacgttcaacatgcgcctgatccaggagattaatcagaacttcgccctcgcctacgaaggcagctaccagtatatggatctcaaacccgaaggttataacgatcgtcatgcggtgaacggtagcttctacaagctcaccttcgctccaacctttaaggtcggcagcatcggtgatttcttcagtcgtccggagattcgtttctacacctcctggatggactggagcaaaaaactgaataattacgccagcgatgatgcgctgggcagcaacggttttaactcgggcggcgaatggtcgttcggtatgcagatggaaacctggttctga

SEQ ID NO: 253296 - DNA, 1371 bp, Klebsiella pneumoniae
  misc_feature (1078)..(1086): n is a, c, g, or t
atggattttgaacagatttcccgctcgctgcttccgattctgggaggcaaggaaaatatcgccagcgccgcgcactgcgccacgcgcctgcgcctggtgctggttgatgacgcgctggctgaccagcaggccatcggcaaaattgaaggggttaagggctgctttcgtaatgccgggcagatgcagattattttcggcaccggggtggtgaataaagtctatgccgcttttattcaggcggcaggtattagcgagtccagtaaatcggaagccgccgacatcgcggcgaaaaagcttaacccgttccagcgcatcgcccgcctgctgtcaaacatcttcgtgccgattatcccagccatcgtcgcttccggtctgctgatgggcctgctgggaatggtcaaaacctacggctgggttgacccaggcaacgctatctacatcatgctggatatgtgcagctcggcggcgtttatcattctaccgattctgattggctttaccgccgcccgcgaattcggcggaaacccctatctcggcgcaacgctcggcggcattctgacccacccggcgctgacgaacgcctggggagtcgccgccggtttccataccatgaacttcttcggcctcgaaatcgccatgatcggctatcagggtacggtgttcccggtgctgctggcggtctggtttatgagcatcgttgaaaagcagctgcgccgcgcgatccccgatgccctggacctgatactgacgccgttcctgacggtgattatttccggctttatcgccctgctgattatcggcccggccggtcgcgcgctcggcgacggtatttcgtttgtcctcagcaccctgattagccacgccggctggctagctggtctgctgtttggcggtctctattcggttatcgtcattaccggtattcaccacagcttccacgccatcgaagccggactcctcggcaatccgtccatcggcgtcaacttcctgctgccgatttgggcgatggctaacgtcgctcagggtggcgcctgcctggcggtgtggttcaaaaccaaagacgcaaaaattaaagccnnnnnnnnnccctcagcgttttccgccatgctgggcatcaccgaggcggcgatttttggtatcaacctgcgctttgtgaagccgtttatcgcggcgctgatcggcggcgcggcgggcggcgcgtgggtggtatccatgcacgtctacatgaccgcggtaggcctgacggcgatccccggcatggccatcgtgcaggccagctcgctgctgaactacattatcggaatggttatcgcctttggcgtcgcctttacggtttccctggttctgaaatacaaaacggacgctgaataa

SEQ ID NO: 253297 - DNA, 1401 bp, Klebsiella pneumoniae
atgtcacttccatcacggctgcctgcgattttgcaggccgttatgcagggccagccgcgcgcgctggccgatagtcactatccgcgctggcaccatgcgccggttaccgggctgatgaacgaccccaacggctttgtcgaatttgccggacgctatcacctgttttatcagtggaacccgctcgcctgcgatcataaatttaagtgctgggggcactggagctccgccgatttgctgcactggcagcatgagccgatggcgctgatgccggacgaagagtatgaccgtaacggctgctactccggcagcgcggtggataacaacggtacgctcaccctgtgctataccggcaacgtgaagtttgccgatggcggccgaaccgcctggcagtgcctggcaacggaaaacgccgacggcaccttccgcaaaattggcccggtcctgcccctgccggagggctacaccggccacgtgcgcgacccgaaagtctggcggcacgaaggacgctggtacatggtactgggcgcgcaggatcggcaaaagcgcggcaaggtgctgctgttcagctccgcagacctccatcagtggacgagtaagggcgaaatcgccggctacggcctcaatggcctcgacgacgccggctatatgtgggagtgcccggatctgtttccgctcggcgaccagcatattctgatctgctgcccgcaggggatggctcgcgaagaagagcgcttcctcaatacctatccggcggtatggatggccggtggtttcgactacgaccgcgccgctttcagccaccgcgagctgcacgaactggacgccgggtttgagttttatgccccgcaaaccatgcacacccgcgatggccgccgtctgctggttggctggatgggcgtgccggacggcgaagagatgcttcagccgactcttgccaacggctggatccatcagatgacctgcctgcgtgagctggagttgatcgacggtcagctctaccagcgtccgctgcgcgagctgaccgctttgcgcggcgaagcgcacggctggccggggaacgccctgccgctggcgccgatggaaatcgccctgcaaaccgcccgggacgatgcgttaagcctcgatttcggcggcgcgttgacccttgagcgcgatacccgcgggattcgcctggcgcgacgcaacctcgccggcgacgagatgcactatcgttactggcgcggcgaggtccgttcgctgcggattttcatcgaccggtcgagcgtggagattttcatcaacgacggcgagggggtgatgagcagccgctgcttcccggcttatccggcgcagctgattttctccggcagcgcgccggacgcattctgctactggccgctgcgaacatgcatggtagaataa

SEQ ID NO: 253298 - DNA, 1005 bp, Klebsiella pneumoniae
atgaaaaccaaacgcgtaaccattaaagatatcgccgaactggcgggcgtttccaaagcgaccgccagcctggtgctgaacgggcgtggcaaggagctgcgcgtggcgcaggaaacgcgcgagcgcgtgctggcgattgcccgcgagcagcactatcagccgagcatccacgcccgctcgctgcgcgacaaccgtagccacaccatcggcctggtggtgccggaaatcaccaactacggctttgcggtcttttcccatgagctggagatgctgtgccgcgaagcaggcgtccagctgctgatctcctgtaccgatgaaaaccccggtcaggagagcatggtggtcaataacatgattgcccgccaggttgacggtctgatcgtcgcctcctgtatgcacaacgatgccgactacctgaagctcagcgaacagctgccggtggtgctgtttgaccgctgtcctaatgaaagcgcgctgccgctggtgatgaccgattcgattaccccaacgacggagctgatttcccgcatcgcgcctcagcatagcgatgagttctggtttttaggcggtcagccgcgtctgtcgccctcccgcgatcgtctggccgggtttacgcagggtctggcccaggcgggtattgaattgcgcccggagtgggtgatcaacggcaactaccatcccagctccggctatgagatgttcgccgccctctgcgcgcgtctgggaaggccgccaaaggcgctatttaccgccgcctgcgggctgctggaaggggtgctgcgctatatgagccagcaccatttgctcgactccgacatccacctggcgagctttgacgatcactatctctacgattcgctgtcgctacgtattgataccgtacagcaggataaccgccagctggcctggcactgctacgatttaatcagtcagctgatcgagggcaacacgcctgaaccgctacagcgctacctgccggcgacgctgcagtttcggcatcggtga

SEQ ID NO: 253299 - DNA, 1293 bp, Klebsiella pneumoniae
atgatgacttctgagaatagccttgagcaagtgtatgtctggatctggctgcctggagcaacagaacccgttgtcgccggagtgttaagcagagacaacggtcggtttattttcaactacggccgcagttatctggagcggaaagaggcgatagcggtttatgtgccggagcttcctttagtcagaggcgcaattgtacctgcccctggtttgcaaatggctggcgcgttacgcgatggcgctcctgatgcctgggggcggcgagttattctgaaccgactgatgggcgcacaaggcagagataccgatcccaacaccctggatgaaatgacctacttacttgagtccggttccgatcggattggtgggtttgattttcagcgctctgcgacggagtatgttccacgcgcggcccgaggagcatcgcttgaagagcttatacaggcagcgtcgatggtggaaaacggtataccgttaaccgtcgatcttgaacaggcgttatttcacggcacttcactcggtggagcacgaccaaaagcgatgatcgaatttgggaatcgtaaatttatcgctaaattttcttcttcaacagatacctataatgttgttaaaggcgaatatatcgccatgcgcctggcaggctgcgttgggttgaatgttgcgcctgttctctttcgccatactgctggtaaagatgttttgcttatcgagcgttttgatcgcgtccaaagcaagaccggttggcaacgccgcctgatggtgtcagcgctgactatctttggtcttgatgaaatgatggcaagatatgcgagctatgaagatttggcggacattatacgtcagcgttttagtgcccctaaagagacgctgcgggagctgtttgggcgacttgtttttaacattatttgtggtaataccgacgatcatgccagaaaccatgcggcattttgggatggtaaaaggcttagcctgacgcctgcatatgacatttgtcctcaagggagagccggcaatgaagccacgcaggctatgctgatcgtaggcgaaaatcggatgagtaaccttgcggtttgcctgtcggctgccgaccgttttttactgagcagacgtgaagccattgagcttattgcccattatcttgatacggtccatatgaactggaaagccctcggtgatgaggtggggttaagtgaagtggacagaaaactcttctggggaaggatgttttttaatcctttcatatttgaaggcgcgccagaagagattttgaggctacgtaagtcgtggctttaa

SEQ ID NO: 253300 - DNA, 339 bp, Klebsiella pneumoniae; identical to SEQ ID NO: 173215

SEQ ID NO: 253301 - DNA, 840 bp, Klebsiella pneumoniae
atgattgttcagaaggtgctcaataatagcctcgtgctctcgatggacgacgataacagggaggttatcgtcatggggaaaggcattggtttcaatagcagacccggagacgagatcgccccggagaagatagagaagctattcgtaacccaggcgctcggcgcgcgcagcggctatcttgaggcgctctccgccattccggatgaggtcattgagatggccgcaatgattatttcccgcgccaatatgcagctcgccagcaaagtccgcgagcagattttcttcaccctcgccgaccatctgactttcgccatcgagcgcagccgcaaagggatcgctattcagaaccgcctgctgccggaagtcaggcgcttttatccgcagcagttccgcgtcgccagtgaggcggtaacgattattcgccagcagtacgggattgaactgccggaggaggaagccgggaatatcgcctttcatctggttaacggccagagcgagggcgacgacgtagcgcagaccatgcagtcggtgaaaatgctgaaggatatttttaatctcgtgcagtaccactttaagcagcagatagacaccgaatcgataaactactcgcgctttctggtccatatgcagtttttcctccagcgtttacaggagggggagctggacggcgcgcgggacagctttctgctggtgcaggtgattaaggcgtatccggacgcttaccgctgcgcgctgctgatccgcgactacgtcaaagcccagctcgatatcaccctcggcggcaacgagctgctgtggctcaccgttcatctggtgcggatcgcggggctggatgtgtga

SEQ ID NO: 253302 - DNA, 1425 bp, Klebsiella pneumoniae
atgatttatcaacagcaggcccggttcccggacggttttctgtggggcgcgtccacctcagcctatcaggttgagggcgcgtggaatgaagacggtaaaggaccgtcggtagtcgacatgcttagccatccgccgggaacggcggacttccgcatcgccagcgaccactatcatcgcgtggaggaggacgtcgcgctgatggcgcagatggggctgaaggcctaccgtttttcggtggcctggtcgcgggtgatacctgacggcgatggcccggtgaatccggttgggctggccttttatcaccgcctgatggacaccctgacgcgccacgggatcacccccatcgtgacgctctaccacttcgacctgccgtgggcgctggagctaaaaggcggctggctgaaccgcaaaaccgcggaggcattcgtgcgctatgccaggctgctgttcagcgaatttgccgccaaagttccgctctggctgaccatcaacgaacagaacaccatgattctgcatcccggcgcgattggcgtgcccgccgatcgtgaactgccggataagaaggcgctgtaccagcagaatcatcatatgatgctggcccaggcgcagatcttcgccctgtgccaccgtgagttccccgggctgcgcatcggcccggcgataaacaccacgtcgatgtacgccgaaagctgtaagccggaggacgccatcgccgcgcataactgggagacgctgcgctgctggagctttctggatgttgcggtgcatgggcgctacaacgccctggcgtgggcctatatgcaggatcgcggcctcgcgccggaactgcagccggaggatgcgctgattttgcagcaggggaggccggactttatcgccattaattactactcgaccgccaccattgccgccagccggggcgacggcggggacgttgcgccccgcgcgggcgatcagcaaattatgctgggcgaagagggggtttatcgtccggcggaaaatccatgggtcggcaaaaccccctacggctgggtggtcgatccggtagggctgcgtctgacgctgcgtaaagtgtgcgagcgctatggtctgccgattctgattagcgaaaacgggatgggcgcgccggacaagctggagcctgacgggacggtgaatgacgactatcgcatcgctttcctcgacgcgcatatcgcacagatgcggctggcgattgccgacggtgtcgagctgatgggctactgtccgtgggcggcgattgacgtggtcagcacccatcagggatacgccaagcgctacggttttatttatgtcgatcgcggcgaggatgacctgaagcggctgcaaaggatccgcaaacgcagcttctggtggtataaggatgtcatcgcgcaaaacggcaaccacgacgagtcgcagagatga

SEQ ID NO: 253303 - DNA, 1881 bp, Klebsiella pneumoniae
atgaactataacgaaacagcagacaaaatcctccacgcggtgggcggtgcggagaacatccgtatgctcacccattgcgcgacccggctgcgcatggagttcaacgaccgcgcaaaggttaacgatgcgcagattggcgccctccccggcgtgatcagcgtagtggagaagggcggccagttccagatagttatcggcaatgaggtgcagcaggtttatcgcctgctcaataaggcgctgccggagaaaaaaggcccggcaggcggcgataaaaacgcgaagccggccggcatcgtcgcccggattatcagcgttatttcgaccacctttaccccggtgatcccggcgattaccggcgcggggatgattaaagcgctgctggccattctcaagctcaccggggtgattagcgaaaccagctcgacgtatcagctgctgaatattattgccgacgccgccttcttcttcctgccggtgctgctggcctacggcgcatcgctgaagtttgaatgcaacccgattctggcgatgaccctcgcgggcgtgctgctgcatccgggcatcggccagatgctggcggccggtaaagcggtggattttgtcggcatcaacgtcctgctttccgattacgccggttcggtgctgccgattattctgaccgtgtggctgatgtcgtgggtggagcgcttcgccgaaaaagtgtcgccatcgattatcaagtttttcgttaagccgatgctgattctgctgattaccgcgccgctggcgctggtggtggtcggcccggcgggcattttgcttaacgacctggtggctgcgggggcgggcgctatcgaccgccacgccagctggttaatcccgatgctgatgggcaccctgcagcccttcctgatcattaccggcaccgcctgggcgatgacgccgatcgccaccggtcagctgagtaaaagcggttacgagatgattaacggcccggggatgctggcctcaaacgtggcgatgggagcggcgacgctgtgcgtggcgctgaaaaccaaaaatagcaacctgcgccagctggcctcctcgtcgggatttaccgcactgctggggatcaccgaaccggcgctgtacggggtgctgctcaagttccgccgcgtgctgattgccgcgatgatcggcggcggctgcgccggggtttatgccggggtgagcgggctggttcgatacgcgtttgtctcgccaggcctcgcggcgctgccggcgtttatcggtgaaaacccgatgaacatcgttcatgcgctggtgacctgcgcgatttccatcgtggtgacctttaccctgacctggtttatcgccttcaaagatgttcctgaggaacaagaagcggtggacgaggcgccgcagcctgcggcgagcgctaaaagcgagggggagacggaagtattaagcccgctgcgcggtcaggtggtggcgctcagtgaagtgaacgacgacgtcttttccggcggtctgctgggcgaggggctggcgattcgtcccgaagagggagtactgcgcgcgccgtttagcggcacggtgatgatgtttctgccctcctgccacgccgttggtctgcagagcgacagcggggttgagctgctgatccatatcggtattgataccgttaatcttaacggccagcactttagctcatcgctgaaggtgggggatagggtggaggcggggcaggtgctgatccgctttgatattcccgccatcgaacaggccggatacgacctgattacgccagtcattgtggtcaacggcgatgggcagcacgctctgcgctttaccgacgccgcccgggtggattacggcgagacgctgatggtgcaatccgttaaggaggcgcagccatga

SEQ ID NO: 253304 - DNA, 930 bp, Klebsiella pneumoniae
atgaaaaaaacagaacaatcagaggggccggttagctggtcggagagtacgttggccaacgatcccccgctgcgggcggtgcgcgccttcgaggcgatcgcacgcctcggcagcgtaaccctggcggcgcaggagctggcgatatccccctcggcggtcagccatcagctcaaagtgctggaaggctatttgcagatcccgctcaccgaacgtcaggggcgacggctgaccctcagccagcaggggcgagagtattaccgctcgatccgcgcggcgtttaacgtgctgcgtcaggccactgagcacctggtcgatcaggtgcaaacccagcaggtgacgatcagcctgatcccgctgtttggcatgggctggtttattccccggctgccgtcattcgtgcacgcgaatccgcataccgaaatcaacgtggtttacgccaaccaccgcaactatcttagcgacgcttccgatatgtcgatccgctttggcaacggtcactgggttggctatcaaagcgaaaagctgatctccggcagaatggttccggtatgcagtcaggcttttctccgcctccatgggcatattgataccccggaacagctgttacagatgccgctgctgcatgatgaggagcgcaccacgtggaaccagtggtttgtgcagcagggagtgaagcgcccgccgcgatcgaccgggccgatgtttgaggatggtctgctaaccctggcgggcgtacaggccgggttgggctgtgcgctaatgcgcgagccgctgatcgctccctatctgaagagcggcgagctggtgaaaatcttcgatgcggcaatagatgatggccgggattattatctctgcgtgcgccaggatagcgagatgacccccaatggcaaactattacaaagctggcttcgtcagcaggccttcggctga

SEQ ID NO: 253305 - DNA, 915 bp, Klebsiella pneumoniae
atgctcggcagcatctacgccctgatcgcgctcggctacaccatggtgtacggcatcctgcgcattattaactttgcccacggcgatattctgatggtcggcgcgttgaccacgctttccgggatgcacgcgctgaacgcccatttccccactttgccgccgctggcgcagctggggctggcgctgctgctggccatggcggtctgcgccctgctggcgatggcggtcgaacgctttgcctaccgccgcctgcgtaacgccccgcgcctggcgccgctgatctccgggatcggcgtctcggtactgctgcaaaccgtggcaatgatcgtctggtcgcgtaatccgctgatgttcccgcagatcctgtcaatggatgccatcgccgtgacccacggcagcgcagcgcatccgccggctctcgttaccgtcaccggtatcgtcaccgtcgcgctggccttcgcggtgatgcttggcctgtggctgctggtggagtacacccgtttaggtcgcggtatgcgcgcggtagcggaaaatccgcgtatcgccacgctaatgggcgttaaccctaacgcaattatcgccctcactttcgccatcggcggcatattcgccgcgctcgctggcgtcatgatggccagcaactacggcaatgccagcttctccatgggctttctgcccggcattaaagcctttaccgccgcggtactcggcggcatcggtaatattcgcggcgcgatgatcggcggcctgctgctgggccttatcgaatctcttggcgcaggctatctcggggacctgacccacggcgtcttcggcagcaattaccaggatatcttcgcctttatggtgctgatcctggtgctggtcttccgcccggccggtttgctcggcgaacgcgtcgcgcaccgggcttag

SEQ ID NO: 253306 - DNA, 1107 bp, Klebsiella pneumoniae
atgactacggcacaactcgatacgcctgtcgtctcccgccgcttctggaccgggatgaccctgttggtctgcgcgctgctggtcgcgccgatggtcgccagccagctcggcggcaactactgggtgcgagtcatcgacttcgccctgctctacgttatgctggcgctggggctgaatattgtggtcggctacaccggcctgctggatatgggctttatcgccttttacgccgtcggcgcgtatctggcggcgctgctggcctcgccgcatctgctggacgtcttcccgattttaaatagctggtttccggacggcctgcacacctcctggctggtgattattccgctcgccgcgctggtggcggcaggctgcggtatcgtgctgggcgcgccgacgctcaagctgcgcggcgactatctggccatcgtcaccctcgggttcggtgaaattattcgcatcctgatgcgcaacctcgaccgtccggtcaacatcaccaacggcgcaaaaggcatttccggggtcgattcgctgaatctgttcggcctcaagtttagcggcgtctatcactggtttggttttaaagtcccggcgctgtggctgtggtactacctgctgatgctggcgatcgtggcgattattttcgtctgcctgcggctacagcattcacgcattggtcgggcctggcacgcgatccgcgaggacgaagacgtcgcccgcgcgatgggcatcaacctgcgtaattacaaactgctggctttcgctatcggcgcctcattcggcggcgtggcgggcgcgctgttcggcgcatttcagggctttgtttcgccggaatcctttaccctgcaggagtcgattgcggtcctggcgatggtggtgctgggcgggatggggcacatccccggcgtgatcctcggcgcggtgctgctgaccgcgctgccggaactgctgcgcagccaggcggcgccggtacagcaggcgctgtttggcgaagtgctgattgacccggaagtattgcgccagctgttctacggtctggcgctggtgctggtcatgctgctgcgcccgcagggcatctggcccgcgcgacatcaaggagcaaaagcatga

SEQ ID NO: 253307 - DNA, 768 bp, Klebsiella pneumoniae
atgagcctgttaagcgtacgccatatgaccaagcgtttcggcggtctgacggcggtcgacaacgtatcgctgagcatcaacgagggcgaaatctacggcctgattggccccaacggcgcgggaaaaaccacctgttttaatctgattaccgggctttacccggcggacagcggcgagttcgttatcggcggagaagcctattttccgaagaatatcgagaaagtaaccgccgcaggcatcgcccgcacttttcagaacgtgcggctgtttaacgacatgtcggtgctggagaatgtaatggtgggccgccatgtgcgcacccgcaacggcctgtgggccgcgctctcccgccataaacgcgcccgcgctgaagaagcgcagacccgcgagctggcctggcacctgctggattataccggtatcgcgcagttcgcccactaccgcgcctgcgacctcgcctacggccaccagcggcggctggagatcgcccgcgcgctggcgaccgatccgcgcctgttagcgctggatgaaccagcggccgggatgaacgccgccgagaagatggcccttggcgaactgctgctgcgtattcgcgacgacggcaaaacgctgctgatgattgagcatgacgtcaagctggtgatggggatctgcgatcgcctgatggtgctggattacggcaaaacgttaaccagcggcacgccggatagcgtacgccgcgatccggcggtgatcgccgcctggctgggaggcagcgcccatgtctga

SEQ ID NO: 253308 - DNA, 720 bp, Klebsiella pneumoniae
atgtctgatttattaaccgttaaccagcttagcgtccactacggcggcatccaggcggtgcgcgacgtctcattcagcgtgaaagagggggagcagaccacgcttatcggcgccaacggcgcgggcaaaagctccaccgtacgcgccattaccgggctggaaccctttagcggcgaaattctgtttaacggcaaaccgatacgcaaacgccgggccgaatccctgctgcgcgaaggactcgtgatggtgccggaaggacgcggcatctttgcgcgcatgacggtgctggaaaacctgcaaatgggcgcctggctacgacgcgacgcggcggcggtaaaacaggagatgcgcgccattttcgaaaactttccgcgccttgccgaacgccagcaccagctggcgggactactctccggcggcgaacagcagctgctggcgctcaaccgcgccctgctcagccagccgcgcctgctgatcctcgacgagccgtcaatgggcctggcgccgctgatggtcgagaacatttttcgcgttatcgccaccctgcgccagcgcggcgtcgcgctgctgctgatcgagcagaacgcacgcctggcgctggaggcgaccgacagcgcctgggtgatggacagcggcagcatcgtcgaacgcggtcagtcgcaaacgctgctggccgacgatcgtattgcacagatttatttgggcgaaatgcccgtttaa

SEQ ID NO: 253309 - DNA, 1158 bp, Klebsiella pneumoniae
atgaaaacagtaaaaatcagtgcgctcagcgccgctattctgctcagtggttttgcctcctccgccgcgtggtctgcggccagcgaaaccgtcattatcggccttgctggcccgctgaccggcccttccgcgcgtatcggcaaggacctggaaaacggcgcgcagctggcgattgacgatatcaacaagcagcagccgactatcggcggcaaagcggtgaccttcaagctgcaatcggaagacgatcagtccgatccgcgcaccgccgttgccgtcgcccagcgcctggtagatagcggcgtcgcgggcgtcgtcggtcactggaacaccggcaccagcatccctgccgcgcgggtttaccatgatgcgggcatcgcccaggttgcgccggtcgccaccgggcacgcctataccaaacagggcttcgataccagcttccgcgtgatgggccacgatgatgacggtggccagtttgccgggcagtacgcggtgcaaaccctgaaggccaaacgcattgcggttattgatgaccgtaccgccttcggccaggggctggcggatgagtttattaagtcgctggaagcgcagggtatcaaaatcgttgaccgtcagtatgtcgatgacaaaaccgtcgatttcagcgccgtcctgaccgccatccgcagcaaaaacgccgacctgattttcttcggcggcgtcgatagtcaggccgccccgctggcgcggcgcatcaaacagctgggcatgaacgccaccctgatgggcgcaggcggcttcgttagccagaccttcctccagctggcacagaaagagggcgacggcgtggtggcgctggagccgggactgccggtcgaacagatgccgggcggtaaagccttcgagcaggcctaccagtcgcgctatcacacccatatcgaactgcacgcgccgttcgcctatgacgctacccgcgtgctggtcgcggcgatggaaaaagccgactccgtcgatcccgccgactatctgcccgccctgcgcgccattaactacgccggcgtgaccggacaaatcgcctttgataaagagggcaacctgaaatcgccaacctttaccgtttacaaagtcgtcgacggcaaatggcagccgcaaaccgtactcggcggcgcaacaacgaagtaa

SEQ ID NO: 253310 - DNA, 483 bp, Klebsiella pneumoniae
atgagtgataacaacgagctgggcattctcgcccgccgcaaaattgaagcagaaataatcaagccgatttacaacattctggtgcgcgagataggtaaatctcgcgcccaggcggtcatcggcgaagccattgaaaacgctgcgattgaggcggggaaagcgtttgccagccaggagcctaacggcgcggatatccagagctttgtcgccctgcagtatctgtgggagaaagataacgccctggaggtcaaggtgctggacgccgacgaccagcagtataactacaacgtcaaccgctgccgctacgccgagatgtaccacgaaatgggcctcggcgagattggccatctgctctcctgcgcccgcgacgataagtttatcgtcggctatgccccggatgtggagctgacccgtaccaccaccattatgcagggcggaaagtgctgcgacttccgctatcgcgtgaaaaaggataagccatga

SEQ ID NO: 253311 - DNA, 1245 bp, Klebsiella pneumoniae
atgataaccgtcaacggcgcacgtctgtggtcgacgctcaacgagatggcgcaactcggcgccacgccggcgggcggcgtgacccgactggcgcttagcgaagaggaccgccaggcgcgcaatctgctgcgccagtgggcgcgtgaagctggtttcccctgcgaagtcgacagtatggggaatatgtttattcgccgccgcggtaaacattcgcatctgcccccggtgttgaccggttcgcacgtcgattcccaaccgctcggcggccgctatgacggcatttacggcgtcctcgccgggctggaggcgctgcgcacgctgaacgaccgcggcattgcgaccgaacgcgatatcgtgctggtgaactggaccaacgaagaaggggcgcgctttgccccggcgatgctggcgtccggcgtctgggccgggcagtttagcgagtccttcgcgctcgcccgcgaagatcgcgacggcatcagcgtcggcgaggcgctggaggctatcggctatcgcggggagcgtcctgccgccgcctgcccgctccacgcctgctacgaagtgcatatcgaacaggggccgattctggaagaagaaggcgttgatatcggcctcgttcacgcggcaatgggccagcgctggttcaacgtcaccctggaaggcttttccgcccacgccggaaccacgccgatgggcagccgccgcgacgcgctgaccgccttcgccgagctggcgctggcggtggagcaaatcggcatcgcccataatccagacgggcgcgcgactatcgggatggcgcaggtcattccgggatcgcgcaacgtagtaccgggaggcgtggcgtgcagcgtcgaatttcgtcatccgcaatccccggcgctggaagccatggaacgggcgctgcatcgcgccgctgaagcgctggcggcgcggggcgtggcggcaaacgtcgagcgcatttttgattatgcgcccattgcttttgatcgcgagtgtctggcgcgcagccagcgagcggcggacgaactgggctatagcgcgcgaaccattgtctccggcgccggtcacgatacctgctatatcagcaaggtcgcgcccgccagcatgattttcattccctgcgagaagggaattagccataacgaggcggaaaatattctgcccgcgtgggccgagaaaggggctaacgtgctgctcaacagtttacgccttgccgccgatgagctgcccgctcgcagcgcgacgtaa

SEQ ID NO: 253312 - DNA, 924 bp, Klebsiella pneumoniae
atgaatatcaagaaaacggttgttgcctctttgatagcctgcatgctgccagcggtcgtgatggcgaaagatatttcggtcggtgtttctatggcgctttttgatgacaacttcctgaccattctgcgcaccgccatgcaaaaagagatgcaaaaagagggcgtgaagtcacagatggaagatgcgaagggcgacgtctcgcagcagctacagcaggtgcagaattttattggccagggcgtcgacgccattatcgttaacccggtcgataccaacgcggtcaaaccgattatggaccaggcgaccaaagcgggcattccgctgatcttcgttaaccgtcgtccgcaggcgcagctgaccgataaaatggcctacgtcggctccgactccgtgctggcggggcgcttacagatggaagcgctagccaaagcgatgaacggcaagggcaacgtcgccattctgctcggcgacctggcgaatgaatcgacccgcgaccggaccaaaggggtcgaagaggtggtggcgaaataccccgatatcaaaatcgtgcagaagcagaccgccaaatttatgcgtaacgacgccgttgacgtagtcagcaactggatgaccagcggcgaagacattcaggcgatcgcctccaataacgatgaaatggccatcggcgcgctgcaggcgctggggaaaaaccccaaccatatcctgattgccggggtggacgggacgccagatgccctgcaaatgcttaaaaacggcaagatgatcgccacgattttccaggatgccaaagggcagggcgaaggcgcggtagatgccgctattaagctggccaatggcgaaaaagtggaaaaggtcatcgacgtcccttaccagctgatcaccaaagacaacatggctgaattcatcaatcgcaaccagaaatag

SEQ ID NO: 253313 - DNA, 1020 bp, Klebsiella pneumoniae
atgaaaagcatttcactggcggcgctggctaaacggatcggcgtgggcgtggcgacggttgaccgggtgcttaacgaacgcggcggcgtgtcgccggaaaccacgcgccgggtgctgcaggcggcgcgtgaagccggtttaaagcgtattttgccggaagaacgtcgtctgccctggcaaatcgaagtgttcctgagcgctaacgactcgtgctttttctctcgcctgacgcaggatttcgccgacgtggcggatagccttggctatcgccgactgacgctgcaccgcacgctggtggcggaatcctccccggaaaaactggcgaaaagccttcttcgcagcagtaaaaagcgccatgcgataattgtcttcggcaacgaacatccgctggtctacgaagccctgcgccagtgtcgcgaagcaaacgtaccggtaattacgctggtcaccgacctgcccggcgcgcagaggctttgccacgtgggaatcgatcagcagcaggcgggacgtaccgcgggcatgatgatggggctgatggcccatcagcccggggaagtgttgatgctcagcggtcgtcaggatttcagcgcccaccgctcgcggattcagggatttcgcgaggtgataagccagcgctttccgcatctgcagcttggtgaggtgctggcgggtgaggataaccggcagcggatcgaccgtttgctggaagaagctctgaaccgtaaccgcgacgcggtgggcatctacaataccggtctgggcaatagtctggtggcgcaggcgctggcccgccatcgccgttatggtaagtgctgttggattactcatgaacgctatagcaccacccgcgaacagctggcgcagggtgggatggcgttgacggtcgatcaaaatcctcatcagcatgccaggctggcggtggagctggccctgcgccacctggaaaccggctatcagccccatctctttcgtgacggcaaggtcgagtttatcctctatagcgctgaaaacgtcgactga

SEQ ID NO: 253314 - DNA, 1008 bp, Klebsiella pneumoniae
atgacctgcattcgttttgcgttattaggcagcggttttataggccaggttcacgccgccaacctcgctcgccatgagcgaaccgttctggccatggtggcggacgccgagcccgagcgggcgaaaacgctggcctcccgctacggcgcgcgggcaaccaccgtcgccgaggccatcagtagcgatgccattgatgcggtgctcatcgccagctcgaccccttcacatgcggaactgctggaggccgccgcgcgcgccgggaaggccgtttactgcgaaaaaccgatcgacctttcgctggcccgtgcgcgccaggttgtcgacagggttttgccgctcggcgtgccggtgaccgtgggctttaaccgccgctttgacgccagccaccagcagctgcgtcgccaggtcgaggctggcgttatcggtaaaattgaactggtgcagatggtgtgccgggcatcggttatgccgccgctggcgtatctgcgcagctccggcggccagatgcgcgaccaggcaatccactttttcgatctgctgcgttttcttaccggcgatgaagtgacaacggttgccgccatgggagaggcgctggcgctgccggagctcgccgggatcggcgatgtcgatacctccattctcatgctgcggatgcgcggcggcgcgctggcgcagctggacaacacccggcgcaccggccacggctacgatgaacgtatcagcctgctcggcccggagggcgtgctggagtccggcagtcaggcctcgcgcggcgtgacgctgtggcagggagcgcgctgcattcagcccggcctctatccggactggttcagccgcgtcgaggagtcgtactacgcgcatctggatgcttttgtccgctcgccaggcggagaagaggagccggacctgccggggctgctggacgggctgcgggcgcaggctatcgccgaagccgccgtgctttccctgcagcaagggcaatttgtcagcgtcgaaccgctggcgtaa

SEQ ID NO: 253315 - DNA, 1032 bp, Klebsiella pneumoniae
atgttcccgtcacagttaccgaaaccgcgccatcctgccgctgcggcgatcccctcgctgcgctgggccattattggccccggctggattgccgagcgctttgtgaaatcgttaaaagagctcagccgccagcgggtggttgccgtctcctcgcggacgcaacaaaaggccgacagctttgccgcccgctgggggatcccgcaggcttacgctcaggtggatgagatgctggcgcggccggatattgatgcggtttacgttgccaccccgcataaccaccacttcccggacgggctgcgggttctgcaggcgggcaaacatgtactgattgaaaagccgtttgcgctgaaccggcgggaaggcgcggcgctaaaagcagaagccctgaaacaggggaagctggcgatggaggcgatgtggtgcgattacgcaccgaaatatgacgtgattcgccagctgctggatgacggcgtgctgggcgatctgcatacgctgctcgccgatcacggtgaatattttactccggatcatcgcatttttaatgccgatcttgccggtggaccgatgatggatctcggcagctatctgacctcattcagcgtgatggtcggcggcgtgccgcaggacattgtcgcccgcgggcgccccgcccaaaggggcatcaatgggcaaatttcgatgctgtttaactgggaaaacggcttacagggattgctcaacaccacgctattcagcaatacgccgggcggcgcggtggtggccgggcgcgacgcgaccctggtccttgacgggcaattctatgcgccggggaattttaccctcgccgccagccaggggggacaggtactgcgctgggaagagccgcgtaaccgctacgaccagctgttttatcaggccgaacattttgcctggtgcgtggggcaagggctcacggattcgccgattcgcccgctgaccagagttctggaaaacctgagcgtcatggatgaagtgcggcggcagattggcgtaatatttaacgaggagcgttaa

SEQ ID NO: 253316 - DNA, 873 bp, Klebsiella pneumoniae
atgataaaaagttcgtggcgtaaaattgcaatgctagccgccgccgttccgctgctgctggcgagcagcgcactgtgggccagtaccgatgctatccatcagaagctgacagatctcgagaagcgttcaggcggcaggttgggcgtggcgctaatcaacacggcagataattctcaaatcttatatcgcggcgacgagcgttttgccatgtgcagcaccagtaaagtgatggccgccgccgcggtattaaaacagagcgaaagcaataaagaggtggtaaataaaaggctggagattaacgcagccgatttggtggtctggagtccgattaccgaaaaacatctccagagcggaatgacgctggctgagctaagcgcggcgacgctgcaatatagcgacaatacggcgatgaatctgatcatcggctaccttggcgggccggaaaaagtcaccgccttcgcccgcagtatcggcgatgccacctttcgtctcgatcgtacggagcccacgctgaataccgccatcccgggcgatgagcgtgataccagcacgccgctggcgatggctgaaagcctgcgcaagctgacgcttggcaatgcgctgggcgaacagcaacgcgcccagttagtcacctggctgaaaggcaataccaccggcgggcaaagcattcgcgcgggcctgcctgaaagctgggtggtcggcgataaaaccggcgccggagattacggcaccaccaatgatattgcggttatctggccggaaaatcacgctccgctggtattagtcacctactttacccagccgcagcaggatgcgaaaaaccgcaaagaggtgttagccgcagcgacaaaaatcgtgaccgaagggctttaa

SEQ ID NO: 253317 - DNA, 1701 bp, Klebsiella pneumoniae
atgaggctattaaaccgtctgcatcagtatcagcgactctggctaccctcttccggcgagccgcagcaggtgaccgtcggcgagctggccgagcgctgcttttgcagcgaacgacatatccgaaccctgctgcgccaggcgcaagaatccggctggctaagctggaaggccagctccggtcgcggaaagcgcgggctactccagttttacaaagcgccggaaacgctgcgcaatgaaatgatggagcaggcgctaagtaaaggacagcagcagaacgccctcgaactggcccagctggcgcctgtagagcttaaagcgctgctttccccctttctcggcggccaatggcagaacgatacgcctaccctgcgcattccttattaccgtccgctggagccgctgcgcccgggttttatgccgggacgcgcggagcagcacctggcaggggagatattttccggcctgacccgtttcgatgcgcaaagtacctgcccgataggcgatttagcccatcattgggaggtgtcgcctgacggtctgcgctggcacttttatattcgttccaccctgttctggcataacggcgatccgataaaaacctcacagctgcagcagcgccttctgatgctgttgcagctccccgcgatgcgtacgctgttcgccagtatcagcgagattagcgtcacccactctcagtgcctgactatcaccctgcaccgcgccgattactggctaccgttccgccttgccagctactgcagcgtgctggcgcatccggacgatccggcgatcggcagcgggccatttcgcctgaaactatttacccaggaactggtgcggctggaaaaccatcagcgttatcatctcacccatccgctgctgcaggccgttgaattctggatcacgccgcagctgttcgaacaggatctgggcaccagctgtcgtcatccggtacagataaccattggcgaccctgatgagctgaccagactgcgccaggtcagcaatagcatcagtcttggattttgctatctgacgctgcgccagagcccccgcctgaataaagcgcaggcccaaagactggtttcgctgattcatcgctccggtctgttagaaacgctgccgctggatgaagacctgatcgcgccgagcaacgaagtattgccgggatggactattccgcagtggccagaaaatggtgatacaccgctgcccgaacggctaactctgctctatcaccttcccgtagagctacacgccatggcggagcgccttcggcaacggctggcagaactcggctgcgagctgacgataatttttcatgacgcgaaaaactgggatggttgccagcagtttgcgaaggcggacctgatgatgggcgatcgcctgattggcgaagcgccggtttatgcgctggagcagtggctacgctgcgatgccctgtggcctaatttgttgaccggggcgcaatatgcgcatcttcaggcaacgctggatgccgttcaggtattaccggacgaacgcagccgcagcgaagctttgcgcaacgtctttaacacactgatggacgatgccatcatgacgccgctgtttaattataattatcgcatcagcgcaccgcctggcgtcaacgggctgcgcctgaacgcgcgaggctggtttgatttcgccagcgcctggctaccggcttcgacgccgtga

SEQ ID NO: 253318 - DNA, 819 bp, Klebsiella pneumoniae
atggccagactggctgcattcgatatggacggtacgctactgatgcctgaccatcgtctgggagaaaaaacgctttcgacgctcaaacgtctgcgcgatcgcgatatcaccctgactttcgccaccggtcgtcatgctctggaaatgcgccacgttatcggcgagttctctctggatgcgtttttaatcaccggcaacggaacgcgcattcactccctggaaggtgaagagctgtatcgccgcgatctggctcccgatgtggcggaagaagtgctgcatagcgcctgggataccgcggcgagtatgcattttttcaacgacggcggctggtataccgggcaggagattccagaaattctgcaagcgcacgtctttagcggttttcgctatcagctatacgacccaaagcgaatgccggcgcatcaggtcaccaaaatctgcttctgcggcgatcatgacgatctccggcggctaaggctgcaactaagtgaagcgctcggcggccgagcggatctctgtttttcagcgatggattgcctggaagttttgcccgggggctgtaacaaaggcgcggcgctggcgatattaagccagcatctgggcctgacgttgcaggattgcatggcgttcggcgacgccatgaacgatcgggaaatgctaggcagcgtcgggcacggcgtgatcatgggcaacgcgatggaacagctgaaatttgaacttccgcatctaccggttattggcgactgccgtcatcaggccgtttcccattttttgactcattggctggattatcctgatcttccttattcccccgaataa

SEQ ID NO: 253319 - DNA, 1053 bp, Klebsiella pneumoniae
atgaacagcgcctgggtaaaacacgcgattagtgaaattaatgccgattatcagcgttccgccgacacgcaccttatacgtctggcgctgccagcgttccctgggatccaactctatctgaaggatgaaagcacccatccaaccggtagcctgaagcatcgcctggcccgctcgctgtttctgtatggcttgtgcaacggctggattaaagaaggaacgacgattatcgaatcctcttccggttcgaccgccgtctctgaagcttacttcgctcgtctcttaggcctgccgtttatcgccgtgatgccttcctgtacggcaaagcgtaaaattgaacaaattgagttttacggcggtcgctgccatttcgtcgacagcgcctgtgaaatctatgccgcctccgaaacgctggcgcgcgagctgaacggtcattatatggatcagtttacctttgccgaacgggctaccgactggcgagggaataataatatcgccgacagtatcttccgtcagatgagccatgagccgcatccgcagccgtcgtatattgtgatgagcgcgggcaccggcggtacctctgcgactatcggacgctacattcgcagtcagggttacgatacgcagctgctggtggttgatccgcaaaactccgtgtttttggactactggcaaagccgcgacgccagcctgcgcagcccggtcggcagtaaaattgagggcattggccggccgcgcgtcgaaccatcgtttattcccgacgtggtcgatgagatgctgcgggtaccggatgccgccagcgtcgccaccgcgctatggctggaaacactgcttgggcgcaaggtcggcgcctcaaccggcaccaatatgtggggcgtactgcagctggccgtacggatgcgcgaagagggacgcaccggctctatcgtcacgctgctgtgcgacagcggcgaacgttatctggaaagctactacaacccgcagtgggtggcggccaatatcggcgacgtctctccctggcaggcgcaaattgcacaaatgctgcaggcaaaataa

SEQ ID NO: 253320 - DNA, 459 bp, Klebsiella pneumoniae
atgttagataaaattgatcgtaagctgctttctttactgcaaaccgactgcaccctctctttgcaggcattggccgatgccgttaatctgaccaccacgccctgctggaagcggctgaagcggctggaagacgaaggtattcttcgcgggcgcgtcgcgctgctggatgcggaaaaggtcgggcttgggctgacggcgtttgtactgattaagactcagcaccacagtagcgactggtattgccgctttgtcagcgaggtctcgcagatggcggaagtcctcggcttctggcgtatggccggcgagtatgactatctgctgcgggtccaggtggcggatatgaagaactatgatgatttttataaacgtctggttaacagcgtgccgggactctcggatgtcacttcgagttttgccatggaacagataaaatacaccacagccttgcctattgattaa

SEQ ID NO: 253321 - DNA, 1773 bp, Klebsiella pneumoniae
ttgcgattatttgcccaacttagctggtatttccgccgggagtggcgccgttacctcggcgctattgctctgctgattattattgccatcctgcaactggtgccgccgaaagtggtgggcatcgtggttgacggcgtaacaaaacaacattacaccgcggaaaaggtgtggatgtggattggcctgctggtcgttattgcggtgatggtctatctgctgcgctatgtctggcgcgtgctgttgttcggcgcatcgtatcagctggccgtcgagctacgtgaggatttctatcgccagctcagccgccagcatccggccttttacctgcgccaccgtaccggcgatctcatcgctcgcgcaaccaacgacgtggatcgggtggtgttcgccgccggtgagggggtgctgacgctggtggattcactggtgatgggttgcgcggtgctgattgtgatgtcgacgcaaatcagctggcagctcactctgctggcgctgctgccgatgccgctgatggcgctggcgattaagcgtaacggcgatgcattacacgagcgttttcgcgtcgctcaggcggccttctccagcctcaatgaccgcacccaggagagcctgaccagcattcgcatgatcaaagcttttggtcttgaagaccgacagtcggcgcagtttgctgccgacgctgcggataccggggcgaaaaatatgcgcgtggcgcgcattgatgctcgcttcgatccgacgatttatatcgctatcgggaccgctaacttgctggccatcggcggcggcagctggatggtgatccagggcagcctgaccctgggtcagctcaccagctttgtgatgtacctcggcctgatgatctggccaatgctggcgctggcatggatgtttaacatcgtggagcgcggcagcgcggcctacgcgcgcattcgcaccatgctggaggaggcgccggtagtgaacgacggcagcgagccgacgccggaagggcgcggtacgcttagcgtcgccgtgcgcgagtttatctatccgcaggcgaacaaggcctcgctggaaaaagttaactttacgctccagcccgggcaaatgctgggaatttgcggcccaaccggctccggtaagagcacgattctggcactgattcagcgtcattttgacgttaccgatggcgatatccgctttcatgacgttcccctgacccgactgcagctggatagctggcgcgccaggctggcggtagtcaatcagacgccgttcctgttctccgataccgtcgccagcaatattgctctcggtaaaccggacgccacgcaggagcaaatcgaacgcgttgcccggctcgccagcgtgcatgaggatatcctgcgcctgccgcaggggtataacaccgaagtcggcgagcgcggcgttatgctttccggggggcaaaaacagcgtatttccatcgcccgcgcgctgctgctggaggcggagatcctgatccttgatgatgcgctgtcggcggtggatggtcgaacggagcatcagatattgcacaacctgcgccagtggggtgaggggcggacggtgattatcagcgctcatcgcctgtcggcgttgaccgaggccagcgaaattctggtgatgcagcatgggcatgttgcccagcgcggtcgtcatgaggcgctagcgacgcagccgggctggtatcgcgatatgtaccgttatcagcagctggaagcggcgctggatgatgttccgctggaagatgaggaggtcgccggtgcgtag

SEQ ID NO: 253322 - DNA, 1779 bp, Klebsiella pneumoniae
gtgcgtagttttactgaactctggccgacattaaagcgcctgctggcctacggctctccgtggcgtaaaccgttaacgatagcggttgctatcatgtgggtcgcggcggtggcggaggtgagtggcccgctgctgatcagctactttatcgacaatatggtggcgaagaactcgctgccgttgaagctggtctgcggcctggccgcagcctacatcggcctgcaactcctcgccgcgggtctgcattactgtcaggcgctgctgtttaaccgcgcggcggtgggcgtggtgcaacagctgcgcagcgacgtcatggacgccgccctgcgtcagccgctcagcgagtttgatacccagccggtcgggcagctcatctcgcgggtgaccaacgatactgaagtgattcgcgatctctatgtgaccgtcgtggctaccgtcctgcgtagcgcggctttgattggcgcgatgctggtggcgatgttcagccttgactggcgaatggcgctggtggctatcgctattttcccggcagtactgatcgtgatgatgatttatcaacgctacagtacgcccatcgtcaggcgggttcgcgcgtggctggcggatatcaacgacggttttaatgaagtgattaacggaatgggcgttattcagcagttccgtcagcaggcgcggttcggcgaacggatgcgcgaggccagctacgcgcactatctggcgcgtatgcaaactctgcgccttgatggtttcctgctgcgcccgctgctgagcctgttttcttcgttaattctctgcggtctgttgatgctgtttggtttcagcagcagcggaacgattgaggttggggttctgtacgcttttattagctatcttggacgactaaacgagccgctgatcgaactgacgacccagcaatcaatgctgcagcaggcggtcgtcgcgggcgagcgcgttttcgaactgatggacaaaccgcgtcaggcgtggggcgacgatagcgaaccgctgcgcagcggctcgattactatcgagcatctctcttttgcctaccgcgacgatagcctggtgttgcaggatatcaatctcgacataccgtcgcgcagctttgtggcgctggtcggccataccgggagcggtaaaagcaccctggccagcctgatgatgggctactacccgttaactcagggagagattcgcatcgatggtcgtccgctgtcgtccttaagccacagcgcgctgcgtcaggggattgcgatggtgcagcaggatccggtggtgctggctgacaccttctatgccaacgttaccctcggtcgcgacatcagcgaagagcaggtctgggaggcgctggaggcggtacagctggcggagctggcccgtgaaatggaaaacggtatttatactcagttgggcgagcaggggaacaatctctccgttgggcagaaacagctgcttgcgctggcgagggtgcttgtcgatacgccgcaggtgctgatacttgatgaggcgacggctaatattgattctggcaccgagcaggcgattcagcaggcgcttgtacgggtgcgcgagcatacgacgctggtggtcattgcgcaccgcttatcgactatcgttgaggctgacacgatcctggtgctgcatcggggtcaggccgtcgagcgcggcaatcatcagcagctgctggcggccaaaggccgctactggcagatgtatcagctgcagctggcgggcgaagaactggccgccagctcgcaggaagagtcgcttatcgcctga

SEQ ID NO: 253323 - DNA, 231 bp, Klebsiella pneumoniae
atgcaccataaacaggcagcttctgctttgcggtttccggtggtgcaaaaacgtcacagtatgcgcactgaaatggtgcaatttaaggctaaagcggcgttttgccgcttcgtttccgccagattcttctttttcctcctcaaaaagggccgcctggcggccctttttcatttctggcatagcccttgctttattagattcgtgttagctgcggccattaccgaattctga

SEQ ID NO: 253324 - DNA, 339 bp, Klebsiella pneumoniae; identical to SEQ ID NO: 173067

SEQ ID NO: 253325 - DNA, 1287 bp, Klebsiella pneumoniae
atgaagatagcaacaatgaagacaggtctgggagcgctggctcttcttccggggctggcgatggccgcaccggcggtagcggataaagccgacaacgcctttatgatgatttgcaccgcgctggtgctgtttatgaccattccaggcatcgcgctgttctacggcgggctaatccgcggtaaaaacgttctttccatgctgacgcaggttatcgtcacctttgcactggtctgcgtgctgtgggtggtttatggctacacgctggctttcggtaccggcggcagcttcttcggcaacttcgactgggtgctgctgaagaatattgagctgaaagcgctgatgggcagcttctatcaatacatccacgttgccttccagggctcgtttgcctgtatcaccgtcggcctgatcgtcggcgcgctggcggaacgtattcgtttctctgcggtactgatttttgttgtggtgtggatgacgctttcttatatcccgatcgcccatatggtatggggcggtggtctgctggctacccacggcgcgcttgatttcgccggcggaacggttgtacacattaacgccgcggttgccgggctggtgggcgcttatatgatgggtaaacgcgtgggctttggtaaagaagcgttcaaaccgcataatctgccgatggtattcaccggcaccgctatcctctacgttggctggtttggctttaacgcgggttcagccagcgcggcgaacgaaattgccggtctggctttcgttaacaccgtggttgccacagcggcggctatcctggcgtggaccttcggcgagtgggcaacccgcggcaagccgtctctgctgggcgcctgttcaggggcgattgccggtctggtcggcatcactccggcctgtggttacatcggcgtcggcgggtctctgatcgtggggattgccgcgggtctggcgggtctgtggggtgtcaccgtactgaagcgctggctgcgcgttgatgacccgtgcgatgtgtttggcgtccacggtgtctgcggtatcgtcggatgcatcctgaccggtatcttcgccgcgacttctctgggcggcgtcggttatgcggaaggcgtgaccatgggccaccaggttctggtacagctggaaagtatcggtatcaccatcgtctggtccggcgtggtcgcctttattggttacaaagtcgccgatatgaccgttggcctgcgcgtaccggaagatcaagagcgtgaaggtctggacgtcaacagccacggcgaaaacgcctacaacgcatga

SEQ ID NO: 253326 - DNA, 510 bp, Klebsiella pneumoniae
atgaaatttgcctatatgttaagtgctatagccgtagcggctacgttgtctgcctgtgcgaataatcacaacagcaatgcagcgaaccaggcggcgcccgatccttatggcattgcttcactaagctcctcgcagcagcagcctaacgtatccgggactatcaatattcgccagcgcgtggcgttaccgccggacgcagtattgaccgtaactctgtcggatgcgtcgctggccgatgcgcctgcgcacgtgctggcgcaaaaagcggtcaggaccgaagggaagcaggcgccgtttaattttgttctgccctataaccaggcgcaaatccagcctaatgcccgcattcttctcagcgcggcgattaccgttaacggtcagctgatgttcattaccgataccgtacagacggtgattaaccagggcggcaaccgtgccgatctggtgctggtgccggtccaacaaacggcggtaccggtggcgaacaacaacgttccgcccgtgcagtaa

SEQ ID NO: 253327 - DNA, 312 bp, Klebsiella pneumoniae; identical to SEQ ID NO: 173074

SEQ ID NO: 253328 - DNA, 366 bp, Klebsiella pneumoniae
atgccgccaattcctgaagtgtctgtgcccttccacggtttacattttttgcgtccgggactgctctttgattttgtcacgattagcgctaatcagctgctggccgtccccccggttgcgctgctctactcaacctctggcgtccttcagcacgctgaattacgtaaacttcccatcgaagccagcggtctcgtggtgtatccgatatcaccccttaagctcccggccacgcgcgccaaactgatgattaacgcccagtctgaacgcccgaagtttcttgaagccttgctaaccaatacgccgcatgaaaatgcccatagtatgctgggtctggcgctggaattcaccgtagtaaacccgacttaa

SEQ ID NO: 253329 - DNA, 258 bp, Klebsiella pneumoniae
atgactactgtggttctgaacgtcaaaattgatagtgagttaaaagaaaagctgcgtcagtatgcggaagaaaataacgaaaatttaggaacagctacggagaaactgctgctgctggcattccaggtagcggaatcagcagacgaggcgggggtttcggaagaagatattgatagccagcacaccgaagaggaagcatctccattaacccctaaagaaatcaaagcattacgtaaactcctgaagaagaaaaaatga

SEQ ID NO: 253330 - DNA, 216 bp, Klebsiella pneumoniae
atgaaacaacaactctctacagccagcaactatagcgaagcgtgcgccatgctgcgttccggctatgtgaagcatgtaaggctgaactggaatatcggtagtgatgagttctttcgcattgcctccgactggtgtgatacgggcgcaaaaattaaaaaagatgaagacggttttattatttcccttaaaggttttccgattccgcgacagcattaa

SEQ ID NO: 253331 - DNA, 1428 bp, Klebsiella pneumoniae
atgtcatctcgtcgctttggttcacaatcgctggtgcgcctgctcggtcactggcaggaatccggttcccgcatgccgctctggcgtcagctggcggaagcgctgcgcctgctgattctcgatggccgccttgcgctggaaacccgtttgcccggcgaacgggaactggcggcggcgctgaatatcagccgtactacggttgccagcgcgcttggacagctacgggaagaaggctatctctacagccgtcagggaagcggttcgcggatcgctttgccggagcgggctgtggagatcaagaccaataaacctgactcgccgtcggtcaatctggccgtcgccgcgctcagcgccgggcctgaaattcatcaggctttcagtcaggccctgaaaatcatgccgcagcatttatccaataccggttacgatcagcagggtctgccgcttctgcgtgaagcgatcgcccaccgctatagcgaacgcggcctgccaacccgaagcgatgaagtaatgattgttaacggggcacttagcggcctggcattggttttgcgcttatttaccgggcccggcgatcgggtggtggtggatgcgccgacttatcctatggcgattagcgcgattcagggagcatcatgccgcccggtcagcgtggcgttaccgcagcagggatgggactgcgacggtttagcggcgacaattgcccaaacggcgccgcggctggcatggctgatgccggactttcataaccctaccggtcgctgtatggatagccccacgcgccagcgggtagcagacatcgccgcgcaaacccgcaccacgctggtagtagatgaaacgatggtcgacctatggtacgacgccccgccgccaccacctttagcatcgtataaccctgatgctccggtgataaccatcggctctgcgggaaaaagcttctggggcggtttgcgcataggttggatccgcgcatcctcgcgcaccattgcatctctggttcaggcgcgggactccctcgatctcggctccccgctgctggagcagctggcctgctgttggctgctggagaatgagaaaatgctgttgccgtcgcggcgcgccatgctggcaacccgtcgggatatgtgcggcgcgctgatggcggagtattttccccactggcgcttcacgccgccggaaggaggactctctttttgggttgagttacccgggatgctggcaacgctgttttccgttcgcgcggaaagccggggaattcacatcggaacaggaacgcgatttggcctggcgggcgcctttgaccgctatttacgcttaccgtttacgcttgcggatgatgaactacgtcacgcttttaatatattgcagccgttatggcatagtcttacggagcagaaagagagcttccgcccacggaaaattatttaa

SEQ ID NO: 253332 - DNA, 615 bp, Klebsiella pneumoniae
atggtacgtcgcttgctgcaactttatattggtctggtcctgtacggcgtgtcgaccgcgctgtttgttcatgccaatctgggggccgatccgtgggatgtttttcatctggggatcggcaaccagttcaatcttgatttcggaacggtgatgattctgacgggcgcggcggtgctgctgctgtggatcccgctacgacaaatgccggggctgggcacggtaagcaatgtgattgtgctgggcctggcggcaaacgccactctggctatcctgccgccgttagaatcgctggtggcgcgtagcctgctgttggccggggctatcgtactgaatgcgctggcgacgggaatgtatattggcgcaggtttcggccccggtccgcgcgatgggctgatgaccggactgcatgcacgtaccggatggtcgctgcgcggcattcgcacggcgattgaactttccgttctgctgattggctggatgatgggcggcaaatttggcgtgggaaccgtactctatgcgataaccattgggccgttgattcagctctgcctgccgtggtttcatcagtcggctgcacgtaaggcgctggcgaaaccgggcgaggccatctcctga

SEQ ID NO: 253333 - DNA, 354 bp, Klebsiella pneumoniae
atgaagtacgttgatggttttgttgttgctgtaccggcggaaaataaggaggcataccgcgcgatggcggcaaaggcgctgccgctatttaaagagtttggcgccctacgcgtggtcgagtgctgggcggatgatgtcccggatggcaagctgaccgattttcgtctggcggtaaaagctgaagataatgaagaggtggtattcagctggattgaatacccctctaaagaggcgcgcgatgccgccaacgctaaaatgatggctgacccgcggatgaaagagtttggcgaaaatatgccatttgatggaaaacgaatgatatacggcgggttttccccgctcctcgatgagtaa

SEQ ID NO: 253334 - DNA, 915 bp, Klebsiella pneumoniae
atgaacgatttcacttcactgctgcaacaggggaatgcctggctattcattcccagcgcgatcctgctcggcgcgctgcacggtctggagcccggacactcgaaaaccatgatggcggcatttattgtggcagtgcgcggaacgttgaagcaggctgtactactggggctagcggcgacggtatcgcatacggccgtggtctggctggtagcgatggcaggcctgtggtttggccgcggttgggatgcgcaaacgtcagaaccctggtttcagctgatctcagggatccttattgtgctgattgcctgctggatgctgcggcgtacctggctcgaatctcgtacacaccaacgcgatcgtgatcataaccataaccataaccataaccataaccacgaccacgaccacgaccacgaccacgaccacgaccacgaccacgaccacgaccacgaccacgaccacgaccacgaccaccatcatgcacaccatcatccgcatcaacaccatcctcacgcgcatccgctagtggccaccgcagagtggcaggacgcccatcagcgcgcgcatgcggaggagatcaaccgccgctttaacggacagcgggtcaccaccggacagatcgttttgtttgggctgacgggcgggctaatcccctgcccggcgtcaattaccgtattgcttatttgcctccagttgaaaaaggtttcgctgggagccacgctggtgctgagttttagcgttgggctggcgctcaccttagtggcttcaggcgcaattgccgccctgagcctgaagcacgtcgccaaccgctggccgggactaaacgatctctcacggaaagcgccgtggatttccggtgcgctgattattgtggtgggttgctatatgctgctgcacggctggcttaatctgtag

SEQ ID NO: 253335 - DNA, 273 bp, Klebsiella pneumoniae
atgtcacatactgttcgtcacaagaagatgttattgacccgactgaagaaaattcaggggcagagcgctgcgctggaaaaaatgctcaaccgcgagcatgaatgcgcagaggttctccagcagctggccgccattcgcggtgcggtaaacggcatgatgatgcaggtcatccaggggcatttaacggatcatgtcgtcaaagagccggaagaaggccagcgtgaagctgaccttgaagtggtcatgcaggtgattaaatcttatctgaaatag

SEQ ID NO: 253336 - DNA, 1587 bp, Klebsiella pneumoniae
atgacgacccggcatcaggtgagcctggttacaggggtactgatactggccattattttgccagtggcgctgagtatttggttggcaatgcagcaggccaaagcgcagttttataccggactggacaacttttccgttcgggtactggctcgcgttcagcaggtagccgatcaggcaagagaggcgctgaacgaagcggatgccgataccgccgcgacctgcagtccgcagcatctgcttaatatgcggcggattgcctacacccaccgctacgtgcaggaagtgttgtggttacatggaggtattccgcaatgctcttctcttgaagatcatcgggtatcagtaacgtttcctgctcccgaccatattactgccgacggctatcgtacctggctcacctcggttagcgatctcgggctacagcataaaatgacggcaatgggcagcgaacatcatgtggtgatgatcgatccggtttcatttattgatgtgattccgtcaggccaggaagagattcacacactcttgtttggcacgaagcgcgatcaaattatcatcagcagtaaaccgctcgacgccgccgcctgggagcacatcaagcgtctggatgtcgaaacattgacgcttgatagcaccgtttatcgcctccgccgcatccctgaactagggctggcgatcgcggcctggtcatcaacattaccgctccagcaaaaattacatcaacagctaatgctgtggttgccgattggtttatgcaccagccttctggcctcattcctgcttcttcgcctgctgcgaaggctgcgctctccgcgttacgggatgctggacgcgctgaactccaatgctatacaggtctattatcagcctattatttcgctacagactggcaaaatcgccggcgcggaagcacttgcccgctggaggcagcctgacggtagttatttatcgccggatatttttatcccgcttgccgaacagacccggctgataacccggttaaccgaagatatcgtgcggaaaattttcgccgatctcggaacctggctgcgccagcgcccggaagtgcatatttcgatcaatttatctgtcgatgatttgcgttcgccaacgctgccgatactcctgcaggagcagctccagcactggggtatcagcgctcagcagatcatccttgaaattaccgagcgcggcttcgttgacccgcaaaccactctgcccgtcatcgccggctatcgtcaggccggacaccgtatatcaattgatgacttcggcaccggctactccagcctgagctatttacaaaaactggacgtcgacaccctgaaaatcgataaatcgtttgtcgatacgctggagtacaaaccgctgacgccgcatattattgaaatggcgaaagcgcttaatctggcgaccgtcgccgaaggcgtcgaaaccgaaagccagcgcgactggctgcgcgttcacggcgtgcagtacgcccagggttggctttatagcaaagcgctgccaaaggagaaatttatcctgtgggctgaaaacaacctgaaagcgtattcaacgccgcctgcggaaaacacctactga

SEQ ID NO: 253337 - DNA, 1110 bp, Klebsiella pneumoniae
atgtccaatatacgactgaggaatgtcaccaaacggttcggcagtacggtgacgctgcatcaggtaaatcttgatattgaagatggtgaatttgcggtgttcgtcggcccgtccggctgcggtaaatcgacgctactgaggatgattgccggtcttgaagaggtcagcgaaggtgaagtgctaattggcgatgaggtgatgaatgatgtcgttcctgcccatcgcggcgtcgctatggtattccagtcctatgcgctctatccgcatatgacggtggcggaaaatatgggctatggcctgaaagtgaacaaagtaccaaaagatgaaattcgccgtcaggttgaaatggtggcgaaaacgctgcagctctctcatctgctggatcgtaagcctaagcaactttccggcggtcaacgtcagcgcgttgccatcggccgcgctattgtacgtaatccacgggtgtttatgtttgatgaacccctttctaacctcgatgccgaactgcgcgttgagatgcgcctgcatatcgccaaactccatcacgagctcaaaacgaccatggtttatgttactcatgaccaggttgaagcgatgactctcgccgataaaatcgtggtgatgaactacggcaaagttgagcagatgggatcgccgatgtcgctgtattacaacccggtgaataaattcgtcgcgggatttatcggttcgccgaaaatgaacttccttcccgcgacggttaccgcatggcagccgggccagcttagcgtgaagatggcgcaagatcataatctgacgctcaatatcaccacctcaccgctgcagcccggcgctgccgtcaccctcggtattcgtcctgaacatctctctaccgatgtgaatatcggtaccgtggttgagtttcaatgtgaagtggtcgagagactgggtaataacacctatctatttggccagtgctacggccacgataacgtcaaaattctgctgccaggcgacgttcactttcgcccctggcagaaaatcagcgttgccttcgacgatcgctactgcatggtgttcgacgaaaacgacctgcggattagcgccgacatcgccgcgccggatgcccactaa

SEQ ID NO: 253338 - DNA, 1233 bp, Klebsiella pneumoniae
atgaaaaagaacactcttgctgcactgatccttaccactctggctgccgggcagctaacgagcctgcaggcgcacgcggccgggcagctcaacgtttgggaagacatcaaaaaatccgccggcatcaaagccgcagtcggtgattttgaaaagcagttcaacgttaaggtgaacgtgcaggagatgccgtacgcccaacagctggaaaagctgcgtcttgatggtccggcgggcatcggcccggatgtcctggtgatccctaatgaccagctaggcggagcggttgtccagggattgctatctccactgactctggatcaggagaagcaggaggcgtttacgcctgcgtcaatcagcgctttccatatggataacgtgctttacggcgtacctaaagcggtggaaaccctggtactgatttacaacaaagatctgatcgaccagccgctggatagcctgcaggcgtggttcgactattcgaagaagcagcgcgaagaggggaaatacggtctgctggcgaagttcgaccagatttattacagctggggcgctatcggtccaatgggcggctatatctttggcaaaaacgataaagggggcttcaacccgcaggatgtcggtctcaacaaacccggcgcagtggaagcagtcactttcctgaaaaaattctataccgataaggttttcccggcagggatcctcggtgacaacgggttgaacgccatcgattccctgttcaccgagaagaaagcggcggcggtgattaacggcccgtgggctttccagccatacgaagcggcaggcattaattatggcgttgcgcctctgccgacgctgccggacggcaaaccgatgagctccttcctcggcgtgaaaggctacgtggtttcgacgtggagtaaagataaagcgctggcgcagcagtttattgagtttattaaccagcctcagtatgtgaaagcacgctatgtggcgaccggcgaaatcccgccgctgaaggcaatgattgacgatccgctgattaagaatgacgagaaggccagcgcggtggcggtgcagtcagcacgggcgacggcaatgccaggaataccggaaatgggggaggtatggggcccggcgaacgcagccctggagctgagcctgaccggtaaacaggagccgaaggcagcgctggataacgccgagaagcagatcaagatgcagatcgaagccatgcaggccagcaatcagtaa

SEQ ID NO: 253339 - DNA, 1308 bp, Klebsiella pneumoniae
gtgattatcaatcccagcgaaaatattgccgaagcgcgtggcgcaggacgccacgcgtggtgcggcctgctgctggctatcgtgccgggttttggtcagttttatcaccgccagtggttgaaggggattgtcttcctggtgctgctgagcagttttatgagcattttctatgactttctcagcgaaggcctgtgggggttatacaccttaggcgaagaagtcccgcgggataactctatcttcctgctggcggaaggaataatcagcgtgctgattatcgcttttggtttgttagtctatttcctctcgctgcgcgatgcctggattaacggtaaaaagcgcgatgagggtatggcgctgaacagcgtacgcaagcaatatcagatgctgctcagcgacggttttccctatttgatgattacgccgggctttattctgctggtgtttgtggtcatcttcccgattctgtttggctttgcgatcgcctttactaactacaacctttaccacacgccgcccgcgaagctggtcgattgggtggggttcaaaaacttcatcaacatcttcacattatccatctggcgctcgaccttttttgatgtcctgcagtggacggtggtgtggacgctgctggcgacaaccctgcaatgcaccgttggtgtgctgctggcgattctggttaaccagaaggatttgcgtttcaagccaatgatccgcacgatttttattctgccgtgggcggtgccggggtttgtgacgattctggtttttgccgggatgttcaatgattcattcggggtcattaacaacgccattttgtctttcttcggcatcagtccgaaggcctggctgaccgacccgttctggactaagacggcgctgatcatgatgcaaacctggctgggcttcccgtttgttttcgccatgaccaccggcgtactgcaggcgattccggacgatctctatgaagcggccacgatggatggtgccagcgcgtttacccggctgcggaccattactctgccgctggtgctgtactcgattgcgccaattattattactcagtacaccttcaattttaataacttcaatatcatctatctgttcaacaacggcgggcctgcagtggcggggtcgaatgccggcggtacggatattctggtgtcgtggatctacaaactcaccatgtcgtcttcgcaatacgctatcgcggccactattacgatcctgctgtcgattttcgtcgtcggcctggcgttgtggcagttccgcgccacaaaatcctttaaaaatgacgatatggcgtaa

SEQ ID NO: 253340 - DNA, 852 bp, Klebsiella pneumoniae
atggctaaatcaccgagtattaaacgcgaaaagtggattcgcctgtcactcacctggctggtggtcatctttgtctcgacgatcattatttacccgctggtctggacggtaggggcgtcgctgaacgccgggaacagtctgctgagtacgtcgattattcctgaaaacctgtcgttccagcattacgcggatttgttcaacggcaatgtgaattatctcacctggtactggaactcgatgaaaatcagcttcatgaccatgcttctgaccctaatcagcgtgagcttcaccgcctatgcgttctcccgctttcgtttcaaagggcggcagaacggactgatgctgttcctgctgttgcagatgattccgcagttctcggcgctgattgcgatctttgtcctttctcagctgctggggctaatcaacagtcatctggcgctggtactgatctacgtgggcggcatgatcccgatgaatacctggctcatgaaggggtatctggacgcgatccccaaagatctggatgaatccgcgcggatggatggtgccagcagcttccgtatctttttcgagatcattatgccgttgtcgaagcctattctggcggtggtggcgctgttttcatttaccggtccgctgggggatttcattctctccagcaccatattgcgtaccccggataagtacacgctgccgattggcctgtataacctggtcgcacagaagatgggcgccagctacaccacctacgcggcgggagcggtattgattgccgtcccggtggcgattctctatctggcgctacaaaagtactttgtttccggcctcacctcaggcagtacaaaaggataa

SEQ ID NO: 253341 - DNA, 1203 bp, Klebsiella pneumoniae
atgaaaagattaacacccgcgtggcttgctgtttctctggcatgctgtttttccgccggtacgctggcggcagatgcgctgcaaacgcaggcgtttagcaatatgcccgctgattttattaaaggcgcggatatctctacgctgctggatgcggaaaaacacggcgcgaagttctttaatcacaacaatcagcagcaggatccgatcgcgatcctcaaggccgatggcgtgaactacgttcgtctgcgcctgtgggtggatcccaaagatgctaaaggccagcgctacggcggcggcgataacgatctggcgacgacgctggcgctggcgaagcgggcaaaagcgcaggggatgaagctgctgcttgatttccactacagcgatttctggaccgatccgggtaagcagttcaagccgaaagcctgggagaagctggactatccgcagctgaaaaccacgatccacgattatacccgcgacacgattgcccgctttaagcaggagggcgtgctgccggatatggtgcagatcggcaacgaaatcaacggcggtatgctgtggccggaaggtaaaagctgggggcagggcggcggcgagttcgatcgtcttgctgggctgctgaatgccgccatcgatggactgaaggaaaatctcaccggcggtgagcaggttaaaattatgcttcatctggccgaaggcacgaaaaacgacaccttccgctggtggtttgatgaaatcagcaagcgtaacgtcccttacgacatcattggtttgtcgatgtacacctactggaatggcccgattagcgcgctgaaagccaatatggacgatatcagccaacgctataacaaagacgtgatagtggtggaggccgcttacgcttataccctggataactgcgacaatgcggaaaatagcttccaggcgaaagaagaaaaagatggtggttaccccgccaccgtccaaggacaatataattatattcacgacttaatgcaggccgttgccgatgttccgcagcatcgcggtaaaggtattttttattgggagccgacgtggattgccgtgccgggaaatacctgggcgacgcctgccggaatgaaatatatccacgatgagtggaaagagggaaatgcccgggaaaatcaggcgttgtttgattgccagggaaaagcattgccgtcgatgaaggtatttaattaa

SEQ ID NO: 253342 - DNA, 2058 bp, Klebsiella pneumoniae
atgaaaaaatttgcgcctttgagtccgaaggttaatacgctattgcatggcgccgactataacccggagcaatgggagaattatccggatattatcgacaaagatattgccatgatgcagcaggcaaaatgcaatgtgatgtcggtagggatattcagctgggcgaagcttgaacctcaggagggcgtatttgagtttggctggttggacagtattctggaaaaactgtataccgccggaattcatgtctttcttgctacgccaagcggcgcgcgcccggcgtggatgtcgcagaaatatcctcaggtgctgcgcgttggtcgcgatcgggtgcctgccctgcacggcggacggcataaccactgtatgtcgtcgccggtctatcgtgagaaaaccctgaagattaataccctgctggcggaacgttacgcgcagcatccggcggtgctgggctggcatatctccaacgaatacggcggggagtgtcactgtagcctgtgtcaggagcgtttccgcgactggctgaaagcgcgctatgaaacgctggataatctcaatcacgcctggtggagtaccttctggagccacacctatagcgactggtcgcagatcgaatctccggcgccgcagggagaagtctcaattcatggtctcaaccttgattggcatcgctttaataccgcccaggtgaccgacttctgccgccatgagattgctccgctgaaagcggcgaatgccgaactgccggtgaccaccaacttcatggagtatttctacgattacgactactggcagttggcgcagacgctggactttatctcgtgggacagctaccccatgtggcatcgcgataaagatgaaaccacgctggcctgctacaccgcgatgtatcacgacatgatgcgcagcctgaagggcggtaagccgtttgtattaatggaatccactcccagtgcgactaactggcagccaaccagtaagcttaagaagccgggaatgcatattctctcctctttgcaggcggtggcgcacggtgcggattcggtgcagtattttcagtggcgtaaaagccgcggttcggtggagaagttccatggcgcgattatcgatcatgtcggtcatctggatacgcgcgtgggccgtgaagtgacgaagctcggcgagatgttaagccagctgccaggcgtcgtgggctgccggacggatgcgaaagtggcgattatcttcgatcagcaaaatcgctgggcgctggatgatgcccaggggccgcgtaatctcggcatggagtatgaaaataccgtcaacgaacattaccgtccgttctgggagcaggggattgcggttgatgttatcgatgctgacgttgacctgagtccttatcaactggtcattgcgccaatgctgtatatggttcgtgagggatttgccgaacgcgccgaagcgtttgtggctaacggcggtcatttagttactacatactggacagggatagtgaacgagtccgacctctgccatctcggcggtttcccgggcccgctgcgtaaactgctgggcatttgggcggaagaaattgactgcctgaacgacggcgaacgcaacctggtacaggggctggcgggtaatgaagctggcttgcaggggccgtaccaggtacgccatttgtgtgaactgattcatgctgaaagcgcgcagccgctggctacctatcgcgatgatttttatgcaggaagaccggcggtcaccgtcaatcactttggtaatggcaaggcatggcacgttgcgtcgcgcaacgatctggccttccagcgggacttcttctgcagcctgatgaaagaactctctctgccgcgcgcggttgaggctgatttcccgccgggcgtagtagcgaccgcacgcacggatggtgaaaccgcctacgttttcctgcaaaactacagcgcgcagcagcatcgcgtggttttgccgcaaggctatctggactgcctcaccggtacggcgctgaatacgccgctggtcttaaatgcatgggattgccgtatcctcagtcgtcgcgcgtaa

SEQ ID NO: 253343 - DNA, 315 bp, Klebsiella pneumoniae
atggtgagtttaaaatcctttctgaattacttctcgcagcctcgtgcggcggtacctttaagtcatgcggagcaacaacagattgattatttaattcaggcgtttggtggtgaaggcaatattattaacgttgacgcctgcattacccgcttacgcgtcacggtgaataatctatcgatagttgattctcaggccttacagcagcagggagcgcttggggttattatcctggggcagcaggtgcatgctattttcggtaagcagtcggatgctttacggcaattacttgatgagcactttgccagccggaaataa

SEQ ID NO: 253344 - DNA, 1272 bp, Klebsiella pneumoniae
atgaacactacgctgcgcacactttccgttgcgttggccgctgcgctgatttcaccatccgtgtttgctgcttccgccaccctcccgggtatcgactttcatggctatatgcgcgccggggttggggtctccggcgacggtagccaggccgaatggcaaaaaaataaaattggccgtctgggtaacgaatctgatacctacggcgagctggagctgggatcggaggtctacaagaagaatgacgttagcttctacctcgatagtatggtcagcatggtatctgacggctcaaacgataatgaaaccacgcttgatgacgatgcgcagttcggcctgcggcagctaaacctgcaaattaaaggtctgatccccggcgatccaaatgcagtcatctggggcggcaaacgctactatcagcgccacgatctgcacattatcgatacgaaatactggaatatttccggatccggcgccgggatcgaaaactatacgctcggtccgggcgccgtttcatttgcctggatccgcggggatgccaatgacgtcgactaccgcgtcgatggcgatagcaacgtcaatattaactatcttgatttgcgctatgcgggctggaagccgtgggccggatcctggaccgaatttggtatcgactacgcgatgccgaataccactaaaaagcaggatacctacggcggactctatgatgctgaaaacggcgtcatgctaaccggtgaaatcagccaggatatgctgggcggttacaacaaaacggttctgcaatacgcaaacaaaggactggcgcagaacatggtgtcccaggggggcggctggtatgacatgtggaactacgtcaatgacgccaccggctaccgcgttatcaataccggtttaattccgattactgaaaagttctctattaaccacgtcctgacctggggctccgcggataacatcaccgattacacggataaaacacgcatgctgtcgctggtggcgcgcgggcagtatcagttcaccgaatatgtgcgcctgattggcgaagtgggcggcttctaccaaaaagatagctacaaaaataataccgattacaaacaagccggtgagaaatacaccattgcgctgggcctggccgatggacctgactttatgtcgcgcccggaactacgaattttcgcttcatacctgaatgattccgaaaatggtaagccgttcgaagatcggaccgccaataatacatggaactttggtgtacaggtcgaagcctggtggtaa

SEQ ID NO: 253345 - DNA, 1074 bp, Klebsiella pneumoniae
atgaagtctaaaagcgcgaccttagaagacgttgcacgccatgcgggcgtctcctatcagaccgtgtccagggtactgaacaaatctgctaatgtatccaaagccacgcgcagcaaggtggagaaatccattgaggagctgcgctatgtcccgaaccgcctggcgcaacagctggtaggtaagcaaagtcgtaccgtgggcctggtcacaatttcccttgcattgcatgccccatcccaggtggctgcggcggtaaaacgctatgcgaacgtggaaggttatcaggtgctcatctccatgattgatgagagcgtcaaccaaagtatccaggactctattaatgaactgaagtctcaactggtggataaggtcatcatcaacgtgccgctggagactgaacaggcccaaaaaatagccgctgataacgatgacatcgtctgtctttttttagatgtcgacccctacagctcggtgtttaacgtttcgtttaatccggcggacggtacacgggccagcgtcaagtatctctatgagatgggccatcgggaaatcgcgttgctggccggccctgaaagttcggtatcggccaaactgcgtttgaaaagctggatagaaaccctggagggttacgggctggagccggtaacggtgattcgcggcaactgggacgcgcaaagcggctacgctggcgcgctgcaaatgctgcgggagacgccaaactttaccgccgttttggtaggtaacgatcagatggcattgggcgtactgagcgcatttcaccagcaccaggtaccgattccgggagaaaagtcggttattggttatgatgacacttatgagagttcgttcttctacccggcgctaaccacggtttcgctggatcttgatctgcaagggaaggaggccgttcggcgcattctcgacagcggcgataacgaaacatcacatacgtcttctatccttccggctcgtctggttgtacgccattctaccgggccaaaaacggagcctggcaaaaatctgcagtctattgctgagcagctccgggctctggcgcatcagctaagtccttaa

SEQ ID NO: 253346 - DNA, 264 bp, Klebsiella pneumoniae; identical to SEQ ID NO: 173093

SEQ ID NO: 253347 - DNA, 141 bp, Klebsiella pneumoniae
atgcaggtgctaaactcattgcgtagcgcgaaacaacgccacccggattgccagatcgtgaagcgcaaggggcggctatacgtgatttgcaaaagcaatccccgctttaaagccgtacagggacgcaagaaaagacgttaa

SEQ ID NO: 253348 - DNA, 699 bp, Klebsiella pneumoniae; identical to SEQ ID NO: 173095

SEQ ID NO: 253349 - DNA, 1455 bp, Klebsiella pneumoniae
atgaatattcctgatgatgctttttttactctgttggagcaggcgctgtgcgacagagggcgtgaaaccctgcagcgcacgctctatctccgtctgcgagcggccattttgcaaggtacgctggcgggcggtagccgcctgccaggttcacgggctatagcgcagcgtctgaagctatcgcgcaataccgtcaacggcgcgctggagcagctggcgatggaggggtatctgctgcgtagccgccaggggacatacgccgcgcttttgaagtcgcagggtgaagaggaggttgcggcgcgcgtgattgtgctccctgagtaccttcagggattacccgccgccacgcgtcgtgattcgcccacgctgctctttacgccgggaatgcctgcggttaactactttcctcttgctatctggcgtcgactccttgaccgggtattgcgcgaggagggaagtgcattgctgggctacggcgatgcgcagggggaacttgcattgcgcaaagcgattgcccgtcatctggcgctctcccggggcattcgctgcgaagccgggcaaattgtgattacggaaggagcgctggaagccgttgatttatgtacgcatctgctgagcgttgccggggagacggcatgggtggaagaacccggctatttaggggcaaaaagcatgtttcttaaagccgggcttcacatcaagggtatacccgtcgatcgagagggtatgcggttcgataccgatgatgatagcgcagcaccgcgattaatctttacttcaccgtcccatcaatacccctgcggttcggtgatgagcgccgggcggcgactggctttactggaatatgcccgccgtcatgacgcctggcttatcgaggatgattacgatagtgaatttcgttatagcggcgaaccgattcccgccatgctgggaatggtcaggcaggcgccggtagtttatctggggacattcagcaaaacgctttttcccgcgctgcgtattggctttatggtgatgccggaggggctggcggatgccgcaagaggcgcgattggttcactgttacggggcggtcatcgtgctgaacagcgggcgctggcgctgtttatcgaagaggggcactacgcgcgtcatcttgccgctatgcgccgcttgtatcgcaaacgccagcagcagctgcgggaaacgctggcggcagagcttactcacccttatgaaatatcaggcggcgagggggggttacacctgactgtcgtcgtcgaagacgttgatgatgaagctattgtgcagcaggcccggcggtttcagctcgcgcccggcgcattaagccgtttttatctgaatgaaaaaaaggcgagaagcggctttgttctgggctacggtaatacgtccgcatcacgctttccttctgcgatacggacgctggatcgccttattgcgcagcaccgatgcgggtaa

SEQ ID NO: 253350 - DNA, 471 bp, Klebsiella pneumoniae
atgacagaaatacagcggctgctgaaaagcaccattgatgagcttaatgtgcaagagaagcgcgataaccgtccgcgctttagcataagctttattcgcaaccatccatggctttttgtcgcgatgtatgcggctttcctggcaacactcatcgtgatgctgcgttctgaaacgctggtagattcggtctggctattaatcgtactatttgttctgctgaacggcttctttttctttgacgtttacccgcgctatcgctatgaagatattgatgttctggacttccgcgtttgttataacggggagtggtataacactcgatttgttcccggtcagctcatcgaacgaatccttcagtcgccgcgcgttgatggcgagcagaaagctcagctgcaaaaaatgatcgccaccaaaggcgaactctcattttacgatgtcttttcccttacccgcatcggtgctgcgcaataa

SEQ ID NO: 253351 - DNA, 567 bp, Klebsiella pneumoniae
atgagtgaagaaaaacaaaaaatgattgccggtgagctgtatgtgtcaggtgacgctgagctaaaggccgaccgtctactggccagacaactgttgcatcgttacaatcattcagcgcctgaagagcgtgaattaagaaaagcattactgacggaactgctaggccacgcaggcgacgcttatatcgaacccacttttcgctgcgattacggctacaatatcttcctcgggaaaaatttctacgccaactttgattgcgtgatgctggatgtgtgtccgatacatattggcgaaaactgcatgctggcgccgggtgtgcatatttataccgcaacgcatccccttgaccctgttgaacgaaatagcggtaaagagtacggaaaacccgtcactattggccacaatgtgtggattggcggccgggccgtaattaatcctggcgtgactatcggcgacaatgccatcgtggcttccggttccgtagtggtgaaaaatgtgccagccaacgccgtcgtcggcggaaacccggctcaaatcataaaaatggtggagagcgaaaaacggtaa

SEQ ID NO: 253352 - DNA, 219 bp, Klebsiella pneumoniae; identical to SEQ ID NO: 173099

SEQ ID NO: 253353 - DNA, 375 bp, Klebsiella pneumoniae; identical to SEQ ID NO: 173100

SEQ ID NO: 253354 - DNA, 3147 bp, Klebsiella pneumoniae
atgcctaatttctttatcgatcgccccatatttgcctgggtgatcgccatcatcattatgctggctggggggctctcgatcctcaagttgccaatagcgcaatatccgacgattgcgccgccggcaatttccatcacggccatgtaccccggtgccgacgcagaaaccgtgcagaacaccgtgactcaggttatcgaacagaacatgaacggtatcgatcacctgatgtacatgtcttcaaatggcgactccaccggtacagcaaccatcactctgacctttgaatccggtaccgatccggatattgctcaggtacaggttcaaaacaaactggcgctggcgacaccgctgctgccgcaggaagtacagcagcagggtattagcgttgaaaaggcatccagcagcttcctgatggttgtcggcgttattaatactaacggcaccatgaatcaggatgacatttctgactatgttgccgccaacatgaaagatgcgattagccgtaccagcggcgttggtgacgtgcagttgtttggttcccagtacgctatgcgtatctggatggacccaaacaaacttaataacttccagttgacgccggttgacgttataagcgccctgaaagcgcagaacgcccaggttgcagcaggacagttaggcggtacgcccccggtgaaaggccagcagctgaatgcctccatcgtggcgcaaactcgtctgaccaatactgaagagtttggcaacattctgctgaaggttaaccaggatggctcccaggttcgtctgcgcgatgtcgcgcgcattgagctgggtggtgaaaactatgacgttatcgcgaagtttaacggtcagccagcttctggtctgggtattaaactggcgaccggcgcgaacgcgctggataccgcaaacgccattcgcgccgaactgaagaaaatggagcctttcttcccttctggcctgaagattgtttatccgtatgacaccactccattcgtgcagatctccattcacgaagtggtaaaaacgctggttgaagccatcatcctggtgttcctggtaatgtatctgttcctgcagaacttccgcgccaccttgattccgacgattgccgtgccggtcgtactgctggggacgttcgccatcctcgcgctgttcggtttctcgataaacacgctcaccatgtttggtatggtgctcgccataggcttgcttgtggatgacgccatcgtggtggtggaaaacgtcgaacgtgtaatggcagaggaagggctaccgccgaaggaagccacgcgtaaatcgatgggccagattcagggcgcgctggtaggtatcgcgatggtgctttctgcggtgtttatcccgatggccttctttggtggttccaccggtgcgatttaccgccagttctcgatcaccatcgtctccgcgatggcgttgtcggtgctggtcgctctgattctcaccccggcgctttgcgccacgatgctgaagccaatccaaaaaggcagccatggcgcaaccactggcttcttcggttggtttaaccgcatgttcgataagagcacgcatcactataccgacagcgtaggcaacatcctgcgtagtaccggtcgctatctggtgctgtacctgatcatcgttgtgggaatggcctggctgttcgttcgtctgccaagttcgttcctgccagacgaagaccagggcgtattcctgagcatggcgcagctgcctgcaggcgcaactcaggagcgtacccagaaagtactggatgagatgaccaattactatctcaccaaagagaaagataacgttgaatcggtattcgccgtaaacggttttggtttcgctggtcgtggacaaaacaccggtatcgcgttcgtctctctgaaggactggagccagcgtccaggcgaagagaacaaagttgaggcgattaccggccgcgcgatgggctatttctcgcagatcaaagatgcaatggtcttcgcctttaacctgccggcaattgttgaactcggtaccgcaacgggctttgacttccagctgatcgaccaggctggcctgggccatgaaaaactgacccaggcacgtaaccagctttttggaatggttgcgcagcaccctgacgtattgagcggcgttcgtccaaacggcctggaagatactccgcagttcaaagtggatatcgatcaggaaaaagcgcaggcgcttggcgtgtctataagcgatatcaacacgacgcttggcgcggcatggggcggaagctacgtcaacgacttcattgaccgtggccgcgtgaagaaagtgtatatcatgtccgaagcgaaataccgcatgctgccagaagacattggcaactggtacgtacgcggtagcgatggacagatggtaccgttctccgccttctcaacctcgcgctgggaatacggctcgccgcgtctggagcgctacaacggtctgccatcgatggaaatcctcggccaggcgacaccaggtaagagtaccggtgaagcgatgaacctgatggaagagctggcgggtaaactgcctgccggtatcggctatgactggacgggtatgtcatatcaggaacgtttgtcaggtaaccaggcgccagcgctgtacgctatctcgctgatcgtcgtcttcctgtgtctggcggcgctgtacgagagctggtcaattccattctcggtcatgctggtcgttccgctcggtgttgtgggggcgctgctggctgccaccttccgaggattgactaacgacgtttacttccaggttggtctgttgaccactatcggcctgtcggcgaagaacgcgatactgatcgttgaattcgccaaagacctgatggataaagaaggcaaaggcctgattgaggcaacgcttgaagccgttcgtatgcgtctgcgtccgattctgatgacctccctggcgtttatcctcggcgtaatgccgctggttatcagctccggcgcaggctccggcgcgcagaatgccgtaggtactggcgtaatgggcgggatgattaccgcgacggttctggcgattttcttcgtgccggtattcttcgtggtcgtgcgtcgccgcttcagtaggaaaaatgaggatattgagcacagccatccggttgagcatcattaa

SEQ ID NO: 253355 - DNA, 1194 bp, Klebsiella pneumoniae
atgaacaaaaacagagggttaacgcctctggcggtcgttctgatgctctcaggcagcttagcgctaacaggatgtgacgacaaaccggctcagcaaggagcccagcaaatgccggaagtcggtattgtgacgctcaaatccgctcctctacaaattactactgaactgccgggccgtaccagcgcctatcgcgttgcggaagttcgtcctcaggtcagtggcattattctgaaacgtaacttcaccgaaggcagcgatatccaggctggcgtgtctctttatcaaatcgatccggcaacctatcaagccacctatgaaagcgcgaagggcgatttagccaaagcgcaggctgccgccaatatggatcagctgacggttaaacgttaccagaaactgttaggcactaagtacattagccaacaggattacgatactgccgtagccacggctcagcagagcaacgctgccgtcgtcgccgctaaagccgcagttgaaaccgcgcgcatcaatctggcctacactaaggtgacctccccgatcagcggccgcattggtaaatccgcggtcacggaaggcgcgctggtgcagaacggccagactactgccctggcgaccgtgcaacagcttgatcctatctacgtggatgtaactcaatcgagcaacgattttctgcgtctgaaacaagagctggctaacggcaaactgcagcaggaaaacggtaaagcgaaggttgaactggtcactaacgacggtttgaaatacccgcagaacggtacgctggagttctccgacgttaccgttgatcagactaccggttctatcacgctgcgcgcgattttcccgaacccggatcacactctgctgcccggcatgttcgttcgcgcgcgcctggaagaaggcgtaaatcctgatgcgattctggttccgcagcagggcgtaacccgtaccccgcgcggcgatgccagcgcgatggttgtcggcgaaggcgataaagtcgaagttcgccagattaccgccactcaggcgattggcgataaatggctggtcaccgaagggctgaaaactggcgatcgcgtcattattagcggtctgcagaaagtcaaaccaggcgtacaggtaaaagcgcaggaagtcgtttctgatgaaaaacagcaagccgcaggcaacgctcagtcagaacaaaccaagtcttaa

SEQ ID NO: 253356 - DNA, 651 bp, Klebsiella pneumoniae
atggcacgaaaaaccaaacaacaggcgcttgagacccggcaacatattctggatgttgctctgcgtttgttttcgcagcaaggcgtatcatccacctcgctggccgcaattgcaaaagctgccggtgtgacgaggggggctatctattggcatttcaaaaataaatcggacttatttaatgaaatatgggtactgtcagaagccaatattaacgatctcgaagttgagtatcgggcaaaattccccaacgatccactgtcagttgtgcgagagatcttagtgtatatccttgaagccactgtgacagaaaaacgcagacggctgatgatggaaatcatctttcataaatgtgaattcgtcggtgaaatggtcacgctgcaagaagcgcagcgcattctttgccttgagagctacgaccgtatcgaacaaacattaaaggagtgcattgtcgcgaagatgctacccgccaatttattaacccgccgggcggcgatcctaatgcgcagctatctttccggcctgatggagaactggcttttggcgccgaacgcctttgatctgcaaaaagaagcgcgggattatgtcgaagtcctgctggaaatgtatcaattttgcccctctctgcgcagttctgaaggactggacgcttaa

SEQ ID NO: 253357 - DNA, 3342 bp, Klebsiella pneumoniae
atgctgcatactatccgttggcgaaatgccctctctgctgtagttcttaccctgatgctttttatcggctgtattagcgttaattcggcgctggcggctgatttacctgaacgctccgaggtccagagccagctcacgaccctgaacaagcaaaaagatttgactccccaggacaagctggttcagcaggacctgactcagacgctggaaacgctcgataaaattgagcgcataaagtcggaaacgacgcagctgcgccagcaggtcgctcaggcgcctgcgaaaatgaatcaggctatcgatagcctgaacgcgctaagcgatgtccccaacgacgaggcgacgcgtaaaacgctgagcaccttgtcgctgcgccagctggaatcgcgcgtctctcagactctggacgatttgcaaaacgcgcaaaacgatctggcgacttataatagtcagcttgtttcgctacagacgcagccggaacgcgtgcagaatgcgatgtattccgcctctcagcagctgcagcagatccgtaatcgtctgaatggcacgactacgggcgaagaggcgctacgtcctacccagcagaatttgctgctggcgcagcaggccttgctgaatgcacagatagatcaacagcgtaaaagcctggaaggcaacacggtgctgcaggataccctgcaaaagcagcgtgactacatcaccgcttacagtaatcgactggagcatcagcttcagctgttgcaggaagcggtgaatagcaagcgcctgacgctgacggaaaagacggctcaggaagcggtttctccggacgaaacggcccgtattcaggcaaacccgctggtcaagcaggagctggacattaatcaccagctgagcgaaaggctcatttcggcaacggaaacgggtaatcagctggttcagcgcaacatcaaagtgaagacctggctcgatcgtgctttgcaatccgagcgcgatattaaagagcagatttccgtgctgaaaggcagcctgctgctgtcgcgaatcctttatcagcaacagcaaacgctgccctctgcggaggagctgagcgacatgaccaaccgcatcgccgacctgcgccttgagcagttcgaggtcaaccagcagcgcgatgcgctattccagagcgatgcgtatgtcgcgaagctggaggaggggcatagcagcgaggtgaatcccgaagtgcatgatgcgcttcttgagattgttgatatgcgccgggaactgctcgatcagtttaataaacagctcggcaaccagctgatgatggcgattaacctgcaaatcaatcagcagcagctaatgagcgtgtcaaccaacctgaaagccatcctgacgcagcagattttctgggtaaatagcaaccgcccgatggactgggagtggtttaaagccttcccggaggcgctgaaaggacagtttaaggcgatgaaaatcaccgtaaactgggaaaaggcctggcctgcggtatttatcgcttttctggccggcctgccgctgctgctgattgccggtctgattcgctggcggctgaactggctgaaagcgtatcaggctaagctggcgtcgcaggtggggcaactgcgcaacgatacgcagctccacacgccgaaagcgattcttatcgatctgattcgggcgctgcctgtggtgctggtcatactcgccgtcggtctgattctgctgacgatgcagctgaatattagcgaccttctgtgggcctatagcaagaagctggcgctattctggctggtgtttggcctgtgctggaaagtgctggaaaaagacggcgtggcggtgagccactttaatatgccgtcacagctgaccagccactggcggcggcagattgttcgcgtgagccttgcgctgctgccgctcaacttctggtcggtgatgtcggaactgtcgccgctgcacctgatggatgacgttctcgggcagttcgttattttcctcaacctattgctgatcgcggtgcttgtcttgccgatgtgccgcgaaagctggcgtgataaagaatctcatagcctgcgccttatcaccgttaccgtgctatcgatcgttcccatcgccctgatggtgctgacggcaaccggctatttctatacgacgctgcgtctggccggccgctggattgaaaccgtttatctggtgatgctgtggaacctgttgtatcagaccgtgctgcgcggcctgagcgtggccgcgcggcgtattgcctggcgccgcgcgctggcgcgtcgtcagcatctggttaaagagggggctgaaggggctgagccgcaggaagaaccgacaattgctctggagcaggttaaccagcaaacgctgcgtattacgatgctggtgatgatcgcgctgtttgcggtcctgttctgggcgatttggtcggatctcatcaccgtcttcgcctatctcgatagtattacgctgtggcattacaacggtaccgaagccggggttagcgccgtgaaaagcgttaccatggggagcctgctgttcgcgattgtcgcttcgatggttgcctgggcgttaattcgcaacctgccgggactgctggaagtgctggtgctgtcccgactaaatatgcgccagggggcgtcttatgccattacgacaatccttaattacgccattatcgttattggcgcgatgacggtatttggcgctctgggcgtctcatgggataaactacagtggctggcagcggcgttgtcggttggtttaggtttcggcttacaggaaatattcggtaactttgtttccggtctgattattctctttgagcgcccggtgcgcattggcgatacggtgaccattggcaccttctccggcaccgtcagcaaaatccgcattcgcgccacgaccatcaccgattttgaccgtaaagaggtgattatccccaataaggccttcgtgactgagcgtctgattaactggtcgctctccgataccgtcacccgcgttgtcatccgccttggcgtagcgtacggttctgacctggataaggttaaagaagtgctgcttaaggccgcgcacgagcatccgaaagtgatgcaagagcccgcgccatcggttttctttaccactttcggcgccagtacgctcgatcatgaactacgactatacgtgcgcgaacttcgcgatcgcagctatgcggtggatgagcttaaccgggcgatcgatcgtttatgtcgtgagaacaatattgatatcgcctttaaccagctggaggttcatcttcgcaatgagaagggcgatgaagtcaccgaggtgaagcgggataaaggcgacgatgccactccggcgatgagctaa

SEQ ID NO: 253358 - DNA, 198 bp, Klebsiella pneumoniae
atgatgattgccgaatggctggaagagaaaggtcgtaaaaaagggagaagagaaggcagactggagggtcgacaggaaggccgtaaagaaatctcgcacagcattgcgctgaaaatgctcgccagcgggctggatcctaagatggtgatggagctgacgggtctgagccaggaagaactctcctcgctcagccattaa

SEQ ID NO: 253359 - DNA, 765 bp, Klebsiella pneumoniae
atggaaagattctcacgtacgccgcacgatgccatttttcgtcaaatgttgactcagaaagaggtcgcccgcgatttcttacagctttacctcccggcgcagtttttaagtatctgcgatcttagtacgctgcagctggcttcaggcagttttatcgaagaagacctgcgctccagctactcggatatactttactctctgcaaacgcggcacggcgccggatatatctatgcgctgattgaacatcaaagctctccggacaagctcatggcttttcgcctgatgcgctatacgctcgcagccatgcagcgtcaccttgatgctggccacgatacgttgccccttgtggtccccattctgttttatcacggcgccgtgagtctctggccgcatacgctcaactggcatcatctctttaaccatcctgagcttgccagcgcgctgtacggcggtgattttccactgatggacctgaccgttatgccagataatcaattcatcctccaccagcgtatggcgatgctggaactgttgcaaaagcatatccgccagcgcgatctggccgaattgcaaccgatactggttgcgctgctggcgcaaggatatctcacggaaacccaaatcgataccctaatcagctatatgctgcaggcgggtataacggaaaagcccgggccccttattcgcgaactggacgaagcagtcgcccaggcacaaggagctactgatgatgattgccgaatggctggaagagaaaggtcgtaa

SEQ ID NO: 253360 - DNA, 174 bp, Klebsiella pneumoniae; identical to SEQ ID NO: 173106

SEQ ID NO: 253361 - DNA, 528 bp, Klebsiella pneumoniae
ttgaaaaccacccggcttttacattcgttggaaaatcagcttgcggagctggccgtccgggtagcgccaatggcgaatcacgcgaccctcagcccgcgtttcgatcgccagctgtttcggacccgcagcacgcagatgcaggcttatctcaatgaggccagcgatcgtttaacggagttaaagctggcggtcgaacgccagcagctcccccaggttgcctggctggcggaacatcttgtggcccaaatcgccgccattagccgggaaacggccacttggtcgttacgcgcctgggatagcgcttcgccgacgcttagccgctggcagcgccggcgtatccagcatcaggaatatgagcggcgtctgctggccatgcgcaacgatcgccagagacagctggcgcaagccacatctcttgatgaacagcagcggctggcaaaagaagttgacgcctacgccgcacgccttgcccgctgtcgcgacgcgctggaaaaaattgaaaacaggctggcccgattaacacgttaa

SEQ ID NO: 253362 - DNA, 378 bp, Klebsiella pneumoniae; identical to SEQ ID NO: 173108

SEQ ID NO: 253363 - DNA, 552 bp, Klebsiella pneumoniae
atgaccgcaacagcacagcagcttgaatatctgaagaacagcatccaaagcatccaggactatccgaaacctggcatccttttccgtgatgtcaccagcttgctggaagacccgaaggcctatgcgctcagcattgaactgctggccgagcgttataaagacgcgggtattaccaaagtggtgggcaccgaagcgcgtggcttcttgtttggcgcaccggttgcgctggcgctgggcgtaggctttgttccggtacgcaagccgcgtaagctgccgcgtgagaccatcgcagaaagctacgagcttgagtacggcaccgatcagctggaaatccatgtcgatgcgatcaaagaaggcgataaagtcctggtggttgacgatctgctggcaaccggcggcaccatcgatgccaccgtgaagcttatccgtcgcctgggcggtgaagtgcacgatgcggcttttattatcaatctgttcgatctgggcggcgagcagcgtctggaaaaactgggaattaactgctatagcctggtccctttcccgggtcactaa

SEQ ID NO: 253364 - DNA, 333 bp, Klebsiella pneumoniae
atgtttggtggaaaaggcggtctgggtaacctgatgaagcaggcccagcagatgcaagaaaaaatgcagcagatgcaggaagaagtcgctcgactggaagtgaccggtgaatccggcgcaggcctggtcaaagtcaccatcaacggcgcgcacaactgccgccgcgttgagatcgacccgagcctactggaagacgacaaagagatgctggaagatctggtggccgccgcgtttaacgatgccgcccgccgcatcgaagagacgcagaaagaaaaaatggcgtctgtgtccgccggtatgcagctgccgccaggctttaagatgccgttctga

SEQ ID NO: 253365 - DNA, 606 bp, Klebsiella pneumoniae
atgcaaaccagtccgctgttaacgcagcttatggaagcactgcgctgcctgccgggcgtcggcccgaagtcggcgcagcgcatggcgtttaccctgctgcagcgcgatcgcagcggcgggatgcgcctggcgcaggcgctgacgcgcgcgatgtcggaaatcggccactgcgccgattgccgcacattcaccgagcaggaggtatgcaatatttgcagcaaccctcggcggaaggaaaacggccagatctgcgtggtagagagcccagcggatatctacgctatcgagcagaccgggcagttttccggtcgttattttgtgctgatgggccatctgtcgccgcttgacggcatcgggccggatgacattgggctcgatcgcctggagcagcgtctgcgtgacgaatcgatgcaggaagtgatcctcgcaaccaacccaacggttgaaggggaggcgaccgcgaactatatcgccgagctttgcgcgcagtatggcgtagaggcgagccgtatcgctcatggcgtaccggtcggcggcgagctggaaatggttgacggcacaacgctgtcacactctcttgccggacggcataagattcgtttttaa

SEQ ID NO: 253366 - DNA, 645 bp, Klebsiella pneumoniae
atgcgtattattctgcttggcgctccgggcgcgggtaaaggaactcaggctcagttcatcatggagaaatacggtattccgcaaatctccaccggcgacatgctgcgtgccgcggtgaagtcaggctccgagctgggcaaaaaggcgaaggatattatggacgccggcaagctggtcaccgacgaactggttatcgccctggtgaaagagcgtatcactcaggaagattgccgcaacggattcctgctggacggcttcccgcgcaccattcctcaggctgacgccatgaaagaagcgggcattgccgtagattacgtactggaattcgatgttcctgatgaactgatcgttgaccgcatcatcggccgtcgcgttcacgctgcttccggccgcgtttatcacatcaaatttaatccgccgaaagtcgaaggcaaagacgatgtgaccggcgaagagctgaccacccgtaaagacgaccaggaagagaccgtgcgtaagcgtctggttgagtatcatcagatgacggctccgctgatcggctattatcagaaagaagccgaagcgggcaatacccaatacgcgaaagttgatggcaccaaagctgtggcggacgttcgcgccgaactggaaaaaatcctcggttaa

SEQ ID NO: 253367 - DNA, 963 bp, Klebsiella pneumoniae
atgcatcagacgaaaacaggtatcttattagccaatttaggcactcccgatgcgcccacgcccgacgcggttaagcgctatctacgacagtttcttagcgatcggcgcgtggtggatacctcccgtctactgtggtggccgttgctgcgcggcgtgatactgcccctgcgcgcccccagggtcgctaagctctatcagtccatctggatggaagacggctcgccgctgatggtctatagccagcagcagcggcaggcgctggccgcgcggcttccggatacgccggtggcgctggggatgagctacggctcgccgtcgctggagagcgcggtggatgaactgctggcgcagggggtggaccacatcgtggtgctaccgctctatccacaatactcctgctctaccgtggcggcggtctgggatgagctggggcgtatcctcgccagaaagcgcgcgattcccggcatctcttttattcgcgactatgccgatgatgtggactacattcacgcgctggccgccagcgtacgcgcttcgtttgcggtgcacggcgagccggatttactgctgctctcctatcatgggattccacagcgttacgctcagcaaggggatacctatcctcagcgctgtcgcgataccactcgtgagctggtttcagcccttggtctgtcgcctgaccgggtcatgatgacttttcagtcgcgctttggtcgtgagccgtggctgacgccctatactgacgaaacgctgaaaatgctcggtgagaaaggggtgaagcatattcaggttatctgtcccggctttgctgccgattgcctggagacgctggaagagatcgcggtgcaaaaccgggaaatcttccttgaagccggcggccagcaatatgagtacataccggcgcttaatgcggacaccgcgcatattgaaatgatggtcaacctgacggcgaaatatcgctga

SEQ ID NO: 253368 - DNA, 1305 bp, Klebsiella pneumoniae
atgaaatttcccggtaaacgcaaatccaaacactattttcccgtcaacgctcgcgatccgctgctgcaacaaattcagccggacaatgagtctaacgtcgcctgggtcgtcggcatcgatcaaaccctggtcgatatcgaagcgaaagtggatgaggcgtttatcgtacgctacggcctgagcgccgggcattcgctggtgattgaggatgatgtcgccgaagcgttgtaccaggaactggtccgcaacgatctgattacccaccagtttgccggtggtaccatcggaaacaccatgcacaactactcggtgctggcggatgaccgctcggttctgcttggcgtcatgtgcagcaatattgaaatcggcggctacgcctatcgctacctgtgcaacacctccagccgtaccgatctgaactacctgcaaggcgtggatggcgcgattggtcgctgctttacccttattagcgactccggcgagcgcacctttgcgatcagccccggccatatgaataagctccgcccggaaagcattccggaaagcgtgatcgccggcgcttccgcgctggtgctgacctcctacctcgtccgctgcaagccgggtgagccgatgccggacgcgacgatgcaggccatcaaatatgcgaaaaagcacgatgtaccggtggtcctgaccctggggactaaatacgttatcgctgataatccggcgtggtggcaggcgttcctcaaagaacacgtttctattctggcgatgaacgaagaagaggcggaagcgctgaccggactatccgatccgctgctggcttccgacaaggcgctggagtgggttgacctggtactgtgcaccgccgggcccgccgggctgtatatggccagttttaccgaggatgaggctaagcgcaaaacgcagcatctgctgctgccgggcgcgattgccgagtttaaccagtatgaattcagccgcgcgatgcgccaccaggactgcgagaatccgctgcgtatttattcgcatatcgcaccctatatgggcgggccggagaagatcatgaacaccaacggcgccggcgacggcgcgctggcggcactgctgcacgacatcaccgctaataattatcatcgcaataacgtgccgaactccagcaagcacaaatgcaaatggctgacctattcctcgctggcgcaggtgtgtaaatacgctaaccgcgtgagctatcaggtgctgaaccagcattcaccgcgtctgacccgcggcctgccggagcgtgaagatagtctggaagaggcctactgggatcgttaa

SEQ ID NO: 253369 - DNA, 1578 bp, Klebsiella pneumoniae
gtgggatatctattagcgggcgtgctggccggaccttttaccccaggttttgttgctgataccaagctggcgccggaactggccgagctcggcgtgatcctgctgatgttcggcgtgggtctgcatttctccttaaaagatctgatggcggttaaggccatcgccatcccgggcgctatcgcccagatagccgtagcgaccctgttgggtatggcgctctctgccatgctgggctggtcgttaatgaccggtatcgtttttggtctgtgtctttctaccgccagtaccgtggtgctgctgcgcgcgctggaagaacggcagcttattgatagccagcgggggcaaatcgccatcggctggctgattgttgaagatctggtgatggttctgacgctggtgctgctgccggcggttgccggcatgaccgagaaaggcgacgttggcctggcttctctggccctcgatatgagtattaccatcggcaaagtcgtcgccttcatcgccattatgatgctcgtcggccgccgcctggtgccgtggattatgtcgcgcagcgcggcaaccggttcacgcgagctgtttacgctgtcggtactggcgttagcgctcggcatcgctttcggcgccgttgagctatttgacgtctccttcgccctcggcgcctttttcgccggtatggtgctcaatgaatccgagctcagccatcgcgcggcccacgatacgctgccgctgcgcgacgccttcgccgtgctgttctttgtctccgtcggaatgctgttcgacccgatgattctgcttgagcagccgctggcagtactggcgacgctggctatcatcattttcggtaaatcggctgccgccttcttcctggtgcggatgttcggccactcgccgcgcactgccctgaccattgccgccagtctggcgcaaatcggtgaattcgcctttattcttgctggtctgggaatggcgctggatctgctgccgcaggccgggcagaacctggtgcttgccggcgccattatctccatcatgctcaacccggtcctgtttaccctgctggaaaaatacctcgataaaacggagacgctggacgaacagacgctggaagaagtgctggaagatgagaaacagatccccgttgatatctgtaaccatgcgctgctggtcggtttcggtcgcgtcgggagcctgcttggtgaaaaactgatggctcaggggataccgttggtagttatcgaaacgtcgcgcacccgcgttgacgaactgcgcgcgcggggtattcgcgcggtattaggtaacgccgccaatgaagagattatgaatctggcgcatctggactgcgcgcgctggctactgctcaccatccctaacggttacgaggccggagagatcgtggcctcagcgcgcgagaagtgcccgaatatcgagatcatcgcgcgggcgcattacgacgatgaggtggaatatattgttgaacgcggcgccaaccaggtagtgatgggcgaacgagaaatcgcccgcgccatgcttaagctgcttgaaacgccgccagccggcgagcttattaccggttaa

SEQ ID NO: 253370 - DNA, 660 bp, Klebsiella pneumoniae
atgcaacaacagtggtcggcagtagataattatctggtggaagcgttaatccccaacgatcccttgctcaaccaggttctggaaaataaccagcacgccgggcttccggccatcgatgttgccgccaatcaggggcagtttctggccctgctggtgcgcatgacgggcgccagacgcatcctcgagattggcacgctcggcggctacagcaccatctggatggcccgggaattgcctgccgatggcgaattagtcaccctggaggccgatgcgcaccatgccgccgtggcgcgcgagaacctgcgcatggcgggcgtggataagctcgttgaggtgcgggaaggcccggcgctggccacgctggagaagctgggcgaccatccgccgtttgatctgatctttatcgatgcggataagccgaataacccaaactatctgcgctgggctttgcgctactctcgcccggggacgctgatcattggcgataacgtggtgcgcgacggcgaagtgaccgatccgcatagcgcagatgaccgcgttcagggcgtcagggagtttattgcgatgatgggcagcgacccgcgcctgacggtaacggccctgcaaaccgtgggcagcaaaggttgggacgggttcaccctcgcgtgggtgaacgcctga

SEQ ID NO: 253371 - DNA, 1380 bp, Klebsiella pneumoniae
atgattcgtccgctcaccctcgccgttattcttgcgctggttggctgccagtcagctgatatcccacaggccgcgccgacgctgcatattcccgccgcctggcgcgcggatatcggccccaccagcccggtcgagggcgtgtggtggcgcaattttcacgacagtacgcttaatcaatacgtcgaccaggcgctacgctacaacagcgacgtgctgattgcccgcgaacgggtcaacgagtaccaggcgcgggtctacgccgccgacagcagcctctttccttcactagacgccggactgaccggtacacgcgcgcggtcgcagtcggccgccaccggtctgccgatccacagtacggtgtataaaggcgcgctaaccgccagctacgatgttgatatctggggcgctaaccgcagcgccgccagcgcggcggaggccagtctggcggcgcaaaaagccgccgccgcggcggcgaacctgaccgtcgcctcttcggtggcgacaggctacgtcactctgctctcactggatgaacagctgcgggtaacgcaacaaacgctcaaagcgcgggaagatgcctttaatctggcgaaacgtcagttcgagaccggctatacatcgcgcctcgaactgatgcaggcggattccgaactgcgctcgacgcgggcgcaaattccgtcgctgcgacaccaaatcgcccagcaggaaaacgcgctcagcctgctgctcggcgctaatcctggggccgttaagcgcaacgcctttgcccagctgacgccgctgtcgctaccgtcccagttgccgtcaaccctgctcaatcgccgcccggatatcgttcaggctcagcgtcagctggtggccgccgacgccacgctggcgtcatcgcaggcgcagctgctgccgtccatcaaccttaccgccaccggcagcatgcaggatcgcactctgcccgacctgctggataatccgctacgcttatggagccttggcggcagcatcctggcgccgctgctcaaccgccaggcgctgaatgcccaggtagacgtgtcgatggcccagcgcaatcaggcgttgtatagctacgaaaaaacggtgcgcggcgcgtttaaggaggtcaatgacagccttgatgctattggccgctacggggagcagctgacggagctgcaggcccaggaggacgtagcccgggagacgctgctcattgcccaaaaccgttatcgcaacggctactcatcctatcttgacgtcctggacgcccagcgtacgctgttttccacccagctcagcgtggtgcaggtgaaaaacaatctgctgctggcgcaagtcgatttgtaccggtcgctgggaggcggctggtctgattcatcagggatgtaa

SEQ ID NO: 253372 - DNA, 1086 bp, Klebsiella pneumoniae
atgagtcagcaggatgcggccaaacaacaggccaacacccgtaataatattcgcgtggtctctatttttaccgccgcggcaattggtattgtcggcgttctggttattctttacgcctggcagctgccgccgtttacccggcaaagccagtttaccgataacgcctacgttcgcgggcaaaccacgtttatcagcccgcaggtcaacggctatattaccgaggtcaaggttcaggattttaatcaggtgaaagccggcgatgtgctgtttcagatcgacgatcgcatctataaacagcgcgtacatcaggcggaagccacgctggcgatgaaagaggcggcgctcaagaacaatctgcagcagcgcaaaagcgccgaggcggtcatcgtacgtaacgaagcggcgctgcaaaacgcccgcgcgcaaagtctgaaaacccaggcggatttaaaacgcgttcaggagctgaccgccgacggttcgctctcgatccgcgaacgcgattccgcccgcgccagcgcggcgcaggggactgcggatatcgagcaggccaaagcgacgctggaaatgtcgcgccaggatctgcaatcgacaattgttaatcgggattcgctgctggccgacgtcgccagtgcgagggccgcgctggaactggcgcagatcgacctccagaatacccgcattatcgcccccgccgatggtcagctggggcaaatatcagtgcgccttggcgcctacgtgaccgccgggacgcatttgacctcgctggtaccgccgcagcactggctgatcgctaacctcaaagagacgcagctggcggaggtccgcgtcgggcagccggtaacctttaccgttgatgcgctgaacagcgagaaattcaccggtacggtgcagagcatctccccggccaccggggttgagttcagcgccatttcgccggacaacgccaccggcaacttcgtcaaaattgcccagcgcattccggtacgcatcgccgtggatgaggggcagaaaaacagccagcgcctgcggccggggatgtcggtgcaggtcaccatcgacacccgcggggaggagacacgatga

SEQ ID NO: 253373 - DNA, 1653 bp, Klebsiella pneumoniae
atgcctcgccgtaaagataatccctatgtgccccacgactgggctccgcacgaaaaaccggcgatcctcggctcgccttccaccccgattcacagcacgcccaggcgcattgcctacgggatcgttggactgctggtctgcctgaccggcgcgctgggcaacgcggtggtcaccgctaacctgcaactgttgcagggaacctttgccgcctggtccaccgagatagcctggcttccggcggtctacgtgatgacgaacgtctccatcaacctgctgctggtaaaattccgtcagcagtatggcctgcgcgccttcaccgaaggctttctcgtcctctatgtgctggtgaccttctttcacctgttcgtcaacgaccttagctccgcgctgatggtacgcgccgcccacgggatggtggctgcggcgctgagctcgttaggcatttactatcaggtgcaggcctggcccgcccgccatcggctaaaagcgttgactatcggtattaccggctcatcgctggcgatcccgctggcgcgcctgttttccaccgaactgctgcaaattgacgagtggcgcggactgtacttctttgaactggggctggcgctggtatcgctggcctgcgtgatcgccctgaagcttcccccaagcgatcgtaaaaaagtttttgagaagaaagactttatcaccttcttcctgctggcgccgggaatggcgctggttaccgcggtgctgtcgctggggcgtctggactggtggtttgaagcgccgtggatcggctgggcgctggcgggagcggtggtgctcatcgtctccgcgattgcctttgaacataaccgcagcaacccgttactcaatattaaatggctctccagtggcagcattctgcgcctcgggctgattatgctgctgatccgcatcgtgctggcggagcaaaataccggggtcatcggctggctgcagtacgtcggcctgcagaatgaacagatgaccaatctggcgtggtcgattttcgccggcatcatctgcggcatcgtcgccagctgtctgacgctcaacccgcagcgtctctactggcccaccgctacggcgctggcgctgatcatggttgcctcgctgctcgacagccagtcgaccatcctgacccgcccggaacagctaatgttcagccagtttctgctgggcttcggcagcgcctttttccttgctccggcaatgctggcagggattggcggcgtgattgccgaccagcgcaatctggtaagcttctcggtactgttcggcatgagtcagaatatcggcggtctgctggggtcggccattctcggcacctttcagacatggcgggagaagtttcactccagccagctcgccgaccagttgaccaccctcaatccgctgattactgaacgtttgcagcagtacagccaaatgtatcaaagccagattggcgacagcaccctgctcaacgttcaggccaccacgctgctacaaaacgccgccacgctgcaggccaatattctcgcttacaatgatacctatctgctgacggcggcgatttcagccgccacgctggtgtgggttttctggcgcttaataagattacgtattaccgcccgcgttgcgttgaagcgcgcgacgggaagcaaataa

SEQ ID NO: 253374 - DNA, 432 bp, Klebsiella pneumoniae; identical to SEQ ID NO: 172355

SEQ ID NO: 253375 - DNA, 1326 bp, Klebsiella pneumoniae
atgaccttgcacgagagcagcaccacatcaattctcaagaaaaacaaaaaggtgctcattgccagcctcaccggcagcgccattgaatggttcgattatttcctttacggtacggcggcggcgctggtattcaacaagattttctttccgatggtcgatccggtcatcggtttaatcctctcctggctctcgttctcgttgacctttttcattcgcccgattggcggggtggtcttcgcacatattggcgaccgaatcgggcgtaagaaaacgctggtcctgacgctctccctgatgggcggcgcaacggtcgccatcggtctgcttcccacctatgagatgatcggtttatgggcgccagcgctgctgataaccttacgtatcgttcagggaatgggcatcggcggcgaatggggtggtgcgctattgctggcctacgaatacgcaccggaaaagcgcaaaggttttttcggcagcattccgcaggcgggcgtgaccattggcatgctgatggccacttttatcgtctcgctaatgacccttttcagcgaagagcagtttctctcctggggctggcgcatccctttcctgctcagctcggtgctggttcttattggtctgtggatccgcaaagatattgatgaaacgccggaatttaaacaggtgaagcagtcaggccaggtagcaaaggcgccgctgcgcgatacgctcaagtatcactggcgcgaagtgttaattgctgcgggcctcaaagtagtggaaaccgcgccattctatattttttcgactttcgtggtcagctatgccaccaccacgctgagctatcaaaaatcccaggcgcttgaagccgtcaccctcggtgcgctggttgctacggttatgatcccgctgatgggactgctttcagacagaatcggacgccagaaaatgtacactctcagcgtggtgctgcttggattgtttatcgtaccgtggtttctgctgttggatacccgcagcacgtggggcattgcgctcgccacggtgatcgccttcggtattctgtgggcaccggttaccgcggtattggggacgctctgctccgagatcttcagcgctaacgttcgctacaccggcatcacccttggctaccagcttggcgccgcgctcgccgggggtaccgctccgctgatcgccaccggactgctggcaaaatatgacggggactggataccggtcgcatggtatctggcgggaacggtggtgatttcacttatcgcgattttctgcgccagccgcttaaagcaggctcccggcgttgtcgccaccaggagcgagatgttataa

SEQ ID NO: 253376 - DNA, 792 bp, Klebsiella pneumoniae
atgtcggagcattttccatcgctgccggaggcgacgctagccgcggcgaaccggctgggggcctggctggcgcagcatgatttgccgcagcagccatcaatcgatgtcgtggtgctggcgggcaatgcggtgatcccaaccattgatttcgcctgccagctggcggcgcatcacgccgttccgctactgatcagcggtggtatcgggcattccacttcgtttttataccacgcggtgttgaacgatccgcgctattgcaccatcccggtagccgatcgcgccgaggcgcacattctggccgatattgcccaccggttctgggctattcctcgcgaatacattgtcgtggaagaccgctccaccaactgtggagaaaatgcgcgttttacccggcaaatgctggaacagagaggtattacgcaccgaacgggcgtggtgatccaggacccgaccatgcagcggcgaacgatggcgacctttgcccgcgtctggcaagacgcagcgcatgcgccgatgtggtacagcgcgccggggtgttcgccggtgttgtgcaatggcgataacggcgtcacctttagcggcgatagcagcggcctgtggccggtggaacgctatctggcgctgatcctcggcgagccgcctcggctggcggacaatccgcagggttatggcccgttgggtaagggatttatcgctcatgtggatattccgccgcagattattgaagcgtggcagacgctgcgcaaggaccgtctgctgtccgatacattgagcgcgcgccagctggcttag

SEQ ID NO: 253377 - DNA, 1440 bp, Klebsiella pneumoniae
atgacagcacccgttcaacaccctatgtatattgacggtcagtttgaagccggccgcggtgatgcatggattgaggtgatcaatccggccacggaagcgctcatatcgcgtattcctgacggcagcgcggaagatgcgcagcgcgcgattctcgccgctgagcgcgctcagccgggctgggaagccttacctgcgatcgagcgagcggggtggctgcgtaaaatcgctgccggtatccgcgaacgggccgacgagatcgccgcgctgattgtcgccgaaggcgggaagatccagcagctggcggcggtagaggtctcctttaccgcggattacctggattatatggccgaatgggcgcgtcgttatgagggcgaaattgtgcaaagcgatcgcccgggagaaaacattctggtattcaagcgcgcgctgggcgtgaccacaggcatcctgccgtggaatttcccgttcttcctgattgcccgcaagctggcgccagcgctgattaccggcaataccatcgtaattaaaccgagtgagtttacgccgaataacgccatcgcttttgcgcaaatcgttcatgatatcggcctgccgaaaggggtctttaatctggtgctgggccgcggcgaaatcgtgggtcaggagctagccggcaatccaaaggtcgcgatggtcagcatgaccggcagcgtcaccgcaggggagaagatcatggccgcggcggcgaaaaacatcaccaaagtatgcctggagctgggcgggaaagcgccggctatcgtgatggatgatgcggaccttgagctggcggtaaaagcggtggtcgattctcgcgtgattaatagcgggcaagtgtgtaactgcgttgagcgcgtgtatgtgcaaaaagggctatacgatcgcttcgttaaccgtttgggcgaagcgctgaaagcggtgcagtttggcgatccggctgcgcgcgacgatattgccatggggccgttgatcaatgccgcagcgctggagcgggttgagcagaaggtagcgaaagcggtggctcagggcgcacgtatcgctctgggtgggaaagcggtggagggtaaaggctatttctatccgccgacgctgctgctggacgtgcgccaggagatggatatcgttcatgaagagacgttcggtccggtactgccggtcgtggcgtttgataccctggaagaggcgctggcgatggccaacgacagcgattacgggctgacgtcatcaatctatacccgcgatttgaacgtcgcgatgaaggcgattaaggggctgaagtttggtgaaacctatattaaccgcgagaacttcgaggcgatgcagggtttccatgccggatggcgtaaatcagggattggcggcgccgacgggcgtcacggcctgaatgagtatctgcaaactcaggtggtctatctgcaggcctga

SEQ ID NO: 253378 - DNA, 999 bp, Klebsiella pneumoniae
atgagcaaactcgggattaatggatttgggcgtattggacggctggtgctgcgccggttactggaggttaatagttccttagaggtggtcgccattaacgatctcacctcaccgaaagtgctggcctacctgctaaagcacgactctaactacggacctttcccctggagcgttgattttactgaagatgcgctgatcgttgatggcaaaaaaatcaccgtttatgccgaaaaagaggcccagcatattccgtggaaagcgacgggcgctgaacttatcgtggagtgtaccggcttttacacctcatcagagaaagcgcaggcgcatctgaccgccggagccaaaaaagttctgatctccgcgccggcgggcgatatgaagaccatcgtctatcacgttaacgacgatacgctggacgccaacgatacgataatttctgtagcatcctgcaccaccaactgcctggcgccgatggcgaaagtgctaaatgacgcctttggtattaaagtgggaaccatgaccacgattcacgcctataccggcacccagtcgctggttgatggcccgcgcggcaaagatttacgcgcatcccgcgcggcggcggaaaatatcattccgcataccaccggggcggcgaaagctatcggtctggtcatccctgaacttagcggcaagctgaaaggccacgctcagcgcgtgccgaccaaaaccggttcggtgaccgaactggtgtcggtgctggagaaaaaagtgaccgccgaggaggttaatcaggcgatgagggaggcggcggcgaacaatgagtcatttggttataccgaagaggagatcgtctcctcagacgttatcggcagccatttcggttcaatttacgacgccacccagctggagatcgcagaagttggcgatctccagctcgtaaaaaccgtcgcctggtacgataacgaatacggtttcgtgacccagctgattcgcgtgctggataaattcgccaaataa

SEQ ID NO: 253379 - DNA, 495 bp, Klebsiella pneumoniae
atgaatatgaccattcgtcaggccagcccggcggacgcaaaagcaatttatgacatgatttatgagctcgcagtgtatgaaaaagcgccggagcaggtggttaccacggtcgaggagatccaggccacccttttcgccagcgacagcaaaacggaagcgctgatctgcgagatagaaaataaggtcgctgggtatgcggtgttcttcaccagctattccacctggctcggacgcaatggcatctatatggaagacctgtacgtctcgcccgagtttcgcggcaacggcgcgggaaaagcactcttgcgcaccattgctcagctagcggttaaaagagaatgcggccggttagagtggagcgtgctcgactggaaccagccggccatcgatttttatctgagcattggcgcgctgccgcaaagtgaatgggtgcgctatcgtcttgacggcgccgcgctagccgctttcgctgaatcaggcgctttggccagataa

SEQ ID NO: 253380 - DNA, 924 bp, Klebsiella pneumoniae
atgaatattatgcatcccgcccttcgccgtcttgatttaaacctgctgccggtattcgaggcggtctaccgctatcgctcggtccgcctggcggcggaagagttagcaatgagcacatcggcgttaagccacgcgctatccagactgcgcgcggcgcttaacgatccgcttttttatcgtgagggtcaccgcatgtgccccagcgtatatgcgacccagctcgcgccgtcgatatcatctgcgttaaagtttttaaatcaggagctcaccccgcagccaaagtttgtcgcttccgccagtaccgactgcctacagatcgcgatcacggatttcaccgcgcagtgcgtttttccaaccctgatgtccagacttcaccaccaggcgccgggtttgcgtttcgaactgcgttatctgccgcatagtccggcgctgacggaactgctggccggagaggtggacctggcgttgggtttcagcgcgctcaatgaagcggaacattcggaactggatgagattcgctggctgcaggatgactatgttgcgatgagtaacgaaaggcggaacagactcacgctggcggattatctggcggcccagcatctggtggtcactccgtggaatgaaagccagggggttctcgatgtgcagctggcgaaaatgggcttcacgcgacatatcaccatcaaaaccccctcaatgctgagcgcaccgtttattattgcgcaaagtgaactgttgatggcgatgccgcgctcggctgctgaaaagatgctcgcaaccgccggggtcaagatttttgaactgccgtttgaggtgccgccatttgaagtgaaaatctattcccataagcgcagcggtcagcgcggcgcaagccagtggctgaaagacacgcttcgggagtgggcggcgccggagggcatctga

SEQ ID NO: 253381 - DNA, 972 bp, Klebsiella pneumoniae
ttgaaattagccggacctcatccagatgaactgcgtcgtctgcaatcgctgcgggcatccgggttactgaatagcggaaaagaagagcgcttcgatcgcctgaccaggctggcgcgtacgctttacgatctgccggtggcgtcgattagcctcgtcggggagaacaccctgcatgtaaaatcctgcgccggacttgatgtggatacgctgccgagggatatcaccttctgcgcgcacaccattctgcaaaccgatcctttaatcgtcaatgacctgcagcaggatatgcgctttcacgataacccgctggtgacggaagcgccgtatattcgcttttatgccgggtatccggttcagctacctgacggcgcgacggtaggttcgttctgccttatggatcataagccgcgtgctttttccggacatgaaatacagatattgagtgacctggccgccattgtagaagatgaattcaaggtgctggatgcggcgaccgccgacgaactgacggggttatttaaccggaggggatttatgtcgttagcggagtatgcgctgttaacagccagacggcgaagtgaaccggcgagcctggtgtttatcgacctcgatcgctttaagctgattaacgatacctggggccatgagcaaggggataaagccctgacggcaatcgccgatgtgatgaagtctaccttcagagagtcggatttaattgccagacagggcggcgatgagtttatcatcctgcttgccaataccgcccagcaggccgcgaacaaggcgatggagcagcttagccagaatgttgccgagtataatcagcaagcgggtaatccgtggcagctggcgttctcatggggctgcgttgaatacgatccccatgagcaccatagtctcaatgacatcgttgcagtggccgaccggcggatgtatcaggctaaaatgagccatggcgcagagcgccggtag

SEQ ID NO: 253382 - DNA, 204 bp, Klebsiella pneumoniae; identical to SEQ ID NO: 172346

SEQ ID NO: 253383 - DNA, 198 bp, Klebsiella pneumoniae; identical to SEQ ID NO: 172345

SEQ ID NO: 253384 - DNA, 156 bp, Klebsiella pneumoniae
atgaacacatttagcatcatagctatcccattctttgccgcagctattgttcttttggccttagccgcgagccgaaagaaccgaacctgttatatcgttggcggcgtgttaatggcttcatccgtggttaacgcagtgattggcatggcgctgtag

SEQ ID NO: 253385 - DNA, 243 bp, Klebsiella pneumoniae; identical to SEQ ID NO: 172343

SEQ ID NO: 253386 - DNA, 528 bp, Klebsiella pneumoniae
atgcgcgataaatactctggcctgcagataggcatccactggctggtttttttattagtgattggcgcgtacgcggcgatggagctgcggggctttttcccgcgcagcgcgcggcctgccattaatatgattcacgtctcgtgcggtatttctatctttgttctgatggtggcgcgcctgatcgtgcgcctgaaatcaccggcgccgccgatagtccccaaaccatcgccgatgatgaccggcttcgcgcatctcgggcatctggtgatctatctgctgtttatcgcgctgccgatcatcggcatggtcatgatgtactatcgcggcaacccgtggttcgcttttggtctgaccatgccgcacgcagcggaaagcgactttgaactggtggataatctgaaagcgtggcatgagctgctggccaataccggctactttattatcggcctgcacgcgctggcggcgctgatgcaccattatttctggaaagataacacgctgctgcggatgatgccgcgtaagcgctaa

SEQ ID NO: 253387 - DNA, 474 bp, Klebsiella pneumoniae
atgaaagtcagacttgccatcgcagaagaggctccgaccctttgggaagttcgtaatcaggcgattcgccacggctgccgtgaaagctatgctgcggaagtcctccaggcctggactcccgacaacatgcctgaaggttatcgccatgcggtgcgcgataatccattttttgttgttgatgatgggcagggcaagccagtcgccagcggctatctggatatcaaagcgggtagcgttgaagccatatttactttgccgacctgggagggtaaaggctgcgccagcatgattatggcggcgattatcggggaggcgaaacaacgcaagttcaggcacattaccctcgatgcaacgccaaacgcggccggtttttatctgcgcctgggattcacttcaaccggcgaaaagcgctggcattcgaacatggcgaacgccgacttacgctgtgaatcgatgatccttagcctcgactga

SEQ ID NO: 253388 - DNA, 276 bp, Klebsiella pneumoniae
atgccacattcacctgaagataaaaagcgtgccctcagccgggtaaggcgcatccgtggccaggttgaagcgctcgagcgggcgctggaatctggcgaaccctgtatgaccattctgcaacagattgcctctattcgcggcgccgctaacggcctgatgggggaaatggttgagattcatctgcaggacgaactggttagcggcgaaacgacgccagaccagcgcgccgccagaatggcggaagtcgggcatctgctacgatcctatttaaaataa

SEQ ID NO: 253389 - DNA, 279 bp, Klebsiella pneumoniae
atgaaaagttcaacctgccgcctgctcgcaggcaccgttttggcgttagccgctgcctccgcacaggcgctgaaggccccggaagtggacctgcgcgatccgacgatctgggaagagaaaacggccagcccgctcaccgctaaccagccgccctgcgaggtttttagcggcccgcactgcgcggtctgggaagatgaaaaatcagatattcagcgagaacgggagcgtcgggaacagcggcggtggcataacggttatgaaaatttgcggcgagaatag

SEQ ID NO: 253390 - DNA, 2373 bp, Klebsiella pneumoniae
atggcaactggcaacgtgccgcgagggttcccacggatcctgcagtggcttctcgccggactgatgctgatcatcggtctggctatcggtattcttggtgcaaagctcgcctcggtcggcgggacgttctattttgcgattatgggcctggtgatggtgatcgcctcagcgctcattttccgcaaccgtcgcggcggcatactgctgtatgggctggcgtttctcgtctcgatcgtctgggcgattagtgacgcggggtggacttactggccgctgttctcgcgccttttcgcgctcggcgtgctggccttcctgtgcgcgctggtgtggccgttcctttcccgccagcctgcgaaaaaagggcccgcgtttggcctggcagcggtgttggcagtggtcctgttggcaagtttcggctggatgttcaaatctcagcctctggtcagcgccagcgaggcggtgccggttaaaccggtcgccgccggcgagcagcagaagaactgggcgcactggggcaacaccacccacggcgatcgcttcgccgccctcgaccagattaacaaacagaacgtgaaccagctgcaggtcgcctggatcgcccataccggcgatatcccgcagagcaacggctccggcgcggaagaccagaatacgccgctgcagattggcgatacgctttacgtctgtacgccctacagcaaagtactggcgctggatgtcgatagcggtaaagagaagtggcgctatgattcaaaagccaccgcgccgaactggcagcgctgccgtggtttaggctattacgaagacagccaggcccaggtgtcctctgccgcctatgcgcagccggccgcctgctcccgccgtctgttcctgccaactaccgacgcccgtctgatcgccattgatgccgataacggtaaactgtgcgacgcattcggcaaccacggtatcgttgaccttagcgtggggatgggggaaatcaaagcaggttactaccagcaaacctctacgccgctggtggcgggtaacgtcgtcgtggttggcggtcgcgtggcggataacttctccaccggcgagcctccgggcgtggttcgcgcctatgatgttcacaccggcaagctggcgtgggcatgggatccgggcaacccgaacctgaccggtgaaccgcctgtagggcaaacctacacccgcggtacgccgaacgtctggtcggccatgtcctatgacgcgaagctgaatctgatttacctgcctaccggtaacgctaccccagacttctttggcggcgaacgtaccgcgctggacgataaatacagctcttccatcgtggccgttgacgcgacgaccggacaggtacgctggcattatcagaccacccaccacgatctctgggacttcgacctgccttcgcagccgctgctgtacgatcttcctgacggtaaaggcggcaccaccccggtactggtgcaaaccagtaaacagggcatgatctttatgctcaatcgcgccaccggtgaaccagtcgccaaagttgaggaacgccctgtccctgcgggcaacgtcaaaggcgagcgctactccccgacccagccctattccgttggcatgccgatgatcggcaacgagacgctgacagagtcggatatgtggggcgcgacgcctgtcgacctgttgctgtgccgcattcagtttaaagagatgcgccatcagggtgtcttcacccccccgggcgaagatcgttcgctgcagtatcctggctcgctgggcgggatgaactggggcagcgtgtcggttgacccgaataatagcctgatgttcgtcaacgatatgcgccttggcctcgccaactatatggttccgcgcgccaacgtggcgaaagacgccagcggtatcgaaatggggatagtgccgatggaaggcaccccgttcggcgccatgcgcgagcgcttcctgtcgccgctgggcattccgtgccagaaaccgccgttcggcacaatgtcagcggtcgatctgaaaaccggcaagctggtgtggcaggttccggtgggcaccgtagaggacaccggtccgctggggatccgcatgcatatgccgatccctatcggcatgccgacgctgggcgcttcgcttgccacccagtccggcctgctgttcttcgcgggtacccaggacttctacctgcgcgcgtttgataccgccaacggtaaagagatctggaagtcgcgtctgccggtcggcagccagtccggcccgatgacctatgtctcgccgaaaaccggtaagcagtacatcatcatcaatgcgggcggcgctcgccagtccccggaccgcggcgattatattattgcctacgcgctcccggagcagaagtaa

SEQ ID NO: 253391 - DNA, 186 bp, Klebsiella pneumoniae; identical to SEQ ID NO: 172336

SEQ ID NO: 253392 - DNA, 621 bp, Klebsiella pneumoniae
atgagagattttttacccgaaaccgcttcacaaaccgccggaccttatgtgcatatcggcctggcgccggacgccgccggatttcatatctttgagaataactttggcccaacgctgacgacccctgcgaccgagggtgagcgcattaccattgaaggcagagtcatcgatggctccggaacgccggtgcgcgatgtgctactggaaatctggcaggccaacgccgccgggcgctacaatcacccggacgatcggcagcaaaacaaaaagctggatgcggagtttcgcggctgggggcgcagctgctcggactttaccagcggtatctggcgcttcgaaaccattaaacccggcgccgtagtgggccgtgatggccgcgtaatggcccctcacgtcaatttatgggtggtggcgcgcggaataaacattggccttaatacgcggatgtacttctccgacgagcaggacgctaatcagaccgatccggtgctcaatctgattgagtgggaagttcgccgtcagaccctcatcgggcagcgcgaagtgcgcggcacggaaatcgtttatcgcttcgatattcacttacagggcgacaacgaaaccgtgttcttcgatatctaa

SEQ ID NO: 253393 - DNA, 741 bp, Klebsiella pneumoniae
atgaacgacaaatggtcaccgcgcgaggttctgcatcgcgactatagcagccatcctccggcttacgcgccgggctataaaaccagcgttctgcgctcgccgcgcaatgcgctcatctccctacagaattcactttcggaaatcaccgggccggttttcagtagcgacgatctcggcgcgctcgataacgacctgatcctgaattacgccaaagacggcctgccgattggcgagcggattattgtgcacggctacgtacgcgatggattcggtcggccgatgaaaaatacgctggtcgaagtctggcaggccaacgctggcggacgctaccgacataaaaaggatcaatatctggcgccgatcgacccgaactttggcggctgtggacgcgtgctgaccgacgagaacggctattattgttttcgcaccatcaaacccggcccctacccgtggcgcaaccaggtaagcgactggcgcccggcgcatattcacttctctctctccggagacgcctgggcacagcgtttaattacgcagatgtattttgaaggcgatccgctgatcaaacagtgtcctatcgtcaaaaccatcaataacgacgatgccatcaggacgctgatcgccgagctggatccccatgccgccgtaccgctggactcgctggcttaccgttttgatctcgtgctgcgcggccaccgcgccacgctgtttgaaaaccgcacgcagggggccgcccgatga

SEQ ID NO: 253394 - DNA, 1344 bp, Klebsiella pneumoniae
atggcgaacaccatcacggctgatgagattcgggagtgcttttcgcaggcgatgtcggcgatgtaccagcaggaagttccgcagtatgggacgctactggagctggtggccgacgttaatctggctattctggagaataacccgaagctgcatgaacaactggctaacgccgatgaactggcgcggctgaacgttgaacgccacggcgcgatccgcgttggtacggcggaggaactggcgaccttgcgtcgcatgtttgccattatgggaatgtatcccgttagttattacgatctgtcgcaggctggcgtgccggttcactccaccgcgtttcgtcccgttgatgacgccgcgctggcgcgcaacccgtttcgtatttttacttcgcttctgcgccttgagcttatcgctaatgacgcgttgcgtaagcgggcggcgcaaatcctttccgggcgcgatattttcaccccacgctgtcgtgaactgattgcgctttatgaacagaaaggagaattcaccgccgcagaggcccgggagttcgtcgaacaggcgctggaaacctttcgctggcatcgacagaccctcgtcgatgaagaaacctatcatgcgctgcacgatgagcaccggctgattgccgatgtcgtctgtttccccggctgccacatcaatcatctgactccgcgcaccctggatatcgatcgggtacaggcgctgatgcctgaatgcggcatcgccccgaaggcgttgatagaagggccgccgcgccgcgaagtgcctattttactgcgccagaccagctttaaggctctcgaggagccggtgatgtttgctggagagcataaaggcacgcataccgctcgctttggtgaaatcgagcagcgcgggattgccctgacgccgaaaggccgtgcgctctacgatcgtcttctgggcgaggcgggggtgggcaaggataacctcaaccatcagcgtcatctgcaggaggtgtttagcgcgtttccggacagcgaattcctgctgcgtcagcagggactggcatacttccgctaccgcctgacccctgccggagaagcccatcgtcaggcgtttcgccccggagacgatccgcagccgctgatcgaacgcggctgggtgattgcgcaaccgattatttatgaagactttttaccggtaagcgccgccgggatatttcagtcgaatctgggcaacgaggtgcagacccgcagccacggtaacgccagccgggaggcctttgaggaggcgctgggctgtgcggtttatgacgagttcaccctctatcagcaggcggaagagcgcagcaaacgacgttgcggtctgctgtaa

SEQ ID NO: 253395 - DNA, 1509 bp, Klebsiella pneumoniae
atgcagaatccgtccaccccgctggtgaaaacccggcaggggatactatccggcacctctgaagagaacattcatatctggcgcggtattccctatgccgcgccgcccgtcggcgatcttcgctggcgctcgccgcagcctgctgcccgctggcagggcgtgcgccgggcagagaccttctcggcctccagctggcaggatattgaatactgccgcgagctcggcggcggcgatcccggtagcttttccgaagattgcctctaccttaatgtctggtcgcccgccgcccgatcgcagccgctgccggtcatggtctggctgcacggcgggggctataccatcggcgcgggaagtttgccgccctatgacggcaaagccttagcttctcgcggcgtggtagtggtgacggtcaactaccggctcgggcatctgggcttttttgcccatccggcgctggaaggggaagacggcgagcgtatctataacttcgcgctactcgatcagatcgccgccctgcagtgggtgcaggagaacattcacgcctttggcggcgatgcggctaacgtgacgctgttcggcgaatccgccggcgcgcgcagcgtgctgtcgctgatggtttcgccaaagtccagaggcttgttccataaagcgataatccagagcggctataccttgcccgatctgccgcgagagaaggcgctggcgaaggggcagcttattgcggaacacttttctttgccgcaggccagcgccgaacagctgcgggcgattccggcgcaagcgttctggtcgttgactgcgccgttgaccatcggcccggcgcccgtggttggcgatgccgtgctgccgcagccgatgctggagactttttttagcggacgtcagcatcccctgccggtaatgatcggttcgaacagcgatgaggcgagcgtcatggcggtgtttggcgtcgatatcgccgggcagatccagaagcttcgccgtgaacgccgtttcggtctgggtctaattaaattgctctatcccggcgtgaagggagatgaagcgctggggcgcgaagtttgccgggatatggcctttaccactctgggctatgtggtgatgcaggctcagcagcgagtagggcaaccgtgctggcgctactggtttgactacgtggccgaggcggaacaccagacctatccgcacggcgcgtggcacggtaatgaagtggcatacgtttttgacaatctcgaccttgccgagccggtacgaaattatgccaacgatcgcgacagagactttgccgcccgggtcgccgactattgggcgaacttcgctcgcttcgccggcaatgactgtcatgaactctcagggccggtacgctggcccgccagcgtgcgcggacgggatcgcctgctgcgaatcgggctgcacaaacgggccggctttaaggtggagaaccgctttatgcgcgcgcgtctggcgctgtttcgtcgggtcatgaagcatcatgtgacgctggattaa

SEQ ID NO: 253396 - DNA, 624 bp, Klebsiella pneumoniae
atggccaaaccgtatgttcgtctggataaaaatgatgccgccgtgctgctggtcgatcaccagaccggattgctttcactggtgcgcgatattgatcctgataaattcaagaacaacgtccttgcccttggcgacctggcgaagtatttcggtctgccgaccatcctgaccaccagcttcgaaaacggccctaatggtccgctggtgcctgagctgaaagagcaattcccggatgccccctatattgcgcgcccgggtaatattaacgcctgggataacgaagatttcgttaaggcagtgaaagcgacgggcaagaagcagctgatcattgccggggtggtgacggaagtgtgcgtggcttttccggcgctatcggctattgaagaggggtttgatgtatttgtggtgaccgacgcttccggcacctttaacccgattacccgcgatgcggcctgggatcggatgtcgcaggctggcgtgcagctgatgtcgtggtttggcgttgcctgcgaactgcatcgcgactggcgtaatgatatcgaaggactgggcacgctgttctccaaccatatcccggattatcgcaacctgatgaccagctttaatcttctgaatcaaaaataa

SEQ ID NO: 253397 - DNA, 1656 bp, Klebsiella pneumoniae
atgaaccgcagacgttttctcaaatcttccatggctgttgccgccgtatgcggaacgtcaggagtcgcctctctattttctaaagccgcattcgccgaagattcgggaattgccgatgggcaaacgcgccgttttgattatagtgtcctccagtcgatggcccacgatcttgcccgtcagccatggggcggcgcacctcgcgatctgccgccaaccctggcaaccctgacgccgcaggcctacaacagcattcagtatgacgccgcgcactccctgtggagcaacattgaagagcgcaagctggatatccagtttttccacgtgggaatggggttccgccgccgcgtgagaatgttctcgctggattcacaaactcaacaggcacgtgaaatacacttccggcctgaactgtttaaatacaatgatgccggcgtcgacaccaaacagctggtgggccagagcgacctgggttttgccggttttcgcgtatttaaggcccctgaactggcgcgtcgcgacatcgtcgcgtttcttggcgccagctacttccgcgcggtggacagcacttaccagtacggtctttccgcccgcggcctggcgatcgatacctttaccgatacgccagaagagtttcctgacttcacctctttctggtttgagaccgttaaaccgggagccacggtatttaccgtctatgcactgctcgacagcccaagcgtcaccggcgcctataagttcatcgttaactgtcaggagacgcaggtgatcatggatgtggaaaaccatatctatgcgcgcaaagacatcaagcagctgggcatcgcgccgatgaccagtatgttcagctgtggtaataacgaacggcgaatgtgtgacaccatccatccgcaaattcacgactctgaccgtctgtcgatgtggctgggcaacggcgagtgggtttgtcgcccgctgaataacccgcaaaagctgcagttcaacgctttccaggataagaatccgcgcggttttggcctgctgcagctggatcgcgacttctcccactatcaggatattatgggctggtacaacaagcgcccgagtctgtgggtcgaaccgcgtaaccagtggggcaagggggccgtcaacctgatggagatcccgaccactggcgaaacgctggataacatcgtctgcttctggcagccggagaagccggtgaaagccggggatgaactggacttccgctatcgtctctactggagcgcgcagccgccggtacgctcgccgctggcgcgggtgatggcaacgcggacggggatgggcggtttcccggaaggctgggcgccgggcgaacactatccggataaatggacccgtcggtttgccatcgattttgtcggcggtgacctgaaggccgccgcgcctaaaggcatcgagccggtcattactctgtcgagcggtgaagcgaaacagatagaaatcctctacgttgaaccctttgatggctaccgcattcagtttgactggtatccgacttcggattcgactgacccggttgagatgcgcatgttcctgcgctgccagggggaggctatcagcgagacctggctttatcagtacttcccgccgccgccggataaacgcaactatgtcgacgatcgggtaatgaggtaa

SEQ ID NO: 253398 - DNA, 573 bp, Klebsiella pneumoniae
atgtccgccgaaaacagatctgctatcgaacatatccccgttacggattctctctccctgcgcgcggttgacgagcgtcacgtgccggaactgcatcagctggtgatgaaaaaccagcgctggcttcagcagtcgctgagctggcccgctgaggtgactcacgaagaggagacccgccgccacgtgcagggcaacgtgatgctccaccagcgcggctatgccaagatgtttttgctctttctgcaggaggagattgtcggcgtactgtcgttcaatcagatagagccaatcaacaagaccgcttacattggctactggattgatgaaagccatcaggggcaggggctgctttcgcaggccctgcaggcgctgatggactattttgcccgcagcggtacggtccgccgctttgtgattaagtgtcgggtggcgaaccacaaaagcaatcaggtggccctgcgtaacggttttagcctcgaagggtgcctcaggcaggctgagtatctcaacggttcgtatgatgatcagaatatctacggacgcattattgatgaattcccggggcgcggctga

SEQ ID NO: 253399 - DNA, 981 bp, Klebsiella pneumoniae
atgcgcaaatattacctcagcgagaaggttcgccagtttcactatgaggccgacggcaacaaacatagcgtaaatctgcggcaaattgtcgccttacgtgatttcgctgacgtaaaaagcggtgatgaaggcggctggctggacgatgaagcagcccttagccacgagggcgcgtgctggatttatgatcctaatagcgccgtatttgccggggcaaaaattgagggcaatgcgcgcttaaccggcgagtgcattatcagccatggggccatcgtcaaaggtaacgcttgtctggatagcgccgcagtgagccataatgcgcaaataggtgacaacgtcaccgtttcacactcgcacattcgcgggtgctgccacctggccgaccacgcgcggatcctcccccactgtttaattatcgccgctcaaggtctgactgccgacaacgataaaatcctgcgcatttatcagcgggccacggtcagcgcatcgcgcgtcgttcaccaggcacaaatttacggcgatgcgtttgtcgaacacgcttttgtcgagcaccgggcggaaattttcgatcatgcgcgactcgaaggtaatgaagagaacgacgtctggatctgcgataacgcccgcgtttatgaccatgcgaggattatcgccgggcgggaagcagacgctatcccgaccctgcgctacagttcgcaggtggcggagcacgctgtggtcgaaggcaactgcctgctgaagcatcgggtgatggtaggcggccatgcgcacctgcggggcgggccaattctgctggacgatagtgtgttaattgaaggccatacggtgatttgcggcgatgtggtgatcgagcatcaggtcactatcggcgatgaagcgcgcatcgaagccagcgcgggagacgccatttctatccggggcgcgaaggtcattaacggcgacgaacattatacccgcacgcccattgttggctttctttaa

SEQ ID NO: 253400 - DNA, 999 bp, Klebsiella pneumoniae
atgaataaaacgcagcgcgcgagccgggtgctgaatcttccggcgggctattttggtatggtactgggcattatcggcatgggcttcgcctggcgctacgccagcaccatctggccggtgagccgggtcgtcggtgacgccctggtgatcgcggctacgctcatctggctactgctggcgctggcatttattacccgggcggtccgtttcccgcacagcgtactgcaggagatgcgacatccggtggccagcagttttgtcagcctgtttccggcgaccaccatgctggtcgccatcggctttgttccctggctgcggccgctgtcgctggtattattcgcgattggggtggtgctgcagctgagctattcggcatggcagagcgccggattatggcgggggaaacatcccagcgaggcaactacgccgggtctctatctaccgacggtggcgaataactttatcagcgccatggcctgcggcgcgttgggctttaacgacgccggactggtgtttcttggcgccgggatcttctcctggctaagcctggagccggttatcctgcagcgcctgcgcagcgatggagaactgccgacggcgatgcggacttcgctcggcattcagctggcgccggcgctggtggcgtgcagcgcctggctgagcgtaaacggcggcgagacggataccttcgctaagctgctgttcggctatggtctgctccagctgctgtttatgctgcggctgatgccatggtatctacgccagccgtttaacgcctctttctggagcttctcatttggcatctccgcgctggcgacgaccgggctgcatctcggtcatcagcatccgggcggctttttccatactctggcgttcccgctgtttctgtttaccaatctgatcgtcggcctgctgctggttcgtaccttcttgctgctggtgcgcggtaaactgcttattcgcgttgaacgcgacgcattattaaaaaataaggattaa

SEQ ID NO: 253401 - DNA, 597 bp, Klebsiella pneumoniae
atgacgcttcgtgacgaaaactactttaccgataaatacggcatgacccgcacccattcggaggtgctgcacgccgccacgctgatcgccccgggcagggcgctggatctgggctgcggcaacggtcgcaatagcttgtatctggcagccaacgggtttgatgttaccgcgtgggacaaaaaccctgccagcatcggtaatcttgagagcattcgtcaggcggaagggctggggaatctgcggacggcgattaaggatcttaacgccctgagctttgatggcgagtatgactttattctttccaccgtggtgatgatgttccttgatgcgcagaccatcccgggtcttatcgccaatatgcaacgctgtaccaaacccggcggctacaatttgatcgttgccgctatggataccgacgattatccgtgcaccgttggcttcccgttcgcctttaaaccgggtgaacttagccactactaccagggctgggcgttcctcaagtacaacgaagacgtcggtgaactccaccgcaccgacgccaacggcaatcgcatcaagctgcgtttcgccaccatgctggcgcgcaaaccggcctaa

SEQ ID NO: 253402 - DNA, 1230 bp, Klebsiella pneumoniae
atgtcatcagccctggccagtcaattaacccaacgcttctttcgctatctggcgataaccagccaaagcgatccgcgagcgtccaccctacccaccaccgccgggcaacacgcgatggcacaggcccttgcggatgagctacgccagcttgggctggatgacattgtgattgacgaacacgccaccgtgacggcggtgaaaaaaggcaatgtcccaggcgcgccgcggattggctttattacccacatcgataccgttgacgttggtttgtcaccggagattcatccacaaattctgcgcttcactggtgaagatctctgtttgaacagcgagaaagatatctggctgcgcgtcgtcgagcatccggaaatcctcgcttatcccgatgaagagattatttttagcgacggtaccagcgtgctcggggcggataacaaatccgccgtcacggtggtgatgacggtgctggaaaacctcacggcggagcatcgccacggcgatatcgtggtggcctttgtgccggatgaagaagtgggtctgcggggagcgaaagcgctggacctctcgcgctttgccgtcgattttgcgtggaccatcgactgctgcgagctcggcgaaatcgtctatgagaactttaacgccgccgccgcggagatccgttttaccggcgtcacggcccatccgatgtcatcaaagggcgtactggtgaacccgctgctgatggccaccgattacatgagccatttcgatcgccagcaaacgccggaatatactgccggacgcgaaggctacgtgtggtttaacggcatccagggcgatcaaaatagcaccctactgcaggccagcatccgcgacttcgatctcgccagctttaatcgccgcaagcagcagatcggcgaagtggcgcaaaaaatcgccgcgcagtatccaaccggtaaggtggaatttcacgtcagcgatacctacagcaacattagcaatgcgattggcgaagatcgccgcgccattgatctgatgttcgaagcaatggaaagcttaggcattacgccgaaaccaacgccgatgcgcggcggcaccgacggcgcggccctgtcggcaaaaggggtgttaacgccaaacttcttcaccggcgcgcataacttccactcgaagtttgaatttctgccgctgcgcgcctttgaagcctcttatcagaccgcgttccagctctgcctgttagccgcgcgttag

SEQ ID NO: 253403 - DNA, 1593 bp, Klebsiella pneumoniae
atgcaacgcagattcacgacgcttgctctggcggtagcggccctgacggccagctcggctattagcgcaaaaacgctggtctactgttcagaaggatcgccggaaaactttaaccctcaactctatacctcgggaaccagcgtggatgccagcgcggtaccggtctataaccggctggttgactttaaagcaggtactacggaattagtgccgagcctggccgaaagctgggaagtcagcgaagatggcaaagtttatactttccatttacgtaaaggcgttaaattccagagtaataaatatttcaaacccagccgcgattttaatgccgatgatgttattttttcatttatgcggcaaaaagatcctcatcatccttatcacaatgtctccaacggcaattattctaattttgaaagcctggagtttggtcagttaattaccgcaatcgataagcctgatgaatatacggtgcgttttacattagcgcatcctgaagcgccatttgtcgccgatcttgcctggtattttgcctctattttatcggcggaatatgccgatgcgatgttaaaagccggcacgccagaacgcgtggacatggacccgattggcaccggtccgttcaaactcgcacagtatcaaaaagattcccgcattctcttcaccgctttcccggaatactggcaggggaaagcccatatcgatcgcctgattttcagcatcacgccggacgcttcggtgcgctacgccaagctggagaaaaacgagtgccaggtaatgccgttccccaatccggcagacctgccgcgaatgaaagagaacaacgcgatcaatctgatgagcaaagcgggcctcaacaccggtttcctggcgtttaatacgcaaaaagcgccgctggacaacgtcaaggtgcgccaggccttagcgatggcgatcaataaaccggcgatcattgaagccgtcttccacggcaccggtacggcggcgaaaaacctgctgccgccgggggtatggagcgcggatagccagcttaaagattacgagtatgacccgcagaaagcgcaagcgctgctggcggagtcgggcgtttccgggccgataaccatcgacctgtgggcgatgccggtgcagcgtccttataatccgaacgccaaacgcatggccgagatgattcaggccgactgggcgaaaatcggcgtgcaaactaagatcacaacctatgagtggggtgaatacttaaagcgggttaaggatggtgaacaccaggcggcgctgatgggctggaccaccgcgaccggcgacccggataacttctttggcccgttgtttacctgccagtcggcaaacggcggctctaactcggcgaaatggtgctatcagccgttcgataacctcatcgccgaggcgaaatcgataaccgatcgccaaaaacgcgagacgctctatctgcaggcgcagcagatgatgcacgaccagatgccggcggtgatgattgcccactcgactatttttgaaccggtacgtaaaaacgtttctggttacgaaatcgaccccttcggcaagcatattttttatcaggttgatataaaataa

SEQ ID NO: 253404 - DNA, 669 bp, Klebsiella pneumoniae
atgcgtactcagttattttttaaggtcgccgcgctggctggcctgttagccctggccggttgttcatcaaaactggctaaacctgaacaatattccggttttttaaaagattactctggtctaaaagaaaccacctccgcttccggtaaaccggagctgcgctggatttctgcggattacaatccgaacaactatgacaatatcgtttataaccccatcacctattatccggtccctaaaccgacaacccaggttggcgaaaaggcgctcagcgatatcctgaattacaccaacaaagagatgaaacaggctatttccgagcgtaaaccgctggctaccaccgcagggaaacgcagcctgatcttccgcggcgccatcaccggcgtggattccagcaaagaaggtctgcagttctacgaagtgattccggtggcgatgattatcgccggtacccaggcggcaaccggtcaccgtaccatggacaccaacctgttctttgaaggtgagctgattgacgcggcgaccaaaaagccggttatcaaagtggtccgtaagggcgaaggtaaaaacctgtccaacgaaaatacgccgctcaccgtcgagaccctgaagcaggtgatcgatgatatggcgattgacgcggtgaaattcgaccctaataaccgttaa

SEQ ID NO: 253405 - DNA, 897 bp, Klebsiella pneumoniae
ttgaacgcattactctacgggttagtcgtcgttatctggggtacgacatggattgctatctttttgcagcaggggccggtcgccgcgccggtgtctattttctggcgttttgccgtcgccagcatcaccatgctgaccattctgctggttacccgccgtcttcgcccgctggccgcccgggaccatcttttctgcctgctgcagggctgctgcgtcttctgctttaatttctggtgcttctataccgccgctgcgtatatcaataccgggctggagtcggtgatcttctccatggcggtgctgtttaacgcgattaacagttttctctttttccgccagcagccgccgggccgtttctggctggccgccgcgctgggtctggcgggcatcgtaacgctcttctgggatgatttgtgggccaacggcctcaatgcatcgctgctgctcggtattgcgctcagcgcattaggcacctacggattttcgctcggcaatatgctcagccttcgccaccagcgccgcggcctggaaaccttgaccaccaacagctgggcaatgctttacggcacgctggtcatgggcgctatcgccctggtacgcggcgatagttttgccccgcagtggacgctaagctatatgggcgcgctgctgtatctggcggtgtttggctcggtgatcgctttcggcgcctatttcacgctagtggggcgaatcggcgccagcaaagccgcctacagtaccctgttatttccgctcgtcgcgctgacgatttccaccttttatgagggctacgtctggtatagcaacgccgtcgccgggttagcgctgattctgctcggcaatctggtgatgtttgctcgcccggagcagtggctgctgcggcgcaggctggcctga

SEQ ID NO: 253406 - DNA, 867 bp, Klebsiella pneumoniae
atggcttacgggactttcgaaacattgcgtcaaaaaaatgccgtgctgcgggagacggttaagctcaactccgggattcagctggcggcgtggtataacaatctcgataccataacggtacaaagcgatcaccacactctgagcctgtatattgccgatggctacgaaagctaccagaagacgccacatggctggaaaaacggcggcgggcccgaccgtttctgcctgatgccgaaaggcgatgagagcacctgggatattcgcggcgacctctcttttgtccacctttactgcaccgatgaacatctccgccgggtaggcgagcagatttgggaccgtagtccggcttcgttcacgctgcaggaaaaaaccttttccagcgatgacaaaattaccgctgtctatcgccagtttctgctggacaacgactggcagcagcaggcgaaccaccttacgttgagttccgccagcacgctgctgctcacgcacttgattcagcattattcaaacgttcagtggcgtttgccgacggtgaccggcggcctggcgccgcacgtcttgcgtaatctgctggcatggattgaggagaacctcgaccggccgctcacccttgccgatctggcgcaggaagcggcgctcagcgaataccattttgcgcggatgttccgccagtcaatgaaaatggcgccgcatcagtacgtgatgcagcgccggatggttaaagcgcaggcgctcattacccgcagtctgctgccgttaaccgatattgctatggcctgcggttttagcagcgccagccactttagcaatcgggtaaaaagcgccaccggcctgacgccctcgcagctacgctcggcgcagcgctga

SEQ ID NO: 253407 - DNA, 1167 bp, Klebsiella pneumoniae
atgcgctcttttactctgccctttccgactctgcttgccggttttgtcgcggtcttagtcggctacgccagttctgccgccattatctggcaggcagcggcggcggcaggcgccgatgcttcgcaaatcgccggctggatgaccgccttaggcctgggaatgggcgtgagtaccctggcgctcaccttatggcgaaaagtaccaatcctgacggcgtggtcaacgcccggggcggcgctgctggttagcggcctgcacggcgtcacgctggcgcaggcgattggcgtgtttatctttgctaacggcttaatcgtactgtgcggcgtaaccggtctgtttgcccggctgatgaaaatcattccccattcgctggcggcggcgatgctggccggtattttgctgcgttttggtatgcaggctttctccagcctgcagggcaatctgctgctatgcggcagcatgttagccgcctggctgatatgcaaagtctgcctcccccgatttgccgtggtggccgcaatgttggcgggaagcgcggtggccgccctcagtggagatgtgacagggtcacatatcagctggcgctttgtcgcccccgcttttatctctcctgaatttacgcccgcgctgctgcttagcgtcggcgtaccctttttccttgttaccatggcttcgcagaatgcccccggctttgctaccctgcaggcttcgggctatcgggttccggcttcatcgctgatcgtggcgaccggcggtctggcgctactgctgtcgccgtttggcgtctactcgatctgtatcgccgcgattacggccgcgatttgccaaagcccggaagcccatccggacccgctaaagcgctggctcgcggcggcggcggcgggcgttttttatctgctggcgggaatcttcggcggctccatcacttcgttgatggcggcgctgccggcggcatggatccagatgcttgccggactggcgctgctgggcaccatcggcggcagcctgtttcaggcgctcaatcatgagcgtgaacgcgatgccgcggtggtgacttttctggtcaccgccagcggcgtggagctggccggtatcggctctgctttttgggggctggttctcggcggcgtcagctacgttttactgtcagcgctgcgccgagcgtag

SEQ ID NO: 253408 - DNA, 537 bp, Klebsiella pneumoniae
atgaatattgcgcaacatctgtcggcgacgctaaaaacgctgcgccagcagcgcggctggagcctgtcgcgcctggcggaagaaaccggcgtatcgaaagccatgctgggccagattgaacgtaacgaatccagtccgaccgtggcgacgctgtggaaaattgccaccggcctgaacgtaccgttttccgcctttattatcgccgatgatagcgctgaaccagccgccttcgacccgcagcagcaggcgatggttgtgacgcctgtttttccctgggacccggtgctgcgtttcgaccacttctccattaccctggcgcccggcgcgctaagcgagtccacgccgcacgaggaaggggttatcgaacatgtggtggtgattagcggcgtgctggatctgtgcctgcaggacgagtggctgtcgctgcagccaggggaagggcggcggttcgccggtgatttagcgcacgcttaccgcaatagcggcgcgcagaccgcccatttccattcgctgatccactacccaaaagcacaataa

SEQ ID NO: 253409 - DNA, 1983 bp, Klebsiella pneumoniae
atggataacgacgagcgtatgcgcctgcaaaaccatcatcttgaactattgagtcctgcccgcgatgccgggatcgcccgtgaagcgattttacacggcgcggatgcggtctatatcggcggaccgggcttcggcgcgcgtcacaacgccagcaatagcctgagcgacatcgccggactggtgccatttgcccaccgctacggcgcgaaggtgttcgtgaccctgaacaccattcttcatgatgatgaactggaaccggcgcaacgtctgataaccgatctgtacgaaaccggcgtggacgcgctgattgttcaggatatgggcgtgctggagctggatattccgccgattgagctgcatgccagcacccagtgcgatattcgcagcgtggagaaagcgaaatttctttccgatgtcggcttcagccaaatcgtcctcgcccgcgagctgaatcttcagcagatcaaagcgatttacgataataccgacgcgaccatcgaattctttatccacggagcgctgtgcgtggcctattccggtcagtgcaatatttcccatgctcagaccgggcgcagcgccaaccgcggcgactgctcgcaggcctgccgtctgccctataccctgaaagatgaccagggccgcgtggtggcctatgaaaagcatttgctgtcgatgaaagacaacgatcagaccgccaacctggccgcgctgatcgatgccggagtgcgttcctttaagattgagggacgctacaaagacatgagctatgtgaagaatattaccgcgcattatcgccagatgcttgacgccatcattgaagatcgcggcgatctggcccgctcgtcgttgggacgtacggagcacttcttcatcccgtccacggataaaaccttccatcgcggcagcaccgactattttgtcaacgcccgcaaaggcgatatcggcgcgtttgattcgccgaagtttattggcctgccggtgggtgaagtgctgaaagtcggcaaggattttctcgacgttgaggtgagcgaagccctgaccaacggcgacggcctgaacgtgatgatcaaacgtgaggttgttggctttcgcgccaacacggttgaaaaaacgggcgaaaatcgctaccgcgtatggccgaacgagatgcccgcggatttacacaaagtgcgcccgcatcagccgctaaaccgcaacctcgatcataactggcagcaggcgctgctaaaaacctccagcgagcgtcgcatcgcggtggatatcgaactgagcggttggcaggaacagctggtcttaaccatgaccagcgaggagggcgtcagcgtcacccatactctggacggcgattttgccgaagcgacccaggcggagaaagcgctgacgaatctgcgcgacggcctggcgaagctgggccagaccctttactactcgcgcaacatggaaattaacctgccgggtgcgctattcgtgccgaacagcctgttgaaccagctgcgtcgggaaaccgtagatatgctggatgacgcgcggctgaaagccgtggtgcgcggctgccgcaagccggtttccgtcccgccgccggtctatccggaaacgcacctgtcgtttctggcgaacgtctacaaccataaggcgcgcgagttttaccagcgttacggcgtgcagctgatcgatgccgcctatgaagcgcatcaggagaagggcgatgtgccggtcatgatcactaagcactgcctgcgctttgcttttaatctgtgtccgaaacaggctaaagggtcgattaagagctggaaagccacgccgatgcagttgattcacggcgatgaagtgttgacgctgaaatttgactgccgcccctgcgaaatgcacgtcgtcggtaagataaaaaatcatatccttaaaatgccgctaccgggcagcatcgtggcgtccgtcagcccggatgagctgatgaaaaccctgccgaaacgcaagggcgcctga

SEQ ID NO: 253410 - DNA, 234 bp, Klebsiella pneumoniae
atgctcagaagatacgtttcagcgctactgttggtgtgcgccctgttttccggccacgtgctggcccaccagcacggacacgatttcttcccggtacagggcctcgagcagcagctacagcacgaagccgatagcgatgagctacgcagccagagcgaagaagccgcgtccgatctgcgcgaacatcaccgctggcaaaatgcgcgaaagccgaaaatgcacttctatccctaa

SEQ ID NO: 253411 - DNA, 126 bp, Klebsiella pneumoniae
atgcaacgagtatggcttaagcgagcggtatggatgatagtgctgtggggaggcagcgtgctggcgctgggagcggtgagcatggggtttcggctgctgatgacggccgccgggctgaaggtttga

SEQ ID NO: 253412 - DNA, 1011 bp, Klebsiella pneumoniae
atgggtatcgatttatcggttatttggtttgttatcattgtcttcgccaccctgatgtatatcgtaatggatggctttgacctgggcattggcattttattcaccactacccgggacacggcggaccgcgacgtgatggtaaacagcgtcgccccggtctgggacggcaatgaaacctggctggtgcttggcggcgcggggctgtttggcgcatttcctctggcctacgcggtcattatcgatgcgctggcgatcccgctcaccctgatgttgatcggtcttatttttcgcggcgttgcctttgaatttcgctttaatgcgacgccatcgcatcgtccattctgggatcgcgcttttatggtcggttcccttctggccaccttcacccagggcatggtggtcggagcggtgatcaacggttttccggtcaacggccgcagcttcagcggcgggatgtttgactggtttacgccgtttaccctgttctgcggcctggggctatgcgttgcctacgcgctgctgggtgccagctggctggtgatgaaaagcgaaaatgcgctccaccgcaatatgcgcatgaccgcgcgcggcttgctgttggcgctgctggcggtcattgtcgccatcagcatctggacgccgctggcgcaaccggccatcgcccggcgctggtttagcctgcctgacctcttcttcctgctgccggtaccgctgctggtggcggcgatcggcgcctggctctggcgaacgcttcgcaacagcgccagccacctgctgccttttactctcacgctggggctgatcttcctcggctttagcgggctggggatcagtatctggccgcatattattccgccggacattaccctctggcaggccgccgcgccgccgcaaagccagggctttatgctggttggcgcgctgcttattctgccggtgatcctcggctacaccttctggagctactacgtttttcgcggcaaagttcaacacggcgaggggtatcactga

SEQ ID NO: 253413 - DNA, 1398 bp, Klebsiella pneumoniae
atgttcggtcttgatgcattccacctggcgcggatccagttcgctttcaccgtgtcatttcatattatcttccccgccatcaccatcgggttagccagctacctggcggtactggaaggcttatggttaaaaaccaaaaacccgacctggcgctcgctgtaccacttctggtcaaaaatcttcgccgttaacttcggcatgggagtcgtctccggcctggtgatggcctaccagttcggtaccaactggagcggattctcggaattcgccgggagcattaccggcccgctgctgacctatgaggttctgaccgccttcttccttgaggccggattcctcggcgtgatgctgttcggctggaaccgtgtcggacctggcctgcactttttcgccacctgtatggtcgcgctggggacgattatctccaccttctggatccttgcatctaatagctggatgcaaacgccgcagggatttgagatcgtcaatggtcaggtggtgccggtggactggctggcggtgatttttaacccgtctttcccttaccgcctgctgcatatgtcggtggcggctttcctcagcagcgcgctgttcgtcggcgcgtcggcagcctggcacctgctgcgagggaacaatacccccgccgtccgcgcgatgttctccatggcgctgtggatgacgctgattgtcgcccccattcaggcgctgattggcgatatgcacgggctgaatacgttgaaacaccagccggccaaaatcgccgccattgaagggcactgggagaacgcgcccggagagcccaccccgctgctgctgttcggctggccggatatgcagcaggagcgtacccgctatggcctggagatcccggctctcggcagcctgattctcacccacagcctggataagcaggtgccggcgctgaaggagttcgccccggaagatcgccctgactccaccatcgtattctggtccttccgcctgatggccgggctcggcatgctgatgatcctgctgggcgcgctggccttgtggctacgctatcgcggccgcctctatcacagcaggccctttttacgctttgcgctatggatgggaccttcgggacttatcgcgattctggcgggctgggtgaccaccgaagtgggccgccagccgtgggtcgtctatggcgttcagcgcaccgctgatgccgtctccgctcacggcgacctgcatatgtcgatcagtctgctgacttttatcgttgtctacggttcggtgttcggcgtcggctacagctatatgctacgcctgattcgcaaaggtccgcagaccgcgcagccaccggcctccggtacgccagcgcgtccactctccgccgctacgggccatcaacagcagaaggagttccgctaa

SEQ ID NO: 253414 - DNA, 1419 bp, Klebsiella pneumoniae
  misc_feature (924)..(931): n is a, c, g, or t
atgaaaaagtaccagcggctggcgcagcagattactgaacagatcgcgcttggggtgtggttacccggcgacaggttgccctcgctgcgcgaacaggtggtaagcagcggaatgagttttatgaccgtcagccacgcctatcagttactggagagccagggacgcatcatcgcccgtccgcagtccggctattatgtcgcgccgcagcccactaaaccgcggcagcccgcgccgcccgcccaggtaacgcgtgatgaagcggttgatatcaacacttatatctttgaagtgctgcaggccagccgccaggcctctatgttgcccttcgcctcggcttttcccgatccgcgactattccctttaccgcagctcaaccgctcgctggcgcaggtgagcaaaaccgcaaccgccatgagcgtgattgaaaacctgccgccggggaacgatgaactgcgccatgcgattgcccggcgctacgcgctgcagggaatgaatatctcgccggacgacatcgtgatcaccgccggcgcgctggaagcgctgaaccttagtctgcaggccgtcaccgaaccgggcgattgggtggtggtggaaaatccctgcttctacggggcgctgcaggctcttgaaagattgcgcctgaaagcgctatcggtggccacggatgttaaagaggggatcgatctcgccgcgctggagcaggcgctacagagctatccggtgaaagcctgctggctgatgaccaatgggcaaaacccgctcggctttaccctcagcgcggagaaaaaagcgcggctggtggcgctgctggcgcgctataacgtgatgctgattgaagatgatgtttacagcgagctctactttggtcgtgagaaaccgctgccggcaaaatactgggatcgcgacgatatgacgctgcactgnnnnnnnngctccttctccaaatgtctggttcccgggttccgtatcggctgggtggcggcgggcaagcacgcccgacggatccagcagctacagctgatgagtacgctctccaccagttcgccaatgcagctggcgctggtcgattacctttcgactaaacgctacgatgcccacctgcgccgtttacgccgccagcttgccgagcgcaaacagctggcctggcaggccctgctgcgccatcttcccgcagagataaaaattcatcatagcgatagcggttattttctctggcttgagcttcccgccggagccgatgcgggggagctgagcgcccgcgcgctggcgtataacatcagcattgcgccggggaaaatgttttccaccaccgccagctggacttcattcttccgctttaataccgcgtggggctggggcgaaaaagaggagcagggggttaaacgcctgggcgaactgattcgcgaaatgctggcttag

SEQ ID NO: 253415 - DNA, 1146 bp, Klebsiella pneumoniae
atgagcaaaaaaattgcccgtggcagcctttgcgtgctggggatggttttcctgacggcgcaggccgccgagccgccgacttctctcgataaaggcgaaggtcgtctcgatattattgcctggccgggatatatcgagcggggacaaaccgataaaagctacgactgggtgagccagtttgaaaaagagtccggctgtcaggttaatgtcaaaaccgccgccacgtccgatgagatggtcagcctgatggcaaaaggaggctatgacctggtcaccgcgtccggcgacgcttcgctgcgcctgattatgggtaggcgcgtgcagccgattaacactgcgctgattgctaactggcactccctcgacccgcgcgtggaaaaaggcgcgtggtttaacgtcggcggacaggtctacggcactccgtaccagtgggggccaaacctgctgatgtacaacagcaaaaccttcccgacgccgccggatagctggagcgtggtgttcgtaaaacaaaatctgccggacggaaaaaccaatcagggccgcgtacaggcttatgatgggcccatttatattgccgacgccgcgctattcgttaaagccactcagccgcagctgggtattaatgatccctatcaacttactgaagcgcagtatcaggcggtgctgaaagtcctgcgcgaacagcacccgctgatccaccgctactggcacgataccaccgtgcagatgagcgattttaaaaacgaaggcgtggtggcctccagcgcctggccctatcaggccaacggtctgaaagcggaaggccagccgattgccaccgtttttccgaaagagggcgtcaccggctgggcggataccactatgctgcacagcgatgctaaacatccggtttgcgcttataaatggatgaactggtcgctcaccccgaaagtgcagggggatgtcgccgcctggtttggttcgctgccggtcgtacctgcgggttgcaaagccagcgcgctgctcggggataaaggctgcgaaaccaatggttacaacgaattcgccaaaattgcgttctggaaaacgccggttgccgaaggcgggaaattcgtcccctacagccgctggacgcaggattacatcgcgattatgggcggtcgttaa

SEQ ID NO: 253416 - DNA, 1011 bp, Klebsiella pneumoniae
atgcacgcggtagagctggataatgtttcgcgcctgtacggcgacgtgcgggcggtggatggcgtcagcatcgctattcgcgacggcgagtttttctctatgctggggccatctggctccggcaaaaccacctgcctgcgcctgattgccggatttgaacagctttcgggcggaacgatacgtatttttggccaaccggccagcgcgctgccgccctggcagcgcgatgtgaataccgttttccaggattatgcgctgtttcctcatatgtcggtactcgataacgtcgcctacgggttgatggttaaggggatcggcaaaaaggagcgccacgcccgtgcgcaggaggcgctggagaaggtggcgctcgcttttgtgcatgcgcgcaagccttctcagctttccggcggccagcgccagcgggtagccatcgcccgggcgctggtgaatcagccaagggtcctgctgctggatgaaccgctgggggcactggatctaaaactgcgcgaacagatgcagctggagctgaaaaaactgcagcaggcgctgggcatcaccttcatttttgtgacccacgatcagggagaggccctgtcgatgtctgaccgcgtggcggtctttaatcagggacgcattgagcaggttgatgcgcctcaggatctctatttgcggccaagaacggcgtttgtcgccgggtttgtcggtaccgccaacgtgtttagcagcgagctggcgcagaagctgtgcgcgatgacgggcgcctggtcgctgcgtccggagcatattcggctgaatgccggcggggaggtgcagattcaggggatcgtgcaggcggtgcagtatatgggcgccgccacgcgcgtcgagctgaagctggctgacggcgagaagctgctggtgagtcaggcgaatgtcgatggtcaggctgcgctgaacgcccctccggtagggcaacaggtgctggcttcatggtcgcgtgcggcgatggtccccctggagagcggagggtga

SEQ ID NO: 253417 - DNA, 930 bp, Klebsiella pneumoniae
atgacgatggcgataccctctgccggaggtggacgcctggccggcaccttctggcgttatccctcgctggctctgtttctgctactgctggggccgctcatgtggtttggcattgtctatctggggtcgttgttgacccttttgtggcaaagtttctatacctttgatgatttcaccatgtcggtcaccaacgacctgacgctggccaatctgcgcgcgctgtttaatccggctaactacgacattattgtgcgcacgctggtgatggcgctatcggtgaccgtcgccagcgcgattctggcactgcccatggcctggtatatggcccgctatacccgtggcaagatgaaagcctttttctatatcgccgtgatgctgccgatgtgggcgagctatatcgtcaaagcctatgcctggacgctgctgctggctaaagatggcgtcgcccagtggttcctgcgccatcttggtctggaaagcgtactgagcatggtgctgacgatcccggcggtcggcggcaatacgctgtcgacctctgggctggggcgcttcctggtgttcgtctatatctggctgccgtttatgatcctgccggtgcaggcggcgctggaacgcctgccgtcttcattgctgcaggcttccgccgatcttggcgcccgtccgcgccagacctttcgctatgtggtgctgccgttagcgatccccggcattgcggcggggtccatttttaccttctccctgacgctgggcgattttatcgtgccgcagctggtggggccgccgggattctttatcggcaatatggtctattcccagcagggggcgattggcaacatgccgatggcggcggcgtttaccctggtgcccattgtactgattgccctctatctggcgttcgtgaaacgtctgggagcatttgatgcactctga

SEQ ID NO: 253418 - DNA, 807 bp, Klebsiella pneumoniae
atgcactctgatcgcgcaccgctgttcctgaaggtcgccacctggggtggcgtgatattcctgcatttcccgctgctgattatcgctctctacgcattcaataccgaagacgccgccttcagctttccgcctgcaggcctgacgctgcgctggtttagcgaagcggcggggcgtagcgatattatcgaatccgtgacgttgtcacttaaaatcgccgcgctgtcgaccgccatcgctctcgtacttggcacgctggctgcaggtgcgctgtggcgcagcacgttttttggcaaaaacgccgtgtcgctactgctgctattaccgattgcgctgcccggcattattaccgggcttgcgctgctgaccgcctttaaggccgtcaatctggaaccagggctgctgactatcgtcgtgggacacgcgaccttctgcgtggtcgtggtatttaacaacgtgattgcccgctttcgccgcacttcatggagtctggtggaagcgtcgatggatttaggcgcaaccggcgggcaaacctttcgttacgtggtactgcccaatctgggatcggcgctgctggcggggggaatgctggcgtttgctctgtcgtttgatgaaattatcgtgaccacgtttaccgccgggcacgagcgtacgctgccgctctggttgcttaatcagctcgggcgcccgcgcgatgtcccggtcaccaacgtcgtcgcgctgctggtcatgctggtgacgatgtttccgattctgggggcctggtggctcactcgtgacggcgacatcagcgcggaaaacggaaaataa

SEQ ID NO: 253419 - DNA, 1428 bp, Klebsiella pneumoniae
atgcaaaataaccttttgataaacggtaagttagtggctggcgaaggcgagactgtgccggtgtttaatccagccaccggcgaagagattttgtcgattgcggaggcctcggcgacgcaggttgatgccgcggttgacgccgctgacctggcctttgccggctggagtcagacgacgccgaaaacccgcgccgaatgcctgctgcggctggcggacctgattactgaacatgcccaggagctggctcaactggagtcgttgcactgcggcaaaccgctgcactgcgtggtcaacgatgagctaccggcggttgccgatgttttccgatttttcgccggtgcagcgcgctgtctgccgggtatggcggcaggtgaatacctcgaaggccacacctcgatgatccgccgcgatccggtcggcgtggtggcttctatcgcgccgtggaactatccgctcatgatggcggcctggaaactggcgccagcgctggcggcaggcaactgcgtggtaataaaaccctctgagatcactccgctcaccgcgctgaagttaggtgaactggcgcaggagattttccccgccggggtgcttaatgttctgttcgggcgcggagcaaccgtcggcgatccgctgaccgcccatgcccgggttcgcatggtgtcgctaaccggctcgattgctaccggcgcgcatattatcggccataccgcggcgtcgattaagcgaacccatatggagctgggcgggaaggcgccggttatcgtttttgatgatgcggatattgacgcggtggtggagggggtacggacctttgggttttataacgctggtcaggactgtaccgccgcctgccgcatttacgcgcaggccggaatctatgaccaactggtggaaaagctcggcgcggcggtcgccagcctgaagattggaccgccggacgatgaaacgaccgaactgggcccgctgagctcgcaggcgcatctggacagggtcagcgccgccgtcgatgcggctcgtgccttgccgcatattcaggtggtgaccggcggcagcaaagcgccgggcaatggttactacttccagcccacgctgctggcaggggcgaagcaggacgatgcgattgtgcagcgggaggtttttggtccggttgtcagcatcaccgcatttagcgatgaagagcaggcgctgtgctgggccaacgattcccaatatggtcttgcctcgtcggtatggactcgcgatgtcggcagagcgcaccggctcagcgcccgcctgcagtatggctgtacctgggtcaatacgcattttatgctggttagcgaaatgccgcatggtgggcagaagctctccggctacggcaaggatatgtcgatgtatggcctggaggattatacgaccatccgtcatgtgatgatcaagcacgggtag

SEQ ID NO: 253420 - DNA, 138 bp, Klebsiella pneumoniae
atgaaccaggtgccccaggagatattgatgccaacaatgcttttgaccagcgccagggccagcaggttcggggccaaagccgacaggaacatcgagctggtaatacaggcggcggtgatcgctacccacatcagatag

SEQ ID NO: 253421 - DNA, 738 bp, Klebsiella pneumoniae
atgctgcaaaatattcgaatcgtactggtagaaacctcacacaccggcaatatgggctccgtcgcccgcgcaatgaaaaccatggggttaaccaacctctggctggtcaatcctctggttaaacctgattctcaggccatcgctctggcggccggagccagcgacgtgattggcaatgccaacatcgttgataccctcgatgaagcactggcggggtgcagcctggtcgtgggaaccagcgcccgttctcgcacgctgccgtggccgatgctcgatccgcgtgaatgcggtctgaaaagcgttgcggaagcgaagcatgcgccgatcgcgctggtatttggccgcgaacgcgtaggcctgactaacgaagagctgcagaagtgtcactaccacgtggcgattgccgcgaatccggaatacagttcgctgaacctggcgatggcggtacaggttatctcctatgaagtccggatggcctggctggcggcgcaggaacaaaatgaacctgtcgttgagcatgaggaaaccccgtatccgctggtggatgatttagagcgtttctacggtcatctggagcagacgctgctggcaaccggatttattcgcgccagccacccgggtcaggtgatgaacaaactgcgccgtttgtttactcgcgcccgtccggaaagccaggagctgaacatcctgcgcggcatgctggcgtcaattgagcagcagcagaaaaataaagaataa

SEQ ID NO: 253422 - DNA, 804 bp, Klebsiella pneumoniae
atgcatccgatgctgaacatcgccgtgcgcgcagcgcgcaaggcgggtaatttaattgccaagcactacgaaacccctgactccgtagaaaccagccagaaaggcagcaatgattttgtgaccaacgtcgataaagccgcagaggcgatgattatcgaaaccattcgcaaatcttacccgcagcacaccatcatcaccgaagaaagcggtgagcacgctggtgaagatcaggatgttcaatgggttatcgatccactggatggcaccaccaactttgtaaaacgtctaccccacttcgccgtatccattgccgtacgcattaaaggccgtactgaagtagccgtggtttacgatccaatgcgtaacgaactgtttaccgcaacccgcggtcagggcgcgcagctgaacggctaccgcctgcgcggcagcagcgctcgcgatctcgatggcacgatcatcgccaccggcttcccgttcaaagcaaaacagcatgcgacctcctacatgaacatcctcggcaacatgttcaccgaatgcgcggacttccgccgtaccggttccgccgccctggatctggcctacgttgctgctggccgcgttgacggctactttgaaatcgcgctgaaaccgtgggatttcgcggccggcgagctgatcgcccgtgaagccggcgctatcgtctgcgactttaccggcggccataactacctgctgaccggcaacatcgttgcaggcaacccgcgcgttgtgaaagcgatgctggccaatatgcgcgagcagctgagcgaagcgctgaagcgttaa

SEQ ID NO: 253423 - DNA, 990 bp, Klebsiella pneumoniae
  misc_feature (685)..(694): n is a, c, g, or t
atgtcagtgatttttgcacaaaacggccgttcgccgcgctggcgccagctctggccgctggcgctgtttctgctgctggcagccggagctggcttctggctatggcgggcctggccgcaggtgctgctgcaaagcgcgatctggcagcgcgcgctgaatgtcgaactgagtcggcttctgcaggcggttgcggagaatcctgccgctgccgggctgtcgctgctggggtttagcttcgcctacggcgtcctgcatgcgctggggccggggcacggcaaggtggtcataaccacctggctggcaacccatccgtcgaagctgaaatcgagcatcggcctgaccctggccgcctcgttgctgcagggactggtggccatcgccttagtggtggtggtactgacgctgctgcggctgccggcaagacagctgcatctgagcagcttctggctggaaaagggaagctatctgctggtcggcgcgctgggccttttgctgtgctggcgtgcgctaaaaaagctgcgcgtactgctgcgccggccgacattcaccgccttcaccgcgcatcacgttcatcacgccaactgcggctgcgggcatcagcatctgccggcgccggaacagctgcaaagcggcgacgactggcgggctcggctggctatcgtgctgtcaatggggatgcggcccnnnnnnnnnngctccggagcgattatggtgctgttattcagcaaggttatcggcgtatttagctggggcatggcggccgcgatggcgatggcggcaggtacctcgttaacgattagcgcgctggccctgctggtgcatggcttccgtcagctggcggtcaggctgagcgccggccgggcgccggcgctgtggaagcagattggctgggcaacgctggcgctggccggcggcgtgatcttactggcggcggcgatagtgatgtggagcagcgctatgccatcgggcggcggcctgcgtccgttttga

SEQ ID NO: 253424 - DNA, 639 bp, Klebsiella pneumoniae
atgaagagagtgaaacaatgcgtcagcgtagcgtttttcatgtttttatcgctatctgcggcggcgcatccgcacagtttcattagtctgcaaaccgaggccgtagcggaaaatgggcaacttaccggctttaaaatgcgctggacgatggatgaaatcacctccgccgatctgctctatgatgcgggcaacgccaaacccggtagcgaaatctggaaaaagctggcggcggaagtgatggcgaacgtgctgggccagcactatttcagcgagctgtggcataacggcgagagagtgaagtttgataatcggcccgatggctatggccttgagcgcagcggccaccaggcggtactctcttttactctgccgctggcgaagccgcagccgatggccgggcaaaccttcaccttttccacctacgacccgacctattatgttgatatgtattacgacaaagacgcagacttcactctaccgacggcgatgaagacaagctgcacggcaaaagtgatgacgccgaagcctaacgaaaaaatgttgtcctacgcgcagtcgctggataaagcggatgcgccgccggaggatatggaactggggaattacttcgcgcaaaaggtgacgctgcaatgtcagtga

SEQ ID NO: 253425 - DNA, 1278 bp, Klebsiella pneumoniae
atgatgacagtgattgaaccaccatctgtgctttccagtccacagcgccgtagccaggtgctcctgatgttttatctgcccgggcagtccgtgacgcccgaatggctgggtaacctcacccaggttgatgaggataccgcccggcaggacatcgcggagacgggacgcgaaattcagcgttatcaccgcttgactctgacttcacaagcggacggcagctatcggatggaaggcgccgcgctcgatcaacgcttatgcctgctgcacggcctgcgccgcgggctgcgcctgtgcccgcattttgtcagccaccattttaccccggctctgaaaacgcagcttaaacagcaaggtatcgcacgcacgctctatgatgacaccaatcttcaggcattggtcaaccgctgctcgcgcgccctgaaccggcagtttgactgccgcgacgtgcattttctgcgtctttatttacagtattgtttgctgcagcaccaccttgggcagagtccctctttcactcacgagcagcagcgctgggcgcaggccgccgccgaatttgccctcgcggaggagattgtccgccactggcagcggcgggttgcggtagcgccccacgcaggagaacagctgtttttgactctgctgtttatgctgttgaaaactcccgatcctattcgcgatggtcatcagcaggatcgacgtctgcatctggctatatccggcctgattcaccgctttcagaacctggcgggccgtccgtttagcgatgaacaggggctcagcgatcagctctatatccacctctcgcaggcgttacatcgcagcgttttcgctatcggtatcgataacgcgctgccggaggaaattggccgtctttatccccgcctgatgcgcaccacccaggccgcactggaggagtttgaagccagctggcaagtgcggtttagccaggaggaagtcagcctgatcgcggtgattttcggcgcatggctgatgcaaaaaagcgatctgcaagagaagcaggtggtgctgcttaccgatgataatccggatcttgagcagtcgctggagcagcagctgcgcgagttaaccctgctgccgctcaatatcaagtatttgagcgtgagcacctttcagaaagagggcgccccgaaggaagtgacgctgatcatcactccctataccaccgcgctaccgctgttttcaccgccgctgtttcatgctgaagaggcgttcagcgatcatcagcggcagcagatttgcaaaatgctggaggcctag

SEQ ID NO: 253426 - DNA, 1134 bp, Klebsiella pneumoniae
atggtcttacactccacgcgctggctggcgcttagttacttcacctatttctttagctacggtatcttcctgcctttctggagcgtctggctttccggacttggcctgacgccggaaaccatcggtatgctgctcggcgccgggctggtgtcgcgttttcttggcagcctgctgattgcgccgcgggtcagcgacccgtcccgactgatctcttctctacgcattctggctttgctgacgctgctttttgcgctcgcattttgggtcggccaccatgtcgcctggctgatggtgattatcgtcggctttaacctctttttctcgccgctggtgccgctcaccgacgcgctggcgaatacctggcaaaagcagatcaccatggactacgggcgcgtgcgtctgtggggatcgatagctttcgtcattggttcggcgctaaccgggaagctggtcagcctgtatgactaccggatgatactggtgatgctcagcgtcggcattgcttcaatgctgctcggcatgttgctgaaaccgtcggtgcagccgcagggagagtcccgccagcaggaagcggccggcctggcggcctggcttacgctggtgcggcaaagctggcgcttcctcgcctgcgtctgtttgctgcagggagcgcacgccgcctactacggatttagcgctatctactggcaggaggcggggtattcggcctccgcggtgggctatctgtggtcgcttggcgtggtggcggaagtggtgattttcgcgctgagcaaaaaagtcttccgtcgctttagcgcccgcgatctactgctgctgtccgcggtgtgcgggctgattcgctggacgttgatgggctggacgacggcgctaccctggcttatcgtcgcgcagatcctccactgcggcacctttacggtgtgccatctggcggcgatgcgctatatcgcagcgcgtcagggcagcgaagtgatccgcctgcaggcggtctactccgctgtcgcgatgggcggcagcattgcggtgatgacggtatttgccggtttcctctaccagcatttgcaccagggcgtgttctgggtaatggcgctggtggccttaccggcgctggtggtgaggccaaaagcggtagcctag

SEQ ID NO: 253427 - DNA, 1437 bp, Klebsiella pneumoniae
atgaataacgcgcagacacatctcaaaatgggctacgtctggactatctgtctggtcgccgcctgcggtggtttactgtttggctatgactgggtagtcatcggcggcgctaagccattttatgaagcctggttttccattaccgacccggcacaatccggctgggctatgagttcggcgctggtgggctgcgttttcggcgcattaatctcgggatggtgcgccgataaactcgggcgcaagctgcccttaatactttccgccgtgctgttcagcgcgtcggcgtgggggacggcggtcgccagcagtttcgacatgtttgtggtttaccgcattgtgggcggcgtggggattggtctggcatccgctctcagcccgctttacatcgccgaagtcagtccggcagaaaaaagagggcgctttgttgcggtcaaccagctcactatcgtgattggcgtgctggccgctcagcttattaacctgatgattgcggaacccgtagagacgggagcgacgcagcaaatgattgtagaaacctggaacgggcagatgggctggcgctggatgttcggcgcagaattggttccggcgctggcgtttctggtactgatgttttttgttcccgaatcgccgcgctggcttatgaaagccggtaagcctgagcgtgcccgagccgcgctggaacgcattggttctgccgactatgccgacagaatattacacgacatcgcgcacacgctggaaaaagataaccataaagtatcctatggcgcactgctggctccgcaggtgaaaccgatcgttatcattggcatggttctcgccattttccagcagtggtgtggaattaacgtcatctttaactacgcacaggagatttttgcttcagcgggcttcgatattaacagcacgcttaaatcgatcgtcgcgacgggggttgtaaacctggtatttaccctcgccgcgctgccgctggtggataaaatcggccgccgtaaactgatgctgcttggcgcttcaggcttgacgctgatctatgtgctgattgccggcgcttacgccatgggcattatgggctggccggtactgctgctggtgctggcggctattgccatttacgccttgaccctggcgccggtcacctgggtactgttggcggaaatcttccccaaccgcgttcgcggactcgccatgtctttaggtaccctggcgctgtggattgcctgcttcttgttaacctacactttcccgctgcttaatgccggactgggcgcggcgggcagcttcttgctgtatggcatcatttgcgctgccggctatctctatattctgcgcaacgtgccggaaacaaaggggatcactctcgaagccctggaagaacagctggcgcaacgccatacgggcgttaatgcggcgaagcaggagcagacgcgctaa

SEQ ID NO: 253428 - DNA, 1197 bp, Klebsiella pneumoniae
atgcagcgtaccggtttaaataatgcccgggtcagacaggccaataaatccatttttttggctcatctctggcgggagaagcagctgagtaaatcccagctttctcagctcaccggactctctattccggcggtgagcaatattcttgaagagctgctcagcgagggactgatcgatcactccacggaaaaaatgagcaaacgcggcgtgaacagcggaagctaccagatccccgcgcgcggagcctggacgctatgcatgaatattacgccgaccagtattgagtatcagcttgccgatgcccgtctactggcggttgacggccaccagcatttgcccatcgatgcccctacgccgcaggcccttctggaggccatcgtggaatgctggcggcgtatccaccgcctctacccgcagcacagcatcaatctcgcccttggcgtccatggtcaggttgatccgatcaccggcgtttcacaaaccatgccccaggcgcgctggaaaacgccgattgaaataaagtatctgctggaagaacagctcggcgtgcaggtacgggtagataatgactgcgtgatgctggcgctggcggagaaatggcagcatccgggcccacaaccggatttttgcgtgatcaacgtcgattacggtattggatcatcgtttgtgattaacgatcagatttatcgaggaagcctctacggcagcgggcagattggacacacgattgtgaatcctgacggcaaagcctgcgactgcgggagatatggctgtcttgaaaccgtagcctccctcagcgcgttgaaaaaacaggcgcggatgtggcttaaaacccagcctgaggcgcagcgatccccggagcagttaaccacggcatcgctcattgaggcctgggaacagggagacgtgcatattcgcgcatgggttgataacgccgccaacgctattggcttaagtctttataatttcttaaatattttgaatattaaccagatctggctatacggtcgcagctgtgcttttggcgaacagtggctggagagtatcgtcaaacaaaccggctttaatccgtttgaccacggcgatacgccgagagcgcatgccacccaaatcggttttggcacactgacccgcgctcagcaactgatggggatcggttatctgtatgttgaggagcaactgcagacgctgcgttaa

SEQ ID NO: 253429 - DNA, 468 bp, Klebsiella pneumoniae
ttgtgtattacgtttaaatcacacgtctctcataacgagctgattatgaacactctacgctactttgactttggttcctcccgctctctgctgctgctgattgcgcgtatcgcggtagtggtgctgtttattcttttcggttatcccaagctgctcggctttagcggcacggtgcagtatatggcctcctccggcgcgccgatgccaacgcttgcggccatcattgccattattatggaggtgccggcggccattttaattgtgctgggctttttcacccgcccgctggcggtgatctttattttttatactcttggcaccgcggtgattggccatcactactggaatatgtccggcgatgcggtactaccgaacatgattaacttctggaaaaacgtcagtattgccggcgccttcctgctgctggcaataaccgggcccggagcgatttcgctcgaccgccgctaa

SEQ ID NO: 253430 - DNA, 1254 bp, Klebsiella pneumoniae
atgttaaagcgtgaaatgaacattgccgattatgatgccgaactgtggcaggctatggagcaagaaaaagtacgtcaggaagagcacatcgaactgatcgcctccgaaaactacaccagcccgcgcgtaatgcaggcgcagggctctcagctgaccaacaaatacgctgaaggatacccgggcaagcgctactacggcggctgtgaatacgtcgatatcgtagagcagctggctattgaccgcgctaaagaactgttcggcgctgactacgctaacgtgcagccgcactccggctcccaggcgaacttcgcggtctataccgctctgctgcagccgggcgataccgttctgggtatgaacctggcgcaaggtggccacctgactcacggctctccggtcaacttctctggcaaactgtacaacatcatcccttacggtatcgatgagtccggtaaaattgactatgacgatatggctaagcaggctcaggaacataaaccgaagatgattatcggtggtttctcggcttattccggcgtggttgactgggcaaaaatgcgtgaaatcgctgacagcatcggcgcatacctgttcgtcgatatggctcacgttgccggtctgatcgccgcaggcgtttacccgaacccggttccgcatgctcacgtcgtgaccaccaccacccacaaaaccctggctggtccgcgcggcggcctgatcctggcgaaaggcggcagcgaagagctgtacaaaaaactgaactccgccgtattcccgagcgcccagggcggcccgctgatgcacgttatcgcggcgaaagccgtcgcgctgaaagaagcgatggagccagagttcaaagtttaccagcagcaggtagcgaaaaacgctaaagcgatggtcgaagtgttcctgaaccgcggctacaaagtggtttccggcggcactgaaaaccatctgttcctgctggatctggtcgataaaaacctgaccggtaaagaagctgacgcagccctgggccgcgccaacatcaccgtcaacaaaaacagcgtgccgaacgatccgaagagcccgtttgtgacctctggtatccgtatcggttctccggcggtgacccgtcgcggctttaaggaagcagaagtcaaagagctggccggctggatgtgcgacgtgctggacaacatcaatgacgaagcggtcattgagcgcgtgaagggtaaagtgctggatatctgcgcacgcttcccggtctatgcgtaa

SEQ ID NO: 253431 - DNA, 1191 bp, Klebsiella pneumoniae
atgctcgacgcccagaccatcgctacggtgaaagccaccatcccccagctggttgaaaccggtccaaaactgaccgctcatttttacgaccgcatgtttgctcacaatcccgaattaaaagaaatcttcaatatgagcaatcagcgcaacggcgaccagcgcgaggcgctgttcaacgcgattgccgcctatgccagcaatctcgagaacctgcccgccctgctgccggcggtagagaaaatcgcccagaagcacaccagcttccagattcaacccgagcagtacaatattgttggtactcacctgctggcgaccctcgatgagatgttcagtccgggccaggaagtactggatgcctggggcaaggcctacggggtgctggccaacgtctttattaatcgtgaagcgcaaatctataacgaaagcgccagcaaaaccggcggctgggaaggcacccgcgcattccgcatcgtcaaaaaaacgccgcgcagcgcgctgattaccagctttgaatttgagccggtcgacggcggcgcggtagcggaatatcatccaggccagtatctggcggtctggctgaagccggaaggttttccgcatcaggaaattcgccagtactctttgacccgcaaacccgacggtaaaggctatcgtatcgcggttaaacgtgaaaacggcggccaggtttcaaactggctgcatgattcagcgaaagaaggcgacgtgatttatctggccgcgccggccggtgatttcttcctcaacgtggcgccggaaaccccggtcacgctgctctccggcggcgtcggtcagacgccgatgctggcgatgctggatgtgctggcaaaatcgcagcatccggcgcaggtgaactggttccatgcggcagagaacggcgacgtacacgccttctcggacgaagttaaaacgctgggtgaaacgctgccgaagtttacttctcacgtctggtaccgcagcccgagcgaagcggaccgtgaatccggcgcgtttgatagtgaaggtttgatggatttaacggcgctggccgacaagatcggcgacccgcaaatgcagttctatctctgcggcccagtggcgtttatgcagtttgccgcgaagcagctggtagatctgggcgtgagcagcggcaacattcattatgagtgcttcggcccgcacaaggtgctgtaa

SEQ ID NO: 253432 - DNA, 339 bp, Klebsiella pneumoniae
atgaaaaagattgatgcgattattaaacccttcaaactggatgacgtgcgtgaagcgctggccgaagtcggcatcaccgggatgacggtaacggaagtgaaaggctttggccgtcagaaggggcataccgagctgtatcgcggcgcagagtatatggtcgattttctgccgaaagtgaaaatcgaaatcgttgttaccgatgatatcgtcgacacctgcgtggataccattatccgtacggcgcagaccggcaaaatcggcgacggtaagatctttgtctttgatgtcgcgcgcgtgattcgtatccgtaccggcgaagaagacgacgcggcgatttaa

SEQ ID NO: 253433 - DNA, 1338 bp, Klebsiella pneumoniae
atgacgatccgtaaacccgcccgtctgctattagtggacgacgatccggggctgctgaagctgctgggtatgcgtctggtcagcgaagggtatagcgtagtgaccgccgagagcgggccggaggcgctgcgcacgctaagtcgcgacaaggtcgatctggtggtcagcgacctgcggatggatgagatggacggactccagctgttcagcgaaatccagaaggttcagccggggatgccggtgatcattctcaccgcgcacggttccattccggacgccgttgccgcgacccagcagggcgtgtttagctttctcaccaagccggtggataaagacgccctttataaagcgattgatgacgcgctggagcagagcgcgccaaccaccgacgagcgctggcgtcaggcgattgtgacccgtagcccgctgatggagcgactgctggagcaggccgggatggtggcgcagtcggacgtcagcgtgctgattaacggccagagcggtaccggcaaggagattgtcgcccaggcaattcataacgccagcccgcgccgcgataaaccttttgtcgccattaactgcggcgcgcttcccgaacagttgctggagtcagaattgttcggccacgcgcgcggcgcttttaccggcgcagtcagcaatcgcgaggggctattccaggccgcggaaggcgggaccctgtttcttgatgaaattggcgatatgccggttgcgctacaggtgaaactgctgcgcgttctgcaggagcgtaaagtgcgcccgctgggcagcaatcgcgatatcgatattgatgtgcggattatttctgcgacccatcgcgacctgccgaaggccatggcgcgaggcgaatttcgtgaagatctgttctatcgtctcaacgtggtgaatctgaaaatcccgccgctggctgagcgtacggaagatattccgctgctggcgaaccatctgctgcgccagtctgccgatcgccataaaccttttgtccgcgccttctccacggatgcgatgaagcggctgatggccgctaaatggccgggcaacgtgcgccagctggtgaacgtgattgagcagtgcgtggcgctgacctcttcgccggtcattagcgacgccctggtagagcaggcgctggaaggggaaaacaccgcgctgccgacgtttgtcgaagcgcggaatcagtttgagctcaattacctgcgcaagctgctgcaaattaccaaagggaacgtcacgcatgcggcccggatggcggggcgcaatcgcaccgaattttataagctgctgtcgcgccacgagctcgacgctaacgactttaaagagtag

SEQ ID NO: 253434 - DNA, 705 bp, Klebsiella pneumoniae
atgtcccacttcttcgcatttgtccgtcccctcaggggatggctgctgtcaggcatttcctgcctggcgctggcgggatgttccgcctctacatcaccatacgccgcggatggcaaaacgctctccgcgctgccgcagcatcaggtcgccgattttctttcggtggagtgcgctgatatctggaatctgcaaagcgaagccagcgacaaaaatccgctctactggctgcgtggaattgactgcgccgatcgtcttgctccggtgcaggcgcgggcggaggcccggctgcacagcggcgacagctggcaggatgcctttaagcgcggcattttactggctgatgccaaaattacgcctaacgagcgccgggaactggtcgccagtctggatagcttcagcccgcaaatcgcccctcaggtgcgcccgctctatcagctctggcgcgatgcccagggccggcagcttcagctgattgacgagcgttcccgctacgccaaactgcagcagtcaaacgatgcggagctggagacgctgcgacagcaggaaattgagctacgcagtcagctcgaactgacgacccgcaagctggagaatctcaccgatatcgagcgtcagctctccagccgtaaacccggcgggaacttcagctctgacgccgggcacggcggcgataaagtcccggaggtgattcatgacgatccgtaa

SEQ ID NO: 253435 - DNA, 1455 bp, Klebsiella pneumoniae
atgattgagaccctatccgtgaagcgactctcccttttcccccgttcgctgcgccaggtggtcacgctatccttcgtgctgatcctgcttccgctgctggtgctggcatggcaggcgtggcaaagccttaacgccctcagcgcccaggcggcgcatattaatcgcaccacccttatcgacgcccgccgcagcgaggcgatgattaacgcgtcgctggaaatggagcgtagctaccggcagtactgcgtgctggacgatccgacgctggcgcgggtctatcaaaatcaacgccaacgctacagcgaaatgcttgacgctcacgcgggcgttctgcctgatgaaaaaatctggcaggcgctgcgtcaggatctcgacgatctggccgagctgcagtgtaaaaatagcggcccggcggcgaagtcagcagtcagcctggaagcgtttgcttccgccaatagcgacatggtccaggcaacccggacggtggtctattcgcgtggacagcagctgcagcaggaaatcgccgagcgcggccagttcttcggctggcaggcgctggtgctgttcctgctcagcctggcgctggtgctgctgttcacccgcatgattatcggcccggtaaagggcattgaaagaatgatcaaccgactgggcgaggggaaatcgctggacgatgccgcgctgtttaccggcccgcgcgagctgcgctccgtcggtaaacgcattatctggctgagcgaacgccttgcctggctggaatcccagcgccatcagttcctgcgccatctttcccatgagctgaaaacgccgctggccagcatgcgcgaagggacggaactgctcgctgaccgggtggccgggccgctgacgcccgagcagcaggagatcgtggagattctggataacagcagccgcaacctgcaaaagctgattgagcagctgctggactataaccgcaaacaggccgatggcccgattgcgcgcgagacggtcaacctggccgaactggtggaaaatgtggtttctgcccatagcctgccggcaagagctaaaatgatgcataccgaactgttgctcagcgagcgtttttgcgaagcggagcccgctctgctggtgagcgtactggataatctctactccaatgcggtgcactatggtgctgaatccggtaacattcgaatccatagctatcggcacggcgagcaggtgcgcattgacgtcattaacgacggcgagccgatcccgtccgcagaaagaaacatgatttttgagcctttttatcagggaagccaccagcgtaaaggggcggtaaaaggcagcggtctggggctgagcattgcccgcgactgcgtacggcaaatgcagggcgagctgagcctggttgatgagaagtcagggctaatctgttttcgtatcacgctccccgtcgccgagtctggaaaaaataacgtataa

SEQ ID NO: 253436 - DNA, 1200 bp, Klebsiella pneumoniae
atggcctttaccggccactgcggcgtcaacgttgatatcgccgcgctcggcgaggatcgcctggccgcgctgtttaacgaagagcttggcggcgtcattcaggttcgtgccgccgatcgtcaggccgtggaagccacgttggccgctcatggcctggcggattgcgttcactatattggccaggctacggcgagcgatcgcttcgtcatcgaggccgacggtcatccggtattcagcgaaagccgcaccacgctgcgcatgtggtgggcagaaaccacctggcaaatgcagcgtctgcgcgataacccggaatgcgctgaccaggagcacgaggcgaaagccaacgatgccgatccagggctcaacgtgaagctctcctttgatatcaatgaggatatcgctgcgccttatattgccaccggcgcgcgtccgaaggtcgcggtgctgcgtgagcagggcgtgaactcccatgtagaaatggccgcggcgttccatcgcgccggctttgatgccatcgacgtgcacatgagcgacctgctggcgggccgtaccggtcttgctgatttccaggcgctggtggcctgcggcggcttctcctacggtgacgttttaggcgccggtgaaggctgggcgaaatcgattctgttcaatgagcgggttcgcgacgagtttgccaccttcttccatcgtccgcagaccctggcgctgggcgtgtgcaacggctgccagatgatgtctaatctgcgcgagctgatcccgggcagcgacctgtggccgcgctttgtgcgtaatcagtctgaccgctttgaagcgcgcttcagcctggttgaagtgacgcagagcccgtctctgctgctgcagggtatggtgggatcgatgatgccgattgccgtatcccacggtgaagggcaggtggaggttcgcgatggcgcgcatctggcgcagctggaaagtaaaggcctggtggcgctgcgcttcgtcgataacttcggtaaggtgacggaaaactatccggccaacccgaatggttcgccgaatggtatcactgcggtaaccagcgaaagcgggcgcgcgaccatcatgatgccgcacccggaacgcgtgttccgcaccgtgtcgaactcctggcacccggaaaactggggcgaagacagcccgtggatgcgtattttccgcaacgcgcgtaaacagctgggctaa

SEQ ID NO: 253437 - DNA, 2790 bp, Klebsiella pneumoniae
  misc_feature (2692)..(2701): n is a, c, g, or t
atggcgcccgtttcccccctggctcaccatgaaagcttcgaagacgagagacttatgatggaaattttgcgtggttcacctgcactgtcggcattccgtatcaataaactgctggcacgtttccaggcggccaaccttccggtcagcacgatatatgccgagtacgttcattttgccgaccttagcgccccgctcagcgacaacgatcgcgagagtctggaaaggttgctcaagtatggcccgaacttaagcagccataccccaaccggcaagctactgctcgttaccccccgtcccggcaccatctctccctggtcttctaaagctaccgacatcgcccataactgcggcctgtctcagattgtgcgccttgagcgcggcgtcgcgtattacgtcgaagccagcagcctcaacgatgaacagtggtcgctggtggcggccgaacttcatgaccgcatgatggaaagcgttttcggcgcgctggaagagggtgaaaaactgtttgcccatcatcagccaacgccggtcaccagcgttgacctgctgggcctggggcgtcaggcgctgattgacgccaacctccgtctggggcttgcgctggcggatgacgaaattgactatctgcaggatgctttccagacgctgggccgcaacccgaacgatatcgaactctatatgttcgcgcaggctaactccgagcactgccgacacaagatttttaacgccgactgggtcatcgatggcgaaaagcagccgaagtcgctgttcaaaatgatcaaaaacaccttcgagaaaaccccggactacgtgctgtctgcttataaagacaacgccgcggtaatggaaggttcagccgtggggcgctactttgccgaccacgcaaccggtcgctacgacttccaccaggaagacgcgcatattctgatgaaggtcgaaacccataaccacccgacggcgatctctccgtggccgggcgcggcgacaggttccggcggcgaaattcgcgatgaaggcgccaccggacgcggggcgaagccaaaagccggcctggtgggtttctcggtttccaacctgcggattccggggtttgaacagccgtgggaagaagatttcggcaaaccggatcgtatcgttaccgcgctggatatcatgactgaaggtccgctgggcggcgcggcgtttaacaacgaatttggtcgtccggcgctcaacggctatttccgtacctatgaagagaaggtaaccagccacaacggcgaagagctgcgcggctaccataagcccattatgctggcgggcggaatcggcaacattcgcggcgaacacgtgcagaagggcgaaattgtcgtcggcgcgaagctgattgttctcggcggtccggcaatgaacatcggtctcggcggcggcgcggcctcttcaatggcctccggccagtccgatgccgacctcgatttcgcctccgtacagcgcgataacccggagatggaacgtcgttgccaggaggttatcgaccgctgctggcagctgggcgacgccaacccgattttgtttatccacgatgtcggcgctggcggtctgtcgaacgccatgcctgagctggtcagcgacggcggacgcggcggtaaattccagctgcgcgatatcctcagcgatgagccgggcatgagcccgctggagatctggtgtaacgaatcgcaggaacgttatgtgctggcggtcgcgcctgagcaactgccgttgtttgatgagctgtgccgccgcgaacgcgcgccgtacgcggtgattggcgaagcaaccgaagcgctgcatctgagccttgatgatgcccactttgacgatcgtccgatcgacctgccgcttgacgtgctgctgggcaaaacgccgaaaatgacccgtgacgtgcagacgttgaaagcgcagggccagagtctgcaacgccagggcatcactattgccgacgcggtgaatcgcgtgctgcacctgccgacggtcgcggagaaaaccttcctcgtcaccattggcgatcgcaccgtcaccggtatggtggcgcgcgatcagatggtggggccgtggcaggttccggtggctaactgtgcggtcaccaccgccagcctcgatagctactacggcgaagcgatgtccattggcgaacgtgcgccggtggcgctgctggacttcgccgcctccgcccgtctggctgttggcgaggcgctgaccaacatcgcggcgacgcagattggcgcgctcaatcgcgtgaagctatcggcaaactggatggccgctgccggtcacccgggcgaagacgccggtttatatgaagcggtaaaagcggtgggcgaagagctctgtcctgccctgggactgactattccggtgggtaaagactccatgtcgatgaaaacccgctggcaggaaggggctgaacagcgcgagatgacttctccgctgtctctggtgatttccgcctttgcccgcgtggaagacgtacgccgtaccgtcaccccacagctctccaccgaagacaacgccctgctgctgattgatttaggcaaggggaacaatgcgctgggcgcgaccgcgctggcgcaggtttatcgtcagcttggcgatgtgactgccgacgttcgcgatgtcgcgcagctgaaaggcttctgggacgcaatgcaggcgctggtggctgaagataagctgnnnnnnnnnnctgctggcctggcacgaccgttccgacggcggtctgctggtcaccctggccgagatggcctttaccggccactgcggcgtcaacgttga

SEQ ID NO: 253438 - DNA, 1617 bp, Klebsiella pneumoniae
atgccgctcattccacgacaaccttttacttattctggtcacagtctgctgaggaacccgaagctgcagaagattaactatctgaaaaaattaaagattaattatctgctcatcggcattgtgactctcctgctggcggctgccctgtggccgtctctcccgtggatgggtaagccggaaaaccgcgtggccgggatcatggcgcgtggagaactgcgtatcagcaccattaattcgccaatgaccttcgcgaccattaacgatcggacctacggttttgattatgagctggcgcagcagtttgccgactacctcggcgtcgagctaaaagtcaccgtcaggcagaatatcagccagctgtttgatgacctcgatgaaggcaaagccgatatgctggctgccggcctggtctataattccgaacgggtgaagaactatcaggtcgggccaacctactactccgtttcgcaacagctggtttatcgcaaaggcagcctgcgtccgcgcagcctggcaaatcttaccgccgaccagttggcgattgctcccggacacgtggcgattaacgatcttcaggccctaaaaaagcaaaaataccccgatctcgactggcgcgtggacgagaaacgcgggacgacggcgctgatgcaggcggttattgatggcaaactcgactataccgttgctgattcggtcgccgtcagcctgttccagcgcgtccatccggagctggccgtcgcgcttgatatcagcgacgagcagccggtcacctggtttagcgaaaaaggtgaggacaactccctgccggcagcaatgctcgatttcttcaataatattaacgaggacggcacactggcgaggctggaggagaaataccttggtcacggcaacgattttgattatgtagacacccgtactttcctgcgcgccgtggaaagcgtgctcccggacctgcagccaatgtttgaaaaatatgcccgtcagatagactggcggcttctggcggctatctcatggcaggaatcgcactgggatccgcaggccacctccccgaccggcgttcgcggcatcatgatgctgacccgcaataccgctcaaagtctgggcttgaccgatcgtaccgacgccgagcaaagcctcgacggcggcatgcgttatttacaggatatgatgaataaagtgccggagtcggtcccgcaggacgaacgcatctggtttgcgctggcggcttacaatatgggctacgcgcatatgctcgatgcaatggcgctgacgaaaaagcagaaaggcaacccgaatagctgggccgatgtgaagcagcgtctgccgctgctaagccagaaaaactactacagccggctgaagtacggctttgcacgcggccacgaagcctacgcctacgtcgaaaatatccgtaaatatcatattagcctcgtgggctatctttctgaaaaagagagaaaggacgcccagatagcggcactaggcgagcactatccggcagtcatgccggaggagctgggtaaggaagagcagtacgctatgtcctttttcagcttccgcgcagaaacgctggtggacaacgcgaagctgaaaatccccggtacggggcattaa

SEQ ID NO: 253439 - DNA, 507 bp, Klebsiella pneumoniae
ttgtctgaccatgaattaaatgatgaatactggatgcgtcacgctctgacgctggcgaaacgcgcctgggaagagggcgaagtgccggtcggcgcggtactggtgcataatcatcaggtcatcggcgaaggctggaatcggccaatcggacgtcacgatccgaccgcgcacgccgaaattatggcgctgcgtcagggcgggctggtgcagcaaaactatcgtctgattgacgcaacgctgtacgttacccttgaaccctgcgtgatgtgcgccggagcgatggtccatagtcgcatctctcggctggtttttggcgccagagatgcgaaaaccggcgcagccgggtcgctcatcgacgtgctgcaccatccgggaatgaaccatcgggtcgagataacggaaggtattttggctgaggcctgttccggcatgctgagcgattttttccgctggcgacgcgaagagaaaaaagcgctgaagcgagctagccggcaagcggaaggttaa

SEQ ID NO: 253440 - DNA, 636 bp, Klebsiella pneumoniae; identical to SEQ ID NO: 174558

SEQ ID NO: 253441 - DNA, 849 bp, Klebsiella pneumoniae
atgaactgtttgacccgtattcgccagcgctacccaacgctggccgcaagcgataaaaaactggccgatttcattctggcccaaccggataaaacccgccaccttagttcacaacaactggcgggcgaagccggggtcagccagtcaagcgtagtcaaatttgcgcagaagatgggtttcaaaggttttccggcattaaagctggcgttaagcgaagccctggcaagcgcccctacgccacagtccgtgccggtacataatcagatccgcggcgacgatcctctccgtctggtaggcgaaaaactcattaaagataatatcgcggccatgcacgcttcgctggacgtcaacgccgaagagaagctgctcgaagccgtcacgctattgcgccacgcccgccgggtcattattaccggtatcggcgcgtcggggctggtggcaagaaacttcagctggaagctaatgaaaatcggcattaatgccgtgtcagaacaggatatgcatgcgctgctggcgacggtacaggcgatgtcgccggacgatctgctgttggctatttcctactccggtgaacgacgcgagatcaacatggcggctggtgaagcgttacgagtaggaagccagatcctggcgatcaccggatttaatcccaacgctcttcagcaacaggcgacgctgtgcctgtataccatagcggaagaacaggctacgcgcagcgccgcgatctcctctaccagcgcgcagatgatgctgaccgatcttctgtttatgggactggtgcagcaggatcttgaacgtgccccggagcggattcgccatagcgaagcgctggtgaaaaagctggtgtaa

SEQ ID NO: 253442 - DNA, 261 bp, Klebsiella pneumoniae
atggcactgttaatcaccaaaaaatgtatcaactgcgatatgtgcgagccggagtgcccgaatgaggcgatatccatgggtgatagcatttatgaaattaacagcgatcgctgcaccgaatgcgtcggccactatgatacgccaacctgccagaaggtatgcccgatcccaaataccattctgaaagatccggcccataacgagaatgaagagcagctgtgggataagtttgtcctgctgcaccacgcggacaaactgtga

SEQ ID NO: 253443 - DNA, 381 bp, Klebsiella pneumoniae; identical to SEQ ID NO: 174552

SEQ ID NO: 253444 - DNA, 732 bp, Klebsiella pneumoniae
atggctgaattactgttaggggtcaacattgaccacatagcgacattacgcaacgctcgcggtaccgcttatccggatccggtacaggcggcctttatcgccgagcaggcaggcgctgatggtattaccgttcatctgcgcgaagatcgccgccatattaccgatcgcgacgtgcgtattttgcgccagactctggatacccgcatgaaccttgagatggcggtgacggaagagatgctgaaaaatgcctgtgagactcaaccgcatttctgctgcctggtaccggaaaaacgtcaggaagtgacaaccgaaggcggactggatgtggcggggcagctcgataaaatgcgcgatgcctgtaagcgtctggccgatgccggtatcctggtctccctgtttattgatgctgatcacgcgcaaattaaggccgcagcggacgtcggcgcgccttatatcgaaattcacaccggctgctatgctgatgcgcaaacggacgccggacaggcaaaagagctggaacgtatcgccaaagcggcaacctatgccgcgagcctggggctgaaggttaacgccggtcacggcctgacgtaccataacgttaaggctattgccgcgctgccggaaatgcacgagctgaacatcggccatgcgattattggccgggcggtaatgagcggcctgaaggaagcggttgcggaaatgaagcgtctgatgcaggaagctcgctgctga

SEQ ID NO: 253445 - DNA, 732 bp, Klebsiella pneumoniae
atgatggaaggctggcaacgcgctttcgtactgcatagtcgtccctggagcgaaaccagcctgatgctggacgtcttcacggaagagtccggtcgcgtgcgccttgttgcaaaaggcgcacgttccaaacgctccaacctcaaaggcgctcttcagccttttacccccttactgctccgctttggcgggcgcggcgaagttaaaacgctgcgcagcgcggaagccgtctcgctggcgctccctctcagcggtatcacgctctacagtggactttacgtcaacgaactgctctctcgcgtgcttgagcacgaaacgcgcttctcggaactctttttcgattatctgcactgtatccagtcgctggctggcgctacaggttcaccggaaccggcgcttcggcggtttgagctggcgctgcttgggcatctgggatatggcgttgatttcctgcactgcgccggcagcggagaagcggttgacgatacgatgacctaccgctaccgtgaagagaaaggctttatcgccagcgtggttattgataacaacacctttaccgggcaccatctgaaggcgctggccagccgtgaatttccggacagcgatgcgctgcgcgcggcaaagcgtttcacccgaatcgccctgaagccctatcttggtgggaagccgttaaaaagtcgcgagctgtttcgtcagtttttgcccgcacgggccgataaaacaaataacgattaa

SEQ ID NO: 253446 - DNA, 906 bp, Klebsiella pneumoniae
atgagcgaagaaaagaactactgcggatttattgccatcgttggtcgtccaaacgtgggcaaatccacattgctgaacaagctgctcgggcagaagatctcgatcacttcccgaaaagcgcagaccacgcgtcaccgcatcgttggtatccatactgaaggcccgtatcaggcgatctacgtcgatacccccggtctgcatatggaagaaaaacgcgcgattaaccgcctgatgaacaaggcggcaagcagctctattggcgacgttgagctggttatcttcgtggttgaagggacccgctggacgccggacgacgagatggtgctcaacaaactgcgcgacggtaaagcgccggtgattctggcggtcaacaaagtcgacaacgtccaggaaaaagcggatcttctgccacacctgcagttcctcggcagtcagatgaacttcctcgatatcgtaccgatttctgcggaaacggggctgaatgttgatacgatcgccggtatcgtgcgcaagcatttgccggaggcgattcaccacttcccggaagattacatcactgaccgttcgcagcgctttatggcttccgagatcattcgtgaaaagctgatgcgtttccttggcgcagaactgccatattccgtcaccgtcgaaattgagcgttttgtgaccaatgagcgcggcggttacgacattaacggcctgattctggttgagcgcgaagggcagaagaagatggtgattggtaacaaaggggccaaaatcaaaaccatcggtatcgaagcgcgtaaagacatgcaggatatgtttgaagcgccggttcaccttgagctttgggtgaaagtgaaatccggctgggctgatgacgaacgcgcgctgcgcagtctcggttacggcgacgatctttaa

SEQ ID NO: 253447 - DNA, 1383 bp, Klebsiella pneumoniae
atggctactggaaaaattgtccaggtaatcggcgccgtggtcgacgtcgaattccctcaggatgccgtaccgcgcgtgtacgaggctcttgaggtacaaaatggtagtgagaatctggtgctggaagttcagcagcagctcggcggcggtattgttcgtaccatcgccatgggttcttccgacggtctgcgtcgcggtctggaagtcaaagacctcgagcatccgatcgaagtcccggtaggtaaagcaacgctgggtcgtatcatgaacgtactgggccaaccggtagacatgaaaggcgacatcggcgaagaagagcgttgggcgattcaccgcgcagcgccttcctacgaagagttgtcaaactctcaggaactgctggaaaccggcatcaaagttatcgacctgatgtgtccgtttgcgaagggcggtaaagttggtctgttcggtggtgcgggtgtaggtaaaaccgtaaacatgatggagctgatccgtaacatcgcgattgagcactccggttactccgtgtttgcgggcgtaggtgaacgtactcgtgagggtaacgacttctaccacgaaatgaccgactccaacgttatcgataaagtatccctggtgtatggccagatgaacgagccgccgggaaaccgtctgcgcgttgcgctgaccggcctgaccatggctgagaagttccgtgacgaaggtcgtgacgttctgctgtttgtcgataacatctatcgttacaccctggccggtactgaagtatccgcactgctgggtcgtatgccttcagcggtaggttaccagccgactctggcggaagagatgggcgttctgcaggaacgtatcacctccaccaaaacgggttctatcacttccgtacaggcggtatacgtacctgcggatgacttgactgacccgtctccagccaccacctttgcgcaccttgacgcaaccgtggtactgagccgtcagatcgcttctctgggtatttacccggcagttgacccgctggactccaccagccgtcagctggatccgctggttgttggtcaggagcactacgacaccgctcgtggcgttcagtccatcctgcagcgttatcaggaactgaaagacattatcgccatcctgggtatggatgaactgtctgaagaagataaactggtggtagctcgcgcacgtaagattcagcgcttcctgtcccagccgttcttcgtggcagaagtatttaccggttctccgggcaaatacgtctccctgaaagacaccatccgtggctttaaaggcatcatggaaggcgaatacgatcacctgccggagcaggcgttctacatggtcggttctatcgacgaagccgtggaaaaagccaaaaaactttaa

SEQ ID NO: 253448 - DNA, 2172 bp, Klebsiella pneumoniae
atgaataacaaaatacctttggcattaaccctttgcagtacgatgatcgcgctaccgctgcaggccaacgaaggccctcagtggcgcgctatcgccttcgggcaatccacggacagcaatttttcctcgaatgttctgcctgaaaagattggcgtcaatgatgtcactatcgccggtaaaaaactgacgccgcaggacgtcgccgatctcagccaacccattactattgaaagccggggaggtaaaattgccaactcccacgacggactgaccttcttttatacccaacttccgaccagtcagaattttatcctgcaggcaacggtgaccgtcaatcagtttggcccggaaaatggcgctcgcccggcagcacaggaaggggcaggactgctggtgcgcgatgtaataggagttccgcgtcaacagccgctgaaggtcggttatgaagagttcccggcggcgtccaatatggtgatgaacgccattatgacgcaggataaaaaagatcactcgcatattaagctgcaggctatcagccgggaagggataacccagccgtggggcaatgcgggggcatcaataaagcgtcagagttataaagaaaaaatcgatatacagcaaacgccgacgttccagctcaggctggaacgcaccaacgacgggtttattacttcctgggcagcgacgggcagtgaaaaatgggtaagccagcaggttcctcacgccgatctgattgctcaacaggataaagaacattactacgtcggtttttttgcttctcgtaacgctaaaatcaccgtcagcaacgcctcgctcaccacgtcagcggcaaatactgttccctctgcgccgtacatcgctaaaagctggccgccggtcatgcaaattgcctcgggaacaaaaagccaggacaaaaagtacatcctacaggcgcgtaccaatagtgacgggcgcatcaccgttcgccaggatgaagtggtgatcgggcaggataaagccgtgaaagccggtgagatgtttacccagcctgccgttctgaaagataaaagcacgttcgaagttacctttacgccgaccaccagtgcaaaaacgctgacccagacgctgacggtggaacagagtgccaatatcacaggcaatacgctctatgctgcacctgaggggcaagcggaggccaaaggcacggcagagtcgccgttggatttagcctccgccgtcgagctcgtacccgctggcggggaaattatattagccgccggagactacccgcaaaccgtcatccctctgagcgccagcggcctgaaagacaaaaccaagaccctgaaagccaccggtaaagcggtaatacacgggctactgctggatgccagctactggcatatcaatggagtagagattacggataagagcctgcgcatacagggtagccataacctgattgagaacgtcaccgcctatcgtaacgatgataccggcattcaaatttcctcaccggcggatgttggacgcccgctgtgggccagctataaccgggtggtgaattcagaatcctttagcaacgaagatccgggaaaaataaacgccgatggcttcgccgtaaaaatgcgcgtaggagaggggaaccggctggaaggctgttactcgcacgataacatcgacgacggtttcgatctgtttaataagattgaggacggtgcaaacggcgttgtggtgatcgagaactctattgcccgcaataataccagcaacggttttaagctcggcggggaagggcagccggttgctcatgaggtacgtaacagcatcgccatcgggaaccatctcgacggtttcaccgacaacttcaatcccggcaagctggtggtggtcaacaacgtcgcggtggataaccagcgctttaactacctgttccgcccaagtccatacggcgcgccggaaacccagggcacgttcagcgagaacctttccttacgtagccagccggggaaatatgacgatgccgttgtcgggaatatcgacgatagcaactactttatccacggtggtaaaagcatcaacgctcaaggaaaaagcattaacagcgccgattaccagactctggcgctgcctgacccgctaatacgtgaggctgacggcagcttcaataccggtaatttcctcagccgtaattaa

SEQ ID NO: 253449 - DNA, 1371 bp, Klebsiella pneumoniae
atgtcaaacagtccgatgagcgtggtgattcttgccgcaggcaagggtacccgcatgtattccgatcttcccaaggtgctgcattcgctggccggcaagccaatggttcagcatgtcattgatacggctaaagaattaggtgcttccgctgtccatttggtctacgggcacggcggcgatctccttcgccagacgctgcacgaagataagctaaattggatcttacaggctgaacagctgggtaccggccacgccatgcagcaggcggcgccgttcttcaaagatgatgaagatatcctcatgctgtacggcgatgtaccgttgatttccgtcgaaacattaaagcgcctgcgagaagcgaaaccgcagggcggcatcggtttgctgacggtgaagctggacgatccgaccggctatggccgcattacgcgccataacggtgcggtaaccggcattgttgagcataaagacgccagcgaagagcagcgtcggattcaggaaattaataccggaattctggtcgccaacggggcggatctcaaacgctggctggctaagctgaccaataacaacgtgcagggcgaatattacattaccgatattatcgccatggcctatgccgaaggtcgcgaaatcgcggcagtccatcctcagcgcctaagcgaagtggaaggcgtgaataaccggctgcagctatcccgcctggaacgcgtctggcagtctgaaaaggcggaggcacttctgctcgcaggcgtaatgcttcgcgatccggcgcgttttgacctgcgcggcgtgctgaaacacgggcgcgatgtcgaaatagatactaacgttattctcgaggggcatgttgttctgggcaatcgggtgaagatcggctccggctgcgtgatcaagaacagtaccattggcgatgactgcgagatcagtccttataccgtagtggaagatgctcatcttgaggccgcctgtactatcgggccattcgcacggctgcgccctggcgcggagctcctggaaggcgcgcacgtcggcaactttgtcgaaattaaaaaggcgcgtctggggagaggcacgaaagccgggcatctttcctacctcggagacgctgagattggcgataacgtcaatatcggcgccggcaccatcacctgtaactatgatggtgcaaataaacataaaacggtgatcggcgatgacgtgtttgttggttcggacagccagctggtcgctcccgtgaccatcggtaagggagtcaccattgctgcaggaacgacggtaacgcgcaacgttgccgacgatgagttagttttaagccgcgtgccgcaggttcataaacagggctggcagcgcccggtgaagaagaagtaa

SEQ ID NO: 253450 - DNA, 1830 bp, Klebsiella pneumoniae
atgtgtggaattgttggcgcagtcgcgcagcgtgatattgctgaaatccttctcgaaggtttacgtcgtctggaataccgcggttatgactccgccggtctggcagtcgtcgataacgaaggtcatatgaaccgcgttcgtcgccttgggaaagtccagatgctggcccaggcgttggaggaacatccgttgcacggtgggacgggaattgcccatacccgctgggcgacgcacggcgaaccctctgaaggcaacgcgcatccgcatgtttctgaccatattgtggtcgtgcataacggaattatcgagaaccatgagccgctgcgcgagctgttgcagtcgcggggctacattttcgcctccgagactgacaccgaagttattgcgcatctggttcactgggagctggaacaaggcggcaccctgcgtgatgctgttctgcggactatcccgcagcttcgcggcgcttacggtaccgtgattatggattcccgcgatccgggtacgctgctggccgctcgttcgggcagcccgctggttattggcctggggatgggagaaaacttcattgcctccgatcagctggcgctcctgccggttacccgccgctttatcttcctcgaagagggggatattgcggaagtcacccgtcgttcggtcactatctttgataaatccggcgccgaagtgctgcgcccggatattgaatccagtctgcagtatgatgcaggcgataaaggtatctatcgccactatatgcagaaagagatctacgagcagccgaatgcgatcaaaaataccctctccgggcgcattagccacggtgaagttgatttaagcgaactgggcccgcaggctaacgagctgctgtctcaggttgagcatattcagatcatcgcctgcggtacctcctacaactcaggaatggtttcccgttactggtttgaatcgctggccggtgtgccgtgtgatgtcgaaatcgcttctgagttccgctatcgtaaatcggccgtgcgtcgcaatagcctgatgatcaccctctcgcagtccggcgaaacggcggacaccctcgcaggtctgcgcctgtctaaagagctgggctatctgggctcgctggcgatttgtaacgtgccaggttcatcactggtgcgggagtccgatctggcgatgatgaccaatgccgggacggaaatcggcgtcgcttcgactaaagccttcactacgcaattgaccgttctgctgatgctggtggcgaaactggcgcgtcttaagggccaggatgccgcgattgaacacgatatcgtgcatggcctgcaggcgctgccgaaccgcattgagcaggtgctctcgcaggacaagcgcattgaggcgctggctgagaatttctctgataaacatcacgcgctgttcctcggacgtggcgatcagtaccccattgcccttgaaggggcgctgaagctgaaagagatctcctatattcacgcggaagcctatgccgctggcgagctgaagcacggtccgctggcgctgattgatgcagaaatgccggtggttgtggtcgcgccgaacaacgaactgctggaaaagctgaaatctaacattgaagaggttcgcgcccgcggcggccagctgtacgtctttgctgacggcgatgcgggtttcaccagcagcgataatatgcacatcattgagatgccgcacgttgaagaggtgatcgcgccaatcttctatactgtaccgctgcagctgctggcttatcacgtcgcgctgatcaaaggaactgacgtcgatcagccgcgtaacctggcgaaatcggtgaccgtggaataa

SEQ ID NO: 253451 - DNA, 1041 bp, Klebsiella pneumoniae
atgaacgttatgcgtaccaccgtcgcaacagttgtcgccgcgaccttatcgatgagtgctttctctgtttttgcagcagcaagcctgactggcgctggcgcaactttccccgcgccggtgtatgccaaatgggcagatacctataacaaggaaacgggtaataaaatcaattaccagggtatcggctcctctggcggcgtaaaacaaattacggccaacaccgtagatttcggtgcctctgatgcccctctggctgacgacaaactggctcaggaaggtctgttccagttcccgaccgtgatcggcggcgtggtgctggcgatcaacctgcctggcgtgaaatcaggcgagctggtgcttgacggtaaaacgctgggtgatatctacctgggcaaaatcaaaaaatgggatgacgaagcgattgctaagctcaacccaggtatgaagctgccttctcagaacatcgcggttgttcgccgtgcggatggctccggcacctccttcgttttcaccagctacctggcgaaggtgaacgaagagtggaaatctaaagtcggcgcgggttcaaccgttaactggccgaccgggctgggcggtaaaggcaacgacggcatcgccgcgttcgttcagcgtctgccgggctcaatcggctacgtagaatatgcctacgcgaaacagaacaacctcgcttataccaaactgctgtctgccgatggcaagccggtgagcccgacggaagacaacttcgctaacgctgcgaaagaaatcgactggagcaaatcctttgcacaggatctgactaaccagaaaggtgacaatgcctggccgatcacttctaccaccttcatcctggttcacaaggcttccaacaagccagagcaaaccgctgaagtgctgaagttcttcgactgggcgtataagaacggcggtaaagaagctaatgcgctggattatgccaccctgccggatagcgtggttgagcaagttcgcgcagcatggaagaccaacgtaaaggacagcagcggtcaagcgctgtactaa

SEQ ID NO: 253452 - DNA, 960 bp, Klebsiella pneumoniae
atggctgcaaccaagccggcatttaaccctccggggaaaaagggtgacataattttcagcgtgctggtaaaactggcggcgctgattgtgctattgatgcttggcggcatcatcgtctcccttatcatctcgtcctggccaagcattgagaaatttggctttgcctttctgtggaccaaagagtgggatgcgccaaaccagattttcggcgccctggtgcccatttacgggacgctggtcacctcatttatcgcgctgctgatcgccgtaccggtgagcttcggtatcgcgctgttcctgacggaactttcacccgcctggctgaagcgcccgctgggtatcgctattgaactgctggccgccatccccagtatcgtttacggcatgtggggtctgtttattttcgccccgctgtttgcgacttactttcaggagccggttggcaacgttttgtcgaccattccgttcgttggcgcgctctttgcgggtccggcgtttggtatcggcattctggcggccggcgtcattctggccatcatgatcattccttacatcgctgccgttatgcgtgacgtttttgaacagacgccggtaatgatgaaagagtccgcatacggtatcggttgtacaacatgggaagttatctggcgtatcgttctgccctttaccaaaaacggcgtgattggcggggtgatgctcggactggggcgcgcgctgggggaaaccatggcggtaacctttattatcggcaacacctaccagctcgatagcgcttcgctgtatatgccaggtaacagcatcacctccgcgctggcgaatgagtttgccgaagcggaaaccggactgcacgttgcagccttgatggaactgggtctgattctgttcgttatcacctttattgttctggccgcatcaaagtttatgatcatgcgcctggctaagaacgagggggcacgctaa

SEQ ID NO: 253453 - DNA, 891 bp, Klebsiella pneumoniae
atggcgacgattgaattacaaaccaccgcagagctggcggaatcccgtcgcaaaatgcaggcgaaacgccgcatgaaaaaccgcctcgccctgacgctatcgatggcgaccatggcgtttggcctgttctggcttatctggatcctgatgtccaccgtcactcgcggcatcgacggcatgagcctggcgctgtttaccgaaatgacgccgccgcctaatacggcgggcggcggtctggcgaacgccctggcaggtagcggattgttgatcctgtggtcgacggttatcggtacccctctgggcattctggcggggatttatctggcggaatatggccgtaaatcctggctggctgaagtcattcgttttattaacgacatcctgctttccgcgccgtcgattgtggtcggtctgtttgtatacaccatcgtcgttgcgcaaatgcagcacttttccggctgggcgggcgtgattgcgctggcgctgctgcaggtgcctatcgtgattcgtactactgaaaatatgctgaagctggtgccggatagcctgcgcgaagcggcctatgcgctcggtacgccaaagtggcgaatgatttctgcgatcaccctgaaagcatcggtctccggcattatgaccggtatcctgctggccattgcccgtatcgccggggaaacggcgccgctgctgttcaccgcgctctccaatcagttctggagcaccgacatgatgcagccgatcgctaacctgccggtaacgattttcaaatttgccatgagtccctttgcggagtggcagcaactggcatgggccggggtattgattatcaccctgtgcgtattgctgctgaacattctggcgcgcgttattttcgccaagaagaaacacggttaa

SEQ ID NO: 253454 - DNA, 774 bp, Klebsiella pneumoniae
atgagtatggtgaatacagctccgggtaagatttcagttcgtaacctgaacttctactacggaaaattccatgccctgaaaaacatcaacctggatatcacaaaaaaccaggtgacggcgtttatcggtccgtcaggctgcggtaaatccacgctgctgcgtacgttcaacaaaatgtttgagctgtacccggagcagcgtgcagaaggtgaaattctgctggatggcgataatattctgaccaatacccaggatatcgcgctgctgcgtgccaaagtcggcatggtattccagaagccgacgccgttcccgatgtctatctatgacaatatcgcctttggcgtgcgtctgttcgagaaactctcccgcgcggatatggacgagcgagtgcagtgggctttgaccaaagccgcattatggaatgaaaccaaagataaactgcatcagagcggatattctctctccggcggtcagcagcagcgtctgtgtatcgcgcgcggtatcgctattcgtccggaagtgctgctgctggatgagccctgttcggcgctggacccgatctctaccgggcgtattgaagagctgatcaccgaactgaaacaggattacaccgtcgttatcgtgacccacaacatgcagcaggccgcgcgttgctccgaccatacggcgtttatgtatcttggcgagctgattgaattcagcaacacggacgatctgtttaccaaacccgctaagaagcaaactgaagattatattactggccgctacggttga

SEQ ID NO: 253455 - DNA, 726 bp, Klebsiella pneumoniae
atggataacctaaatcttaataaacatatttccggccagttcaatgccgaactggagtacatccgcacccaggtcatgaccatgggtgggctggtggagcagcagctttctgatgcgatcaccgcgatgcataaccaggacagcgaactggcaaagcgcgttatcgacggcgataagcaggtcaatatgatggaagtggcgatcgatgaagcctgcgtgcgcatcatcgccaagcgtcagccgaccgccagcgacctgcgcctggtgatggcgattatcaaaaccatcgccgaactggaacgtatcggtgacgttgcggataaaatctgccgcacagcgctggaaaaattctcccagcagcaccagccgctgctggtgagtctggaatcgctggggcgccataccgtgcagatgctgcacgatgtgctggatgcttttgcccgtatggaccttgatgaagcggtgcggatttatcgtgaagataagaaagtcgaccaggaatatgaaggcatcgtgcgccagttgatgacctatatgatggaagattcgcgcactattcccagcgtcctgaccgcgctgttctgcgcccgctctattgagcgtattggcgaccgctgccagaatatctgcgaatatattttctacttcgttaaaggtcaggatttccgtcacgttggcggcgacgaactggataaactgctggcgggaaaagatcctaaagagtaa

SEQ ID NO: 253456 - DNA, 1647 bp, Klebsiella pneumoniae
atgtttaaaaaaaatctgattacatctgccatacttattatggcaccgttcgcttattcgacacatgctctggcggaatcgctaacggtcgaacagcgccttgagcttctggaaaaggcgcttaaagatacgcagtccgaacttaaaaaatataaagatgaagagaaagccagaaatcaaatctggatcgccaatacgcagtccggtaccaacacacaacgtgcttctacgcaggttgccagcgctcccgcaccggccggcggcgcagaaaaaccagccgcggttctggtgaaaaacgaacagcccgcggcgaatggcgagtccatttatagctcgatgacaatgaaggatttcagcaagtttgtgaaggatgaaattggcttcagctataacggctattaccgttccggctgggggaccgcatctcatggttcaccaaagtcctgggcgattggctcgctcggtcgtttcggtaatgaatactctggctggtttgatttacagcttaagcagcgggtctatcaggaagacaataagcgggttgatgccatcgtgatgcttgacggtaacgtcgggcagcagtattcctccggctggtttggcgataacgctggcggcgagaactatatgcagttctctgatatgtacgtaaataccaaaggtttcctgccattcgcaccggaggcggatttctgggtgggtaagcacggcgcgccgaaaattgaaatccagatgctggactggaaaacgcagagaaccgatgccgcagcaggcattggtcttgaaaactggaaagtgggcgcgggtaaatttgatatcgcgctggtgcgcgaggacgtcgatgactacaaccgcacgttgaccaaaagccagcaaattaacaccaatactattgatattcgttataaagagatccctctttgggataaagcatcattgatggtcagcggtcgttatgtcgcggccaatcagagctcatctgagaaatataatgaaggtaataatggatattatgaatggaaagatacctggatggcgggaacgtcgttaacgcagaagtttgataacggcggatttaacgaattttccttcctgctggcaaataattccatcgccagcagcttctcgcgctacgcgggatccagcccgtataccacctttaacggcagatactatggcgatcacaccaacggcaccgccgttcgtttgacctctcagggagaaacctatttgagtgatgacatcattctggcgaacgccatcgtttactcttttgggaatgatgtctacagctacgagaccggcgcgcactctgattttgagtctattcgcgccgtcgtgcgcccggcctggatttgggataaatataaccagaccggcgttgaactgggctatttcaagcagcagaacaaagatatcaccggcaagaaatataacgaatccggctacaaaaccaccctgttccatacctttaaagtgaataccagtatgctgacctcccgcccggaaattcgtttctatgcgacttatattaaagcgcaggatatcgacctggataaggcagccaacagcaatactcgcagcatttttgaagacggtaagaatgaccagtttgccgtaggcgcccaggctgaaatctggtggtaa

SEQ ID NO: 253457 - DNA, 723 bp, Klebsiella pneumoniae
atgaaattaatcgtgacggaagattatgcggagatgagcctggtcgccagccatcacgttctgggctatatcaccgcgccgcgcagggtgaatctggcggtgacggcaggcagtacgccgaaaaaaatgtatgaacatctgacggccgcgattaaaggtaaaccgttctattctcaagtccattattacaactttgacgagatcccattccgtggacaggatcgtgaaggcgtgaccctttccaatttgcgcaatctgtttttcactcccgctcagatcccggaagagaacattcacaagctcagccatgaaaattttatgcatcatgaccagcggttacaggaagaagggggcctcgatctgatggtgatgggcctcggcgccgacggccatttttgcggtaacttgccgaataccacgcgcttccacgatgcgacggtggaagtccctatcgccggagatatggtggggcttgtcgctcacggcgaaatgggcggcgacttctctgcggtgccggatagctacgtcacgatggggccgaaaagcgttatggcggcgaaaaacctgctgcttatcgtcagcggcgccgcaaaggcgcgggcgctacaagaggtgattgaaggcgaagtcagcgagcgggttccggcatcagtgctgaaactacatccatccctggtgatagtggctgataaagcggcggctgcggaattgagacaaccgtaa

SEQ ID NO: 253458 - DNA, 666 bp, Klebsiella pneumoniae
atgacccaaccagaagcagtatttttcgactgtgacggcacgctggtcgacagcgaggtgatctgctcccgcgcctacgttcacatgttcagggaattcggcattacgctggatttagaggagatttttaagcgcttcaagggcgtaaagctgtacgagattatcgacaccattaacgcggagtacggcgttaatctggataaggcgacccttgagccggtgtaccgcgatgaagtcgcccgcctgtttgataccgaactggaagtcatctctggcgcccaggcgctactggacgcggtcagcgttccgatgtgcgtggtctccaacggtccggtgagcaaaatgcagcactctctgggtaaaaccggaatgctgcaccattttcccgagcgtctttacagcggctatgatattcagcgctggaagcccgatccggccctgatgctgcatgccgcaaaagcgatgaacgttaacgtcgaaaactgcattctggttgatgattccagcgcaggcgcgcagtcagggattgccgccggaatggaggtgttctacttctgcgccgatccgcataataagccgatcgaccatccgaaggtgacgacctttacccgcctggaagagctacctgaactatggcaagcgcgcggctggaatataacgcgataa

SEQ ID NO: 253459 - DNA, 1338 bp, Klebsiella pneumoniae
atgagtcaacaacaaaccagccagtcttctggccagggtctgctggagcgcgtgttcaaactgcgtgaacacggcacgacggcacgcaccgaagcgattgcaggtttcaccacctttctgacgatggtgtacatcgttttcgttaacccacagatcctcggcgtggcgggtatggataccagcgccgttttcgtcacaacctgtctgattgctgcattcggtagcatcatgatggggctgttcgctaaccttccggtggccctggcgccggcgatggggctaaacgccttctttgcttttgtcgtggtacaggcgatgggcttgccctggcaggtcgggatgggcgcgattttctggggcgccgttggcctgctcctgctgacgattttccgcgtgcgctactggatgattgcgaatattccggttagcctgcgcattggtatcaccagcggtatcggcctgtttatcggtatgatgggcctgaaaaacgcgggcgttatcgtcgccaacccggaaaccctggtgagtatcggcaacctgacgtctcacagcgtgctgctgggtattcttggcttctttattattgctattctggcttcccgcaacatccacgcggcggtgctggtttctatcgtggtcaccactttgctgggctggatgctgggtgacgttcactacagcggcatcgtttccatgccgccgagcgtaacgacggtcattggccatgttgacctggcaggttcgctgaatcttggcctggcaggagtgatcttctcgtttatgctggtgaacctgttcgactcctccggcaccctgatcggcgtaaccgacaaggccgggctggccgatgctaagggcaagttcccgcgtatgaagcaggcgctgtttgtcgatagcgtatcctccgttgcggggtcttttatcggtacctcttccgtcactgcctatattgaatcttcctctggggtttccgtgggcggccgtaccggcttaaccgccgtggtggtgggcattttgttcctgctggtgatcttcctgtcgccgctggcgggcatggtccctccttatgccgcagccggcgcgctgatttacgttggcgtcctgatgacgtccagcctggcgcgcgtgaagtgggatgatttaaccgaatccgttcctgcgtttattaccgccgtgatgatgccgtttagcttctccattacagaaggtattgccttaggctttatctcttattgcgtgatgaagattggcaccggccggctgcgcgatctcagcccgtgcgttattgtagtttcactgctgttcgtgctgaagattgtgtttattgacgcgaaataa

SEQ ID NO: 253460 - DNA, 567 bp, Klebsiella pneumoniae
atgtctgatacgttgaaagttgttacgttactcggaagtctgcgcaaaggctcttttaatgccatggtcgcacgtaccctgcccggcatcgcgcccgcgggtatggaagtttccgcgttaccgtccattggcgatattcctctctatgatgccgacgtgcagcaggaagagggtttcccacaaagcgttcaggatatcgcgcagcaaattcgtgaggcggatggcgtggttatcgttacgccggaatataactactcggtgcccggcggcctgaaaaacgccatcgactggctgtctcgtctcccggaacaaccgctatccggcaagccggttctgatccagaccagttctatgggggccattggcggcgcgcgctgccagtatcatctgcgtcagattctggtattcctcgacgcgatggtgatgaataagcccgagtttatgggcggcgtgattcagaataaagtggatccgcaagaggggaaagttgtcgatcagggcacgctcgatcatctgaccgggcagcttagcgcttttgccgagtatattcagcgagttaaggcctga

SEQ ID NO: 253461 - DNA, 738 bp, Klebsiella pneumoniae
atggcaacgcattttgcaagagggatactcaacacccgggagccgctatccacacgcctgtcagcggcctgtcatcaatccgccagacgcctgcctgagtaccgacaaagccgatatcgcgcatcccggtcactcctcgcagaactcctctttatgttgtacggcatcagtgaactccccgaaattattgacgaagagaatggaaaaccggcttttcgcgacgaacatctcccgcgtttctccatctcctatgccggaaatatcgtcggcgttgccttaaccaccgaaggcgattgcggcctggatatggaattgccgcacgcttcccgcgcgttacatgcatcgcacgatacggagcgttatgtttttaacagtaatgagcgaatatggattagcaatcagcacgatcctgacgaagcgcgcgcgcagcttgatgcgctacgcaaaagcgtgatgaagctgaccggcgaaaccgccttgaacctgcagcttctcccgggctccggacggttgcggacaagcgggacgcagtcaatcgaagccgtctgcgacgccgaaacggtgctggtctggtctattgccgccagcccggatattggccagctaaaagtctgggaatataacgcgaaggagggctggcgcagcctgcccgacgcacaggcccgtgctaaagaaccatccgcccggctgatgcgcttcaccagtttaccggtagaaaaagccttctccctcaactga

SEQ ID NO: 253462 - DNA, 960 bp, Klebsiella pneumoniae
atgaagaaacccctgtcgagtctcgatcttaatctgctgctctgcctgcagctcttaactcaggagctcagcgtcacccgcacggcgaaacggatgaacgtctcgccgtcagcggtaagcaaatcgctggccaagctgcgcgcctggtttgacgatccgctgtttgtcaaaacgcctctggggctatcgcccacgccgctgatgagcagtatggagcaggatctggcggactggatgcagatgggcaatcagatccttgataagcctcatcacactatgcccagcgggctaaagtttgagctggcggcagagtcgccgctgctgatgatcctcctcaatacgctttcgcagcggatttaccagcgctatcctcaggcgctgatccgcctgcgtaactgggattacgattcgctggatgcgattattcgcggtgaagtcgatatcggattttgcggcagggaaacacatcctcgctcccgggagcagcttagcctgctgccctggtatattgattttgaaatcctgtttaccgatctcccgcaggtatggctgcgcgccgatcatcccgcgctgagcgaagagtggaatctggacacgttcttgcgctatccgcacattaatatttgctgggaacaaagcgacacctgggcgctggacgatgtcctgcaggatctgggacataaacgcaccgtggcgctgaccgttccgggttttgagcagtcgttatttatggccgcccagcccaatcatacgatgctgtccaccgctccgcgttactgccagcgttacaatcagcagcaccacctgccgctggtttgcttacctctgccgctggaaccgtcgcagctggagaaaatacgcgtcccctttacccttctttggcataagcgcaacagttataacccgaagatcgtctggctacgtgaaacgctcaggcagctctacgccgaaccgctatag

SEQ ID NO: 253463 - DNA, 1185 bp, Klebsiella pneumoniae
atggcacgctttcttatctgcagttttgcgctggttctgctttatccatccggcatcgatatgtatctggtcggcctgccgcgcattgcgcaggatctgggggccagtgaagcgcagctgcacatcgccttttcagtttacctggcaggaatggccgcggcgatgctgtttgctggccgtatagccgacaaatccggccggaagccggtggcgattttcggcgccgtcgttttcctgctggcctctcttctttgctcgcaggcgcagggcagcgcccatttcctggccgggcgttttattcagggtattggcgcgggcagctgctacgtggtcgcctttgcggtattgcgcgataccctggacgatcgccgccgggcaaaagtgctttctctccttaatggtattacctgcattattccggttctggccccggtaatcggtcatctgattatgctgaaattcccctggcagaccctgttctataccatgagcggcatgggggctctggtgggattgctgtcgatatttgtgttgcgggaaacgcgaccaacatccgttccgcacgcggcaaagcagcaaaatatcgtcccggagtcgctgctcaatcgctttttcctcagccgaatcgtgatgactactctgagcgtgacggctattctgacctacgttaacgtctcaccggtgctgatgatggaggtgatgggcttcgatcgcggtacctattccatgactatggcgcttatggcgctcgtgagcatggtggtttcgttttcgacgccgtttgctctgacgctatttaaaccccgcacgctcatgctgacctcacaggcgctgttctttagcgcgggcgtgctgctgagtctgtccaccagccagacggtgacgatgctggggctgggactgatttgcgcagggttctccgcaggctttggcgtggcgatgagtcaggccctcgggccattcaccctgcgcgctggcgtagcgagttcagttttagggatagctcaggtttgcggctcttctctgtggatttggctggcggccatcatcggactcagcgcgatgaatatgctgatcgggatacttattgcctgtagcatagtgagcattgttctgattatggtcgcctctccggcgcgggccgcgcaacgctatgaagaaacccctgtcgagtctcgatcttaa

SEQ ID NO: 253464 - DNA, 465 bp, Klebsiella pneumoniae
atgattatcggcgatatccatcacccggaatgcgcaggactatcacccgttctgcttgaggctgtgaggctggccgttaaggcccaaccgcagcagtgtgaacccgggcgttatgatttacagggcgatgatatttatatgaacgtcatgcgcttcgctacgcagccggcggaaagtaaaaaatcggagctgcacaaaaaatttattgatattcagatcctgctggaaggcgaagaaacaatccattatggcatggtcgatagcgcccgggagtgcgaaacatggcaccacgaggaggactaccggctatgttcaaccattgccgaccagcagcaggtagtgctgaagcccggtatgtttgccattttcttgccgggagagccgcataagccgggcgtgcagggcgcagagagcgttgagataaaaaaagcggtgattaaagttaatcacgcgctgctggcctga

SEQ ID NO: 253465 - DNA, 897 bp, Klebsiella pneumoniae
  misc_feature (93)..(102): n is a, c, g, or t
atgaccacgctggcaattgatatcggcggcaccaagcttgccgccgcactggtcgatgctcagcatcgcgtgctggaaaaacagacgctgccnnnnnnnnnnatgtgtataagagacagagccagcaaaacgccggcggcgctaacggaagcgttacgcgagctggttgcgcctttcgcaggccggtcccggcaggtagcggtcgcctccacgggcattattagtcacggcgttctgacggcgttaaacccggataacctgggcgggctggcgcagtttcctcttagggacacgctggcgcagctaacggggctgccgtgcctggcggtgaacgatgcgcaggcggcagcctgggccgaatatcacgctctggctgccgatgcgagcgagatggtcttcatcaccatctctaccggcgtgggcggcggtatcgtctgccacggtaagctcttgtccggcaaggaggggctggccggacatatcggccatacgctggctgacccgcacggcccgcgctgcggctgcgggcgtattggctgcgtggaggctattgcatccggaagggggatcgccgcgctggcaaccgacgatctgcagggaatgacggccaaaaccatttttgctctttcgcagagcggccattcccaggcgacatcgttagttcaccgttcggcgcaaaccatcgcccggctgattgccgacatgaaggccagctataactgccagtatgccgtcctgggcggcagcatagggctggcgcccggctatattcccctggttgaaagatatctggcgcaggagcctgcggtatatcacacccctattgtagccgcacactatcagcatgatgccgggctgattggcgcggcgttgttagcagaggacaaagcattatga

SEQ ID NO: 253466 - DNA, 690 bp, Klebsiella pneumoniae; identical to SEQ ID NO: 173998

SEQ ID NO: 253467 - DNA, 1491 bp, Klebsiella pneumoniae
atgagtgaaataataagtaccaaaccatggtataagcacctcaataagtcgcagtggcgggcgttttccgcagcctggctgggctatttactggatggttttgatttcgttttaattgctctggtgctcaccgaagtacaaagcgaattccagctcaccacggtacaggcggcgagtattatctcggcggcgtttatctcccgctggttcggcggcttgctgctgggggcgatgggtgaccgctatggccgccgcctcgcgatggtcagcagtattattcttttctccgtcggtacgctggcctgcggctttgcgcccggatacacctccatgtttatcgcccgtatggtgattggaatgggaatggccggagagtacggctccagcgccacctatgtgattgaaagctggccaaaacacttgcgaaataaagccagcggcttcctgatttccggcttttccgtcggcgctgtcgtagcggcgcaggtttacagtctggtggtccccttgtggggctggcgcgcgttgttcttcctcggcattctgccgattattttcgcgctgtggctgcgtaaaaatattccggaaacggaagactggacagagcgccagacgaaaaaaacgccggtgcggacgatggtggatattctctatcgcggtaaatatcgcgccatgaatatgctgatgacgctggccgcaacggccgcgctctggttctgcttcgccggaaacctgcacaatccgctcgtggtgattgcgctggcgctcgtctgcaccatcattttcatcagctttatggtacagagcagcggaaaacgttggccgaccggcgtgatgctgatggttgtcgttctgttcgcctttctctactcctggcctatccaggcgctgttgccgacctatctgaaaaccgagctggcatacgatccttcgacggtcgcgaaggtgctcttctttagcggattcggcgcagccgtcggctgcatcgtcggcggtttcctcggcgactggctgggcacgcgaaaagcctacgtttacagcctgctggcatcgcaggttctgattattccggtcttcgccatcggcggctccagcctctggggtctgggcatccttctcttcttccagcagatgctgggtcaggggattgccgggatcttaccgaaattgatcggcggctacttcgacaccgaccagcgcgctgccggtctgggtttcacctataacgtaggcgccctgggcggggcggctgcgccggtcctcggcgcgctggtcgcacagcacatgcatctgggtacggcgctggggtcgctctccttcggactgacgtttgtggtgatcctgctgattggtctggatatgccgtcccgagtacagcgctggattcgcccggaagcgctacgtacccatgacgctattgatggtaaaccgttcagcggcgcactggttggtcacgacaaagcgaacgctccgctttgcgataaacactaa

SEQ ID NO: 253468 - DNA, 882 bp, Klebsiella pneumoniae
atgacgactccgacttcgccggtcaaagccgggaaaatacttgataccctgggggcgatgcaaagcagtatgacccgcgtcgggaaaagcatcgcgcagtatgtgatcgcttccccgcataaggtgactcagctttcgattgccgatctctcagaggaagtgaacgcgggcgaagcatcggtgatccgtttctgtcgacagctgggctataaaggttttcagaacttcaaaatggaactggccattgagctggccatgaacgatagcgatgacaatagcacgctgctggaggctgaaattcagaaaaccgacgatgcgcacaccatcggcttgaagctccagggcgccatctcgaccgtgctttcggaaacgctaaatctgctggatatggagcaggtggaacgggtcgtggaggcgctgcatacttgtaattgcgcctatatctttggcgttggcgcttccggactgaccgccgaggagatgaagcataagctgatgcgaatcgggctgcgcgtcgatgccttaacaaataatcactttatgtatatgcaggccgcgctgctcaaggttggcgatgtcgccatcggcatcagccactccggacattcgccggaaaccgcgcacgccctcgatctggcaaggcaggctggagccaccaccgtcgccttaacgcataacctcggatcgccattgagtaaagtcgctgatattacgctcattaacggcaaccgacaggggcgcctgcagggtgactctatcggcactaaaacggcgcagctcttcgttctggatctcatttatacgctgctggtgcagagagatccggaagccgcccgcgcgaataaactgcgaacgatggatgctctgtccatgctcaagtag

SEQ ID NO: 253469 - DNA, 891 bp, Klebsiella pneumoniae
atgacaaagttaacaggtcttattgccgccccccatacgccttttgatgccaacggcgaagtcaactaccccgttatcgatcggattgccgagcatctgattgcgcagggcgttaaaggtgcttacgtctgtgggacgaccggagaaggcatccactgttccgtagaagagcgtaaaaaaattgccgagcgctgggtcgcggcaagccagggacaattaagcattacgctacacaccggggctctcagcatcgccgatgcgctggagctcagccgccatgctgaaaccctggatatttttgccacctcggtcatcggaccgtgcttcttcaaaccgtcaaccgtcgacgatctggtggaatattgccgtattatcgccgccgccgcgccgtcaaaaggcttctattactaccactccggcatgtcgggtctgagcctggatatggagcagttcctgatcgcggcagcggataaaatcccgaacctgtccggtatgaagtttaactccgcggatatgtatgagttccagcgctgcctgcgcgtcaacaatcgccagttcgatattccgttcggcgtggatgagtttttaccggcaggcctggcctgcggcgccgtcggcgcggttggcagtacttataactatgcggcgccgctctatcatcgtctgatcgacagctttaaccggggagaccatcaggatgttgctgcctgtatggataaggttatcgcaattattcgcgtcctggttcagtacggcggcgttgcggccgggaagctggcgatgcagctgcacggtattgacgtcggcgatccgcgccgcccgctgcgcccgatgaccagcgagcaaaagcgcgtcgcgctggacgcttttcgcgctgccgattttatttaa

SEQ ID NO: 253470 - DNA, 408 bp, Klebsiella pneumoniae
atgttgagtgattacaccctgattgataccgtaccttctgcggaagacttttgccgcctgcgcatcatttctggtatgtccccgcgcccgctggaaggcgcccgcgcgggtctgccgcatagctgctacggggtgcatatcctctatgagggcgtgcccgttgggatggggcgcatcgtcggcgacggcgcgctgaactttgaaatcgtcgacgtcgccgttgatcccgctcatcagggaaaagggcttggtcgccagatcatgcaaaaaattgtcgcctggctggatgaaaacgcgtttaaaggggcatacgtctcgctggtggcggatgttcccgagctgtacgcaaaatttgggttttccagcgtcaggccagaaagtgaaggtatggcaaagatctggaaataa

SEQ ID NO: 253471 - DNA, 1365 bp, Klebsiella pneumoniae
atgagccataacgacactatcgtcgcccaggcaaccccaccgggacgcggtggtgtgggcatcctgcgcatctctggcctgaaggcgcgcgacgttgcgcaggcggtgctgggcaagctgccgaaaccgcgctatgccgactacctaccgtttaaagacagcgacggcagcgcgctggatcagggtattgccctgtggttccccggcccgaactcctttactggtgaagacgtgctggagcttcagggccatggcggccctgttattctcgacctgcttctgaaacgtattctgacgcttccgggtgtgcgcatcgccaggcccggcgagttctccgagcgcgcgtttttgaacgataagctcgatttagcccaggccgaagcgattgctgacctgatcgacgccagctccgagcaggcggctcgttcagcgctgaattcgctgcagggcgcattctctactcgcgtcaaccatctggtggaagcgctgactcacctgcgcatctacgtcgaagcagccattgattttccggacgaagagatcgacttcctctccgatggtaaaattgaagcccagcttaacgcggttatcgccgatctcgacgccgtgcgcgccgaggcgcgccagggcagcctgctgcgcgaagggatgaaagtggtcattgccgggcggccgaacgccgggaaatcaagcctgctgaacgcgctggcgggccgggaagcggctatcgtcaccgatattgccggaaccacccgcgacgttctgcgcgagcatatccacattgacggtatgccgctgcacatcattgataccgccggcctgcgcgatgcgaacgacgaggtcgagcgcatcggcatcgagcgtgcctggcaggagattgaacaagccgaccgcgtactgttcatggtcgacggcaccaccaccggtgcgaccgatccggcggatatctggccagattttatcgcccgtctgccgaaaaatttgccgattaccgtggtgcgcaacaaagcggatattaccggcgaaacgctggggttgagcgaagtaaatgaccactcacttgtccgcctttcggcgcgtaccggcgagggcgtagacgtgctgcgcaatcatctcaagcagagcatgggttttgagacccatatggaaggcggctttctggcgcgccgtcgccacctgcaggcgctgtccgatgccgcagagcatctgcagcagggtaaagcgcagctgctgggcgcctgggctggcgagctgctggcggaagagctgcgcctggcccagcagaacctgagcgaaatcaccggtgagtttacctccgacgacctgctggggcgcattttctccagtttctgtattggtaagtaa

SEQ ID NO: 253472 - DNA, 1647 bp, Klebsiella pneumoniae
atggattcgcaacgcaatcttcttatcatcgctttgttgttcgtgtctttcatgatctggcaagcctgggagcaggataacaatcctcagcctcagcagcagaccacgcagacaacgaccacagcaacgggtagcgccgccgaccagggcgtaccggccagtggccaggggaaactgattacggtaaaaaccgatgtgcttgacctgaccatcaacacccgcggtggtgatgttgagcaggcgctgcttctggattatccgaaagagctgaaatcaactgagccattccagcttctggaaacttcgccgcagtttacctatcaggcgcagagcggtttaaccggtcgtgatggcccggacaatccggcaaacggaccgcgtccgttgtataacgtcgataaagatgcgtttgtgctggctgatggccagaacgaaatcgtcattccgctcacgtacaccgataaagcaggcaacgtattcaccaaaaccttcaccctgaagcgcggtgaatatgcggtgaacgtcggctatagcgtagagaacgccagcgaaaaaccgctggaaatctcaacctttggccagctgaagcaaaccgctaacctgccgacgcatcgcgacacccagaccggtggcctgactaccatgcacaccttccgtggcgcggcgtactcaacgtctgaaacgaagtacgaaaaatataaattcgatactatcgttgataacgaaaacctgaacgtcagcaccaaaaacggttgggttgccatgctgcagcagtactttactaccgcatgggttccgcagaacaacggcactaacaacttctataccgcgaaccttggcaacggccttgtggctatcggctacaaatctcagccggttctggtccagccgggtcaaaccgacaagctggaaagcaccctgtgggtcggcccggccattcaggacaaaatggccgccgttgcgccgcatcttgacctgaccgtcgactacggctggctgtggtttatctctcagccgctgttcaagctgctgaaatggatccacagctatctgggcaactggggtttctccatcatcgtcattacctttatcgttcgtggcatcatgtacccgctgaccaaagcgcagtacacctccatggcgaagatgcgtatgctgcagccgaagattcaggcaatgcgcgagcgtctgggcgacgacaagcagcgtcagagccaggagatgatggccctgtataaagcggagaaggttaacccactgggtggctgcttcccgctgattatccagatgccaatcttccttgcgctgtactacatgctgagcgcctcggttgaactgcgtcatgcgccgtttatcctgtggatccacgacctgtctgcgcaagacccgtactacatcctgccgatcatcatgggcgcgacgatgttcttcattcagaagatgtctccgactaccgtgaccgacccgatgcagcagaagatcatgacctttatgccggtcatctttacggtgttcttcctgtggttcccgtctggtctggtggtttactatatcgtcagcaacctggtcaccattattcagcagcagctgatttaccgtggtctggagaagcgtggtctgcatagccgcgagaagaaaaaatcctga

SEQ ID NO: 253473 - DNA, 1074 bp, Klebsiella pneumoniae
atgtcgctatcccgacttctaatcaaagacttccgcaatattgaaaatgcggatctcgccttgtcccccggctttaacttcctggttggcgctaacggcagcggcaaaaccagcgtgcttgaagctatctatacgctcggccacggtcgggcgtttcgtagcttgcagattggccgcgtgattcgtcatgagcaggagtcatttgttctgcacggtcgcctgcagggcgaagagcgagaagtcgccatcggcctgacgaaagataagcagggcgacagcaaggttcgtatcgacggcaccgacggccataaagtggcggagctggcgcttctgatgccgatgcagctgattacgccagaggggtttactttactcaacggcggccccaaatacagaagagcgttccttgattggggatgcttccacaacgaagccggattctttaccgcctggagcaacctgaagcgcctggtgaagcagcgcaacgccgcgctgcgtcaggtgagtcgctatgcccagctgcggccatgggatctggagctgatcccgctggcggagcaaatcagccgctggcgcgccgaatatagcgccgctattgtcgaagatatggcggatacctgtcggcagtttttacctgagttcgccctcaccttttctttccagcgcggctgggagaaagaaacggattatgccgaggtgctggaacgaaatttcgaacgcgatcgcatgttaacctataccgcgcacggtccgcacaaagcggatttccgcattcgtgccgacggcgcgccggtagaggatacattgtcgcgcgggcagcttaagctgctgatgtgcgccctgcggctggcgcaaggtgagtttttgacccgcgagagcgggcgacgctgcctgtacctgatagatgattttgcctcggaactcgacgacgcgcggcgcgggctgctggccagccgtttaaaagccacgcagtcgcaggttttcgtcagcgccattagcgctgaacacgttatagacatgtcggacgaaaattcgaagatgtttaccgtggaaaagggtaaaatagcggattaa

SEQ ID NO: 253474 - DNA, 1551 bp, Klebsiella pneumoniae
  misc_feature (1459)..(1467): n is a, c, g, or t
atgtcgaattcttatgactcctccagtatcaaagtcctgaaagggctggatgcggtgcgtaagcgcccgggtatgtatatcggcgacacggatgacggcaccggtctgcaccacatggtattcgaggttgtggataacgctatcgacgaagcgctcgcaggttactgtaaagacatcgttgttacgatccacagcgataactccgtctccgtacaggatgacggccgcggtattccaaccggtattcacccggaagagggcgtctcggcggcggaagtgatcatgaccgttctgcacgcaggcggtaaattcgatgataactcctataaagtttccggcggtctgcacggcgtaggcgtttccgttgttaacgccctgtcgcagaagctggagctggttattcagcgcgataacaaaattcaccgtcagatttatgcccacggcgtgccgcaggctccgctggcggttaccggcgaaaccgaaaaaaccggtaccatggtgcgcttctggccgagctacgaaacctttaccaacgttgtcgaattcgaatacgagattctggcaaaacgcctgcgcgagctgtcgttcctgaactccggggtgtcgattcgcctgcgcgacaagcgcgacggcaaagaagatcatttccactacgaaggcggtatcaaagcctttgtggaatatctgaacaaaaacaaaacgccgatccacccgaatattttctatttctccactgaaaaagacggtatcggcgttgaagttgcgctgcagtggaacgacgggttccaggaaaatatctactgctttaccaacaatatcccgcagcgcgacggcggtactcacctggcgggcttccgtgcggcgatgacgcgtaccctgaacgcctatatggataaagaaggctacagcaaaaaagcgaaagtcagcgctaccggcgacgacgcccgtgaaggcctgattgccgtggtttccgtgaaggtgccggatccgaaattctcctcgcagaccaaagacaagctggtctcctctgaggtgaaatcggcggtcgaacagcagatgaacgaactgctgaacgagtacctgctggaaaacccgtctgacgccaaaatcgtagtgggcaaaatcatcgatgccgcccgtgcgcgtgaagccgcgcgccgcgcgcgtgaaatgacccgccgtaaaggcgcgctggacctggctggcctgccgggcaaactggcggattgccaggaacgcgacccggcacactctgaactgtacttagtggaaggggactctgcgggcggctctgctaagcaggggcgtaaccgtaagaaccaggcgattctgccgctgaaggggaaaatcctcaacgttgagaaagcgcgctttgacaaaatgctcgcttcgcaggaagtggcgacgctgattaccgcgctgggctgcggcattggtcgcgacgagtacaacccggacnnnnnnnnncatgaccgatgcggacgtcgacggctcgcacattcgtacgctgctgttgaccttcttctaccgtcagatgccggaaatcgttga

SEQ ID NO: 253475 - DNA, 864 bp, Klebsiella pneumoniae
atgccggaaatcgttgagcgcggccacgtctatattgcccagccgccgctgtacaaagtgaagaaaggcaagcaagaacagtatattaaagacgatgaggcgatggatcagtaccaaatctccatcgcgctggatggcgcaacgctgcacaccaacgccaacgcgccggccctggccggagagccgctggagagactggttgccgagtataacgccacgcagaaaatgattacgcgtatggaacgtcgttatcctaaagcgctgctcaaagagcttatctatcagccgacgctcgcagaggccgacctggcgaatgagcagaccgtgacgcgctggatcaacgccctggtgagcgagctgaatgagaaagagcagcacggcagccagtggaaatttgatgtccgcgagaacgccgagctgcagcagtttgagccgatcgttcgcgtgcgtacccacggcgtggataccgattatccgctggatcatgagtttgtcaccgggccggaataccaccgtatctgcgcgctgggcgaaacgctgcgcggtctgattgaagaggatgcctttattgagcgcggcgaacgccgtcagccggttgccagctttgaacaggcgctggactggctggtgaaagagtcgcgccgcggcctctctatccagcgctataaaggtcttggcgagatgaacccggatcagctgtgggaaaccactatggacccggatagccgccgcatgctgcgcgtgaccgtgaaggatgcgattgccgctgaccagctgttcaccaccctgatgggtgacgccgttgaaccgcgtcgtgcctttatcgaagagaacgccctcaaagcggcgaacatcgatatttaa

SEQ ID NO: 253476 - DNA, 936 bp, Klebsiella pneumoniae
atgaccgatacgctgaaggatattccggtttttgtggccgccgttgaggcgggaagttttgctcaggccgcaattcgtttgcatttgtcgcgctcggcggtaggaaagagtatcgctcggcttgaagagagattgggggtacgtctgtttcaacgtacgacccgcagccaaagcctgaccgacaacggcgcccttttttatgaacgttgtcagcgcgcgctggaggaaattcgtggagcagagtcgctgctggaaacagggaaacagcaggttagtggccgcctgcgcgtggccatgccggtgctgtttggtcgccagtgcgtggccccactgctgatcgagcttgcgcaggaacacccaggtctcgagctggagatgtcattcagcgatcgcgtggtggatctcgtcgaggaagggtttgatatggcggtgcgtaacggcccccttcaggacagcagcgttctggtcgccagaaagctgggagaacaccgcatggtgctgtgcgccgcgccggattacctgctgaagaagggtctgccacacagcgttgatgatttaccccaccatgcggccattaactatctgcaagcaggcagagtgctatcctggcagctgatggataaagaaggagcctcgcacacctttactccccgttcatcgctcaatatggatgatttgcaggcaatctgcgacgctgcgctggccggccacggcattgcatggctgccctgctggatggccagcaaagaaattcatcagggaaaactcgtcccgcttttaaagcaggcgccggatgtgcgcttcgacgttcatgcggtctggcaacagacgccgcatctaccgctgagggtgagaattgccgtcgatatgctcgccagccgtttaccgtccgtgatgtcgctggatatgcctgcgcccacaaaaaagccgcgctaa

SEQ ID NO: 253477 - DNA, 1026 bp, Klebsiella pneumoniae
atgacgcagacaatgcaacgctggtctatggacgcccttgggcgtgagaacctcaatcttattcaggcgcctgttccgcagccgggcccgggtgaagtccgcgtgcgggtgaatgccgttgcgctcaactatcgcgataagatggtcattgaaggcaccatgcctattgcgctttccttcccgtttacgccggcgtctgatatggcgggcgtggtggagagcacgggcgagggcgtcacgcgtttcaaacccggcgctcgggtgatctccacctttttcccggagtggatcgacggtagaccagcgtcagatgcccgcactttgccttataaaaccaccggcgggtacttccagggcatgctggctgagtacgtggttgtgaatgaaaactggctggtggctgcaccggaaacccttgatgatgcagaggccagcacgctcccttgtgcagggcttaccgcatggttcgcgctggtggaacgcggtcatttacatgccgggcaatcggtgctggtacaggggacgggcggtgtggcgatattcgctttgcaaattgcaaaagcacagggggcaaaggtttttgtcacatcaggaagtgatgaaaaactggcgcgggctaaacaactcggcgccgatcatgggattaaccggctcaaaagtgattggacggaaggaatttacgaactgaccgccgatcgcggcatcgatcatattattgaaaccgttggcggggagaatctgcgacattccctgcgagccgttgcggttcatggtcgcatatcggtcattggcgtactggccgggagtgaaatctcgctaccggctggcgaactgttgctgaaatccccggtgattcaggggattggtgtggggcaccgtcgtgcgctggaagatttcgtccgcgccgttgacgtgaccgggttaaaaccggtgattgaacaccgttaccgttttaaccagcttgaacaggcgcttgcacatctcgatcgcggggcgtttggtaaaatcgttctgacccgcgagtaa

SEQ ID NO: 253478 - DNA, 813 bp, Klebsiella pneumoniae
atggctattaaactaatcgcaatcgatatggacggcacgctgctgctgcctgaccataccatctctcctgcggtgaaaaccgcgattgccgcagcccgcgaacgcggcgtcaacgtggtgttaaccactggacgaccttacgcaggcgtgcacagctacctgaaagaactgcatatggagcagccgggagattactgcatcacctacaacggcgctttagtacagaaggcaagcgacggcagtaccgttgcgcaaaccgcgctgggctacgacgactatcgctatctggagcagctggcccgtgatgtcggctcccacttccacgcgctggatcgtaatactctgtataccgctaaccgcgatgtaagctattacacggtgcatgaatcctacgtggcgacaatcccgctggtcttctgcgaagccgaaaatatggatcccaacatccagctgttgaaagtgatgatgatcgatgaaccggccattctggaccaggctatcgcccgcatcccggctgaagtgaaagagaaatacaccgtgctgaaaagcgcgccctacttcctggaaatccttgataaacgcgtcactaaaggcaccggcgtgaaatcgctggccgatacgctgggtatcaagccggaagaggtgatggcgattggcgatcaggaaaatgacattgcaatgatcgaatatgcaggcgtcggcgtggcgatggacaacgcgatccctgccgtcaaagaagcggcaaactttatcaccaaatccaatctggaagacggtgtggcatatgctattgaaaaatatgttttaaactaa

SEQ ID NO: 253479 - DNA, 690 bp, Klebsiella pneumoniae; identical to SEQ ID NO: 174013

SEQ ID NO: 253480 - DNA, 876 bp, Klebsiella pneumoniae
atgacatctcgctacatcgcaattgactggggatcgacaaacctgcgcgcctggctttatcagggcgagcagtgtctggagagcaggcaatcggaagcaggcgttacgcgcctgaacggacactcccccgcagcggtgtttagcgaaataaccgcgggctggcgcgacagcgctaccccggtagtgatggcgggaatggtcggcagtaatgtcggctggaaggcggcgccctacctgccggttcccgtccatttttccgccattggcgaacaattaaccgccgttagcgaccaggtctggattattcccggactcagcgtctctcgcgacgataaccataatgtgatgcgcggcgaagagactcagctcctcggcgcgcgggcaatagctccttcctccgtctacgttatgcccggcacccactgcaaatgggtgcaggctgaccgccaacaaattagcgactttcgcacggtgatgaccggcgaactccaccacctgctgctgcgccactcgctggtcggcgccgggttaccggagcaggtctcagctcctgacgcgtttaacgccgggcttgagcgcggcctgcattcgccagacatcctgccgcagctttttgaggtacgcgctgcgcacgtgctgggctcactgccgcacgaacaggtgagcgaatttctctccggcctgctgattggcgcggaagtcgccaccatgagcgcccatttccacgatcgccaggtcaccctcgttgccggagaggcgctggcagaccgctatcagcaggcgcttggcgctatcggccgtcagacgaccgtggtgtcaggcgacaccgcatttcagaccggaataaggagcatcgcccatgcagtggcaaactaa

SEQ ID NO: 253481 - DNA, 618 bp, Klebsiella pneumoniae; identical to SEQ ID NO: 174015

SEQ ID NO: 253482 - DNA, 1149 bp, Klebsiella pneumoniae
atgaaaataaccaaactcaccacgtatcgtttacccccgcgctggatgtttttaaaaattgaaaccgacgaaggcgtgattggctggggcgagcccgtgattgaagggcgcgcgcgcaccgtggaggctgcggtgcatgagctcggcgattatctgataggccaggatccggcgcagattaacgacctgtggcaggtgatgtaccgcgcgggcttttatcgcggcggcccgattttaatgagcgccatcgccggtatcgaccaggccctgtgggatattaaaggcaaagtgctgaatgccccggtctggcagctgatggggggcctggtacgtgacaaaatcaaagcctacagctgggttggcggcgatcggccggcagaagtgattgacggtatcaaaaagttgcgcggaattggttttgatacctttaaattaaatggctgcgaggagctggggctgatcgataattctcgtgcggtggacgctgcggtgaataccgtggcgcaaattcgcgaagcgttcggcaatgaaattgaatttggcctcgatttccacggtcgcgtgagcgcgccgatggcgaaggtacttatcaaagagctggagcaataccgcccgctatttattgaagagccggttcttgccgagcaggcagaatactatccgcggctggcggcgcaaacctcgattcctattgcggcgggcgaacgcatgttctcgcgcttcgagtttaaacgcgtgctggaagccggtgggctggctattctgcaacccgacctgtcgcacgccggcggtattaccgagtgctataaaatcgctggaatggctgaggcctatgacgtggcgttggcgccgcactgcccgctgggacccattgcgcttgccgcctgtttgcatgtcgattttgtctcctataacgccgtcttccaggaacaaagtatgggcattcactataacaagggcgcggaattactcgactttgtaaaaaataaagaagacttcaatatggaaggcggcttctttaaaccattaatgaagccagggcttggcgtagagatcgatgaagcgcgggtaattgaattaagtcaaaatgcgccggactggcgtaatccgttgtggcggcatgaggatggtagcgtcgcggaatggtaa

SEQ ID NO: 253483 - DNA, 1293 bp, Klebsiella pneumoniae
atggatatttcagttacagctgcaaaacccgggcgtcgtcgttatttgacgctgattatgatctttattaccgtggtgatttgttatgttgatcgcgccaaccttgccgtggcatcggcgcatattcaggaagagtttggtattaccaaagcggaaatgggatatgtattttccgccttcgcgtggctgtatacgctttgccagatccccggcggttggttccttgaccgcgtgggatcgcgactaacctactttatcgctatttttggctggtcagtggcgacgctactgcagggatttgccacgggactgatgtcgttgattggtctgcgcgcgattaccgggatctttgaagccccggcgtttcccactaataatcgcatggtgaccagctggtttccggagcacgagcgcgcatcagccgtcggtttttacacttcaggacagtttgtcgggctggcattcctgaccccgctattaatctggattcaggaaatgctgagctggcactgggtttttatcgttaccggcgctatcgggataatatggtctttaatttggtttaaggtttatcagccgccgcgtctgacaaaaagtatcagcaaagccgaactggattatattcgcgacggcggtggcctggtggacggcgatgcgcccgttaaaaaagaggcgcggcagccgctgaccaaagccgactggaagctggtattccatcgcaaactaatcggcgtttacctcgggcagtttgccgtaacctccacgctgtggtttttcctgacctggttccctaactatctgacccaggaaaaggggattacggcgctgaaagcgggctttatgacaacggtgccgttccttgccgcctttgttggcgtgctgctttccggctggctggcggacaggctggtccgaaaaggcttctcgttaggcgccgcgcgtaaaacgccaattatctgcgggctgctgatctcgacctgcatcatgggggcgaactacaccaacgatccggtgtggattatgatcctgatggcgctagccttcttcggcaacggcttcgcctccattacctggtcgctggtatcgtcgcttgcgccgatgcggcttatcgggctgaccggcggtatgtttaatttcgtcggcgggctgggcggtatcaccgttccgctggtggtgggttatctggcccaggactatggttttgcgcctgcgctggtttatatttccgttattgcgctgattggcgcgctttcttacatcctgctggtgggggatgtcaaacgcgtaggctaa

SEQ ID NO: 253484 - DNA, 285 bp, Klebsiella pneumoniae; identical to SEQ ID NO: 175616

SEQ ID NO: 253485 - DNA, 1311 bp, Klebsiella pneumoniae
atgagtcaggcattaccgctagttacccgtcagggcgatcgtatcgccatcgtcagcggtttacgtacgccgtttgcccggcaggcgacggctttccacggcgttccagccgttgatttaggtaagctggtggtcggcgaaatgctggctcgcagcaatatccccgcggatataatagacctgctggtatttggtcaggtggtacagatgccggaagcaccgaacatcgcgcgggaaattgtgctgggtaccggtatgagcgtacatactgatgcctatagcgtcagtcgcgcctgtgcgaccagctttcaggcggtggccaacgtcgccgagagcctgatggcgggaaccattcatgcaggcatcgccggcggggccgactcctcttccgtattgcccattggcgtgagcaaaaaacttgccagaacgcttgttgatgccaacaaagcccgcactttgggacagcgcatgaagctcttttcccggctgcgtttccgcgatcttctccctgtgccaccagctgttgccgaatattccaccggtctgcggatgggcgataccgctgagcagatggcgaaaacgtggggtatcacgcgtgagcggcaggatgcgctggcgcttcgttcgcaccagcttgcggtgagggcctgggaggaagggaaattaacggcagaagtcatgactgcctacacgccgccgttccgtgaacctctggaacaggataacaacatccgtaagaattcaacgctggcagattaccaaaagttacgtccggccttcgatcgcaaacacggtagcgtgaccgccgctaacagtacgccgttaaccgatggggcggcggcggtgatcctgatgaccgaatcccgggctaaagcgcttgggctaatcccgctgggctacctgcgcagctacgcttttaccgcgattgatgttcgtcaggatatgctgctgggtccggcgtggtcgacaccgctggcgctggaaagagccgggctgacgctggccgatttaaccctgattgatatgcatgaagcctttgctgcgcaaacgctggcgaatttgcaatgcatggccagcgatcgatttgcccgtgaggtacttggccgctcgcaggctatcggcgaagtcgatgagagcaaattcaacgtgcttggcggttcgattgcctacggccatccctttgccgccaccggcgcgcgaatgattacccaaacgctgcatgaactgcggcgtcgcggcggagggtttgggctggttaccgcctgcgcggcgggtgggttgggttcagctatggttctggaggccgaatga

SEQ ID NO: 253486 - DNA, 2148 bp, Klebsiella pneumoniae
atgatggaaaccgtatcggcatttacgcttgaggttcgcccggacaatatcgccgtcatcaccattgacgcgccaggtgaaaaaatgaacaccctgaaagctgagttcgccagcgaggtgcggggaattatccgtcagctccgtgacaataaagaactgcgcggcgcggtatttatttcagcaaaagcggataactttatcgccggggccgatatcaacatgattgcccgctgtcattccgctcaggaagcggaggcgctggcccgccaggggcagcaaatcatggccgagatccacgggctccccattccagtgattgccgcaattcacggcgcatgcctgggcggcggcctggaactggcgctggcctgccacgggcgggtatgcagcgatgataataaaacccggcttggcctgccggaagttcagttgggcctgctgccaggttctggcggcacccagcgtttaccgcgattaattggcgtcagcagcgcgctggagatgatcctgaccggcaaacagcttcgcccgcgtcaggctctgaaggcgggactggtcgatgaagtggtgccacagaccatcctgctacaaaccgcagttgaacgggctcttaaaggtcgtccggcaagccgtaccgtcccggcgcgcgaacgtattctcgcaggacctctcgcccgcagcctgctgtttcgtctggtagcgaaaaagacgcatcacaaaacccagggcaactacccggcaactgagcgcattctgcaggtgattgagaccggactggcgcagggatgcagcagcggatacgcagaagaagcccgcgcttttggcgagctggcgatgacgccgcaatcgcaggcgctacgatcgatttttttcgccagcaccgatcttaaaaaagatcgcggtgcggatgcgcagcccgtcgcgctgcgtagcgtaggcattcttggcggaggactgatggggggcggcatcgcctacgtcaccgcatgcaaaggagaattgccggtccgcattaaggacattcagccgcgcgggataaatcatgcattgaaatacagttgggatctgctcgataaacaggtgcgccgccgctatctgcgcgccagcgagcgcgatcgccagatggggttgattaccggttcgctggattaccagggttttgcccatcgcgatgtggtgatcgaagcggtatttgaagatctggcgctcaagcagaaaatggtcagcgaagtggaacaacactgccacccggagacgatctttgcctctaatacgtcgtctttaccgatcgcagagatcgcggcgcaagcgagcagacctcagcgggttatcggcctgcacttttttagcccggtagaaaaaatgccgctggtcgaagtgattccacatcgtggtaccgatcggcagactattgccacggtggtaaagctggcgaagctgcaggggaaaacgccgattgtcgtcgcggataaagccggattttatgttaaccgaattctcgcgccctatattaatgaagccatgcgcctgttaatagaaggggagccgatcgatcacattgataagtcgttggttcaatttggctttccggtagggccaattcagcttcttgatgaagtggggatcgataccggcactaaaattattcccgttctggaggcggcatggggagagcgttttagcccgcctgcaaacatcattagcgcaattctgaatgacgatcgcaaagggagaaaaaataaccggggtttctatctttatgcggcaaaagggcgtaaaagcaaaaaacggcccgacctggcgatttacaacctgctgggtatcgcttctccacaggcgcgcttgtccgcgcagcaggtggcggaacgctgcgtcatgatgatgctcaacgaagcggcgcgctgcttcgatgagcaggttattcgcaacgctcgcgatggcgatatcggcgccgtgtttggcattggttttccgccgttccttggcggcccgttccgctatatggatagattgggggcgggggaagtcgcagcgattttgcagcgtctggccgctcaatacggcccgcgttttacaccatgtgacactttgttacacatggccgagcagggggcgaccttttggcccgctgatgaacgtacgacctaa

SEQ ID NO: 253487 - DNA, 552 bp, Klebsiella pneumoniae
atgaaaaagaaaacaacgctaagcgaggaggatcaggcattgttccggcagctaatgaccggcactcgtcagattaagcaggacaccattgttcaccgtccgcagcgcaaaaaaatcgctgaagtaccgcccaagcggctgctccaggagcaggccgataacagccactacttttccgatgagtttcagccgttgctgaataccgaaggatcggtgaagtatgtgcgtgctgacgtcagccactttgagctgaaaaaactgcgtcggggtgattattcgccggagctgtttctcgatctgcacggtttgacccagcagcaggccaagcaggagctgggggcgttgattgccgcctgccgtcgcgagcacgtattttgcgcctgcgtaatgcacgggcatgggaagcatattctcaaacagcaaacgccgctatggctggctcagcacccgcatatcatggcgtttcatcaggcaccaaaagagtacggcggtgacgccgcactgctggtactgattgaagttgaagagtggcaaccgccggagcttccgtaa

SEQ ID NO: 253488 - DNA, 1005 bp, Klebsiella pneumoniae
atgctgatttatccccgtcttcgtggcaaactagccgccgaatttatagcagagcgtgccctgggggatagcgtggataaaatttttgttgatgaagccgttaatgagcttcataccattcaggacatgctgcgttgggcggttagtcgcttcagcgctgcaaatatctggtacggacacggtaccgacaacccgtgggacgaagcggtgcagctggtgatgccgtcgctgtatctgccgctcgatattccggaagatatgcgcaccgcgcgcctgacttccagtgagaaacaccgcatcgttgagcgcgtgattcgccgcattaacgaacgcattccggtcgcttatctgaccaacaaagcctggttctgcggacatgagttttacgtcgatgagcgcgtgctggtgccgcgctcgccgattggcgaactcattaataaccatttttccggcctgattgaccactatccgcagcacatcctcgatatgtgcaccggcagcggctgtatcgctatcgcctgcgcttacgcttttccggaagcggaagtcgatgcggtcgatatttcccctgacgcgctggccgttaccgagcagaacgtagaagaccatggcttaattcaccacgtgacgccaattcgctccgatctgttccgcgacctgccgaaggtgcaatacgatctgatcgtcactaacccgccgtacgtcgatgaagaagatatgtccgacctgccgggtgaatatcgtcatgaaccggttctcggcctggcgtccggtagcgatggcctgaagctgactcggcggatcctggcctgcgcgccggattatctcagcgatgacggtatcctgatttgtgaagtcggcaacagcatggtacatctgatggaacagtatcctgacgttccatttacctggctggagtttgaaaacggcggcgatggcgtctttatgctgactaaaccgcagctgattgccgcccgcgcgcatttcggcatctataaagactaa

SEQ ID NO: 253489 - DNA, 1086 bp, Klebsiella pneumoniae
atggcaggaaacacaattggacaactctttcgcgtcacgacgtttggcgaatcgcacggcctggcgctgggctgtatcgtcgacggcgtaccgcccggcattccgctaaccgaagccgatctgcagcacgatctcgatcgccgacgtccgggaacatcgcgctatactacccagcgccgcgaaccggaccaggttaaaatcctctccggcgtattcgagggggtgactaccgggaccagcattggtctgctgattgagaataccgatcagcgttctcaggattacggcgcgattaaagacgttttccgcccgggtcacgctgactacacctacgaacagaaatatggcctgcgcgactatcgcggcggcggtcgttcctctgcccgtgaaaccgctatgcgcgtggctgccggagcgattgccaagaaattcctcgccgcgaaattcgggattgtgattcgcggctgcctgacccagatgggggatattcctctggctatcaaagattgggaacaggttgaacaaaacccgttcttctgtccggatccggagaaaattgaagcgctcgatgaactgatgcgcggcctgaaaaaagagggcgactccatcggagcgaaagtaaccgtggtggccgatggcgttccgccggggctcggtgagccggtatttgaccgcctcgatgcggacattgcgcacgcgctgatgagcattaatgcggtgaagggcgtggaaattggcgatggttttgaggtggtgaagcttcgcggcagcgaaaaccgcgatgaaattaccaaagcgggtttccagagcaaccacgcgggcggcattctcggtggtatcagcagcggtcagcagatcgtggcgaacattgcgctgaagcctacctccagtattaccgttccgggacatacgattaatcgctctggcgaagaagtcgagatgatcaccaaagggcgtcacgatccctgcgttggcattcgtgcggtaccgattgccgaagcgatgctggcgatcgtgcttatggatcactttatgcgtcagcgcgcgcaaaatggcgacgtgacgacatcaattccacgctggtaa

SEQ ID NO: 253490 - DNA, 825 bp, Klebsiella pneumoniae
atgaaaaaaaccgttatcgcactgctggcgcttctcgccagcggtaccagcctggcggcaacgccgtggcagaaaatctcccagcccatcagcggcagcccgcagtcgatcggtgcatttgccaatggctgcatcgtcggcgcgcaggcgctgccgttaaacgccaccggctatcaggtgatgcgtaccgatcagcgccgctacttcggccatccggatctcgtgcagtttattcagcgtctaagcaaccaggcgtataacagaggtatgggaacggtactgattggcgatatggggatgccggccggggggcgtttcaacggcggtcatgccagccatcagtccgggcttgacgtcgatatttttctgcagcttccgcaggcgcgctggagttcagctcagctgctgaagccgcaggcgctggatctggtggcccgcgatggtcagcgcgtcgtgccctcgttgtggagcccgcaaattagccagctgattaagatggcggcggaagatagcgacgtcacgcgtattttcgtcaacccggcaattaagcagcaactgtgcctggatgccggtaacgatcgcgactggctacgcaaagttcgcccatggttccagcaccgggcgcatatgcacgtgcgcctgcgctgtccggcaggcagccttgagtgcgaagatcaggctccgccaccggccggcgatggctgcggtgcggaattgcaaagctggtttgaaccccctaaaccaggatcaaccccacctgtgaagaagacgccgcctccgctgccgccttcctgccaggcgctactggatgagcatgttctttaa

SEQ ID NO: 253491 - DNA, 810 bp, Klebsiella pneumoniae
atggatagttttatcgatctttttatggtgtcgccgacggtaatggtggtgctgtttttcgtggccattctggcgggatttattgactccctggcgggcggcggcgggctattaaccgtcccggccctgatggcggcgggtcttcctccagcgcaggcgctggcaacgaataagctgcaggcctgcggcgggtcgctgtccgcttcgctttatttcatccgccgcaaggtagtgaatctggccgaccagaagctcaatattctgatgacctttctcggctcgaccggcggcgcgctgctggtccagcacgtccagtctgatgttctcaaacagatactgccaatcctggttatcggcattggcctctattttctgctgatgcctaaactcggcgaagaggaccggcagcgacgtctgtacggtctgccgtttgccctggtggctggcggctgcgtcggtttttacgatggtttctttggcccgggcgccggatccttttacgcgctggctttcgtcaccctggcggggttcaatctggcgaaatcgaccgcgcatgcaaaattgcttaacgcgacgtccaacgttggcggcctgctgctgtttattattggcggtaaggtgatttgggcgaccggctttgtgatgatggccgggcagtttatcggcgctcgcgcgggatcgcgactggtgctgagcaaaggacagtcactgattcggccaatgatcgttgtggtgtcggcggtgatgagcgcgaaacttctttatgatagccatggacaggagatcctccgctggttggggatgaactaa

SEQ ID NO: 253492 - DNA, 549 bp, Klebsiella pneumoniae
atgaacagtacgcataaatacgaacagctgatcgaaatcttcgacggctgttttgccgttgattttaatacccgtctgattaaaggcgatgacgaaccgatctatcttccagcagatgaagaggtgccctacaaccgcatcgtctttgcccacggcttttatgccagcgcgctgcacgagatttcgcactggtgcattgccggaaaggcgcgccgcgagctggttgatttcggttactggtactgcccggacgggcgcgacgcgatgacccagtcaaaatttgaagacgtcgaggtgaagcctcaggcgttcgactggctgttttgcgtggcggcgggatatccgtttaacgtcagctgcgacaatctggaaggggattttgaacccgatcggatcgcttttcagcggcgggtacatgcccaggtcatgatctatctggagcaagggatccctgagcgtcccgcgcgttttatcaaggcgctgcaagaatattaccaaacgccgcctttgacggcagaacagttcccgtggccggaagacctgcactaa

SEQ ID NO: 253493 - DNA, 279 bp, Klebsiella pneumoniae
atgatcgcggagtttgaatcacgcattctggcgttaattgacagtatggtagaccacgccagtgatgatgaactgtttgccggcggttatctgcgcggccacctgacgctggcggtggccgagctggaaggagaaggggagcatactgcgcaggcggtgcatgataaagtgacccaaagcctggaaaaagccatcagcgcgggcgaactgtcgccgccggatcagatactggtgcagggaatgtgggacagtttgtatcagaaggcgatgcaggcgtag

SEQ ID NO: 253494 - DNA, 1989 bp, Klebsiella pneumoniae
gtgaaacaaaacgccatacaacctgccaacctggaattcaacgctgagggtacacctgtttcccgagatttcgacgatgtctacttttccaatgacaacggtctggaagagacgcgctacgttttcctcgacggcaaccggctcaacgaacgtttttcaacacattcacgtccgttatttgtggttgccgaaagcgggttcggtaccggccttaactttctgacgctgtggcaggcgtttgacgtttttcgccgcgataaccctcaggctaccctgcaaagattacacttcatcagtttcgaaaaattcccgctgcgcgcggacgatctgcgcctcgctcaccagcactggccggagcttgcgccctgggccgagcagctgcaggcccgttggccactgccgtttgccggctgtcatcgactactgctggacgagggccgcgtcacgctggatttatggtttggcgatattaaccagctgaccaacgagctggacgactcgctcaatcagcaggtagacgcctggtttctggatggctttgcgcccgccaaaaacccggacatgtggacggcggaactctttgcggcaatggctcgcctggcgagacccggcggcactctggccacctttacctccgcaggttttgtgcgccgcgggctggaggaagccggtttcagcatgcagaaacgcaagggctttggccgcaagcgagaaatgctcatcggggaaatgaatcaacaactcaactttcccgcgcgtgcgccgtggtttgcccgcggcggcaccgaacagcgcgatgcggcgattgttggcggagggatcgccagcgccctgctcgctctggcgctgctgcggcgcgggtggcaggtgacactatactgcgccgatgacgctccggcacaaggcgcatccggcaatcgccagggagcgctctatccgctgctcagccagcacgaccccgccctggcccgctttttccccgctgcatttactttcgctcgccgcctctacgacgatctgccggtcatgttcgatcatgactggtgcggggtgacgcagctgggctgggatgaaaaaagcgcgcataaaattgcccagagggttgagcttaatctgccgccggaaatcgccctcgccgttaatgcgcagagcgctgcggaacaagcaggagtggaaaccggctgcggaggaataacctatcctgccggaggctggctgtgcccccagcagttaaccgcagaactgctggcgctcgccgccactcgcggattacgggttcactaccgctatcccgtagagactatcagcgcggacaataccggctggcaattaaacgatcgtcagtttcatgaagtcgtggtgctggccaatggccatcaggtaacccgcttcagccagacggagcatcttccgatgtatcccgtcgccggccaggtcagccatataccaacaacgccagggctatcggctttacgccaggtgctgtgctacaacggctacctgacgccgcaaaacccgcacaaccagcagcactgcatcggcgccagctatcatcgtggacagacagataccgcgtttagcgccgacgatcagcagcagaatcgacagcgtctgatagactgtttcccgcaggcgcaatggacgcgggaggttgacgtaagcgcgaatgagtcccgcagcggcgtgcgctgtgcgacgcgcgatcatttgccgatggtcggcagcgtgcctgattatgacgcgaccttaagtgaatatgcctcgctggctgaacatcaggataaggccggagcagcgccggtttaccgcaatctttatatgctgggagcgctgggttcgcgcggcctctgctccgccccgctcgcggcagagatcctcgcggcgcaaatgagcaatgagccattaccgatggatcaagagacgctagctgcgctgaatccgaaccggctatgggtaagaaaactgctgaaagggagagcggtgaaataa

SEQ ID NO: 253495 - DNA, 1176 bp, Klebsiella pneumoniae
atgtccgcagtcactgaaacaaaaaaaacgccttcagcgaatggttcgctgtttcggatcactttcgccgtttttcttacctatatgaccgttggcctgccgctgccggttatccccttgttcgtccatcaggaactgggcttcggcaacaccatggttggtatcgccgttggtatccagtttctggcgaccgtattaacccgcggctatgcaggtcgtctggcggaccagtacggcgcgaaacgctctgtgctacaggggatgctggcctgtgcgctggctggaggtgcctggctatgcgccgcgctgctgccggtccccgtaatggcgaagtttggcctgctggtgctgggccgtctgatcctggggtttggtgaaagccagctgctcaccggcaatttaagctggggaatggggctggtgggcccgatgcgctcaggtaaagtgatgtcgtggaacggcatggcgatatacggctcgctggcggcaggagctccgctggggctgctgatctacagccattacggcgttgcagcgctggccggcgtcaccatggtgctgccgctggtggcgtgggcgattaacggcacggtgcgtaaaattcccgccctcggcggcgagcgtccgtcgctgtggagcgtggtgggaatgatctggcggcccggtattggtcttggactgcagggcgtcggtttcgcggtgataggcacgttcgtctccctctatttcgccagcaacggctgggcgatggccggttttaccttaaccgcgtttggtggagcatttgtgctgatgcgcgtgctgtttggttggatgccggaccgcttcggtggggtgaaagtggccatcgtttcgctgttgattgaggcggtaggcctggcgctgctctggcaggcgcccaatgcctgggtcgcgctggcgggcgcggcgctaaccggctgcggttgctcgcttatcttcccggcgctgggcgtagaggttgtgaagcgggtaccgccgcaggttcgaggaacggcgcttggcggctacgccgcgtttcaggatatctcctacggcgtcaccggcccgcttaccggattgcttgcgacttctttaggctattcttccgtcttcctggcggcggcaatatgcgccgtgctggggatcctcattacgctggtatcgctgcgtaaatag

SEQ ID NO: 253496 - DNA, 960 bp, Klebsiella pneumoniae
atgacgcatcccgtttcaggtatgtccgatcgccctccggggacaggcgaacctccgctcactacccagcagcgcaccgcgcttgagcggctcattacgcgcctggtggcgttaacatcgcagcaaagtgcggaagtgtgggcctgcgtaaagcacgatctgagcctgaaaaacgacgccccgctgttggcaagccattttgcggccgccgaacacagcctgaaccaccgcttaatccttgcccaacagaatcaccaccgccggcaaatcctggcgcagctgagcgaactgctgaaccagggtaataatcgtcaggcggtcagcgattatattcgtcagcatgacggtcaaaccgcgctgcatgcgctcacccagccgcagctggagaatgttttgcaactgctgcaaagcggccagctctcgattcctcagccgcagcagcgcccgccaacccatcgtccactgctgccagcggagcacaatacgctcaatcaacaggtgaccaaactggcagcagctaccggagagtccagcaagctcatctggcagtcgatgctggagctaagcggcgtcaaaagcggggaactgatcccggcgacccacttcactcccctctcttactggctccatgcgcggcaaacgctcagcacgcaggctacgccgacgctgatgtcattgcaggccgccttgaagcagccgcttgaagctgcggagtggcaaagagtgatggattttgcgcaaaccagctggcacgcaacggcgcaaacgccgctaagcgcagcccagctgctgacgctgctgaacaaaattttcgtgctcagggtcgccagagcgcaagagacgctggcgatcccgccggttcaggcgccgccttcatcgccgtggctggcgtttaaaaagccgtggactatcgcgttgacgctgctcgcggtgcttattttgctgtggttggtgatttaa

SEQ ID NO: 253497 - DNA, 1137 bp, Klebsiella pneumoniae
gtgaaaatcctcgttgatgaaaatatgccctatgcgcgcgagctttttagccgcctgggggaagtgaaggccgttgcgggtcgtcccgttccggtcgaagcgctcaatgacgctgatgcgctgatggtgcgatccgtcaccaaagttaacgaagcgctgctctccggcaaggctatcaaatttgttggcaccgcaacggcaggcaccgaccatgtcgatcaggcgtggctgcagcgggcgggaatcggtttttccgcggcgccgggctgtaacgctatcgcggtggtggaatatgtcttttcagcgctgctcatgttggctgaacgcgatggctttgcgctgcgcgaccgtaccgtcgggatcgtaggcgtcggcaacgtgggcgggcgcctgcacaaacgtctcgaggcgctgggaattaaaacgctgctttgcgatcccccgcgcgccgatcgcggcgatgagggcgacttccgtcctcttgacgagctggtgcaggaagccgacattctgactttccatacgccgctctataaggaagggcagtacaaaacgctgcacctggcggatgaggcgctgattcgccgcctgaagccagggacgatattaatcaacgcctgccgtggggcagtggtggataacgctgcgctgcttaaacgactacaggaaaatcagccgttaagcgtggtgctggatgtctgggagccggagccggacctgaatatcgagctgctcaagcgggtggatattggtacgccgcatattgccggctacacccttgaaggaaaagcgcgcggtacgacccaggtttttgaggcctacagcgcgtttattggccacccgcagcaggtggcgctggacacgctgctaccggcgccggagtttggtcgcattacgctgcacgggccgctcgatcaggcaacgctaaaacggctggcgcatttggtgtatgatgtgcgccgcgatgatgcgccgctgcgaaaagtcgcgggcgttgcgggcgagttcgataagctgcgcaagaattaccaggaacgtcgcgaatggtcttcgctgtacgtgcagtgtagtgatgcccaggcggcgacgctgctgcgccagcttggctttaacgccgtacatcatcctgttcgttaa

SEQ ID NO: 253498 - DNA, 1014 bp, Klebsiella pneumoniae
atgtctgaaggctggaatattgccatactgggcgcaacgggcgccgtaggcgaagccctgctcgaaactcttgccgatcgtcagttcccggtgggggatatttatgcccttgcgcgtagcgacagcgccggtgaacatctgcgttttgcgggcaagtcggttctcgttcaggatgcggcggagttcgactggacccaggcccagctggcattttttgccgcgggtgtagaagcgaccgcagcgtatgtcgaagaggccacgaacgcgggctgcctggtgattgacttaagcggtctgtttgccctggagccggatgtgccgctggtggtgccggatgttaacccgttcgtactggcggattaccgcaaccgcaacgttatcgcggtagcgaatagcctgacaagccagctgctgtcggcgttaaaaccgttgatcgatcagggcggtctgtcgcgtataagcgtaaccagcctgctttctgcttccgctcacggtaaaaaagcggttgatgcgctggcgggccagagcgctaaattactcaacggtatgccaatcgatgacgatgatttcttcggccgccagctggcgttcaatatgctgccgctgctgcccgatcgtgaaggaagcgtgcgcgaagagcgacgtatcgtcgatgaagcccgcaagatactgcaggatgacggtctgatgatctccgctaacgtcgtgcagtcgccggtgttctatggccacgcgcagatggtgagctttgaagcgcagcgtccactggcggccgaagaggcgcgcgatgcctttagccgcggggaagatatcgagctgtccgaagagggcgaattcccgacgcaggtcggggatgcttccggcaacgcccgcctttccgtcggctgcgtgcataacgactatggtatgcctgaacaggtgcagttctggtcagtcgccgataacgttcgttttggcggcgcgctgatggcggtgaaaatcgctgagaagctggttcaggagtatttgtactga

SEQ ID NO: 253499 - DNA, 813 bp, Klebsiella pneumoniae
atgtctgagatggagcagctgccggtctacaaaatcgcgctgggcatcgaatacgatggcagcaagtactacggctggcagcggcagaacgaagtccgcagcgtacaggagaagctggaaaaggcgctctcgcaggtagcgaacgagcctgttaacgttttttgcgcgggccgtacggatgccggcgttcacggaaccggtcaggtcgtgcattttgaaacgcgctcgcagcgtcaggatgccgcatggaccctgggcgtcaatgccaatttacccggcgatatcgcggttcgctgggtgaagcgggttcctgaggattttcacgcccgcttcagcgccaccgcgcgccgctatcgttatgttatctataatcatcgtctgcggccggcggtattgagccgcggcgtaacccattattatcacccgctggatgcagaacggatgcagcgcgccgctcagtgcctgctgggagagaatgatttcacctcgtttcgtgcggtgcagtgccagtcgcgcacgccgtggcggaacgtgatgcacattaatgtcactcgttatggtgcatatgtggtggtggacatcaaagcgaatgcctttgtacatcatatggtaaggaatattgtcggcagtctgatggaagtaggtgccggtaaccagccagagagctggattgcagaacttctggcggcaaaagacaggacgcttgccgccgcaacggcaaaggcggaaggattgtatctggtggcggtggattacccggcgcgctacgacctccctgtcatgccgatgggcccgctgtttttggcggactaa

SEQ ID NO: 253500 - DNA, 660 bp, Klebsiella pneumoniae
atggatctgattcactttttaatcgattttatcctgcacattgatgtgcatctggctgagctggtcgcggagtacggtatttgggtatacgcgattttgtttttgattctgttctgcgaaaccggcctggtggtcacgccgtttctgccgggggattctctgctgtttgtggcaggagcgctctccgcgctgccgactaacgatctcaacgtccatttaatggtgctgctgatggtcattgcggcgattgttggcgatgcgctgaactacacgattggccggctgttcggtgaaaagcttttcagcaaccccgattcgaaaattttccgccgcagctatctggataagacccatagcttctacgaacgccacggcggcaaaaccatcatcctggcccgtttcgtgccgattgtcagaacgtttgcgccgtttgttgcgggaatggggcatatgtcctatcgtcattttgcgatgtataacgtcgttggcgcgctgctttgggtactgttatttacctatgcgggttatctgtttggcgatttgccgatcgtacaggaaaaccttaagctgctgatcgtcgcgattattgttctgtccgtactgcctggtgtcattgaagtcatccgccacaagcgggcggcggcgaaacaggcgaaataa

SEQ ID NO: 253501 - DNA, 1269 bp, Klebsiella pneumoniae
atggaaaaacaacctattcctcaggccacgtcgcccctggctacgtggctttcttatctggaacatctgcacagcaaaactatcgatcttgggctggcgcgcgtcagcgaggtcgcgcagcggatggcggtaataaaacctgcgccgtttgtctttacggtcgcggggaccaacggcaaaggcaccacctgccgtaccctggaatcggtgctgatggcggcgggctacaaggttggcgtatacagttcgccgcatctggtgcgctacaccgagcgggtgcgcgtgcagggcgaagagctgccggaactcgcgcatacgacttcttttgccgaaattgaagccgcgcgcggcgagatttccctgagctatttcgagttcggtactctctctgcgctgtggttgtttcagcaggcgcgactggatgtggtgattcttgaggtgggcctgggcggccgccttgatgctaccaatatcgtcgatgctgacgtggcggtggtcaccagtattgccctcgatcatactgactggctggggcccgatcgcgaaagtatcggtcgtgaaaaggcggggattttccgctcaggcaaaccggccatcgtcggcgaacccgatatgccgttgaccatcgcagaggtggcgagcgaaaaaggggcgcagctcctgcgccgtggcgttgactggcagtacgacgccagtcaacaaggctggtccttccgcgatcggctggggacgttaaacgatctgccgctgccgcaggtaccgctgccgaatgcggcaaccgcgctcgcggccctgcgcgccagcgggcttaaggtgaaggagcaggcgatgcgcgacggcattcaaaacgcgatgctgcctgggcgtttccagataatcagcgaagcgccgcggacgatccttgacgttgctcataacccgcacgcggcggcctatctcgccgggcgtctcaaaaccttatcgaaaacggggcgcgtactggcggttgttggtatgctgcatgataaggatatcgcaggtacgctggcgaatttgcaggcggaagttgacgactggtactgcgcgccgctggaaggaccgcgcggagccacggcggagcagctgctggaacatttacgcgcaggtaaagtctataccagcgttgcgcaagcgtggcatgcggcgatggcggatgccagacctgaagatacggtgctggtctgtggttcattccacacggtggcgcatgtaatggaagaaatagacgcggggagaaccggtggcaagtaa

SEQ ID NO: 253502 - DNA, 684 bp, Klebsiella pneumoniae
gtggcaagtaagtttcagaaccgtttagtcgggacgattgtgctggtagcgctgggggtgattatcctgccagggctactggatggtcagaaaaaacattatcaggatgagtttgccgccattccgctggtgcccaaaccaggggaccgcgatgagccggatatgctgccagcggcgactcaggcgctgccttcgcagcctccggaaggggcggcggaagaggtgagagccggtgacgccgcggcgccatcgttggatccgtcgcgcataccggtgaacaacaacagttttgatgtggttcaggagccggttgtcgcgccaaaaccgcaggcgcagccgaaacctcagccgaagccggtagagaaaccacagcagcagcaggttgcggcgcagacgccgccgcctaagccacagcagcaggctgaaatcccggcgccgaccggtaaagcatacgtagtgcagctgggcgcgctaaagaacgccgataaggtcaacgaaattgtgggcaagctgcgcgcttccggttttaaggtttacacatcgccttcgacaccggtgcagggtaaaattacccgtattcttgtggggccggatacctcaaaggataagcttaaaggccagcttggagaactgaagcagctttcaggactcagcggcgtggtcatgggctacagcccgaactaa

SEQ ID NO: 253503 - DNA, 489 bp, Klebsiella pneumoniae
atggtctggattgattacgccataattgcggtgattggtttttcctcactggttagcctgatccgcggctttgttcgtgaagctttatcgctggtaacctggggatgtgctttctttgttgccagtcattactacacttacctggctgtctggttcacgggctttgaagacgaactggtccgaaatgggattgctatcgcgatactgtttatcgcaacgcttatcgtcggcgctatcgtaaactttgtgataggtcagctggtggagaaaaccggcctgtcgggtaccgacagggtcttagggatctgctttggcgccctgcgcggtgtgctaatcgtctcagcgattctgttctttctcgatagctttaccggtatggcgaaaagcgacgactggcaaaagtctgagcttatcccgcagttcagtttcgttatcagatggttctttgactatctgcagagctcgtcaagtttcttgcccaaagcataa

SEQ ID NO: 253504 - DNA, 1968 bp, Klebsiella pneumoniae
atgatgcagtctgatgtaattgaagccgacctgaaccgaattaccgttaccgatcctttcctgggagagtatcagcgtttgattcgtgatgtcgtcattccttatcagtgggaagcgctgaacgacaatattcccgatgcggagcccagccacgcgctggccaactaccgcattgccgcgggacaagaggatggccaattttacggaatggtttttcaggatagcgacgtcaccaaatggcttgaggcggtcgcctggtcgttaagccaaaaacctgacgcgacgctcgaacaaaccgctgacgaagcgatcgaactgctggcgcaagcgcagtgtgaagacggctatctcaatacctggtataccgtaaaagaaccgggtcagcgctggactaacctggcagagtgtcatgaactgtactgtgccgggcatctttttgaagcagctgtcgctttttatcgcgccaccggtaaacgtcgtctgttggaaatttcctgccgctttgccgaccacattgataccgtcttcgggcctaaccccggacagcttcgcggctatccaggacatccggaaatcgaactggcgctgatgcgcctgtatgaagtcacccgggaacctcgctatcaggcgttggcctgcttcttcgtcgaagaacgtgggaagcagccctactattacgatatcgagttcgaaaaacgcggcggtacccggcactggatcggttggggcgacgcctggccaggaatgatcaaagacaaaacttacacccatgcgcacaaaccgctcgctgaacagaacgaagcggtcggccacgccgtacgttcggtctatctgatgaccggcctggcgcatatcgcccgtatgacaaatgacgaagagaaacgtcagacctgcctgcggatctggaacaacatggtgcagcgtcggatgtatatcaccggtggaatcggctctcaggggatcggcgaagcttttaccagcgactacgatctgcccaacgataccgcctacggcgaaagctgcgcttcaattggcctgatgatgttcgcccgtcggatgctggaaatggaaggcgatgcgcactatgccgacgtgatggaacgcgctttttacaatacggtactcggcgggatggcgctggacggtaaacacttcttttatgttaacccgctggaaacctatccgaaaagcattccgcataaccatatttacgaccatatcaaaccggttcgccagcgctggtttggctgcgcctgctgcccgccaaatatcgcccgcacgttggtggctatcgggcactacctgttcacgccgcgccgggatgcgctgtttatcaatttctacgccggaagcgaagcgcagttcaccattaatgaccagccgctggcgctaaaaatcagcggtaactatccatgggatgaggaggtcaacatcactttcagccacccgcaggccgttcagcatacgctggcgctgcgcctgccggaatggtgtgaagcgccgcaggtgctcatcaacggcgaagccgcgcagggcgaacaactgaaaggctatctgcatattacgcgccaatggcagcagggggatgtcattacgctgcgcctgccgatgaccctccgccgggtctacgccaacccgctggttcgccataacgccggtaaagtcgccattcagcgcggaccgctggtttactgcctggaagaggttgataacggcgccgaactgcacaacctgtcgctgcccaaagcgagtcagatacgcgagattccagggaccggggtgctagaaggaaaaatcgtgctgcaggcggaggggcttcgggtactgaccgcccaggaggataaaccgctctacagcttcgaccatcgccagacggcggtagagaaacagaccttaacctttattccatggtttagctgggccaatcgtggcgaaggcgaaatgcgaatttggatcaacgaggcctga

SEQ ID NO: 253505 - DNA, 1404 bp, Klebsiella pneumoniae
atggctacagtcgataatctggacacgaatgtgcagatggttgatgcgggcgaaacgctctccacccgcgaaaaaataggctatgggctgggagatgccggtggacactgcatctctgacttaatcagcggcttcctgctttttttctacaccgatgtgttcggcctcagcccggccatcgtcggggcaatgttctttaccctgagaatttttgatgcgatatcagacccggttatgggcgttattgctgacagaacccgcagccgctggggccgctttcgcccgtggcagctctggactgccgtgccgcttgcggttatcggcatcctgacgtttaccgtgccagacatgagcccaaacatgaaaattgcctgggcgttcgggacctattttttgctctctattggctataccgccaataacgtcccctactgcgccctgataaacgccatgaccaaccgtcacgatcaggtaatgtcctgccagtcctggcgctttgtcttaagcggtatcgccggcttcctggtctccgtcgggctgccatggatggtcgagctttttggccagggcaatctggctaaaggctaccagtacggcgtggccgtgctgtgtgccgttggtatgatcatgtttttactttgctttttctgggtcaaagagcgggttccgctgtcgctggccggaaaattcaccctgcgccagcatctgcaagggctgcgtaagaacgaccaattactgctgatgctggtaatgtccttcctgctggtgaatattctgtgcattcgcggcggcggctacatgtactttatctcctacgcgctgcagggcagcgccggctttatgtcgctgttttttgccatcgtcaccgtggctgcgattattggcgcggtgatcgtcaacccgctttcacgccgcgtcgacatggttacgctgtacttccgcactaacctggtgctggttattttcggcgtggcgatgtggttcctgcccaccggcccgcagcatcagacactatggctggtctgtatcctgatcaacaacgttgtgcttggtttcaccctgccgctgcacttctcgattatggccttcgccgatgattacggtgaatggaagaatggcgtgcgttcctccggtatgaacttcgcctttaacctcttttttatcaagctctcctgggcctcatccggcggcattatcagcctgttgctgattctggtcgcgtaccgtccaggcctggaaaatcaaactgccgcgtctattcagggcatcaccctgctgcaaaccgtaataccggcaattttccatctggtgctggccctgtgtctgctgaagtgccgactggacggcccaatgatgaaacgtatctctaccgatcttaaccaaagacatagccaaatttcctga

SEQ ID NO: 253506 - DNA, 912 bp, Klebsiella pneumoniae
atgcatttaggaatggatatcggtgggaccaaagttgagactgtcgtgctggatgacaagggaaaactggtctggcagcagcgcattgcgacaccgaaagccagtattgagcagttcttacagggtatcattggagaagtccatgccgcgcaggattgggcaggcgaaaagctaagcctgggattcggtttgcccggcgcgattgacaccgctacttgtttagtaaaaaattcaaatattcaggtggtcaatgggcatccgctgcatgatatccttagcgactatttttcccagtcggtggctgtcgcaaacgatgctaactgtttcgcgctgtcggaagcgatagatggctgcggcgccggtcatgaagtggtgtttggggcgatacttggtaccggatgcggcggcggtgtggtggtgcatcagcgtttgctgaccgggccgaatgcctgcagcggtgaatgggggcataatcctttgccgcactattccccggaacacgatgggccttcgcacttgtgctattgcggtcagcataactgcgtagaatcgtttatctctggcagcgggctggtccgacagtttcgcttgcataatgaaggacgcggaaccgctgaagaactggtgttgaagatgcgtgaaggacaccctcaagcgctggcgctgtggcggcaattccgtaatcagctggcgcgcgccttcgcaaacgtcgtgaatacgctcgatccggatgtgatagtgataggtggggggctgtcgggcgtcgatgagctgtatagcgatttatcggctgaaatggcaaagtacatattcggtggacgctgcgtgacgccggttttgccggcaacgcatggcgacagcagcggcgtacgcggcgctgcatgggctggagagcaggcgctgcagggataa

SEQ ID NO: 253507 - DNA, 996 bp, Klebsiella pneumoniae
atggtaaaaaagaccagaattaaagatattgcggcggcctgcggcgtgtcgattgccgcagtatcaagagcgctaaaagggcagccggggcttagcgaggagactcgtcagcggatcctgtcgatagcggaagccgaaggctatgattttagccgcttgcgcaacggtcgcatcaagcggctgctgtttttaatgcacagggaacacaatattgccagcgctctgccgttctattcgaccgtcatgcttggcgttgctgacgcttgtagagaaaatgaaattgccatgagcttccagcccattggtccgggagattcagttggcgagttgattaatctccatcagcctgacgcgctgatctgcgcgggttatcttgaagcagagatactggcggaattgaaaaaaacggcgctccccgttgccctggttgatttgtgggcggcggattttccctgtgccaatcctgacaactatcacggcggatttatcgccacccgccacctgcttgaacagggaagaaagcgtattgccttactcggccattcgcagcaccattacagcattcgtcagcgtactgaaggctatctgcaggcgctgtttgatgccggaatttctctggccgaggagtatcgagtcgaagtccccccggtcaaggagatagaaaaaccgctggtagaaggcatggagaaactgctggcgctaccgcagccgccggatgctatctttgcttataacgatatggcggcgctggtggcgatgagagtttgcgcgcggaagggcatcaaggtgccggatgagattgcgatcgtcggtttcgatgatattgaagctgctgcatgggcctggccgccgttaaccacggtggccattgataagcgtgagcttggccgcgatgcgttccgtcttttactcagcgatgagggtgacagaaacctgttgttgccggtgcggttagtggttcgtgagagttcattgcggttgcgtccgcaggcataa

SEQ ID NO: 253508 - DNA, 570 bp, Klebsiella pneumoniae; identical to SEQ ID NO: 175588

SEQ ID NO: 253509 - DNA, 783 bp, Klebsiella pneumoniae
atgaagaagacggtcctggctttctctttaatgatgagcatttgcagcgcttccagcgccttcgccgcgctgccgcagagtattcgcattggcaccgatgccacctacgcgcctttttcttctaaggatgcgaaaggggatttcgtgggttttgacattgatttgggtaatgagctctgttcgcgcatcaaagtaaaatgtacctgggttggcagcgatttcgactccctgatcccatcgctgaaggcgaagaaaatcgacgccatcatctcttcgttatcgatcaccgaaaaacgccagcaggaaatcgcgttctctgacaagctctatgcggcggactctcgcctgattgccgccaaaggctcaccgattcaaccgacgctggaatctctgaaaggcaagcacgtcggcgttctgcagggctccacccaggaggcctacggcaatgaacgctggcgcagccacggggtcgacgtcgtggcttatcagaatcaggacttaatctactcagacctcgctgcgggccgcctggatgccgccttgcaggatgaggtcgccgccagcgaaggcttcctcaagcaaccagccggtaaagattttgcctttgccggaccttctgttaaagacaaaaaattcttcggagatggcaccggtattggcctgcgtaaggatgatagcgaactgaaggccgcttttgataaagccctggctgagcttcgcaaagacggcacctacgacaaaatggcgaagaaatacttcgacttcaacgtttacggtgattaa

SEQ ID NO: 253510 - DNA, 783 bp, Klebsiella pneumoniae
atgaaaaaactggcgttgtctctctccttagcgctggccctttccagcgtttccaccgtattcgcagcaattccgcaaaaagtccgcattggcaccgatcctacttatgccccgttcgaatcaaagaatgcacagggtgaattggttggttttgacatcgatctggcaaaagagctgtgtaagcgcatcaatacgcaatgtaccttcattgagaacccgctggacgcgctgatcccttctttaaaagcgaagaagatcgacgccattatgtcttcgctttcgatcaccgaaaaacgccagcaggaaattgccttcaccgacaaactttacgcggctgattctcgcctggtcgtcaaaaaaggcagcgatatcacgccagaccttgcgaagctgaaaggtaagcgcattggcgttctgcagggcaccacacaagaaacctatggcaatgaacactgggcgccgaaaggtattgaaatcgtttcctatcagggccaggacaatatctattccgatttgaccgccggacgtattgacgcggcattccaggatgaagttgccgccagcgaaggcttcctcaaacagcctattggcaaagattatcagttcggcggcccgtcgattaaagacgagaagctgtttggcgtcggcaccggaatggggctgcgcaaagaggataatgagctgcgtgaagcattaaataaagcctttgccgagatgcgccaggacggcacctacgacaagctggcgaagaaatatttcgattttaacgtgtacggcgactaa

SEQ ID NO: 253511 - DNA, 687 bp, Klebsiella pneumoniae
atgctgtacggtttttctcaggttatttttcagggcgcgctggtcacccttgagctggcgttaagctcggtcgttctggcagtgcttatcggcctggcaggcgcgggggcgaagctttccagcaatcgtccgctggcgctgatttttgaaggctataccaccttaattcgcggcgtacccgatctggtgctgatgctgctgattttctacgggttgcagatcgcgctcaacgcgctgaccgatgcgcttggcctcgcgcagtttgatatcgaccccatggtcgcggggattatcactctgggctttatttacggcgcttacttcaccgaaacctttcgcggcgccttcctggcggtaccgaagggacatattgaagcggcaacggccttcggcttcagcggcgggcagacctttcgccgcattctttttccggcaatgatgcgctatgcgctgcccggaattggcaataactggcaggtgatcctcaaagcgactgcactggtctcattgctggggctggaagatgtggttaaggcaactcagctggcgggtaaaagcacctgggagcctttctacttcgctatcgtctgcggtctgatttatctggtgtttaccacggtttccaatggtgtgctgctgatgctcgaacgccgttattctgttggcgtgaagagggctgacctgtga

SEQ ID NO: 253512 - DNA, 717 bp, Klebsiella pneumoniae
gtgattgatattattcaggagtactggaaatctctgctgtggaccgacggctatcgcttcaccggcgtagcgattacgctctggctgctgatctcttcagtcgtgatgggcggcatactcgcggtttttcttgccataggccgggtatcgagcaacaaatttatccagttcccaatctggcttttcacctatatctttcgcggtactccgctgtatgtgcagctgctggtgttctattccggtatgtacacgctggagatcgtcaaaggtacagaactgctgaacgccttctttcgtagcgggctgaactgtacggtgctggcgctgacgctgaatacctgcgcttataccacggagatttttgccggagcgattcgttcagtgccggcgggagagatcgaagccgcccgcgcgtacggtttttctgcggtcaaaatgtatcgctgcattattttgccttccgcgctgcgtattgctctgcctgcctacagcaacgaagtgatcctgatgctgcattccaccgcgctggcctttaccgccacggtgccggatctgctgaaaattgcccgtgatatcaactcggcaacctaccagccgtttaccgcttttggcattgccgcagttctgtatttaattatctcctatgtgctgattagcttattccgcagggcggaaaagcgctggctgcagcatatcaaaccttcttcgacgcattga

SEQ ID NO: 253513 - DNA, 774 bp, Klebsiella pneumoniae
atgtccgacaataaattaaatgtaatcgatctgcataaacgttacggcgaacacgaggtgctgaaaggcgtttcgctgcgggcgaaagccggggacgtgatcagtattattggctcatccggttccggtaaaagcacctttctgcgctgcattaactttcttgaaaagcccagcgaagggacgattgtggttaacgggcagaacattggtctggttcgcgataaagacggtcagctcaaggtgtcggataagaaccaactgcgtctgctgcggactcgcctgacgatggtgttccagcatttcaatctctggagccatatgacggtgctggaaaacgtgatggaagcgccgattcaggttttgggcctgagcaaacaggaagcgcgcgagcgggcggtgaaatatctggcgaaggtggggattgacgaacgccagcagattaaatatccggtgcatctctccggcggccagcagcagcgcgtgtccatcgcccgcgcgctggcgatggaacccgatgtgctgctgtttgatgaaccgacgtcggcgcttgatcctgaactggtgggcgaagtgttgcgcattatgcagcagctggcggaagaggggaaaaccatggtcgtggtcacccatgagatgggttttgcgcgccacgtctcctctcacgtaatcttcctgcatcagggcaagatagaagaagaggggcaccctgacgaagtcttcggtaatccgaaaagccagcgcctgcagcagttcctgaaaggctctttaaagtaa

SEQ ID NO: 253514 - DNA, 498 bp, Klebsiella pneumoniae
atgataacactcaccactccgcgcctgcgtctctctgggtttaacgcatccgactggcctttttttctgcgcttacggcgagatcccgaagtgatgcgctatatgggagagcttcttgaggagccggcgctgcggacgctgtttgagtcccgctgcgcagaccctggcgtattcgttttacgtgatgccagcggcgcggcaattggcgatatcgggctgcgcatcagcagtaaaaacccgcacgaagcggatgtcggatacgcactcctgcccgaagctcaggggaaagggtacgccagcgaagcgctaaaagcgatttgcgactacggttttcagcagctcggcgttcacgccatcaatgcctgggtgctgggcagtaacgctggttcctctcgtctgctggaaaaacacggttttatccgcattcaggtgctcgaaaaagcctatcgcctgaacggaattgattacgacgactgggtatatcggctggagcgttag

SEQ ID NO: 253515 - DNA, 567 bp, Klebsiella pneumoniae
atggcgctgtataattttacgctcaccctttccggcgtaactgctcgtaccgtgggtctggaagatgcgctgcatgccgcaggctgcgctgacgccctggtctgtttttacggaacggcggtctatctggagttcgatcgcgaaagagactctcttgagcaggctattctgtcagccattgctgatatcgaatccgctccggctctgaatgcgcgagtcgaatccgttgattccgcgctggtaggattaagcgatattgccgaactcaccggcctgacgcgacaggccgtcgccttattgaaagatggcgcgcgaggctcgggccagtttccgggaccggtgcagcgcgttaaaggcaattcgccgctatggcgctggaaaactatcgttggctggctggtaacggagggacgacttgctgaagactcagcgctggtcgcccacgccgagttgctggacgatctcaatctggcgctgcagctgagggctacgcgggagagcaaaaccgtgttgcactatcttagcgggctggaaagtcagcgccaggcttcaccgacggttgcttaa

SEQ ID NO: 253516 - DNA, 255 bp, Klebsiella pneumoniae
atgaaggaacatccggataaacatatcagagcagctattgactacgcgctggcacggggctggatttttatcactggcggcaaaagcgctcactgttttggcaggttgatgtgtgggacggcccggcaccgggaacatatgatgagcatctggtcaacgcctgcggtacccattaaccacgccaggcaaattatcagaatggtcgaccgctgccagccgcctgcctcgggtcagattaaccacaagaaggattaa

SEQ ID NO: 253517 - DNA, 894 bp, Klebsiella pneumoniae
atgaacgttctgcttactggcggtaccggcctgattggccggcatctgataccccggctgctggagctggggcatcgcgtaacggtttcaacccgcagccctgaaaaggcgaaaaaccgcctcgattctcgcgtcactctgtggcgcgattttgagcatcaggtgaatcttaacggttttgatgccgtcatcaatctggcaggcgaacctatcgccgataaacgctggacggcggagcagaagcagcgcctctgccacagccgttgggatatcacccaaaagctggtcaccctaatcaacgccagcgacgcgccgcccgcggtgctgattagcggttcagccgccggctattatggcgatctcggcgaagttgtcgtcaccgaagaagagccgccgcataatgagtttacccacaagctttgcgcccgctgggagcagattgcctgcgaagcgcagagcgatcgcacccgcgtatgcctgctgcgtaccggggtggtgctggcgccgcgaggcggcattctggccaaaatggcgcccgcctttaagcttggcctcggcggccccatcggcagcggcagacagtatctggcctggatccacatcgacgatatggtcaacggtatactgtggctgcttgataacgacctgcgcgggccgtttaatatggtttccccttacccggttcgtaacgagcagttcgctcatgcgctgggccatgcgctaaaccgtccggcgattttccgcgtcccggcggcggctattcgtctgctgatgggagaatcttccgttctgatactcggcggccagcgcgcgttgcctaaacgcctggaagcggccggatttggctttcgttggtacgatctggaagaggcgctggccgacgtgctgcggtag

SEQ ID NO: 253518 - DNA, 630 bp, Klebsiella pneumoniae
atgatcgatctttactacgcacccactcccaatggccacaaaatcacgctcttcctcgaagaagctcagttggcctatcgtctcatccgggtggatatcggcaaaggggagcagttccaaccctcctaccttgcgatttcgccaaataacaagatcccggcgatcgttgaccacgaacccgccgacggcggtggcccgttaaacctgtttgagtccggagcaatcctgctctaccttgcagaaaaaagcggcaagttactgagcggtgagctccgcgagcgccacgctacgctccagtggttattctggcaggtcggcggtttagggccgatgctcgggcaaaaccaccactttaaccactgcgccccgcaggcggtaccctacgccatcgagcgctatcaggtagaaactcagcggctgtacggcgtgctcaaccggcgccttggcgagagcccctggctgggcggcaaccactacagtatcgccgatatcgcctgctggccgtgggtgaatgcccatcagcgccagcgcatcgacctcgccagttttccggcggttcacaactggtttgaacgcattcgtcatcgcccggcgaccgttgaggcgcttctgaaaacagaagcctggtaa

SEQ ID NO: 253519 - DNA, 645 bp, Klebsiella pneumoniae
atgagccagtccgcgattaccctgtggtccgacgccgattttttctcgccctatgtgatgtccgtgtacgttgccctgcaggaaaagagcctgcctttcactctaaaaaccgtcgatctcgacagcggcgagcatctgcaaagcggctggaaaggctacagcgtgacgcggcgcgtaccgctgctggaggtcggtgagttcttcctgagcgaatcctccgcgattaccgaatatctcgatgaacgcttcgcgcctccggagtgggagagactgtatccgcatgaccttcaaaagcgcgcgcgggcgcgtcaggtgcaggcctggctgcgtagcgatttaatgccgattcgtgaagaacgctcgacggctgtggtttttgccggagaaaagaaaccgccgctcagcgaagccggggaaaaaagcgccggcaagctgtttgaaacggctggcgttctgctatcccatggcgggcagaatttatttggcgaatggtctatagccgataccgaccttgcgctgatgctcaatcgtctggttctgaacggcgatgaggttccgacagcgctggctgattacgccaccttccagtggcagcgagcgtcagtccagcgctacgtcgcactctcagccaaacgagcgggctga

SEQ ID NO: 253520 - DNA, 552 bp, Klebsiella pneumoniae
atgaagctgatgtttgcctcggatatccatggctctctgcctgcagccgaacgcgtgcttgagctgttcgcgcgaagcggggcgcagtggctggttattctcggtgatgtgctgaatcacggaccgcgtaacgcgcttcctgaaggttatgccccggcccaggtcgcagaggcgttaaaccgcgtagcggagcgggtgattgccgttcgcggcaactgcgacagcgaagtcgatcagatgctgctccatttccccataaccgccccctggcagcaggttttgagcgagcgaacccgcctgtttctcactcacggacatctgtacagccccgataatttgcctccactcgccgctggcgatgtgctggcttacggccatactcatattccggtagccgagaaacgcggcgagatttttctcttcaatcccggctcggtcagcatccctaaagggggatttaccgccagctacggtcttctgaacgaggggcgattgcaggttttagcactcgatgatcatcaggttattgcagaggtcgcaatttacccgtaa

SEQ ID NO: 253521 - DNA, 1020 bp, Klebsiella pneumoniae
atgtctctaacccgaaaacggcgtagtaccggtaaagtgacgatcgccgatgttgctcagctggcaggtgtgggaaccatgaccgtatcccgcgcgcttcgcacgccggaacaagtttccgataaactccgtgaaaaaatcgaagcggcggtgcaagaactcgggtatatgcctaacctcgccgccagcgccctggcatcagcctcttcaagaactatcgcgatggtggtccccaatctggcggaggcgggctgctcagcgatgtttgccgggcttcagcaggtactacagccggcgggttatcaaatcatgctcgcggaatcgcagcaccgtcttgagcaggaagaaaagttgctggaaacgctgctggcttcgaatatcgccgccgccattctgcttagcgttgaacatagcgataccgtacgccactggctgcaaaacgcctcgattccggtggtggaaatgggggcgatgcgcgccgatcctatcgacatgaatatcggcattgataacgtagcggcgatgttcgagctgacggagatgctcattcaccgcggctatcagaatatcggtctactgtgcgccaatcaggaacagtggatttttcagcagcatttgcaggggtggtacaaggccatgctgcgccatcatatgtcgcctaaccgggtgattaacgctgcgctaccggccaacttttccaccggcgcttcgcagctgccggagtttttgctggcatggccagaactcgatgcgctggtctgcgtttccgatgagctggcatgcggggcgctgtatgagtgccagcgtcggcgtatcaaggtgcctgatgatttagccgtcgtcggctttggcgacagtgacgtgagtcgggtgtgccagccgccgttaacgaccatggctgtgccgcaccacaagattggtatagaagccgggcgagcccttctggagcgttttaatgagggaaactggagcgacaggaaacccatcgcgtccagtttatgcatgcgggatagctgctaa

SEQ ID NO: 253522 - DNA, 444 bp, Klebsiella pneumoniae
atgctcaacacatggctctctgatgccaccattgcgctgcggcagaacgtagacagctggccccaggcgctggatatctgcgcccggccgctgctcgaggccggcgttatcgaacctgcttacgtgaaggcgatcgtggagcagcatcgtaggctggggccgtattacgtgcttgcgccgggactggcgatgccgcatgcgcggccagaggagggggcaaagggcttaggactatcgctgttgaaactggaacagggcgtatcgtttggctctgaggagttcgacccggttgatattatcattatgcttgcggcaccggataaacatagccatctcgaaatgatcgcggctctggcggaattattttccagcgatgaagatatgtatcaattacatcaggcaaccggccttgaggagattaaaaaaatcatcgcacgcttctga

SEQ ID NO: 253523 - DNA, 273 bp, Klebsiella pneumoniae
atgaaaattatggcaatttgcggttctggcctgggcagcagttttatggttgaaatgaatattaaaaaagtgcttaaaaagctcgaaatcgaggccgaggtagagcactccgatctgtcgtcggcaactcctggcgcggcggatctgtttgtgatggcgaaagatattgctgccagcgccagcgtaccggaaagccagctggtggtgattactaacatcatcgatattaatgaactcgaagcgcagctgcgcgcgtggttcgccagacaataa

SEQ ID NO: 253524 - DNA, 1392 bp, Klebsiella pneumoniae
atgtttatccttgaaacgctgaattttgttgttgatattcttaaagtcccttcagtactggtcggtttaattgcgttaattggtctggtggcgcaaaaaaaatctttctccgacgttgtgaagggaacaattaaaactattctgggctttatcgttctcggcggtggtgcgacggtattagtcggctcgctgaatccattgggggggatgtttgaacacgcatttaatattcagggaattatccctaataatgaggcgatagtttctattgcgctggaaaaatatggtgcttcaaccgcgctgattatggcgtttgggatggtggcaaatattgtggtcgcccggtttacgcgcctgaagtacatttttctcaccgggcaccacaccttctatatggcctgcatgattggcgtgattctcaccgtggcgggttttgagggggtcgggctggtatttaccggttcgctgatccttggcctggtcatggcattcttcccggcgttggcccagcgctatatgaagcgtattaccggaaccgatgacattgctttcggccacttcggcactctgggctacgtactgtcggggtggatcggtagcgtttgcggtaaaggctcgcgttcaacagaagagatgaacctgccgaaaaacctgagcttcctgcgcgacagctccatctctatttcgctgaccatgatgatcatctatctgattatggcggtgagcgcagggcgtgaatacgttgaaagcaccttcagcggcggccagaactacctggtctacgccatcattatggcgatcaccttcgctgccggggtgttcatcatcctgcaaggggtacgcctgattctggcggaaatcgtaccggcttttaccgggttttcggaaaagctggtgccgaatgcccgtccggcgctggactgtccggttgtttatccctatgcgcccaatgcggtactgattggcttcctgtttagcttcctcggcgggctggtcgggctgttcctctgcgggcaatttaagtgggtgttgattctgcccggcgtggtgccgcatttctttaccggcgcgaccgctggcgtgtttggcaacgcgaccggcgggcggcgcggggcaatgatcggcgcgtttgccaacggtctgctgatcaccttcctgccggtgctgctcctgcctgtactgggggcgattggttttgccaataccactttctcggatgctgatttcggcgtcgtcggcatcgtgctgggtaatctggcccgctatctgtcgccgtttgcgataactggcctggttgtggcgttgttcgtactgctggtggcgtacaacgtttttgcgaaaaagaaatctgtgggccgcggcgcgcaggagaacagcggagcgaaatcatga

SEQ ID NO: 253525 - DNA, 831 bp, Klebsiella pneumoniae
atgaatgtgcaagaagtgactaaactggcgcgagacattcgcgtcgcaacccttaaatcgctgacggatctcggtttcggccactacggcggcagtatgtcggtcgtggaaacgctggcggtactgtacggcgcggtgatgaaaattgatcccgccgatccggactggcccgagcgcgactactttgtgttatcgaagggccatgccggcccggcgctgtacagtacgctggcgataaagggatatttcccgatggaggaactaagcacgctgaaccagaacggtacgcggctgccaagccatccggatcggctaaaaacgcgcggcgtagacgccacaacggggtcgctggggcaggggatttccatcgctggcgggatggcgctgtcgcataagctggcgggacggacgaatcgtgtgttctgtatcgttggcgacggggaactgaatgaaggccagtgctgggaagcattccagtttatcgcccatcatcgcctgaataacctgaccgtgtttgttgactggaacaagctacagcttgacggcaggctggatgagatcattcgcgcttttaatctggaagataaattccgcgcctttggttttgatgtcgtgaccgttaaaggcgatgacgttcccggactgctggctgcggtacagcccgttccgcccgtcgatgcgcgaccgcgggtagtcattctcgatagcgtgaaaggccagggcgtgccgtatctcgaaaatctcagcaacaaccaccatttgcgcctgacgggcgaaatgaaagagacgctaaacgaggcgattcgccaactggaggccgaacatgattaa

SEQ ID NO: 253526 - DNA, 954 bp, Klebsiella pneumoniae
atgattaagcttgcaccagtagggcaaaaagatgccgtagagatgcgtaaggtttatgccgggttcgtcgcagagcagattgcagacaagagctcaattatcgcgctggaagcggatttgatgagttccatggcgatggacggcgtcgcgcgggagcatccgcagcacgtcatcaactgcggcatcatggaagccaacgtgataggcactgccgccgggctatcgttgaccggacgcaagccgtttgtgcacacctttaccgcttttgccagccgccgctgtttcgaccagctgtttatgtcgctcgattatcagcggaataacgtcaaagtgattgcttccgatgcgggggtgaccgcctgccataacggcggaacccatatgtcgtttgaagatatggggattgtgcgcggcctggcgcattcggtcgtgctggaagtgaccgatgcggtgatgttcgatgagattctgcatcagcttatcgatctcgacggcttctactgggttcgcaccattcgcaaacaggcgccgagcgtgtacgcgccgggttcaacgttcaccattggcaaagggaatgtgctgcgcgaaggtgaagatatcacgctgattgccaatgggattatggtggcggaagcgctggaggcggcgcgccagcttgagcaggaaggcgttagcacggcggtgattgatatgtttaccctgaagcccattgaccgcatgctggtgaaaaattacgccgaaaaaaccgggcgcatcgtgacctgcgaaaaccacagtattcacaatggactgggatcggcggtggcggaggtgctggtggaaacctgtccggtaccgatgcggcgcgtaggagtgaaagagcgctacggtcaggtgggaacgcaggagttcctgcagaaggagtatggcctgacggcgcatgatattgtctcagcggcgcgcgagctgctgtaa

SEQ ID NO: 253527 - DNA, 2199 bp, Klebsiella pneumoniae
gtggtgcagttttgtatcccgcccgatactggcggtaacgaaagaggatatatcgtgtcccgtacaattatgctgatccctaccggaaccagcgtaggcctgaccagcgtcagcctcggtgttgtccgtgctatggaacgtaaaggcgtgcgcctgagcgtctttaaaccaatcgctcaaccgcgcgccggtggcgatgcgccagaccagacgacgaccatcattcgcgcgaactccgaccttccggccgcagaaccgttgaagatgagtcacgttgagtcgctgctctccagcaaccagaaagacgtgctgatggaagagatcatcgccaactaccacgccaacgctcaggatgctgaagtggtgctggttgaaggcctggtcccgacccgcaaacatcagtttgcccagtcgctgaactacgaaatcgccaaaacgctgaacgctgaaatcgtcttcgtcatgtcccagggtaccgatactccggaacagctgaaagaacgcgttgagctgactcgcagcagcttcggcggcgcgaaaaacaccagcattaccggcgtaatcgtcaacaagctgaatgcgccagttgacgaacagggccgtactcgccctgacctgtcagaaatcttcgacgactcttccaaagcgaaagtcgtgaagatcgatccggctcagctgcagaacggtagcccattaccggttctgggcgcggtgccgtggagcttcgatctgatcgccacccgcgcgatcgatatggcgcgtcacctgaacgccaccatcatcaacgaaggcgacattaatacccgccgcgtgaagtccgtgaccttctgcgcacgcagcattccacacatgctggagcacttccgcgcaggatcgctgctggtcacttccgcagaccgtcccgacgttctggtcgccgcctgcctggccgcgatgaacggcgtggaaatcggcgccatcctgctgaccggcggctacgaaatggacgagcgcatcagcaagctgtgcgaacgcgcattcgcgaccggcctgccggtatttatggtcaacaccaacacctggcagacctccctgagcctgcagagcttcaacctggaagttccggttgacgatcacgagcgcatcgagaaagttcaggaatacgtggctaactacattaacgctgactggatcgagtcgctcaccgcgacttccgagcgtagccgtcgcctctctccgccagccttccgctatcagctcaccgagctggcgcgtaaagcaggcaagcgcgttgttctgccggaaggtaacgaaccgcgtaccgttaaagccgccgctatctgcgccgagcgcggtatcgccacctgcgtcctgctgggcaaccccgaagaaatcacccgcgttgccgcgtctcagggcgtagagctgggcgccgggattgaaatcgtcgatccggaagtggttcgcgaaagctacgtagctcgcctggtcgagctgcgtaagagcaagggtatgaccgaagcggttgctcgcgagcagctggaagacaacgtggttcttggcaccctgatgctggagcaagacgaagttgacggtctggtctccggcgcggttcacaccaccgccaacaccatccgtccgccactgcagctgatcaaaacggcccctggtagctctctggtctcctccgtattcttcatgctgctgccggaacaggtttacgtttacggcgactgcgcgatcaacccggatccgaccgctgagcagttggctgaaatcgccattcagtctgctgaatccgcaattgcctttggcatcgagccgcgcgtggccatgctctcctactccaccggcacttcaggcgcaggcagcgatgtagagaaagttcgcgaagcaactcgtctggcgcaggaaaaacgtcctgacctgatgatcgacggcccgctgcagtatgatgctgcggtaatggctgacgttgcgaaatccaaagcgccgaactccccggttgccggacgcgctaccgtgttcatcttcccggatctgaacaccggtaacaccacttacaaagccgtacagcgttccgccgatctgatctccatcgggccgatgctgcaaggcatgcgtaagccggtgaacgacctgtcccgcggcgcgctggttgacgatatcgtctataccatcgccctgaccgcgattcagtcgtcccagcagcaagcataa

SEQ ID NO: 253528 - DNA, 762 bp, Klebsiella pneumoniae
gtgttcgacaccgcgttccaccagaccatgccggaagaatcttacctctatgccctgccgtacagcctgtacaaagaacacggcgtacgtcgctacggcgcgcacggtaccagccacttctatgtgactcaggaagctgcgaaagttctgaacaaaccggttgaagagctgaacatcatcacctgccatctgggcaacggtggttccgtttccgctatccgtaacggtaaatgcgttgacacctctatgggtctgactccgctggaaggcctggtgatgggtacgcgttctggcgatatcgacccggcaatcattttccatctgcacgatgccctgggcatgagcgtagacgccatcaacaaaatgctgaccaaagagtccggtctgctcggcctgaccgaagtgaccagcgactgccgctatgttgaagacaactaccaggacaaagcggatgctaaacgcgctatggacgtttactgccaccgcctggcaaaatacatcggttcctacaccgcgctgatggatggccgtctggacgcggttattttcaccggcggtatcggtgagaacgcggcgatggttcgcgaactgtctctgggcaaactgggcgtactgggctttgaagttgatcacgagcgcaacctggctgcccgtttcggcaagtctggcttcatcaacaaagaaggcactcgcccggctatcgtcattccgaccaacgaagagctggtcatcgcgcaagacgccaaccgtctgaccgcctga

SEQ ID NO: 253529 - DNA, 1278 bp, Klebsiella pneumoniae
ttgccaacctcatctgccaccaaaactattctgaccgccgcccactggggacccatactggtcgaaaccgatggtgaaaacgtcatctcgtcgcgcggagcgcttgatacgcctttcgccaactccctgcaaactgccgtgcgcgatcaggtgcacagcaaaactcgggtacgttacccgatggtgcgtaagggcttcctcgcctcgccagaaagcccacaaggcgtgcgcgggcaggacgagtttgtgcgggtgagctgggagcaggcgctggatctgattcacgctcagcatcgacgcattcgcgacagttatggcccgagcgccatcttcgcgggttcctacggctggcgttctaacggcgtgctgcacaaagcggcgacgctgctccagcgctatatgagcctggcgggcggttataccgggcatctgggcgattattccaccggcgcggcgcaggcgatcatgccgtacgtggttggcggtaatgaggtttatcagcagcagaccagctggccaatggtgctggaacatagcgatgtggtggtgctgtggagcgctaacccattaaatacgctaaaaattgcctggaacgcttccgatgagcagggcatcccgtggttcgatcgtctgcgtcagagcgggaagcgggtgatctgcatcgatccaatgcgatcggaaacggcggaattctttggcgacgcggcggagtggatcgccccgcatatgggcaccgacgtggcgctgatgctcggtatcgcccatacgctggtggaaaacggctggcaggatgaggcgtttttggcccgctgcaccagcggctatgacgttttcgcccgctatctgaccggggagagcgacggaacggccaaaacggcggaatgggcggcggcgatctgcggcattagcgcggagaaaattcgcgaactggcacaacttttccacgaaaaaaccaccatgttaatgtccggctggggaatgcagcgccagcagtttggcgaacaaaagcactggatgctggtgacccttgccgccatgctcggccagattggcaccgagggcggaggcttcggcctctcctatcactttgccaacggcggcaaccctacgcgccgcgcggcggtgctggcctcaatgcagggcagcgtggcgggcggtaccgatgcagtggaaaaaatcccggtcgcgcgcatcgttgaagcgctggaaaaccccggtgcgtcttatcaacataacggtatggaacgccgcttcccggatatccgctttatctggtga

SEQ ID NO: 253530 - DNA, 663 bp, Klebsiella pneumoniae
atgaaaaaacgcgtactcatgattgcggctatcgttagcggcgcactggtcatttctggctgtaccaccaacccctacactggcgaacgcgaagcgggtaaatccgggatcggcgcgggcattggttcattggtcggcgcaggcgtcggcgtgctctcctcttccaaacatgaccgcggcaaaggcgcgctgattggcgcagcggccggtgcagcgctgggcggcggcatcggttactacatggacgtgcaggaagcgaagttgcgcgacaaaatgcagggaaccggcgtaagcgtaacgcgcaacggtgacaatatcgtgctgaatatgccaaacaatgtgaccttcgacagcagtagcgccaatctcaaaccggcaggcgccaataccctgaccggggtggcaatggtgctcaaagagtatgagaaaaccgcggttaacgtggttggctataccgacagtaccggtagccaggatctgaatatgcgtctttctcagcagcgcgcggagagcgtcgccagcgcgcttatcacccagggcgtagcggccagtcgcatccgcacgaccggcatgggtccggcgaaccccatcgccagcaacagcacggcggaagggaaagcgcagaaccgccgcgtggaaattaccctcagcccgctgcagtaa

SEQ ID NO: 253531 - DNA, 1017 bp, Klebsiella pneumoniae
atggcgaaagcggcgcgagcaaccattagcgatgtggcgaaagccgcaaagaccggcaaaaccagcatttcacgctatctgaacggcgagaagcacctgctttccgacgatttgctgggacgcattgaaaaagccattgccgagctcgactatcgtcccagcctgatggcccgcggcctgaagcatggccgcacccgactgatcggcctgatcatcgccgatattaccaatccctactccgtcaacgtgctcagcggtattgaagcggcctgtcgtgaaaagggattcaccctactggtatgtaataccaacaacgagctggatcaggaactgcactatctcgacctgctgcgcagctaccaggtcgaggggattgtggtcaacgccgtcgggatgcgcgaggatggccttaaccgcctgcagcagtcggcgctgccgatggtgcttatcgaccgcaagattccggaattcgcctgcgatgtcgtcggcctcgataatacccaggccgccaccacggccaccgaacatctggtggagaaaggcttcgaagcgctgttgttcctcagcgagcctcttggctcagtcaatacccgtcgcgagcgcctgagcgcgtttcgccagacgctccagcgccataccggcatcgtcgcggaaaacgccgaagtgccgttgaacgatggcgcgatgctggataacgtcctgcgtcatttccactcccaccatcgcggcatgcgtaaggcggtaatttccgccaacggcgcgctgacgctgcaggtggcacgctccctgaaacgcgttggcctgatttggggcagcgatatcggcctgctgggcttcgatgaactggagtgggccgagctggcgggcgtggggattactacgctcaaacagccgacctggcagattggcttcgccgccgtcgagcaggtggtgcgccggattgaaggcagcaccgacccggtctgcgaaagggtattttccggagagctgatcgtcagaggctcaacctcccgctag

SEQ ID NO: 253532 - DNA, 939 bp, Klebsiella pneumoniae
atgcaaaaaccattagatgtcatcacgataggcgaagctatggcgatgtttgtcgccaccgaaaccggcgagctggccgatgtagaacactttatgaagcgcgtggcgggcgcggagctgaacgtcgcgaccggtctggcccgcctcggcttaagcgtcggctgggtaagccgcgttggcgcggacagctttggccgcttcgtcctcaatacgctggcgaaggaggggatcgacgcctgcggcgtgagcaccgatagccgctacgctaccggctttcagctgaaatctaaagttgaaaatggaaccgatcccatcgtggaatacttccgtaaaggatccgccgccagccatctttcgccggacgactttaacgaatcgtacttcgccagcgcccgccacctgcacttaagcggcgtggccgccgcgctgtcggaaagttcatacgccctgctggatcgcgcggcacgcaccatgaaggcgcagggaaaaaccatttcgttcgaccccaatctgcggccggtgctgtggaaaagcgaagccgaaatggtggaaaagcttaaccagctcgccttccaggccgactgggttctgccgggtttaaaagaaggcatgattctgaccggccagcaaacgccggaagctattgcggacttttatctccgccacggtgttcgcgcggtcatcattaaaaccggaaccgatggcgcctggtataaaaccgccgatggcgaacagggggccgtcgcggcaataaaagtggataacgtcgtcgataccgtcggcgcgggcgatggttttgccgtcggggtcatcagcgccctgttggaaggaaaaccgctgcagcaggcggtaaaacgtggaaataaaattggctccctggccattcaggttcagggcgatagcgaaggcttacccacgcgcgaggcgctgggcgagtaa

SEQ ID NO: 253533 - DNA, 1281 bp, Klebsiella pneumoniae
atgaatagttcaacgaatgcaacaaaacgctggtggtacatcatgcctatcgtgtttatcacgtatagcctggcatacctcgaccgcgctaacttcagcttcgcttcggcggccggtattaccgaagacctggggatcaccaaaggtatctcctccctgctgggagcgctgttcttcctcggctacttcttctttcagatccccggcgcgatttacgccgaacgccgcagcgtacgtaaactgatttttatctgtctgatcctgtggggtgcctgcgcctcgctgaccgggatggtgcacaatatccccgcgctggcggcgattcgttttattcttggggttgtcgaggctgcggtcatgccggcgatgctgatttacatcagcaactggtttactaaatctgaacgctctcgcgccaataccttcctgatcctcggtaacccggtgacggtgctgtggatgtcggtcgtatccggctatctcatccaggctttcggctggcgggaaatgtttattattgaaggggttccggcggtaatttgggccttctgctggtgggtgctggtaaaagataaaccatcgcaggtcaactggctggcggaaagtgaaaaagccgcgttacaggagcagctggagcgtgaacagcagggaatcaaaccggtgcgcaactacggcgaagccttccgctcgcgcaatgttatcctgctgtgcatgcagtatttcgcctggagcatcggggtttacggtttcgttctgtggctgccgtccattatccgcagcggcggcgagaatatgggcatggtcgaagtcggctggctctcctcggttccctatctggcggcgaccatcgcgatgatcgtagtctcctgggcctctgataaaatgcagaaccgcaagctgtttgtctggccgctgctgctgattgccgccttcgcctttattggttcctgggccgttggcgccaaccatttctggatctcgtacaccctgctggtgattgccggcgcggcgatgtacgccccctacgggccgttcttcgccatcattcctgagatgctgccgcgcaacgtcgccggcggcgccatggccctgattaacagcatgggcgcgctgggttcgttcttcggttcatggtttgtcggttacctgaacggcaccaccggcagccccgcagcctcgtacattttcatgggagtggcgcttttcgtctcggtatggcttactttgattgttaagcctgctaataatcaaaaacttccgcttggcgcacgtcacgcctga

SEQ ID NO: 253534 - DNA, 972 bp, Klebsiella pneumoniae
atgaagccgtcagttattctctacaaaacgcttcccgacgacctgcaacagcgtctggaacaacactttaccgtcactcaggtgaaaaacctgcgtccggagaccgtttcgcagcacgccgacgcgttcgctgaagcggttggcctgctgggttccagcgaaaaagtcgataccgcgttactggagaaaatgcccaagcttcgtgcgacctcgaccatttccgtcggttacgataacttcgacgtcgaggcgctgaatgcgcgtaaggtgctgctgatgcacaccccgaccgtgctgaccgaaaccgtcgccgataccgtaatggccctggtactgagcaccgcgcgtcgggtggttgaggtggctaaccgcgtgaaggccggggagtggaccaaaagcatcggtccggactggtttggcaacgatgtgcatcataaaaccctcggcatcgtgggtatggggcgtatcgggatggcgctcgcccagcgcgcccacgcgggcttcggtatgccgattctctacaatgcccgccgccagcacccgcaggcggaagagcgctttaacgcccgctattgcgatctcgataccctgctgcaggaagcggattttgtctgcctgatcctaccgctgaccgacgagacttatcatctgttcggcaaagaacagttcgccaaaatgaagtccagcgccatctttattaacgccgggcgcggcccggtagtggacgaaaaggcgctgattgccgcgctgcaggaaggggttattcacgccgccggactggacgttttcgaacaagagccgctggcgaaagactccccgctgctgactatgccgaacgttgttgccgtgccgcatattggctccgcaacgcatgaaacccgctataacatggcggcctgcgcggtggataacctgattgatgctctgaacggtaaagtggaaaagaactgcgtgaatccgcaggtgaagtga

SEQ ID NO: 253535 - DNA, 711 bp, Klebsiella pneumoniae
atggcgacaggaaagtcctgctctcgctggtttgcggctattgcggccctgttaatggtggttagcctgagtgggtgttttgataaagaaggcgatcagcgcaaagcgttcatcgatttcctgcaaaatacggcaatgcgtagcggcgaacgtctgccgacgctgaccgccgatcagaaaaaacagtttgggcctttcgtttccgattatgcggtgatttatggctattcacagcaggtaagccaggcgatggatgcgggtttgcgtccggtggtggatagcgtaaacgcgatccgcgtaccgcaggattatgtcacccagcgcgagccgctgcgtcaggcaaacggcgccctgggcgtactgagccagcagctggagaatgcaaaaatgcaggcggatgccgctcacggcgcgctgaagcagggggacgatctcaaaccggtcttcgaccaggtgtataataaagtcgtgaccgcgccggcgaatgcgctacagccgcttattccggccgctcaggtctttacccagcagctggtgcaggtaggcgattttattgctcagcaagaatcccaggttagctttgcggcgaacggtattcagttcccgacttcgcagcaggccagccagtacaatatgctgattggcccgctggccgctcagcaccaggccttcaaccaggcgtggacggcagctgttaacgcgactcgttaa

SEQ ID NO: 253536 - DNA, 1359 bp, Klebsiella pneumoniae
atgaagaaaacaaccatcgatattcaggcttttatcaatgaacatcccttcacgaaataccagtggatgattctggccttatgttttatcaccgtcgcgatggacggattcgataccgcgataatcggctttatcgcctctgacctggtgcaggaatggggcgtcgaaaaatcggcgttaggcccggtgatgagcgccgccttagtcgggctcgccgtcggcgcgctgaccgccggaccgctcgccgatcgcgttggacgcaaaaaagttctgattttgtccattgtggttttcggcggcttcagtctgctgaccgcctttgctaccagccttaatcagctaacgctgctgcgttttctcaccggccttgggctgggtgccgccatgccgaacgccgcgacgctgatgagcgaatatgcccctgagcgccgcagagcgctaatggtcaatctgatgttcgttggctttccaatgggctcctcgctgggcggttttctctccgcctggatgatcccccattacggctggcaaagtgtgctggtgctcggtggcgtaatgccgctgctgctggcggtcgttttgatcttttttctaccggagtccgcgcgctatatggtggtcaaacgccagcctgcgcagcgtatcgccgcgatcctgcgccgcatcgcacctgttcctgagcaggcggaatttgagctacgcgaagcgggccaggtaaaagagaaatcgtccatcggcgtgattttttctccgcgctacgccgtcggcaccgtgatgctttgcctgacctactttatgggcctgctgattttctatttactgaccagctggctgccgctgctcatccgcgaaaccggggcgacgatgagccaggcctccattatcaccgcgctgttcccgctgggtggcggcattggcgtactcgttctcggcgcgctgatggataagctcaatccaaacaaagtcgtggcggtaggctggctgctgacgggggtctttgtttgtctggtcggtttctcaacccataacctgctgctgatggggattatggtatttatcgccggcagcattatgaacggcgcgcaatcgtcgatgccggcgctggctgccggcttctatcccactcagggacgcgcaaccggcgtggcctggatgctgggtattggccgctttggcggcattctcggggcgtttagcggcgcattcctgatgcaggcccagctctctttcgaaacaattttctccctgctggctatcccggcatttctgtcggccatcgccctgctggtgaaatataagctgggtcagcggcaacctgcggctgcgccaggcgaagtggagaagctgcaaaaggcgtaa

SEQ ID NO: 253537 - DNA, 294 bp, Klebsiella pneumoniae
atggaatataaagatcctgcatttgaactgctgagcaaccttgaacaaattatttttaaagatcaggctcaggcggcctccctgacgcgtaagcccgccgcatgcattgaatttgaccagctacgcaaaggtaccgggctgaaaatagatgattttgccaacgccatgggcgtcagcgtagcaatggtacaagagtgggagtcaagacgcgtacggccttcgcccacggagcttaagctgatgcgcctgatacaggccaatccgcagctttcaagacagcttattgattcataa

SEQ ID NO: 253538 - DNA, 213 bp, Klebsiella pneumoniae; identical to SEQ ID NO: 173474

SEQ ID NO: 253539 - DNA, 1620 bp, Klebsiella pneumoniae
atggctcattgtgcccagatcccctcttttattttgcatcaggtcacctgtcactttgcgacaggagataccctttttggtccgctgaatttatcgctggactcctctctttgtggccttgtcgggcgcaacggcgtcggtaaaacccggcttttacgcttgctggcgggccatgacacaccgtctggcggccacatcgagcgcatggtttccggaagctacgttgctcagctgcgggatagggcttcagagatgacgctggcggaattgctgggcctggagtccattttcgctgctctcgctcgccttgatcgaggagagggacgaagtaacgatcttgaacgtcttgatggtttttgggatctcccggatcgtctggatacggcgtttcttgcggctggcttaggtacattttctcctgcacggcccgcctcttcgctgagcggcggtgaaagagtgaaggcgcagctttgcggggcattcctgtccggcgccgattttcttctgcttgatgaacccaccaaccatctcgaccgtccgggacgcgagtggctgtatcagcagcttaaacaatggcgcggcggggcgctaattgccagccatgaccgggagttattagcggtcatgccgcgtatccttgagctgacgcctgcgactttgcgtcgctacggcggcaactatgcggattatcagcagcagcgtgagctggaacagcaggcggctcgctccgcgctggatcatgccgtcgctgaacggcgccgtacccgcgcgcggatgcacaaagagcacgatgcctgccagcggcgttccgcgcaaacgttacgcaccgtcgatacgctaaatatcgcgtcattcgagcgggttgcctggaaaggcgcggcaaaagaacgttccggcagcctgcagcgtcagcatcgacagcaaaatggcgcccttaacaacgcggtagtacaggcgcgggagagagtggaagaggagagcccggtgatgtttacgttacctggcaaccggatagccccgggaaaacaggtgctggaactggatgcggtgcggttggcgcatacgatgttggcaccgctgagctggcggatggatgggccaatgcgggtggcgctgcgtggtcccaacggctgcggtaaaaccacgttgctgaaaacgctgctgggtctggagctgccgatcgctggacgctgccgcttatcggttaacgcggcgtatctggaccagcatctgacccagctggacctgtcattatcggttatgaagcacctgaacctcggcgatacgcccttagaagaaggcgcgttgcgtagccagctggcgcagctacagctgggggcggataaagtcgatctgccgctatcggccctgagcggaggcgagagactgaaggcggcgctggcctgcgtactctggcggcgtgatgccacgcagcttctgctgctggacgagcccacgaatcatctcgatttggcctccactcaggcgattgaaaaagcgctggcccggtttcccggtgcgatgctggtggtctcgcatgatgaagctttcttgcaggcgctgaagctgacccacagtctgacatggcgggaagatggctggtgctttgagaggctataa

SEQ ID NO: 253540 - DNA, 912 bp, Klebsiella pneumoniae; identical to SEQ ID NO: 173478

SEQ ID NO: 253541 - DNA, 306 bp, Klebsiella pneumoniae
atggtgatgaaatatgcgttttctggactactgctgtgtctgctggcgggctgcagcgcaacgccgcctcagcctacgcagaaggcgcagaaagcgcggataacgccgcagaccaccctcaatatggagcagctttgcaaggataatgccgccgtccgttataatacaggcgtgcgccaggtggacgtcagccatttcgagcagttccggggcagcttcgagctttcgggcaagactgcgcggaatgaacgctttatctgttcttttgacccggacgggcagtttttacatctttcgatgcgctaa

SEQ ID NO: 253542 - DNA, 996 bp, Klebsiella pneumoniae
atgcaggaaaaaatacactggattactcatttgcgcggcattgcctgcctgatggtcgtcatgattcatagcactacctggtatattacgcacccgcacgcgattagcctgctggagtgggatttggccaatatcctcaactctgcgtcccgcgtcagcgtaccgctatttttcatgatttcaggctatctgtttttcggtgagcgcagcgcccagccccgccattttctgcgtatcgcgctatgcattctcttctacagcacgctatcgctgctctatatcaccctgttcacccatatcaacgttgagctgtcgctgaagaatttactgcaaaaaccggtgttctaccatctgtggtttttcttcgccatcgtcgtgatatatctgctttcgccgctggtgcaggttaaacaggtaagcggcaggatgctgctggcgctgatgctggtactgggcattctggcgaaccccaatatggtccaggtaaaagccggaggcgttgaatggttgccgttcaatctttatatcaatggcgacacgttttactacgtgatgtatggcgtgctgggacgggctatcggcatgctggataccgagaaaaaatggctgaccgccctctgcgccgcgctgttcatcgccggcgtgtgggtaatctcacgcggcacgctgcacgagctgcgctggcgcggcgatttcggcgatacctggtatttatactgcggtcctgcggtttttgtctgcgccatcgctctgctgacgctggtaaaaaacacgctcaatcggcgtcagctgccgcttattgcgccgattgcgcgccattctttagggatttacggttttcatgcactgatcattcacgcgctgcgcgccagcgggcttgaactaagccgctggccgttactggatattatctggatattcagcgccgcgctgctgggcagcttactgctctcggctctggttcagcggtttgatagccgccgtttcgtcagctaa

SEQ ID NO: 253543 - DNA, 381 bp, Klebsiella pneumoniae; identical to SEQ ID NO: 173481

SEQ ID NO: 253544 - DNA, 1455 bp, Klebsiella pneumoniae
atgtatatcgggattgatctgggcacctcgggcgtcaaagctattctgctcaatgagcagggcgaggtcgtggcttcgcatactgaaaagctcaacgtgtcgcgtccgcaccctctatggtctgaacaggaccccgagcactggtggcaggcgacggaccgcgcgatgaaagcgctgggcgcgcagcactcgctgcgcgaagtcaaagcgttaggtattgcgggccagatgcacggcgcgacgctgctggataagcaacagcgtgtcctgcgcccggcgattttatggaatgatggccgctgcggtgaagagtgcgcgctgctggaagagaaagtcagccgctcgcggcagataaccggcaacctgatgatgccgggattcaccgcgccgaagctgctgtgggtacaacgccacgagcctgagatcttcgagcgggttgataaagtcctgctgcctaaagattatctacgtttacgcatgaccggcgagtttgccagcgatatgtccgatgccgctggaacgatgtggatggacgtagcgcgaagggactggagcgatgagatgctcgccgcctgcggtctgaaccgcgacaacatgccgacgctgttcgaaggatgtgaagtcacgggggcgctgcgcccgacggttgcgcagtcgtggaatatgccggaagcgctggtggtagccggcggcggcgataacgcagccggtgcggttggcgtgggtatggcggatgcggggcaggcgatgctgtcgctggggacctcgggcgtctactttgcggtcagcgacggctttcttagtaagccggaaagcgccgtacacagtttctgccacgcgctgcccgggcgctggcacctgatgtcggtgatgctgagcgcggcttcctgtctggattgggcggcgacattaaccggccttggcacggttccggcgttgattgcggcggcggagtcggcgaacgagagtgccgatcctatctggtttctgccttacctctccggtgaacgtacgccgcacaacaatccgcaggcgaaaggcgtctttttcggcctgactcatcaacatggtccggcggagctggcgcgggcggtgctggagggcgtcggttatgcgctggcggatggcatggacgtggtgcactcctgcggcgtgaaaccggaaagcgtgacgctgattggcggcggcgcgcgcagcgcgtactggcggcaaatgctggcggatatcagcggtcagcagcttgatttccgcaccggcggcgacgtgggaccggcgcttggcgcggcgcgactggcgcagctggcgctgcataaaaacgtcgcattctccgatctgctgccgcagctcccgctggagcaggcccactgccctgatgacgaacgttttgcccgctacgccccccgtcgggagacattccgacagatttatcagcagcttttaccgctgatgtcgtaa

SEQ ID NO: 253545 - DNA, 1323 bp, Klebsiella pneumoniae
atgcagacctattttgatcaactcgatcgcgttcgttatgaaggcccgacatccgctaacccactggctttccgtcattacaacccggatgaactggtgctgggcaaacggatggaagagcacctgcgctttgcggcctgctactggcacaccttctgctggaatggtgctgacatgtttggcgtgggctcctttaaccgcccgtggcagcagccgggcgaagcgctggaaatggcgaaacgcaaagcggatgtcgcgtttgagtttttccacaaactgaacgtaccgtactactgtttccacgacgttgacgtttcccctgaaggggcatcgctgaaagagtatgccaacaactttgcgcaaatggttgaagtgctggcggaaaaacagcagcagagcggcgtcaagctgctgtggggaacggcaaactgctttacgaacccgcgctatggcgccggggcggcaaccaatccggatccggaagtgttcagctgggcggcgactcaggtggtcaccgcaatgaatgcgacccacaagctgggcggcgaaaactatgtcctgtggggcggccgtgaaggttatgaaaccctgctgaataccgatctgcgtcaggagcgcgagcagattggccgctttatgcagctggtcgttgagcacaagcacaagattggcttccagggtacgctgctgattgaacccaaaccgcaggagccaaccaaacatcagtatgattacgacgcttctaccgtctatggtttcctgaaacagttcggcctggaaaaagagatcaaactgaacatcgaagcgaaccacgcgacgctggccggtcatacgttccatcacgaaattgcgactgccattgctctgggactgtttggttccgttgacgctaaccgcggcgacccgcagctgggctgggataccgaccagttcccgaacagcgttgaagaaaacgcgctggtgatgtacgaaatcctgaaagcgggtggtttcaccaccggcggcctgaactttgatgctaaagtgcgtcgtcagagcaccgataaatacgacctgttctacggccatatcggcgcaatggacaccatggcgctggcgctgaaagttgccgcgcgcatgattgaagacggcgagctggataaacgcgttgccaaacgttatgccggctggaacggcgagctgggtcagcagatcctgaaaggccagatgaacctggcggatattgctcgctatgccactcagcatgacctggcgccgcagcaccagagcggccatcaggaactgctggaaaatgtggtaaaccgctacctttttgatcgctaa

SEQ ID NO: 253546 - DNA, 993 bp, Klebsiella pneumoniae
atgaagataaagaacctttgcctaacgctctgtgcttcactcctcctcaccagcctgtcgggcattgcgaaagaagttaaaattggcatggcgattgacgacctgcgtcttgagcgttggcaaaaagatcgcgatatttttgtcaataaagctgaatcattaggtgcaaaagtattcgtccagtcagccaatggcaacgaagaaacgcaaatgtcgcaaatcgaaaacatgattaatcgcggcgtcgacgttctggttattattccctataacggtcaagtgctgagtaatgtgataaaagaggctaaacaggagggaattaaagttctcgcctacgatcgtctcatcaataatgccgacattgatttttatatttcttttaataatgagaaagtgggcgaaatgcaggcgcaaagcctggtcgataaagtgcctcagggtaactatttcttaatgggcggctcgcccgttgataataacgccaagcttttccgcgccggccaaatgaaagtccttaagccctatattgatgaaggcaaaattaaagtcgtcggcgatcagtgggttgacggatggctacctgaaaacgcactgaaaattatggaaaacgccctgaccgccaacaataataaaattgatgcggttgtcgcctctaacgatgccaccgccggcggcgccattcaggccctgagcgcccaggggctcgcaggcaaagtggcgatctccggtcaggatgccgacctcgccggcgtgaagcgcattatcgctggcacccaaacgatgaccgtctacaaaccgatcgccacccttgccaccaccgcggcggagattgccgtcgaactgggcaacgacaaacagccgaaggctgacgccacgctcaacaacggcctgaaagatgtcccttctcgtctgctgacgcccattgaagtcaataaagacaacattgaccagacggtgatcaaagacggtttccataaaaaaagcgagctgtaa

SEQ ID NO: 253547 - DNA, 1539 bp, Klebsiella pneumoniae
atgtcctggttactcgaaatgaaaaacatgactaaaaccttcggcgcggtgaaggcgattgataatgtcagcctgcggctgaacgccggagaagtggtctcattatgcggagaaaacggctccgggaaatctacgctcatgaaggtgctttgcggaatatacccgcacggtagctatgagggagagattattttttccggagaaactttgcagccgggccatattcgcgataccgaacgcaaaggaattgccatcattcatcaggagctggcgctggtaaaacacctgaccgttctggagaatatttttctcggcgcggagatctcccgccacggtctgctggattacgaaaccatgaccttacgctgcgagaagctgctggcccaggtcaatttagccatatcacccgacacccgcgtcggcgatttaggccttggccagcagcagctggtcgaaatagcgaaagcgctaaataaacaggtacggttgttaattctcgacgaacccaccgcctcattaacggaacaagaaacggccattctactgaatattattcgcgatctgcaaaatcacggtattgcctgtatttacatttcccacaaactcaatgaagtcaaagcgatatccaatactatctgcgtgatccgcgatgggcagcatatcggtacccgtaacgctgacggcatgaacgaagatgacatcatcaccatgatggtcggccgcgagcttaccgccctctatccgaacgaagcccatagctgcggcgatgaaatcctgcgcgtagaaaatttaaccgcctggcatccggtcaatcgccacatcaagcgggtcaatgacgtctctttttcactgcggcacggcgaaattctggggatagccggactggtcggcgcgggccgtaccgaagcggtacagtgcctgtttggcgtctggccgggccgctggcaggggaaaattttcatcgatggccagcaggtgacgattcacaactgccagcaggccatcgcgcagggcatcgccatggtgccggaagacagaaagaaagacggcatcgtgccggtgatggcggtgggtaaaaatatcaccctcgccgcgttaaaccagtttaccggcccgctgagcagccttgacgatgccggagagcagcactgcattcagcaatccatccagcgtttgaagatcaaaacctcatcgccagagctggcgatcggtcgcctgagcggcggcaatcagcaaaaggctatcctcgcccgctgcctgctgctgaacccgcgcattctgatactcgatgagcctacccgcggcattgatatcggcgccaagtacgaaatctacaagttgattaatcagctggtgcagcaggggatcgccgtcattgtcatttcatccgaactgcccgaagtactggggctaagcgatcgggtgctggtgatgcatgagggcaaactgaaggccgatttgattaatcagggcctgacacaggaacaggtgatggaagccgcactgaggagcgaacgccatgtcgaagaacacgtctga

SEQ ID NO: 253548 - DNA, 1179 bp, Klebsiella pneumoniae
atgtcgaagaacacgtctgaaatgaaactcaccccgcccgtctccggggctttttccgggctaaaagggatgaatctccaggtattcgtgatgatcgccgctatcgtggccattatgctgtttttcacctggactaccgaaggcgcttatctgagcgcgcgtaatatctctaacctgctgcgccagaccgccatcaccggcattctcgcggtcggcatggtgtttgtgattatttccgccgagatcgatctttccgtcggctcgatgatgggcctgctcggcggcgcagcggcaatatttgacgtctggctcggctggccgctgccgctgacgattgtggtcacgctggcgcttggcctgctgctgggcgcatggaacggttggtgggtcgcctaccgtaaagtcccgtcgtttatcgtgacgctcgccggtatgctggcattccgcggtattctgataggtatcaccaacgggaccaccgtctctcccaccagcccggcgatgtcgcaaatcggccagagctatctgcctgatggtattggctttggtatcggcgtggcgggaatggcggcctttattatctggcaatggcgcggccgtatgcgacgtcaggccctgggacttgccacgcccgcttccgcttcgaccgtaggtcgccagacgattaccgccgttattgtgctgggcgctatctggctattaaacgactatcgcggcgtcccgacgccggtactgattctcgccgcgttgctgctggcgggtatgtttatggccacccgcaccgcgtttggccgccgcatctacgccatcggcggcaacctggaagccgcgcgtctatccggcattagcgtggaacgcaccaagctggcggtgttcgccattaatggcctgatggtggcgattgccgggttgattctcagttcgcgcctgggcgccggttctccttccgccggcaacatcgccgaactggacgccatcgccgcctgcgtgatcggcggaaccagcctcgccggcggcgtcggcagcgttgccggcgcggtcatgggcgcatttatcatgtccgcgctggacaacggcatgagcatgatggatgtcgccaccttctggcagtacatcgttaaaggggtcattttattactcgcggtgtggatggattcagccaccaaacgccggagctga

SEQ ID NO: 253549 - DNA, 1179 bp, Klebsiella pneumoniae
atgtttgaaaagcgtcaccgtattacgttgttattcaacgccaacaaggcctatgaccgccaggtcgttgagggcgtcggcgaatatttacaagcatcgcaattggaatgggatatcttcattgaggaagattttcgggcgcgaattgaaaacatcaaggaatggttaggcgacggcgttattgccgattacgacgatccggagattgaaaacctgctgctcgacgttaatgttccaattgtcggcgttggcggctccttccaccgcccggagtgctatccgccggttcactacatcgctaccgacaacgccgcgctggtcgagagcgccttcctccatctgaaggaaaagggcattaaccgctttgccttttacggcctgcccacatccagctgtaaaggctgggccgcagagcgcgagcatgctttttgtcagctggtcgccagagagaaatatcgcggcgtggtctatcaggggctcgagacagcgccggaaaactggcagcatgcgcaaaatcgcctcgccgactggctacaaaccctgccgccgcaaaccggcattatcgccgtcaccgacgcccgcgcccgtcatgtgttacaggcctgcgagctgttgcatatccccgttccggaaaagctgtgcgttattggcattgataacgaagagcttacccgctatctgtcgcgcgtggcgctgtcttccgttgctcagggcacccgccagatgggctatcaggcggcaaagctgctgcatcgtctgctggagaatgaagagctgccgcttcaacgacagcttatcccgccgatgcgcgtagtagagcgccgctccaccgactaccgttcgctaaccgacccttcggttatccaggcgatgcactatattcgtaaccacgcctgtaaagggattaaggtagagcaggtactggacgccgtaggcatttcccgctcgaatctggaaaaacgcttcaaagaggaagtgggcgagaccattcatacggtgatccacagcgagaagctggaaaaagcgcgcagcctgctggtttcaaccaccctgtcgattaatgaaatctcgcagatgtgcggctatccgtcgttgcagtacttctattcggtgtttaagaaagagtacgacgtgacgccgaaggagtatcgcgatcggcacagtgaagtcatgatgtag

SEQ ID NO: 253550 - DNA, 564 bp, Klebsiella pneumoniae
atgccttatattacgaaacagaatcaggtgattactgccgatcgtaactggctggtttccaagcagtacgatgcgcgctggtcgccgagcgagcgtacgcgcctgaaagagatcgcctcgcgctataaagtgaagtggtccggcaatactcgccatattccatggaactcgttgcttgaacgcgtcgatattatcccgaacagcatggttgcaaccatggcggcggcggaaagcggctggggaacatcaaaactggcgcgcgttaacaacaatctgtttggtatgaagtgtggcggtggaaactgccgcggcgcggtgaagggctactcgcagtttgattcggtggaagagtccgttcaggcctacgtgagaaacctgaatacgcatccggcttattcatcgttccgtaaatcgcgtgcgcagctgcgcaaggccgatcaggaagtgaccgccagcaccatgattcataagctgaagggctattcgactaaagggtcgagctataacaactatctcttcgccatgtatcaggataaccagcggttgattgccgcgcatatgtaa

SEQ ID NO: 253551 - DNA, 2031 bp, Klebsiella pneumoniae
atgaaactcgctgcgcttgcgtcgctgctgttgcctgggatggccttcgccgcctggactaccgcagacttccccgccttcaccgaagagggcaccggcagatttatcagtcaaaacgaggtagcaaagggtacgcgcccgctgcgaattaattttgaccaacagtgctggcagcccgctggcatgatcaagctcaaccagatgctgtcgatggaaccctgtcgcgacccggtgccgcagtggcgcatctttcgcgacgggcgctatatcctggaagtggacacccgttcgggtacgccgactctgatggtctcccttgaggagaaacagtccgctgccgccgcgccgcagatcaagcagtgtccgaaatgggatggcaagccgctgaccattgacgtcagtaaatcctttgccgaaggcagtaaagttcgcgacttttacagcggcaatatcgcgaccgtcagcggcggtaaaattaccctccagccggcgtttaacagcaatggtcttctgctgcttgagcgcgcggaaaccgaatccgccgcgccgttcaactggcacaacgccaccgtctatttcgttctgaccgatcgctttgttaacggcaacccggccaacgacaatagctatggccgccacaaagacggcatgcaggaaatcggcaccttccacggcggcgacctgcagggcctgaccagcaaacttgattacatccagcagctcggcgttaacgcgctctggatcagttcgccgctggagcaaatccacggctgggtcggcggcggtacgaaaggtgatttcccgcattatgcctatcacggctactacacccaggactggactaagctggatgccaatatggggacggaagacgatttgcgccgtctcgtagacgaggcccacaagcgcgggattcgcattctgttcgacgtggtgatgaaccataccggctacgcgaccctggccgatatgcaggagtttcagtttggctcgctgtacatccagggtgacgaactgaaaaagacgctcggagagcgctggaccgactggaagcctcgcgcaggacagagctggcacagttttaacgactacattaacttcagcgataaagccggatgggagaaatggtggggtaaaaaatggatccgcaccgatatcggcgattacgacaaccccggctttgacgatctgaccatgtcgctggccttcctgccggatctgaaaaccgaatccacggagccctccggcttgccgaacttctatcgccataagccggataccgccgctaaagcgatccccggctacacgccgcgcgattatctgacccactggctgagccaatgggtacgcgattatggcatcgacggtttccgggttgataccgccaaacacgtcgagcaggcggcctggctgcagctaaaaacccaggccagtgaagcgctggcggaatggaaaaaagccaatccggataaagcgctggataacgccccgttctggatgaccggcgaagcctggggccacggcgtgatgcagagcgactactatcgtcacggctttgatgccatgctgaactttgattatcaggatcaggcagcaaaagcgacaagctgcctggccaatatggatctgacctggcaacaaatggcggagaagctccaggatttcaacgtcttaagctacctctcttcgcacgataccagcctgttccgtgaaggcggtagcacggcggcggaactgctgctgcttgcgcctggcgcagtgcagatctactacggcgatgaatcctcacggccattcggtccgaccggctccgacccgcttcagggaacgcgttcagatatgaactggcaggacatcaacggcaaagccgcgcgcagcgtgacccactgggagaaactgggccagttccgcgcccgtcatccggccattggcatgggtaaacaaaccacgctatcgatggcgacaggctacggctttatccgcgagagcggtgatgacaaagtcatggtggtgtgggcaggacagcagtag

SEQ ID NO: 253552 - DNA, 489 bp, Klebsiella pneumoniae
atgaaccggtttattatcgcggatgcgcaaaagtgcatcggctgccgtacctgtgaagtcgcctgcgtggtgtcccatcagcagaatcaggattgttctggcgtatccgctacgcgctttgcaccgcggatccgcgtggtaaagaatgatgaactttcgacggcgacgttgtgccgccagtgtgaagatgcgccctgcgccaacgtctgccccgagggcgctatccgccgagaaaattcggtctggcgcgtggatcagcgccgctgtattgggtgcaaaagctgcatggtggcgtgcccctatggcgcgatgacggtgatgcgggtggaggagggcgtacaggcgctgaagtgcgatttgtgcagccatcgtgaagagggcccggcctgcgtggcggcatgcccgacgcaggcgctacgctgcatagagcccatggagctggaaagaatagccgctgaacgtcgccagcggatggcgctggcgatgtag

SEQ ID NO: 253553 - DNA, 324 bp, Klebsiella pneumoniae
atggatgaattcattaccgtttctttaaaaaaaatgagcgcgggcagtatttataaaatcctgcttatcggcctgacctgctcattagtgccgctcggccttttaaacggcattctcgcggcggttggcgtcaatttactgacgctgcgctggaacggagaagctgtccatggcttcagcgcgattattatcagcccgatcttctgcttcatcctggcgctggtgttgaccggcatcgtcggcagcctggcctggctcggattatggatttacggccagtttcgcccgctgactctgcgcatctcttccaccgagcggggttaa

SEQ ID NO: 253554 - DNA, 1848 bp, Klebsiella pneumoniae
atgattattgccaccgccggacacgttgatcacggcaaaaccacgttgctgcaggcgataaccggcatcaacgccgatcgcctgccggaagagaaagcgcgcgggatgacaatcgatctgggctacgcctactggccgcagcccgacgggcgggtactggggtttatcgacgtacccggtcacgaaaagtttttgtccaacatgctggccggtgtcggcggtatcgatcacgcgctgctggtggtggcctgcgatgatggggtgatggcgcagacgcgcgaacatctggcgatcctccagcttaccgggcagccgacgttaaccgtcgcgctgaccaaagctgaccgcgtagaagcaactcggatcgaggaggtaaaggcggaaatcgatgcggcgctggcggagttcggctttaccggcgcgaccctgtttaccgtcgcggcgacggaagggcggggcattgacgagctgcgcgagcatctcctgcgccttgccgcgcgcgcgcatccgcagcgtcagcgttttcgcctggcgatcgaccgggcatttaccgtcaaaggcgcggggctggtggttaccgggacggcgctatccggcgaggtcaacgttggcgagacgctgtggctgaccggcgtggataaaccgatgcgcgtgcgcggtctgcacgcgcaaaatcagccggttgagcaggcccgggccggccagcgtattgccctgaatattgtcggcgatgcgcaaaaagaggacctcaatcgcggcgactggctgctctcggtacagcccccggaagcctctgaccgggtcattgtcgagctccagtgccacacgccgcttagccagtggcagccgctgcatatccaccacgccgcctgccatattaccggccgggtgtcgctgcttgaaggcgcgctggcggagctggtcctcgatacgccgctgcggctggcggataatgaccgtctggtgctgcgcgatatttccgcgcgcctgacgctcgccggtgcgcgagtggtgacgctcaatccgccgcgccggggcaagcgtaagccggagtatttacagtggctgcacgcgctggctgctgcgcaaagcgatgacgtccaggcgctggatattcaccttcagcgcgatgcggtgcgtctcgatgatttcgcctgggcgcgtcagctcagtagcgatggcctcaacgcgctgattaaccgccctgactatctacaggcgggaaagagcctgttgagcgccccgctcgccgcgcgctggcagcgcaagctgcttgaagccctcgcgcgctatcacgatcagcatcgcgatgagccgggaccgggccgcgaacggctgcggcgtattgcgctgccgatggaagatgaagcgctggtgctgctgctgattgagcaaatgcgagaaagcggtattgttcatagccaccacggctggctgcatctgccggaacataaagcgggctttaccgacgagcagcaggccatctggcagcgggtcgccggactgtttgccgatgagccctggtgggttcgcgatctggcgcgggaagcctgcgtggaagagtcgttaatgcgtgcggtgcttcgccaggcggcgcagcaggggatgattaccgcgatcgtcaaagatcgctactatcgcaacgatcggatcgtggagtttgccaaaatgatccgtgaactggatctggaaagggggtcaacctgcgcggcggatttccgcgatacgctgaacgtcgggcgcaagctggcgattcagatcctcgagtattttgaccgcatcggttttactcgccgtcgcggtaacgaccatattctgcgggataaggcattgttcataaaagaataa

SEQ ID NO: 253555 - DNA, 1389 bp, Klebsiella pneumoniae
atgactaccgagattcgtgcgctttatacccggcttccggccatcgaccgtttactccgcgatcccgcattctcgccgctgctgatgcaatatggtcactcccagacggtggcgctgctgcgccagatgctggacgaggcgcgggaaaatatccgtcagaaccaggcgctgccgggctggtgcgatgactggctgcaggaaacgacgaggcggctggcgctgacgcagcagagcgcgctgcgtccggtttttaacctgaccggtaccgtgttgcacaccaatcttggccgggcgattcaggcggaagcggcggttgaggcggttgcccgggcgatgcgcgcgccggtgacgctggaatacgatcttgatgatgccggacgcggccaccgcgaccgagcgctcgccgacctcctgtgccgtatcaccggtgcggaagacgcctgtatcgtcaataacaacgcggcggcggtactgctgatgctggcggcgatcgccggcggcagcgaggtggtggtgtcgcgcggtgagctggtggagatcggcggcgcgttccgtattcctgacgtgatgcgccaggcgggctgcgttctgcatgaagtcggtaccactaaccgcacccacgcgaaagattatcgtcaggcggtgaacgacaataccggcctgctgatgaaggtgcataccagcaactacagcattgagggcttcacgaaagcggtcgatgaagcggagctggccgagctggggcgcgagttgaatatcccggtggtggccgatctcggtagcggttcgctggtagatttaagccagtacggcctgccgaaagagccgatgccgcaggagatgattgccgcaggcgtcagcctggtgagcttctcaggcgataaactgctggggggcccgcaggcgggaatcatcgtcggcaaaaaatcgctaatcgcccgtttgcagagccatccgctcaagcgcgccctgcgggcggataaaatgaccctcgcggccctggaagccacgctgcgcctctatctgcacccggaaaagttggccgcagagctgccgactctacgcctgctgacccgtcaggcggatgacattcgtcagcaggccgaacgtatacgaacggctctggtcgcgcattatgctgattttgacctgcgggttgagccatgcctgtcgcagatcggcagcggctcgctgccggtggaccgcttgcccagcgcggcgttgacgttgactccgcgcgatggtcgcggcagccagctggaggccctggcggcacgctggcgtctgctgtccgtgccggttattggcaggatctatgatggccgcctgtggctggacctgcgctgtcttgaggatgaaacccggtttatggagatgttactgagatga

SEQ ID NO: 253556 - DNA, 609 bp, Klebsiella pneumoniae
atgaaactgatcggcagctacaccagtccctttgtgcgcaaaatttccgtcatactgctggaaaaagcgatcccctttgagttcgtcaacgaattcccttaccacgagactaacggcgtggcgcagtataatccgctgggaaaagtgcccgcgctggtcaccgatgacggcgactgctggtacgattctcccattattgctcaatacctggagctgctcggcatcgccccggctatgctgcctgcggaaccgaaagccgcgctgaaactgcgtcaaattgaggcgctggcagatggggtgatggaggccgcgcaaactctggtacgggagaaagcgcggccagcggcgcagcagtcggaaagcgaactgctgcgccagcgcgaaaaggtcgcgtgcggtctcgatgcgctggaaggctatgcgagtgacggaacgttgcgccctgatgaggttaatctggcgaccatctccgcagcctgcgccatcgcttatctcaatttccgccgcgtcgcgccaggctggtgcgccacccgaccgaagctggtccgtctggtggattccctctttcagcgcgccagctttgcgcgcaccgaaccgccggtgagttga

SEQ ID NO: 253557 - DNA, 1911 bp, Klebsiella pneumoniae
atgtcatccgatatcaagatcaaagtgcaaagctttggtcgtttcctcagcaatatggtgatgccaaatatcggcgcgtttatcgcgtggggtattatcaccgcactattcattccgacaggatggttaccgaacgaaacgctggcgaagctggtcggtccgatgatcacctatctgctgccgctgctgatcggttataccggcggtaagctggttggcggcgagcgcggcggcgtagtcggcgcgattaccaccatgggcgttatcgtcggcgcggatatgccgatgttcctcggctccatgatcgccggtccactgggcggctgggctattaaaaaattcgacgtgtgggtagacggtaagatcaagtccggttttgagatgctggtgaataacttctccgcaggcatcatcggtatgatcctcgctattctggcgttcctcggcattggcccggcggttgaagttctgtcgaaaatcctggctgcgggcgttaacttcatggtggcgcacgacatgctgccgctggcgtctatctttgttgaaccggcaaaaatcctgttcctcaataacgccatcaaccacggtatcttctcgccgctgggcatccagcagtctcacgatctcggcaaatctattttcttcctgattgaagccaacccgggtccagggatgggcgtcctgctggcatacatgttctttggtcgcggtagcgcgaaacagtctgcgggcggtgcggcaattatccacttcctcggcggtattcacgaaatttacttcccgtacgtgctgatgaacccgcgcctgattctggcggttatcctcggcggtatgaccggcgtgtttaccctgacccttctcaacggcggtctggtttctccggcctctccgggctccatcctcgccgtgctggcaatgacgccgaaaggcgcctacttcgctaacatcgccgcgattgttgccgccatggccgtctccttcgtggtttcagccgtgctgctgaaaaccagcaaagttaaagaagaagatgatattgaggccgcaacccgccgtatgcaggatatgaaagcgcagtccaaaggcggcgccactccgctggccgcgggagacgtggctaacgacctgagccacgtgcgtaaaatcatcgttgcctgcgatgccggtatgggctccagcgcaatgggcgcaggcgtgctgcgtaaaaaagtgcacgatgccggactgagtaatatctccgtcaccaactgtgcgatcaacaacctgccgccggatgttgacctggtcatcacccaccgcgacctgaccgagcgtgcgatgcgccaggtgccgcaggcgcagcatatttcgttgactaacttcctcgacagcggcctgtacaccagcctgaccgaacgtctggttgcggcgcagcgccacacggataacgaagagaaagttcgcgatagcctgaaagacagcttcgacgcgtctgacaccaacctgttcaaactcggcgcggagaacatcttcctcggccgtaaagcggcgacgaaagaagaagcgattctgtttgccggcgaacagttggtgaaaggcggctacgttgaaccggaatacgtccaggcgatgctggatcgtgaaaagctgacctccacctatctgggtgagtccatcgcggtaccgcacggcaccattgaagccaaagaccgcgttctgaaaaccggcatcgtcttctgccagtacccggaaggcgtgcgctttggtgaagaagaggatgaggtggctcgcctggttatcggtatcgccgcccgtaataacgagcatatccaggtgattaccagcctgaccaacgcgctggacgatgagtcggtgattgagcgtctggcgaaaaccaccagcgttgaagaagttctgacgctgctgaaagcgtaa

SEQ ID NO: 253558 - DNA, 1149 bp, Klebsiella pneumoniae
atgaaagcattacattttggcgcaggtaatatcggtcgtggttttatcggcaaactgctggcggacgcggggatacagctgacgttcgcggatgtaaatcaggtcgtgcttgatgccctgaatgcccgtcatagctatcaggttcacgtggtcggcgagaatgagcaggtcgataccgtttccggcgttgacgccgtcagcagcatcggcgacgaagttgtcgagctgattgccagcgtggatctggtgaccaccgccgtcggcccggtcgtgctggaacgtatcgccccggcgattgccaaaggcctggtcaaacgtaaggcgcagggggttactgccccgctcaacatcatcgcctgcgagaacatggtccgcggtaccacccagttgaagggacatgtctttaacgccctggccgaagaagataaagcctgggttgaagccaacgtcggcttcgttgattccgccgttgaccgcatcgttccgccatcggcttccgctactcacgatccgctggaagtcaccgtggaaaccttcagcgagtggattgtcgacaagacccagttcaaaggcgaactgccgaacatccccggtatggaattaaccgataatctgatggcatttgtcgaacgtaagctattcaccttaaacaccggacatgctataaccgcctacctcggaaaactggcgggtcatcagaccatccgtgacgcgattcttgatgagaagattcgcgctgtggttaaaggggccatggaagagagcggcgcggtgctgattaaacgctatgcctttgacgcgcagaagcatgctgcttacatccagaaaattctcggtcgctttgagaacccgtatttgaaagatgacgttgagcgcgttggccgccagccgctgcgtaaactgagcgcgggcgaccgtttaattaagccgctgcttggtacgctggaatacggcctgccgcaccggaatctgctgaaagggatcgccgcggcgatgcacttccgtagcgaagaggatccgcaggcgcaggaactggcggcgctgattgccgagaaaggcccacaggccgcgctggcgcagatttctggtctggacgcggcaagcgaagtggtggcggaaaccgttaacgactacaacgcgaccaaatga

SEQ ID NO: 253559 - DNA, 225 bp, Klebsiella pneumoniae; identical to SEQ ID NO: 173501

SEQ ID NO: 253560 - DNA, 363 bp, Klebsiella pneumoniae; identical to SEQ ID NO: 173502

SEQ ID NO: 253561 - DNA, 1656 bp, Klebsiella pneumoniae
atgaacctctggcaacaaaattacgatccggccggcaacatctggctatcgagtcttatcgcatcgctaccgattctgtttttcttttttgccctgattaagctcaagctgaaagggtacgtcgctgcgacctggaccgtggtcattgcgctctccgtcgccctgctgttctacaagatgccggttgaccacgcgctggcctccgtcatctacgggttcttctacggcctgtggccaatcgcgtggattattatcgccgcggtcttcgtctataaaatttcggtgaaaaccgggcagttcgacattatccgctcatcaatcttatcgattactccggaccagcgtctgcaaatgctgatcgtcggtttctccttcggcgccttccttgaaggggccgccggttttggcgcgccggtcgccatcaccgcagcgctgctggtaggactcggctttaacccgctgtatgcggcgggcctgtgcctgatcgttaataccgcgccggtggcgtttggcgcgatgggcattccgattctggtcgccgggcaggttacgggactcgacagctttgaaattggccagatggtcggccgccagctgccgttcctgaccatcatcgtgctgttctggatcatggcgattatggacggctggcgcggcattaaagagacctggcctgcggtcatggttgccggcggctcctttgctatcgctcagtacctcagctcaaacttcctcggcccggagctgccggacattatctcttcgctggtatcgctggtctgtctgacgctgttcctcaaacgctggcagccggtacgcatctttcgcttcggcgatatgggcgcatcgcaggtcgatatgaacctggcgcgcacgcactacacgccgggacaggtgattcgcgcctggacaccgttcctgtttctgaccgccaccgtgaccctgtggagcgtgccgccgttcaaagcgctcttcgctcccggcggcgcaatgtacgattttgtgattaatatttccgtgccgttcctcgacaagatggtagcgcgcatgccgccggtggttagtgaagccacgccatatgccgcggtctataaatttgactggctctccgccaccggcaccgcgatcctgttcgccgcgctgctttccatcgtctggctgcgcatgaagccaaaagatgcgatttccacctttggcagcacgctgagagagctggcgttgccgatttactccatcggcatggtgctggcgttcgcctttatttccaactattccggtctatcctccacgctggcgctggcgctggcgcacaccggccatgcatttaccttcttctcgccgttcctcggttggctgggggtattcctgaccggttcagatacctcgtctaacgcgctttttgccgcgctgcaggccacggcggcccagcagattggcgtctccgatatcctgctggtcgcagcaaataccaccggcggcgtgaccgggaaaatgatctccccgcagtcgatcgccatcgcctgtgcggcggtcggcctggtgggtaaggagtccgatctgttccgctttaccgtcaaacacagcctgattttcacctgtatggtcggcgtcatcaccacgctgcaggcgtatgtcttaacctggatgatcccgtga

SEQ ID NO: 253562 - DNA, 774 bp, Klebsiella pneumoniae
gtgatagtgatgccaaaacgccttgccgacgacgtcgcccgtcgcgtgcgggcgctgattgaagaacaaaagctggaggcgggcatgcgattgcccgccgagcgccagctggcaacgcagctcggcgtatcgcgcaattctctgcgcgaagcgctggcgatgttagtcaacgaaggggtgctgctcagccgtcgcggcggcggcaccttcgtgcgctggcagcacgaagcgtggtcggagcaaaacatcgttcaaccgctgaagacgctgctctccgacgaccccgattacagctttgatatcctcgaagcccgtcatgctattgaagccagcaccgcctggcatgcggcaatgcgggcaaccgatgccgaaaaagagaaaatccgcctctgctttgaagccacccaaagtgaagacccggaccttgcctcgcaggccgatgtccgcttccacctggcgatcgccgaagcctcgcacaacgtggtgctcctgcaaaccatgcgcggtttttttgacctattacaatcctcagtcaaggagagccgccagcggatgtatctcgtcccgccggtattcgctcgcctcaccgaacagcacctggcggtcatggaggcgattgtcgccggtgacccggaaggtgccagacaggcgatgatggcccatctgggcttcgttcacgccaccatcaaacgttttgatgaagaccaggcccgccaggcgcgaattacccgcctgcccggtgaccataacgacaattccagggagaacttgtga

SEQ ID NO: 253563 - DNA, 1224 bp, Klebsiella pneumoniae
atgattatttccgccgccagcgactaccgcgccgccgcacagcgtatcctgccaccgttcctgttccactacatcgacggcggcgcttacgccgagcacaccctgcgccgcaacgttgaggatctctccgacgtggccctgcgccagcgcattctgcgcaatatgtcggacctgagcctggaaaccaccttattcaatgagaagctggcgatgccaacggcgctggcgccggtcgggctgtgcgggatgtacgcgcgccgtggtgaagtgcaggccgccggcgcagcggatgagaaaggcatccccttcaccctctctaccgtttccgtctgcccgatagaagaagttgccccgaccattaaacgtccgatgtggttccagctgtacgttctgcgcgaccgcggctttatgcgcaacgcgctggagcgcgcgaaggcggcgggttgttcaacgctggtctttaccgtcgatatgccgacccccggcgcacgctatcgcgatgctcactccgggatgagcggcccgaacgcggcgatgcgccgctactggcaggcagtgacccatccgcagtgggcatgggacgtcggattaaacggccgcccacatgatttaggcaacatctccgcctacctcggcaagccgaccggcctggaggattacatcggctggctggcgaataacttcgatccctcgatttcctggaaagaccttgagtggatccgtgaattttgggatggcccgatggtgatcaaggggatcctcgatccggaggacgcccgcgacgcggtgcgcttcggcgctgatggcatcgtggtgtctaaccacggcggccgccagcttgatggagtgctctcttccgcccgcgccctgcccgcgattgccgatgcggttaaaggcgacattacgattctcgccgatagcggcatccgcaacggcctcgatgtcgtgcgcatgattgccctcggcgccgatagcgtgctgctgggccgcgcttatctgtatgcgctggccacgcacggcaagcagggtgtcgccaatctgctgaacctgatcgaaaaagagatgaaggtggcgatgacgctgaccgggacgaaaaccatcggcgaaatcagtcgtgaatccctggtgcaaaacgccgatgcgctgcggaccttcgatgtgatcaaagcagcgaacgcggcggttagccctaatcctgaagaaaccgtccggcaggtgggttaa

SEQ ID NO: 253564 - DNA, 474 bp, Klebsiella pneumoniae
atgcttaacatcgtcttatttgaaccagaaatcccgccaaataccgggaatatcatccgcctgtgcgctaacaccggcttcaatctgcatattatcgagcctatggggtttgcctgggatgataagcgcctgcgccgcgccggtctggattaccacgagttcgccgccgtccagcgccatcgcgattacgccgcgtttgttgaaagcgcaaagccgcagcgcctgttcgccctgaccaccaaaggcacgccggcgcacagcgcggtgagctatcaggacggcgattatctgatgtttggcccggaaactcgcggactgccgggcagtattcttgatgccctgccgccagaacaaaaaatccgtattccgatgatgccggacagccgcagcatgaacctgtcaaatgcggtgtcggtggtggtctatgaagcctggcgccagctgggatatcccggcgcggtactgcgcagctga

SEQ ID NO: 253565 - DNA, 822 bp, Klebsiella pneumoniae
atgccgtgtgaagaactggatatcgtctggaataacattaaagccgaagcccgggctttagctgactgtgagccgatgctcgccagtttttaccacgccacgctactcaagcacgaaaatctcggcagcgccctgagctatatgctggcgaacaagctggcttctccgattatgcccgccatcgcgatccgagaagtagtggaagaggcctacgccgctgacccggaaatgatcgcctccgccgcctgtgatattcaggcggtgcgaacgcgcgacccggcggtggataaatactcgacccccctgctttatctgaaagggttccacgcgctgcaggcctatcgtatcggccactggctatggaatcaggggcgtcgggcgctggcgatcttcctgcaaaatcaggtttccgtatcgttccaggtggatatccacccggcggcgaagattggccgcgggatcatgcttgaccacgccaccggtattgtcgtcggcgaaacggcggtgattgaagacgatgtgtcgattctgcaatccgtgaccctcggtggtaccggtaaaaccagcggcgatcgtcatccgaaaattcgtgaaggggtgatgattggcgccggggcgaagattctcggcaacatcgaagtcgggcgcggagcaaaaatcggcgcgggttcggtggtgctgcagccggtgccgccgcataccaccgccgcaggcgtaccggcccgtattgtgggcaagccagagagcgataagcccgcaatggatatggatcagcactttaatggcatacaccataccttcgagtacggtgacggtatttga

SEQ ID NO: 253566 - DNA, 201 bp, Klebsiella pneumoniae
atgaaaatatggcagaacatcgtggtggttccggtaatttcgctgaagaccgtgataaagcatctgaagctggacgtaaaggcggtcagcacagcggtggtaattttaaaaacgatccgcaacgtgcatctgaggccggtaaaaaaggcggccaaaatagtcatggtggtggacgcaaatctgacaactcctgattattaa

SEQ ID NO: 253567 - DNA, 498 bp, Klebsiella pneumoniae
atgaatatgaagagcatagaagacgtttttattcatctgttatcggatacttatagcgcggaaaaacaattaacccgcggcctggctaaactagcccgggcggcgtcaagcgagcagcttagcgccgcattcaaagcgcatctggaggagacccaggggcaaattgaacgtatcgatcaaattgtcgaacaagaagccaatattaaaattaagcgcatgaaatgcgtggcgatggaggggcttatagaagaagctaacgaggttattgagagtactgagaaaaatgaagtgcgcgatgccgcgttaattgccgcagcgcaaaaagttgaacattatgaaattgccagctacggcactctcgccactttagcccaacagctgggttataaaaaagcggttaagcttttaacagaaacgttagaagaagagaaatcaaccgatctgaaattaactgacctggcggtcggcaatattaataaagaagcacaaaataaatag

SEQ ID NO: 253568 - DNA, 507 bp, Klebsiella pneumoniae
atgaatcacgttgaacactatcacgactggctacgcgatgcgcatgcaatggaaaaacaagcagaatccatgctggagtcgatggctggccgtatcgataactaccccgatttgcgtagcagaattgaacagcacgtcaccgaaaccaagcgccaaattacggttctggaagagattctggatcgtaatgatatatcgcggtcggtgctgaaagattcaatgagtaaaatggctgcgttaggtcaatctattggcggcatgttcccttccgatgaaatcgttaagggttcaattagcggctatgttttcgaacagtttgaaatcgcgtgttatacctctctgcttgccgctgcgaaaagagccggtgacaccgcgtctattcccgccatcgaatccattctggcggaagagcgggccatggccgactggctgctgaaacatatcccgcaaacaacggaagagttccttctgcgctctgacgcaaaaggcgttgaagctaaaaaataa

SEQ ID NO: 253569 - DNA, 873 bp, Klebsiella pneumoniae
atgttccgacacgttaagcaacttcagtataccgtcagggtcgcggaacctaatccggggctggctaatctccttctggagcaattcggcggccctcagggcgaactcgccgccgcatgccgatatttcacacagggcctgagcgatgacgatccgggtcgcaaggatatgctgatggacattgctaccgaagagctgagccaccttgaaattatcggctcgctggtaggtatgctcaataaaggggcgaaaggcgccctggcggaaggtacggaaaacgaagccgatctgtaccgctcgcttaccgctaacggcaacgacagccatattacctctttgttatatggcggaggcacgccgctgaccaattccgccggcgtgccctggaccgcagcatacattgacaccattggtgaacccaccgcggatttacgctccaacgtggccgccgaggcgcgcgctaaaatcatctatgagcgcctgataaacgtcaccgatgaccccggcgtgaaggatgcgctggcctttctgatgacccgagaagccgcccatcagctctcttttgagaaggcgcttcaatccatcagaaacaactatccgccgggcaaactaccgccaatcactgactacgccagcacctactacaatatgtcagagggcgatgacattcgcggcagctggaatagcgatctgcacttcgagtatgttgcgaatccgcagcctgcagtagatggcggagatggcggtgccagcgttaagctaacggccgaacaaaaggccctggtgaaaaccatggcgaaacgcacccaatccgacccggaaggcgatcctctcaccggcgcagaacttggcgcgggtaagaaaaagccgtaa

SEQ ID NO: 253570 - DNA, 1404 bp, Klebsiella pneumoniae
atgtttgaactcgatgcgtttaatctggcaaggctacagttcgcatttaccgtctcttttcatatcctgtttccggcgattaccatcggactggccagctatctggtggtgctggaggggatgtggctgcggacaaaagatgacgtctggcgctcgttatataatttctggctgaagatttttgccgttaatttcggcatgggcgtggtatcaggcctggtgatggcctatcagttcggtaccaactggagcggtttctctcagtttgccgggagtattaccggtcccctgctgctgtatgaagtcctcaccgcgtttttcctcgaagcgggcttcctgggcgtcatgctttttggctggaacaaagtccccccaggactgcattttttcaccacctgcatggtggcgctcggcacgctaatgtccaccttctggatcctcgcctccaatagctggatgcagacgccgcagggctttaccattgaaaacggtcacgtcattccccaggactggctggcgattattttcaacccatctttcccgtatcgcctgttacacatggcgatcgccgcttttctcagcagtgcgatgttcgtgggcgcctctgccgcctggcaccttctgcgcgggaacaatacccctgccatacgtaaaatgttctccatggcgatgtggatggccctgctggttgcgccaattcaggccttcgttggcgatatgcacggcctcaatacccttgagcatcagccggcaaaaatcgccgccatagaaggccactgggagaataaacccggcgaggccaccccgctgctgttgtttggcataccggatatggaggaagagcgtaccaaatacgggctggaaattccggcgcttggcagcctgatcctgacccatagcctggataagcaggtcccggcgctgaaagattttccgaaagagaatcggccaaactccctcatcgttttctggtcgttccgcatcatggtgggtatgggcgtgctgatgattgccctcggcgtctggagcctgtggcttcgctatcagcagcgtcttttccactctcgcgccttccagtggtgcgccctggcgatggggccggcaggactgctggcgctgttggccggctggatcacgaccgaagcgggacgtcagccctgggtcatttatggttttttacggacccgggatgcggtatcgctgcacagcacggcgcaaatggtcgtcagcctgctggtctttatcgtggtgtactgttcggtctttggcgtcggttattactacattgtccggcttattaagaaagggccgcaacccgtcagcgaattgacatcgtcaacgtccggcacgccggctcgccccctttctgccgcagaagccgtgcctgaagaggagactcgctaa

SEQ ID NO: 253571 - DNA, 1011 bp, Klebsiella pneumoniae
atgggcatcgatattcccgttatctggtttgtcatcattgtattcgccacattgatgtatatcgttatggacggcttcgatcttggcatcggaattttattcggctttgtaccgaatgctcaagaacgcgacgtgatgatgaatagcgtcgccccggtgtgggatggcaatgagacatggctggtgctgggcggcgcggggctatttggcgcctttcccttggcctacgccgttatcaccgatgcgctggctatcccgctcaccgctatgctcattggcctgatcttccgcggcgtcgcctttgagttccgcttcaaggccaccccctcgcatcaaaagttctgggactactcttttgtcagcggctccctgctggcgacctttagccaggggatggtggtaggcgcggtcatcaacggttttgaggtcgccgaccgcaggtttgcgggctcggcgctcgactggctgacgccctttagcctgttctgcggcttaggactggtcgtcgcgtatatgctgcttggtacaacctggctgattatgaaaagcgaaggcgccctacaacagcgcatgcgtgagctgactcgccacacgcttctggcgctgatggcggtcatcgccgttgtgagcgtctggacgccgctgggctggccctccgtggctgagcgctggtttaccctacctaatttctactggtttgtacccgttcctgtactggtcattgccttaagcctgtggatctggcggttaagcgcccatcctggtagccatgcccgccctttcctgcttacgcttgggctcatttttcttggctttagtggtctgggtatcagtctctggcccaacatcatccctccgcatattacgctgtgggaagcctccgcgccgcccgccagccagctctttatgctggtagggaccctgcttatcattccggtgattttggtttacaccgcatggagctactacgtattccgcggcaaagtttccggcactgaaggctatcactga

SEQ ID NO: 253572 - DNA, 123 bp, Klebsiella pneumoniae
atggcggactggcatacgcgagccatcatttatcagattgattcggcgctgttttacgatctcaacggcggcggctggcgctctgtcatgccgtactcttttcactccccggcgtaccgataa

SEQ ID NO: 253573 - DNA, 531 bp, Klebsiella pneumoniae
atgcgctacggggatgaaattgggatgggtgacaatctggccctggaagagcgctacgcggtgcgcacgccgatgcaatgggccggctcagcgggcggcggtttctccgcagccgatcctgctacttttgtcgctccattgatcgataaggggccgtttcgctatcagaaggtcaacgtcgctgattcgctgctgcaccgccattcccttctgcatcgcattatagatatcgccaatacgcggtgcgagtttccggaaatcgccgttgcgccttttcgcattatcagcatcgatcggcaggcgattctggggatttgctacgatgccgaccaacgccgcgtcatcacctttcttaatttcagcgacaagcgcgtgcgcttcaccgcgaaagagattgccgagggcgtctggacgccctgcctggccgacaaaacctatgctgacgaccttgttgcgggtaaacgcgttgagctggagattggcgcctatggctaccgatggttctggaccaacagtagcgcgctgcgttag

SEQ ID NO: 253574 - DNA, 990 bp, Klebsiella pneumoniae
atggcggtcatgacgatcaccggcggtactgcgggcgtcggcaaagcaacggctgttcgctttgcgcgggcaggctatgacgtggggattatcgcccgcgatcgtcaaagccttgaagcgacgcaacaggcgctgcggcagtttggcgttcgggtgcatgtcgttcaggccgatgtcgctgatgcggatgcgattaacactgccgcctgcgagatcgaaaagcaattaggggctatcgaggtgtgggtcaataacgccatgtgcgcggtgctggcgcctttcaggacgatgacccacgatgaattttcgcgggtcaccgaagtcacctatcttggttacgtcaacggtacccgcgccgcgctggagttaatgacgccccgcgatcgcggcatcattatccaggtcggttccgcgctggcctatcgctccattccgctacagtccgcctactgcggggcgaaggccgcgattcggggctttaccgatgcggttcgcacggaactgatgcatgaaaagagcggcgtgagtatctcaatggtacagatgcctggcctgaatacgccgcagtttgagtgggcgcgcaataagtttgcctgggcgatgcgcccggtgccccccgtctatcagccggaggtggccgcagaggctatcttcaacgttgcacgcaggcccgtgcgtgaactctgggtggggagcagcacaatccagtctatcgttgggcaatttctcttccccggcttcctcgatcgactgatggttaataaagcatgggaagggcaaatgacccggcacaggaatgtcgctgaccggcaggattatctacaacagccggtcagcggactgcataaaacccacgggcgtttttcctcagaggcgaagtatcgcgccgccgccatcacctccggcgtgccgggaaaagcgctactcggcggcgcggcagcggcgggatggttgttggcaaaatggtttatctcgcgtaaaaaacgctaa

SEQ ID NO: 253575 - DNA, 519 bp, Klebsiella pneumoniae
atggcgaataatccttataaccaggcgaaaaccaccggtgagctgaccaaacaagtcgccatcgcattgaccgaccgtcgtttacgcttaaccaccgctgagtcgtgtaccgggggaagcctggcggcagcgctgtgcgcggaggaggatacggctgcgttttacgatattggtttaatcacctttagcgaccgtgcgaagcaaaaacttctcggcgttaaggcttcgacgctggaaaagtatagcgccgtcagtcgacaggccgtggaagagatgtcgacgggcgcgctggagtgttccggagcggatatcagcattgcgataagcggatacgctgggccggacggcggcgaggacgggacgcctgcgggaaccgtctggttcgcatggaattttcgcggcgcaatcgacgcgcagaaggtgctgttttccggcggctgccaggatgtcgttgagaaatccgtacgctactcgctggcgatgctgatggagaaactgcccggctggcagggcgaataa

SEQ ID NO: 253576 - DNA, 447 bp, Klebsiella pneumoniae
atggagatggtgttgcgggcgctggccatttatttaattttgctggtggtttttaaaatcgccggacgccgggcgctattacaaatgaccagctttgatctgattttattacttatcatcagtgaagcgacacaacaggcgctgctggggaacgacttttcggtcaccggcgccatgctgacgattatcacgctggtggtggtggatatgctctttggcttaatgaaaaaatatatggctggcgccgagtcagcgcttgatggctgcccggtaattttagtcgaaaacggcgttccgttaattgataaactcaaaaaagtggatgtctcctgcgatgatattcttgtggccgcacggcagaatcagggtattacggaattaagtaaaatcaaatatgccatactggaaaggaacggacatatttctattattcctgctgaaagttaa

SEQ ID NO: 253577 - DNA, 504 bp, Klebsiella pneumoniae
atggtcagtgaaaaagagaagctgcccgggataaaagagagtgaactttttcttaattttgaatgtgctgctcgtaagatcgggctcgggatattattattaatcatcttcgcagcgctggcggggattttttccaccggctatttgagccgtgctgaaaaaacaaatgcccagcaaaatttaaccgtggtttatgagcgttttggccgtttgcaaactgagttccgactaaaaattactacccattcgcgcgtcgccaataaatatgtttttagccttggcggtgattttacttcatcgctcgaaaccaatactatctggccccagccagatagtatgtacagtaaggacgatcggctctttttggtttataataatttgaaaagtatggaaaacttttccatatggctctacgttacgcccaccgctcccggcaagctgaaccacgttttacagcttaatagcgaacccgaaattcgcttctggcaatttatttatccttag

SEQ ID NO: 253578 - DNA, 999 bp, Klebsiella pneumoniae
atggcaaccataaaagacgtagcagaaaaagcaggtctgtcggtgacgacggtctcccgcttcctgaacaatcatccttatatcgctgaagataaaaaggaaaaaattctcgcggcgatgaaagagctcgattacgagccaagcaccgtcgcgcagcagatgcgcggcgtgaaaacccaccgcattggcgtactcatttcgaggatcactaacccatttttcgccagcctggtggacgctctcgaagtcaccgcgcgtaaacacggctactcagtgctgatcgttcagaaccacaatagcgcgggcgaagaggagaactgtctcgatctgctgaagaaaaagatcatcgacggccttatcttgtgcgccgtcgaaagtgataaggacgtgatcgagcaatatcagaaatatggtccgatcctgctgtgcaacaccagcctcgataacacgactctgcccgtggtcagaatggacgatgaactggcgacctatcgcgccgtcagttggctgctgcataaagggtatagaagaatcgcctactctaccggcggcgcattccagcaaaagggccacggtagcagaaggaaccgcggctttattgccgccatgcagcaggggcagcagccgattgacgagcggctggttttccgccacgtccacacctggcgcgacgggcagcgtctggctgagcagatcctacagatggctaaaagcgaacgtcccgatgcaattttcgccggcagcgatgaagtcgcctgcggcttaatttctgcgctctcagccaacggcgtcagcgttcccggcgaactggcggtcatgggctttgataaccttccggtggcggagatggtgcatattccgctcactaccgttagccaacccatcgagcaactgggccgcatctcggtagaacgtctgctggccctgatcaacaacacgcactatcgctatgacgaggaagacctgaaatcggaactggtcatcagggcctcggcgtaa

SEQ ID NO: 253579 - DNA, 1665 bp, Klebsiella pneumoniae
atgaatcagtcacaacaaggggcatggtggaaggaagcggtcatttatcaggtgtacccaaaaagcttctatgacagcaataacgatggcactggcgatatccaggggataatcgcgaaactgccgtatctgaaaacgctgggcatcaccatgatttgggtctcgccgttctacctctcgccgggtgcggacaacggctacgatatcgccgactactatgcagtgaaccccgatttaggtcagctgcaggatgttgacgacctgattaaacaggcaggcgaactgggaattgggatcatggtggatctggtggttaatcataccagcgatgaacaccgctggttccaggccgcactggcggaccctgcctcaaaataccgtgattactacatctttaagcccgccgttgctggtgccgcgcctaataactggcgttcgatttttggcggcagcgcgtgggaaaaagtggctggcgaagagtgctactatttgcacgtttttcataaaaaacagcccgacctgaactgggaaaacccgcagctgcgccaggaaatctacgccatgattaactggtggctggataaaggcatcgccggttttcgcatcgatgcaattacgtttattaaaaaagatcaggattacgcctccctgcccgccgacggcgtcgatggtctggcctccattaaaacgaaatcgcgcaaccgtccgggaattgaatgttttctgaacgagctgaaagaacacaccttcaaccgccatcgctgcgtgacggtgggcgaagcgcccggcgtgcctctgcaggagtacgacagctatatcggaccggacggctatttcaatatgatcttcgattttcacgctgccgatatcgatgtcgagaacggctcggagtggtttaagcagcgcaactggcgcgtgggcgaattcaaagaagcgctttttgccagccagcgcgctttttgtcaggccggctgggggacgacgtttattgaaaaccacgaccagccccgggcgctgtccaagctcatccgcgacgcggattaccaaaatgacatcggtgccaaagcgctggccgcgatgtacttctttatggccggaacgccgtttatttaccagggccaggagctgggaatgaaaaattttcgccggcagtcaattgcggaatttgacgatatttccagtctggataactatcaccgctccctcgcggaaggtttctctgaacagcaggcgttaggctttattaatcagcgctcccgggacaactcgcgaacgcccttcccgtggtcgaatagcgtcaacggcggatttaatcagggtacgcagccctggctggcgttttcttcaaccgactttagcgtcaatgcgcaaagccagataaacgatgcgcattcggtgttcgcgttttaccagaagatgatcgccttgcggaataagcactatccgcaagcgctgatttatgggtcattcgccgccgtggaggacgttgacgagcgtatcgttgcctaccagcgcgcaacacacaacgaacgttttatctctatcaccaacttaagcgcgcagcatctgccttacacgctcccggcaggagagattgtactcaataattatgccgacgccgacgccaccctgaaaccttatcaaaccattctcgttaaggaatga

SEQ ID NO: 253580 - DNA, 1398 bp, Klebsiella pneumoniae
atgaacaaatataaaaatatcgccgttgagattgtaaataccatcggcaaggagaacattgcttccgccacccattgcgccacccgtttacgtttgcaggtaaaagaccggcagaaaatcgatgatgataaagtccgtaatatcagcgaagttaaaggcgtatttttcaattccggtcagtatcagataatcctcggtaccgggatcgttaataaggtttatcaggcgtttgttaacgaatatcaggttgccgaagtcagtaaggatgaaatgacgaagcagagttcgggccgattacagcggggaatacgcaacttatcggacgtttttgtgccaattgtcccggttctcggggcgaccggtctgtttcttggtctgaaaggggtcatttttaatgataccgtgcaggcgtggtttggcagcagcgtccatcaggttccggcggccctgcaaacgctgaccacggtactctgcgataccgctttcgccttcctggcggcgtttatctgctggtcagcctttaagaagtttggcggtacgccgattatcggttttttaatcggcctgatgctggtttccccggcgctgcctaacgcctatgacgtggcgtacggcaatagcagcccgatttatgtgtttggcgttattccgctggtgggctatcaggggtcaattttgaccgcactcatcaccggtattatcggcgcaaaactggaaatctttttccgccgggtgatgcccaactcgatggacctgattttcacgccgtttatcgtcattctgattgctgtggccatcgctttactgattttagggccgctggtacatgggtttgaacactacgccgtgatggcaattcagcaatttttgacgctacctgcgggtattggcggcctgttaatcggctttatctatcccattgccgtaatgaccggaatgcatcacatgtttattatgattgaaacctcgctgattgccggcaccgggtttaatccactcattacggtttgcgcgatgtacggttttgccaacgccgccgtatgtctggctatttcactgaaggcgaaaaatatcgcgtttaaaaccgccggaatttccgcgaccattactcagctattaggcgtctcggaaccggctttattcggtatcgtgatgcaatccgggcttcgggcgataatggtgatgctcaccagctcggcgctgggcggcatgattctgtcgctgctgtcgataaaagcgaactcatacggtctggcggtcctgctgtcgccgctaatgtatctctacgatcgctatcagtttgtcacctatattaccgtgggactcgcggtgtttatttttgcttttattattacattcctttttgtcaaaactgctaacacccgcaaagagagctga

SEQ ID NO: 253581 - DNA, 1575 bp, Klebsiella pneumoniae
atgatgaaagcctatatgcttacgctctgcgcgctggctttgccagcatccgccgctgcggcggataccaccctgaatgaaattaatgcccggcttgaaagacttgaggccgaattaaagcagtcgcgcatccagttacaggatgcgacgcgtaaaatagatcgcgcggaaaaaagagcggccagcgccgaacaaaacgcggcgcgcgcgcaagaaagactgcaggccgttgagcacagaaccgaccaggatctggcattaataaaaaaccagccggcgcagaatgtcgtcgcgcaggcgaagcttcaggaaatcaccttcggcggctacgcacgcagcggcatattaacaagcaagggcacaaccagtaccgtcgggccttccctgacgcctgcgggcagcaccggggggagcgtcggtcgccttggcaatgagtcggatacctatgtgaccgccgatattaactaccggcgaaaatatgataacaatagccagctgcgttattacatgaaaatcgccgagtgggataaaacctataataccgacagttcctttaacggccagatgaacgtccgtcaggcttttgtcgaaatgagcgatatgcccgcgtttagcggcgcgtttaaacaggcgacgctgtgggccggtaagcgggaagatcgggataacttcgatattcactggcttgattccgatatgatgaatttaatcggtaccggggccggtatttatgatgtgaatttctggggagatatcaaaaccaacctcgcggtatatggccgtaatttcaacgatatcgatacgatggacaacgttgaatataacaacatgaccggcgcggataacacgtatattcaaaactataccttctcgcttaatcaccgtctggcgaactggcagtggatgctcaacggcctctactcgcaggacaacgacaaacgcataaacgatggtctggcgtcggataaagcggcctcgcaagggtttaacaccatgctggcgtaccacggcgacagcttctacggcctgcgccccggcagtacgaaaaccgcgctgctttatggccgcgcgctgggagctgaagttcgcggcccgggctccgacggttatttgattcaaccggcatggaccgtgaagttcgcctcttacggtatcacatcactcaccgacaggctgagcttcgcgccgctgatcgtcgcccagagcagcaataatcgctatatcgattctgaccattacgactgggtcaccctgaacgcaagaatcattcagcaaattaatcagaatttcgccctgcaatacgaaaccagctatcagtatatggatatcgacccgaaaggttttaacggcaacagcgccgccagcggtagctactacaagctgacgtttgctcccaccttcaagctgcaaaacgtaacggacttctttgagcgtccggaaatccgcttttttgccacctggatgcgctgggacaaatcgctggataactactcatcaacggataccttcggcagcgccggataccatagcgctggtacgctgttcttcggcgcccagctcgaaacctggttctga

SEQ ID NO: 253582 - DNA, 1680 bp, Klebsiella pneumoniae
gtggagcttttcaactggcggaaggccaccgataacaaatgtgataacaacaacggcgggtcagtcattatgaagaaaattgccattatcggcgcaggtcctaccgggatttataccctgttctcattgcttaaacagggcgaaccgctggacgtgtcaatttacgagcaggccgaggaagcgggcgtgggtatgccctatagcgatgaagagaattcgcgcatgatgctggccaatatcgccagtattgaaatccctcctgtacaaagcacctatcttgactggctaaaagcccagagcccgtcgcgcctggcgcgctatggcgtagagtatgaaacattgcacgatcgccagtttttgccgcgcatcctgttgggcgaatattttcgcgaccagtttcttgcgctggtcgaaaaggccagggaactgggatttaacgtccaggtcaatgagtcctgtcgggtcagcgacctgcaggcgaccgaagaaggagtgaggctgtgggttgaggagcagcccgtcgccgaagtgtttgacctcgcggtgcttgccaccggtcacgtctggccggatgaagaagagtcaacccgcacctggtttcccagtccgtggtctgggctgatggaagccaccattccgccctgccgggtgggaattatgggcacctcgctaagcggaattgatgccgcaatggccgtcgccgtccagcacggtcagtttctcggttccgacgatgaggcgctcaccttcaggctcaacgaaaccagtcaggcgctgcacatcgtgctgatgtcgcgctccggcattcttccggaagcggatttttactgtcctattccctgggagccgctggaaatcgtcaccgacagcgcgatggaaaatgccatcgccgcggggagcgacggcctgcttgaccgggtctttgctttgctggcgcaggaaattgccctggccgaccccctgtggagcgaaaatatcgcccttcacagccttaacgccgatagcttcagcgaagcgtggtttgctaaacgccagcagcataaccctttccactgggcgatggataaccttgaagaagttgagcgtaacaagcgcgggcgctacacggtcccctggcgctacgttattctgcggctgcatgaagccgttcaggcgatggtgccccaccttaatgaccgcgaccgggagcgattcaaaaacggccttgcccgggtctttattgactgctatgccgccattccttcggagtctatccgccgactgctggcgctgcgcgaagcgggcgcgatcggcattctcgccttagggcatgattatgatatggcggtgcagcaggagaagacggtgattaccagcgggcaaaatcgctatacgtttgacgtgtttattgatgcgagggggcaaaaagcgctgaaaaataaagatctccccttcccgcatttgagggagcaactgatggcgacgggcgaagagatcccggaggttggcgacgactatacgttaagagagccgcccgtagcgcgcgggcgtatcgccttcgccgcaatcccctggctgatgcacgaccagcctttcgttcaggggattaccgcctgcgcggagatcggcgcagcaatagccagggcgatatcgcagccggcgagccgctcacgcctacgtttagcgccattcgatctttaa

SEQ ID NO: 253583 - DNA, 150 bp, Klebsiella pneumoniae
atgtccgtacagcatccagccgacccggataaacgcggtcgtcatccgtcgaaagaggatccgcgcgagcagggtgaagttccgcgtaaaagagacgacagcgaagatcataaagaagatccctggcatccccaacctgaaaaacgctaa

SEQ ID NO: 253584 - DNA, 393 bp, Klebsiella pneumoniae; identical to SEQ ID NO: 174464

SEQ ID NO: 253585 - DNA, 885 bp, Klebsiella pneumoniae
atgagcgagaacgctaacaataccgcgaagtatccccgtcccccctttgttgaccagccgcaatcgccgccgggtcttgccgaagagatgaagccgcagccggatcacggcgaactgagctacgtcggttccggtcggctggcaggtaagcgcgcgctgatcaccggcggtgattccggcattgggcgcgcggtagcgatcgccttcgcccgcgagggcgccgacgtggcgatcaactatctgccggaagaggagtccgatgctgaaaccgtgattgccctgattgaggccgaagggcgtaaagccgtagcgattccgggcgatgtgcgcgatgaagccttctgtgaatccctggtcgagcaggccgccagccaactcggcggactggatattctggtcaataacgccggacgccagcaatattgcgagtcgctggaagagttaaccaccgccgactttgacgccacctttaaaaccaacgtttatgcggccttctggatcacaaaagccgccctgcgtcatcttaaagaacacagcgtaattattaacacctcatccgtgcaggcctttaagccgagccccatcctgctcgactacgcgcaaaccaaagcctgcctggtggcattcacgaagtcgctggctaaacagctggggccgaaaggtatccgggtgaacgcggtcgcgcccggcccttactggacggtgctgcagtcaagcggcggccagccggaagaaaaagtgcgtcagttcggcgccgatacgccgctgggccgtccagggcaaccggtggagatcgcgccgctgtacgttacccttgcctctgatgcctgctccttcacctccggccaggtgtggtgctccgacggcggcgacggcgtgctgtaa

SEQ ID NO: 253586 - DNA, 807 bp, Klebsiella pneumoniae
atgattacgctgtgcgcaacctgcggtacgtcttacgacgatcgcggcaataccctgaacctttgtcgtatctgtgaggatgaacgccagtacgtcccggccagcggacaggcctggattaaacctgacgatctgatcgcgacgcatatgaataaatggcagcagcataatgaacggctgttgagtttcaggacggtaccgaaatttgctatcgatcagcgcgcttttctgctgctcacgccgcaggggaatatcctgtgggactgcatcgctaatcttgatgccgccagcaaaacgctgattaccgcgcttggcggaataaaagcgatcgccatttctcatcctcactactacaccacgatgcaggactgggcagcagcctttgatgcgcgcatttatcttcatgccagcgatcgcgaatggatcatgcgcgatagccctgccatcacattatgggaaggggatgcgctggagatccttccgtcggtacggttgctgcgcctgggtgggcatttcgccgggggaaccgttctgcactgggcaaaagagggaggtattatgctggcgggagatattatccaggtcacgccgggcgcacgcgctgtttcttttatgtggagctatcctaatctgctgcctttggcggcccccagcgtcgagaatatcgttgagcgtttgggcgatgcgcccttcggggcgctgtacggcgccttcgaagggcagaacatcaccaaaaatgcccgtcagatcgtactggattcagcgcagaagtatctcgactgtctgcgcacgacggcgggccgctga

SEQ ID NO: 253587 - DNA, 636 bp, Klebsiella pneumoniae
atgcaacatatcattgagggcttcctcaacttccagaaagagatcttcccgcaacgtaaagagctctttcgcagcctggcatccagccagaatcccaaagcgctgtttatctcctgttccgatagccgcctggtcccggagctggtgactcagcaggagccgggtcagctgtttgtgatccgtaacgccgggaatatcgtcccctcatttggccctgaaccgggcggggtttccgcgacaatcgagtacgccgtcgtcgccctgggcgtgaccgatatcgtcatctgcggccactctaactgcggcgcgatgaaagccatcgccacctgccagtgtctggagccgatgcctgccgtgtctcactggctgcgctactccgacgcggcgaaggccgtcgtggagaagaaaacctgggctaacgagaccgataaagtcaacggtatggtgcaggaaaacgtcatcgcccagctgaacaatattaaaacccacccctccgttgccgtcggcctgcgcgacagcacgttgcgtctgcacggctggttctacgatattgaaagcggcgacattcgcgcgctggataaaaacagcaaaaccttcgtttcgctgtcggaaaaccctgacgtctatttcgaataa

SEQ ID NO: 253588 - DNA, 630 bp, Klebsiella pneumoniae
atgttcttatccagcctgatggccattgccgcggttctcattatgggcgttatcagccccggtccaagctttatttacgtggcccgcaacgccgttgcgcgctcgcgggtgcacggtctggtcaccgcgctgggaaccggcgcgggcgcggctatcttttcgataatggccatgatggggctgcaaaaagtgctgacggcggtgccggaaatgttcatcggcctgaaggttgcgggtggcctgtatctgctgtggctgggttataaaatttaccgcggcgcggcgcagccgatggattttgccgcaggcggcatggcggcggaacattcactattgaaaaccttccgcgatggcctctatacccagctcagcaacccgaaaacggcgctggtattcgcctctatctttaccgccctgctgccggaacgcatcccgttggccttttactatatcgtgccgctgatgagcttcctgatcgacgtcagctggtattcgctggtggcgctggtgctctcttccgcccgcccgcgcagcgtctatctgcgcatgaagcgtaagattgatatcgccaccgccacggtactgggcgcgctcggcctgcgcctgattgccacttcgctgtcaaagtag

SEQ ID NO: 253589 - DNA, 771 bp, Klebsiella pneumoniae
ttgctcgattatgctgcttttcctaaacaacgacaagcgcttatttgccagatcctccaggagaacggcagagtggtttgcgccgaactggccagccgtctgaacgtctccgagcatacgattcgacgtgatttacatgagcttagccgcgagggatactgcaaaaaggtctacggcggcgcggtgatgaccctgcctgaggccggtgactacagcgcgcgcaaagagaaaaatacggcgacaaaaagcagaatcgcgcagaaatgcgcaaagctggtgaagcccggcggctgcatattcattgataccggcaccaccaatctggcgatggcggaggcgctaccggcggagctggcgctaacggtggtcaccaactcccccgagatcgctgccgtattgctcaaaaaaccgctgtatgacgtcgtgatgcttggcgggcagatccaacgcgccaccggcggctgcgtgggggcctccgccgtggcgcagattcagggtatgcttttcgatcaggggtttatcggcggctgcgccatggcgcctgagtcgggcctgacaggctttgactattccgactgcgaatttaaaaaagcggtcattaaacagtgcagcgaaattattgtcggcctgacctccgataagatcccggcggtggcgcgcttcgtggtggtcgagagcagcgccattgacgtactggtcgtggaggaaaatatcagccgggaatatcgcgacgcgttcagcgagcacgacatccgtatttataccgtttaa

SEQ ID NO: 253590 - DNA, 384 bp, Klebsiella pneumoniae
atgaaaattgcccatatcgccctttggacccgtcagcttgagcaacaggcccgcttctgggtagccttcttcgacggtgagataaatgagaagtactgcagtcagaccaacccggggtttgaatccttttttgtcaggatcggcgatgatattgccattgagctgatgaccaagccgggattgactgcgctgacggcggataataaccacaccggctgggtgcacctggcgataaccgttggcggcgcggagaacgtcgacaggctggcaaaacgcgccgctgagcaggatattctggtttctgcgcctcggaccaccggtgatggctattatgaagcggtaattaaagaccccgatggcaacctgattgaaatcgtcgcatag

SEQ ID NO: 253591 - DNA, 639 bp, Klebsiella pneumoniae
gtggccaactatcacgtcatagacaaacaaacctggccgcgaaaagatcattttgatttttatcgcggttttgccaatcccagctttaatctctgcgttcctgtcgaggcgcagcggctatatgagtgcgcgaaagatcgcggcgtctcgtttttccagctggccctcttcgcccttgtgcgcgcggcgaacgaggtgccgcagcttaaacagcggctgctgggcgacgatattatcgaatatgaccagctggcggtgatgacgccagtgatgaccgcccaggaaggttttcgccaggtctggtgcgagaatgccgccgattttgccgccttcagccaggccgccacgccacatatcgaggcggcaaaacacaccgccccggcgccgcttatcgtcaacggcgaaaatttcttctgcgccagctgcctgccgtggctgcatttcagcgccatgactcacgctgagtattacgttggcgcgtcggtgcccgccctcacctggggcaagctgaaaaacggtattattccggtcgcgggcaaattcaatcacgcctttgtcgacggcctgcacgccagccgtttttttgcccgcgtcgaagaaaattttgctcaaccggagatcctctggcaggcgcgataa

SEQ ID NO: 253592 - DNA, 1224 bp, Klebsiella pneumoniae
atgcccgacgaaaaacagacccttcactattgccgccagacgccaaaggcatacgttatccgcagcgatgacgaagccatcgccatcgcccatgaaatcgcggcggtactgcagcccggcgcggcgcaacgcgatcgcagcggcagcgtgccgccggagattatcgatacctactccaatagcggcctgtggggtatcaccgtcccgcggcaatggggcggagccgaggtatccgccgccacgctggcccaggtgatagcgattatttccgccgccgacccgtcgctggggcaaattccccagaaccattactgtcttctggaggatatccgtctgcagggcagcgaagagcagcaggcatttttcttcgctcaggtgctgcaaggctatcgctttgccaacgcgctttctgaaaccggcggcaagacggtactcgatatccgcactcgcctggaggccagcgaacgcggtctgcacatcaccggtcgaaaaggctactgcaccggttcgctctacgcccactggatcggcattctggcgctcgatgcagagaataacgctcagctggcgtttgtgccgcgcgaatcggctgggctgacggtcatcgacgactgggcctgcctcggccagcgtaccaccgccagcggaacggtcctggcggagaatcttgtcgtcgagcctttccacctgttcccgacctggaaatcctacgcgacgccaacccttgccgggccgtttgcccagctcaccaccgccgctatcgacctggggattgcccgcgcggcgcttaacgacacggtgatctttgtcagccagtttgctcgcccgtggatcgatgccggcgttgagcgggccagcgaagacccgctgactatctaccatattggccagcttgacagccggctggccgccgccgatgcgctgctggagcgggccggcaaagtgctcgatcgctataaatacgcactgagcgaggataacgttgctcaggcgtctatcgccgtggcgcgcgccaaggtctttaccaccgaagcggcgctggaagccgccagccgcctgtttgagcttagcggcacccgctcaaccagcatcgccctcaatcttgatcgccactggcgcaacggccgcgtccacaccctgcacgatccggtgcgctggaaatatcagctgctgggcaactgggtgctgaacggcattcctccacaacgccatgactggaactga

SEQ ID NO: 253593 - DNA, 675 bp, Klebsiella pneumoniae
atgaacggcgcgctggcttttttcgctgatatcgactggggcgacgtggcgcaggccagcctcgataccttgaccatgctgggctggtcgctggggtttaccgtgctgattggcctaccgctgggaattgtgctctatctcagcggccagcctcgcctgctccatgctccgcgcctctatcgcctgctgtcgctgggggtcaacgttctgcgctcgctgcccttcatcattttattgattgtgatgatcccggtgacgacgctgattaccggcacctcgctgggcgttgaaggcaccattccgccgctggttgtcggctgcgcgcctttctttgcccggctggttgagaccgcgctgcgcgaggtggagcacggtctggtggaggccagttggtcgatgggcggcaacacctggcagctaatctggcacaccctgctgccggagtcgcgcgccgggcttattgccgccatgaccgtgaccgcgattttactggtcgattatacctccatggcgggggtcatcggcggcggcgggctgggcgacctggccatccgctttggctatcagcgcttccagacggacgtgatggtgataaccgttctgctgctgattgctctggtgcagatagtacagatgagcggcgatcgtctggtgaaggcgatgagccgcaaataa

SEQ ID NO: 253594 - DNA, 777 bp, Klebsiella pneumoniae
atgaaaaaaacaacactcgcagccgggctcctggccctcttcgctttatccgccagcgccaacgagacgctgaccgtgggcgcgacgccggtcccccatgccgaaattctggagttcgttaagcccgagctggcgaaacagggggtcgatttgaaaattaaagtcttcaacgactttatccagcccaaccagcagctggcggagaaaaatctcgacgccaactactaccagtaccgccctttcctcgataactacaaccagacccgccacacccatctgctgccggtggtcggcgtgcatattgaaccgtttggcgcttattcgagcaaatataaaacaatcaaagaggtaccggatggtgccaccgttgccatcccgaacgatccggtgaataccggtcgcgcgctggtgatgctcagcaatgccgggctgattaccctgaaaaacccgcgcgatccgcagtcggcgaccaaagatatcaccgctaatccgcaccgttttaaaattcgcgagctggaaggcgcgatgctggcgcgggcggtgaatcaggtcgatctggcgtttatcttcgccaactatgcgctggaggccggaattgataccgacaaggcgctgctggtggaaaaaggcagcgacctgtacgtcgagtatctggtggcgcgtcccgacaacatcaacgatcccggcattcagaagctggcgaaagccctgaactcagaccgcgtgcgcagcttcattctcacccgctataaaggcaaaatcctgcccggtttttaa

SEQ ID NO: 253595 - DNA, 1041 bp, Klebsiella pneumoniae
  misc_feature (296)..(305): n is a, c, g, or t
gtgacgcaaaaacccaacgccacaacgcatattcagttgagccagataagtaaagcctaccccaacggcgtgcaggcgctgcgggatattaatctgcagatcgctcagggagaaatcttcggcattattggccgcagcggcgccggaaaatcaaccctgctgcgcctgttcaaccgcctggaaaacgccgacagcggtgagattaccattcacggcgaacatactcggcactactcccgcagccagctgcgcgacctgcgccggcgggtcgcgatgatctttcagcactttaattnnnnnnnnnnggtggcgcagaacgttgagctgccgctgaaaatggccggggtaccgcgggcggaaaggcagaaacgggttgcggagatcctggcgcttgtcggcctcagcgatctgcgcgacagctggccggctaagctttccggtggccagaagcagcgcaccggtatcgcccgtgcgctggtcacgcagccggagatcctgctgtgtgacgaagccacctcggccctcgacccggaaaatacccttgcagtactaaaactccttaaagagatcaaccagcgccttggtttgaccatcgtgctgatcacccatgagatggacgtcattcgcaccctctgcgaccgggtcgcggtgcttgagcacggagaaattatcgaacagggcgaggtgtggcgagtatttggtcatcccggacatgctgtcacgcaaagcctgctcggcacgctccatcatgaccgtgcggaagaacgactctcgctgagcgaaaaccagcagctggtcacgctgcattttgacggcagcagcgggcaggaaccggatttacagcgcatcgccgcgctgctgggcgccgatgcccgcctgttatacggcagctgcgagcagattcagggacgagtgattggccagctgcggatacgcctggcgaagccgctggccaatcctcatttacagcagcatgccggctgggtggctgaccgcttaaccctttccggcgatacggcagcggagaatgctggcgtttag

SEQ ID NO: 253596 - DNA, 1704 bp, Klebsiella pneumoniae
ttgtccagactactgcacgggttaaaaaccaaacagacgcggttcgcgcttgctctgaaaatcgcgttgctcggcggcgcggtggcattttcttctgtcgccatcgccgacgagatcttaaaagaagggatcaccccggccagcgatgccagccagatccccgcagcggcaaagctgcgtaaagataccgtcgtggccggcatttccgagccacagggcatttttaacccctacttcttcgtcaacggctgggatgaaaacgtcaccaacgtgatcttctcccgcctgatcgactgggacagccacggcaaactggtgccgggtctcgccgaaagctggacggtcagtccggacaacaaggtctacaccatcaagctgcgacccaatctgacctttagcgacggctcgccgctgacggctgacgatgtcgcctttaccctcaccgtgctgctggacccgaaatacgacggcgataccgatattacgctcgccaatatcgccggcggcgcggagtacaaagcggcgaaagccgatagcgtcagcggtctgaaagtgctggatcccttgacgctccaggtgaccaccacccagccgggcgcgacgacgttggcaaaaattggcggtccggtactctccagagcgtattacggcaaaggctaccagcgcggcaatctcgattatctgcgcaccctgcacggcaaaccgctgggcaacggtccttacgtttatgacaaatatatccccggccaggagattcgtttccacgccaacagccatttttatcgcggtacgccccccaccccgcgctttatctatcgcgtgaccaacccggcgaccaactttcagctcttccagacgggcgaaaccgactacgacgcctttacctcgcgtccggacgatatcgaacagctgaaaatgctcggctttgccaacatcaatctttacggctccagcgactacagccaggtggagtttaacgtccgccgcccggcgctgaaggacatcaaggtacgccaggcgctgatttacggcctcgatcgccagaagctgattgatgtggtctaccagggctacggtaaagtagcgattgagcctatcgcgccaatctcctgggcctggaacgccgacggagtgaacccgtatcactatgacccggcgcaggcgaagaagctgctggacgatgccggctggaaaccgggaccggacggtatccgcgtcaaagagggcaaacgactggagttaaccctgctggtgagtaagaaagtgcttaacgatgcgctgatccccatcgccaaagagaactggcagcagattggcgtcctgttaaaaccgcaggtcgtcgatttcaacgccctgatggcgcagcgtaagtcgggtaattacgatctggcgtcgttcagcaccagcacccttaacgacccccatgatggcgtgtgggatttttacagcgcggaagcgaaagagtccggctataacaatccgcaggtcgataagctgattaccgaaggtaactcggtgctcgacgttgagaaacgcaagcctatctaccaccagctgtatcaggtactggcgcaggacccgccggtgatccttctcggctaccgcgaaattctctcggcgagcagcgcccgggtcaccggcttcaaaccggatatctacaacggcctgaccggcagcctgccggatgtcaaaatcgttaagtaa

SEQ ID NO: 253597 - DNA, 960 bp, Klebsiella pneumoniae
atgagaaatttcatcctgagacggctgctgcaaacgctgccgatgctgctgctggcttcattcattatctttatgctgtttgccaaaacgccgggcgattttatcgacggcaatatcaccctcaccgccgcccgcgccgccgaactgaaggcgatttacggtctggaccagccgttattcacccgctatatccattggcttggccagctgctgcgcggcgatcttgggttctcgctgcagtaccagattccggtcagccagctgcttaaccagtacatctggaactccttcctgctggccagcgtggcgctggtgttctactgggggattggtctgacggtcggcgcaatctcggcgctgaagcccaactcgctgttcgatcatctggtgagcgtcgcggtcttcgccgccatgtcgttcccgacctttttcctctgtctgctgctgatcaagtggttcgccgtcgacctgcactggctgccggttggcgggatgacccgtaccggtagtgacgacagcggctggggctatgtgctacaggttgccgcccatctggtgctgccggtgctggcgctggtgatgctccaggcaggtagcctgacccgctattttcgcgccagcatgctcgaggtggtgaaaatggattttatccgcaccgcccgcgctaaagggctacgcgaacgcacggttatcctgaagcacgccttgcggaacgccctgctgccgatcattaccctgctcggcttcgagctgccggggctgttctccggggcgatcatcaccgaaaaagtgtttaactggccgggggccgggcatattcatatcgattcgctggccgcccgcgactacccggtgttaatgggctttaccctgtttctggcggtgctgaccattcttggcaacctgattgccgatgtgctttacgcgtgggtcgacccgcgcattcgcgtgaggtcctga

SEQ ID NO: 253598 - DNA, 948 bp, Klebsiella pneumoniae
atgctcagctctctgtattctgttaaccgacgcctgcgcaaggcggaaatcccggcgctggcgcaggttacgccgtccccctggcgtcaggcctggcaggcgctgcgtcacaatcgtctggcgatgctgtgcctgctgctgctggtcatcatggccctctggtgcacgctggggccgctgtggtcgccttggaaggacgatgctaccgacgcgctgatgatcaacaagccgcccggcgcgcagcactggctgggtaccgattttctcggtcgcgatatttacacccgcctgctactggccggacgcatttcgctgatcatcggcctgctgaccatgctgctgtcggtcacccttggctatctgctcggcgcgctgtcgggctacgccggcggcctgaccgataaactcatcatgcgttttgccgatctggtgatgaccatccccggcctgccgctgctgattgtcgcgggagcgatgctctccgagctcgatttctcgccgaattcacgcatctatatggtggtagttatgctgagcctgctggagtggccgaagcttgcccggctggtacgagggcagtgcctctccctgcgcgagcgcgactttatgctggcgacccaggtgctgggcttgtcggcgcggcgccgtctgtttggtcatctgctgccgaatacggtaccgattctggtggtgatggcgacgatggcggtggctaacgctattctcagcgagtcggcgcttagctacctcgggcttggcgttgtgccgccgacgccgtcgtggggcaatatgatggacgccgctaacagcctgatcgattttcagcgccgcccctggctatggatgccgccggggatcgccatttttatcaccgtcattgccatcaacgtgctgggcgatggtctgcgcgacgccatggaccccaaaatgaaacagaggctgaaatga

SEQ ID NO: 253599 - DNA, 981 bp, Klebsiella pneumoniae
atgagtcgcgcattaattacctttaatcaactttcggtctcttttgccgccgacaaaggccgggtacgcgcggtgcaggaggtgtcgttcactatccgcgccgggcagaccgttggcgtcgtcggcgaatccggctgcggtaagagcgttaccgccatgtcgttaatgggcctgctgccgccgcaggcggcgcgcattgacggtggggagatacttttcgaggatcaggatctgctgcggctgaaaaatgcccatatggccgatctacgcggcaatcagctggcgatgatttttcaggaaccgatgagcgcccttaatccggtactcaccgtcggcgagcagctgtgcgagccgcttattcgccaccgcggcgagtcgccgaagatcgcatggcagcacgctatccagcttctggctgatgttggactggcgcgcgcggatagcctgatggccagctatccacaccagctttccggcggcatgctgcagcgggtgatgatcgccatggcgctgagctgccagccgaagctgctgattgccgatgagccgacgaccgcgctggacgtcaccgtgcaggcgcagatcctgcgactgctgcgcgaccaggcgcgagccaaccggatggcgatgatgctgattactcacgatctcggagttatcgcgcagatggccgaacacgtggtggtgatgtacgccgggcgtatcgttgagcaaggtgcgacagccgccattttgcgtaacccgcagcatccctatacccaggggctgatcgcctcgcgccctgtgccgggggagcggcggcgacgcctctactcaatccccggtcaggtaccggacctcgccgcccttcccgccggatgcgccttcgccgagcgctgcgcaaaagccaccgcgcgctgccgacagagcattccgccgctatcggggcacaaccggcaggccgcctgcttttacagtgaactttcggagtccgtggcatga

SEQ ID NO: 253600 - DNA, 966 bp, Klebsiella pneumoniae
atgagtcatgaatacgtgattgaagtggatgggctaaaaaaacacttcccgctacgcgatgggctattcggccagcagaccggcgtgctgcgggccgtggatggcgtgagttttaagattcgccggggcacgatttttggcctggtaggcgaatccggcagcgggaaaaccaccgttggccgcacgctgctggggctatacgagaagaccgccggcagcgtgaagtttcgcggccaggagcttgccgaactgtcgccgcaggcgatgcgcgcgctgcggcctaaaatccagctggtttttcaggacccctacagttcattaaacccgcgcatacgcattggcgtcgccatcggcgaggcgatgctggaacacaagctctgtcgccgggcggagctgtatgacaaaacccttgaggtgatgcgcatctgcgggctgtctccgcagcattacaaccgcttcccgcacgaattttccggcggccagcgtcagcgcatcggcattgcccgtgcgctgatcttaaacccggattttattattgccgatgaaccgatttcagccctcgatgtgtcgattcaggcgcagattatcaatctgttttccgacctgcgcgacgaccatggggtgacgtttttgtttatctcccacgatctgggggtagtagagcatctgtgcgatgacgtagcggtaatgtatctcggtcagctggtagagaccgccagccgcgatgcgctattcagcagccccctgcacccctacacccgggcgctgctggcggcggtaccgaccctcgatccggacagcgagccggtcgcggcgctacaaggtgaaattcccgacccgtcccggcccccttccggctgtcgtttttcctcgcgctgcccgcaggccagcgaccgctgccgccgtgatattccacttctaagggaggttgccgacggccacctcgtcgcctgtcacgcggtttag

SEQ ID NO: 253601 - DNA, 2406 bp, Klebsiella pneumoniae
atggacgaacgacaaggtagcggaaggggaattttcttcaccgtctaccgattactctttgtattactgagctttggcattgggctctttttcaccatctgggggggcaaactcctctcgctgggcggcagcgcctggtatctgctcgccggtattgcttatctgcttatcgccgtcggctatctcgcccgcagtcgatatgtcctgccttttgccattctgacttttctgttgacccttgcctgggcgctgtatgaagtgcagctcagttattggggactgatcccacgactggtggtgcctgcgctgatgctgatgctggcgctgtggctgtcggcgacgctgccgatgccgcgtacgcgggtacgctacgccaactggagcgcttcggcgattttcctcgtgctgctggcgacgctggtctcggccttttacccgcacggcggtatccataacggcgtggtgaaagcgagcgacgacaaaacgccgaccctggctgccagaagcgataactgggcgttcttcggtcgcgatgcctccggcacccgttttgcgccgtacgaggacattacgccgcaaaacgtcaaaaacctgaaagtcgcctggacgtaccataccggccggcggcttaccggcgccgggattggcgtcgatgaaaataccccgctgcaaattggcgatacgctgtactcctgtacgccgctgaacgtggtcaccgcgctggatgcggataccggtaaagcgcgctggcgttttgacccgcacgcgcaaaccgccgagcacgtcacctgccgcggggttggctattgggatgcgcagagcgatgattctctgagcgcagaggagaaggccagcccgtcgctgcagcagtgtccgcagcgtatcctggtgtctacggtcgacgcccgcttgatcgccctgaacgccaaaaccggcgagctgtgcgatgacttcggcgaccacggtagcgttgatctgaaacagggtatggacaataccgaaaacagcaaacgctaccatccgacctcaacgccggtgattatggggcatattgcggtgctcggcggctgggtgcgcgatatcgtgcacggcgaaccctccggcgtggtgcgcgcgtttgacgtccgtaccggcaaagtggtgtgggcgtgggacgtcggccagccggaaaacgtgaccgatccggtaaaagggcgcgtctacactctcgaaacgccgaacgtctggacggtgccgggctttgacaaagagctgaatctgatttatctgccgaccggtaacggtccgccggactactggggcggcgatcgcaacgcggccaaagagaaatatggctcgtccgtggtggcggtggatgccagcaccggggagacgaagtgggtcttccagaccgtgcatcatgatatctgggactatgacctgccgtcgcagccggtactgttccatatgaaaaacgaccggggtgaagaggttccggtcctgatccagaccaccaaaaccgggcagatttacgtgctcgaccggcgtaccggcaagccagtgactcgcgtagaagagcgacctgtggcccacgacggcgcggaaggcgagcatctctccgccacccagccgttctccaccggcatgccgcaattgggcgtcgagccgctcaccgagaagtcgatgtggggcgtgacgccgttcgatcaactgatgtgccgtatcgacttcaaagcgtcgacttatctgggtatgtacacgccgccgtcagagaagccgtacatcgaatggccgagcctgctgggcggcatgaactggggcggtatcactatcgatgagcgcacaggaacgctgttcgtcaatgatatgcggatgccgctgagaatgtcgctggtgcgcaaagaggatatggcgaaatacaaagtctccaccgacgaggtgcccggctttatggggaccgtgcgtccgcaaattgccgggccatacggcggcgtgcggattgatatcttgcagtcggcgctgggcgttccctgtaatacgccgccgtttggcaccatgagcgccatcgacctcaatacccgccagctgatgtggcaggtaccgatgggatcggtagaggataccggtccgctggggctgaaaacgcacatgcatatcccgctgggtatgccgacgctgggcggcccaacgtccacggcttccggactggtcttcttcgccggtacccaggataactacctgcgcgcgctggattccgctaccggtaaagagctatggcgcgctcgtctgccggtaggggcagtggcggctccgctgatctataaatcaccgaaaagcggtaaagagtacgtggtgatctccgccgggggcgccagccactcgccggacgtgggcgatgatattattgccttcgcgctggaagagtag

SEQ ID NO: 253602 - DNA, 912 bp, Klebsiella pneumoniae
atggtatcgacaaccgcagtagccgccgtcaaagaatggcggaaacataataaatttatttgtcaggttaaactcagctataaaaaggtactgcgtaaatgcagagaaatatctttaaccggagggaaatacaaagaatatcagacattatgcgccagctatgcttgcgcgaaattaacgggagccaccgaggggctggttaactttgaagataaaccctttaaagcctatttaaataaaaagatgtcaaaaagagcgaaactcgatatcgctcatggcgctttgaattttatagaaaaaagctttcgtcccgaggccttgccgcagctgtatgatatggcgaactttggccgtacgcttatcgccattccgctgaaaaacggtagcagtattgatgtgaagctcctggcatcgccttttcaggaggaaggggagctcatgctgttaatgttccttggtgataaacgcgtctacagtatctgtttttcctgcactgacgatggccgcgcctggattggcggtattcagggagggaaagatatcgataatgaagaggtgaaggcgctgacgaaagagcttcacggcacccgtcctaaaaacttaattatcactctgctgtacggttttttagcctttttcaatatcaaggagatctatgctatcgatagtgattttcatgttaaaagcgacagagtaaaaactcgttattctgagctttggctggaaattggcggcgagaagcatcgacgcggctggtataaattaccgccaaccgagattaagaaaagcctggaagaggttaaaagtaagcaccgtagccagtttatcaagcgtgaaggtctgaaggagctggcgcagttggatcttgccgccgcgctaggcgacatctgcctctgccgtaacgccggataa

SEQ ID NO: 253603 - DNA, 141 bp, Klebsiella pneumoniae; identical to SEQ ID NO: 174483

SEQ ID NO: 253604 - DNA, 1311 bp, Klebsiella pneumoniae
atgtcacaccgggaaaatcgtgctaaatggaacctttttattcaggcattaaaacaggaagtgaaacccgcattaggctgtaccgaaccggtatctgtcgccctcgcctgcgccgtggcggcgcagcagctctctggcgcgattgtgcggatcgaagctgcggtctcgccgaatctgatgaaaaatggtatgggcgtcaccatcccgggtacggggatgaccggcttgcctatcgccgcggctctcggcgctatcgccggcgacccgcaggcgaatctggaagtgcttaacaaggccacccgtcgggaaattgatgccgccagggcgctacttgaggttggcgccgtgcgcgtggtgctacaggaaccctgcgacgagattctgtacgttcgcgccaaagtctacgcgggcgaccagcatgcgacggtcaccatcaccggcgaccacaccaacgtggtggcggttgagaaaatgggtgagcctctgtttgttaaggacgcaagcgcgaacgccgctcccacccgcgatccgctggcgcaggtcgcccacagttcgctgcgcgagatctatgatttcgttagcgaagcgcctgcgcagacgctggaatttatgctcgaggctggcgcaatgaacaacgccctttcaaagaaagggctgagcaaagagtggggattgcatatcggcccgacgctaaagcgccaggtcgacaaaggactggtttccgatgatatgtttaacgagatcctctaccgcaccagcgccgcgtcggatgcccgcatgggcggcgcatcgctgccggcgatgaccaactccggctccggcaaccagggcatcaccgccacgatgccggtggtcgtggccgcagagcgtcttcacgccagtcagcagcagctggcccgcgcgctggcgctatcacatctggtcgccatttatattcactgtcaacttccgcggctatcggccctctgcgccaccaccaccgccggaatgggtgccgcggcggggattatctggctgatgaacggcagctttgacaccatcgccatggcggttaataacatgattggcgacgtcagcggcatcatatgcgatggcgcttccggtagttgcgcaatgaaagtgtccaccagcatctcttccgcctggaaagcggttctgctggcgctggataattcggttgtttccggcaacgacggtatcgtcgatcgcgatgtggaaaactccattcgtaatctttgcgccatcgccggtcgggccatgcagcataccgaccgacaaattatcgaaatcatggcgcacaagcgttattag

SEQ ID NO: 253605 - DNA, 801 bp, Klebsiella pneumoniae
atgccatcagtaaaggccagcgatacgctggtgaccgccggtgcggttcagtcgaatcatgtacggcaaaccgcagcggtagccgcacatttgggtctgaagtgcgcagcgctgctggagaatcccattcaaaccgcagagcctaactatctctgcaacggcaaccatctgctgtttagcctgatgggctgcgagtcagaaagggttgcagagctttacgattcggatgcgcagctgcagcagttcagcgagcggctttcggcagaaggggctaaaccctatattgttcccgtcggcggctcaaacgcgctgggggcgctgggctacgttgagtacgcgctggagatagcggagcagtgcgagcagatgtgtgcagtccgtggtggtgccctccggcagcgcggggacgcatgccggactgagcgtgggattcgcccattgcctggcggaggtcgaagtcgtggggtgaccatttcgcgccttgttgacgatcaggggcccaaagtggcgaagctgcagggcgaattatccgcaatgctgggcgtaaccacactgtcgccattgacgctatgggatgattactttgcgctgcgctacggcatgccgaataccgcagggatggaggcggtagcgttgctggcgcgtctggaggggatcatgcttgatccggtctataccggcaaggcgatggcgggcctgaatgatggcgtgaaaacaacgcgtttcaccggcagcgggccggtgatgtttgtccataccggcggcgcgccggcgctctttgcttactatcctcgcgtctga

SEQ ID NO: 253606 - DNA, 387 bp, Klebsiella pneumoniae
atgactaaggctatcgcgacagaaaatgcgccgcaggcaattggcccctatatccagggcgtgcgcagcggaaattttatttttacatctggtcagctacccatcgatccgcaaacgggcactattcccgagtgcgccgaaggccaaacccgacagagcctcgagaatattcaggcaatcattgaggccggcggcctgacggtcgccaatatttgtaagatgactatcttcgtcaaggatctgaacgaattcgccgccattaatgatgcctacgcggcgttcttcacccagcgtaacgcttctttcccggcgcgctcttgcgtagaggtcgcccggctgccaaaggacgttaaagtagaaattgaagctatcgcctggcagggataa

SEQ ID NO: 253607 - DNA, 1419 bp, Klebsiella pneumoniae
atgcatgattatggcatctggacgataattactccgctggtcaccattattctggcgattctgacccgccaggtgatcctctctctgcttaccggtatttttgtcggctatgcggtgattcaccacagcattatccagggcgttggcggcacgctgaacggaattattgaaacctttgcctccgccggtaatgcgcgaacgattatttttatggtgatgatcggcggcattatgcggctgattgtggtcaccggcggcgtgcgaaagctggtgcagtttctttcggagaaaaatgatttcgtcaccaataaaaagtcggtccagctactggcgatggtggtgacatcgttaatctttatcgagagttcgataaaccagctgattgccggcgcatcaacgaaaaaccttgcccggcgctataaagtctcgccggaaaagatgtcctatattatccagacttcctgcgtgtccgtttgctcgtcggtgatgatcaacggctggggagcggcgatgatgggggttatcggcgtccagattgcgcaaggctacctgaccggcgagccatttgaagtgctggcaagctcgatggtctggaatacgatggcctggttttcattagcctcagtgcttttttatatcctctccggctgtagctgggggccgatgaaaaaggcggaggttaagtttgaaacggtccagacggaaatagaacaagagcatggcgaagaggaagcggacccggtgattgaccatccggcctgcaactcattgctcaacttctttattccaatcctttccaccgtacttatggtgccggtagtgctatatatcaccggcgagggacaattctccaaaggcagcggctccatgtcggtctactccggcgtcatgtttggcaccgtcgtctcttttatctggtttcgcctgcgcggtattctgaacgtagaaaacttttttaaagagctgtatatcggctacgccagtatggtgaaaatcagctcaatcatgattctggccttcctgatggggcatatttcggcggaactgaataccggacagtatattgcttcgataacctccggcgttattccatccggcttttcgatcggctttatcttcctgattgccgcggtgatgtcgctggccaccggtacctcctggggaacattcgccatcatgattccaattggcgtccagctcggcgtgtccttaggcatcgatccgcactttatgatcggcgcggcgatttccggctcaatctttggtgatatgacttcgcctatctccagtgatgccatcgtggcatcgatggcgaccaactgtgaccatattgaacatattcgcacccagctgccttatgcgctggtgacgggcgggctggcgctcattgtttatttaattgtcggcttcactctttaa

SEQ ID NO: 253608 - DNA, 1188 bp, Klebsiella pneumoniae
atgaaaaccagaactaaagatattgctaccctggccgttcatgctggaagccaatccgatccggtaaccaacgctatatttaccccgattgtcacagccagctcttttatccagcctaacctttatgaaggcggcgatttttgttattcccgggtttccaatccaacgcgtaaagcttatgaatccgcacttgccgagctggagggggggatatatgccaccgctaccgcatcgggaatggcggccaccaatatcgtgatggaactattgcccaaagacgcacacattattgcgatgaagggcgtctacggcggaacctggcggctgtttgagaaattaaaaacgcacaccaccggcgccacaatttcctatatcgatctgaacgatgagcagagcctgatggcgaatattcaggaaaacaccgccttaatctggattgaaacgccgaccaatccattacttgaactggtcgatatcgcgaaagtgtgtcgtattgctaaagaacacgccattaccacctgcgttgataatacctttgccagcgcctggaaccataaaccgcttgaaatgggggcggacatggtcatgctctccaccagtaaatatgttggcggacattctgatttaataggcggcgcggttattaccaataatgaagcgctcgcctcgaggctcgattttattaaaacaacgatcggctctattgcctcgccctttgatgcctaccttgccctgcgcggtatgaaaacgctggatttgcgcatggagcgtcagtgcagtaatgccctgcgcgtggcggaatatctggaaaaccatccggcgattgccagcgtctattatccggggctgccgtcgcaccctcagcatcagctatgcaagaagcaaatgcgttcgggcggcgcggtagtgaccgcgaccctgaagggagacatgcagagcctgaaacgctttatcggcggtctgcactattttgtgctggcggaatcgctgggcggggtagagagcatgattaaccattcggcctcaatgtcccacggttcgatgtcaaaagaggagagggaagcgattggcgtttatgacacgacgctgcgcttctccgtcggcattgaacatatcgatgacttactccaggacctggatattgccttcgccgctatggacctcaaacaggataaccatcatgcatga

SEQ ID NO: 253609 - DNA, 873 bp, Klebsiella pneumoniae
atggaacttcgttatctgcgctactttgtcgccgtcgccgaggcgcgacatttcactaaagcggcaaaagaacttggtatctcacagccgcctttaagccaacaaattcaacggcttgaacgggaaattggcacgccgcttttccgccgtttaacgcgcggcgttgagctgacggaagcgggggagtcgttctatgaggatgcctgccagatcctcgccctgagcgatgcggcgctcgaaaagacgaaagggatcgcccgcggactgaacggtcggctggcgctgggcattaccagttctgatgccttccatccgcagatctttagcctgctgcagcagttccaacaacgttacccggcggtaacgctgcatcaaatcgagggcaatatggcgacgctgatgggggcgcttggcgaagcggagctggatattgcttttgtacgcctgccttgtgaaagcagtaaagccttcaatctgcgtattatcgatcaggagccgatggtgatcgcgctggcgcgttcgcatccgctgtcgtcatgcgacgaactcgcgctcgagcagcttaccgacgtggcgccgattctttttccgcgcgaagtggcccctggcctgtatgagctggtgttcaacagctatctgcgcgccggtattgacgtgcagcgagcctatcaatcatcgcaaatatcgtcgtcgctcagcatggtggaagccggattcggctttgcgctggtgccgcagtcgatgacctgcatcacgctacctggcgtcagctaccaccctttggcgggcgcgccgctaaaaaccgatattgctatcgcctggcgacgctacgagcgttcgcgcacggtgaagcattttctggccatgttttaa

SEQ ID NO: 253610 - DNA, 780 bp, Klebsiella pneumoniae
atgaaccattctgctgaatgctcttgtgaagagagcctgtgtgaaactctacgagggttttccgcgcaacatcccgatagcgtcatctaccagacctctctgatgagcgcgctgttgagcggcgtttatgaaggcaataccaccatcgctgatttactcacccacggcgattttggcctgggaacctttaatgaactggacggcgagctgatcgcgtttagcagcgaggtataccaactgcgcgccgacggcagcgcccgtaaagcccgaatggaacagcgcacgccgtttgcggtgatgacctggtttcagccgcagtatcgtaaaacgttcgataaaccggtgagccgccagcagctgcacgacattatcgaccagcaaataccctccgataatctcttctgcgccctgcgcattaacggtcattttcgtcatgcgcatacccgcaccgtaccgcgccagaccccgccctaccgggcgatgaccgacgtgctcgacgaccagcctgtgttccgcttcaaccagcgcgaaggggtactggtcggcttccgtaccccgcagcatatgcagggcattaacgttgccggctaccacgaacatttcatcaccgatgaccgtcagggcggcggtcatctgctcgattatcagctcgaccacggcgtgctgacctttggcgaaatccacaaattgatgattgaccttcctgccgatagcgccttcctgcaggcggatctgcacccggacaatctagatgccgccattcgctcagtcgaaaactaa

SEQ ID NO: 253611 - DNA, 1680 bp, Klebsiella pneumoniae
gtggataatcaacatcaacctcgccagtgggcgcatggcgccgacctgatcgtcagccagctggaggcccagggcgttcgccaggtcttcggcattccgggggcaaaaatcgataaggtctttgattcgctactggactcctcaattcgcattatcccggtacgccacgaggccaacgccgcctttatggccgctgcggttggccgcatcaccgggaaagcgggcgtcgcgctggtcacttccggtcccggctgctccaatctgattaccggtatggccaccgcttacagcgaaggcgatccggtggtggcgctgggcggtgcggtaaaacgcgccgacaaggccaaacaagtgcaccagagtatggatacggtggcaatgttcagcccggtaaccaaatactcggtggaagtcaccgcatccgatgcgctggcggaggtcgtgtctaacgcatttcgcgccgccgagcagggacggccgggaagcgccttcgtcagtctgccgcaggacgtcgtcgatgagccagtccacgccagggtgctgcccgccagcgaagccccgcagaccggcgcggccccggacgacgccattgagcgagtggcgaagatgattgccggggcaaaaaatccggtattcctgctcggtctgatggccagccagacggaaaacagcgcggcgctccgcgaattgctgaaaaaaagccatatcccggtcaccagtacctatcaggccgccggcgcggtaaatcaggaccactttacgcgctttgccggacgggttgggctgttcaataaccaggccggggatcggctattgcatctcgccgacctggtcatctgcattggctatagcccggtggagtatgaaccggcgatgtggaataacggtaacgccacgctggtgcatatcgacgtgctgcccgcttacgaagagcgcaactataccccggatatcgagctggttggcgatatcgctgccacgctgcacaaactctcccggcgtattgaccaccagctggttctgtcgccgcaggccgcggagattcttgttgaccgccagcaccagcgggaactgctcgatcgccgcggcgcgcagctaaaccagtttgcgcttcatccgctgcgcatcgttcgcgccatgcaggatatcgtcaacagcgacgtaacgctgaccgtcgatatggggagctttcatatctggatcgcccgctatctctacagcttccgcgctcgtcaggtcatgatttccaacggtcaacagaccatgggggtggcgctgccgtgggcgattggcgcctggctggtgaacccgcagcgcaaagtggtttcggtttccggcgacggcggtttcctgcaatccagtatggagctggagaccgccgtaaggctaaaagctaacgtcctgcatatcatctgggtcgataacggctacaacatggtggcaattcaggaagagaaaaaatatcagcggctatccggcgttgagttcggcccggtggattttaaagcctatgccgaagccttcggcgccagagggttcgcggtcgagagcgccgccgcccttgagccgacgctgcgggcggcgatggacgtcgatggccccgccgtggtcgccatccccgtcgattacagcgacaacccgctgctgatgggccagcttcatctcagtcaactactttga

SEQ ID NO: 253612 - DNA, 771 bp, Klebsiella pneumoniae
atgaaaaaagtcgcactcgtgaccggcgcaggccagggtatcggtaaagctatcgcccttcgcctggttcaagatggctttgccgtggccatcgccgattataacgatgccaccgcacaggcggtcgctgacgaaattaaccagcacggcggccaggcgctggcggtgaaggtcgatgtctcgaaacgcgatcaggtttttgccgccgttgagcaggcgcgtaaaggccttggcggttttgacgtgatcgttaacaacgccggggtcgcgccctctacgcctatcgaagagattcgcgaggacgtcattgataaagtctacaatatcaacgttaagggcgttatctggggcattcaggccgcggtagatgcgtttaaaaaagagggccacggcggcaagatcatcaacgcctgctcccaggcgggccacgtgggtaacccggaactggcggtctacagttcaagcaagtttgccgtgcgcggcctgacgcaaaccgccgcccgcgatctggcgcatctgggaattaccgttaacggctactgcccggggatcgtcaaaacccccatgtgggcggaaattgaccgtcaggtttccgaagcggcgggcaaaccgctgggctacggaacccaggaatttgcgaaacgcattaccctcggtcgtctttccgaaccggaagacgtcgcggcctgcgtctcttatctggccggtccggactccaactatatgaccggtcagtcgctgctgatcgatggcggtatggtattcagttaa

SEQ ID NO: 253613 - DNA, 1149 bp, Klebsiella pneumoniae
atgagttttatgttggcactacccaaaatcagcctccacggcgcgggcgcaatcggtgatatggttaagctggtggcaggtaaagggtggggtaaagcgctgatcgtcaccgacggtcatctggtcaagatgggtctgctcgacagcctgtttaccgccctggatgaacagcaaatgtcttatcatctgtttgatgaggtgttccctaacccaacggaagcgctggtgcaaaaaggctacgcggcgtatcgcgaggccgggtgtgattaccttatcgccttcggcggcggcagcccgatcgataccgctaaagcggtgaaaatcctcaccgccaacccggggccatcgaccgcctactccggcgtcggcaaagtgaaaaacgccggggtgccgctggtagcaatcaacaccacagcaggaacagccgcggagatgaccagcaatgcggtcattatcgacgccgaacgtcaggtgaaagaggtgatcatcgaccccaatatcattcccgatattgccgtcgatgacgccagcgtgatgctggatatcccgccgtccattaccgccgccaccggcatggacgcgctgacccacgccattgaagcttttgtttccgttggcgcgcacccgctgaccgatgccaatgccctggaagcgattcgcctgatcaaccaatggctgccgcaagccgtggacgacgggcacaatcttgaagcccgcgagcaaatggcgtttggccagtatctggcgggcatggcgtttaacagcgccggtcttggcctggtgcatgcgctggctcatcagccaggcgctacccacaacctgccgcacggcgtgtgcaacgccatcctgctgccgatcatcgaaaactttaatcgcccgaacgcggttacccgtttcgctcgcgtcgcgcacgcgatgggcgtcgatacccgcggcatgagcgatgaggcagccagcatggaggccatcaacgccatccgcgcgctgagtaaacgcgtcggcatcccgcaaggctttagtcagcttggcgttagcaaagccgatgtcgaaggctggctggacaaagcgctggccgacccgtgcgcgccgtgcaacccgcgcaccgccagccgcgacgaagtccgcgaactgtatctggaggcattatga

SEQ ID NO: 253614 - DNA, 594 bp, Klebsiella pneumoniae
atgatggatatgaaagaaagaatgaacagcggcgagctctatattgattcaggatatggcttaccgcagcagcggctgatggggaaggcgcgagcctatgagtacaaccactcccatccgtttaaccaggaattaagaaacgacattattcagcggatgtttgcccgcgtgggtaaagaatgctggatagaaccaccgattaattttgcctacggaactcacatctccattggcgataatttttacgctaactttaatctgacgctgattgatgatgctgagatcaccattggtaataacgtgatgtttgcgccaaatgtgacgatttcaaccgccggccacccgatccatccggatctgcgccacacccagcagcagttctctttgccggtggttattgaagacggcgtctggctgggcaccggggtgattatcaatcctggcgtcactatcggaaaaaactcggtcattggcgccgggagcgtggtgaaccgttccataccggcaaatgttgtcgccgcaggcgtcccttgtcgggtattaagagacattaccgatgaggataaaaataaatatcagctgttcgcaggctga

SEQ ID NO: 253615 - DNA, 549 bp, Klebsiella pneumoniae
atgactcagccaattagcctgattgccaaaagcctggttcgtgaacgcgcgcgcaccggtctttcccttgctgaagttgcgcgacgggcgggaattgccaaatcaacgttatcgcagctggagtccggtaacggtaacccgagtctggaaacgctgtgggcgctgtgcgtggccctcgatattccttttgcccggctgctggagccgcaggtcaacaccacccaggtgatccgccgcggcgaggggacgaaagtgattgccgagcaggcaaactatcaggcgattttactcgccgcctgcccgccgggcgcgcggcgcgatatctatctcctgctaacccagccgggggctgaccgtatctctcaccctcatccacccggttccgtggaacatattattatcacccaggggcgggcgcgggtcggcctcacggaggcgccggaagagttgggagagggggattacatctgctatcccgccgatcgggagcacgttttccaggcgctggaaccggatacccaggcgctattggtcgccgagcagaactag

SEQ ID NO: 253616 - DNA, 690 bp, Klebsiella pneumoniae
atggaaattcgttcgatatggctaaagagtatgaaacatcacttcgccagtcttaaaggcgacaccctcagagcaattgttttagtctgcctcgcagtgggcatcgttggtatgtcctatggctcgctggccatcgcctacggtttcccgatttgggtgccctttgtgctttcggtcagcgtcctggcgggcgcctcggagtttatgtttatcggcattgtcgccagcggcggaaatcccctggcggcggcggcggccggtttactggtcaacgctcgtcatattcccttcggcgtgacggttcgcgacttggtcggccagcgcgccgccagcttcctcggctgccatattatgaacgatgaaagcgtggtgtttggtctgtcgcagaaaacccccgagcagcggcgggcggcctactggctgtgcggtctgggcgtggcgctgatctggccattgggcgcgctattgggcgcgggggtcggcaaactgctcccggctccggaaaccattggcctcgatgcggtctttccggccattctgctggcgctggtggttccggcatttaaaaatcgcaccaccttgatccgcgcctgcagcggagcagctctgtcgctggccgccgtaccttttgcgccggttggtctgccggttttactgtcgctgtttggcctgctgacgaggagaaaataa

SEQ ID NO: 253617 - DNA, 324 bp, Klebsiella pneumoniae
atgggcaatatgacgctatttatcgccggtatcgcgattctgtcgctgggcacttacttaatgcgcttaggcggagcgaagctcggcagccggctggccttttctgagcgctcacaggcgctactctccgatgcggcaacggtgctgctcttttccgtcgcactggcaaccaccttctacgaaggtgaacattttgccgggatggcgcgggtgctgggcgtgggctttgcggtatttcttgcctggcgtaagatgccgctgatcgtggtgattatcgccgctgccgtggtgacggcgctgctgcggatggcgggtttacgataa

SEQ ID NO: 253618 - DNA, 1029 bp, Klebsiella pneumoniae
atgaaaaggaatttattggcggcagcaataagctgcgtcttattaatggggcttgttggatgtgacgataataaattacccgaaagcgctcctgcagcagctccggctagtccatctgcatcttcaggtgccgataacaaggaagttaaaaacgccagcccagaccgcattattagcgaaaagatgagagtatatattgagtgttataatgatatcgatgaagatatttatcgtagcattaaatactatgctcgctggttagacgatctgaaggtcggtcccaccggaaaagaaaagagggttggtggtattacggatgtttccgcagagtttgatcagtgcctggccaatatgacgcacgtttcgagtttaaagccgtcgctggatcctatcgataatctcgctttaccctatattaattcatctattaagctggcagaagtcatcaataagatgaataaatattacgaacagcaagattataaagatgatgctttcgctaaaggcaaagcgctgcatactcagtttattcaggcattagccgcgttcaaacccgcgtcagatgcttactcagaagcgattcatgaaattaataaccgccgtcaggaacagcagttgaaaaagattgaggccaaagaaggcaagtcttttgattactattcgctatccattatgttgaccagcaaaaaggttaaccaggcgcttgaggcggataaatttgataccgatgctgcgatgaaactcgtccaggatctgggtgaacaaattgagcaattgaaatcaaaacagggcgaaaccaaaaaaggtccccggatgcgtgagatcagagccccgacgtttatcgaagcggcggaaaagtaccttctggatgccaaaacgcgcgtccgccgcgttcgcgataacacgccgctgacgtctggggaagccatgttgatggatggcgccccgcaaatggtggatggctcttttgaacatctcatggcgagctataaccagctcgtaagatggtttaatacattgagtgattaa

SEQ ID NO: 253619 - DNA, 552 bp, Klebsiella pneumoniae
atgaacagatatctcacacccggctgcaaaacggtaattttaattaacggcattcccgcctcgggtaaaagcaccgtcacccggcagctatcggtagcgtttaatctgccacagctgaccatcgacggtattaaagagccgtttatggcgtgctttaccgggatcgatcggtccttcaaccggcagctgggctgcgccgcgtatgaagtgatatggtcgattgtcggtcagtcaccggcaggctgcatctggctcattgacgcctggtttggctttcaaccgcgcgacacgctgcagcagctgctgcaacaagcgggcgttgaaaaggttctggaggtctggaatcatatcccgcctgagcttgcggtggcgcgctatgccagccggttacacgatcgtaagccggggcatccgggcgaagagtatctgccggaactggctcggctggcgcagcaggcggaaccaatgcggctggggccggtattgaccgtggatcagcaaaaaccgctggatatcgagcgcgttattctttggatagcagcacagatttag

SEQ ID NO: 253620 - DNA, 438 bp, Klebsiella pneumoniae
atgacgataaaagaactgcttattgaggccgatgcgattcaggtcggcgtcacggagtccgactggcagaaggtgatccaactggcggccagcccgctggttgcaaagggatatatctcggcagattacggtcaggcggtgatcgataataccctgcatcatggcgcctattacgtttttgatgagggcatcgccatcccgcatgccagaccggagtgcggcgtaaagcgcaactgctttagtcttgttgtgttggataagccaattcagtttgctgatagcgagaaggcggatatcgtcattatgttcggcgcgcaggacagcaatgcccatatagaagaggggattcgtgcgattgttgctctgctcgataataacgagaccatggagaagctgcgggccgccagcagcaaggaggaggtcgttgcgttgctatga

SEQ ID NO: 253621 - DNA, 270 bp, Klebsiella pneumoniae
atgtttgaatctttgaaaacgctgtggaaaaaagagagtagcccgccgcaggattatgacgcacagtcccgccagctggcgggggaaatcgccaggctggaaggcgaattacggggcgacccgggaaatggcgaagtacagaaagcattaatgctggtttataaccgggcgctgtcggtatatgccaaaagccatacgcatcgccaggaaatagatgcgctttttgtgcgcattgatgagttacgtaatgttattcgccgtaatatatag

SEQ ID NO: 253622 - DNA, 843 bp, Klebsiella pneumoniae
atgagtctgtataacttcaacgcgattctgcgcattgcccgggaaaggaattttaaagccattggctcgtttaatttgcactgtattgaaatgctgccggcgttttttaaagcggcgcaaaaaagcgatagcccattaatgattcaaatctctaccgggacggcggaatatcttggctatcgtttactggtggatgccgtgcgctcgctcgcggaaagtgaaaacgtgccgacctgtctgcatctggatcactgctctgatatcagcgccattgaaacggcaatggatgccgggttttcatcagtgatgtatgacggctcccatctggggctggaggagaatatcggcaatacgcgtatcgtggtggagatggcgcgcccgcggaatatcacggtagaaggcgagctgggggcgataggcggctcggaagatggcaaagccgttgccgcagaagatatttgtttcaccacggtggaagacgccaaacgctttgtgaaggagacgcaggtggatatgctggcggtctccgtaggcaccgtacatggcctctataccggcaaagcgcagatccagcatcagcggctgaaagagattagcgccgccacaggcgtaccgttagtgctccacggcggtaccggcgtcagcgatgatgatatgcgcctggccgtaacggaaggcatcaacaaagtgaacgtcggtactgaaatgaacgttcagtgggtcgatcaatgtaaaaccacttttgaaaaaggcaaagttaatgacagcgtgcgcaaattcttaattccggcgaataacgcggtcacccaggtattaatggaaaaaatcgcgctgtttaaataa

SEQ ID NO: 253623 - DNA, 1368 bp, Klebsiella pneumoniae
atgaatagctttgtagagtttatcgtcaaagatttgctcggccaggcttcgatattaattgcatttattgcgatgctgggcttgattttgcaaaaaaaatcagcgggcaaaacggcggagggaacctttaaaacgctgctcggtttcttaataatgatggccggaatcaacattattgtcgccacgctaacgttccttaacgatatcttcacccagggattcggcatgaaaggctacattactgatgttgccgccatcgccgggttagccaatcgtgaattaggttccgaagtggcgctgaccctgatggtcatttttgccgttaacattattatcgcccgcctgacgccgctcaaatatatcttcctgaccggccaggctctgctgtggatggcgaccatcggcgcggtaataggctataaagccgggctgaccggactgtcgctgattttaaccggcggtattttcggcggcgtaatggcggtattgatgcccgctcttgcgcagccggtggtcagacgtattaccggttccgatgatgtggcgctggggcacttctgcaccatcggctatctggtgcaggcggcggtggctaaagtggtcgggaaaggttcccgctcaaccgaagatcttgagctacctgataactttaagttcctccaggatacctaccttgcgatggcggtggtaatggtgccgatgtacctcattcccgcgcttgccgcaggcccggaatatatcgctcagttctccggtggtattaactacctgatgtacgcctttatgcagtctattcagtttgtggcgggggtattcgttctctatagcggcgtgcgcttattgcttaacgagctggtgccggcattccgcggcatcgccatgcgcattgtcccggacgcaaaacccgcgctggattgcccggtactgttcccctatgcgcccaatgcggtgattgtcggcttcctggcaacgaccgtcggttccattatcggcatgctggtattcccgatgtttggtctggcgatgatcctgcccggcctgttaaccaacttctttgccggcggtacggcaggcgtgtttggcaacgcgctgggcggccggcgcggagcgatgattggcggcgtcattcacggcctgtttattacctttctgcccgccattttagtgccgatgctggaaagctacggctttaccggcgtcactttcagcgattctgacgtcattagttccggtctggtattgggccacgccttccagaataactggctatttgttgctctgttcattgtttttgttgccgcactggcatggttcgtaaacggtaaatcagctaagccaaaaggggaaaatattcatgagtctgtataa

SEQ ID NO: 253624 - DNA, 315 bp, Klebsiella pneumoniae
atgctgaaaattctttgcgtatgtggctgcggcctcggttctagctttgccatcgaaatgacggcgaaggcggttttaaagaaactggaaattccggcgcagattgaacataccacaatttccgaagccggggcgtttaaatcagacatgattctgacgcaaaaaacctttgccgatatattaaccgcagatgccagtgaggaggaaattaaacgcgtggtggtactgcataaactgacggataaagatgaggttgaagccaaaatcgtcgcattcttaaaagagcgtaacctgaaggtggcagattatgaatag

SEQ ID NO: 253625 - DNA, 981 bp, Klebsiella pneumoniae
atgaaaattggcattgttattagcggtggcgatgtttctggaattaataactttatatttcagattgccagactggcgagcgccgatatcaccgtttttaacgggggcatacccgggttattggaaaaaaatcatcacgaagttgcgtggcgcgatctggttgatttctccataacgtctattccgatcatcacatccgggcggaccagccgcaagctgttgcgcagtgaatatgaaaccatagctaaaaaaattaaatcattgcgtatcgatgtgctgattatggccggcggcgacggcagcctgcagtttctcaatacgctgagtgaatttgatattaactgctttggcgtcgggatgactatcgataatgatgtatacggcagcgattatacgattggtttttctactgcctgcgagcagattattaaagaagtttcccgtttaagaaataccggaagagcattaccgggtcgggtatttatggttgaaatattaggaggctattgtggagagttaacgttgcaatccgctattaaatctaatgctgatattgccctgattccggaatcacagatgccgttagaagcgctggccgagcgggtgaagcacaagctaaaacagcaaaatagcgtggtgatcctctgctctgaaggctacaccagagagtattctcccggttttcagggggccattgataccatgattaagcagcttgaaccgcaaattggcgtacgcatccgcaaaaccatcgtgggctacggtttacgcagcggcgacccgacctgcgaagaaatctatcaggggacgattatggcctgcgaagtggttcgctgcattcagtccggcatgaaaaataaagccattataattaattccagtaacaaacctattccgattgatttagtcagtatgaaaaaacgtctggtcgataccgaaggacaccattataaacttgccaaacaactcaatattatttga

SEQ ID NO: 253626 - DNA, 141 bp, Klebsiella pneumoniae
atgtcgataaatttagtcacacctaatattgacaccgggtttattatcacgttttttgtgatcaatctctcctttataaaaggcgatcgccttaacaattatttttttattttctttaagatcattaagttgcctgaatga

SEQ ID NO: 253627 - DNA, 213 bp, Klebsiella pneumoniae
atgaaaagcatcaaaacttttgtcgctgttatcgcactttccgcttcttttggttcctttgctgcggaaaccgtcaccgctaccgcagcaacgatggacggtgcggaagcgaagatcgccgctcaggcccaggccgcaggcgcgtcgtcttacaaaattaccgaagcgtttaccggtaaccgcgtgcacatgaccgctgaactgaataaataa

SEQ ID NO: 253628 - DNA, 837 bp, Klebsiella pneumoniae
gtgaacaagaagcctcttgaacaaatcgaaaatgtgaccgatatcacaggttatcgccaggtatcgctctggaagcgcccaaatttgcaacatcctcagccagacgagttagctgaagaggtacccgttgcgctggtttataacggcatctcgcacgtggtgatgatggcgacgccgaaagacctggcgcagttcgccgtcggcttttccttatccgaagggattatagagaaccggcgcgagatttatggcatcgacgtcgttcaggcctgtaacggcctggaagtgcaaattgagctctccagccgccgctttatgggattgaaagagcgccgtcgcgcgctagccggccgcactggctgtggcgtatgcggcgtggaacagctcaacgatatcggtaagcccgtgcagcctctgccttttacccagacgttcgatctggcgaacctcgatcgcgcgctggcgcatctgcgggattttcagccgataggctgccttaccggctgcacgcacgcggcggcttgggtaacgctttccggcgagctcgcgggcggccacgaagacgttggccgccacgtggcgctggacaaactcctcggacaccgcgcggaagatgatggcgcctggcaaaacggtgcggcgctcgtctccagccgcgccagctatgaaatggtgcagaaggcggcgatgtgcggggtggaaattctttttgcggtctctgccgcgaccacgctggcggttgaagttgctgagcgctgtaacctgacgctggtgggcttctgcaagccgggtagggcaaccgtgtacacgcatccgcagcggttaattgcaggttaa

SEQ ID NO: 253629 - DNA, 2415 bp, Klebsiella pneumoniae
atgaccaaccactgggtcgacattaagaacgccaatcttatcgtggtgatgggcggcaacgccgctgaagctcacccggttgggttccgctgggcgatggaagccaagatccacaatggcgcgaagctgattgtgatcgatccgcgctttacgcgtaccgcgtcggtggctgatttctataccccaattcgttccggtactgacattaccttcctgtcaggcgtcatcctgtacctgttgaacaatgaaaagattaaccgtgaatataccgaagcctataccaacgccagcctgatcgtgcgtgaagattacagctttgaagacggtttattcagcggctatgacgccgaagcccgcaagtacgacaaaacgtcctggaactatgagctggatgaaaacggctttgctaaacgcgataccacgctgcagcatccgcgctgcgtctggaatttgctgaagcagcacgtttcccgctatacgccagaagttgtcgaaaatatctgcgggacgccaaaagcggacttcctgaaagtctgcgagtacattgcggaaaccagcgctccggataaaaccgcgtctttcctgtacgcactgggctggacgcagcactccatcggcgcgcagaacattcgcaccatggcgatgatccagctgctgctcggtaatatgggcatggcgggcggcggcgtaaacgccctgcgcggccactccaatattcagggtctcaccgacttaggattgctgtcgcagagcctgcctggctatatgacgctgccgagcgagaaacagactgacctgcaaacctacctcgccgccaatacgccgaaaccgctgttgaaggatcaggtgaactactggggtaactacccgaaattcttcgtctcgatgatgaaggccttctttggcgataaagcaacggcggaaaacagctggggctttgactggctgccgaagtgggacaaaggatacgacgtcctgcaatacttcgagatgatgaatcagggtaaagtgaatggctatatctgccagggctttaacccggtagcctcgttcccgaacaaaaacaaggttgttgcgtcgctgtcgaaactgaagttcctggtgaccatcgatccgctcaacaccgaaacctccactttctggcaaaaccacggggagtcgaacgacgtcgatccggcgaaaatccagaccgaagtgttccgcctgccgtccacctgcttcgccgaagagaatggttccatcgttaactccggccgctggctgcagtggcactggaaaggcgctgacgccccggggattgcggccaccgacggtgaaatcctcgccggtatcttcttacgcctgcgcaagatgtacgccgaacagggcggaccggcgccggaaccggtgctgaacatgacgtggaactacgccacgccgcatgaaccggcatcggaagaagtggcgatggagagcaacggcaaggcgctggctgacatcaccgacccggcaaccggtgctgtgatcgtcaagaaaggccagcagctcagttcgtttgcgcagctgcgtgacgacggcacgacctccagcggctgctggatcttcgccggcagctggacgcctgacggcaaccagatggcccgtcgcgataatgccgatccatctggccttggcaataccctcggctgggcatgggcgtggccgcttaatcgccgtatcctgtataaccgcgcctccgctgacccgcagggtaaaccgtgggatccgaagcgtcagctcctgaaatgggacggcgcgaagtggggcggcgtggatattccagactacagcgccgcggcgccggacagcgatgtcgggccgtttatcatgcagccggaagggatgggacgtctgttcgctatcgataagatggcggaggggccgttcccggaacactacgagccgtttgaaacgccgctgggcactaacccgctgcacccgaatgtcgtctctaacccggccgctcgcgtctttaaaggcgaccttgagcagatgggcaaagcggaaaaattcccttacgtcggtaccacttaccgtctgaccgagcacttccactactggaccaagcacgcgcttctcaacgccatcgcgcagccggagcagtttgtggagatcggcgagaagctggcgaacaagctcggcatcgcccatggcgataccgtgaaggtctcctctaaccgcggctatattaaagccaaggcggtggtgaccaagcgtattcgcacgctgaaagcggacggcaaggatatcgatactatcggtattccgattcactggggctacgaaggcgtggcgaagaaagggtttatcgccaataccctgacgccgtttgtcggggatgcgaacacgcagacgccggagttcaaggctttcctcgtgaacgtggaaaaggcgtaa

SEQ ID NO: 253630 - DNA, 903 bp, Klebsiella pneumoniae
atggcttatcaatcgcaagacattatccgtcgttccgcgactaacggcttcacccccgcgccgcacgcgcgggaccatcaggaagaggtggcgaagcttatcgacgtcacgacttgtatcggctgtaaagcctgtcaggtggcctgctccgagtggaacgacattcgtgatgaagtgggtcataacgtcggggtgtacgataaccccgccgatctgaccgccaaatcctggaccgtgatgcgcttctcggaagtggagcagaacgacaaactggagtggctcatccgtaaggatggctgtatgcactgcgccgatccgggctgcctgaaggcctgcccggcggaaggggcaatcattcagtatgccaacggcatcgtcgacttccagtctgagcagtgcatcggctgcggctactgcattgctggctgcccgttcaacgtgccgcgtctgaacccggaagacaaccgcgtctataaatgcacactgtgcgtggaccgcgttaacgttggccaggaaccggcctgcgtgaaaacctgcccgaccggtgctatccactttggctccaaagaggatatgaaaacgctggcaggcgagcgcgtcgccgagctgaaaacccgcggttatgacaacgcaggtctgtacgatccggcaggcgttggcggcacgcacgtgatgtacgtgctgcaccacgccgacaagccgaatctctatcacggcctgccggaaaatccggaaatcagcgctaccgtgaagttctggaaagggatctggaaaccgctggccgcggtcggatttgcggccaccttcgccgccagcatcttccactacgtcggcgtcggtccgaaccgcgcggaagaggaagaggacaatctggatgaagagaaagacgaggtgcgcaaatga

SEQ ID NO: 253631 - DNA, 930 bp, Klebsiella pneumoniae
atgagcattcgtatcatcccgcaagatgagctggaaaagagcgagaaacgcgcgacggatatgattccaccgttgttgtttcctcgactcaaaaatttatataaccgtcgtgccgagcgcctgcgcgaactggctgaaaataatccgctgggggattatctgcgctttgctgcgcttatcgcccacgcgcaggaagtggtgctgtacgatcatcccctgcagatggatctcaccgcacgcattaaagaagcgaacgatcagggcaaaccgccgctcgatattcacgttttaccgcgcgacaagcactggcacaagctactgcattcgctgattgccgaactgaagcccgagatgagcggcccggcgctggcggttatcgagaatctggaaaaagcgtcagagcaagagctggaactgatggcaagcgcgctatttgtctccgattttgcctccgttagcagcgataaagcaccgtttatttgggccgcgctatcgctctattgggcgcagatggccagtctgatacccggtaaagctcgcgccgaatacggtgaacagcgtcaattctgcccggtttgcggctcgatgccggtctccagcatagtgcaaattggcaccactcagggcctgcgctatttgcactgcaacctgtgtgaaaccgagtggcacgtggtgcgcgtgaaatgcagcaactgcgaacagacgcgcgatctgcactactggtctttagataacgagcaggcggccattaaagccgaaagctgcggcgactgcggtacctacctgaagattctttatcaggaaaaggatcccaaagtagaagccgtggccgacgacctcgcctcactggtgctggacgcacggatggaacaagagggctttgcccgcagctccatcaacccgttcctgttcccgggagagggggagtaa

SEQ ID NO: 253632 - DNA, 918 bp, Klebsiella pneumoniae
atggcgcttgaaaagggtattgcaatacaggtgcgggagtttatcgaggcgggtcgcccctcatcgcgcactcagagtatcgatgaccggagacgcggctatatcgccagcactgtactggctggggagcaagaaaagcgcgttcaggtagaagatatcgagctcgaaggtatgacatttcgcattgtctcccccctcaacgcctcaggcgctctccctgcggtcatctattttcacggcggctgctttatcagcggtggtttcgccacgcatgaccatcagctccgtcagctggcttaccacagcggctgccgggttatcgccgtgcaataccggctggcgccggagcacgcttttcccgccgcccatgacgatgcggaaaaaggcgcactgattattcaccgccacgcgccgcagttaggcatcgacgtttcgcgtattacgcttgcgggcgatagcgccgggggtcatctggccttggtcaccgctctgcggctgaaaaccacccgggcatggcaacccgcgcagcttgttttgatttacccgatgctggatgccaccgccagtatgaagagctatatcgataacggtaaagattacattatcaccgaagacactctgctcagcggctatgaaatgtacctttcgtcgacgacactccaccacccggaagccagcccgctatggcgtaaagactttaacggcttaccgccggtgcatattctgacggcagaatacgatcctttacgtgatgaaggcgaagcgctttaccagcgtctgcttgaacagggcgtagagtgcacctgtcagcgctatctcggagtgattcacggcttcttccagctgggcggtatcagcccagcggcagccagcgcgatgagagatatcgcctggcgggtaaaatcaccgggccagtag

SEQ ID NO: 253633 - DNA, 942 bp, Klebsiella pneumoniae
atgtatcaccttcgcgtaccgcaaacagaagaagagttagagagctactaccagttccgctgggagatgctgcgtaagccgctgcatcagccgaaagggtccgagcgcgatgcgtgggatgcgatggcgcaccatcaaatggtggtcgatgaagagggtaatctggttgccgttgggcgactgtatgtgaacgcggaaaacgaagcctcgatccgttttatggccgtacatccgtcagtacaggataaggggctgggaaccctgatggcgatgacgctggagtccgtcgcccgtcaggaaggcgttaagcgcgtgacctgtagcgcccgtgaagacgcggtagaattctttgccaagctcgggtttgtgaaccagggtgaaatcacgacgccgaccaccacgccgattcgtcattttttgatgattaagccaatagcctcgctggacgatattttacatcgcggcgactggtgcgctcagctgcagcaggcctggtatcagcacatccctcttagtgaaaaaatgggcgtgcgcattcagcagtataccgggcaaaagtttatcaccactatgccggaagctggtaaccagaatccccaccatacgctgtttgccggcagcctgttttcgcaggcaacgttaaccggctgggggcttatctggctgatgctgcgcgagcggcatcttggtggcacaattattctcgcagatgctcatattcgttacagtcagcccattagcggacgccccagcgctgttgccgatctcggctcattaagcggcgatctcgatcgcctggcgcgtgggcgcaaagcgcgcgttcagctgcaggttgagctattcggtgacgatcggctcggcgcggtttttgagggtatctatatcgtgcttcctgcgaagccgttcggctcttatgaagagggtggcaacgaagaggagtag

SEQ ID NO: 253634 - DNA, 438 bp, Klebsiella pneumoniae; identical to SEQ ID NO: 176338

SEQ ID NO: 253635 - DNA, 861 bp, Klebsiella pneumoniae
atgctaaaaaccgttcatcaaaaaacagcgcgccatctgcggccgctggtggcctggctgaagctgctatggcggcgtattgatgaagatcatatgacgaccctggcgggaaacctggcctatgtgtcgttactctccctggtgccgcttattgccgttatatttgcgctgtttgcggcctttccgatgttttctgatgtcagtatccagattcgacactttatttttgccaattttattccgaccaccggcgatgtgattcagggctatatcgagcagtttgtcgctaactccagtcggatgaccgccgtgggcgctttcggcctgattgtgacatcgctgctgctgatgtattccattgatagcgcattgaatactatctggcgcagcacccgaacccggccaaaaacctactcctttgccgtctattggatgatcctcacgctggggccgctgctggcgggggccagccttgcgatcagctcctatctcctgtcgttacgctgggccagcgatctgaatagcgtgattgacgatgtgctgcgtatttttccgctcattttatcgtgggtggcattctggctgctgtacagcattgtgccgacggccgaggtccgtaaccgcgatgcgataatcggttccctggttgcggcgctgctctttgaggcggggaagaaagcttttgctttatatatcactgcgttcccgtcctatcagctgatttatggcgtgcttgccgtggtacccattttgttcgtctgggtgtactggacgtggtgtatcgtcttgcttggcgctgaaattactgtcactctcggtgaataccgcaaactgaaaaaagaagaaacagaacaatcatga

SEQ ID NO: 253636 - DNA, 600 bp, Klebsiella pneumoniae
atgctctatatctttgatttaggtaatgtgattgtcgatattgacttcaaccgggtgctcgggacgtggagcgatttaacgcggatccctcttgcgacgctgaagcagcatttcactatgggtgaagcgttccatcagcacgagcgcggcgaaattagcgatgaggattttgcggcggcgatgtgccacgaaatgaacatgccgcttagctacgagcagttctcccacggctggcaggcggttttcgtcgccctgcgaccggaggtgacggcaattatgcaaaaattacgcgagcaggggcatcgagtcgtggtcctgtccaatactaaccgtttgcataccaccttctggccggatgaatatccagaaatacgcgccgtggctgaccatatctatctctcccaggagatggggatgcgtaaacccgaagcgcggatctaccagagcgtgctcgaatcggaaggtttctccgcagaggatacggttttcttcgatgataacgccgataatattgccggcgctgatcagttaggtatcacgtcaattctggtgaccggaaaggagacgataccgaactactttgcgaagcagctatgctaa

SEQ ID NO: 253637 - DNA, 1824 bp, Klebsiella pneumoniae
gtgatcgaaaatctgcgtaatatcgccatcatcgcgcacgttgaccatggtaaaactaccctggttgataagctgctacagcaatctggtacgttcgacgcgcgtactgaagcacaagaacgagtgatggactccaacgatttggagaaagagcgtgggattaccatcctcgctaaaaacactgctatcaaatggaatgattaccgtatcaacatcgttgatacccctgggcacgccgacttcggtggtgaagttgaacgtgtcatgtccatggtagattctgtgctgctggtggttgatgcctttgatggtccgatgccgcagacgcgcttcgtcaccaagaaagcttttgcccacggtctgaagccgattgttgttatcaacaaagttgaccgtcctggcgcgcgccctgactgggttgtcgatcaggtattcgacctgttcgttaaccttgatgctaccgacgaacagctggacttccctatcgtttacgcttccgcgctgaacggtatcgcgggtctggatcacgaagatatggctgaggatatgactccgctgtatcagactatcgtcgatcgcgtaccggcaccgaacgttgaccttgatggcccgctgcagatgcaaatctcccagctggactacaacaactacgttggcgtcatcggcatcggccgcatcaagcgcggtaaagtgaagccgaaccagcaggtcactatcgttgatagcgaaggcaaaacccgtaatggtaaagtcggtaaagttctgacccacctgggtctggagcgtatcgagagcgacatcgctgaagcgggcgatatcatcgcgatcaccggtctgggcgagctgaacatctctgacaccatctgcgatacgcagaatgttgaagcgctgccggcgctgtccgtcgatgagccgaccgtttccatgttcttctgcgttaacacctctccgttctgcggtaaagaaggtaagtacgttacctctcgtcagatccttgaccgtctgaacaaagagctggtgcacaacgtggcgctgcgcgttgaagaaactccggatgcagacgcattccgcgtttctggccgtggtgaactgcatctgtccgttcttatcgaaaacatgcgtcgtgaaggtttcgaaatggcggtttcccgtccgaaagttatcttccgcgaaatcgacggccgtaagcaagagccgttcgagaacgtgacgctggacgtcgaagagcagcaccaggggtctgtcatgcaggcgctgggtgagcgtaaaggcgacctgaaaaatatgaatccagatggcaaaggccgcgtacgtctcgactacgtgatcccaagccgtggtctgatcggcttccgttcagaattcatgaccatgacctccggtaccggtctgctgtactccaccttcagccactacgatgacgttcgtgcgggtgatgtgggtcagcgtcagaacggcgttctgatctccaacggtcagggcaaagcggtggcgtttgcgctgttcagcctgcaggatcgcggtaagctgttcctgggccacggcgcagaagtttacgaagggcagatcatcggtattcacagccgttctaacgacctgacggtaaactgcctgactggtaagaaactgaccaacatgcgtgcgtccggtactgacgaagcaacggttctggttccgccggttaagatgaccctggagcaggctctggagttcatcgatgacgacgaactggttgaagttacccctacttccgttcgtatccgtaaacgtcatctgaccgagaacgaccgtaaacgcgcaatgcgcggcgcgaaagaagagtaa

SEQ ID NO: 253638 - DNA, 1410 bp, Klebsiella pneumoniae
atgtccgctgaacacgttttgacgatgctgaacgagcatgaagtgaagtttgtcgatctgcgcttcaccgataccaaaggtaaagaacagcacgtaactattccttctcatcaggtaaatgccgaattcttcgaagaaggcaaaatgtttgatggctcctcgattggcggttggaaaggtattaacgaatccgacatggttctgatgccggatgcaaccaccgcgctgatcgacccgttctatgaagaaccgactctgatcatccgctgcgacatcctggaacccggcactctgcagggctatgaccgcgacccgcgttccattgctaagcgcgctgaagagtatctgcgctctaccggcctggctgacaccgtactgttcgggccagaaccagaattcttcctgttcgatgatatccgttttggtgcgtccatctccggttcccacgtcgctatcgatgatatcgaaggcgcatggaactcctccaccaaatacgaaggcggcaacaaaggccaccgtccgggcgtgaaaggcggctacttcccggttccgccagtagactcctctcaggatatccgctccaccatgtgtatgatcatggaagagatgggcctggttgttgaagctcaccaccacgaagtggcgactgccggtcagaacgaaatcgccacccgctttaacaccatgaccaaaaaagcggatgaaattcagatttacaaatacgttgtgcacaacgtcgcacaccgtttcggcaaaaccgcgaccttcatgccaaaaccgatgtttggcgataacggttccggtatgcactgccacatgtccctgtccaagaacggcgtaaacctgttctccggcgacaaatacgcgggcctgtctgaacaagcgctgtactacatcggcggcgttatcaaacacgctaaagcgattaacgccctggctaacccgaccaccaactcctacaagcgtctggtcccgggctacgaagcgccggtaatgctggcttactctgcccgtaaccgttccgcgtctatccgtattccggttgtcacctctccgaaagcgcgccgtatcgaagtgcgcttcccggacccggcggctaacccgtacctgtgcttcgccgcgctgctgatggctggccttgacggtatcaagaacaaaatccatccgggcgaagccatggataaaaacctgtacgatctgccgccggaagaagcgaaagagatcccacaggttgcaggctctctggaagaagcactgaacgcgctggacgcagaccgtgaattcctgaccgccggcggcgtattcaccaacgacgctatcgatgcttacatcgccctgcgtatggaagaaaacgaccgcatccgtatgactccgcacccggttgaattcgagctgtactacagcgtctga

SEQ ID NO: 253639 - DNA, 1050 bp, Klebsiella pneumoniae
atggcaacaggcacactgcccgatgctgggcagatccttaactctttaatcaacagtatcttactggtcgatgatgacctggcggttcattacgcgaacccggcggcgcagcagctgctggcgcaaagttctcgtaagctattcggcacgccgctgccggaactgttgagctatttctcgctgaatatcggcctcatgcaggagagcctcgctgcggggcagggttttaccgataacgaagtgacgctggtcattgatagccgctcgcatatcctttccctgacggcgcagcgcctgccggaaggctatattctgctggaaatggcgccgatggataatcagcgtcgtctgagccaggagcagctgcagcacgcacagcagattgccgcacgcgacttagtgcgtggtctggcccatgagattaaaaacccgctgggcggtttgcgcggagcggcacagctgctgagcaaagcgctgcccgatcctgcgctaatggaatataccaaagtcattattgaacaggccgatcggttaagaaatctggtcgaccgtctgctggggccgcagcatcccgggatgcacgtgacggaaagcatccataaggtcgctgagcgggtagtgaagctggtgtcgatggagctgccggataacgtcaaactggttcgcgattacgaccccagcctgccggaactcccgcacgaccctgaccaaatcgaacaggtgttgctgaatatcgtccgtaatgcgctgcaggcgctgggacctgagggcggcgagatcactctgcgcacccgcacggccttccagttaaccttacacggcgtacgctaccgcctcgctgcgcgcattgacgttgaagataacggcccgggaataccgtctcatttacaggacacgctgttttatccgatggtgagcgggcgcgaaggcggtaccggactcggtctgtctattgcccgcagccttatcgatcagcactccgggaaaattgaatttaccagttggccagggcataccgaattctcggtgtacctgcctattcggaagtag

SEQ ID NO: 253640 - DNA, 1410 bp, Klebsiella pneumoniae
atgcaacgagggatagcatggatcgttgacgacgatagctccatccgttgggtgcttgaacgcgcgctcaccggggcaggcttgagttgtacaacgtttgagagcggtaacgaggtgcttgatgccctcacgaccaaaaccccggatgtgctgctgtctgatatccgcatgccgggaatggatgggctggcgctgttaaagcaaattaaacagcgccatccaatgctaccggtcatcataatgacggcgcattcggatcttgatgcggcggtcagcgcctatcagcaaggcgcctttgattatctgccgaaaccgtttgatatcgatgaagcggtagcgctggttgaccgggcaatcagccattaccaggagcagcaacagccgcgtaatgcgccgattaatagcccaacggccgatatcatcggcgaagcgccggcaatgcaggacgtctttcgcattatcggccgcctgtcgcgctcttctatcagcgtgctgatcaacggcgaatccggtaccggcaaagagttggttgcccatgctctgcatcgccacagcccgcgcgccaaggcgccgtttattgcgctgaatatggcggcaatccctaaagacttgattgagtcagagctctttggccacgagaaaggcgcttttaccggcgccaataccgtgcgtcagggacgttttgagcaggcagacggcggtacgctgttccttgacgagattggcgatatgccgctggacgtccagacccgtctgctgcgcgtcctggccgatggtcagttttaccgcgtgggcggctatgcgccggtgaaagtggatgtgcgtattattgccgccacccaccagaaccttgagctgcgcgtccaggaggggaaattccgtgaggatttgttccatcgcctgaacgtgattcgcgtccatctgccgccgctgcgcgagcgtcgggaagatattcctcgcctggcgaggcatttcctgcaaattgccgctcgtgaactgggcgtggaggccaaacagctgcatccggagacggagatggcgttaacccggctggcgtggccgggcaacgttcgtcagctggaaaacacttgccgctggctgacggtgatggccgcgggtcaggaagttctgacgcaggatctccccagtgagctgtttgaaaccgcgataccggataatccgacgcaaatgctgccggatagctgggcgacgctgctggggcaatgggccgatcgcgcgctgcgctccggtcatcaaaacctgctctcagaagcgcagccggagatggagcgtacgctgctgaccaccgcgttacgccatactcaggggcataaacaagaggcggcgcggctgctagggtggggccgtaacactctgacgcgtaagttaaaagagttgggaatggagtag

SEQ ID NO: 253641 - DNA, 1374 bp, Klebsiella pneumoniae
atgtctgtgcagttaatcgactgggatctggccctgatccagaaatataattattccgggccgcgttatacttcgtatcccaccgcgctggagttttctccagaatttggcgctgctgaatttgatgcggcggttgcccgctatccgcagcgtcctctatcgctatacgtgcatatcccgttttgccataaactctgctatttctgcggctgcaacaaaatcgtcacccgccagcagcataaggctgaccagtatctggatgtgcttgagcaggagattattcatcgcgctccgctttttgctggccgcaaggttaatcagctgcactggggcggcggtacgccgacgtatctgaacaaagcgcaaattagccgcctgatgcggttgctgcgtacgcatttcgattttaacgcggatgcagagatttccattgaagtcgatccgcgtgaaatcgagcttgatgtcctggatcatttacgcgccgaaggctttaaccgcctgagcatgggcgtgcaggacttcaacaaagaagtgcagcgtctggtgaaccgcgagcaggatgaagcatttatcttcgcgctacttaaccacgcgcgtgatatcggctttacctcaaccaatatcgacctgatttacggtctgccgaagcaaacgccgcagagcttcgcttatacgctacagaaagtggcggagcttaatcccgatcgtctgagcgtatttaactatgcgcatctgccaacgctgtttgctgcacagcgcaaaatcaaagatgccgatttgccctcagctgaacaaaagctggatattcttcaggagacgattgcttcgttaacctctgcgggatatcagtttatcggcatggaccactttgcccgccctgatgatgagctggcgatagcccaacgggaaggtattctgcatcgcaacttccagggatataccacccagggagacaccgacctgctggggatgggcgtgtcggcgatcagtatgattggcgattgctatgcgcagaaccagaaagagttgaaacagtattatcaacaggtcgatgaaaccgggacggcgctgtggcgcggtattgcgttgacgcgcgatgactgcattcgtcgtgatgtcattaaggcgctgatttgtaacttccgtctcgactttgcggcggtagagaaacagtgggcgctcatctacgatgactactttgccgaagatatgaaattgttggcgccgctggctaaagacgggctggtggatgtggatgagaagggcattcaggttacgccgaaaggccggctgctgattcgcaatatctgtatgtgctttgatgcttacctgcggcagaaagcgcggatgcagcagttttctcgcgtgatataa

SEQ ID NO: 253642 - DNA, 507 bp, Klebsiella pneumoniae
atgaaaaaaccgacatccgtacctcgtggcaaaaaaaatcgcaaaacgcgtgaagaattgaaccaggaagctcgcgagcgtaagcatcagaagaagcatcgcggccatgcggcaggcagtcgtgcgaccggtggcgacaccgcttcagcagtcaaaaaacaaggtcagcagcaagatccccgaattggcagtaaaaaacccatcccgctgggcgtaactgaaagcgctccggcgattaagcagcataaaccaaagagcgagaaacctatgctttcaccgcaggctgagttggatttgctggagaatgatgagcgcctggatgcgctgctggaacgccttgaagaaggcggcaccctgaatgctgaagagcaaacctgggttgatgccaaactggatcgcattgatgagctgatgcagcagctgggcctctcctatgatgatgacgaagatgaagaagaggaagagcgcaaagaagatatgatgcgcctgctgaagggtggaaactaa

SEQ ID NO: 253643 - DNA, 633 bp, Klebsiella pneumoniae
ttgaccaactggaattatcaactgacgcattttgtcactagcgcgccagatatccgccatcttcctgccgataccggtattgaagtggcatttgctggccgctctaacgccgggaaatccagcgctctgaatacgctgactaaccaaaaaagtctggcgcgcacgtcgaagacgcccgggcgtacgcagctgatcaacctgtttgaagtcgctgagggcaaacgccttgtcgacctgccgggctatggttacgcccaggttccggaagagatgaagatcaagtggcagcgcgcgctgggtgaatatcttgagaaacgcctctgtctgaaagggctggtggtgctgatggatattcgtcatccgcttaaagatctcgatcagcagatgatccagtgggccgtcgaaagcgatatcccggtgctggtactgctgactaaagccgataagctcgccagcggtgcgcggaaagcgcagatcaatatggttcgcgaagcggtcatcgcctttaacggagatgtgcaggtagaagcgttttcttccctgaagaagcaaggtgtggataaactgcgtcagaagctggatagctggtataacgatatcctgccgcaggaagaacccgtagacggcgaataa

SEQ ID NO: 253644 - DNA, 900 bp, Klebsiella pneumoniae
atgccgagattactcgccgcgataacgctcccgctgagtatcgccctgactatcatagtcaccgtcatctgctccgtgccaatcatcatcgccgggctgattaaacttcttgtgcccgttcctgcggtctggcgctcgatatccgttttttgcaatttcatgatgtactgctggtgtgaaggactggcgtggctgctacgccttaatccctggcttaaatgggatgtgcaaggccttgatggtctgagtaaaaagaactggtatctgcttatcagcaaccatcacagctgggccgatatcgtggtactttgcgtgttgttccgcaaacagattccgatgaataaatatttcctcaagcaacagctcgcctgggttccgtttattgggctggcctgctgggcgctggatatgccttttatgcgccgttattcccgaggctatttactccgccatcccgagcgccgtggcagagatgttgaaactactcgccgctcctgcgagaaattccgcgcgcatcccaccactatcgtcaactttgttgaaggttcacgttttactgaagaaaagcgacagctaacccgttcgccataccacaatctgttagcgccaaaagcggcgggtatcgcaatggcattaagcgtgctgggctcgcagtttgataagctgttgaacgtcacggtgtgttatccggaaaatagccaaagaccgttttacgatatgctgagcggtcgattaacgcgcattgtggtgcgaatccatcttgagcccgtagctgaagagctgcatggtgactatgtaaatgataaaaactttaagcgacgctttcagcgttggctaaatacgctctgggaagagaaagatcggcagctaacggaaatcatgcagcaggcaaagaagtga

SEQ ID NO: 253645 - DNA, 504 bp, Klebsiella pneumoniae
gtgctcgagtttttctcgttctattgcccgcattgctatcagtttgaagaagtccttcacgtatcagataacgtgaagaaaaagctgccggaaggcgtcaaaatgacaaaataccacgttgagttcctgggcccgctaggcaaggatctgactcaggcatgggctgtggcgatggcgctgggcgtggaagataagatcaccgtcccaatgtttgaagcggtacagaaaaaccagaccgtccagaccgtggccgatattcgtaaggtcttcgttgatgccggcgtcaaaggtgaagattatgatgcggcctggaacagctttgtggtgaaatctctggtggctcagcaagagaaagccgcttctgatttccagctgcagggcgtgcctgctatgtacgttaatggtaaataccagcttaatccgcagggtatggataccagcaacatggacgcatttgttgcccagtatgctgataccgttaagcagctggttgataagaaataa

SEQ ID NO: 253646 - DNA, 867 bp, Klebsiella pneumoniae
gtggccgtagcgcaatgccccgcatcctgtggggaactcatccagggctggatcctcggcagcgagaagctggtctcctgccccgttgactggtacagcaccgtcgaggtggactacggttcgcctcgggcggatgaacgtccgctggcgcgggcgatggtcgaccagttgctgagctactggcgttatccgccggcgctgagcaaggagattcggatcgatatctgctccacgattccggttgccaaaggtatggccagcagcaccgcggacatcgccgcgacggcggtagccgccgcgcatcatctcggccatccgctggatgaacccaccctcgcccggctctgcgtctccctggagcccaccgacagcactctgtttcgtcagctcaccctgttcgaccacaacaccgccgccacgcagattgcctgtgacagccagcctcagctcgatctgctggtgctggaaagccccgctacgctgctgaccaccgattaccaccgacttccccggcttgaaaagctgcacgcccactccgcgtctctgcagctagcctgggagaaagttcagctagcctgcgagacggataatccccggcggatgggagaggccgcgacgcttagcgccgtcgccagccagcatctgttaccaaagccggggtttgatacgctgcgggggctggtggaagagtgcgatttatacggtattaacgtggcgcacagcggcagcgtggtcggcctgatgctcgaccgtcaacgtcacgacattgagtatttacagcgacggctggaagagacgcgacttagcgagctctggcccaggcagcacctgctgcgcatggtgcagggcggcgtcgaactgcgctaa

SEQ ID NO: 253647 - DNA, 1329 bp, Klebsiella pneumoniae; identical to SEQ ID NO: 175947

SEQ ID NO: 253648 - DNA, 1332 bp, Klebsiella pneumoniae
atggtgaaggaacgtcgcaccgaactggtagagggattccgccattctgtcccctatattaacgcccatagaggtaaaacgtttgtcatcatgctgggcggggaagccatcgagcatgataatttctctagcatagtcaacgacattggcctgcttcacagcctgggaattcgtctggtagtggtctatggcgcccgtccacagatcgacgccaacctggcggagcaccgtcacgaaccggtctatcacaaacaaacccgagtgactgacgccaaaacgctcgagctggttaagcaggcggcgggtatgctgcagctggaaattaccgctcgcctgtcgatgagcctcaacaacaccccgctgcagggcgcccacatcaacgtggtcagcggcaatttcattatcgcgcagccgttaggcgtggatgacggcgtggattactgccatagcgggcgcattcggcgcatcgatgaagaagccattcaccgtcagttggataacggcgcgattgtgctgatgggcccggttgcggtgtcggtcaccggcgaaagctttaacctgacctccgaagagattgcaacccagctggcgattaagctcaaagccgaaaagatgattggcttctgctcgtcacagggggtgtacaaccaggatggcgagatcgtccccgagctattccctaacgaagcccaggcgcgggttgaagagatggaagcggacgaagactacagctccggtaccgtgcgcttcctgcgcggcgcggtaaaagcctgccgcagcggcgtgcgccgctgccacctgattagctatcaggaaaacggcactctgctgcaggagctgttctcacgcgacggtatcggcactcagatagtgatggagagcgccgagcagatccgccgcgccaccattaacgacatcggcggcatccttgagctgataagcccgctggagcagcagggcattctggtcaggcgttctcgcgaacagctggagatggaaatcgataagttcaccattattcagcgcgacaacaccaccatcgcctgcgccgcgctctatcctttcccggaagagaagatcggcgaaatggcctgcgtggcggtgcatccggactaccgcagctcatcgcgcggcgaagtgctgctcgaacgaattgccgcgcaggcgaagcaaatgggcctcagcaaactgtttgttctgacaacccgcagcattcactggttccaggagcgcggatttacgccggtagacgttgacctgctgccggagagcaaaaaagagatgtacaactaccagcgtcgctccaaggtgttgatggcagacctggcctga

SEQ ID NO: 253649 - DNA, 1836 bp, Klebsiella pneumoniae
atgaacctggatgaactattgctacaggcggttgagcagcgactgctgcgcccgctggacgttcagtttgcgctaatggtggcgcaagaagcgcatccggcggtgaagctggtcgcggcgatcctcagtcgcgatgctggtgaagggcacgtctgtctgccgatttcgcgtcttgtcgatgatgaactgttgaaggctaaagcaggtggcctgagcgagcaaattcttgaactgaccggcgcgccggacggctggctgccgctgctcaatgattccgaggccgtcagctgcggagagcggccagcgccgatgattctctgcggcgatcggctttaccttaaccgcatgtggcgcaacgaattaaccgtcgcgcgctttttcaatgaagccaatcaggtgctggaggtggatgaagcccggctggcagcgacgctcgacgcgctgtttccgcccgcagaggaaactgactggcaaaaagtggcggctgctgtcgccctgacccggcggatttcggtaatttccggcggaccgggcacaggtaaaaccacgaccgtcgctaaactcctggccgcgctgatccagaccttctccagcccgcggtgccgtattcgcctggctgcgccgaccggtaaagccgcggcgcgcctgaccgagtcccttggcgctgcgctgcgccgtcttcctctcaccgacgaacaaaaggcgctggtgcccaccgaagccagtaccctccatcgcctgctgggcgcgcagccgggaagccagcggatgcgctatcacagcggaaacccgctgcatcttgatgtgctggtggtcgatgaagcctcaatgattgacctgccgatgatgtcgcgcctgatcgatgcgctgcctgagcacggaagggtgattttccttggcgaccgcgatcagctggcttcggtcgaggccggggccgtgctcggcgatatctgcgcgtgggttaatgcaggctataccccggagcgggcgacgcagctcgcccggttaaccggccagccggttccggcaggcgagggtaatatggccggttcgctccgcgatagcctgtgcctgctgcagaaaagctaccgtttcggtcgccattccggtatcggccagctggcctgggcggtgaacagcggcgatcgcagcgcggtacgcgcaacgctgcgccagtcatttgacgatatcgctctgtatccgctgagcgccaccgaagagtatgaagcgatgctgaatcaggcgcaggcgggctacggccgcttcctgcagctgctgcgcgctcgggcagagcccgaagagatgatcgccgcttttggcgaattccagctgctgtgcgcgctgcgcgagggtccgtatggcgtcagcggagttaatgaacagctggagcagatgctcaaccgcaagcgggcgattacgttaccgcgccattcgcgctggtatgaaggtcggccggtgatgatctcgcgcaacgacagcgcgctggggctgtttaacggcgatatcggtatcgcgctggaaagaggtggtgacctgcgcgtctggttcccgatgcctgatggcagcatcaagtcggtacagccaagtcgtctgccggagcatgataccgcctgggcgatgacggtgcataaatcgcaggggtcggagttcgatcacgcggcgctgatcctgccttcgcgcagcgtgccgctggtgacccgcgagctggtttataccgctataactcgcgcgaaacggcagctgtcgatctatgccgatgagcaggtactgacccaggcggttgtcgcgcgtaccgaacgacgcagcggcctggcggatattttttccgctcagtga

SEQ ID NO: 253650 - DNA, 3546 bp, Klebsiella pneumoniae
atgaccgacaccgccgagtctcttgacccactgcgcttgcccctgacgggcgagcgcctgatagaagcctctgcgggcaccggaaaaacgtttaccatcgccgcgctctatctgcggctgttgctggggctgggcggtgaatccgctttcccccggcagatcagcgtggaagagctgctggtggtgacctttaccgaagcggcgaccgaagagctgcgcggacgtatccgcagcaatatccacgagctgcggatcgcctgcctgcgcgaaagcaccgacaatcctctttatgccgggctgctggcggaaattgacgataaagcccaggcggcgcaaacgctgctgctggccgaacgccagatggatgaagcagcggtatttaccattcacgggttctgccagcggatgctgagccttaacgcctttgagtccggcatgctgttcgaactgcagctgattgaagatgaatcccgcctgcgctatcaggcctgcgccgacttctggcgtcgccactgctacccgctgccgcgcgaaattgctgcggttatccacgaggcgtggaaagggccgcgcgacctgttgaaatccatcgaccgctggctgcaaggagaggcgccgcagctaaaatctccgccccctgctgaagaaacgctggccgaacgccaccagcaaattattgaacgcattaacgcgctcaaacagcagtggctggaacaggtgagcgagattgagacggtactggaaacctccggtctcgaccggcgcaagttcaatcgcggcaatcagggcaaatggctggaaaaagtgaccgcctgggcccaggaagagactttgagctaccagctgccggatgcgctggaaaagttctctcagcccttcttgcttgagcgcaccaaagcggacggcgcaccgccggtacacccgctgttcagcgcgatagaagcgctgctggcgacaccgttaaccctgaccgatctggtgatcgccagggcgatggttgaaatccgcgaggcggtcgcgcgggaaaaacgccgccgcggcgagctgggatttgacgatatgcttagccgcctggatgacgccctgcgcggagagagcggagaagcgctggccagcgcgattcgtcagcgcttcccggtggcgatgatcgatgagtttcaggataccgacccgcagcagtaccgaatctttcgccgcatctggcggcgccaggcggataccgcgctgctgctgattggcgaccctaaacaggctatttacgccttccgcggcgcggatatctttacctacatgaaagcgcgtggagacgtcaccgctcactatacgctcgataccaactggcgctccgccccggggatggttgacagcgtcaatcgcctgtttagcctcagcgataacccttttatgtttcgcgaaatcccgtttctgccggtgaaatcggccgagaaaaatcaggggctgcgctttaccgttgatgatacggcggttccggcgatgaatatctggctgatgccgggcgaggccgtgggcgcaggggattatcagacgtttatggcccagctgtgcgcggcgcaaattcgtgactggctaagcgcgggccagcagggcaaggcgctgctgtggcgcggtgaaaaagctgaacccgtgcgggcttcagacatcacggtgctggtgcgcaatcgtcaggaggcgtcgttaattcgcgatgccctccagctgctgtcgataccttccgtctatctctccaaccgcgatagcgtgtttgaaacgccggaggcgcaggagctgctgtggctgctgcaggcggtgctggcccccgagcgcgagaataccctgcgcagcgcgctggcgacctcaatgttcggtcttaacgcgcaggatatcgaaaacctcaaccagaacgaacgggcgtgggatgagctggtagaagagtttagcggctaccggcaagtctggcggcagcgcggcgttatgccgatgctgcgcgcgctgatgaccgcgcggcgcattgcagaaaacctgctggcgaccaacggcggcgagcggcgcctgaccgatatcctgcatatcagcgagctgcttcaggaggcggcgaaccagctggagagcgaacatgcgctggtgcgctggctggcgcagcatatcgccgagccggatagcaacgcctccagccagcagatgcgcctggaaagcgacaagcatctggtgcagatcgtcaccatccataaatcgaaagggctggagtatccgctggtctggctgccgtttatcgcgcgttttcgcaaacaggatcaggcgttttatcacgacagaacctcttttgccgccgtgctcgatctgggccaggatgagagcagcatggagctggctgaggccgaacgtctggccgaagacttacgtctgctgtacgttgcgctgacccgggcggtctggcactgcagcctgggcgttgcgccgcttagcccccgccgcagcgacaagcccggcgccagcgattttcaccacagcgcgctggggcggctgctgcagggcggagaagcgatggacgccgcagggctaacggcgcgactgcaggcgttttgccgcggggatatcgccctgcagctccccgcgacgacgacgcagacgccctggcaggctccacagtcggcgctgccgccgctctccgcgcgtctgcttgagcgttcggtgagcgatgactggcgcgtcaccagctactccggcctgcagcaaaacggacacagcgcggcgcaggaccttttaccgcgtctggatatcgatgccgcaggcgtcggcgatgtggcggaagaaccgcagcttacgccgcaccacttcccgcgcggagcatcgccaggcacgtttctgcacagcctgtttgaagatattgatttcacccagccggtccccgccgactggatggcggaaaagctccagcttagcggcttcgaggagaaatgggccccagtactgaccgaatggctcgacggcgtgctgcgtacccgtctccctggcgcggagatcgcgctgaatcagcttagcgagcgtgataaacaggtggagatggctttttatctgcccatcgagcagcctctggatccgctgcgcctggatgcgctgattcgtcagtacgatccgctctccgtcgatacccccatgctcgatttccgccaggtgcgcggtatgctgaaaggctttattgacctggtatttcgccataacggccgctattacctgctggattacaaatccaactggctggggaaagatcgcgaggcctatacccaggaagcgatgatgcaggctatgcgtacccatcgttacgatttgcagtatcagctctacagcctggcgctgcaccgttatttgcgccaccgtattgccgattatgattacgaacgccactttggcggcgtcatttatctctttttacgcggtatggatggacaggacggcgggcagggtatttttaccactcgtccggcgcgaccgctgattgacggccttgatgcgctgtttgctggagaaactcaggaggtggcgctatga

SEQ ID NO: 253651 - DNA, 2886 bp, Klebsiella pneumoniae
atgccccgcagtttatggttcaaggttattgttttactggccgccctctgggcgccgttaagtcaggcagacaccggatggcaaccgattcaggaaaccatccgtaaaagcgacaaagatacccgtcaatatcaggcgatccgcctcgataacggcatggtggtattgctggtttccgatccccaggcggtaaaatcgttgtcggcgctggtcgttcccgtggggtcgctgcaggaccccgctgagcatcagggactggcccacttcctggagcatatgacgctgatggggtcgaaaaagtacccgcagccggatagcctcgccgaatatctcaaaatgcacggcggcagccataacgccagtaccgctccgtaccgcactgccttctatcttgaagtagaaaacgatgctctggacggcgcggtcgatcgcctggccgacgccatcgccgctccgctgctggataaaaaatatgccgaccgcgagcgtaatgcggtcaacgccgagctgacgatggcgcgcagccgcgacgggatgcggatggcgcaggtcagcgcagaaactattaacccggcgcaccccggctcgcagttttccggcggtaaccttgaaacgctgagcgacaagcccggcaagccggtgcttgatgccctgcacgcctttcgcgatagctggtattccgccaacctgatgaaggcggtgatctacagcaacaagcctctgccggagctggcaagtatcgcggcggccacctacggccgcgtgccgaaccacgatatcagcaaaccggaaataaccgtcccggtggtgaccgatgcgcagaagggcatcatcattcactatgtcccggcgatgccgcgtaaagtcctgcgcgtggagttccgcattgataacaatagcgaccagttccgcagcaaaaccgacgagctggtgacctatatgatcggtaatcgcagccccggcacgctctctgactggctgcaaaagcaggggctggctgagggtattcgcgcggactccgacccggttgtcaacggcaacagcggggtgctggctatttctgctactctgacggacaaaggcctggcgcaccgcgatgaagtgaccgcggccatcttcagctacctcaatctgctgcgtagccagggaatcgataagcgctattttgatgaactggcccacgtgctggcgctcgacttccgctacccgtccatcaaccgcaatatggattacgtcgaatggctggcggacaccatgatccgcgtgccggtcgaacataccctggacgtagttaacatcgccgatcgctacgatccgcaggcgatcaaagaccgtctggcgatgatgacgccgcaaaatgcccgtatctggtacatcagcccgaaagagccgcataacaagaccgcctacttcgttaatgcgccctatcaggtggataaaattagcgagcagacttttgccgactggcagcagaagtccagcgctatcgatctcaagctgccggtgctgaacccctatattccggacgattttagcttaatcaaaagcgataaggcttacccgcatccgcagctgattgtcgatgaaccgacgctgcgggtgatctacgcgccgagtcagtacttcgccagcgagccaaaagcggatatatcgctggtgctgcgtaacccgcaggcgatggacagcgcccgccgtcaggtgatgtttgccctcaatgattatctggcgggtatcgcgctcgatcagctcagcaaccaggctgcggttgggggcatcagcttctctaccggtgcaaataacgggctgatggttaacgccaacggctatacgcagcatctgccagagctgtttaacgccctgctggacggttactttagctatacgccaaccgaagagcagctggagcaggccaaatcctggtacgcgcagatgatggattcggcggacaaaggcaaagcctacgatcaggcgatcatgccgattcagatggtttcacaggtgccgtactttcagcgtgaagatcgccgggcgctgctgccgtcgattacgctgaaagaggtgctggagtatcgcgataacctcaaggcgaaagggcgaccggagctgctggtcatcggtaaccttaccgccgaacggtcaacggcgatggcccgccagatccaaaaacagctgggggcggacggcaacgaatggtgccgcaacaaagacgtactggttgatcgcaagcagctggcgatttttgagaaagcgggtaacagcaccgactccgcccttgccgctgtcttcgcgccgccgaacctggacgaatacgccagctcagctgccagctcgcttctcgggcagatcgtccagccgtggttctacaaccagctgcgtacggaagagcagctgggatacgcggtcttcgccttctcgatgaacgtgggccgccagtggggaatgggcttcctgctgcaaagcaacgataagcagccggctttcctctggcagcgcttccaggccttcttccccacggcggaagccaaactgcgggcgatgaagccggaagagtttgcgcagattcagcagacggtcatcagtcagatgctggaggcgccgcaaacgctgggcgatgaagcatcgaagctgagcaaagatttcgatcgcggtaatatgcgcttcgattcacgtgataaagtagtggctcagattaaactgctgacgccgcaaaagcttgccgacttcttccatcagacggtggtggatccgcagggcatggcaattctctcccaggtttccggtagccagaatggcaaggcggaatacgcgcatccgcaggatggcaaagtctgggagaacgtcagcgcgttgcagaaatccttacccctgatgcgagagaatgaatga

SEQ ID NO: 253652 - DNA, 3375 bp, Klebsiella pneumoniae
atgttaagggtgtaccactcaaaccgtctggatgtgcttgaagccttgatggagtttatcgtcgagcgccagcggctggatgacccttttatgccggaaatggtgctggtacagagtaccgggatggcgcagtggctgcagatgacgctggcgaagcgcttcgggattgcggccaacattgagttcccgctacccgccagttttatctgggacatgttcgtgcgggtgctgaaagatatccccggagaaagcgcgttcagcaagcaaagcatgagctggaaacttatgactctgttaccagagcggcttaatgatgaatcttttacgctactgcgccactacctgcatgacgatagcgacaagcgtaaactgtttcagctggccgccagagtggcggatctctacgaccagtatctggtttatcgcccggagtggctgatgcgctgggaggctgaccagcgcgttgacggtctgggagaggcgcaggagtggcaggcgccgctgtggaaagcgctggtggaatataccgccgagctgggccagccgctgtggcatcgcgccaacttgtaccaacgttttatcagcgcgcttgaagacgccgaacagccgcccgccgggctgccatcacgggtctttatttgcggaatatcggcgctgccgccggtgtatctgcaggcgctccaggcgctgggtaaacatgttgatgtatatgtcctcttcactaacccgtgccgctactactggggcgacatcaaagatccggcatttctggccaaactgctgtcccgccagcggcgccaccaccgcgaaacggcgcgagagctgccactgttccgcgatgcggaacaggcgccggggctgttcaacgacgccggtgagcaggatgtcggcaacccgctactggcctcctggggtaagctggggcgcgactatatctacctgctggcgggtcttgaacgctatgaagagctggacgcttttgtcgatattgtgccggataacctgctgcataatcttcaggcggacattctcgaactgcgcaatgaagccgtggccgggcgcagcgccgaagagtttgccaatagcggcagcaagcggccattggcagcggacgatcgcagcctgacgattcatgtttgtcatagcccacagcgagaagttgaggtgttgcacgatcggctgctggcgatgctcgaagagaatcccgagctcacgccgcgcgatattatcgtcatggtggcggatatcgatagctttagcccgtatattcaggcagttttcggcagcgccagcggcgaacgctggctgccgtgggcgatttccgatcgacgcgcccgtgaatcgcatccggcactgcaggcctttctcacgctcctttcgctgcccgatagccgctttgccagcgaagatgtgctggcgctgcttgacgtgccggtgctggcggcacgctttaacattgacgaagaggggctgcgctacctgcgacagtgggtgaacgaatccggcgtacgctgggggatggatgatgacaacgtgcgtgaactcgacctcccggcaaccggccagcatacctggcgctttggcctgacgcgcatgttattgggctatgccatggacagcagcgagggtgagtggcgctcggtgctgccttatgatgagtcgagcgggctgattgccgagctggtgggcaacctggcatcgctgctgatgcagcttaatctctggcgtcgcgggctggcccaggagcggccactggccgagtggctaccggtatgccgcgatctgctgaacgactttttcctcccggatagcgaaacggaagccgccctcgcgctgatagaacagcagtggcaggcggtgattgacggcggcgtcgacgcccagtatggcgaaacggtaccgctctccttgctgcgcgatgagctgtccctgcgcctcgatcagcagcgtatcagccagcgctttctcgccgggccggttaatatttgcaccctgatgccgatgcgttcgattcctttcaaggtggtatgcctgctggggatgaacgacggtgtttatccgcgcacgcttgcgccgctgggctttgacctgatgagtcagaagccgcagcgcggcgaccgtagccgtcgcgatgacgaccgctatctgttccttgaagccctgatgtccgccgagcagaaactctatatcagctatatcggccgttctattcaggataacagcgaacgctatccctcggttctggttcaggagctggcggactatatcggtcagagccactgcctggaaggagacgaagatctggattgcgatgccagcgagcgtcgtgttaaagaacatattactcatctgcatacccgcatgccttttgatgccgcgaattttctggcgaacgaagatcaaagctatgcccgggaatggctggcggctgccagccagcagggggaagcccacggtgagtttatccagccgctaccggtccctgaactcgatcacctgcctctggaacagctgctgcgcttctggcagcatccggtacgcgccttctttcagcagcggctgcgggtgaatttccgctcggaagagagcgagatccctgacgatgaaccttttacccttgaagggctgagccgctatcagctgaaccagcagttgcttaatacgctgattgaacagcaggacgcctcggcaatgtatcgccgttttcgtgccgccggggagctaccctatggcgcattcggcgaactggcctgggaaacgcagcgtcaggagatgcagaacctggcagagcgggtgatagcctgccgtcaaccggggcagagcatggaaatcgatctgcaatgtaacggagtcaacattactggctggctacagcaggtacaatccgacggtttgctgcgctggcggccatcgttattaagcgtggcgcagggaatgcaactttggctggagcatcttgtctattgtgctagcggcggtcgcggcgaaagtcggctgtttgtgcgcaaagaaggcgagtggcgctttcccccgctggcgcaggaacaggcccaggaatacctgaatgagctcgttgacggttacctgcagggaatgtcaaaaccgctgctgttgctgccggaaagcggcggcgcatggctaaaagtctgttatgacgccgaaaagaatgtcatgttaatggacgaagagacgcagcaaaaagcgcgcagtaaatttcttcaggcttatgaagggaacatggtggtcagaggcgaaggtgccgacgtctggtatcagcgcctgtggcgcaccctggagccggaatactatgaagagatccttacgcaaacgcagcgttatttgctaccggtgtttcgttttcatcagtccgaataa

SEQ ID NO: 253653 - DNA, 324 bp, Klebsiella pneumoniae; identical to SEQ ID NO: 175953

SEQ ID NO: 253654 - DNA, 414 bp, Klebsiella pneumoniae
gtgaatcgccagcgcgggctctcttcgctgctgatggtgctactgcttttagcgcttggcacactgttactccaggggctgcaccagcagcagcgttcgctgttagtgcagacggccagcgaaacgcgggcgcttcgcgacgccactgatgcgcattccgcgctgcagtggggaaaaacgctgacctggccgttgcaagaagcggttagctgccagcagaaggctgcactcgactggcgcgcctgtctgaggagctttagcgacgcctcggtattgctcattggcagcagcggcggtggcagaatgctgctgtggcagtcgggcgctgtggaacaaaaccgcatccatttttcaccacacggctggagcgatttttgcccgttaaaggaggtgagcctatgccagatgccctga

SEQ ID NO: 253655 - DNA, 564 bp, Klebsiella pneumoniae
atgtctgtaaaacgtcgcggtttttcgctgccggaaacgctgatcgcgatggctattagctccgtgctattgctcggcagcgcgcgttttctcccggcgctgcagtgggccgcgcttcgccagacccggcagcaggcgctggaaaatgagctatggcagcgaatctataccgtagcgaagcatctgcagcgcgccgggtactgccgtggccgctgtagcgggcaaccgctgtatatcgcagagagcggcgattgcctgcttgttcgttgggatggcaacagcgatggcgtctggaatcgctctccgtcatcagaatctgatactaccggatttcgcctgcgcgacggggcgctggaaaccttgagaggggcggaggagtgtagcggcaagggctgggagaaaatgaccaatccagcggcgattcaggtcaccgtttttcaggttacccggcagaataagacggatttttcgcccgagttgtcgataacgctggcggcgcattccgttgccgacccgcaaatccgcgcgcgagcggaatatggcgtaacggggtataacctgtga

SEQ ID NO: 253656 - DNA, 468 bp, Klebsiella pneumoniae
atgaacagagaacatggctataccctgattgaaaccctggtcaccatggtcgtcgtcgtcattcttggcgccagcggactttatggctggcagagctggcaacagcagcagcgtctgtggcaaaccgcctgccaggttcgcgattatctggtgctgctacgcgatgacgccaactggcacaaccgcgacagggtattaagcgtcgaccgaagcgcggagggctggtgcctgagcgtcagcggatcgacgaacgactgtagcgtcagcaacgctttcacgctgcagccgctatggccggaggtttcgctcagcgcgatgacgccggggctaggattttacggcctgcgaaataccgcctgggcgggacatatccgcctgcaaagcgcggcgggcggctggaatattatcgtttctaactgggggcgtattcgcctgtgccgcggcgaggagacggcatcatgtctgtaa

SEQ ID NO: 253657 - DNA, 876 bp, Klebsiella pneumoniae
atgaatagtggctacctgcattttccggagtttgatccggtaattttttccattggaccggtctccctccactggtacggcctgatgtacctggttgggtttgtttttgcgatgtggttggccacccgtcgggccaatcgtccaggcagcggttggacaaaaaacgaagttgaaaacctgctgtacgccggcttccttggggttttcctcggcgggcgtcttggctatgtcttcttctacaacctgccggtgttcctcgacgatccgctctatctgttccgcgtctgggacggcggtatgtccttccacggcggcctgatcggcgtgattctggtgatgatcattttcgccaaacgcaccaagcgtaccttcttccaggtttctgacttcattgcgccgctgattccgtttggcctcggcgccgggcgtctgggtaactttatcaacggtgaactgtgggggcgcgtcgatccgaacttccactacagcatgattttccccggctctcgggcggaagatctggcgctgctgccatcgcatccggagtggcaatcgctgttcgatacctacggcgcgctgccgcgtcatgcttcgcagctctatgaactggcgctggaaggtgtggtgctgttcctgatcctgaacctgtttatccgcaagccgcgtccggccggttcggtttccggcctgttcctcattggctacggtctgttccgcatcatcgtggagttcttccgtcagcccgatgcccagtttaccggcggctgggtacagtacatcagcatggggcagattctttcgattccgatggtgcttgcgggtatcataatgatggtctgggcgtaccgttctcgtccgcagcaacaaaattcttga

SEQ ID NO: 253658 - DNA, 2247 bp, Klebsiella pneumoniae
atgctcactcggttgcgagaaatagtcgagaaggtcgcgagtgcgccacgtttaaacgaggcgctggatatcctggtaaccgatatctgcgctgcgatggagacggaagtttgttcggtttatctggctgatcatgaccgacgctgttattacctgatggcgacgcgcgggttgaaaaagccccgcgggcgcatcgttgcgcttgcttttgatgaaggcctggtcggcctggtcggccgcctggcggaacccatcaacctcgccgacgcgcaaaagcaccccagctttaaatatattcctgccgtaaaagagggccgctttcgcgctttcctcggggtgccgattatccagcggcgtcagctgctcggcgtgctggtggtacagcagcgcgagctgcgccagtttgacgaaagcgaagagtcttttcttgtcacgctggccacgcaaatcgccggcattctctcccagtcccagctaaacgcgctatttggtcagtatcgtcagacccgcatccgcgcgctgcccgcatcgtccggcgtagcaattgccgaaggctggatggacgtcagcctgccgctgatggagcaggtttatgaagcctcaaccctcgataccgcttccgagcgcgagcggctgaccggcgcgctggaagaggcggcgaatgagtttcgccgctacagcaaacgctactctgccggcgcgcagaaagagacggcggccatttttgacctctattcacacctgctctctgacgcgcgcctgcgccgcgagctgtttgccgaagtggataaaggcgcggtggccgaatgggcggtgaaaaagatcatcgagaaattcgccgaacagtttgccgcgctcagcgatggctatctgaaagagcgcgcgggcgatctgcgcacgctgggccagcggctgcttttccatctcgacgacagtattcaggggccaaatacctggccggagcgcatcgtgctggtggcggatgaactgtcggccaccaccttagcggaggttcctcaggatcgtttagccggcgtggtggtgcgcgatggcgcggcgaactcccatgccgcgattatggtccgcgcgttgggcattccgacggtgatgggggcggatatccagccttcgttgctgcacggccatacgctgattgtcgatggctatcgcggcgagctgctggtcgacccggagccggtgctgctgcaagagtatcagcgcctgatcagcgaagaaaacgagcttagccgcctggctgaggacgatcttgaacgcgcttcggaactgaaaagcggcgagcgggtaaaagtgatgctcaacgcgggcctgagccccgagcatgaagaaaagctcggcaacttcgtcgacgggattggactttaccgtaccgaaatcccctttatgctgcaaagcggcttcccctctgaagaggagcaggttgcccaatatcagggcatgctgcagatgttcaacgataaatcggtgacgctgcgcacgctggacatcggcgcggacaaacagctgccgtacatgccgatcagcgaagagaacccgtgccttggctggcgtgggattcggatcacgctcgatcagccggagatctttctggtgcaggtccgcgcgatgctgcgcgccaacgcggcgaccggaaacctcagcatcctgctgccgatggttaccagcctcgatgaagtggatgaggctcgtcgcctgatcgatcgcgccagccgcgaagtggaagagatgatcggctacgccattccccgtccgcgtcttggcgtgatgctggaagtgccgtcgatggtctttatgctgccgcagctggcgaaccgcgtcgattttatttccgtcggcaccaacgatctgacccagtacattctggcggtggatcgcaataatacccgggtcgccagtatgtatgacagcctgcatcctggggttctgcgggcgctggcgatgatcgcccgcgacgccgagcgttttggtatcgatctgcgcctgtgcggagaaatggcgggcgatccgatgtgcgtgacgatcctgattggcatgggttatcgtcatctgtcgatgaacggccgttcggtggcgagagtgaagtacctgctgcggcgcatcgatatcaatgaagctcaggagctttcacagcgaagcctggaagcgcagatgaccgccgaagtgcgccatcaggtcgcggcatttatggaacgacgaggactcggcggcctgattcgcggcggccgttag

SEQ ID NO: 253659 - DNA, 531 bp, Klebsiella pneumoniae
gtgattgatgacgatggctaccgcccaaatgtcggtattgtaatctgtaatcgccagggccaggttatgtgggccaggcgctatggtcagcactcgtggcagttcccgcaagggggcataaatccaggagaatcagcagagcaggcgatgtatcgggaattgttcgaagaagtcgggcttagccgcaaagatgtgcggatcctcgcttcaacccgtaactggttgcgttacaaattgcctaaacgtttggtgcgttgggacacaaagccggtatgtatcggccagaaacagaagtggtttctcctgcaattgataggcagtgatgcagatgtcaatatgcaaaccagcagtacacctgagtttgatggctggcgatgggtaagctactggtacccggtgcgtcaggtggtgtcgtttaagcgcgacgtataccgcagggtgatgaaagagtttgccagcgtcacaatggcgctggcggaaaacacgcctaagccgcaaagcgcgcctgcatatcgacgtaaaagaggttaa

SEQ ID NO: 253660 - DNA, 225 bp, Klebsiella pneumoniae; identical to SEQ ID NO: 177344

SEQ ID NO: 253661 - DNA, 696 bp, Klebsiella pneumoniae
atgtcgaccatcgcgccgctgttatcccccccgcaaagccaggcgcagctgctggcccaggcgcagcagctggcaggctattcgctgggagagctggcgatgcttgccggaattcccattccgcgcgatttaaaacgtgataaaggctggatcggtattctgctggaaatatggctgggggcgagcgcaggcagcaagccagagcaggatttcgccgccctcggcgttgagctgaaaacgattcccatcgatgcttttggccggccgctagaaaccaccttcgtctgcgtcgcgccgctaaccggcaacagcggcgttacctgggagagcagccacgttcgtcacaagcttaagcgcgtgctgtgggtaccggtagagggcgatcgcgcgatccctttagccgaccgccgcgttggcgctccgctgctgtggagccccagcgaagaagaagagcgacagctacgtatggattgggaagagctgatggacctgatcgtccttggccaggtcgaacgtatcaccgctcgccacggcgaagttctgcagctgcgcccgaaagcggccaacagcaaagcgctgaccgaggccgtaggcgcccgcggcgagccgatcctcaccttaccgcgcggtttctatttgaagaaaaattttaccgccgccctgctcgcccgccattttcttctttaccctaaataa

SEQ ID NO: 253662 - DNA, 714 bp, Klebsiella pneumoniae
atgttatttgcatgggtaaccgatcctaacgcctggctggcgcttggtacgctgacgctgctggagatagtgctcgggatcgataatattattttcctctctctggtggtcgctaagctgcccacggcacaacgggcacatgcccgccgcattgggctgatgggcgcgatgatcatgcgtctggcgctgctggcgtcaatcgcatgggtcgtcaagctcactaaccctctctttaccgtattaggtcaggagatctcttttcgcgatctgatcctgctgctcggcgggctgtttctgatctggaaagcgagtaaagagatccacgaatccatcgaaggcgaagaagaagggctgaaaaccaacgtccattcatttatgggcgctatcgtgcagattatgctgctggatattattttcagcctcgattcggtcattaccgccgttgggctgtcggatcatctgtttataatgatggcggcagtagttatcgcggtgctggtgatgatggttgccgcccgctcgataggcgattttgtcgatcgccacccttcggtaaaaatgctcgcgctgtcgtttttgatccttgtcggctttacgctgatgctcgaaagtttcgacgtgcacgtgccgaaaggttacatctatttcgccatgttcttctcgattgcggttgagagcctcaacctgctgcgaaataaaaaaaatccgctgtag

SEQ ID NO: 253663 - DNA, 219 bp, Klebsiella pneumoniae
atgaaaaaatgggcagtattgatttccgccgtaggactggcgttctcggtttcaggttgcagcagcgattacgtcatggcaaccaaagatggtcgcatgattctgactgacggcaaacccgctatagacgacgataccggccttatcagctacgaagatcagcagggtaataaaatgcagatcaatcgtgatgacgtttcgcagattattaaacgttaa

SEQ ID NO: 253664 - DNA, 1194 bp, Klebsiella pneumoniae
atgagtgagtcagtacacactaacaattcgctgtactcgaaagggatgatagcggttatctgcgcccagtttctctcagcattcggcgacaacgcgctgttgttcgctaccctggcgctgatgaagcagctgttctacccggagtggagccagccggtattacagatgttgtttgtgggcgcttacattctttttgcgccgtttgtcgggcaatttgccgatagctttgctaagggacgagtgatgatggtagccaacggcctgaagcttatcggcgcgggctgcatctgcttcggcgtgaatccgtttctcggctataccctggtcggtatcggcgccgccgcctattctccggctaaatacggcatccttggcgagctgaccaccggcgataagttagtgaaagcgaatggtctgatggagtcatccactattgcggcgatcctgctcggctcgatggcgggcggtattctcgccgactggcacgttgtggcggcgctcagcgtctgcgcggtggtgtacgccggggcggtcgttgccaacctgtggatcccgaagctgcctgcggcgcgtccggggcaatcctggcgcttcaggccgatgaccaacagctttttcagcgcctgtacgaccctatggcgcaacggcgaaacccgcttttcattagtcggcaccagcttgttctggggagcgggggtgacgctgcgctttctgctggtgctgtgggtcccggtagcgctgggcattaccagcaacgcgatgccgacctaccttaacgcgatggtggcggtagggatcgtgctgggagctggcgcggcggcgaagctggtgacgctggaaacggtgtcgcgctgtatgcctgccgggatattaattggcgtggcggtcatctttttcgccatccagcaggcgctgctgccggcgtttgctctgctgctgctgctcggcgcgtttggcggcttctttatcgtgccgctcaatgcgctgctccaggagcgcggcaagcatacggtcggcgcgggcaacgctatcgcggtgcagaacctgggcgaaaacgtggcgatgctgctgatgttggggctctattcgctggcggtgagcatcggcattccggtggtcggcgtggggatgggttttggcgtagtgttcgcgctggcaattaccgctctgtggatctggggacggcgcaaataa

SEQ ID NO: 253665 - DNA, 147 bp, Klebsiella pneumoniae; identical to SEQ ID NO: 201686

SEQ ID NO: 253666 - DNA, 246 bp, Klebsiella pneumoniae
atgcacgaagaagtaccactgaaatattacgacattgcggatgagtattcgacggagtccgccgagcccgtcagcgagtcagaacgtgagcccctggcgcgctattttcaactgctgattacgcggctgatgaataacgaggaaatcagcgaggaggcgcagggagagatggccatacaggcggggattgatgaacagcggatcgatgatatagcgatattcctgaataaatggggtaatgagtag

SEQ ID NO: 253667 - DNA, 639 bp, Klebsiella pneumoniae
atgaaaaagttagcagcggcggttgttattctgggcacgctttccaccggtagcgtctgggcgcatgaagctggggaattctttattcgtgcgggttcggctacggtcagaccatcagaaggcgcgggcggaacgttaggcagtctggggggctttaacgttagcaataatactcaactgggcctgacgttcacctatatggcgacggacaacatcggcgtagagctgctggccgccacgcctttccgccacaaagtcggaacggcggcaaccggcaatattgcgaccgttcatcatttaccaccgacgctaatggcacagtggtactttggcgacgccagcagcaagctgcgtccgtatattggcgcaggtatcaactacacgactttctttgacgaaagcgtgaacgatacgggtaaaaagacgggcatttctgacctgagcctgaaagactcctggggagccgcggggcaggtggggatggactatctgattaaccgcgactggctgattaacatgtcggtgtggtacatggatatcgacaccaccgccaactataagctggcgggcgcgcagcagcacgacagtatccgtctggatccgtgggtgtttatgttctctgcgggttatcggttctaa

SEQ ID NO: 253668 - DNA, 744 bp, Klebsiella pneumoniae
atgtctatcacggcgaagtccgtctaccgtgacaccgggaactttttccgcaatcagttcgttactatcctgctgattgcgctgttatgcgcgttcattacggtagtacttggccatgccttttcacccagtgaagagcagctgtcgattctgagtcagggcgatagcctggcgggcagcggcgggctgttcgaactggttcagagcatgacgccggagcagcagcaaattctgctgcgcgcgtccgcagcctcgaccttctccgggctggttggcaacgccattcttgccggcggcgttctgctgatgatccagatggtctccgccggccagagagtcagcgccctgcgtgcgatcggcgcttccgcgccggtgctgccaaagctgctgctgctgatcctgctgacgacgtttgttgtgcagatggggatgatgctggtggttgtgccgggcgtcctgctcgccattgtgctctctttcgcgccgatcatgctggtacaggataaagttggtattttcagcgccatgcgtagcagtatgcgcctggcctgggccaacgtacgcctggtggcgccggcaattatcggctggctgctggcgaaaacgctgcttctgctgtttgcatccagcttcgcggtcctgacgccaaacgttggcgcggtggtaataaataccctcagcaatctgatctccgcattgttgctgatctatttattccgcttgtatatgctcattcgtaactaa

SEQ ID NO: 253669 - DNA, 540 bp, Klebsiella pneumoniae
atgaagcagtttctggattttttaccgctggtagtcttcttcgcattctacaagctttatgatatctacgccgcgacgaccgcgctgattatcgccaccgctatcgtgctgatttacagctgggtacgctatcgcaaagtcgaaaaaatggcgttaattaccttcgtgctggtcgccgtattcggcggcttaaccatctttttccacaacgacgaatttattaagtggaaagtgacggttatctacgtcctgttcgccagcgccctgctgttcagccagtgggtgatgaagaagccattgatccagcgtatgctgggtaaagagctgacgctgccgcagcaggtgtggtcacgtctcaatctggcctgggcggtgtttttcatcctttgcgggctggcgaatatctacatcgctttctggctgccgcagaatatctgggtcaacttcaaggtcttcggcctgaccgctctgacgctggtattcaccctgctgagcggcgtgtatatttatcgccatatgccgcaggacgacaaccactaa

SEQ ID NO: 253670 - DNA, 1317 bp, Klebsiella pneumoniae
atgcgcgcataccgcttttcatcactctctttgcttttattcctcgggaaatggctgctcctcgcttttatcattgcggtgctggcgggcacggcctcggcattttttcttttctcactggagtgggctacggcaacgcgggaagctcaccgctggcttatctggctcctgccgtttgccggatttgccgtcggctggatctatctgcgctacggtacctgcgtggaggccggcaacaacctgattctggaagagatccatgaccctaagcgcgtcattcccctacggatggcgccgatggtatttttcggcaccgttgtttctcatctgtttggcgcctccgtcgggcgtgaaggcacggcggtacagatgggggcctcgatcgccgatcgcttcacggccattttccgtcttaaccacgatgcacggtcaatggtgctgatggccgggatcagcgccggtttctcttcggttttcggtaccccgctcgccggagcgctcttcgggctcgaagttctggctatcggacggataaactacaacgccattcttccttgcctgtttgccgcaattattgccgatcgggttggcatcatgtggggcgtgcagcatacgcactactttattaccgtctttcccacgctaacgctctggacgctgctggcaatcattatcgccggctgctgctttggcctcgcggcgcgcatttttgccgacagcacgcaggcaatcggcgcgttgatgaaaaaatggattcactacgcgccgctgcggccgtttattggcggactggcgattgcctgcgcggtctggttgctgcacggagagcgctatattggcctgggcataccggtgatagtggacgctttccagcaaccgctggcgccgtgggatagcttcggcaaactgctcttcaccgccgtctctttaggtagcggatttaaaggtggtgaagtcactccgctgttttatgtcggtgcgacgctgggcaatgcgctggcgccgctgctgcatatgccgctcggctttctggccggaataggttttgtcgccgtctttgccggggcggcgaatacgcctgttgcctcaacgctgatggcgattgagctgtttggttctgaaatcggtatttacgccgcgctggcctgcgtggtggcctggctggtctcaggctatagcggtatttatcgttcgcagcgtatagcctgccgaaaacagagcgatgtgccaactggcatcaggctgtcagaattcccggagtggtaccagtcacaaaaaagccgacaaaaggccgacaaagagacacccgcctcctga

SEQ ID NO: 253671 - DNA, 2181 bp, Klebsiella pneumoniae
atgagaacgcagaaaaatcacatagcaacgcccctggccctggccattgcaggcttactcagcccaggggtcttcgccgaagaggtggaacaggatacggagaccatggtggttcacggaaccgccgaagaggcgctgaagcagcagccgggcgtctcgatcattaccgctgaagatattgctaaggaccctccggttaacgatctgtcagaaatcatccgtaaaatgcccggcgtaaacctgaccggcaacagcgccagcggcagtcgcggcaacaaccgtcagatcgacattcgcgggatgggaccggaaaacacgttgattcttattgacggcgtgcccgtcacttcccgcaactccgtacgctatagctggcgcggcgagcgtgatacccgaggcgacagcaattgggtaccgccggaaatggtggaacgcattgaagttctgcgcggacccgccgctgcgcgctacggctctggcgctgcgggtggggtcgtcaatattatcaccaaacgccccaccaacgactggcacggctcgctctcgctctataccaatcagccggaaaataacaaagaaggcgccactaaccgggctaacttcagcctcaacggaccgctggccggggatgccctgaccatgcgtttgtacggcaacattaacaaaacggaacccgatgcctgggatattaaccgcgcgcaaaatggctcttatgcggcgggccgcgaaggcgtgcgcaacaaagatattaacgccctgctgtcgtggaaagtcaccccgcagcagatcctcgacttcagctacgcctacagccgtcagggcaatatctatgccggcgatacgcaatacagcaacagtaatatgagtccaaatggcctggtggatacgctgtacggtcaggaaaccaaccggctataccggcaggcctggggcctgacctacaacgggatctgggactggggccagtcgaaagcgggcgtctactacgaaaaaaccaacaatacccgtctgcaggagggcaccaccggtcgcgtagaagggatgatcaatagcgatgtctacgacaccagtcgcctggagtcttggcgctcaaccgctgaagtgaatcttccctttaactggctcgcagaacagaccctgactgtggggatggagtggaaccgcgatgaactgaacgatccggcttcgatgcaggccactacgacgacggaaacgctgccggggatgcccggcgatccttcgcaacgcagccctaaaaacagcgccacgctgaccggtatttatctggaagacaatatcgaagcgatgccgggaaccaatattatccccggcctgcgtttcgactatcataacgacttcggcagcaactggagcccgagcctgaatctgtcacaggatctgggcgatatgtttaaggttaaggcgggcattgcccgcgtgtttaaggcgccgaacctgtatcagtcgagcgaaggctacctgctctctacgcgcggaaacggctgtccgataagtattgcggaaggcaattgctatcttttaggtaacccggatctcgacccggaaatcagcgtcaacaaagagctcggccttgagtttaacctcaacggttataacgccggcatcacctggttccgcaacgactacaaaaacaagatcgtctccggcaccgaggtgctgggtaataccgccagcggagcgaatatcctgcagtgggagaacggcgggaaagcggtcgtcgaaggccttgaaggcacgctgctggttccgctcattgccgatacgctcagctggcgcaccaacgccacttatatgatcaaatcggaaaacaaagataccggcaacccgctgtccgttattccgaaatacaccatcaataccctgctcgactggcaggtgaccagcaagttctcggctaacgtcaactggaccctgtacggtcgacagaaaccgcgcgaatacgcggaaattcgtaacgaaaacggggtgctggccaccaacgaagtcggcgcgtattctgtcgtcggcgtcggcggcaactatcagctaaccaaagacctgcggctgaatgccgggatcagtaacctcttcgataagcaaatttatcgggaaaacgaaggcgcttcgacctataacgaaccgggtcgcgcctattacgctggcgtcacgctctctttctaa

SEQ ID NO: 253672 - DNA, 399 bp, Klebsiella pneumoniae
atgacaacaacagatcttgcgccgaagggcgaattggttttacgcaccctggcgatgccggcggacaccaacgcaaacggcgatattttcggcggctggctgatgtcgcaaatggatattggcggggccattatggccaaagaaattgcccacggtcgcgtcgtgaccgtgcgcgtcgacggcatgacctttttgcgcccggtggcggtcggcgacgtcgtgtgctgctacgccaactgcgtgaagcgcggcaatacgtcgataactatcaatatggaagtgtgggtcaagaaagtgtcgtctgagcccatcggccagcgctacaaagccaccgaagcgctgtttatctacgtcgcggtggataatcagggaaaaccgcgcgcactgccgactctgtga

SEQ ID NO: 253673 - DNA, 537 bp, Klebsiella pneumoniae
atgacgtatcaacaagctggacgcattgcagtacttaaacgaattctgggatgggtggtatttatcccggcggttatctcgacgctgatctccgtgctgaagtttatgtacgagcacagcgagaaaaaaccgggcatcgacgcggtgatgatggactttgctcatgtgatgatcgagatgatgcgctttaacacgccgttcctcaatttcttctggtacaactcgccgctgccggattttaagcacggcatgaatatcggtttctggatcatctatattctggtgttcgtcggcatggcgctacaggcttccggggcgcggatggggcgccaggcgaagtttctgcgcgaaggcgttgaggatcagctgattctggaacaggctaaaggaacggaagggctgacgcgcgaacaaatttccgcacgggttgtggtgccgcgccacaccatcctggtgcagtattttccgctgtacgtcctgccggtaattattattgtgctgggctacttcttcttttctttactcggttttctgtaa

SEQ ID NO: 253674 - DNA, 669 bp, Klebsiella pneumoniae
atgtcagccaggcgccagattcacgccgcgatttttgatatggatggattactgattgactccgagccgctatgggacaaagcagagctggaggtaatggccagccttggggtggatattcgtcgccgcaatgaaatgccggatattctcgggctgcgcatcgatttagtcgtcgacctgtggtttgcccaacagccgtggcagggcccggaccgcgcggaggtcaccgcgcggatcatcaatcgcgctatccaactggtggaagaggcgcgtccgctgctgccgggggcgcgggaagcggtggcgatgtgtaaagcacagggactgaaaattggcctggcgtcggcatcgccgctgcgaatgctggaaaaagtcctcgccatgtttgaactacgcgaccagtttgacgccctcgcttccgccgaaatgctgccctacagcaaaccgcacccgcaggtctatctgaactgcgccgccagtctcggcgtcagcccgatgaactgcgtggcgctggaagactcggtcaacgggatgattgccagcaaagcggcgcggatgcgctctgtcgtcgtaccggaagcggaaaatagccatgacccgcgcttcgtgctggccgacgtcaagcttgccacccttgaatctttgaccctgagcgacctgctcggctaa

SEQ ID NO: 253675 - DNA, 762 bp, Klebsiella pneumoniae
atggtactgaacgcctttgaccttacgggcaaggtcgctatcgtgacgggttgtgataccggactgggccagggaatgacgctcggccttgcgcaggccgggtgcgatatcgtcggcgtgaatcgccggatcccccacgaaaccgcagagaaggttcaggcgctgggccgacgctttaccgctattcaggccgatctgagccgtcaggatcagattgcagccattgttactcaggccgtggccgccatgggccgggttgatattctggtgaataatgccggaaccatccgccgcgccgatgcgctaacctttggcgaaaaggactgggacgacgtgattaacctgaatctgaaatccgttttctttctgtctcaggcggtcgccagacagttcatcgcgcagggcgacggcggaaaaattattaatatcgcctcaatgctctcatttcagggcggtattcgggtcccgtcatacaccgcctccaaaagcggcgtgctgggcattacccgcctgatggccaacgaatgggcggaacatcgtattaacgttaacgccatcgcgccgggctatatggctaccaataatacccagcagctgcgcgacgatgccgaacgcagcaaagagatcctcgaccgtatcccggccgcacgctggggtgttccggaagacctgcagggaccggtggtctttcttgcttcccaggcggcggattacattaacggctataccctggcggtggacggcggctggctggcacgctga

SEQ ID NO: 253676 - DNA, 591 bp, Klebsiella pneumoniae
atgacggcggaaggccacctcctcttttctattgcctgtgcggtatttgcgaaaaatgcggaattaacccccgtgctggcccagggtgactggtggcatatcgttccgtccgccatcctgacctgtctgctgccggatatcgatcaccccaagtcgtttctcgggcaacgattaagctggatatcaaaaccgattgcccgcgccttcggccatcgcggcttcacccatagcctgctggtggtctttggcgcggtggcgattttctcgttgaaggttccggatagctggatcgtcccggcggatgcggttcagggcctggtgctgggctacctcagccatattcttgccgacatgcttacccctgccggggttccgctgctctggccatgccgctggcgctttcgtttccctattcttgcgccgcgcaaaggtaatcaactggagcgcgcgctgtgcatggcgctgttcatctacgccgtgtggatgccgcaaaacgttgccgaaaacagcgccgttcgctggtcatctgagatgataaattcgctgcaaactacctttcatcgctttattagtcaccagactggacgataa

SEQ ID NO: 253677 - DNA, 1392 bp, Klebsiella pneumoniae
atgaactttccattaatagcgaacgtagttgtgttcgcggttttactgttggcgctggcccaaacccgccataaacagtggagcctcgctaaaaaagtgctggtcggtctggttatcggcgttatttttggcctggcactacagctagtctatggctccgacagcccggtgctgaaggactctatccagtggtttaatatcgtcggtaacggctacgttcaactgctgcaaatgatcgtcatgccgctggttttcgcctcgattctgagcgcggtggcccgcctgcataacgcttcgcagctgggtaaaatcagtttcctcagtatcggtaccctgctgtttactacgctgattgcggcgctggtcggggtgctggtgactaacatgtttggcctgacagccgaaggcctggtccagggcagcgcggaaaccgcccgcctcaacgccattcagagtaattatgccggtaaagtcgccgacctgagcgtcccgcagctgatcctctcctttgtgccgaaaaatccgttcgccgatctgaccggcgcgaacccgacgtcgattatcagcgtggtaatcttcgctgcattcctcggcgtcgcggcgctgaagctgctgaaagacgatgtcgccaaaggccagcgcgtgctgaccgctatcgatacgctgcagagctgggtgatgaagctggtgcgtctggtcatgcagttaacgccgtacggcgtactggcgctgatgaccaaagtagttgcgggttctaacctgcaggacattatcaagctcggcagcttcgttatcgcctcctatattggtctgggcatcatgttcgtggtgcacggcctgctgctggcggtcaacggcgtgagcccgctgaaatacttccgcaaagtctggccggttctgaccttcgccttcaccagccgctccagcgcggcgtctattccgctgaacgtggaagcgcaaacccgtcgtctgggcgtgccggaatccattgccagcttctcagcatcgttcggcgctaccatcggacagaacggctgtgcgggactctatccggcgatgctggcggtgatggtcgcaccgacggtcggtattaacccgctcgatccgctgtggattgctaccctggttggcatcgtcaccgtcagttccgccggcgtcgcaggcgtgggcggaggcgcgacgtttgccgcgctgatcgtcttaccggcgatggggctgccggtcacgctggtggcgctgttaatctcggttgaaccgctgattgatatgggccgtacggcgctgaacgttagcggctcaatgaccgccggtaccctgaccagccagtggctgcgccaaaccgataaagctattctcgatagcgatgacgatgcggagctggcacaccgctaa

SEQ ID NO: 253678 - DNA, 339 bp, Klebsiella pneumoniae
ttgctactaaaggaccacaagcagggggcgacgaaagcgggcgttttcggctatgataggggtttctgtttaccgccgtatttagtgaatttatttgtcatgaaaccacttcgccaacaaaatcgtcaggtcattagctacgtgcctcgagtggagcctgcgccgccggaacacgccgtcaaaatggatggttttcgcgacgtttgggttctgcggggtaaatacgtcgcctttgtgctgatcgacgaacgtttccgtcgctccccactgtttaacgtgccggaagcggcgcagcgctgggcgacgcaaatgaggcaggaaggtgaaatcgacgcctga

SEQ ID NO: 253679 - DNA, 2259 bp, Klebsiella pneumoniae
atgtctgataaaccccataacccgaaatcccatcaatcaccggtgcatgatgaccgggcggcaaaacctggcctgggcgcattagcgccagaagatcaggattggcagcccacgccgcacccgaccgcgccgggcgaagagccgacggcgccgggtagcatgaaggccccggatacgaccaacgaaaagctcgatgccctcgagaaacagcgtaaaggcggtgagaatgctgcgcttacgaccaatcagggtctacgcatcgctgacgaccagaactcgctgcgcgcgggtcaacgcggccccacgctgctggaagattttatcctgcgtgaaaaaataacccattttgaccatgaacgaattcccgagcgcatcgttcatgcccgcggctccgctgcgcacggctatttccaggcgtacagcgatttaagcgacatcaccaaagcggctttcctctgcgacccgcagaaaaaaacgccggtattcgtccgtttttccaccgttcagggcggcgctggctccgccgatacggtgcgcgacatccgcggttttgccaccaagttttataccgacgagggcatctttgacctggtcggcaacaacacgccgatcttttttatccaggatgcgatcaagtttcctgattttgtccatgcggtgaaaccggaaccgcactgggccgtcccacaggggcaaagcgcgcacgataccttctgggattacgtctcgctgcagcctgaaacgctgcataacgtcatgtgggcgatgtcggaccgcgggcttccccgcagctaccgtaccatggaagggtttggcatccacaccttccgcctgattaacgcggaaggtaaagcgaccttcgtacgcttccactggaagccggtcgcgggtaaggcctctctggtgtgggatgagtcgcaaaagctgaccggccgcgaccccgatttccatcgtcgtgacttatgggaatcgattgaagccggagattatcctgagtacgagctgggattacagctgatcccggaagaggatgaatttgcttttgatttcgatctgctggatcccaccaagctcatcccggaagcgttggttccggtgcagcgcgtcggtaagatggtccttaatcgcaacccggataacttctttgccgaaaacgaacaggcggccttccatcccgggcatatcgttccaggaatagacttcagcaacgacccgctgctgcagggccgactcttctcctataccgatacgcagattagccgcctcggcgggccgaatttccatgaaattccgattaataaacccacctgcccgtatcataatttccagcgcgacggcatgcaccggatggatattgataccaacccggcaaactatgaacctaactccatcaataacaactggccacgggagacgccgccggccgctaaacgcggtggcttcgaatcttatgccgagcggattgacggagaaaaaattcgccagcgtagcccttcctttggcgagtattactctcaacccctgctattctggcgtagccagacgccaattgagcagcagcatattatcgacggattcagcttcgagctgagcaaggttgtcagagagtggatccgcgagcgggtggtcgatcagctggcgcatatcgacctgcagctggctcaggccgtaggtaaaaacctcggtattgagctcacggacgaacagcgcagcattacgccgccgccggatgtcaacggcctgaaaaaggatccgacgctaagcttgtacgccattcccagcggcgacgtgaaaggccgggtggtggcggtactgcttaacgatcgtccggttgccaaagagctgctgactttgctcaagtcgctgaaagcgcacggggtacatgccaaattactctattcacgaatggggaaagtgcaggccgatgatggcaccgagctgccggtagccggaacctttgccgggtcgccatcgctgaccgtggatgcagtcatcgttcccggcggcgatctgcaaagtctgagcagcaacggtgatttcaactattacctgctggaagcatacaaacacctgaagccgattctgctggcaggcgatgcacggcagtgcaaagcgccgctgcaggttgccgctcagggcgaagaaggcattgttgagaccgatgccattgatagccaatcaatggatgaactgatcaccctgatggcagcgcatcgggtgtggtcgagaagcgccaaaatcgccgcgatcccggcgtaa

SEQ ID NO: 253680 - DNA, 759 bp, Klebsiella pneumoniae
atggaacgcgtgttaatcgtcaatgccgatgattttggcctcagcagggggcaaaactacggcattatcgaagcttgcaagaacggtgtggtcacctccacgacggcgctggtcaacggcgcggcgattagccacgctgcccagcttagccgctgcgtcccggagctggctgttgggatgcactttgtcctgacgctgggcgagccgctggcggcgatgccggggctaacccgcgaagggcgctttggaaagtggatttggcagatggcggaagagggcagcctgccgctggacgacatcgcccacgaactggagcgtcagtatcagcgttttgtcgagctgtttggccatgaaccgacgcatatcgacagccatcatcatgtccatatgatcgcgcagatctaccccatcgtcgcggcgtttgcccgcgagaagggcgtggcgctgcggatcgaccgccagctagcgacgctgtcaggcctggcgcaggatgccgcgcgcagtagtgatggatttgccagcgagttctacggggaaggggtttcggaagcgctgtttctgcaaaccctggatgcctctgtccagcgcgaggaaaaatcgctggaggtgatgtgtcacccggcgttcgtggataacacgataatgggcagcgcctactgctatccgcgactgaccgaactggatgtgctgaccgccgggtcgctgaagtatgcgattgccgagcgcggctaccggcttggaacctaccgcgatgtataa

SEQ ID NO: 253681 - DNA, 1347 bp, Klebsiella pneumoniae
atgagccagaaattgaaggtagtgactatcggcggcggcagcagctataccccggaattactggaagggttcctgaagcgttatcatgaactgccgattagcgaactgtggctggtggacgtcgcggaagggcaggaaaagctcgatattatccatgcgctgtgccagcgcatggtggaaaaagccggcgtgccgatgaaagtctacaagaccctcgatcgccgcgcggcgctggaaggcgcagatttcgtaacgacccagctgcgcgttggccagctcaaggcccgcgagaaggacgagcgtatcccgctgagccacggctatttaggccaggaaaccaacggcgcgggcggactgtttaagggtttgcgcactattccggtcatttttgacattgtgaaagatgtgcaggaagtctgtccgaatgcctgggtcattaactttaccaatccggcggggatggtcaccgaagcggtttatcgtcataccggcttcaagcgttttatcggcgtgtgcaatattccgattggcatgaagatgtttatcaccgacgttctgcagctgagcccgagcgatgagctcaatatcgatctgtttggcctgaaccatctggtatttgtgcgcgatgtactggttaacggcgtttcacgctttgacgagctgctggacggcgtggcatcgggtcgattgagcgctaactcggtgaaaaatatttttgatttaccctttagcgaaggactgcttcgttcgctgcgcctgatcccttgttcctatctgctctactactttaagccaaaagagatgctggcgattgaaatgggcgaatactacaaaggcggcgcgcgcgcgcaggtggtgcagaaggtagagaaacagctatttgagctgtacaaagatccggatctgaacgttaagccgaaagaactggaacagcgcggtggggcgtattattccgacgcggcctgtgaagtgattaacgccatttataatgacaagcaggccgagcattacgtgaacgtgccgcatcatggtcacgttgataacatcccggcagactgggcggtcgagatgacctgtacgctgggccgcgacggcgcgaaaccgacgccgcgcatcacgcatttcgatgagaaagtgttggggctgatttacaccattaaaggttttgaagttgcggccagcgaagcggctatcagcggtaaactggacgatgtgctgctggcgcttaatctgagcccgctgatccactccgatcgcgatgctgaaaagctggcgcgggagatgatcctcgcgcacgagcagtggctgccaaactttgcggcgactatcgaaaaactgaaacagtaa

SEQ ID NO: 253682 - DNA, 825 bp, Klebsiella pneumoniae
atgatgaccactgaaatcagtaccgcccgggagcaacaactctttaacggcaaaaactttcatgtggtcatctataacaaaacggagagcgtaagcgggcttcaccagcatgattattacgagtacaccatcgttttaaccgggcgctattatcaggttattaatggcaagcgggtgctgctggagcgcggggatttcgtttttatcccaatggggtcgcaccaccaaagcttttatgaatttggcgcgacgcgcattctgaacgtcggtatcagcaaaagtttctttgaaaaacactatttgccgctgctgccgtttggtctggttgcttctcaggtctatgccgttaaaagtacttttctcagttatattgagtcggttattgcatcactgaattttcgcgaaactgaatttgacgaatttatcgagctggtctccttttatactctgaatcggctccgacattatcgtgaagagcctgcggaagacgtcattccgcaatggctgaaaaataccgtggaggggatgcacgataagcttaagtttggcgagggggcgctggagaatatggttgaactttccgggaaaacccaggagtacttaactcgggcaacccagcgttattacgccaaaacgccgatgcagatgattaacgatattcgcatcaacttcgcaaaaaaacagttagagataaccaactactcggtgaccgatattgcctatgagtcggggtacagtagcccaagtttgtttattaaaacattcaagaagctgacttcttttacccccagcagctatcggaaacacctcaccagtattaattaa

SEQ ID NO: 253683 - DNA, 348 bp, Klebsiella pneumoniae; identical to SEQ ID NO: 175102

SEQ ID NO: 253684 - DNA, 1359 bp, Klebsiella pneumoniae
atgagtaaagtgattgattcgcttgaaaaggtactccttccgtttgcggtcagaataggaaggcaacctcacgtcaatgcaattaaaaacggctttattaagttaatgccattgacgttagccggggccatgtttgttttaattaataacgtatttttgagctttggcgacggttcattcttttattcaatgggcattcgtctggatgcctcgacaatcgaaacactgaacggttttaaagctatcggcggcaacgtttataacggtacgctaggtattatgtcgctgatggcgcctttctttattggttcggctttagctgaagagcgtaaagttgacccaatggcggccgggttgctggcggttgcggcatttatgaccgttacgccttatagcgtcggggaagcctacgccgttggcgcgaattggttaggcggtgccaatattatttctggtatcgtaatcggtctggtcgttgccgagatgttcacctttatcgttcatcgcaactgggtgattacgctgccgtccagcgtgccggcttcggtctcccgttcattctcagcggttatcccggcctttattatcctgtctattatggggattatctcctgggcgctgacccactggggaacgaacttccaccagatcatcatggacactatctccacgccgctggcctcaatgggtgccgtggtaggctgggcatacgttattttcacctcgctgctgtggttcttcggcgtacacgggtcgctggcgctgtcggcgctcgatagcggcattatgacgccatgggcgctggaaaacatcgcaacctatcagcagtacggctccgttgaagccgcgctggcggcgggtaagagcttccatatgtgggccaagccgatgcttgattcctacattttcctcggcggtaccggcgcgacgctgggcttgatcatcgccatctttatcgcttcccgccgcgaggatcatcgtcaggtggcgaaactggcgctgccgtccggcatcttccagattaacgagcctatccttttcggtctgccgattatcatgaacccggtgatgtttattccgttcattctgattcagcctctgctggcggccatcaccatgacggcgtataccctgggcatcatcccgccgattaccaacatcgcgccgtggactatgccgaccggtttaggcgccttctttaacactaacggtagcgtcgcagctctgctgctggccctgttcaaccttgccgtatcgaccctggtctacctgccgtttgtggttatttccaacaaagcgcagggcgtcattgagcaggaagagagcgaagaagatatcgctaacgcactgaaattctaa

SEQ ID NO: 253685 - DNA, 321 bp, Klebsiella pneumoniae; identical to SEQ ID NO: 175100

SEQ ID NO: 253686 - DNA, 339 bp, Klebsiella pneumoniae; identical to SEQ ID NO: 175099

SEQ ID NO: 253687 - DNA, 828 bp, Klebsiella pneumoniae
atgacgctacaacaagagattattcaggcgctgggcgctaaaccccagatcgatgtcgaagccgaaatacgccgcagcgtagactttttgaagtcctatctgcagaaatacccttttattaaatcactggtcctcggcatcagcggcggccaggactccacgcttgccggtaagctctgccagcaggcaatcaatgagctacgggccgaaaccggtgacgacagcctgcagtttatcgccgttcgcttgccgtacggcgtgcaggcggacgagcaggactgtcaggacgccatcgcttttattcagccggaccgtgtattaacggtcaatattaagggcgccgtgctggccagtgaacaggcgctgcgcgaagccggcattgagcttagcgactttgttcgcggcaacgaaaaagcccgcgaacgcatgaaagcgcagtacagcatcgccgggatgacccacggcgtggtggtaggtaccgatcatgctgcggaggctattactggttttttcactaaatacggcgacggcggcacggacatcaaccctcttttccgcctcaacaaacgtcagggcaaacagcttttggcccatctggggtgtccggagcacctgtataaaaaactgccgaccgccgatcttgaggacgaccgcccctccctgccggacgaagtggcgctgggcgtgacctacgagaacatcgacgactatctggaaggtaagacgctggacgagaaagtcgcgaaaacgatcgaaggctggtatctgaaaaccgagcacaaacgccgcccgccaatcaccgtcttcgacgacttctggaaaaaataa

SEQ ID NO: 253688 - DNA, 861 bp, Klebsiella pneumoniae
gtggcaagaaggcaatccgccccgcgtctcgaatttgaagcggcggcaatctatgagtatcccgaacatctgcgtccgtggcttgaggctctgcccaggcagccgggggtatatctgtttcacggcgaaagcgatacccttccgctctatatcggcaaaagcgttaatatccgcagccgggtgttgtcgcatctgcgcacccccgacgaagcggctatgctgcgccagtcacgacgcatcacctggcaacggacggcgggcgagctcggcgcactcctgttagaagcgcagctcattaaggaacagcagcctctgtttaataaacgtctgcggcaaaaccggcagctgtgctcattgcgcctggctgacgcccgaccgcaggtggtttacgccagcgagctggatttctcgcgacaaagcgatctctatggcctttttgccaatcgccgcgccgcgctgcaggcgctgcaaaaaattgccgacgagcatcgcctttgttatggattaatgggactcgagccgctcaacctcgggcgcgcctgctttcgctcggcgctgggccgctgcgcaggagcctgctgcgggaaggagagcgttgaagcgcaccagcagcgtttggtggaaaatatgcaaaaaatgcagctggtatgctggccatgggccggggcgatcgcgctggaagagcgcagcgaggatatgacgcagtaccatattattcaaaactggctatggctgggcgccgtagaatccctgtcgcaggcctcatcgctcacgcgcctggcggcaaaatttgaccatgatggttataaaatactgtgtaaaccgctgcttagcggccgctataagctgcatccgctgtaa

SEQ ID NO: 253689 - DNA, 2043 bp, Klebsiella pneumoniae
atgctctgtataactctgcgggtagtgcgcgcgttcgtattgctgttgctgctgcctgccagcgcagcattctccgcaaacaacccgattattattagagatgcttctcaactccccgctggcgctattccggcgtatgaacatatcctctcttttgattcccgggcgcgctttagcccgaacggcagcatggcgattgaggagaatatcaaggtacttgccctggggaaggagattcagcgagggattttgcgcacgcttcccctcacgtggaaccgccaggatggcaaaatcttccgtgttgactatacgatcgaatcggtgtcgcgcgatggcgtctctgagccatttagccttgatgaggcagcaaaaagcctgacggtacgtatcggcagcggcgaaaagatattaaaaccagggatctatcactatcggattcgctatcaaatcagcaaccatttcagccgatttccccagtgggatgaactgtactggaacgtgacgggcaatggctgggcctggccaattagcaaggccagctttagcctgacgctaccggatagcgccgcaaatctcaacgctgacgccaaagatgccaggctgcgctcaatagatgtttatacagggatcgcaggcgcgaaagagcacaatgcaacgattctgcccgacggtagcgtgcgcactctgcgtccgctggcaaagggggaggggctgacggttgtttatacctggccgcgggagatacttgcccgcgctccggcgccggaggccgcttcgccgctggtgcatttacttttccccaacctgaaaacctgggtgatatggctgccgctgctgttcatgctcatttattatctgctctggtggcggaaaaacgtcacccaggccgggttgagaatgccgcctgttgtgccgctcttttcgctgcctgcctccatgtcgccaggccacctgcgttttattacccggcgtaaatatgacgatgtggcttttagcagcgatttattagcgctggtcgcgaaacgcgggatgacgctgacgagcgacaaaaatccatcccgcagcccgtggcgattaaattccggcatcaaacaacggctgacccgcctccccgttgagggaaacagacggttaaacagagacgatctccagctattaagcaccctatttaaaggcaaacagaaaaatatcgatcttagtaaggcccatcagcggtcagtgcagagtgcgcgtaaacgtcaggagacgcgttgtgaagaacagcgggctaaactctttcgtaaatgggggcaaccgctgcggcgctgcatctacattgcgctgcttgttccggtagcgtgcggtctttgggttaatgcggaggccgcgctgctgacgataccggcggcggtttttatgctgatcggcggttcgctgctggcatttttcttgcggtttctttgtcatcctcgggagatgtggcgcgactggggccccgccccggtactgttttgtgcctcttttggtattttagcgatgctcggcggaagcaattttctgttgggaatgttgcccataacccaacttcccgccggatatattggcgcgctgctgatggcgttcgccctgtgcgtttttgttggctggaaaacgcctcgttatacgcagcgcgggttggatgagctggccgtcgccaaaggactgaagctgtatcttggcaccgctgaaaagaaccgctatcagattatttacccgcctgcgcagatgatctcccattttgaagaactactgcccgtagcgttggcgcttggggtggggaaaacctgggcgaacacctttgcccactatctgagtagtactggcgctctgtcggaagcgtttgccggagctggctgggaaagcgtgcatcatttcagcgagtcatgtcgaatctcctctatatcctcgccgaccagcggttcagggggcggttcatcatcgggttcaggctatagcggttccggctcttccggtggcggttcatccggcggcggctcaggcggaggcggtggaggaggctggtaa

SEQ ID NO: 253690 - DNA, 543 bp, Klebsiella pneumoniae
atggaaatgtatatcggcctcgccgtccttgttgtcgtcctcgtctgggttatcatgacctataaccgctttatctccctgcgtcgtttcaaagacgaggcctggagcggcgtcgctgtacagcttaagcgccgccacgatctggcgcccaatctactgagtctggtgaaacgctatgcacagcacgaaaaggaattgctggaagagctgggccgccagcgtagcgtactggtcggcagcacccgacagatagccgacagcgaacgccactattccgctacgctgggacgtattttcgcgctcggcgaagcctggccggaactcaaagccagcgacaacttcctctcattacagcaatcgcttaatgaaatagaagagcagctgcagatggctcgccgctacttcaacggtacggtgcgcgatatgaatattctggtcgagtctttccccagcctgctgctggcgcgactatttaaatttaaagcagaagctttctttgaactggactcaccggaagaagctaaatctccacggatggagtga

SEQ ID NO: 253691 - DNA, 483 bp, Klebsiella pneumoniae
atgaaaaagattacagctctgtttgttgcctctactctggctcttggcgcggctaacctggctcacgcggctgatactacggctacctcaggcgagaccgcgccgatgatgcatcataagcgcggcccggcgggcccacatgaaatgatgtttaaaggtctgaacctgaccgacgcgcagaaaacgcaaattcgcgacatcatgaagagccagcgcgacaatatgaagcgtccgtccctggatgagcgccgcgcgatgcatgaactggttgccagcgataccttcgataaggcaaaagcggaagcgcagattgataaaatggaagcccagcataaagaaatggcgctggctcgactggaaactcagaacaagatttacaacattctgaccccggaacagaaaaaacagttcaatgctaattttgagaagcatctgacagatcgtaaagcgccggaaggtaaaatgcctgcaccagctgaataa

SEQ ID NO: 253692 - DNA, 963 bp, Klebsiella pneumoniae
gtggacgactttctggcattaacgctggctgggcgtttgccccaccattttcatggccaaacggcgcacttccgctggcactggattgactgcggtatactgcagctcattccccatgagccctgcgagcgctcgttggtattgtccgccgggatccatggtaacgaaaccgcgccggtcgaaatcacggatttactgctgcgtcagttgttcagcggggagttgccgttacgctggcggttgctggtggtcttcggcaatccttcggcgctgagggccaataaacgctatctgcacagcgatattaatcggatgtttggtgagcgctggcgggctttcagcgtcagcgatgaaaccgctcgcgcccggcaactggagcatgcgctggcgcgcttttatgcgccgggtagcggtgagcgctggcacctggatttacataccgctattcgcggatcgctgcatacgcgctttggcgtcctgccagcgcgcgataagccgtgggatgaagcattcctgggctggttaggggcggctggcctggaagcgctggtctttcatcagcagccgggcggcacctttacccatttcagtagcgaacgtttcggcgcgctctcctgcacgctggaactgggaaaagcgcttccttttggcgacaacgatctcagccagtttgccgcgacgcagcgcgcgctggcgcgtctgctggccggcgagagggcgttggctgcaggtgattcgccgctgcgctacagagtggtgcagcaaattacccgcagcagcgacaaatttcagctgcatatgtcggcgcagacgctaaacttcacccccttttctgccgggacgctgctggctgaagatggtgaaacccgctatgtcgcggctaaggagccagaatatgtgctgtttcccaaccccggcgtagcttttggccagcgagccgggctgatgctcgaacgcttctga

SEQ ID NO: 253693 - DNA, 1326 bp, Klebsiella pneumoniae
atgaacgcctgggaagtgaactttgacgggctgccgggcctgacccatcactatgcgggattatctttcggcaacgaggcttcgaccaaacaccgctatcgggtgtcaaatccgcagctggcggcaaagcaggggctgaaaaaaatgaaagccctggcggatgcgggctatccgcaggggatcatcccgccgcaggagcggccaaacatccccctgttgcgccagattggctttagcggtagcgatgagcaggtgctggaaaaagcgtcgcgtcaggcgccggagctcctctcggcggccagttcagcctcatcaatgtgggtggccaacgccgctacggtctcgccatcggcggattcgctggacggccgggtgcatctgaccgtcgccaacctcaatgataaattccaccgctccagcgaagcgcctaccaccgaggctttgctgaaggcgattttccccgatgagcagcggtttgccgtacacggcgcgctgccccaggcctcgctgttcggtgatgaaggggcggcaaaccataaccgtctcggcggcgactacggcgcccctggcgtgcagctgtttatttacggtcgtcagcagggtggggaagagagcccgcagcgctacccggcgcggcagacgctggaggccagccaggccgttgcacgcctcaaccaggtcaacccccggcaagtgattttcgcccgtcaaaacccggcggtgattgataagggcgtatttcataacgatgtgattgcggtaagcaatcagcaggtgctgttttgccacgagcaggcgtttgtcgatcagccgcagctcctgcagcagctgacggagcgggttgctggttttacgccgcttgtggtgccgacgggtcaggtatcggtagaagaggcggtggcgacctatctgttcaacagccagctgctgagcaaacgcgagggcggaatgcggctgattctgccgctggaagcgcaggagcatctgggcgtctggcgttatctgaaccggctggtggagggcgataacccgattgatgagcttcaggtttacgacctgcgcgagagcatggccaacggcggcggcccggcctgcctgcgtcttcgggtggtgctgactgagaacgagcgacgagcggtgaatccggcggtcatgatcgacgacgcgctgttcgccactttgaatgattgggtagaccgctactatcgcgatcgcctgacccaggccgaccttgcggatccgcagctgctgcgcgaaggtcgcgaagcgctcgaccgcctgacgcaaatcctgcgcctcggctccgtatatccgtttcagcaataa

SEQ ID NO: 253694 - DNA, 1479 bp, Klebsiella pneumoniae
atgagtttatggatcaatggcgactggcaaagcggtcgcggcccggcccgacaaaaacataacccggtaagccaggcgctactgtggcagggacgggatgccgatgctgagcaggttgcgctggcggtcagcgcggcgcggcgggcattccccgcgtgggcgcgccagccgtttgccgcccgcaaagcgatagcagaaaagtttgctgctttacttgacgtgaacaaagctgaattaaccgccattattgctcaggagaccggcaaaccgcgctgggaagcggcgacggaaatcaccgcgatgatcaacaaaatcgcgatttcagtaaacgcttaccatagtcgtacgggggaagcgcaaaccgcactggccgacggcgcagccactctgcgtcaccggccgcacggcgtactgacggtgtttggtccctacaattttcccggacatttaccaaacggacatattgttccggcgctgctggcgggcaataccgtggtgttcaaacccagcgagctgaccccacagagcggcgaagcggtggtaaggctttgggcagaagccggcctgccgcccggagtgcttaacctgcttcagggcggtcgggagaccggcgaagcgctgagcggtcagtcagatatcgacggtctgctgtttaccggcagttctgccaccggctttcagctccatcgccagcttgccggccagccggaaaaaatactcgctcttgagatgggcggcaacaatccgctgatcgtcgatgagccggaggatatcgatgccgccgttcatctcaccattcagtcggcatttattactgcaggccagcgctgtacctgcgcgcgtcggctgttggtgaagcgtggtgaggctggcgatgcgtttcttcgccgtcttgtgacagtgtcacaaaaacttattcctgacgcctgggatgcagagccgcagcctttcctcgggggactgatttcagcgcaggcggcgcagaaagtgcatcaggcctggctgacacacgtctccaacggcggccaaacgctgctggagccgcgtctgctacaggccgaaacgtcgctgctgacgccgggtattatcgacatgagcgaggtcgcgcaggtggccgatgaagaggtttttggcccactgctctgcgtctggcgttacgaccatttcgatgaggcgattgcgcttgctaacgcgacccgcttcgggctttcctgcgggctgatctccgccgaacgcgagaagttcgaccagctgctgctggaggcgcgcgccggtatcgtgaactggaataaaccgctcaccggcgccgccagcaccgcgccgtttggcgggaccggtgcttccggtaaccatcggccgggggcctggtacgccgcggattattgcgcctggccgatggccagcctggaatcgccggagctgtcgctcccggtcgcgctcagcccgggtctggattttggccaggagagctcacaatga

SEQ ID NO: 253695 - DNA, 1035 bp, Klebsiella pneumoniae
atgatggtgatccgtccagtcgaaaaaggtgacctgccggggttaatgacgctggcaggcgaaaccggcggcggcctgacatcgctgccggccgatgaggccacgctggccgcgcgcattgaacgttcacagatgacctggcgcggcgagctgccgaaaagcgaacaggggtatgtgttcgttctggaggattgcaccagcggcgcggtggcgggaatttgcgccattgaggtggccgtagggcttaacgacccctggtacaactatcgcgtcggtacgcaggtccacgcatcgaaagagctaaacgtctataacgccctgccgacgctgtttctcagtaacgaccataccggcagcagcgaactgtgtaccctgttccttgatccaaaatggcgaaaagagggcaacggctatctgctgtcgaaatcgcgttttctgtttatggccgcctttcgtgaacgcttcaacgataaggtcgtggcggaaatgcgcggcgtaattgatgagcacggctactcgccgttctgggagagtctcgggaaacgcttcttcgcgatggagttttcccgcgccgactatctgtgcggcaccgggcaaaaagcgtttatcgccgcgctgatgccgaagcacccgctgtatatcgacttcttaagcgatgaagcgcgggcggttatcggcgaggttcatccgcaaaccgccccggcccgcgcggtgctggaaaaagagggattccgctatctcaactacgtcgatattttcgacggcggtccgacgctggaatgcgaaattgaccgggtgcgggccatccgcaaaagtcggctggttaccgtcgttgaaggcgaacccgaggcgggagagtggccgccatgcctgatcgccaatgaacagtaccagcactttcgcgccatgctcgttcacgcggacccggatagcgaccgcctggtgctaagcgcgcgtgagttagatgccctgaaatgccattccggtgaacaaattcgcctggttcgcctgtgccctgaggagaaaaaatcatga

SEQ ID NO: 253696 - DNA, 1221 bp, Klebsiella pneumoniae
atgtctcagtcaattacgcgtagcaactttgatgaatggatgatgcctgtatacgcgccagcggcttttattccggtacgcggcgaagggtcacgcctgtgggatcagcaggggaaggagtatatcgattttgccggcggcattgcggttaatgccctaggccatgcgcacccgcagctggttaaggcgctgaccgaacaggcggagaaattctggcataccggcaacggctataccaatgagccggtactacgtctggctaagcagctcattgacgccacttttgccgaccgggtctttttctgtaactcgggggctgaagccaacgaagcggcgctaaaactggcgcgcaaatatgcccacgatcgtttcggcagtgagaaaagcggcatcgtggcattcaagaatgccttccatggccgcacgctgtttaccgtttctgcgggcggtcagccggcctattcacaggattttgcgccgctgccgccgcagattcagcacgctatctttaacgacctcgactcggcaaaggcgctgatcgacgacaatacctgcgcagtgatcgttgaaccgatgcagggggaaggcggcgtcgtaccagcggatgtggaattcctgcgcggcctgcgtgagctgtgcgatgcgcacaatgcgctgctgattttcgatgaagtccagaccggcgtcggccgtaccggggagctgtacgcctatatgcactatggcgtgacgccggacgtgctttccaccgcgaaagcgctgggcggcggtttcccgatcggcgcgctgctggcaacggaacgctgcgccagcgtaatgaccgtgggtactcatggcaccacctacggcggcaacccgctggcctgcgcggtggcgggggaagtctttgccatcgtcaacacgcgtgaggttctcaacggcgttaagcagcgccatcagtggtttagcgaacggctcaacgccatcaacgcccggtacggcctgtttaaagaggttcgcggtctggggctgcttattggctgcgtgctgaaagatgaatatgccggcaaggcgaaaaacatcagcaacctggcggcggaggaagggctaatgatgctgattgccggcgccaatgtgttgcgcttcgcaccggcactgattatcagcgaagacgaagtcaatagcggcctggatcgcttcgagctggcctgcaaacgctttctctcgggggtctcatcatga

SEQ ID NO: 253697 - DNA, 807 bp, Klebsiella pneumoniae
atgaaatttgtctcttttaatatcaacggcctgcgtgcccgcccgcatcagctggccgccatcatcgacaaacaccagcccgacgtcatcggcctccaggaaaccaaagttcacgacgatatgtttcctctcgaagaggtggcaaagctgggctataacgtcttttatcacgggcagaaaggccattacggcgtcgcgctgctgaccaaagagacgccgatctcggtgcgccgcggcttccccaacgatggtgaagaggcccagcgccgcattatcatggcggaaatcccgtctccgtttggtaacgtgacggtaatcaacggctatttcccgcagggcgaaagccgggatcatgaaaccaaattcccggcgaaagcggccttttatcagaatctgcagaactaccttgataccgaactgaataaagagaatccggtgctgattatgggcgatatgaacatcagccctaccgatcttgatatcggcatcggcgaagagaatcgcaagcgctggctgcgtaccggcaaatgttcattcctgccggaagagcgcgaatggatggagcgcctgctgggctggggcctggtggatacgtaccgccatgcgaacccgcaggacaacgaacatttctcatggttcgactatcgctctaagggctttgacgataaccgcgggctgcgtatcgacctgctgctggccagccacccgctggcgcagcgctgtatcgagaccggcatcgactacgaaattcgcggcatggaaaaaccctccgaccatgccccggtatgggccacctttaaagtctga

SEQ ID NO: 253698 - DNA, 663 bp, Klebsiella pneumoniae
gtggtcatcctgagcattttcgcctgtattatccagcagtcgggttttgccgagctggtcactcatttccaccatctgcgcgaaattatccgccaaagcggtggcttcgggtatgcgctctatatcttgctgtttattatcgctaccctgtttttgattccgggcagtgcgctggtcattgccggcggtgtactttttggcccgctgacgggaaccttgctatcgctgctggcggcgacggtcgcctcctccctgtcgttcctgctcgcccgttggctgggccgcgagctgctgcttaaatacttcggagagacggcgatattccaggcaattgaaagaggcattgagcgtagcggctgcgattttttaattctgacccggttagtcccgctgtttccctataatatccagaattacgcctatggcctcacggctatttcattctggtcgtttacctttatttccgccataaccaccttgcccggcatatttatttatacgctgatggccagcgaacttatccgcgacggtatcacctccctttttgtgctaaagctaacgcttgccgggctggtgttatttgtcctgattcaggcagccaaaagatatgcccgctatcggcggatcgacacgcaacggtggcgaatcaacgatgaaaaatag

SEQ ID NO: 253699 - DNA, 744 bp, Klebsiella pneumoniae
atgcccgctatcggcggatcgacacgcaacggtggcgaatcaacgatgaaaaatagccaggcgatctaccggataatcattggcgctacgctgctggcggggctgctggcgtggtggctgatccccggcgtcaatgggtttatgcagcgcagcctcgccgcctttgccacgctcgatcagctggctattgagcagtttatcgactcctgggggccgcaggcggccctggtctcctttgcgctgatgattctgcaggcgattatcgccccgcttcccgcttttctcatcaccttcgctaacgcttccctgttcggcgccttctggggcggcgcgctatcgtgggtgagcgccatggccggggcggcgctgtgttttttcatcgccagagtatttggccgcgaagcggtggaaaagctgaccggcaaaagcgtattgcagagtatggatggcttttttacccgctacggtaaacacaccatcctggtttgccgcctgctgccctttgtaccttttgatccggtaagttacgcagccggactgacctcaatacgctttcgccattttatgctggctaccggtctgggccagttgcccgccacgatagtctactcatggaccggcagcctgctgacgggcggtacattctggctggtaaccggtttatcgatcctgtttgcgctggcgatcctggtggtcgtcgcgaaagcactctatcttgaacaacaaaagaggcgttcacgatga

SEQ ID NO: 253700 - DNA, 552 bp, Klebsiella pneumoniae
atgagcttaccccccctgaagtcaattcccctgattctgcgcccgcaggcctggctgcatcgccgccactacggcgaggtgctgagccctattcgctggtggggtcgcattccgctggtcttttatctggtgtcgatgttcgtcggttatctggaacgcaaacgctcgcccctcgagccggtgctgcgttcgctggtcagcgcccgcatcgcgcagctgtgtttgtgcgagttttgtattgatatcaccagcatgaagctggcggagcgcagcggcggcagcgataaactcctggctgtagccggatggcgagatagcgcgctattcagcgaacgcgagcggctggcgctggagtatgccgaagcggccagcatgacgcctccggccgtcgacgacgcgctgcgcgataagctggcgggacagtttgatgctcaagcgctgaccgaactcacggcgctgatcgggttacaaaacctgtcagcgcgctttaattcggcgatggcgatccccgcccaggggttatgcccgcttcccaccgattcgaaaccataa

SEQ ID NO: 253701 - DNA, 1161 bp, Klebsiella pneumoniae
atgcgtagtttgttggtcttcgctttgctgttgctttctccgctgtccgccagcgccaactggcaatccacgcaacaagaggctcgcggccagacggtgtggtttaacgcctggggcggcgatccggcggttaaccactatctcgactgggtcagcgaagaggtgaagcgcgactatgccatcgatctgcgcatcgtgcatatcgccgatgccgccgacgcggtaaagcgcattcaaagcgaagcccgcgccggacgcagttctggcggttctatcgacctgctgtgggttaacggcgagaatttccacaccctgaaaagcgcaaatctgctgcaaacccagtgggcggaaaccctgcccaactggcgctttgtcgatacgcaaaagtcggtgcgcgaagatttctccattcctaccgacggggcggagtcgccgtggggcggcgcgcagctcacttttatcgcccgccgttcgcaaacgcccgacgcgcccaacgatccgcaggcgctgctggctttcgccgccgcgcaccccggtagcgttacctatccgcggccgccggattttaccggtaccgcctttctcgaacagctgctgctgacgctgaccccagatcctgacgccctgcgtcagccgccgcaagaggccaatttcgccgccgcgaccgcgccgctgtggcaataccttgaccagcttcaccctctgctatggcgcgagggccgcgacttcccggcttcgcccgcccgtatggataccatgctgacgaacggtgtcctcaggctgtcaatcaccttcaacccgctgcacgcgcagcaaaaagcggccagcggcgagctgccgaaagacagctacggcttcggttttagccaggggatgctcggcaacgtccactttgtggcgatcccgactaacgcccgcgcgacggcaggggcgaaagttgtcgccaatttcctgctctcaccgcaggcgcagctgcgcaaggccgacccggcggtgtggggcgaccccagcgtgctggatccggcgaagttaacggcagatgagcgccagtccttcaacgccgttgtgccgcaggatttgccgccaatgctgggagaaccgcactcggcctgggtagaagcgctggagcaggaatggctgcgccgctacggcacgcactaa

SEQ ID NO: 253702 - DNA, 1536 bp, Klebsiella pneumoniae
atggctgcgccgctacggcacgcactaaggctgctggcctgggccgccgtcgcgctgatctatctcccgctgctgccggccgtttctatgatgacgcttccggcgctgcgcctgacgctttggcagtcgctggttgccgatccgcagttctggcaggcgctggcggcgactctcgtctcaaccctgctctcggttggcggcgcgctgatcatcacgctctcggttgttgccgcactctggccatcaagcggttggcgccggctggcagccaggctgccgctgctgctggcggtaccccatgtcgccttcgctaccgccgccctgctgctatttgctgaaggcggctggctctctcgcctgctgccctttttcattccgccagttgaccgctacggcattggcctgggtctgacgatggcggtcaaagagagcgcatttctgttgtgggtggtttacggcctgttaggtgagaaacggctggcgggacaggctacggtattaaaaagcctcggctacggccgctggcagtgcctgaagtggcttgtgctacccgccctgctgccagcgctggcgatcgcgctgctggcgaccgccgcctggagcctttcggcggttgatgtcgcgctggtaattgggccgggcaacccgccgacgctggcggtgctggcctggcaatggttgagccagggcgatgaacaacagcaggccaaaggggcccttgccagcctggtattactgctgacgctcgtcatgatggcgctgctggcatggggagcctggcgcgtctggcggcggcggatcccaccggttcaggggatccgccgcccgcagccgcgggcgctcgtcgggaaaagcttcgcgattctcctgccgctgtgtggcgtgctctgcgcgctgctgctggcggcaacggcgcagagtcgtgctccgctcggcgatagtatcggcaacagtctgtggctcggtctctgctctgcgcttctcggcgcggtcgtttgcctgctgtggctggagcttggcccttcccgcttcggcggctggatctggctgccgctaattttaccggcgctgccgctggtggacgggcaatatcagctggcgctgtatacgtggcaggacggcgagtggcttaccgttttatggggccatctgctatgggtggtaccatggatgctgtttattctgcatcccgcgcgtcgcgcggccgatccgcgcgcggagctggttgcccgaaccctcggctggcatcaggggcgtatcttctggctggtcaccttacctgccctgacgcgtccgctgctgacggcgctggcggtgggcttttcggtaagcattgcgcaatatctaccgacgttatggctgggaggcgggcggatcccaacgctgaccagcgaagccgtagcgctgagcagcggcggcgatatcgccaccctcgccgcgcaggcgctgtggcagttgctgctaccggcggtattctttgctctcaccgctctgctggcctggccgattggccgctatcgacaaggattacgctaa

SEQ ID NO: 253703 - DNA, 633 bp, Klebsiella pneumoniae
atgttgatcgtcaaaaacctgactctcagactcaacgggcagccgctgctgcgcgacgtcgatttttcggtcgcagcgggcgagatattgacgttgatgggcccctccggcagcggcaaatcgacgttgttcgcctggatggtgggcgcgctggcggaagatttccgcgccgcaggggagctgtggctggataaccagcgctgcgacagtttacccaccgagcggcggcgtatcggcatcctgttccaggacgcgctgctgtttgaccacttcagcgtcggacaaaatctgcggctggcgctgcccgctgacgtccagcgttcccagcgcaaaccgcaggtagaacaggcgctggagcgcgccggtctggagggtttctacagccgcgatccggccaccctttccggcggccagcgggcgcgggtcagcctgatgcgcgccctgctggcccgaccgcgggcgctgctgcttgatgagccctttaatcgcctcgacattgagctgcgcgccgattttcgccgctgggtattcgacgaactggcgcggctggccattccggcgctgctggtgacgcacgatcgccaggactctcccgtcggcggacgctgtttgcatatgagccagtggcaatga

SEQ ID NO: 253704 - DNA, 1296 bp, Klebsiella pneumoniae
atgaaacgtgtttctcaattgaccgcactcgccctcctgatggggcttgctgcttccacctccgccgctgaatccatgccaacgctaacgctctccacgctgcaacagcagaacggcgtcgctattgatacgcgtctcagcgctttctataacggctggccgcaaagcgctaacgggcctcagggtcatgaaccgcaggcgcttaacctgtcagccagctggcttggcgcgatgaacgacgaacagctgagcgcctgggctaagctgcacaatctgcagacctctacgccaattgcgctatacggcaacgccgacgacaacgcgaaagtcgcggcgcgccttcaggctgctggtttcactcatctcagctccctcggcgatgccctgagccaggcaggtcgcctgcaaaagctgccgcattttgaacagctggtatatccgcagtggctgcacgacctccagcgcggcgagccggttaccgccgcgcctgccggtgaatggaaagtttttgaagccgcctggggcgcgccgaagttttatctgctgagccatattccgggcgccggttatatcgacactaacgaggtggagagcgaaccgctatggaataaagtgtccgacgcgcagcttaaagcgatgctggcaaaacacggcattcgccatgacaccacggtaattttgtacggtcgcgacgtgtatgccgccgcccgcgtggcgcagattatgctctacgccggcgtgaaggatgtgcgactgctcgacggcggctggaagacctggtccgatgccggtctgccggttgagcgcggaacgccgccagaacagaaacctgaacctgattttggcgcccccatcccgggccagccgcagctgatgctcaataccgagcaggctcgcgccctgctgcatcgtcaggatgcttcgctggtcagcatccgttcctggccggagtttatcggtaccaccagcggctacagctatatcaagccgaagggcgaaattgccggggctcgctggggtcatgccggaagcgattccacccatatggaggatttccataatccggacggcaccatgcgtagcgctgatgatatcgccgcgatgtggaaatcatggaatattctgccgagccagcaggtctctttttactgcggcaccggatggcgcgcctcagaaacgtttatgtacgccagggcgatgggctggaacaacgtctcggtctacgacggcggctggtacgagtggagcagcgatccgaaaaatccgattgcgactggcgatcgcaagccggagtga

SEQ ID NO: 253705 - DNA, 222 bp, Klebsiella pneumoniae
ttgaccattaataccgagtatatcgaaaatcttattctgacatttatggtgggtttgcccattgtggctactgtcgccgttgcatggcaaacctggcataaacacaaatccgatcccgatactttcggcaaacactggcgcgtatggcgcaatgcgatcctgacactaattctcagcgctggggtgggttttggcctggttctggccagccttacaaactaa

SEQ ID NO: 253706 - DNA, 618 bp, Klebsiella pneumoniae
gtgcttgatcgttatctgcatccgcgtttgaaacctgctctcaacgccaccgccgctctgctggatcgtccagccgtctctcccgacggtctgaccctgcttggctttgcaattggcgtactggcgctgccgtttttagccctgggctggtatcaggcggcgctggcggcgatagtgcttaaccgcctgctggacggcctcgacggcgcgctggcccggcgacgcggattgaccgatgcgggcggttttctcgatatttccctcgattttctgttttacgccctggtgccgtttggctttattctggccgacccggcgcacaacgcgctggcgggcggctggctgcttttcgcgtttatcggtaccggcagcagctttctcgcctttgccgcgctggcgacaaagcatcagatcgccaatccgggctacgcccacaaatcgttttactatcttggcggactgacggaagggacggaaaccatcgcgctgtttgtgctgagctgtctgttccctgcgtggtttgcctggctggcgtggatttttggcgcgctgtgctggctgacgacctttacgcgggtgtggagcggatacctgaccctgaaacaggtaagagagtga

SEQ ID NO: 253707 - DNA, 411 bp, Klebsiella pneumoniae
atgctaaaaactcttgatgttgttgccgccattatcgaacgcaacgggcaaattttgctggcgcagcgccctccccacgcggatcagccggggatgtgggaatttgccggcggtaaagtcgaacccggcgaaacccaggccgaggcgctggcccgcgagctccgggaagagctggagatcgacgccagcccgggatgctatatcgccagccatcggcgcgaaatttccgctcgcctgattcatcttcacgcctggtgggtccctcattttagcggcgaacccatcgcccgctatcacagtcagctgcgctggtgttcaccgcaggaggcctttagcttcaaccttgcgccagcggacatccccctgctggaagcctttatcgcccagcgcgccgctctcctctcccgctaa

SEQ ID NO: 253708 - DNA, 1344 bp, Klebsiella pneumoniae
atggatcagacgtgcactctggaaggttttctcgcccgcgttcaacagcgcgatccaaatcaaactgaatttgctcaggccgtccgcgaggtgatgaccaccctgtggcccttccttgaggaaaatccgcgctatcgccagatgaatttgctggaacgtctggttgaaccggagcgtgctatccagttccgcgtcgtttgggttgatgaccgtaaccaggttcaggttaaccgcgcatggcgcgtgcagttcaactccgccatcggcccgtacaagggcggtatgcgttttcacccctccgtaaacctgtcgattctgaaattccttggctttgaacaaaccttcaaaaacgccctgaccaccctgcctatgggcggcggtaaaggcggcagcgatttcgatcctaaaggcaagagcgacggcgaagtcatgcgtttctgccaggcgctgatgaccgaactgtatcgtcatctggggccggataccgacgtgcctgccggtgatatcggcgtaggcggtcgtgaagtcggctttatggccgggatgatgcgtaagctctctaacaacagcgcctgcgtatttaccggcaaaggtctctccttcggcggcagcctgattcgtccggaagccaccggctatggcctgatttactttaccgaagcgatgcttaagcgccatggtttgggatttgaaggcgctcgcgtggcggtttccggctctggcaacgtggcgcagtacgccatcgagaaagcaatggagcttggcgcgcgggtgattacagcgtccgactctaacggcaccgtcgtcgacgaggcaggcttcaccaaagaaaaactggcgcgcctgatcgacattaaagagcgttgccatggccgcgtagcggattacgcgcgcgagtttggcctgacctatctggaaggcaaacagccgtggtccgtaccggtggatatcgcgctgccgtgcgcgacgcagaatgagctggacgtcgatgccgcccgtcagttgatcgctaacggcgtgaaggccgtagcggaaggcgccaatatgccaaccaccatcgctgccaccgatctgttccttgaagcgggcgtactgttcgcgccgggtaaagccgcgaacgccggcggcgtcgccacctccggcctggaaatggcgcagaacgccgcgcgcatgggctggaaagcggaaaaagtggatgcgcgtctgcaccacatcatgctggatattcaccacgcctgcgtgcagtacggcggcgaagcgaagcagaccaactacgtgcgcggcgccaatatcgccggtttcgtgaaggttgctgacgctatgctggctcagggtgtgatttaa

SEQ ID NO: 253709 - DNA, 1572 bp, Klebsiella pneumoniae
gtgcagcgctgcctgattaacgatctcaacccgcaggcggtggagcgggcgattaaccgcctgcgcgccaatagcgagttcgttccgctgtgcgtctcggcgctggctcgcgcccgcgccgactggttatatgggatcaatatgacccgcgcctacaccatccttgggcgtaacgcgggttatcaaggggtgctatcggtcggacgcgtgcaaacgccggtgcttggcctggttgtacgccgcgatgaagagattgaaaacttcgtcgccaaagacttcttcgatgtgaaggcgcatatcgtcaccccgaaggaggagcgttttgtcgccacctggatccccagcgaggcctgtgaaccctaccaggatgaagagggacggctgctgcatcgttcgcttgccgaacatgtggtcaagcgcattgagggccagccggcgacggtgaccgcttataacgacaagcgggactccgagccagcgccgctgccgttttccctctcggcgctgcagattgaagccgcgaagcgcttcggatttagcgcgcagaacgtgctggatatttgccagaagctgtatgaaacccataagctgattacctatccgcgttcggacagccgctatctgccggaagagcattttgccggaagacatgcggtgctgaacgccatcagcgtacatgcgcctgacctgctgccgcagccggtggtggacccggagatccgcaaccgctgctgggacgataaaaaggtcgatgcccaccacgccattatccccaccgcgcgcagttcgcaggtgaagctcagcgacaacgaagaaaaggtttacaccctgattgcccgccagtatctgatgcagttctgcccggatgcggtgttcagaaagtgtcagatcgatcttgatatcgccaacggtaagtttgtggccaaggcgcgttttctggcagaagcgggctggcgaaccctgttaggcaataaagagcgcgatgaagaaaacgacggcatgccgctgccggtggtcgctaaagatgatgagctcctgtgcgaaaaaggggaagtggtggagcgccagacccagccgccgcgtcactttaccgacgccacgctgctgtcggcgatgaccggtattgcccgctttgtgcaggataaagacctgaagaaaattttgcgcgccacggacggtctcggtacggaggcgacccgcgccggaattatcgagctattgttcaaacgcggttttctgaccaagaaagggcgctatatccactctaccgatgccggcaaggcgcttttccattcgttgccggagatggcgacgcgtccggacatgactgcccactgggagtcgattctgacgcaaatcagcgagaaacagtgccgttatcaggatttcatgcagccgcttgtcgggacgctgttccagcttattgaccaggcccgtagcacgccggtacgccgcttccgcggaattgcggcgccgggggaggggaagaaaagctttagcaaggggaaaggcagagccaaagcgaaagataaaaaaagcgccgccggccctgcggcggaaaacccgcagtaa

SEQ ID NO: 253710 - DNA, 936 bp, Klebsiella pneumoniae
atgtcgcttagcccggcagagatcgatttacgtaaaaacctccagttggcccgtaaagaggtacagagattgaagaatgaactcattctgcttcgccgagaagtacaacagtcagatagtacattggcggagcaggtcgtggctctccaggcaacttatgagcaactggctgcggcagaggaaaaaaatgtcactcaacagaatgagctccaggcgcttactgcgcgcgctacccaactggaagaaaaaaatgcgcagtggcaagtattaaccagaaaattacagtcgagccttaaggaagcgcactatcccgcactgccagcaactgacggtgaactggcggattttgcggccgggatggcgatgggttatgacattttggcggtactcgaacaacgggatgaacaacagatacatattgataaggaagtctttctggccggcattacggaaacgatacgcggcgaacgccgattgtcgcaggaggattttgagcgccaccttaaacgcgccaatcagcgagtagaagaagcgatgcacaagttcaggcaacaaaaggaagcgcgggatagcgcatggctggggcaatttattcaagaggaagggacgcagagtgcaggtgaacaggcctggtataaagtcatccatgcaggcgagccgctgttcgaggatgagcactctgaagcggcgctaaccatttcggtcaatcgtcgtctgtctgatggtaccgtgattgcggacacagatataactggcctggtattacaagaaaaattttccgacctccctggatggcttcggaaagtagtgaaagatatccgtctgtacggtgaagcagagttagccgttaaagttgatgaatatggtgttccacaagaacgcggtaattatattgaacattggcgcatacgtgtaattgaacgacagactatgtaa

SEQ ID NO: 253711 - DNA, 756 bp, Klebsiella pneumoniae
atgaaacttaaattaatgacttttctggggattatcttgtttaccggaagccagcatttggctcaggcggcattatccgtagagcgctcccgggttattttcaatgaaggggagaaatctgttggattgagcgtgaaaaataataatacgcaggatccttatctcgcccaagggtggatggaaaacgagaaagaagaaaaaataaacggcccgctgatgattttaccgcccgtacaacgtattgagcctgatggtcgaacgatgatccgcgtccagcaggtcgccgaaacaccgtctctgcccaccgatagagaaagcgtcttctggcttaacttacgcgagatcccaccaaaatccgataagcctaacgttttgacgctggcaatgcagacccggatgaaagttttctggcggcccaaggccctcaaggttgatccgcttctcgacgtggtgccgggggctgaaacgctgacccttacccgcaagggggaccgctatgaggttgagaatcctacgccctatcatttttcgtttgtcgaagcgcgcggcagcctgcacggtaaggcgctggatgattttgagcctgtcatggtttcgccaaagggcaaagcgcagctgccgttatccgcatcccggatgggcacgacgccgacgctgatgtttatcaatgattatggcagcgcacggttactgccgtttacctgcactggcatcgcctgccgcgccgggaaggtggcacaaccaaaggaaggttaa

SEQ ID NO: 253712 - DNA, 528 bp, Klebsiella pneumoniae
atgacacgccaacgcttaacgataatccggatgcacctgatgatggctggagccgcactgcttcttgctggcggacaggcgagcgccgctgaaggagacaccaccactatcaccatcaacggcaccctgatcgatggaccgcagtgcgttattgacggtaacgataccgtagacgtgaagtttggtgatgacctcattactcggctggtagacggggtgaattataagaaagagatccagtacggtctgacctgtactgatctgaacagcaatgccctcaagctgacgattcgaggctcgctggcgagttttggctccgggcttctcctgaccagcaaaggggggctgggtatacagctttacagcggaagcgcaggcaccacggttatgacgcccggcagctacgtcaacttcaatggcacagccaataaacccaggctatgggccgtacccgtggcgcaaaacaacgctacgctcaccgcaggtccgttttccggcacaggcaccatggtcattgactaccagtga

SEQ ID NO: 253713 - DNA, 486 bp, Klebsiella pneumoniae; identical to SEQ ID NO: 177474

SEQ ID NO: 253714 - DNA, 525 bp, Klebsiella pneumoniae
atggcacagggaatcaacataatgagattgattggatatgcaccatttcttctggccgcattgatgatgacagggacctcatcacttcaggcggcagacccggaaaaccttgaatttatcggcaccctgataacgcctccgtcttgctcaataagcgaagatggcccggtatatattaacttcaatgatgtccgcataaaaaaagttgcggagggaagatatcgtgaaaccgtcccgctgaccttgaagtgtgaagagagcagtctggcctggcagttgcggctcagcgtacgcggtaatccggccgggtttgacgccgataacgccaccgtggtgaccgcagaacaggccaatcttggcgtgaaaatcttccagaacggccagccgtttaaactgggcgaggccattaacatcaatagcgtgacgttgccgactattgaagccctccttgttcagcgtgatggggtggaattggtggaaggattatttaacgccaccgcgaccctgcgagccgaatatcagtaa

SEQ ID NO: 253715 - DNA, 801 bp, Klebsiella pneumoniae
atgctaagtacgttacccgatttacacagaagttttgcagagcaactcaagcttaagtttcagtctgactcgcggattcactcccttctcgctggcggctcgattattcatggcggatttgatcaatactccgatctcgattttatcgttgtcgtagaccctggctattatgacgaaatcatggcgcagcgtagggagctcgccggaacattaggccatctgttacatgctttcactggggaacatgtcggagaaccccgcctgcttatatgcctgtatggacctgaactcctccatgtcgatctaaaatttgtcaccctggaaatgctcactcaacgcgttgaggagccagcagtattatttactcgtgataacacggctctggagcgacaacgggtaaaatccagtgctcgctggcccaacatgacgccggagtggtttgagtcgcgagcctggatctggcttcactatgcagtggttaagctgggaagaggcgaactgttcgaagcgataggtatgctggcattctttcgagagcaggttctgggacctatgctgtatcgtcgggcaaatctaccgcaacgtggggttcgccgcattgaattccacagcattgatcctgacggcctgctgacctccacgctggcaacgcacgatcgtgactccgtcagcgttgccatcagaatggctgttgaagcttatatcaatctgcgagctgatgctctgcctgaaaatatcgcagacgacgcgacacgttgggcggtccttgccatgctgaaaaaggtttctgaccagggttaa

SEQ ID NO: 253716 - DNA, 672 bp, Klebsiella pneumoniae
atggaaaacatacagcagaatttagacgtcttcattccgatgatggaagggatagcaaatcagttcggtgacaactgtgaagtggtcctgcacgaccactcccaggggctggaaagcagtattatcgcgattattaatgggcatgtcaccggccggaaagtgggcgatcccagcagcaatctggggctggaagtgctgcggggaacggatgtcaacggcgacaggcataactacgttacgcgcacccgtgagggtaaaacgctacgctccacctccatttacatacgtaacagcaataaacaggttataggcgcactttgtatcaacctcgacattagcgatattttacaggcggaaaaaacgctcagtaaactggccggtcattcggatagtagcgccgctaaaaaagaggacgttaatgaggtatttgttaaagacgtcaatgaactacttgattacctgattgccgagtgtatgggaattattgatgtccccgtcgccaatatgtctaagcaggataaactcaacgcgattaaatttttcgatgacaagggcgttttccttattaaaaagtccggagaaaaaatctgcgaatttctgaacatttcgaaatataccctctatgcctacctgggagaggtcagaggggaaaacccaacaagtgacggctag

SEQ ID NO: 253717 - DNA, 1080 bp, Klebsiella pneumoniae
atgttaaccacaccttatgttgcgctggatatggatattatgcagaggaatattatcgccatgacctccggactggctcgccataatattcaacactggccgcatattaaaacccataaatctgtacgcctggctcagctcgagcaggcgctgggggcgagtggaattacctgcgctaagctatctgaagcggaagtgatggctgcgggcggaattacctcaattctgctggcctatccgctgattggtgatgacaaatgtgagcgctatgctgaactggcgcgcaagattaccatgcgaaccattgtcgacagcctggcgggcgcgcaggggctctcacgcgctgcgctgaggcatggcctgacgtttgacatcgatattgccattgatttcggtgcccaccgcgaaggagtacagccggatcaattgctgacgttcgcccgtgaggtggcggcgcttccggggttaagggtgcgcggggtatttacctatgccgggactatttatcaataccacaatgagcaggatatccgtcgcgcggcgcgcgaagaagccgctctgctgatgaccagtcgggatcttcttaatgcgcatggttttcatattgacgttttatccggcggctcaacgctctcttctttttatgccgatgagctcagcggaataaccgaatcccgcgccggaaattttatttttggcgatatgaacgcgattaacggcgggatttacaccgccgccgactgcgcgttgaccatttgtgcgacggttgtcagtatcccgctgccgggctacgccacgctggatgccggtacaaaatcgctgacctccgatctttccgcgacgcccggttcttacggattgattcaggaacatccggacgtcgcgctggtcaagcttaatgaagaacacggctatctgcgctatgacccggaaaaagtatcgctcgctattggcgatcggctgcatattattcccaaccactgctgcgtggtcgcaaatcttgtcgatgaaatatatgctttccgtaacggaatattgagcgaaacgataactatcgacgcccgcggcaaaagttattaa

SEQ ID NO: 253718 - DNA, 1161 bp, Klebsiella pneumoniae
atgaccgatattgaattaactgccgatgaacggcaggagttgactacgctcctgtgcagcctgatacagcacccgtcggaaaacccgccgggcaatgaaaaagcggtcgcgctgttcattgctgatgtattacgcggcgaaggcattgacgttgaagtacaggaggcggtagaagagcggccgaacgtgattgcccgactcaaagggcagcggccaggcaagcggctgatcctcaacggacactctgacgtggtgccatgcggcgcagggtggtcggtggaaccctttgccgccgtcattgatggtgaccgcattattggccgcggggcggcagatatgaaatccggcgttgcggcaatgatgtacgcggcgatcctgattcagcgacggcagtacgcgttcaacggtgaaattgttttactgttcaacgttgatgaagagcgcatcaacctggggatggaacattttgtggcgcagggcgtcgaggcagattacgccgttatcggtgagccgacctcgctggagatctgcgtggcgcataaaggggtgagccgaacccgcttgaccacgcacggcaccgccggtcatgcggcaaagacgcgcaatccggacagcgccatcgacaaaatggcgcggctcctgccgggggtgctggcagagtgtcagcgggtgaagcaaaagcatcacgatttactgggcaacgcctctatgctggtgaccaccattaccggcggcagcgcgccgaatattgtcccgcaatcgtgcgttattgaaatcgaccgcagggtgctgccggaagaaagacgtaatgaaattaacgaaagcctgcaaagatcgcttagcgactcaggactaaaaccgcagcacgactacgacctcgaaaactatctgtatattccggcctcgtctattgcagagacgcatccgctggtggaagccgcttttcagacggtagaagcgctcaccggcgcggccaaaaaaacgattttcgacgccacctgtgaagcgccgttcttctccgtaggctgccagatcccgaccatcattctcggccccggtgatttagctcaggcgcacgtcaaagatgaatatgtcaaaatcgaagagctgcatcaggccgcgcaaatatataccgcactggcattatctttactcaaataa

SEQ ID NO: 253719 - DNA, 462 bp, Klebsiella pneumoniae
atgaatattgaacagcgattaaccgaattgggtatagtgctcagcgcgcctgtaccgcctaaattttcttatgtgcccattaaacagacgggaaatttattgtactcgtcaggtaatgactgtcgggtcaacggggaattactttatcaaggaaccctcggcagggaactcacgatagagcaggggcaggctgctgcgcgccagtgcattatcaatattctctcgtccctgaaaagctatctgggcgatctcaatcgcgtggctggctgcgttaaaatgctcggtttcgtgcagagtgcagacgttttcaaagaccagccgttggtgatgaatagcgcttcggatttactgatcgcaatatttggtgaagcgggtaaacatgcgcgttcagcaattggtaccaacacgctgccttttaatacgcccgttgaaattgaacttatttttgaaattaaagattaa

SEQ ID NO: 253720 - DNA, 1290 bp, Klebsiella pneumoniae
atgtccagtcaagcaagctctcgcctgaagcgtttgcaaatcatggcattattgtttttgctcgtggcgggtattattaacttcctcgacagaacctcactttcgattgccaacaccactatccgtgaagagatggggttgacggcaacggaaatgggattgttgctctcggtattctcctttggctatgcgctgtgccagctgccgattggcatggtgatggaacggttcggcgttaaaaaggtgtatggctttggtatcttcctgtggtccgcagctcagaccgcgctggggtttgtcggctcctttagccagatgattgtcgcccgtatcgttctcggcataggggagtcgccgcacctgcctaccggcgtaaaagtcgttaatgactggtataacatccgtcagcgcggcgtgccgatggggattgtgaatatgtcatcaactctggcgcaggcgctggcgccgccgctgctgatcgccatgatgctggctttcggctggcgcatgatgttcatcatcatcggggtgagcggtattattctttctatcctctggtttatgttctatcgcaaccgggaagatgccggcctgtcggcggaagacatcgcgcacctggaagaggagacgcctccttccagcaaggaaaaggtgaccctgaaggactgggccggtctgtttaagcaaaaatcgatgtggggaatgatcatcggtttcaacggcgtcggctacatggtttggttattcctcacctggctgccttcttatctcgaaatgtcccgcggcctgagcctggaaaaaaccggttgggtagcggctattccgttcctgtttggcgctgccggtatgctggttaacggcgccgtagccgactgggtgatgaagcgcggcgcggataaaatgaagagccgtaaatggatgatctgccttggcctgctttgcgcggccggctttacgctccccgccgcttatactgacagtacgtttatggcggtcgcctgcattagtatggcgctcttctccattcactttgccggtacctcggcatggggactgatcctggtgtcggtaccgtcacggctgataacctcggtgagcggcattcagaacttcggcggttttatcggaggttcgtttgcaccaattattaccggaatgattctggataataccggctcatttaccctggcgctggtggcctcttcggtcatcgcttttatggcttcgctggtttacttctttatggtgaataaaccgattgtggacccggcggcagcgtcctgttcatga

SEQ ID NO: 253721 - DNA, 1053 bp, Klebsiella pneumoniae
atgaatgaaacaccgcagttttccgttattcgtcataatcatacgcagcttgaaattcatttttgcaaagcattagataacgccacgctctactggacgcgagaccgcgatattcacaccgccgagcgtaacttgattaccgatcgtatctcaggtccggtatattttgatgaccctttgcaggcacagcagcgtatctattttatcgtggaacatgcgcaaaattcatggttgtttggcgaaagaaccctgccgatatccggtataaataatttcagggatatcggaggatatcgcggtgcaggcggcaaaagggttaaatggggcctgctctatcgctccaaccatctgtataatttgacgccgcaggctcaggcctacctggaaggcctggaggtaaaaaccattatcgattaccgcagcgccaacgaaatcgcgaaaagccccaacggctttatcggggaaaataagaccttccacctggatgccacggcgcaaaccgcagagctggcggcccagtttgccgccgaacccagcaatgaggatcgcgcgctgatcgagagcgttatacgcgatataccggcggaactgattaacggtcagggaggccaggtcattgagcagtacaggcattttgtactcagcgacaagtcaaaaaaagcctttaagtcgatgattaacgtcctgcttgacccgggcaatgcgccgaatattcagcattgtcgtgggggcaaagatcgcaccggctatggcgctttattgatactctccatgcttggcgtttctgaacaggatattatcgccgactacatgctgaccggcgcaaaccgcctggcgcgaaataatgtgaagatgaccgcctatcgacaaattaccgataatcaggatgtactcgattacttacttaccctgatcgatacccgggaggcatttatcgttgaagcactgaacaccatgaaggcactctccggcagcgttaatgcttatattaaaaaagagcttggctttaccgacgctgactttattaaaatgcaggaaaactatttacagtag

SEQ ID NO: 253722 - DNA, 852 bp, Klebsiella pneumoniae
atgagcgatatcgcctcttatcgggtggccgaaaccgcaacccaggacaaaaaactgactaagcaggatctaaaccgtattttctggaatatccagtcaatgtccttttcctataactatgagaagttacaaaccatcggctttgcgcactgcatgatcccggtgcttgagcgactctacgctgatgccgataaagcaacgcgcattaaagccatgaagcgccaccttgagttttacaactcacaggtgaataccggcgcgctgatccttggcgtcaccgccgcgctggaggaaaaaacctcggaagaagaaaaagaagccgtggtgtcggtaaaagccgggctgatgggcccctttgccggtctcggggatagcttactcaaatttacctggctgccaatctgcggcagtatcggggcggcctttgcgcttcagggcaatattattggccctcttctgatgttcatcctgtttaatatcgttaacgttggctcaaaatatttctttatccactatggctataacaagggcgtagacttaatcgagcagtcgaaaaactcgaacattatccagcgtatctccaacatcgccaacgtggtcggcgtgatggtgctggggtcgttaatagcgacaaccgtgaaaatatcaactccgctggttattgcggttggcgagcagtcgataaaagtgcaggagatgttcgataaagttattcctaacttgctgaccctgctatttgcgctgggtatctttttcctcgtcaaaaaatttaagggcaaacataccgtcgcgctcatcatcggcatgatgtgcatcggcgtcatttgttcgatgttgggaattttaaattaa

SEQ ID NO: 253723 - DNA, 795 bp, Klebsiella pneumoniae
atgttaattgaagcttttctggtcgccatctgggcagggatctgctcactggacgacgtcgggccgcagatgctgcgtcgcccgcttctgacgggaaccgttgctggaattattatgggcgatacggttcaggggctggcgatcgccgccacgctggagctgatgtggatggggatcggcaacgtcggggcctattccgcgcccgacattattgccggatcgatcatcggcgtcgctctgggcatttcctccaaaggcggtatcgctgcgggcatcgccctcgccgtcccggtgtcgatactctgccagcagcttcttatcatctggcgctctttcgccagtttcctgaacgtatgggcggagaagtccattcaggagggtgactatggtaagctgctgaaagtccattatttctctacgccgctgtggtttctgatccgcgccgtcccctgcttcctggccgtctattttggcggggacctggtgggtcggattctggccgccatcccggaaagtattctgaccggtatgggcgttgccgccaaaatgatcccggccatcggcgtctgtatcctcctcttaatgctgctgaaaggccggatgtggttcttcttcctgcttggcttcatgctcaccacctatctgaagctgccgatcattcccattacctttatcgctctggcttttgccgtgctctatgacatggcctacagcaatggtcagaaggccgagagttcacctgcggaaaaagagcagcagtccactaccgacactgaagaaggatatgacttatga

SEQ ID NO: 253724 - DNA, 471 bp, Klebsiella pneumoniae
atgccgattaatctcgcaagaattgatgaccgtctgattcacggccaggttattaccacgtgggtaaaaaaccacgatatcgaacaagtgctcatcatcaacgataaagtcgctggcgacaaaatccagcaatcggttttaaccatgtccgcgccgccggaattaaaggtacaggtattcggcgtgcagaaatttatcgaaattctgcaaaaaacggaaattaaaagacgcaccatgctgctgttcactaacagtattgatgtaaacacgctcgttgaaaacggggtgaaaatcgacaaactcaacgtcggcggcatgcgaatgcaggaaggcagaaagagtctttcccgcgccgtcgcggtaacgccggaagaagaacaagcctttaaatcgctaatagccaggaatataccggtggaaatacagatggtgcccaaagatccggtagttgatctgcaaacgttaatttaa

SEQ ID NO: 253725 - DNA, 432 bp, Klebsiella pneumoniae
atgcaaactgaaattcctgtcattctggtcagccacggtccttttgcccagggggcgctttcctgtgcggaaatgcttatcggtgaacagcgcaacgtgtcggtgatttcgctgcagcctgaggccaatatcagcgatgtgcgcgccacgctgctcgagacctatctctcggtcaataagggaaacggcgtggtgatactggtcgatatgatgggcggttcgccatgcaacctggcgagcgagctctttttgacctatcccgacatcctgctgttctgcgggttcaatatcccgacgctgctggaagtgctcagcaatcgtgatttaccgcgcgatgagattgcaacaattattgaagacgttttcccgggtagctgttttaacgtcggaaaaacgttacacgctgaatacacacaatcgaccgatctgtag

SEQ ID NO: 253726 - DNA, 894 bp, Klebsiella pneumoniae
atgatggcgaacaattatcgtctcacttttaaaggtggccaggtgcttgatctaaagctaagagaagtgaataacaatctgtccgccaaagagcgtcttgtcgccgactatattctggcgaataagccgctgctaaaaagcatgagcattcagaccctggccaaagcgaatgatgtcagcaccacaaccatcctgcgtctctgccacaaactcggctatcagggtttcagcgatcttaaaattgatctgatcacctcttctggtcatccccagcacgacaaagttttacaggaggatatcaatcttgatgactctgtagagagcgtcaatcataaaatccagctgattgaaaaatcctccattgatgagacccatgccatcgtgaatatcgaacagctagagctggcgatagcgctgatcaggaagagtaataagatcgtgatttacggtgccggcagcagcggactcgtcggtaaagagctggagtatcagctcatcaaaataaagaaagacgtgagctgtcacgcggattacagtatccagtacagcatcgtcaatacgctggatgagcatgacctggtgattattctctcccactccggcgaaaacctggaaagcgttaagctgctgaccatggctcagcagctgggcgttccgtcaattgctatcaccaaaatggggcaaagccgcatctctgctctcgctaccgttctgttacacaccatcaccagcgaaagcgtatctcgcctgatccctatccgttcaaaaatgtcgcagctctcggttatcaatatgctggtgacgaatctctttattcagcaatacgacgatcgcctgctgaaacaaacccaaaaccgcgcccagcgtttctacaatcagaatcacaaatcctga

SEQ ID NO: 253727 - DNA, 582 bp, Klebsiella pneumoniae
atgaaatatcaggacgaattacagagattattattcagcgacccgttcagaatggaggcgctttatgccgttcaggcgctcgaactcaacgatggctggatcggtgccggcctggtcagagatgcggtttgggatcatctgcacggatacggtcaaaggccggtttcgggtgatgtggatgttgcctggttcgatccgaaaagctgcagtgctgcccatgataacgcgctggaagcggggctttgccaacggtcgcccgcctttaactggtcggtgaagaatcaggccagaatgcaccagcgtaacggtaatcaaccttatcattcaacggagaatgcgcttagctactggcctgagacggcgacggccatcgcggtcagaatagggcgctctggccttattgaggtcattgcgccttacggactcgacgatctgtttgaacgtcgcctgcggccaacgccggaatttgagggcgataagctgaatattttccgccagcgcgtggcggaaaaacgctggctggaacgctatcctgttctgcagcttatgctcccgaccggaggcggtcaaacccagcggtga

SEQ ID NO: 253728 - DNA, 2022 bp, Klebsiella pneumoniae
atgaaaatgacacggttttaccctctgattgtgggagggtttctgctcccgggcatggctcatgcccagactgcacagcaagacgaaaccacgctggtggtcaccgccagtaaacagtcttcccgctcggcatcagccaataacgtctcttctaccgttatcagcgcgacggagttaagcgacgcaggcgttaccgccagcgacaaactcccccgagtgttgcctggactcaatattgaaaatagcggcaatatgcttttttcaacgatctcgcttcgcggcatctcttctgcccaggacttctataaccctgccgtcaccctgtatgtcgacggggttccccagctatctactaacaccatccaggcgctaaccgatgtgcaaagcgtggagctgctgcggggtccccagggaaccttgtatggcaaaagcgctcagggcgggattatcaacatcgtcacgcagcagccggacagtaccccgcgcggctatattgaaggcggcgtcagcagccgcgacagctatcgtagcaagttcaacctgagcggccctctccaggatggtctgctctatggcagcgtaacgctgttacgccaggttgatgacggcgagatgattaaccctgcgacgggaagcgatgatttaggcggcacccgcgccagcatagggaatgtgaaactgcgtctggcgccggacgaccagccctgggaaatgggatttgccgcctcgcgcgaatgtactcgcgcgacacaggatgcctatgtggcatggaatgatattaagagccgtaaactgtcgatcgacccggggtcgccggacccatatatgcggcgctgcactgacagccagacgctcagcggtaaatacagcaccgaggactgggttttcaatctgatcggcgcctggcagcagcagaattattcacgcacttttccttccggctcgttgatcgtcaatatgccccaacgctggaatcaggatgtgcaggagctacgcgccgcgactctcggcgagacgcggaccgtggatatggtgttcggattgtaccggcagaatacccgggagaagctaaattcagcctacgatatgccgaccatgccctatttaagcagcaccggctacaccaccgccgaaacgctggccgcctacagcgatctgacctggcatttaaccgatcgttttgacatcggcggcggcgcgcgtttctcacatgataaagccagcacgcagtatcacggcagtatgctcggtaacccctttggcgatcgtggtaaaagcagtgatgaccacgtgctcggacagctctccgcaggctatatgctgaccgacgactggcgggtgtatacccgcgtagcgcagggatataaaccttccggatataatatcgtgcctaccgcaggccttgatgccaggccgttcagcgcggaaaaatccatcaactacgaaattggcacccgctacgagaccgccgacgtcacgctgcaagccgcgacgttttatacccacaccaaagatatgcagctctactctggtccggtcgggatgcagaccttaagcaacgcggggagagccgacgccaccggcgttgagcttgaggcaaaatggcggtttgcgcccggctggtcatgggacatcaatggcaacatgatccgttccgaattcaccaatgacagtgagctgtatcacggcaaccgggtgccgtttgttccgcgttacggcgcggggagcagcgtgaacggcatgattgatacccgttatggggcgctgatgccccgactggcggtgaatctggtaggaccgcattatttcgatggcgataaccagctgcggcaagggacttacgccaccctcgacagcagcctgggctggcaggcgactgaacggatgaatatttccgtctatgtcgataatctgttcgatcgccgttaccgtacctacggctatatgaacggcagcagcgctgtcgcgcaggtcaatatgggccgcaccgtggggatcaatacgcgcattgatttcttctga

SEQ ID NO: 253729 - DNA, 1578 bp, Klebsiella pneumoniae
atgcacgcttcttttaacactctgattgaacagtatcccttacctattgccgcacagctgcgctgctgggcggcgcgttattccacgcaaacagcgctcgttgatgacgggggtgcgctaacctacagcgagcttgatgtccgggtcgaccagcttgccgcagggttagactcgctggggttgcgttcaggacagcatgtgattgtgcagcttccaaacggcaacgccttcgtgatcctgttgttcgccttgttaagactcggcgcgatccccgttctggcgatgccctcccagcgggagctggatatcgacgcgctgatcgcgctggcgcaacccgtcgcttattttattcacggggaaaaccatgcagggctggcccgccagatgatgcataaacacgcctgcttgcgtcatattctgaccatcgaacaatgcgcagatgacgagtttacgccgctgttctcgctgcgcggcgagcttcaggcgtggcggcagcccgaggtttccgccaccgcgctgctgctgctttcaggcggcaccaccgggacgccaaagcttattccgcgacggcacgccgactatagctataacttcagcgcctctgccgaactgtgcggcatcaacgcccaaagcgtatatctcgccgtccttcccgtggcgcataattttccgctggcctgtcccggtattctgggaacgcttgcctgcggcgggaaggtggtgctgaccaacagcgccagctgcgatgaggtgatgccattaatcgccgaatgccgcgcgacgcacgtcgcgctggtgccggccctggcgcagctctgggcgcaggccagagaatgggaagagagcgatctctcttcgctgcgcgtcattcaggtgggcggcgcccgcctcgatccgacgctggcagagcagatcatcgccacctttaactgcaccctgcagcaggtattcggcatggcggaggggctgctttgctttacccgtctcaacgatccgctggtcagcgttctccatagccaggggcgcccgctatctcccctggatgaaattcgcgtcgttgacgaagaagagaatgacgttgcgcctggcgaaaccggacagttattaacgcgcggcccttacacgatttcgggctattatcgcgctcccgagcacaatgcccgggcctttaccgcgcaaggattttaccgtacgggcgataatgtcaggcgcgatgaggcgggaaacctgtacgttgagggacgcataaaagagcagattaaccgcgccggagagaaaattgccgcggcggaagtggaagcggcgctgatgcgtctggaggcggtaaaggattgcgccgtggttgccgcgccggacacgctgcttggcgagcgaatttgcgcgtttatcatcgcgcagcagacgccatttgactatcaacagttgcgtcaccagctaacccggctggggctcagcgcgtggaaaattccggaccaaattgagtttctgacccactggccgctcaccgccgtcggcaaggtagataaaaaacgcctgacggcgctcgccaccgagccttgtcgccagacgtcacaataa

SEQ ID NO: 253730 - DNA, 804 bp, Klebsiella pneumoniae
atgatgcaatctgccatgtgtactccgttatggcccgcccgcagcgccagtacggcgcatctggtgatgtgccccttcgcgggcggcagcagtagcgcgtttcgctgctggcgagagcagcctatggcggacatcgcgctttccctggtaacctggccgggacgcgatcgcctgcgccatctgacgccgctcaacagcattatgccgctggcggtacggctggcgaacgaactgcaacagagcgtatctcctgaggcgccgctgctgctcgccgggcacagtatgggcgcgcaggtggcgtttgaaacctgtcgccttctggagcaacgaggacatgcgccgcatggcctgattatttcggggtgccatgctcctcacctccattccgaacgccgactcagccatcgcgatgatgccgactttatcgctgagctgatagatattggcggatgttcgcctgagctgcgggaaaacgaggagttaatatcgctgtttcttcccctcctgcgcgccgatttttacgccaccgagcattatcactacgattcgcccgatcgcgcctcgccgctgcgcacgcctgcgctgctcatatgcggcagccgcgaccgcgaagcctcccggcagcaggtcgacgcctggcgtcagtggctgacccacgttaccgggccggttacaatcgacggagatcacttctatcccattcaacaatcccgcgccttctttacgcagattgtccgccattttcccgacgcattttcgacgctgaccgctgtgcaaaaacagtccagtacttctgaaaggtga

SEQ ID NO: 253731 - DNA, 1098 bp, Klebsiella pneumoniae
atgatgccgtccaccttcgacaaacaacgcgtactgattgtgggcgccaaattcggcgaaatgtacctcaacgcctttatgcagccccaggtggggctcgaactggttggcctgctggcccagggaagcccgcgcgcaaaagagctggcccaggcgtttggtatcccgctgtatacctcgctcgaacagatcaaggagatgccggatatcgcctgtatcgtcgtgcgctcgaccgtcgccggcgggagcggaacgcagcttgcccggcactttttaactcacggcgcgcacgttattcaggagcatcccctccacccggatgatgtccgttcattacaagcgctggcgcaggaacaggggcgttgctattgggtcaatacgttttatccgcacgcgcttgccggtcgcgtgtggctcagggacgcggagcagttacgtcgctgtctggatcgggggccgtcgattgtccatgccaccaccagccggcagttgctctactccactctcgatttattgctgctggctctgggcgtggatgccgccagcgtggcgtgcgaagtggtcggcagcttcagtgactttcactgtctgagactctactggccggagggagaggcttgcctgctgcttcagcgctatctcgatcctgacgatccggatatgcacagcctgattatgcaccgtctgctgctgggatggccggaaggacatctttcgctggaggcgagctacggccccgtcatctggtcatccagcctgtttgtcgccgaacatcaggagaatgctcacagcctctaccgcaggccggagatcctgcgcgacccgccgggtcagacgcgcagcccggcgcccctgagctggcgtgattgctgtgaaactgccgggcctgagggcgtcggaagattactccatcagctgcgcagccatctggcgggcgaaaatgcgcctgccgcctgccacggcgctcatcagctggcggtgtcgtacctatggcagcagattttacgcgcgaccggcaatgccgagatccgccacctgaagccgccgcgtcatgaacggttaacggctttctaccgccacgatgaggagtcccgatga

SEQ ID NO: 253732 - DNA, 5205 bp, Klebsiella pneumoniae
  misc_feature (2004)..(2013): n is a, c, g, or t
atgattgtcgaggagagcgaacagacgctggcgttagcgaaacaagtgaaggaggccctgaccaccggcgccggaggattgattgcgatcactcgccgcgcgtggcaggttgaggagaatgaggcgctcgccgcgtctcatcacgctctgtgggctttgcttcgcgtcgcggccaatgaacagccggaacgcttgattgccgccatcgatctggccgaaaacacgccatgggaaacgctgcgtcagggattaagcgccgtctccctttctcagcgctggctcgccgcaaggggcaacgccctctggctcccctccctggcgccgaatccagggcgcgccgccgatcttccggcaaatgtcttcgctggcgatacccgctggcatctggtgaccggcgcgtttggcggattgggccgccttgccgttaactggctcaaagaaaaaggggcgcaacgtattgccctgctggcgccgcgcgtggatgcctcctggccgggcgacatcgagggcgtgcaaatccgcgtctgccgttgtgatgttggcaacgcccgacagctgaccagggttctcgataagctggcgggcgatggcggcattgccggggcgatccacgccgcaggcgtattggctgatgggccgctgcaggatctggacgatcgccagctggccgcggttttcgcggtgaaagcgcaggcggcagaccagctgcggcaaagcctgagcgaccacaacgcacgctatcttattctttactcctccgcagccgccgccctcggcgcgccgggtcagagcgcccatgcgctggcctgcggctatctggacgggctggcgcggcaacatacttctgatgatactccgaaaacgataaccattgcctggggcgcctggggggaaagcggtcgggcggccacgccggaaatgctggcgacgctggccagccgcggcatgggcgcgttaagcaatgccgaaggctgctggcatctggaacaggcggtgatgcgcggtgctccatggcggctggcgatgcgtgttttcagcgacaacatgcctccgctacaacaggccctgttccatagcgggtccgcagaaaaagccgcagtgccggtcagccctcctgcggatgacaacgtctttatcggcaacctgagcgatgaaacggcggtaatgacatggctgaaaaaacgcatcgcggttcagttacggctaagcgatccggcatcgctgcaggcaaatcaggatctattgccgctgggcatggattcgctgctcttccttgagctcagtagcgatattcagcactacctgggcgtgcgcatcaatgcggaacgggcgtggcaggatctgtcgccgcgtgggctcacgcagcttatctgttctataccagagaagacgcctgccgcttcgcagccggaagcgttacggcacgacgccgatgagcgttatgcccccttccctctgacgccgattcagcacgcctactggctggggagaacccatcttattggttatggtggcgttgcctgtcacgtgctgtttgagtgggataaacgccacgatgaactcgacctctccctactggagaaagcatggaaccagcttattgcccgtcacgatatgctgcgaatggtggtggatgcagacggccaacagcgcgttctggcgacaaccccgacgtatcgcatcccgcgcgacgatctgcgcgcgctctccccgcaggagcagcgcctggcgctggaaaaacggcggcaggaactgagctatcgcgttttacccgccgaccagtggcctctttttgaactggtggtcagcgaaatcgacgattgtcgctatcgcctgcacatgaacctcgatcttctgcagttcgatgtgcagagttttaaagttatgatggacgatctggcgcaggcctggcgcggagagacgctggcgccgctcgatatcaccttccgcgattatgtgatggctgaacaggcgcgccggcagacggcggcatggcacgatgcnnnnnnnnnntgggagtactggcaggaaaaactgccgcaattacccctggcgccggaactgccggtggtggagacgccgccggaaactccacacttcaccacgttcacctcaacgatcggcaagcctgcgtggcaggccgttaagcagcgctggcagcagcaagggctcaccccttctgccgcgctgctcacgctgtttgccgccaccctcgagcgctggagccgcaccgctgaatttaccctgaacctgactttctttaatcgccagccggttcatccgcaaatcaaccagttgattggtgattttacctccgtcacgctggtcgattttaacttcaccgcgccggcgacgctgcaagagcagatgcaacgaacccagcagcgcctgtggcagaacatggcgcacagcgaaatgaacggcgtcgaggtgatccgcgagctggggcgcctgcgcggatcgcagcatcaaccgctgatgccggtggtgtttaccagcatgctgggaatgacgcttgaaggcatggctatcgatcgggcgatgagtcgtctgttcggtgaaccctgctatgtgttcacgcaaacgccgcaggtctggctggatcatcaggtcatggagagcgatggcgagttgacgtttagctggtactgcatggataacgtgctggagccgggcacagcgcaagccatgtttacagactattgcgccatcctgcaggctgctattgccagccctgaaagcctggagacgatggcctgcggtattgccgaacagaacccgcgccgccgctggccgctcaacgcgcagacggactacgatttgcgggatattgagcaggcgacgctggactatcccggtatccagcgggccagagcggaactaagcgaaaatggcgcgttaacgctggatatcgtcatggccgaggggccgtcgtcctccgcgctcgccccggctgagcgcgatctcgcctcgctggcgctgccgttgcctgagcaggcgcaacttgatgaactggacgcgacctggcgctggctggaggcgcgtgcgctacgagggatcgccgacacgctgactcgccatggtttattcacctcgccggagagcgcccatcgctttagcgaaattgtacaggcgctggccgcgcagggggcccggcgacggctgctgcgccagtggctacagtgtctgacggaaagagaatggttggcccgcgagggggatagctggcgctgccgcatggcgttcagcgagatccccgggccgcaggatgcctgcccgccaacccaatggagtcaggcgctggcgcagtatctggacgcctctatttgccgccacgacgaccttttctccgggcagtgttcgccgctggaactgctgttcaatgagccgttgcgcgtaaccgacgcgctgtatcgcgaaaaccccgccagcgcctgtctgaatcgctataccgcacagattgccgccctgtgcggcgcagaacgcatcctcgaggtgggcgccggaaccgcagccaccgcggagccggtgctgaaggccacgcaaagcacgcgacgttcataccatttcaccgatgtctccacgcagttcctcaacgatgcccggagccgtttccacgatcaatcgcgggtttcttacgccttattcgacattaaccagccgctggatttcgccgcccatccggcagaaggatacgacctgattattgccgtcaatgtgcttcacgacgccagtcatatcgttcagacgttgcgccgattaaagctgctgctgaaaaccggcggacgtttgctgatcgtcgaggcgacggagcgaaacagcgtattccagctggcgagcgtcggctttatcgagggattgagcggataccgtgatttccgccgccgggatgagaaacccatgctcgcccgttcggcgtggcaggaagtgcttgcgcaggccgggtttgtcaacgagctggcgtggccgacgcaggaatcctcgcctctgcgccagcatctgctggtcgcgcgttcgcctggcgtgaatcgaccggataaagcagccgtaagacgctatctgcagcagcgttttggctccggcctgcccgcattacggattcgccaacaagaagcgttacttgcgccgctgcgtaccccgtccgttgcgcagattgccccagccggatcgaccccggtcgccgggggcgatccgacgctggaaaaacaggtcgctgaactctggcaatcgctgctttctcgccccgtggccagacatcacgacttttttgcgctgggcggcgacagtctgatggcgacaaggatggtcgcgcagctgaaccgcagaggaattgccagcgccagccttcaggatctgttcacccattcaacgctcagcgacttctgcgcccatctgcaggcctgttcgtcggcagaggacaatcctgtgctcatttgccacggcacggatgatgaaacgttgtttgttttccacgcttccgacggcgatatcagcgcctggctgccgcttgcccgggcgctggacaggcgcgtattcggcctgcaggcaaaatcgccgcagcgttttgccacgcttgatcggatgatcgatgagtatgtcgcatccatccgtcgccagcagccacacggcccctatgtgctggcgggatggtcgtacggcgcttttcttgcagctggcgccgcgcagcgtctgtacgccaaaggcgagcaggtacggctggcgttaatcgatcccgtgtgtcgacaggattttcgttgcgccaaccggacggccctgctgcggctgttagccgaagggaatacgccgctggcgctgccggaacattttgaccggctgacgcccgcccgccagcttgctgtcttcatcgaccttgccagaacggcgggaatggtgccgcaaaacctgacgcggcaagcggcagaaacgtggatcgacaacatcgcgcatctgctgcgtttactggccgggcatacgccgggcgaagccgttgcgcttccctgcctcatcctgcatgccgtaatgagacccgagcgctggacgccagcggagaccgaatggcgggcctggatggaccgcgccgaccgctatgcgattaaagccagtcactggcaaatcatgctggagcccccccacgttcaggcttgcgcgcagcatatccagcgctggcttggcgcaacctcaacgcaaccggagaacaccttatga

SEQ ID NO: 253733 - DNA, 1563 bp, Klebsiella pneumoniae
  misc_feature (1417)..(1426): n is a, c, g, or t
gtggcgagtcgcgccgcggcagcgctcgatcttccccggctggaagcgcttaaacgctgcgccacgcggctacacgccatctatgtcgatcggctggtacaacgctgtgcggacgatgccattgccagcggcgtcgacgccatgaccattatgcgccgaggccgtctgctgccgcgctaccagcagctgcttcaacgcctgctgaataactgcgtggccgacggcgactaccgctacgctgacgggcgttacttccgcgcccgcccgattgaacatgagcagagggaagctctgctggcggagcttgctggctattgtgaaggttttcaggctattcccgagaccatcgcccgcgccggcgagcggctgtatgaaatgatgagcggcgaggaagagccggtggcgatcatcttcccgcagggcgcctccgacggcgtggaggtcctctatcaggaattcagctttggccgctatttcaaccaaatcgccgccggtatcttacgcggtctcgtccagacgcgtcagccccagcgccctttacgaatcctggaagtcggcggtggtaccggcggcaccaccgcgtggctgctgccggaactcaacggcgttccggcgctggagtaccacttcaccgatatctccgccctgtttacccgccgcgcccagcagaaattcgccgactatggctttgtgcactaccacgaactggatctcgaaaaagaggcgcagtcccaggggttccaggcaaactcatacgatcttatcgtggcggcgaacgtgatccacgccacccgccatattggccgcacgctcgataatctgcgccctctgctcaaaccgggcggacgcctgctgatgcgcgaaatcacccagccaatgcgtctgtttgatttcgtttttggcccgctggtgcttccgctccaggatatcgacgcccgcgaaggcgagctcttcctcaccccccaacagtggcagcagcagtgtcgccgcgccggattcagcaaagtggcgtggctaccgcaggagggtagcccgaccgccggtatgagcgaacatatcattctcgccacgctgcccggtcaggggatatcctcgtcatcagcatccgcgctggggcagacgttgccggataacgctgatgatctcgccgactggtccgattgcgcgggtcagccggaacggtttaacgcccgctggcaggaggcctggcggcggctctcagcgcggcacggcgacaattcccccgtggaaccgccccaggtcagccccccgcagtggctgggggaggtgcgcttaagctggcgaaacgccgccttttcccgcggcgagatgcgcgtggaagcccgtcatcctgatggcgagtggctgccgctggctcccgccgcgcctgttcctgcgccgcagacgcattatcaannnnnnnnnngcgctggacgcccttcagcgccgccagcgatggccgcccactggcatttcgcttcagcgccggtacgcttgcgcacgaaaatgagctggcgcaatgcggtatccttcacgatccgcaggccgcttcggtgctcatga

SEQ ID NO: 253734 - DNA, 2727 bp, Klebsiella pneumoniae
  misc_feature (2703)..(2712): n is a, c, g, or t
atggataacttgcgcttctcttctgcgccgacagcagattccattgatgcatcgatcgctgaacgctacccggactgcgaacctgtcgcggtgatcggctacgcctgccattttcctgaagcgcccgatggcgaaacgttctggcacaacttgctggaaggccgtgaatgcagcaggcgctttacccgcgaggcgctgctggccgccggtctggatgccgcggtgattgacgatcctcattacgtcaatatcggaacggttttagacaacgccgactgcttcgacgccgccctgtttggctactcgcggcaagaagccgaatctatcgatccgcagcagcggctgtttttgcaggcggtctggcatgcgctggagcatgccggctatgcccccggcgccgtcccccacaagaccggcgttttcgcctcttcccggatgagcacctatcccggccgcgaagccctgaacgtcacggaagtcgcgcaggtcaagggtctgcagtcgctgatgggtaatgataaggactatattgccacccgcgccgcgtataagctcaatctgcacggcccggcgctatcggtacagaccgcctgctccagttcgctggtcgcggtgcatctggcctgcgaaagcctgcgcgcgggggaatccgatatggcggtggccggcggcgtggcgctctctttcccccagcaggcgggctaccgctaccagcccgggatgattttctctcccgatggccactgtcgcccttttgacgcctcggcagaaggcacctgggccggcaacggtctcggctgcgtggtactgcgccgcctgagagatgcgctgctgtcagaggatccgattattgccgtgatcctctccagcgcggtcaacaacgacggtagccgaaaagtgggttataccgcgccgtcggtggcaggacagcaagcggtcatcgaagaggcgttaatgctggcggcgatcgatgacagacagattggctacattgaaacccacggtaccggcacgccgctgggagacgcgattgaaattgaagcgctgcgcaacgtttatgcgccccgcccgccgcatcagcgctgcgcgctcggttcggtgaaaagcaatgttggccatctggatacggcggccgggattgccgggctgctgaaaaccatcctcgcggtcaaccgcggacaaattccaccgatgctaaattttgccacgccaaacccggcgctcaagctcgacgaaagcccgttcaccgtgccggtgacggcccagacgtggcaggacgaaatacgctacgcgggcgtctcctcctttggcattggcggcacaaactgccacatgatcgtcgcctcgctgcccgatgagctcaaattaccgttgcctggtgcggatgacggtagcaggagcaccgcgctgctgctcagcgccgccagcgacaccgcgttgcggcagctggctacggactatgctcgggcgctgagggaaaacgcggatgccagtaatctggccttcacggctttgcgcgcccgccgtctcgatctcccctttcgtctggcgacggcattaaatgatgataccgccgctgcccttagcgcctgggctggagaacaggccggggcgccggtttatagcggccacggcgtcagcggtaagcaggtgtggctgtttaccgggcagggctcgcactggcggaccatgggccacgccatgtgccagcgttcgaaggtgtttgccgacacgcttgaacgctgtttttccgcctgtcgtgaaatgctcacgccctccctgcgcgacgcgatgtttaatcccgactcggcgcagctggaggagatgacctgggcgcagccggccatcgttgcctttgaaatcgccatggcggcgcactggcgcgccgagggattgcagctggattacgccatcggtcactcggtgggcgaatttgccgccgccgtggtctgcggacactatacgattgaacaggttatgccgctggtttgccgccgcggggcgctgatgcagctgtgcgcaaacggcgcgatggtggcggtgttcgcgcaagaagaggcgctgatgccgctggcccgccagtttgagctggatctggcggccaacaacggcacccggcatacggtcttttccgggccggaagcccgtattgcggaattttgcgcagcgctttcgcagcgtgatatcagctatcgtcgcctgagcgtttccggcgcggcgcactccgccttactggagccgatactcgatcgttttcaggacgcctgcgccgggctgcacgcagagcccgggcagctacagcttatttccaccctcaccgccggggtcatagatgcgtcgacgctcaatcaggcggattactggcgccgccatatgcgccagccggtgcgctttatccagagtattcaggcggcgcacaagctcggcgcccgcgtttttgtagagatgggacccgatgcccagctgattgcctccggacagcgcgaataccgggataacgcttactggatagccagcgcccgccgtaaccaggaggcgagcgctgtcctgaatcaggcgctgctccagctgtacgccgctggcgtcaccctgccatgggcagacttactggcgggcaatgggcaacgtatctctgcgccacgctatccgttcgcgaccgagcgttactggaaagagaacgtttccaacgtctgcgagcctgannnnnnnnnngtccgccggcgctga

SEQ ID NO: 253735 - DNA, 1323 bp, Klebsiella pneumoniae
gtgacgcccaccaaactcgctgccgatggcgtcccacatcaatttgaggatcttgatacgctcgacgtgatccatgccgttcgatccgcgcacgtatttcgccagatattcgttgatctgcggattgttgagatcgcgggcgctggacggcagatagatcaggccgctggtgacgttgcgttcaataatgtttttgattttggcgtaggccatcggcgccatcacgcgataggtttgcagcgcggcgtgatccggcagatacgcgccgttaacccacggcgtggcttcggcgcacatcgagtcgctcagcgcccagaacatattgcgccaggctaccacttcgccgagatccgcctgtacgccgcggaactccagggtgccggtgcactccagcgagcgcttgagcagggcggtgataaagtcgagcttcacggccagacgcacgcaggcctgcagcggatacatgcgggcgaaaccgccttccatcgtccagcggcggcagcgatcgaagtcgcggtagatcagcacgttttcccatgggatcagcacattatccatcaccaggatcgcatcattttcgtcgaagcggctggagagcggatagtcgtacggcgatccggttgctccggcgaccagttcataggaggcgcgggagataagcttaacgccttcggcatccatcggcgcgacaaacatcagcgcgaagtccgggttttcgcccatcacctgcgccgagccgaagccaatcatattgtagtgggtcagcgccgagttggtggccaccactttcgcgccgctgacgatgatcccggcatcggtctctttctccagcttgatatagacgtctttcacttcgtcggctggcttatggcggtcgatcggcgggttgacgatggcgtggttaaagtagaggccggtttcctggatgcgggtgtaccagttacgggcgttctgttcaaactgaccataaaacgccgggtttgcgccgagcgcgcagccgaatgcggctttgtagtccggggtacggcccatccagccgtagctcaggcgcgaccattcagcgatggcgtcgcgctgctggcgcagatcgtcggcgcttttcgcgacgcggaagaacttgtgggtatagccgccgctgccggtatcggtgccccagcacagggtatcctgcagctcgggtttatgcagcgcatcgtacatctgggcgacggaggcggcggcgttgcggaacgccgggtggatggtcacgtccttaacgcgttcgccgtagatatagatttcgcggccgtcctgcaggctcttcaggtactcttcgccagttaa

SEQ ID NO: 253736 - DNA, 891 bp, Klebsiella pneumoniae
atgtgccagagtcctgttgccaatatcgatattaataaagagtacgatgagagtctgggaacggaggaggtacattaccaatcctttgcccggatggcggagttttttggccgcgatatgcaggcgcaccgtcacgaccagtattttcagatgcactttctcgataccgggcagattgagctgcagctcgacgatcatcgctattcggtgcaggcgccgctgtttgtcctgacgccgccctcggtgccgcacgcttttatcaccgagtccgatagcgacggtcatgtgctgacggtgcgcgaggatctggtctggccgctgctggaggtgctctatcccggcacgcgggaggctttcggtctgccgggcatctgcctgtcgctggccgataagcccgaggagttggcggcgctggcgcattactggcggctgattgaacgggaatcgacgtcgcagctgccggggcgggaacataccctgacgctgctggcgcaggcggtgttcaccctgctgctgcgcaacgcgaaacttgacgatcatgcggccagcgggatacgcggcgagctcaagctgttccagcggtttaaccagttgatcgatagccactaccaccagcactggacggtgccggattacgccagcgagctgcatctgaccgaatcaaggctaaccgatatctgccgccgcttcgccaaccggccgcccaagcggctgattttcgacaggcagctgcgcgaggccaaacggctgctgctattttccgacaacgcggtaagcgaaatagcctggcagctgggctttaaagatccggcctattttgcccgcttttttaaccgcttagtcggctgctcgccgagtgcctatcgggcgcagaaagtaccggtgtcgtaa

SEQ ID NO: 253737 - DNA, 192 bp, Klebsiella pneumoniae
atggcaacgttctggcggcaaaccgatagcgaatgtggctccctcttctaccaacaccacgtcgttctggcggtaaaccaggttctgacggatggcggggatctggatatgaatttgcgtttcgtgaccgagctgttcgacgacctggacctcgccttcaagggttacatcggcgatatcgctgggcagtaa

SEQ ID NO: 253738 - DNA, 516 bp, Klebsiella pneumoniae
gtgatagagctccagcggtttcccaacctgcgccacacggccggcgtcgaggaccacgatcttgtcggcgagggtcatcgcttccacctgatcgtgggtgacatagatcatggtgcggcccagtcgcttatgcagacgggagatttcgatacgcatctggacgcgcagggcggcatcgaggttggaaagcggctcatccagcaggaaaacgcttggctctgccaccagcgtacgaccaatcgccacgcgctggcgctgaccgccggagagggctttcggtttacgctccagcagatgggccagctgcagcacttccgcaacctgagtcacccgctggttaatcagatcttttttcgcgccggccagcttcaggccaaacgacatattttccgcaacggaaaggtggggatagagtgcataagactggaataccatcccaacgccgcgttctgccggtgggatctcgttcatgcgggtgtcaccgataaacaggtccccgctggtaatagtttctaa

SEQ ID NO: 253739 - DNA, 1191 bp, Klebsiella pneumoniae
atgaaaatcaaaactggcgctcgcatcctcgcgctgtcggcactgaccacgatgatgttttccgcctctgccctcgcaaaaattgaagaaggtaagctggttatctggattaacggcgacaaaggctacaacggcctcgctgaagtgggtaaaaagtttgaaaaagacaccggcatcaaagtctccgtagaacatccggacaagctggaagagaagttcccgcaggttgccgcgaccggcgacggccctgacatcattttctgggctcacgaccgcttcggcggctacgcacagtccggtctgctggcggaaatcaccccggataaagctttccaggacaaactctatccgttcacctgggatgcggttcgctacaacggcaagctgattgcctacccggttgccgtcgaagcgctgtcgctgatctataacaaagacctggtagcgaacccgccgaagacctgggaagagatcccggcgctggataaagaactgaaagcgaaaggtaagagcgcgctgatgttcaacctgcaggaaccgtacttcacctggccgctgattgctgccgacggcggttacgcgttcaagtttgaaaacggtaagtacgacgtgaaagacgtgggcgtagatagcgctggcgcgaaagcgggcctgaccttcctggtcgacctgatcaagaacaaacatatgaacgccgacaccgactactccatcgcggaagcggccttcaacaaaggcgaaactgcgatgaccatcaacggtccgtgggcgtggtctaacatcgataagagcaaggttaactacggcgttaccctgctgccaacctttaaaggtaatgcgtccaagccgttcgttggcgtactcagcgccggtattaacgccgccagcccgaacaaagaactggcgaaagagttcctcgaaaactatctgatgaccgaccagggtctggatgaagttaacaaggacaaaccgctgggcgcggttgcgctgaaatccttccaggaaaaactggaaaaagatccgcgtatcgccgccaccatggctaacgcccagaaaggtgaaatcatgccgaacatcccgcagatgtccgccttctggtatgccgttcgtaccgcagttatcaacgccgctagcggtcgccagaccgtcgatgccgccctgaaagacgcgcaggctcgtatcaccaagtaa

SEQ ID NO: 253740 - DNA, 1545 bp, Klebsiella pneumoniae
atggatgtcgtgaaaaagaaacactggtggcaaagtccgcagctcacatggtctgtgatcggcttgctgtgcctgctggtgggttaccttgttgttttgatgtacgcccagggggagtacctgtttgccatcatgacgctgattttaagctcggttggcctgtatattttttccaatcgcaaggcctatgcctggcgctatgtttacccgggtctcgccgggatggggctgttcgtcctgttcccgctgatctgcactatcgctatcgctttcaccaactacagcagtactaaccagcttacctttgaacgcgcccaacaggtgctgatggaccgttccttccaggcgggtaaatcctacaacttcgcgctttatccggcgggagatgagtggaagctggcgctgaccgatggcgagagcggcaaaaactatctttccgacgcttttaaattcggcggcgaacagaagctggcgttaaaagaggctgatgccctgccggaaggcgaacgcgccaccctgcgcgtgattacgcaaaaccgcaccgccctgaaccagctgaccgccgtcctgccggatgagagcaaagtcattatgagctccctgcgtcagttctccggtacccagccgctgtacgcgctggccaatgacggtacgctgaccaacaaccagagcggcgtgaaatatcggccgaacgccgaggtcggtttctatcaggcgattaacgccgacggcagctggggcagcgaaaagctcagcccgggctacaccgtgaccatcggctgggataacttcacccgcgtgttccaggatgaaggtatccagaaaccgttcttcgcgattttcgtctggacggtggtcttctctgttctgaccgtgattctcaccgttgcggtcggcatggtgctcgcctgtctcgtccagtgggaagccctgaaaggcaaagcgatttatcgcgtactgctgattctgccttatgccgtaccgtcgtttatctcaattctgatcttcaaagggctgttcaaccagagctttggtgagatcaacatgatgctcagcgcgctgttcggcatcaagccggcctggtttagcgacccgactaccgcgcgcaccatgattatcatcgtcaacacctggctgggctatccgtacatgatgatcctgtgcatgggcctgctgaaagcgattcctgacgatttatatgaagcctcggcaatggatggcgccacgccgttccagaacttcttcaaaattacgctgccgctgctgatcaagccgctgacgccgctgatgatcgccagcttcgcctttaactttaacaacttcgtgctgattcagctgttgaccaacggcgggccggaccggctcggcaccaccacgccggcgggctacaccgaccttttggtgagctatacctatcgcatcgcctttgaaggcggcggcgggcaggacttcggcctcgcggcggctatcgccacgctgatcttcctgctggtaggcgccctggcgattgttaacctgaaagccacacgtatgaagttcgattaa

SEQ ID NO: 253741 - DNA, 891 bp, Klebsiella pneumoniae
atggctatggttcaacccaaatctcagaagctgcgtttactgacaacgcacctcctgctgctgatttttatcgcggcgattatgttcccgctgctgatggtcatcgctatctcgctgcgcgaagggaacttcgccaccggtagcctgattcccgaaagtatctcctgggagcactggcggctggcgttaggcttcagcgtcgaacacgctgacggccgcgtcacgccgccccccttcccggttctcctgtggctgtggaactccatcaaggtggccggcattaccgccattggcatcgtcgcgctctctacaacctgcgcttacgcttttgcccgtatgcgcttcccgggtaaagccacgctgcttaaaggaatgctgattttccagatgttccccgcggttctgtcgctggtcgcgctgtatgccctgtttgaccgtctcggccagtacgtaccgttcgttggactgaatacccacggcggcgtgatcttcgcctatatgggcggtatcgcgctgcacgtctggacaatcaaaggctacttcgaaaccatcgacggctcgctggaagaagcggcggcgctggacggcgcgacgccatggcaggctttccgcctggtgctgctcccgctatcggtaccgattctggcggtggtgtttattctgtcgttcatcgccgcgattaccgaagtgccggtggcctctctgctgctgcgcgatgtgaacagctatacccttgcggtcggaatgcaacagtatctcaacccgcagaactatctgtggggcgactttgccgccgcggcggtgctctccgccattccgattaccgtagtgttcctgctggcccagcgctggttggttaatggcctgaccgcaggcggagtgaaaggttaa

SEQ ID NO: 253742 - DNA, 1476 bp, Klebsiella pneumoniae
atgaatacccaatataattcaagctatatcttttcgattacgttagtcgccacgttaggaggactattatttggctacgataccgcagtcatttccggtacggtagaatccttaaacactgtttttgtggctccgcaaaacctgagtgaatctgccgccaactcattgctgggcttctgcgttgccagcgccttgattggctgcatcattggaggagcgcttggcggctattgtagtaaccgttttggccgccgggattcgctaaaaattgccgcgcttctgttttttatctccggtatcggttcggcatggcctgaattaggttttaccccgataaatcctgataacgcggtgccagtttatttagccggatatgtaccagaattcgttatttaccgcattattggaggcattggcgtaggtttagcatcaatgctttcaccgatgtatattgcggaactggcgccggcaagcatacgaggaaaactggtttcctttaaccagttcgcgattatttttgggcagctattggtttactgcgttaactatttcattgcaaaatcaggtgatgctagctggctgaataccaatggttggcgatatatgtttgcctcagaatgcattcccgcactgctgtttttggggctactgtataccgtaccggaaagcccgcgctggctgatggcgcagggcaaacaggaacaggcggagggtattctgcgcaaaattatgggcagcaagctcgccgtccaggcaatgcaggagatcaatctgtcactggaaaatggccgtaaaacgggcggtcgtctgctgatgtttggcgcaggcgtcattactatcggcgttatgctgtctatattccagcagtttgtcggcatcaacgtcgtgctctactacgctccggaagtcttcaaaacgctgggagccagcactgatgtcgccctgctgcagaccattatcgtgggcgttatcaacctgagtttcaccgttctggccatcatgacggttgataaatttggccgcaagccgctgcaaattattggcgcgctcgggatggcgcttggcatgttcagcctcggcaccgccttttatacgcaagcatccggtttggtggcgctgctgtcgatgctgctttacgtcgccgcatttgccatgtcctggggcccggtttgctgggtgctgctggcagaaatcttccctaacgcgattcgcggcaaagctctcgccattgcggttgccgcgcagtggctggcgaactactttgtctcctggaccttcccgatgatggataaaaactcctggctggttgcccattttcacaacggtttttcctactggatttacggttgtatgggaattctggcggcgatgtttatgtggaaatttgtgccggaaacgaaaggcaagacgctggaagaactcgaagagctgtgggcacccgcagaagagaaaacgcttcaggcctctatcagataa

SEQ ID NO: 253743 - DNA, 411 bp, Klebsiella pneumoniae
atgccgccggtttatcgtccgttggtgagttttattgcaaccgccatgcaaaccgttttgaatcttggcctgctgtgcctgggggtcattctgatcgtattcctcggtaaagagacgttgcatttggcgcacgtcctgtttacccctgaacctgtcagtaaatacaagctggtggaagggctggtggtctacttcctctatttcgagtttatcgcgctgattgtgaagtactttgaatcgggatttcacttcccgctacgctactttgtttatatcggcatcaccgccatcgtacgcctgattatcatcgatcatgagtcgcccatggcggtgctgatttactccgccgcgatcctgattctggtgattacgctctggctgtgtaactccaaccgactgaaacgcgagtaa

SEQ ID NO: 253744 - DNA, 1278 bp, Klebsiella pneumoniae
atgattaatgaacgcgcatccatttttataaaatggctaaaacaagaagtggctccggcattaggttgtaccgaacccgtcgctatttcttttactaccgcttacgctgcgaaacatttagatacggcctgtcaaagtattaacggttttatttctgcgaatctgtacaaaaacgcgacgggcgtaactattccaggaacatccgttagcggtgtcgcgcttgccgccgccattggcgcttttggcggcgatgccgataagggtttaaaaacgctggaggggattaaccagcagcatgtcgaattagcgcaaaagctaatcgccgatggccaggttaatattcgcgtggaagatactcccgattttatccatctggatctgaccctgaccggtggcgaaaagagctgccgcgtggtagttaaaggcacgcataccaatatcgttgaactttatattaatggcgaagcgcaggctttggctaataaacagaatacggtaacgcagcaggaagcgttagaaaccttttcgcttgtcgaagccttcaattttataagcgaagtcgattttgccgacatcgaatttattctcgaagccgcccgcctcaattcggcgctggcaaatgaaggcaagagcaagaaatatggcttaaacatcaatggtaccttctctgatgcagtaaaaaagggtctgctcagcaacgacctgctcagtaaagtcatcatcaataccgtcgccgcatccgacgcgcggatgggcggcgctcccgtcgtcgccatgtcaaactttggttccggtaaccagggtatcgccgctaccatgccggtagtgacggtcgcggagcatcttaatgccgatcaagagacgctcgcacgggcgctcgcgctctcccacctgaccgcgatatcgatccactcccgctatacgcgtctgtccgcgctatgcgcggcgtctacggcagcaatgggagcagctgccgggatggcgtggctatttactcgcgatatggaaaccattaacaccgcgattattaatatggtcagtgatattaccggtatgatttgtgacggcgcttctaatagctgcgcgatgaaagtttcatccgtcgtgtccagcgcatttaaggctgtattgatggccatgcaaaatagctgcgcaagctctaatgatgggatcgtttgcgctgacgttgagcaaacgattaataatctctgtcgtctggttgttaagcccatggcctataccgacaaagaaattatcaacatcatggttgctaaataa

SEQ ID NO: 253745 - DNA, 738 bp, Klebsiella pneumoniae
atgaacaaaaaagttatcctacggggcgccagcgccattcttcccttgtgtatcggcgactttcccttttcatttatcgtcggcgcgctaagcgtgagcgccggaatgagcgtctggcaaagtacggtctggtccaccattgttattgcgggttcagcacaaatgctggcgttgaatatgctcaaaaccggggcgagcctcggggtaattatattcaccacgctgattattaatctccgtcatatactttacagcgcatcaatttccagtaccgtacgcgaggcgtccttttttaaaaaatgctttatggcctatgctctgaccgatgaggtgtacgccacgacggtgaaagagatggaggagaataaaaaggataaatatctgttctactcttcagccatgctgacattttggttcgcctgggttttagccgatttccttggcgctctggttggcgcctcatttccacatattgaaaaatacggtctggacttcgcgatggtcgccgcctttatcgccatcgtcgttccgcaaatcaagagccaggcctgtaccgtcgccgccattgtggctgccgtatccggcgtacttttggtcgtgctgccctattcgttaggcattgtcgtcgcatccgtattgggcgtaatggcgggcctgagcgtcgatctcgccgaagagcgtaaacaagcgcaggccgccgctaaactctctctcgaaggagcgctggaaaatgagtaa

SEQ ID NO: 253746 - DNA, 321 bp, Klebsiella pneumoniae; identical to SEQ ID NO: 175314

SEQ ID NO: 253747 - DNA, 378 bp, Klebsiella pneumoniae
atgattatttccaccgcgtccgcgcctgccgccatcggtccgtatgttcagggggtaaacctgggtaccatgacgatgacctcagggcagctcccggttaatgcgcaagatggcaccatgtctgacgacatcgctgtgcaaacgcgccagtcgctggaaaacgttaaggctatcgtggaagcggcgggcttgcaggtgaaaaatattgttaagacgatggttttcgtcaaggatctgaacgattttgccaccatcaacgcggtctatgaagcgttcttcgttgaacacaacgcggcgtttccagcccgctcctgcgttgaggtcgccagactgcctaaagatgcgggtattgaaatcgaggccatcgccgtcgcctga

SEQ ID NO: 253748 - DNA, 510 bp, Klebsiella pneumoniae; identical to SEQ ID NO: 175316

SEQ ID NO: 253749 - DNA, 456 bp, Klebsiella pneumoniae
atgcatacccttcgtgaaaccgccattcgcaacgtcgccagcggcgaaaacgtggtgatttaccagcccgccaacctctatgactgcacgctaggcgataacgtcttcgtcggccccttcgttgaaatccagggccatacccgcgttggcagcgacagcaaaattcagtcccatacctttatctgcgagtacgtgaccatcggcgaacgctgttttatcggccacggcgtaatgttcgctaacgatatgttccgcgatggcaagcccaacgccgaccgcgaaagctggggaagaatcgtcattggcaacgatgtgtctatcggcagcggcgcaaccattctggcggtcagcatttgcgatggcgtcgtgattggcgcgggcagcgtggtgacaaaatccattacagagaaaggcgtgtgggcaggaaacccggcaaaactgctgcggcggctataa

SEQ ID NO: 253750 - DNA, 1650 bp, Klebsiella pneumoniae
atgaaaaacatcaacccaacgcagacttctgcctggcaggcattacagaaacactttgatgaaatgaaagacgttaccatcgcggatctgttcgcgaaagatagcgaccgtttctctaaattctccgccacgttcgacgatctgatgctggtggatttttccaaaaaccgcatcaccgaagagacgctggccaaactgcaggatctggccaaagagaccttcctggctgacgccattaaatccatgttctccggcgagaagattaaccgcacggaagatcgcgcggtgctgcacgttgcgctgcgtaaccgcagcaatactccgattctggttgatggcaaagatgtgatgccggaagtgaacgccgtgcttgagaagatgaaaaccttctctgaagctattatctccggtagctggaaaggctacaccggtaaagcgattaccgacgtcgtgaacatcggtatcggcggctccgatcttggcccgttcatggtgaccgaagcgctgcgtccgtacaaaaatcacctgaatatgcactttgtttctaacgtcgatggtacccatatcgccgaagtgctgaaaacggtgaacccggaaaccacgctgttcctggtggcgtcgaaaacctttaccacccaggaaaccatgaccaacgcccacagcgcgcgcgactggttcctggcgaccgctggcgatgagaaacacgtagcgaaacacttcgccgcgctctccaccaacggtaaagcggtaggtgaattcggtattgataccgccaatatgtttgagttctgggactgggttggcggtcgttactctctgtggtctgctatcggcctgtccatcatcctgtccgtgggcttcgacaacttcgtcgagctgctctccggcgcgcacgcgatggacaaacacttctccaccacgccggctgagaaaaacctgccggtgctgctggcgctgatcggtatctggtacaacaacttcttcggcgctgaaaccgaagcgattctgccgtacgaccagtatatgcaccgctttgccgcctacttccagcagggcaacatggaatccaacggtaaatacgttgaccgtaacggcaacgccgtggattaccagacgggcccgatcatctggggcgagccgggcaccaacggtcagcacgcgttctatcagctgattcaccaggggaccaaaatggtgccgtgcgattttatcgctccggcgattacgcataacccgctgtctgaccaccatccgaagctgctgtctaacttctttgcgcagaccgaagcgctggcgtttggtaaatcccgcgaagtggttgagcaggaatatcgcgatcagggtaaagatcccgcgacgctggaacacgtggtgccgttcaaagtgtttgaaggcaaccgcccgactaactccatcctgctgcgtgaaatcacgccgttcagtctgggcgcgctgattgccctgtatgaacataagattttcacccagggcgtgattatgaacatcttcaccttcgaccagtggggcgttgagctgggcaaacagctggcgaaccgcatcctgccggagctgaaggatggttctgaagtcagcagccacgacagctccactaacggcctgattaaccgctataaatcctggcgcgcataa

SEQ ID NO: 253751 - DNA, 243 bp, Klebsiella pneumoniae
atgaaacgcccgactgcgaacgtttctggtgacaacccaggggattcagcccctgtggccggtgatgagcgtaaccagacgcttattcacctcggcgttgctccccctcacgtattttccccggactggctcctccaatacggttacctgggcaacgcacctcttctggcaattaccgacgtctttcactttgccagggggacgcgggacattatacccccctgcaataccctttcgctgtag

SEQ ID NO: 253752 - DNA, 1350 bp, Klebsiella pneumoniae
atgacagacttagttgtagccaaattcggcggtaccagcgttgccgactttgatgccatgaaccgcagcgtagacgtcgcgctgctggatgccaatacccgcgtggtggtgctttccgcctcggctggcgtgaccaacctgctggtcgccttagcggaagggctggaacctggcgaacgtttcgcaaagctcgatgccatgcggcaaatccagttcaatattctggagcgtctgcgttatccgaacgtgatacgcgatgaaattgaacgcctgctggaaaacatcaccaccctggcggaagccgcctccctggccagttcaagcgcgttaaccgacgaactggtcagccatggcgaactgatgtctactctgctgtttgtcgagatcctgcgcgagcgcggtatcgccgcccagtggttcgacgtgcgcaaggttatgcgcaccaacgatcgctttggccgcgcggaaccggatatcgccgccttatctgaactcaccgagcagcttctggctccgcgtctggcggaaggcctggtgatcacccagggctttattggcagcgaagcgaaaggccgtaccaccacgcttggccgcggcggcagcgactataccgccgcgctactcggcgaagcgctacacgctacccgcgtcgatatctggaccgatgttccgggtatctataccaccgacccgcgcgttgcgccggcggccaaacgcattgacgttatcgcctttgaagaagcggcggaaatggcgacctttggcgcgaaagtgctgcatccggccaccctgcttcccgccgtacgtagcgatattccggtattcgtcggctccagcaaagagccaaaagcgggcggcacgctggtgtgcaaaaatacggaaaatccgccgctgttccgcgcgctggcgctgcgccgcaagcagactctgctgaccctgcacagcctcaatatgctgcactcgcgcggttttctggccgaggtattcagcacgctggcgcgtcacagtatctccgttgatctgatcaccacttctgaagtgagcgtggcgctgaccatggataccaccggttcgacttcggccggcgacaccctgctcacccagtcgctgctgaccgaactgtcctcgctgtgccgcgttgaggttgaacaggacctggcgctggttgccatcattggtaacgaactgtcgaaagcgtgcggcgtcggtaaagaggtgtttggcgtgctggagccgtttaatattcgaatgatttgctacggcgcatccagccacaatctgtgcttcctggtaccgggtgcagatgccgagaaagtggtgcagaagctgcatcataatctgttcgagtaa

SEQ ID NO: 253753 - DNA, 816 bp, Klebsiella pneumoniae
atgacgtatcacggtgtgaacgccgccatgcgccataaggtgcagcggcagttaaacgacgtggagcggcgctacggcgtcagggtgctctacgcctgcgagtccggcagccggggctggggctttgcttcgccggacagcgattatgatgtgcggtttctctacgttcattcgctggagtggtatctgcggatggacgcgcagcgcgatgttatcgagctgcccatcgacgatgagctggacgtctgcggctgggagtggcgcaaagcgctgggtctgttgaaaggggcgaacccgacgctgatcgaatggctggattcaccggtggtgtatcggcaggatgatgcgacggttcaggcgcttaaaaaactcatcccgcattggttttctccggttcgcgcccgctggcattactactcgatggccaggaaaaattttcgcggctatctgcaaggcgaacaggtgcggctgaaaaagtacttttacgtattgcgcccgctgctggccgtccgctgggttgaggcgggaaaaggggcgccgccgatgcgctttgctgaactgctggcgggaagctgtctggaggcgggcctgcgtcaggaaatcgacgagctgctggcgcgcaaacagcgcgccggcgaggccgaatatggtccgcggcggccattactgcatgcgtttattcagtccgagctgctcagaggcgcgatccctcccgcgctgccggatagccggacagggaatatcagggagttggacagattactgatgaccacggtgatggggaacgctaaatcggaatctttgatacgcgtttga

SEQ ID NO: 253754 - DNA, 1128 bp, Klebsiella pneumoniae
atgacgaaaaaaattacggtacgtaaaggtcagcttggccttttatcccgccagggcgactactatcaggttctggaagcgggcgagcaccgcctgccgtggttcaacgttcctgacgtgctgatcgtaaaccgggacggtagcgaggtgccggaagcgctggcggagtatttacggcgctttcagcctgaatgggttgaacgctactgcctggcggtggatttgacggatatcgaaaccggggcgctgtatgccaacggtgtgctgcaggaaattttaccgccttcgacgcgccggctgtactggtccgccggtgacgagatgcggctgctacgtatcgatacccggcaggttgcggttccggctgacatcatgaatgcggtgctgcagccgcgacgtcacggggcggtaaaaggccgcgaagcgatcctcaccgtatcggtgccggcgtggcacgtcggggtgctgaaaatcgacggcgagacacaatcgctgctgcagcctggcctgagcgcgtactggaaggtcaatcacctggtggaagcggaagtggtcgatacccgcctgcaggtgctggaggttggcggccaggagattctgaccaaagacaaagtgaacctgcgtttaaatctggcggcgaactggcgctacagcgatgtgctgcaggcttttggacagctgacgaagccgctggaccatctatatcgcgagctgcagtttgcgctgcgtgaagccgtcggaacacgaacgctggatgcgctgctggaagataagaaaatcattgatgaggtggtaagcgcgcaggtcaccgagcgcatggcggcatttggtatcgacgtcgcgtcgctgggcgtgaaggatattgtgctgcccggcgacatgaaagccattttgtcgcagctggtggaggcggagaaatcggcgcaggcgaacgtgatccgccggcgtgaagagaccgcggcgacgcgctcgttgctcaacaccgcgaaggtgatggaaaacaatccggtggcgttgcgtttaaaagagctggaaacgctggaaagagtggcggagcgtatcgataaaatctcggtctttggcggtctggaccaggtgctgcatggcctggtgaatctaaaaggataa

SEQ ID NO: 253755 - DNA, 1581 bp, Klebsiella pneumoniae
atgaaaaagcggcgagtggtgattggcgtcctcggaacggtactggataaacgcggcaagcgagcgaaccgttttaaaaaatggcggcccaccgtggggctatgccagcaggccgattttcctgtcgacaggctggagcttctccaccagccgcgtgatgaaaatatggcgcaaaagctgattgacgatatcgcccagctttcgccgcataccgaagtccatccgcatacggttgaaatcaacgatccctgggattttgaagaggtctacgcggcgtttctcgacttcgccaaccgctatcgctttgataccgaaaacgaagagtatctggtgcatatcaccaccgggacccacgtggcgcagatctgctggttcctgctgaccgaagcgcgctaccttcccgccagcctgctgcagaccagccctgcgccgaaaggcgcagcggatgaagccgtcgccgccggtatttactcggtgatcgatctggacttaagccgctatgctgcgctcaccagccgctttcagcgcgagcagcagcagtccgtctccttcctgaaggcaggtatcgagacgcggaacgcgacgttcaacgcacttatcgatcgtattgagcgcgtggcgatccgatcgaccgatccgatcctgcttaccggcccaacgggcgccggtaaatccgtcctcgccaaacgtatttttcagcttcgtcagtcacggcatcgggtggcgggaaaattcatggcggtgaactgcgccacgctgcgcggcgataacgccatgtccacgctgtttggtcatgtcaaaggcgcgtttaccggcgcggtgacgcctcgcgccgggctattacgcgaagccgacggcggcgtactgtttctcgatgaaatagccgagctggggctggatgagcaggccatgctgctgaaggccatcgaagaaaaaacctttttcccgtttggctcggataaagaggtgcacagcgacttccagctgatcgccggcacgcatcgcgatatgcagcagtgggtggcggaggggcgctttcgcgaagatctttatgcgcgcatcaatatgtggcgctttgccctccccggcctggcgcagcggcgggaagatattgcgccgaacgtggagtatgaattacggcgactggccaacgagcggcagacgcagatccgcttcgataaagacgcccgcgaacgctatctggcctttgcctgttcgccgcaggcgcaatggcgcggcaattttcgcgagctcagctcgtccgtggcgcgcatggcgaccctggccgagcaggggcgcattacgctagccgttgcggaagaggagataatgctgctgaaagagagctggcagctcacgacatcttctcctgatattgcgctggaaatcgatctgttcgatcgccgccagctggaaacggtgctggaggtctgccaacgcagcgcttcgctctccgaagccggacgcgagctgttcgccgtctcccggcaaaaaaaggccaaccctaacgatgccgaccgcttgcgcaaatatttagcgcgcttcggactcagctgggagcttatccgcagcggaacatga

SEQ ID NO: 253756 - DNA, 273 bp, Klebsiella pneumoniae
atggcactcccccgcatcacgcaaaaagagatgaccgagcgcgaacagcgcgaactgaaaaccctgctcgaccgcgcgcgcatcgcccatggccgtccgctgaccaacgcggagaccaacagcgtgaaaaaagagtacatcgataaactgatgctccagcgcgaagccgaggctaagaaagcccgccagctcaagaaaaagcaggcttacaaaccggatgcggaggcctcgttttcctggtcggcaaatacgccaacgcgcggcagacgctaa

SEQ ID NO: 253757 - DNA, 873 bp, Klebsiella pneumoniae
atgctgcccgactcgtcaacccgactcaataaatacatcagcgaaagcggaatttgctcgcgccgtgaagccgatcgctttatcgaacaaggcaacgtttttatcaacggcaaacgcgccactattggcgaccaggttaaagctggcgacgtagtcaaggtcaatggccggttgattgagccgcgcgaagcggatgatttagtactgattgcgctaaataaaccggttggcatcgtcagcactaccgaagacggagagcgcgacaacatcgttgatttcgtaaaccacagcaaacgcgtattcccaatcggccgtctggacaaagactcgcaggggctcatctttctgaccaaccatggcgatctagtgaataaaatcctgcgcgccggtaacgaccatgaaaaagagtatctggtcaccgttgataagccggtgaccgatgagtttattcgcggaatgggtgcgggcgtaccgattctcggtacggtgacgaagaagtgtaaagtgaaaaaagaagcaccttttgtgtttcgcattaccctggttcaggggctgaatcgccagatccgccggatgtgcgaatattttggctatgaagtgacgaagcttgagcggacgcggatcatgaacgtcagcctgacggggatcccgctgggagagtggcgcgatctgaccgacgatgagctgatcgatctcttcaagctgattgagaactcgtcttcagaggcgaaaccgaaggcaaaggcgaagccgaaaacggccggcattaagcgcccggtagtcgcgatggaaaaaaccagcgagaagtcttcccgtccggcgtcgaacggcaaacgctttactgcgcctgggcgtaaaaagaaagggcgttag

SEQ ID NO: 253758 - DNA, 948 bp, Klebsiella pneumoniae
atggaaaacagcgacgatattcgtctgatcgtaaaaatcgcccagctctattatgagcaggatatgacccaggcgcagattgcccgcgagctggggatataccgcaccaccatcagccgtctgctgaagcgcggccgcgagcagggcatcgtcactatcgccatcaactatgactacaacgaaaatctgtggcttgagcagcagctgaaacaaaaatttggcctcaaggaggcggtggtggcggcctgcgactcgctgctggaggaggatcagctcaatcttatcggcctgcatggcgcacaattggtcgacaggctgctggagccgggcgatatcgtcggtttctcctgggggcgtgcggtacgcgcgctggtggagaatctgccgcaggccagccagtcccgtcaggttatctgcgtcccgattatcggcggcccctccggcaagctggagagccgctaccacgtgaatacgctgacctacggcgccgcggcgaagctgaaagcggaatcgcatctcgccgatttcccggcgctgctggataacaaattaattcgcaacggtattatgcaatcccagcactttaaaaccattgcatcttactgggataacctggacgtcgcgctggtggggatcggttcaccggctatccgcgacggcgccaactggcatgcgttttacggcagtgaagagagcgacgatctcaacgcccgccaggtcgccggtgatatctgctcgcgcttttacaatattgatggcgcgctggtagaaaccgccatgagcgagaaaacgctatctattgagatggcgaaactcaggcaggcgcgttattcggtaggtatcgccatgggcgaggaaaaatactccggtattcttggcgccttaaatggacactatattaactgtctggtgacgaatcgagaaaccgccgagtcactactgaagtaa

SEQ ID NO: 253759 - DNA, 408 bp, Klebsiella pneumoniae
atggttaacgtcatcttctgcgcccacggccagctggcctgcgccatgctcgactcggtgcgcatggtttacggcgatgtcaacgtcagcgccgtggagtttgtaccgggtgaaaacgcgggcgacatcgccggtaagcttgaaaagttggtaagtactcacaaagacgaagagtggcttattgccgtcgatttacagtgcggaagcccgtggaatgccgccgccgggctggcgatgcgcaacccgcagctccgggtcatcagcggcctgtcgctgccgctggctctggagctggtcgataatcagcaaacgatgaatgcagaagcgctgtgccaacacctggaacttatcgccagccagtgctgcgtcacctggcggcaaccggaaaccgttgaggaggatttctga

SEQ ID NO: 253760 - DNA, 495 bp, Klebsiella pneumoniae
atgaacattacgctcgcgcgcattgacgaccgtttgattcacggccaggtcaccaccgtttggtcaaaagtggccaacgcccagcgcattattatctgtaatgacgacgtgtataacgacgacgttcgccgcacgctgcttcgccaggccgcgccgccgggcatgaaggttaatgtggtgaatatcgagaaagccgtcgccgtttatcacaacccgcaatatcaggacgaaacggtcttttatttattcacaaacccgcaggatgtattaaccatggtgcagcagggggtgaaaatagccaccctaaatattggcggtatggcctggcgaccgggtaagaaacaattaaccaaagcggtatcattagacgcagcggatattaatacctttcagcagttagataagctgggggttaaacttgatttacgcgtcgtagcttcagatccgtcagttaatattctcgataaaatagcagagcagtccgttacagaataa

SEQ ID NO: 253761 - DNA, 798 bp, Klebsiella pneumoniae
atggaaataagtaccctacaaataatagccatatttattttttcctgtattgccgggatgggcagcgtgctggatgaattccagacgcaccgtccattaatcgcctgtaccgtgattggcttaattctcggcgatttaaaaaccggaattatgctcggcgggacgctggagctgatcgcgctcggctggatgaacgttggcgcggcgcagtctccggattcggcgttagccagcattatctccgccatcctggtgatcgtgggccagcaaagcatcgctaccggaatagcgattgcgctgccggtcgctgcagcaggtcaggtgctcaccgtgttcgcccgcaccattaccgtggtgttccagcacgcggcggataaggccgcggaagaggcacgcttcagaacaatcgatctgctgcacgtgtcggcgctgggcgttcaggcgctgcgcgtcgccattcccgcactcatcgtttctctgtttgtcagcgcggatatggtcagcaatatgctcaacgccattccggaattcgtcacccgcggtctgcaaatcgccggcggttttatcgtggtggtcggctacgccatggtgctgcgcatgatgggcgtgaagtatctgatgcctttcttctttctcggcttcctcgcgggcggctatctcgactttagtctgctggctttcggcggtgtgggggtcatcatcgcgctgatttatatccagctcaacccgcagtggcgtaaacctgaaccgcaggccgccgccccctcttccaccgcccttgaccagcttgacgactga

SEQ ID NO: 253762 - DNA, 1233 bp, Klebsiella pneumoniae
atgcaaacaacaacagccctgcgcctgtacggcaaacgcgatctgcgcctggaaacctttgcacttccggcgatgcaggatgatgaaattctcgcccgggtggtcaccgacagcctgtgcctctcttcgtggaaagaggcgaaccagggcgaggaccacaaaaaggtgcctgatgatgtggcgactaacccgatcatcatcggccatgagttctgcggagagatcatcgccgtcggcaaaaaatggcagcacaagtttcacgctggccagcgctatgtgattcaggccaatctgcagctaccggatcgcccggactgccccggttattccttcccgtggatcggcggcgaagccacccacgtggtgatccctgacgaggtgatggcgcaggattgcctgctcacctgggaaggcgatacctggtttgaaggttcgctggtggagccgctttcctgcgtaatcggcgcgttcaacgccaactatcatctgcaggaaggcagctataaccatgtgatgggcattcgcccgcaggggcgcaccctgatcctcggcggcaccggcccgatgggtctgctggctatcgactacgcgctgcatggcccgatcaacccagcgctgctggtggtcaccgacaccaataagccaaaactcagctatgcgcgccagcactatccctccgagccgcaaacgctgattcactatctggatgggcacgatgccagccgcgaaacgctgatggcgctctccggcggccacggttttgacgatatttttgtcttcgtccctaatgaccagctcatcactctggcatcctcgctgctggccccggacggctgcctgaactttttcgccggcccgcaggataagcagttcagcgcgccgatcaatttttacgatgtgcattacgccttcactcactacgtcggcacctccggcggcaataccgacgatatgcgcgccgccgtagcgctgatgcaggcaaaaaaagtccagactgcaaaggtggtgacccatattctggggctgaacgcggcgggcgaaaccaccctggatttaccggcggtgggcggcggtaagaagctggtttataccgggaaaaacttcccgctgacgccgctgggagacattcgcgacccgcagctagcggcgattatggaacgtcaccacggtatctggtcaaaagaggcggaagagtatctgctggcccacgcggaggatattgctcatgattaa

SEQ ID NO: 253763 - DNA, 810 bp, Klebsiella pneumoniae
atgattaatcgcgatacgcagctatgcatgtcgctggccggtcgcccgggcaacttcggtacccgctttcataactatctgtatgaaaaactcgggctgaattatatctataaagcctttactacccaggatattgccgcagcggtgaagggcgtccgcgcattgggcatccgcggctgcgcggtctcaatgccgtttaaagagagctgcatagcgtatcttgacgcgcttgccccttcggcaaaggcgattgattcggtcaacaccatcgtcaacgacgacggcaggctaaccgggttgaataccgactacatcgcggtgaaaagcctgattgacagccatcagctcgactcctctgccaaagtgatgatccagggcagcggcgggatgggcaaagcggtcatcgccgcctttcgcgatgtcggtttccgcgatgtgattatcgccgcccgccatcgcgatcgtggactggtgctggcaaagcagtacggttttcaatggcagccaaagccggaagggatcgcggcggatattctggttaacgtcacgccgctcggcatggcgggcggtgcggaaagcgaaaccctggcctttagcccgacgatggtggaacgggccgacgtggtatttgacgtggtcgctctgccgccggaaaccccgctcatcaaactggcgaagaagcgggacaaacacgttatcagcggcgcggaggtgattgccctgcaggcggtggagcagtttgcgctctacaccggcgtgcgtccggacgcggcgctggtcgctgaagccgcggcctttgccagaggataa

SEQ ID NO: 253764 - DNA, 567 bp, Klebsiella pneumoniae
gtgacgcaaacctgggatgattacaccgcgaaaaccgccgccgtcttcagcccaatgggcgttacggttaccggtattcacagcgtcgcggacccggtttcggcgattgagaacgcggagatagttatcgtcggcggcggcaatacctttcagctgctgaaagagtgtcgcgaccgcggcctgctggcgccgatggtggatgtagtgaagcgcggggcgctgtatatcggctggagcgctggcgctaaccttgcctgcccgacaattcgcaccaccaatgatatgccgattgtcgaccctaacggtttttctgcactggggctgtttccgctgcaaattaacccgcacttcaccaacgcgctgccggaaggccacaaaggggaaactcgcgaacagcggattcgcgagctgctggtggttgcgccagagttgacgattatcggcctgccggaaggcaactggatacaggtgacgcagggccacgccactctcggcggcccgaatccgacgctggttttcagagccggagaggaagcggtaaccctgaacgcaggccatcgtttctga

SEQ ID NO: 253765 - DNA, 1632 bp, Klebsiella pneumoniae
gtgttaactctgctacacctgttgtccgccgtcgctctactggtgtggggcacccatattgttcgtaccggcgtgatgcgcgtctacggcgctcgcctgagaagtgtactcagcagcagcgtggagaaaaaaccgctcgccttctgcgcggggatcggggttaccgcgctggtccagagcagcaacgccaccaccatgctggtcacctcttttgtcgcccaggatctggtggcgttagcccctgcgctggtgatggtgctgggcgctgacgttggtaccgcgctgatggcgagggtgctgaccttcgacctgtcctggctttcgccgctgctgatttttatcggcgtcattttcttccttggacgcaagcaaacgcgtgcgggccagctcgggcgcgtggggattggcctgggcttgattctgctggcgctggagctgatcgttcaggcagtgcatcccatcacccaggctaacggcgtgcaggtgattttcgcctcgttgaccggcgatattatgctggatgcgctgatcggcgcggtatttgccatcatcagctattcaagcctggcagcggtgctgctgaccgctacgttaaccgccaccggcgtgatttcgttcccggtggcgctgtgcctggtgattggcgccaacctcggatccgggctgctggcaatgctaaacaacagcggcgctaatgccgccgcgcgccgcgttgcgctcggcagcctgttgtttaagctggtgggtagtctgattatcctgccgtttgtccatctgttggcaaacgttatggatgagcttccgctgcaaaaatccgaactggttatctatttccacgtcttctacaacctgatccgctgtatcgccatggtgccgttcgccgggccgatggctaacctctgtaagcgactgattcgcgatgagccggagctggatgcacgactgaagccaaagcatcttgatacttcagcgctggacaccccggctctggcgctggctaacgccgcccgcgaaaccctgcgtatcggcgatgccatggagcagatgctggaaagcctgcataaagtgatgcacggtgaaccgcgtgaagagaaagagctgcggcggctggcggacgatatcaacgtactttacaccgcgattaagctctatctggcgcggatgccaaaagaggagctggccgatgaggaatcccgccgctgggcggaaattatcgaaatggcgctcaacctcgagcaggcttcggatatcgttgaacgaatgggcagcgaaatcgccgataaatcgctggccgcgcggcgcgcgttctccatggaggggttgaaagagctggatgcgctctacgatcagctgctcagcaatctacagctggcgatgtcggttttcttttccggcgacgtaccgagcgcccgccgcttgcgccgtagcaaacaccgttttcgcattatgaaccgtcgttactcgcatgctcacgttgatcgcctgcatcagcaaaacgtgcagagtatcgaaaccagtacgctgcacctggcgctgctgggcgatatgaagcgtctgaactcgctgttctgctcggtagcctatagcgtgatggagcagccggatgaggacgatgagcgcgatgattattaa

SEQ ID NO: 253766 - DNA, 3399 bp, Klebsiella pneumoniae
atggaatccctgtcggcggaaatcaactttacggcggcgaaactggcccgcgccagcgctgatgcctggaccgcgcgcacgccggaaaaaccacgctatgtggcaggcgttctcggcccgactaaccgcactgcgtccatttctcctgacgtcaatgacccggcctttcgcaacatcacctttgacgggctggtggaagcctatcgtgaatccaccaaagcgctggtggaaggcggggcggatctgattctgattgagacggtgttcgataccctcaacgccaaagcggcgatctttgcggtcaaagaggagtttgaagcgctgggggtcgatctgccgattatgatctccggcaccatcaccgacgcctccggtcgcacgctgtccggccagaccaccgaagccttttataactcgctgcgccacgccgatgcgctcactttcggcctcaactgcgctctggggccggacgaactgcgccagtacgtgcaggagctgtcgcgtatcgccgaatgctacgtcaccgcccacccgaacgccggtctgccgaacgcctttggtgaatacgatctggacgccgacacgatggcgacgcaaattcgcgaatgggcggaggccggcttcctgaatattgtcggcggctgctgcggcaccacgccggaacatatcgccgccatgagccgcgcggtggccggcctgccgccgcgccagctgccggagatccccgtcgcctgccgtctttccggccttgagccgctgaatatcggcgatgacagcctgtttgtgaacgtcggcgaacgcaccaacgttaccggctcggcgaaattcaaacgcctgattaaagaagaaaaatataacgaagcgctggatgtggcgcgccagcaggtggaaagcggcgcacagattatcgatatcaatatggatgaggggatgctcgacgccgaagcggcgatgacgcgtttcctcaacctgattgccggtgagccggatatcgcccgcgtgccgattatgatcgactcctccaaatgggaggttatcgaaaagggcctgaagtgtattcagggcaaaggcatcgttaactccatctcgatgaaagagggcgttgagccgtttatccagcatgcgaaaaaggtgcgccgctacggggccgccgtcgtggtgatggcctttgatgaagtgggtcaggccgatacccgcgaacgtaaaattgaaatttgccgccgggcgtacaccattcttaccgaagaggtgggcttcccgccggaagacatcatcttcgacccgaatattttcgccgtggcgaccggaattgaagagcacaacaactatgcccaggactttatcggcgcctgtgaagatatcaaacgcgaactgccgcacgcgctgatctccggcggcgtctctaacgtgtcgttctccttccgcggtaacgacccggtgcgcgaggcgattcacgcagtattcctctactacgccatccgtaacggcatggatatgggtatcgtcaacgctggacagctggcaatttacgacgaccttcccgccgagctgcgcgacgcggttgaagatgtgattctgaaccgccgcgatgatggcaccgaacgcctgctggatctggcggagaaatatcgcggcagcaaaactgacgataccgccaacgcccagcaggcggaatggcgcagctgggacgtcaaaaaacgcctcgagtactcgctggttaaaggcattaccgaatttattgagctcgataccgaagaagcccgacagcaggccgcgcgcccgatcgaggttatcgaaggaccgctgatggacggtatgaacgtggttggcgatctgttcggtgaagggaaaatgttcctgcctcaggtggtgaaatccgcccgcgtaatgaagcaggcggtggcctacctcgaaccctatattgaggccagcaaagagaaaggttccagcaacggcaagatggtcatcgccaccgtgaagggtgacgttcacgatatcggcaagaatattgtcggcgtcgtgctgcagtgtaataactatgaaatcgtcgatctgggcgtgatggtgcctgcggataaaatcctgaaaaccgcccgcgaggttaacgccgacctgattggcctctccgggctgattacgccgtcgctggatgagatggtcaacgtggcgaaggagatggagcgtcagggctttactattccgctgctgatcggcggcgcaaccacctcgaaagcgcatacggcagtgaaaatcgagcagaactacagcggcccgacggtctacgtgcagaacgcctcgcgcaccgtcggcgtggtcgccgccctgctgtccgatagccagcgcgatgattttgtcgcccgtacccgcaaagagtacgaaacggtgcgtattcagcacggacgtaaaaagccgcgcactccccccgtcacgctggaagccgcgcgcgataacgacctggcctttgactgggcaagctacaccccgccggtggctcatcgtctgggcgtgcatgaggtggaagccagtattgaaaccctgcgtaattatatcgactggacgccgttctttatgacctggtcgctggccggtaagtatccgcgcattctggaagatgaagtcgtgggcgaagaggcacagcgcctgtttaaagacgccaacgaactgctggataagctcagtgccgggaaggccctcaatccacgcggcgtcgtggggctgttcccggctaaccgcgtcggcgacgatattgaaatctatcgcgatgaaacccggactcatgtgctgacggtggggcatcatctgcgccagcagaccgagaaagtcggctttgccaactactgcctggcggattttgtcgcgccgaagctgtcggggaaggcggactatatcggtgcctttgcggtgaccggcggccttgaggaagacgcgctggccgacgcctgggaggcacagcacgatgactataacaagattatggtgaaggcgattgccgaccgtctggcggaagccttcgccgagtatctgcatgagcgggtgcgtaaggtctactggggctatgcggcgaacgaaaacctcagcaacgaggagctgatccgcgagaattaccagggaatacgcccggcgccgggctatcccgcctgtccggagcacaccgaaaaggcgaccatctgggaactgctggaggtggaaaaacgtactggcatgaagctgacggaatcctttgccatgtggcccggcgcgtcggtttccggctggtacttcagccatccggacagtaagtacttcgcggtagcgcaaattcagcgcgatcaggtggaggactatgcgttacgtaaggggatgagcgtggcggaagtggagcgctggctggcgccgaacctcggttacgatgccgactga

SEQ ID NO: 253767 - DNA, 240 bp, Klebsiella pneumoniae
gtgagcagcaaagttgagcaactgcatcagcagttaaaagaacgtattctggttctggatgggggcatgggcaccatgatccagagctatcgtctgagtgagcaggactttcgcggtgagcgctttgctgactggccgtgcgacctgaagggcaacaacgacctgctggttctcagcaacccggaagtgatccgcgagatccacgacgcctatttcgaggccggcgcggatatcatttaa

SEQ ID NO: 253768 - DNA, 828 bp, Klebsiella pneumoniae
atggcgacccccgctcccgcaaaacgcggcagaaaacctgccgcctccgccgccgctccggctggcgggcaagttcagtccctgacccgcggcctgaagctgctcgaatggattgctgaatctcacggcagcgtggcgctgaccgaactggcccagcaggccggcttgcctaattccaccacgcaccgcctgttaaccacgatgcagcagttgggttttgttcgtcaggtcggtgaactgggccactggtcagtgggtgcccatgctttcgtcgtcggcagcagcttcctgcaaagtcgtaacctgttggcgatcgtccatccgattttgcgtcaactgatggaagactccggcgaaacggttaacctcgcggtgctggacccgagcgatcatcaggcgatcattatcgatcaggtgcagtgtacccaactgatgcgtatgtcggcgccgattggcggtaagctgccgatgcacgcttccggcgccggtaaggcgtttttgtcgcagttgagtgaagatcaggtcaccggcctgctgcaccgtcaaggtctgcacgcttacacccacgctacgctggtatcgccggtgcatctgaaagaggacctggcccagacgcgtaagcgcggctattcgtttgatgacgaagaacacgcgctaggactgcgctgcgtagcctcatgcatttatgatgaacatcgtgagccgttcgccgctatctctatttccgggcccatttcccgcattaccgatgaccgcgtgaccgagttcggcgccatggtgatcaaagcggcgaaagaagtgacgctggcgtatggcggagtgcgctaa

SEQ ID NO: 253769 - DNA, 414 bp, Klebsiella pneumoniae
atgagcgatctgaaatcctactggcaggataaatacccttctgctttttgctggtctttcggcgattcagcggagctggccgacgagctggcggccctggtcatcgcggggaagaagcgcggcacctgcggttcgcttgccggctatcagcaggagcagccgcccgtgacgccgggggcatatcacattgtgctggacggccagggcaaagccgtctgcgtgatacgcaccctgatgctcaggctgatccggtttaatgaaatgagccctgagctcgccgcgctggagggcgaaggtgatttgagcctcgcttactggcaatcggcgcatcaggcattctttgaacgcgaaggcacctgggcgccggatatggagctggtgtacgaagaatttgcggttatagaggccgcctga

SEQ ID NO: 253770 - DNA, 1743 bp, Klebsiella pneumoniae
atgacacgtggcctggaattattgattgcgcaaactattttgcagggtttcgacgcccagtacggtcgttttcttgaagtcacttccggcgcccagcagcgctttgaacaggccgactggcatgccgtccagcaggcgatgaagcagcgcatccatctctacgatcaccatgtcggcctggtcgtcgagcagctgcgctgcattaccgatggcaaaaataccgatagcgactttttgctgcgggtaaaagaacactatacccgcctgctgccggattaccctcgcttcgaaattgcggagagctttttcaattccgtctattgtcggttgtttgaccaccgctcgctgactcccgagcggctttttattttcagctcgcagcccgagcggcgcctgcgctctataccgcggccgctggcgaaagatttcttccccgagcgcggctgggacacgttattacgcaaagtgttatccgatcttcctctccgcctgccgtggcaaaacagagcgcgcgatatcgggtatatcaccgtttgcctgcaggaagcgcttggcggcgagctgctctcccggtcgtatctacaggtgacgaatgaactcttttaccgcaataaggcagcctggctggtaggcaaattggttacgccgatggccacgctgccttttcttctgccaatccatcgtaccgatgaaggcgaactgtttgtcgatgcttgcctgacgacgcatgccgaagccagtatcgtttttggcttcgcccgctcctattttatggtttacgcgccgcagcccggcgcgctggtcgagtggctgcgcgagattctgccgggtaaaaccaccgccgaactgtacatggcgattggctgccagaagcatgcgaaaacggaaagctatcgggaatacctgcactatctttcccgcagcaatgaacaatttgttgaagcgccggggatccgcgggatggtcatgctggtgtttaccttgccgggctttgatcgggtatttaaggtcatcaaggaccgcttcgcgccgcagaaagagatgactgccgctcacgtgcgcgcctgttaccagctggtcaaagagcatgaccgcgtgggacggatggccgacacccaggagtttgagaacttcgtgctggagaaacggcaaattgcgcccgagctgatggccctgttacaaaccgaagccggtgggaaaattaccgacctcggcgatcggattgcgatcagccatctgtatatcgagcggcggatggtgccgctgaatatctggctggagcaggttgacgggcaggcgctgcgcgatgcagtcgaggagtacgggaacgccattcgtcagctggctgccgccaacattttcccgggcgatatgctatttaagaattttggcgttacgcgtcacggccgggtggtgttctacgattacgatgaaatttgctatatgacggaggtgaatttccgcgagatcccgccagcgcgctatccggaagatgagcttgccagcgagccctggtacagcgtctcgccgggcgatgtttttccggaggagtttcgccactggttgtgcgccgacccgcgtatcgggccgctatttgaagagatgcacgccgacctgctgcgcgccgactactggcgggagctgcaaaaccgtattcgcaacggccacgtggaagacgtctacgcctatcgtcgccgtcagcgcttttgcgtgcgttatggcaacctgcaacaggcagggtaa

SEQ ID NO: 253771 - DNA, 1320 bp, Klebsiella pneumoniae
atggagcatctgcacatgaaaacccgtacccaacaaatcgaagaattaaacaaagagtggaccaacccgcgctgggaaggcattactcgcccatacagcgccgaagacgtggtgaagctacgcggctccgttaacccggaatgtacgctggcgcagctgggcgcggcaaagatgtggcgactgctgcacggcgaagcgaaaaaaggctacgtcaacagcctgggcgcgctgaccgggggccaggcattacagcaggcgaaagcgggcattgaagcgatttacctttctggctggcaggtcgcggcggacgccaacctggcctccagcatgtatccggatcaatcgctctatccggctaactcagtaccggccgtggtcgatcggatcaataacaccttccgtcgcgcggatcagatccagtggtctgcgggtattgaaccgaacgatccgcgttataccgattatttcctgccgatcgtcgccgatgcggaagcgggatttggcggcgtgcttaatgcgtttgagctgatgaaatcgatgattgaggccggtgcagcggccgtacacttcgaagatcagctggcatcggtgaagaaatgcggccatatgggcggcaaagtgctggttcccacgcaagaagcgattcagaaactggttgccgcgcgtctggcggcagacgtaatgggcgtgccaacgctggtgattgcccgcactgacgccgatgcggcggatttaattacctcagactgcgatccttacgatcgtcagttcattaccggcgaccgtaccagcgaaggtttcttccgcacccatgccggtatcgaacaggcgatcagccgcgggctggcctacgcgccctatgccgacctggtgtggtgtgaaacctccaccccggaccttgagctggcgaagcgctttgccgatgcgatccatgcgaaatatccgggcaaactgctggcctataactgctcaccgtcgtttaactggcagaaaaagctggatgataaaaccattgccagcttccagcagcagctggcggatatgggctacaaatatcagttcatcaccctggccggtattcacagcatgtggttcaacatgttcgatctggctcacgcttacgcccagggcgaggggatgaagcactacgttgagaaggttcagcagccggaattcgcggcggcgaaagatggctatacctttgtctcccatcagcaggaggtcgggactggctacttcgataaggtcaccaccattatccagggcggaacctcatcagtaacggcgttaaccggctctacagaagaagatcagttctga

SEQ ID NO: 253772 - DNA, 1602 bp, Klebsiella pneumoniae
atgacgcagcaggcgacaattactgacgaactggcttttagccagccatatggcgaccaggagaagcaaatcttaacgcctgaggcagtcgaatttttgactgaactggtgagccgctttacgcctgagcgcaataaactcctggcggcgcgtctccagcagcagcaggaaattgatgacggtaagctacctgattttatttcggaaacagcttccattcgtaatggtgattggaaaattcgcggcatccctgtggatttgctggatcgccgggtggaaatcaccggtccggtagagcgtaagatggtgatcaatgcgctgaatgcgaacgtaaaagtctttatggcggatttcgaagactcactggcgcctgaatggagcaaagtcattgaggggcaaattaacctgcgcgatgcggttaacggcaccatcagctataccaatgaagctggcaaaatctatcagcttaaaccgaacccggcgctgctgatctgtcgcgtgcgcggcctgcatctgccggaaaaacacgtgacatggcgcagggaagccattcccggcagcctgttcgactttgctctttatttcttccataactacaaagcgttactggaaaaaggctgcgggccctatttctatctgccgaaaacccaggcctggcaggaagccgcgtggtggagtgaagtctttagctttacggaagaccgttttgagctgccgcgcggcactatcaaagccacgctgctgattgaaacgctgcctgccgtattccagatggacgaaatcctgcatgccctgcgcgaccatattgtgggtctgaactgcgggcgctgggactatatcttcagctatatcaaaacgctgaagaatcacccggaccgcgttctgccggatcgtcaggtggtgacgatggacaagccattcctcagtgcctactcacgattgttaattaaaacctgccataagcgcggcgcatttgcgatgggcggcatggcggcctttattccgagcaaagatgctgagcggaacaatcaggtgctgaacaaggtaaaagcggacaaatcgctggaggcgaataacggccatgatggcacatggattgcgcatcccggtctggctgacaccgcgatggccgtctttaatggcgtgctcggtgagaacaaaaatcagctatttgtcacccgtgaagacgatgcgccaattaccgctgaacagctgctggccccctgcgagggcgaacgaaccgaagagggcatgcgcgccaacattcgcgtggcggtgcagtacattgaggcgtggatttccggcaacggctgcgtaccgatttatggcctcatggaggatgcggcaacggccgagatctcacgtacctcaatctggcagtggatccatcacgaaaaaacgctcagcagcggtcaaccggtaactaaagcgctgttccgccagtggctggccgaagagatgcgggtgattcaggacgaactgggtgagcaccgctacagcagcgggcgctttgacgaggccgcgcgcctgatggaacagatcaccacttccgatgagctcattgacttcctgactttgccgggttaccgcctgctggcctga

SEQ ID NO: 253773 - DNA, 387 bp, Klebsiella pneumoniae
atgaaattgaccattattcgtttacagcacttcagcgatcaggatcgtatcgacttagggaaaatctggccgtcgcaggatctcgcggcactggcgatagatgagagccatcgtatttacgccgcccgcttcaacgagcgtctgctgggagcggtacgtattacgctgaatggcgttgagggcgaactcagcgcgctgtgcgtgcgtgaagtgacccgccgtcgcggcgtcgggcaatatttagtggaagaagcgctaaaggataatccagaaatcaccagttggcggattgcggatgccggcgtggaagaccgcggcgtgatggcggcgtttatgcaggcgctgggttttagcgcgcaaacgggcggttgggtaaaaaatcagtaa

SEQ ID NO: 253774 - DNA, 1110 bp, Klebsiella pneumoniae
atgaaaaggaacgcgaaaacggttatcgcggggttagtcgcactggcgatgtcccaggcggcttttgccaaagatattaaggtcgccgttgttggcgcgatgtctggcccggtagcccagtggggcgatatggaatttaacggcgcgcgccaggcaatcaaagacattaacgcgcagggcggcattaagggcgataagctggtcggcgtagagtacgatgacgcctgtgacccgaaacaggccgttgcggtggcgaacaaaatcgtcaatgacggcatccagtatgttatcggccatctctgctcttcttccactcagcccgcatccgatatctacgaagatgaaggtattctgatgatctccccgggagcgactaacccggagctgactcagcgcggttatcagtacatcatgcgtactgcgggtctggactcctcgcaggggccgaccgccgctaaatacatcatggaaaccgtcaaaccgcagcgtattgctatcattcatgataagcagcagtacggtgaaggcttagcgcgctctgttcaggagagcctgaaaaaaggcggcgcgaatatcgtcttcttcgacggcatcaccgctggcgaaaaagacttctccgcgctgctggcgcgcctgaaaaaagagaatatcgacttcgtttactacggcggctactacccggaaatgggtcagatgctgcgccaggcgcgttccgtagggctgaaaaccgtgtttatgggcccggaaggcgtgggtaacgcgtcgctgtccaatatcgcgggcgatgcggcggaaggcatgctggtcacgatgccaaaacgctatgaccaggacccggctaacagcgctatcgttgacgcgctcaaagcggagaagaaggacccgagcggtccgtatgtctggatcacctacgccgccgtacagtcactggcgcaggcgatggaccgggccggaagccaggagccgctggatttaatcaaagatctgaaagctcacggcgcgaaaaccgtgattgggccgctgaattgggacgaaaaaggcgatttgaagggatttgagtttggtgtcttccagtggcacgcggatgggtcatccaccctcgcgaaataa

SEQ ID NO: 253775 - DNA, 927 bp, Klebsiella pneumoniae
atgtccgagcagtttctctattttttgcagcagatgtttaacggcgtcacgctgggaagcacctatgcgctgattgccatcggctataccatggtgtacggcattatcggcatgatcaacttcgcccacggcgaggtgtatatgattggcagctacgtctccttcatgatcattgccgccctgatgatgatgggtattgataccagctggctgctggttgctgccggattcgtcggcgctatcgtgattgccagcgcctacggctggagtatcgagcgcgtggcctaccggccggttcgcagctcaaaacgcctgattgcgctgatctccgccatcgggatgtcgatcttcctgcaaaactacgtcagtctgacggaaggctcgcgcgatgtcgcgctgccaagcctgtttaacggccagtggacggtgggcagtagcgacaacttctccgcgaccattaccaccatgcagctggtgatctggatggtgacgtttatcgccatgctggcgctaacgctgtttattcgctattcccgcatggggcgcgcctgccgcgcctgcgctgaagatctgaaaatggccagcctgctcgggattaacaccgaccgcgtgattgcgctgacctttgtgatcggcgcggcaatggcggcggttgccggcgttctgctcggacagttttacggcgttatcaacccctacatcggctttatggccgggatgaaggccttcaccgctgcggttctgggcggcatcggcagcattcctggcgcgatgatcggcgggctgatcctcggtattgccgaagcgctctcttctgcctatctcagcacggaatataaagacgtggtctccttcgcgctgctgatcctggttctgctggtgatgcctaccggcatcctgggccgtccggaggtagaaaaagtatga

SEQ ID NO: 253776 - DNA, 1278 bp, Klebsiella pneumoniae
atgaaaccgatgcattttgcgatggcgctgctgtcggcagttatgttctttatcctggcgggcgtctttatgggcgtgcagctggagcttgacggcacgaagctggtggtggataccgccgccgatatccgctggcagtggatctttatcggaaccgcagtggttttcttcttccagctgctgcgtcccatttttcagaaaaccttgaagaacgtctccgggccgaagtttattctgccggctatcgacggttcgacggtaaaacagaagctgttcctgatcgccctgctggttatcgccgtggcgtggccgtttatggtgtcgcgcgggacggtggatatcgccacgctgacgatgatctatatcatcctcggcctgggtcttaacgtggtggtggggctttccggcctgttggtgctgggctacggcggcttttatgccatcggcgcctatacctttgcgctgctgaaccactattacggcctggggttctggacctgcctgccgctggcggggctggtttcggcggcggcgggcttcctgcttggcttcccggtcctgcgtctgcgcggcgactatctggcgattgtcacgctcggcttcggcgaaatcgtgcgcatcctgctgcttaacaacaccgaaataaccggcggcccgaacggcattagccagatcccaaaaccgacgctcttcggccttgaatttagccgcagcgcccgtgaaggcggctgggatacgttcagcaacttctttggcgtgaagtacgacccctccgatcgcgtcattttcctctacctggtcgctctgctgctggtggtgttaagtctgttcgtgattaaccgtctgctgcgtatgccgctgggccgcgcgtgggaagcgctgcgcgaagatgaaatcgcctgtcgctcgctgggcctcagcccgacgcgcatcaagctgaccgcttttaccatcagcgccgcgtttgccggttttgccggcaccctgttcgccgcccgtcagggctttgtcagcccggaatccttcaccttcgccgagtcggcctttgtgctggcgattgtggttctcggcggtatgggctcccagtttgcggtgatcctggcggcggttctgctggtggtctcgcgcgagctgatgcgtgatttcaatgagtacagcatgctgatgctgggcgcgctgatggttctgatgatgatctggcgtccgcagggccttctgccgatgacgcgtccgcagctgaagctgaaaaacggtcaggcaaaaggagagcaggcatga

SEQ ID NO: 253777 - DNA, 768 bp, Klebsiella pneumoniae
atgagtcagccattattatccgtaaacggcctgatgatgcgttttggcggtctgctggcggttaacaacgtgtcgctggagctgcgggaacgggaaattgtctcgcttatcggcccgaacggcgcgggcaaaaccaccgtttttaactgtctgaccggtttctacaagcccactggcggcactattatgctgcgtgaccagcatctggaagggctgccgggacagcagattgcccgcatgggcgtagtgcgaacgttccagcacgtgcgtctgttccgcgaaatgacggtgattgaaaacctgctggtggcacagcatcagcagctgaaaaccggggttttctccggcctgctgaagacgccatctttccgccgcgcccagagcgaagcgctcgatcgcgccgcgacctggcttgagcgtattggcctgctcgaacacgccaaccgccaggccagtaacctggcctacggcgaccagcgccgtctggagatcgcccgctgcatggtgacccagccggaaatcctgatgctcgatgaaccggcggcggggctgaacccgaaagagaccaaagagctggacgagctgatcgtcgagctgcgcagtcatcacaacaccactatcctgctgattgagcacgatatgaagctggtgatgggcatttccgaccgtatttacgtggtaaaccagggcacgccgctggccaacggtacgccggaagcgatccgcaacaacccggacgtgatccgcgcctatttaggtgaagcataa

SEQ ID NO: 253778 - DNA, 732 bp, Klebsiella pneumoniae
atggtggtgacgcataagatggaaaaagtgatgttatcttttgacaacgtcagcgcgcattacggcaaaatccaggcgctgcacaacgtcagtctgcatatcaatcagggagaaattgtcaccctgattggtgccaacggtgcggggaaaaccacgctgctgggtaccctgtgcggtgacccgcgcgcctccagcggccgcgtggttttcgacggtaaagatattaccgactggcagacggcgaaaatcatgcgcgaagcggtggcgatcgtgccggaagggcgccgggtcttctcgcggatgacggtggaagagaacctggcgatgggcggtttttttgccgatcgcgaccagtttcagacccgtattaaatgggtgtatgagctgtttccgcgcctgcatgagcgccgggttcagcgggcgggcaccatgtccggcggcgagcagcagatgctggccatcgggcgcgcgctgatgagccagccgcgcctgctgctgctggatgagccttcgctcggcctggcgccgattatcattcagcaaatcttcgataccatcgaacagctgcgcgagcaggggatgactatcttcctcgtcgagcagaacgccaaccaggcgctgaagctggccgaccgcggctacgtgctggaaaacggtcacgtggtgcttgaggataccggcgacgcgctgctggcgaatgaagcggtacgcagcgcctatctgggcgggtag

SEQ ID NO: 253779 - DNA, 1596 bp, Klebsiella pneumoniae
atgcagaccatcttaaagattgaccctactgataacttaatcgttgcgctgcaggacttacgcaaagaacagcgggttcactggaacgatgaggcctacgttctgcgtagcgatgtcaaagccaaacataaatttgccaccgaggatattgcgcccggcgatatcgtttcgctgtacggcgtaccggtcggtaaagcgacgcgccccatcacccggggcgaagccatcacaacggagaatatcaaacactacgcggccccggttacgcttgacgatgtcgccccctatgactggcagcagccggatatttccgcctggcagcagcggacgtttaagggaatcgtgcgtgaagatggccgggtcgccaccgcaaactactggctggtcattccgctggtattctgtgaaaaccgcaacgttcagcgcgtcaccgatgcgctaaacgacgcccttggctacgccaataacggcctgaaaaattttgctcgccaggtgacatcggcaggggctttaaacgatacccgacatctgccctttccgcatcttgacggtattcgctgtattaccgttaattccggctgcggcggcgccacctcggacagcatgacgatgtgcgacgtgctggccgcctattccgatcatcctaacgttcttggcgtgacggtttttgctctcggctgtgaaaaagcgcgaattgttgatttcaacgccgcgctggcgaagcgcaacccgaacttcagcaaaccgattatttacttcaggcagcaggactggagtagcgaagagaaaatgatgcaggatgcgttgaccgaaacttataacgcgatccgcgaagcccccgtcgccgagcggcaggacgtcccgctctcccacctcaaaatcggcgtgaagtgcggcgcttctgacgggttctcggggatcagcgcaaacccggcgatgggcgaagtatcagaccgcctcgtcgccctcggcggcgcgtcggggctggcggaattccccgagctgtgcggcgcggaaggggatatcgttcagcgctgcgcgacccgggagctgaaagagaagtttttgtcgctgatgaaaaactatgagcatgtcgcgaacttcttcggcaccaccatcgccgataaccccagcccgggaaacattgccgatgggctgatcactgacgcgataaaatccgccggcgcggcgaaaaaaggcggcagagcgccggttagcgcggtatgcgactatgccgaaccgatgggagaaagcggcctttcgctggtctgcacgccgggcaacgatgtggacgcggtaacgggcctggtcgcggcggggtgcaacgtggtgatcttctcaaccgggttgggtacgccgacggggaaccctatcgttccggttctcaaagtttcaaccaacaccgcgctcgcaaaaaagatgccggatattatcgattatgactgcgggccgattatcgaaggcacgccgctggcggatatcgccgatggcctgtttgagaaaatcatcgctaccgccagcggaacctggcgcaccaaagcggatgcgctcgaacagtatgattttatgctgtggaaacgctctctggagctgtag

SEQ ID NO: 253780 - DNA, 1311 bp, Klebsiella pneumoniae
atgaaaaccatcacagcttacgacaatccggccctcaattccgcgattacgaaatcatggaagcgcctggtgccactgatgtttattttgtacttcatcgcctttatcgacagggtgaacgtgggattcgctaaagaggcgatgcaggtggatattgggctctccaattccgccttcgccctcggggcagggatctttttcgccgcctatgcgctatttggcattcccgcaaacctgatcctgaataaaattggcgcgcagaaatggttaagcatcactactgcgctgtggggcgttctctctgccctcaccggactggtgcagacggaaacccagtttattgttctgcgttttttactgggattaggcgaagccggtttttatcccggtattctgctgctggcctccatctactttcccaataaagttcgcgcatccgtcgtcggtatcttcgtactcggcgtaccgctggcgctgaccttaggctcgcccatctccggcgcgctgctggaaatgcacggtttccttggtaaacccggctggttctggatgttctttattgaaggcattccggcggtcatcatggggatcttcgcctggttctggctcgacgatacgccggccaaagcgcgcttcctgaacgaagaagagaaaaaggcgctgattgcccagctacagcaggagcagcggcagacggaaaccagcagcgttggtaccgcgctgaaaagccttaaagtctggcacctggcgctgatctacggcaccatccagatcagcgtgtacggactgatgttcttcctgccttcgcaagtcgcctcgctaatgggttccacgctcggctttaaagagtcgctggtcgccgccattccgtgggcctgctccgccgtcggcgtctattacattccgcgtctggcggacaaaatgccggctcgccgggtactgatttcggtcatctgtatgctggctgcggcgctggggctgtttgtttctgcctggtccggcccggtgctcgccattgccgcgctctcgctgtcggccatcggctttctctccgtgcaacccattttctggactttcccggcgcagattgtgtcaggctcggcgctggccgccagtatcggcttttgcaccaccatgggcgcgttttgtagcttcctggcgccgctcattcgcgttgaggtcgataccttcttcggcaatgattcggcgggcctggtcgcactgtcgctgattaccgtctgctgtgcgctgctgattgccgctcttgccggcagaaaagcgacaaacggcgttgcggttacccatcactaa

SEQ ID NO: 253781 - DNA, 900 bp, Klebsiella pneumoniae
atgcaaagtcattacatcaccccggcaataacggtttttgatgagcagggcaggctggatcctgaaggcaactttcgcctgtatgatttcattaaaagcagcgtatcgggatttgtcgtcatgggcagtaccggtgagtttttctcgctggatatgaaaacatcccgtcaggtaattcaaatggcggcagagttcccgcgcgagggaataaaggcctatgcgggtaccagccgcatggatattgacgagtgcgtagagctggctaactatgcagatgagtgcggactggatggcgtcatgattatcagcccgtggtacttccgcctgactgatgaaggcatttatacattttatagccagatagctcgccgcaccgccgccaaaatatttatttataacttcccggaacgtaccggctattgcgtctcgccagaggtctgtttacgactcgccagagagttcccaaacattgtcggtcttaaagacaccattccggacaccaatcacacgtcgcaggtgattcgccaggtaaaatctgaactaccgtattttgaagtctatgccggttatgacaataacttcgcgcacaatgtcctggcggggggcgatggatgtatcggcgggttatccaatatttgccctgaaatattccgcgactggatgcaggcatttaacgataacgatttgcagcaaatttcgcggtatcagcaaaaagtggatgggttaatggatatttacgcggttaacgatccgttcattccaacatttaaaaaagcgttacggctgcgcggaattattcagtccgaccgctgcacgccaccgtttagctcactcacaaccggccagaccgaaagtattttgcggatactttcccgtgctggtattgaaattaatgcctga

SEQ ID NO: 253782 - DNA, 768 bp, Klebsiella pneumoniae
atgaagacgcttcataaacctaccgagcgcgttttgctcattctggaaaccttagccaacgcggatggaatgacgctttccgagctatcgctcaaaacggatatttccaagggaaccattttcccgatcctcaaatcactgcagtatcgcaaatatatcagtcacgacgatcgcaacgggatttacactctggggatctcctgcgcggttctggccagcgccaccgtcgaaaaagagttctggctgaaaacgatcaatagcgaaatgcacgcggtagtcactgaatgcaacgaagtttgccagctcggcattctggatgacgcctgggtactgtatgttgataaagtccagggcgatcaaaccgtgcagctggtctctaaggtagggacgcgcctgccggcaatctgctccgccctgggcaaggcgctgctgcataagcaccgcgacgaagagattctggagctctatccgcagggttttccttccgttaccgcccgcagcgtaacgaatatggcccagcttcgtcagcagctggatatggttgccgccaacggttatgccatggacgatcgggaaatcaacgacgataccatctgcttcgccgtccccctgcagcagaaaggcattattctggcggcgatcagcgtctcattgccctctttccgcgccagcgatgaaaaaacgcagcaggtgattcgtgcgctaaaagaggccaagggtcgtatcgaaagtgtgctgaataagctgcctgatattaaaaattactga

SEQ ID NO: 253783 - DNA, 1317 bp, Klebsiella pneumoniae
atgatatcgttacgacatacagctttaggactggcgctcagcctggcatttgccggacaagccctggcggtaaccactatcccgttctggcactcgatggaaggggagttggggaaagaagttgattcactggcgcaacgtttcaatgcagccaacccggactataaaattgtcccggtgtataaaggcaactatgagcagagcctgagcgcaggcatcgccgccttccgtaccggcaacgcgccggcgctattacaggtttatgaagtcggcaccgcgacgatgatggcctcaaaggcgattaagccggtttatcaggtgttcagcgatgcgggcattcagtttgacgaaacgcagttcgttcccaccgtttccggttattacactgattcgaaaaccggacacctgctctctcaaccgtttaacagctccacgccggtgttgtactacaacaaagacgcctttaaaaaagccgggttagatccggaacagccgccgaaaacctggcaggatctggcggcgtataccgcgaagctgaaggctgccgggatgaaatgcggctacgccagcggctggcagggctggatccagattgaaaacttcagcgcctggcacggcctgccggtggccaccaaaaacaacggcttcgacggtaccgacgcggtgctggagttcaacaagccggagcaggtcaagcatatcgccctgctcgaagaactgaacaagaaaggcgacttcagctacttcgggcgtaaagacgaatccaccgagaagttctataacggcgactgcgccattaccaccgcctcctccggctcgctggcggatattcgtcagtacgcgaagttcaactatggcgtagggatgatgccgtacgacgccgacgtgaaaggcgcgccgcaaaacgccattatcggcggggccagcctgtgggtgatgcaggggaaagacaaagaaacctataccggggtcgccagattcctcgatttcctgactaaaccggaaaacgcggccgaatggcaccagaaaactggctatctgccgattaccaccgctgcttataacctgacccgcgagcagggtttctatgataagaatccgggtgcggatattgcgacgcgtcagatgctgaataagccgccgctgccgttcaccaaagggctgcgtctgggcaatatgccgcagatccgcaccatcgtggatgaagagctggaaagcgtgtggaccggtaagaaaacgccccagcaggcgcttgacgccgcggttgagcgcggtaatcagctgctgcgccgtttcgaacagtcaacgaagtcgtaa

SEQ ID NO: 253784 - DNA, 888 bp, Klebsiella pneumoniae
atgtcatcatcccgtccggtgtttaaatcccgctggctgccctatgtgctggtcgcgccgcagctggttatcaccgtcgtattctttatctggcccgctggcgaagcgctgtggtattcgctccagagcgtcgatccttttgggctctccagccagtttgtcggcctggacaactttttagccctgttccacgacccgtattacctggactccttctggaccaccattaagttcagtacgatggttaccgtcagcggtctgctgatctcgctgtttttcgccgcactggtcgattatgtggtgcgcggcagccgcttctatcaaacgctgatgctcctgccctatgccgttgcgcccgcggtggcggcggtgctgtggatcttcttattcaaccctggacgcgggctgattacccatcttctcggcgaaatgggctatgactggaaccacgcacagaatagcggtcaggcgatgttcctcgtggttttcgcctcggtctggaagcaaattagttacaacttcctgttcttctttgccgcgctgcaatcgattccccgctcgctggttgaagccgccgcgattgacggcgccgggccggttcgccgcttcttcaggctggcgctaccgctgatcgccccggtgagtttcttcctgctggtagtgaatctggtgtacgccttctttgatacctttccggttatcgatgccgcaaccggcggcgggccggtgcaggcgacgacgacgctgatttataagatctaccgtgaaggtttcgcggggctcgacctgtccgcttccgccgcccagtcggtggtgctgatgttcctcgtcattattctgacggtggtgcaattccgttacgttgagaaaaaggtgcgctaccaatga

SEQ ID NO: 253785 - DNA, 690 bp, Klebsiella pneumoniae
  misc_feature (643)..(652): n is a, c, g, or t
atgattgaaaaccgtcgcgggctgacgattttcagccacacgatgctgattttagggatcgcggtcattctgttcccgctgtatgtcgcctttgttgcggcgacgctggacagtaaagcggtctttgacacgccgatgacgctgatacccggcgggcatcttctcgaaaacatgaagtttatctgggtgaacggcgtaggggccaatagcgcgccgttctggctgatgatgctcaacagcttcatcatggccttcggcatcacggtgggcaaaattacggtctcgatgctctccgctttcgccatcgtctggtttcgttttccgctgcgcaacctgttcttctggatgatcttcatcacgctgatgctgccggttgaggtgcgtattttcccgacggtggaagtgatcgccaacctgaaaatgctcgacagctatgccggactcacgctgccgctgatggcctcggcgaccgcgaccttcctgtttcgccagttctttatgaccctgccggacgagcttatcgaggccgcacgtatcgacggcgcatcgccgatgcgctttttccgcgacatcgtcctgccgctgtcgaaaaccaacctggcggcgctgttcgtcatcacctttatttacggctggaaccagnnnnnnnnnntatttacggctggaaccagtatttgtggccgctgctga

SEQ ID NO: 253786 - DNA, 201 bp, Klebsiella pneumoniae
ttgtggccgctgctgattattaccgacgtgaatctcggcaccgcggtcgcgggcatcaaagggatgatcgccatcggccagggcaccacgcagtggaatcaggtgatggcggcgatgctgctcacgttgattcctccggtagtcatcgttttagccatgcagcgcgcgtttgtgcgtggtttagtggatagtgagaaataa

SEQ ID NO: 253787 - DNA, 1071 bp, Klebsiella pneumoniae
atggcaggactgaagctacaggcagtaaccaaaagctgggatggcaaaacccaggtgatccaaccgctgacgctggacgttgcggacggcgaatttattgtgatggtgggcccttcgggctgcggaaaatcaaccctgctgcgtatggtggcgggtctggagcgggttaccagcggcgatatctggattgaccgcaagcgtgttaccgaaatggaaccgaaagatcgcggcatcgcgatggtgttccagaactacgccctctacccgcatatgagcgtggaagagaatatggcgtggggtctgaaaattcgcggtttgggcaaaggattaattgctgagcgcgtccaggaggcggcgcgcattctggagctggacggcctgctgaaacgccgtccgcgcgaactctcaggcggccagcgccaacgcgtggcgatggggcgggctatcgtacgcgatccggcggtattcctgtttgatgagccgctatccaaccttgatgccaaacttcgcgtgcagatgcgccttgagctgcagctgctgcaccgtcggctgaaaaccacctcgctgtacgtgactcacgatcaggtggaggcgatgaccctcgcccagcgggtgatggtaatgaataaaggcatcgccgagcagattggtacgccggtcgaagtctatgaaaaaccggccagccgctttgtggcgagctttatcggcagcccggcaatgaacctgctggaagggcgggtcagcgatgacggcagccgctttgagctggagggtggaatgcttttacctgtcaacagcgagcatcgccgctatgccgggcgtaagatgacgctgggtatccgcccggaacattttgcattaagctccgaagcggaaggtggcgtaccgttggtgatggatacgctggaaattttaggtgccgataaccttgcccacgggcgctggggcgcgcaaaagctggtggtccggctgccgcaccagcagcgtccgcaggcgggcagcactctgtggctgcatctgccgcaggaaagtctgcacctttttgatagtgaaacaggacaacgcgcatga

SEQ ID NO: 253788 - DNA, 741 bp, Klebsiella pneumoniae
atgagtcactggccttatccccatatcgtcgcccaccgcggcggcggtaaactggccccggaaaacaccctggcggccatcgataccggcgctcgttatggccatacgatgattgaatttgacgctaagttatcgaaagacgggcacatttttttactgcacgatgacaatcttgaacgcaccagcaacggctggggcgtggcgggcgagctggcgtggaacgatctgctaaaagtggatgccggcagctggtacagcggcaaattcaaaggcgagccgctgccgctgctgagcgaagtggccgatcgctgccgtcagcacggcatgatggccaatatcgaaattaaaccgaccaccggcaccggcctggtgaccggtaaagcggtggcgctggcggcgcgtgagctgtggcagggaatgacgccgccgctgctctcatcgtttgaaatcgatgcgctggaagcggcgcaggaagcggcgcccgaactaccgcgtgggctactgctggatgagtggcgcaacgattggcgcgaactcaccgcgcgtcttggctgcgtctctattcatctcaaccacaagctgctggatgaagcgcgagtggcaaacctgaaggctgcaggtctgcatattctcgtctataccgttaataaaccgcagcgtgccgccgaactgctgcgttggggcgttgactgtatctgcaccgatgcgattgatctcatcggcccacgcttttcggcataa

SEQ ID NO: 253789 - DNA, 321 bp, Klebsiella pneumoniae
atgaaagcaatgttatatctggcggcgctggtcccgctgagcgtcatggcgcagccgatcaatatcgacaataaccctaatcagccggggtatgtggtgcccagccagcagcggatgcaaaatcagatgcagacccagcaaatgcagcagcaaaacactctgaagcagggtattcagagccagtcgcgcacgcagcagcagcatcttcagacgcagttgaataacgatcggcagcgggtacagcagaataacaacctgaaccggcagcagcctctacccaacaacaacggtgggatgctgcagcgccagacgaccccgtaa

SEQ ID NO: 253790 - DNA, 1743 bp, Klebsiella pneumoniae
atgagaagaacaacgctctggcgtcaggtggtcatcgctgcgctgctggcgggcggcagttttaccgtcgcggcagatcccgccccgcctccggtctcgtatggtgtagaggaagatgtttttcatccggtttgcgctcagcaggggatggttgcctcggtggatgcgctggcaacgaaggttggcgtggatattttacgtcagggcggcaatgcggtggatgctgccgtggcggtgggctacgcgctggcggtcacccatccgcaggccggtaatatcggcggcggcgggtttatgatgctgcgaaccaaagacggtaataccacggcaatcgacttccgcgagatggcccctgaacaggccacccgcgatatgtttctcgacgatcagggcaatccggacagtaagaaatcgctgacctcccatctggcttccggcatcccgggaaccgtggccggcttctccctcgcgctggagaaatacggcacgatgccgctcaacaaagtgatccgtccggcaattaagctggcggaagagggcttcacggtcaacgatgcgctggccgacgatctgaaaacctacggcagcgaagtgatccccgaccatgccaacagccgggctatcttctggaaaaacggcgagccgctgaaaaagggcgataagctggtgcaaaaacagctggggaaaagcctggagctgattgccgagctggggccggatgccttctataaaggggcgatcgccgaccagattgccgcggagatgaagaataacggcggactaatcaccaaagcggatctggcgaattacaacgcggttgaacgtacgccggtgagcggcgagtatcgcggctatcaggtgttctccatgccgcccccatcgtccgggggcattcatatcgtgcagatcctgaatatcctcgaaaacttcgatatgcataagtacggcttcggcagcgccgacgccatgcaggtgatggccgaagctgaaaagcacgcctatgccgaccgttcggaataccttggcgatccggacttcgtcaaggtgccgtggcaggcgctgaccagcaaagcctacgctaaatcgattgccgggcagattgatgtcaataaggcgaagccgtcgagccagattcgccccggcaagctggccccttatgaaagcaaccagactacccatttctcggtggtggataaggacggtaacgccgttgcggtgacctatacgctgaacaccacctttggcaccggcatcgtggcggggaactcaggcattctgctgaacaatcagatggatgatttctcagctaaacccggcgtgccgaacgtctacgggctggtgggcggcgacgctaacgccgtcgaggcgaaaaaacgtccgctttcatcgatgtcgccaacgattgtggtgaaagatggcaaaacctggctggtgaccggtagcccgggcggcagccgcatcatcaccacggtactgcagatggtggtgaacaccatcgactttgggatgaacgtcgcggaagccaccaacgccccgcgcttccaccatcaatggctgccggacgaactgcgggtagagaaggggtttagcccggatacgctgaagctgctggagagcaaagggcagaaagtggcggtgaaagaggcgatgggcagtacccagagtattatggttggcccggatggcacgctgtacggcgcatccgatccgcgttcgccggatgttttaaccgcagggtattag

SEQ ID NO: 253791 - DNA, 492 bp, Klebsiella pneumoniae
atgagcgacatagtgatacgccatgccgaagccaaagattacgacacaatccgtcagatccatgctcagccggaggtatatcgcaatacgctacaggttcctcatccttccagccatatgtggcacgagcgactaaccgaccgaccgggcgtcaaacagttggtcgccagcatagatgaccaggtcgtgggacacctcgccattgaggttatccagcgcccgcgccggagccacgtcgccgatttcggcatttgcgtggattcacgatggcacaatcgcggcgttgccagtgagctgattcgcaccatgatcgacatgtgcgacaactggctccgcgttgaccgtattgagttgacggtgtttgtggataacgctcccgcggttgcggtatatcagaaattaggctttgaaattgaagggacggggagaaagtatgccctgcgcaacggcgaatatgtcgatgcctactttatggcgcggctgaaggggtga

SEQ ID NO: 253792 - DNA, 660 bp, Klebsiella pneumoniae
atggaaagcaagtatttagccataaatagcgctcttctcttctggctgcttggcctgctggcatggtgcttcgaatccacgtacatggccttgttatctggttctttctccctgtcatccttcgtttttcattttcaataccatcgggttaaccatatgtttaaaaagaataaaactatcgacgttacgccacagccagccagcgtacccgcgccggtcaacgacaaagtcacctctgcggccaggaagccggataccacggtcatcgccagcggcatgcgctttgaaggaaacattattgcggcgggtaatgtcgatatctacggcacggtgagcggcgatatcgacgcgaaagagaaccaaattaagatcatgaccggcggcctgctggagggaaacattacctgccgcgaactggttattgacggctgcgtcatcggccagtgcagtagcgataccattgaaatcgataaaaacggtaacgtcaccggaacgctggcctaccgtacgctggccattaaaaagggcggcgtgttttccggccaggcagaagtgctgccgccggtcgcggaaaagaacaacgtggtgggattcatcacagataccgcggtagaaacgaaagagagagcggaagcgcatactgccgaagcggcgcagtaa

SEQ ID NO: 253793 - DNA, 1038 bp, Klebsiella pneumoniae
atgactttacactgcgcatttattggattcggcaaaagtaccacccgctaccatcttccctatgttttgcaccgaaaagaccgctggcatgtggcgcatatcttccgccgcagcgccaggccggaggagcaagcgccgcagtattcgcacatccacttcaccagcgatctcgatgaagtgcttaacgacccgcaggtcaagctggtgatcgtgtgtacccacgcggacagccattttgactatgccaaacgggcgctggaggcgggtaaaaatgtgctggtcgaaaagccttttacgccgaccctggacgaggcgaagacgctattcgcgctggcgaaaagcaaagggctgacggtcactccgtaccagaaccgccgctttgactcctgctttctgaccacgaagaaagtcattgagagcggcaaactgggggagctcgtcgagattgaaaaccatttcgataactatcgcccgatagatggtggaaagcctggcctgccgcaggatgggacgttctatggtctgggggtccataccatggaccaaattattgctctgtttggccgcccggatcatgtgtcttacgacattcgtagcctgcgcagccaggccaacccggacgatacttttgaggcccagctgttctacggcaatctgaaagcgattgttaaatccagccatctggtgaagctgccctacccaaaattcatcgtccatggtcataaagggtcatttattaaatacggtatcgaccagcaggagaccagcctgaaggcgaatatcatgcccggtgagccaggattcggcgcggacgatacgttgggcctgctggagtacgtcaatgaagcaggggaaaccgtacgggaagaggttccgcttgaaaccggcgactatggccgcgtctatgattcgctgtatgaaaccctcgttaacggccagcctaatttcgtcaaggaatctgaggttctcacgaatatcgagatccttgaacgcggctttgagcagccgtctcccgccactataacccttgcaggataa

SEQ ID NO: 253794 - DNA, 696 bp, Klebsiella pneumoniae
atgatctacttacgcaaagctaacgaacgcggccacgctaaccacggctggctggattcctggcatactttctctttcgcgaactattacgatcctgactttatgggcttctcggcgctgcgggttatcaacgatgacgtgatcgacgcaggccagggcttcggtacccatccgcataaagatatggaaattctgacctacgtgctggaaggggccgtggagcatcaggacagcatgggtaacaaagagcaggttccggcgggtgagtttcagatcatgagtgcgggtaccggtattcgtcactctgagtacaacccaagcgccacggaaaaactgcatctgtaccagatctggattatgccggaaaaaaatggcatcactccgcgctacgaacagcgccgctttgacgccgttcagggcaaacagctggtgctgtcgccggatgctcgcgaaggctcgctgaaagtgtaccaggatatggaactgtaccgctgggcgctgctgaaagacgagcagtcggtgcatcagattgccgccgaacgccgggtgtggatccaggtggtgaaaggtgaagtcaccatcaacggaacgaaggccaccaccagcgatggcctggccatttgggacgagcaggcgatttccgtgcatgctgacggcgatagcgagatactgctgttcgatctgccgccagtctga

SEQ ID NO: 253795 - DNA, 996 bp, Klebsiella pneumoniae
atgaaaaagaaaagacccgtacttcaggatgtagccgatcttgtcggcgtgaccaaaatgacggtcagtcgctatttacgtaacccggaacaggtttccgaagcgctgcgtggcaagattgccgttgctctcgatgaactgggttatattcctaatcgcgcccctgatatcctctctaatgcgaccagccgcgccattggcgtgctgctgccctcgttaactaaccaggtcttctcggaagtgctgcgcggtattgaaagcgtaaccgactctttcggctatcagactatgctggcgcactacggctataagccggaaatggaagaaaaacgcctggaatcgatgctctcctggaatattgacggcctgatccttaccgaacggacccatacgccgcgaaccctgaagatgattgaagtcgcgggtatcccggttgtggagctgatggacagtcagtcgccgtgcctcgatatcgccgtcggctttgataactttgaagcggcccgacagatgaccgcggcgattatcaatcatggtcaccgtcacgttgcctatcttggcgcacgtcttgatgaacgtactatcatcaaacagaaggggtatgagcaagcgatgcttgatgccggaatgacgccctacagcgtgatggttgagcagtcttcttcttattcatcgggaattgagctgatgcgccaggcgcgtcgagaatatccgcagcttgacggcattttctgtaccaacgatgaccttgcggtcggcgcagcgtttgagtgccagcggttggggcttaaaatccctgacgatatggcgattgccggtttccacggccacgatattggtcaggtgatggagccgcgtctggccagcgtgctgacgccgcgtgagcgtatggggcggattggcgctgaacgtctgctggcgcggatacgcggtgaaacggtgacgcctaagatgttagatttaggtttcacattgtcaccgggcggatctatttaa

SEQ ID NO: 253796 - DNA, 531 bp, Klebsiella pneumoniae; identical to SEQ ID NO: 173338

SEQ ID NO: 253797 - DNA, 1341 bp, Klebsiella pneumoniae
gtgagtacattaacgcttgttttgacagcagtcggctccgttttgctgctgctgtttttagtcatgaaggcgcgtatgcatgccttcgtggctttgatggtggtttctattggagcagggcttttttccggaatgccgttagataagatcgcggcgacgatggaaaaaggcatgggcggcacgctgggttttctggctatcgtcgtcgcgttaggggctatgtttggtaagatcctgcatgaaaccggcgcggtcgaccagattgccgttaagatgctgagatctttcggccacaatcgcgcccactatgccataggtctggccgggcttatctgcgcgctgccgctgttttttgaagtggcgatcgtgctgctgatcagcgtggctttctcaatggcgcgccataccggcaccaaccttgtgaagctggtgatcccgctctttgctggcgtagccgccgcggccgcgttcctgctaccggggcctgcgccgatgctgctcgcctcgcagatgcatgccgactttggctggatgatcctgattggcctgtgcgccgctatcccggggatgattattgccgggccgctgtggggtaacttcatcagtcgctatgttgagctgcacattccggacgatattagcgagccacaccttggcgaaggcaaaatgccgtcgttcggcttcagcctgtcgctgattctgctgccgctggtgctggttggcctgaaaaccatcgccgcgcgctttgtgccggaaggttctaccgcttacgaatggtttgagtttatcggccatccgtttaccgcgattctggtcgcgtgcctggtggctatctatggcctggcggtacgtcagggaatggctaaagatcgggtgatggagatttgcggtcatgcgctccagcctgcgggcatcatcctgctggtcatcggtgcgggcggggtgtttaaacaggtgctggtcgactccggcgtaggccctgccctcggtgaagcgttaaccggtatgggcctgccgattgccatcacctgcttcgtgctggcggcggcggtgcgtattattcagggttccgcgaccgttgcctgcctgacggcagtcgggctggtgatgccggttattgaacagctgcactacagcggcgcgcagatggcggcgctctctatctgtatcgccggcggttctatcgtggtcagccacgttaacgacgcgggcttctggttgttcggcaagtttaccggcgcgaccgaagcgcaaacgctgaaaacctggacgatgatggaaaccatcctcggcaccgtcggggcgattgttggtatgattgcgtttacgctgttgagctaa

SEQ ID NO: 253798 - DNA, 771 bp, Klebsiella pneumoniae
  misc_feature (728)..(737): n is a, c, g, or t
atgaaaaatgttggttttatcggctggcgcggaatggtcggctctgtcctcatgcaacgcatggtagaagagcgcgattttgacgccattcgccctgtttttttctccacctcccagttggggcagcctgctccatcctttggtggcagtaccggtggcacgcttcaggatgcattcgatctggaagcactgaaggcgctggacattattgtcacgtgtcagggcggcgattacaccaacgatatttacccgaagctgcgtgaaagcggctggcagggctactggattgacgccgcctcttcgctgcgcatgaaagacgacgccatcattattcttgacccggtgaaccaggatgtcattaccgcaggtctgaacaacggcgttaaaacctttgtcggcggcaactgtaccgttagcctgatgctgatgtccctcggcggcctgtttgctcaggatctggttgagtgggtgagcgtggcgacttaccaggcggcttccggcggcggtgcgcgtcatatgcgcgaactgctgacccagatgggccagctgcacagccatgttgcggctgagctggcggatccggcttccgcaatcctggagattgaacgcaaagtcacctctttgacccgcagcggcgaactggcggtggataactttggcgttcctctggcgggcagcctgatcccatggatcgacaaacagctggataacggccagagccgtgaagnnnnnnnnnngcctgatcccatggatcgacaaacagctggataa

SEQ ID NO: 253799 - DNA, 447 bp, Klebsiella pneumoniae
  misc_feature (7)..(16): n is a, c, g, or t
gtgaagnnnnnnnnnngcctgatcccatggatcgacaaacagctggataacggccagagccgtgaagagtggaaaggccaggcggagactaacaaaatcctcgcgaccgcctcaccgattccggtagacggcctgtgcgttcgcgttggcgcgctgcgctgccatagccaggcgtttaccatcaagctgaaaaaagatgtttctattccgaccgttgaagaactgctggccgcgcacaacccgtgggccaaagtggtgccgaacgatcgtgatattactatgcgtgagctgaccccggctgccgtcaccggcaccctgaccaccccggtggggcgcctgcgtaaactgaatatggggccggagtatctgtcggcgttcaccgttggtgaccagctactgtggggggccgccgagccgctccgccgtatgctaagacagctggcgtag

SEQ ID NO: 253800 - DNA, 2187 bp, Klebsiella pneumoniae
atgtctaatcgtatcgataaggacgtgattaatgcgcttatcgccggccattttgcggatcctttttccgtgcttggcatgcattacaccgacgccgggctggaagttcgtgcattattacccgatgccaccgaagtgtgggtcattgaaccaaaaaccggacgcaaagtcggcaagctggaatgcctcgactcgcgcggtttctttagcggcgttctgccgcgtcgtaaaaatccttttcgttatcagttggctgtcacctggcacgggcagcagaatctgatcgatgacccgtaccgttttggcccgctgctgcaggatctggatgtctggctgctgtcggaaggcacgcacctgcgtccgtatgaaacgttgggcgcgcatgccgatactatggacggcgtggtcggcacgcgtttctcggtctgggcgcctaacgcccgtcgggtgtcggtcgtcggccagtttaactactgggatggtcgccgccacccgatgcgcctgcgtaaagagtccggcatctgggagctgttcgttcccggcgcgctgaacggccagctgtataaattcgagctgattgatgcccacggcaacctgcgggtgaagtccgacccttacgcctttgaagcgcagatgcgcccggatagcgcctcgctcatctgcgggctgccggaaaaggtccagcagccgccggagcgcaagctggctaaccagtttgatgcgccaatctcgatttatgaggtgcacctcggctcctggcgtcgccataccgataataacttctggctgagctaccgcgagcttgccgaccaactggtgccttatgccaaatggatgggcttcacccatcttgaactactaccggttaatgagcatccgtttgacggcagctggggctatcagccaaccgggctatatgcgccaactcgtcgcttcggcacccgggaggatttcctctactttatcaacgccgcgcacgctgcgggcctgaacgtgattctggactgggtacccggccattttccggcggatgatttcgcgctcgcctcgtttgacggcacctcgttgtatgaacatagcgacccgcgcgaaggctaccaccaggactggaacaccctgatttacaactacggtcgtcgcgaggtcagtaattatctggtcggcaatgcgctgtactggatcgaacgcttcggcattgacgcgctgcgggttgatgcggtggcatcaatgatttatcgcgactatagccgcaaacagggcgagtgggtgccgaacgaattcggcggtcgggaaaaccttgaagccattgagtttctgcgcaataccaaccgcgtgctgggcgagcagacgccgggcgcggtgacgatggcggaagagtcgaccgatttccccggcgtgtctcgtccttcctccaccggcgggctcggcttctggttcaagtggaaccttggctggatgcacgacaccctcgactatatgaagctggacccggtgcatcgccgacatcatcacgacaagatgaccttcggtatgctctacaactacaccgaaaactttgtcctgccgctctctcatgatgaggtcgtgcacggcaaaaaatcgatactcgaccgtatgccgggcgatgcctggcagaagttcgctaacctgcgcgcgtactacggctggctgtttgccttcccgggtaaaaagctgctgtttatgggcaatgagtttgctcaagggcgagaatggaaccacgatacaagccttgactggcatctgctggaaggcggcgataactggcaccacggcgtccagcggctggtgcgcgacctcaaccatacttatcgccaccataaagcgctgcatgaagtggattttgacccctacggatttgaatggctggtggtggacgaccacgagcgctcggtctttatctttgttcgtcgcgacagggcgggtaacgaaattatcgtcgccagcaacttcacgccagtgccgcgccatgagtatcgctttggcatcaaccagcctggccgctggcgtgaagagctgaacaccgactctatgcactaccacggtagcaataccggcaacggcggcgtcgtcgagagcgacccgatcgccagccacggtcgtgaacactcgctctccattacgctgccgccgctggcgacggtatggctggtgcgggaggcgcaatga

SEQ ID NO: 253801 - DNA, 1977 bp, Klebsiella pneumoniae
atgatcgcactcacggcaggaaagcccgcgcctttaggggccagctacgacggtaagggcgtgaatttcgcgctcttttccgcccatgcggagcgggtggaactctgcgtgtttgacgagcagggcaatgagcggcgagtcgacctgcccgcacgcagcggcgatatctggcacggctggctcgccgatgtcgggccaggtctgcgctacggctaccgcgtccacggcccctgggacccggcgcaggggcaccgtttcaatccggcaaagctgctgctcgatccctgctgccaccaggtggatggcggactacctgacgacgagcgacttcacggcggcgatagcgttcccgataaccgcgatagcgcggcaatagcgccgaagtcgcgggtaatcgacctccattatgactggcgcggcgataagccgccgcgcacgccgtggggccagacggtgatttatgaagcccacgtcaaggggctgacctggctgcaccctgagctgccggaagagatccgcggcacctacaaagcgctgggtcatccggtgatgatcgaatacttccgcacgctcggcattactgcactagagttaatgccggtggcgcagttcgccagcgaaccgcgtctgcagaggatggggttaagcaactattggggctacaacccgctggcgatttttgccctcgatacgcgctacgccagcgcgccggagcaggcgttaaacgaatttcgcgatgcggtaaaagcgctgcacgcggcaggtattgaagtgatccttgacgtggtgttgaaccatagcgcggagatagacctggaagggccgaccttctccctgcgcggaatcgacaaccgtagctattattggatcagggaagacggtgattaccacaactggaccggctgcgggaacaccctcaacctcagccatcccggggtggtggagtatgcgcgccagtgtctgcgcttttgggtcgatgagtgccacgtcgacggttttcgtttcgacctcgcctcggtaatggggcggacgccagagtttcgtcaggatgcgccgctgtttgaggccattcgtaacgatccgcggctggcggaagtgaagctgattgccgagccctgggatatcggtcccgggggctaccaggtcggtaactttccgccgttgtttgctgagtggaacgaccatttccgcgataccgcacgtcgattctggctacagcagaacgtctcgctgggcgacttcgcgctgcgttttgccgcatcgagcgacgttttccagcgtaacggcagagcgccgtcggcggcgattaacctggtcaccgcgcacgatggtttcaccctgcgcgactgcgtttgtttcaatcagaaacacaatgaggcaaacggggaggagaatcgcgatgggactaacaataactacagcaacaatcatggtatagaaggattagaagggagtcttgccgtcattgagcggcgccgtgccagcgttcacgctcttctggcgacgctactgctggcgcagggaacgccgatgctgctggcgggtgacgaacacggtcacagccagcatggcaacaacaattcttactgtcaggacaatgcgttgacctggctggactggaaccatactaaccgcgggctgaccgcgttcaccgccgcgttgattcatctgcgccagcgtatttcggctttaaccgataatcgctggtggcaggagggagacggcagcgttcgctggttaaaccaacatgctcagccgttgtccgctgatgaatggcagcacggtgcgccgcgcatgcagatcatattgtccgatcgctggctgatggcgctgaacgccaccgccgaggtggcagagatggttttacccgcgggggaatggcgcgccattccacctttcgccggagaggataatccggtcactatggctgtctggcatgggcccgcgcacggagtgtgcgtatttcaaaggtcgtaa

SEQ ID NO: 253802 - DNA, 1296 bp, Klebsiella pneumoniae
atggttggggtagaaaagaacgatccattgatgctggcgcgtcagttgccgatcaaatccgttgcgctgatccttgccgggggacgtggtacccgtctgaaggatctgaccaataaacgcgcgaaacctgctgtccatttcggcggcaagttccgtattatcgattttgcgttatctaactgtattaactcaggtattcgtcgtatcggcgtcatcacccagtatcaatcgcatactctggtgcagcatattcagcgcggctggtcttttttcaatgaagagatgaacgaatttgttgacctgctgcccgcccagcaaaggatgcagggagaaaactggtatcgcggcaccgcggacgcggtgacgcagaacctcgacatcattcgtcgctacaaggcggagtatgtcgtcatcctcgccggcgaccatatctacaaacaagactactcgcggatgcttatcgaccatgtcgaaaaaggcgcgcgttgcaccgttgcctgtatgccggtgcctattgaagaagcacgggcgtttggcgtaatggcggtggacgagagcgataagattatcgatttcgtcgaaaaaccggctaaccctccggcgatgccgggcgatgcgagcaaatcgctggcgagtatgggtatctatgtctttgacgcggattacctttatgagcttctggaagaagacgacagcgatgaaagctccagccacgattttggtaaagacatcattccgaaaatcaccaaagctggcatggcttatgcacatcctttcccgctttcctgcgtgcagtccgatccgcagtctgagccctactggcgggatgtcgggaccctggaagcgtactggaaagccaacctcgatctggcttcggtgaccccggaactggatatgtacgatcagaactggccgattcgcacccatatggagcctctgcctccggcgaaattcgttcaggaccgctcgggtagccacgggatgaccctcaactcgctggtctccggcggctgtatcatctccggttcggtggttgtgcagtcggtgctgttcccgcgcgtgcgggtgaattcattctgtaatattgattcggcagtcttgctgccagaggtttgggttggccgttcgtgccgcctgcgtcgctgcattattgaccgtgcctgcgtgataccggaaggtatggttgttggtgagaacgcggaagaggatgcacgccgtttctaccgctcggaggaaggtatcgtgctggtcacccgcgacatgctgcggaaattggggtacccacaggagcgctaa

SEQ ID NO: 253803 - DNA, 1434 bp, Klebsiella pneumoniae
atgcaggtattacatgtatgttcagagatgttcccgctgttaaaaaccggtggactggcggatgtgatcggcgcgctgcctgcagcgcaaattgccgggggcgttgatacgcgcgtactgttgcccgcgtttcctgatatccgccgcggcgtgacggatgcgcaggtggtaacgcgccgggagacgtttgccgggcgtatcactttactgttcggccactttaacggcgtgggcatctatctgattgatgccccgcatctctacgatcgtccggggagcccttaccacgataccaatcagcatgcctataccgacaacgtgctgcgcttcgcgctgctgggctgggtaggcagcgagatggcctgcggcctggatcctttctggcgtcccgatgttgttcacgcccacgactggcacgcggggctgacccctgcctacctggcggcgcgcggccacccggcgaagtcagtctttacggtgcataacctggcctatcaggggatgttctactcgtggcatatgaacgacattgagctgccctggtcgttctataacgttcatggcctcgaatttaacggtcagatctccttcctgaaggcgggtctttactacgccgaccatattacggcggttagtccaacctatgcccgcgaaatcaccgagccgcagttcgcttacgggatggaagggctgctgcgccagcgacagcatgagggccgcctttcggggatcctcaacggagtggatgatcatatctggaatccggaaagcgacctgctgctggccgcgcgctatgaccgcgatcggctggaagagaaggctgagaacaaacgtcagctgcaaatcgccatggggctgaaggtggatgataaagcgccgctatttgccgtggttagccgtttgaccagccagaaagggttggacctggtgctggaggcgctgccgggcctgctggagcagggcggtcagctggcgctgctgggggctggcgatccggtactgcaggagggcttcctggccgctgcggccgagcatccgggcaaagtcggcgttcagattggctaccatgaggcattctctcaccgcattatgggcggcgccgacgtgattctggtgcccagccgttttgaaccgtgcggtttgacccagctgtacggcctgaagtacggcacgctaccgctggtgcggcgcaccggcggtctggcagacaccgtttccgactgctcgctggagaatctcgccgacggtctggctaccggctttgtttttgaagatagcaacgctgtgtcgctgctgcgggccattcgacgcacgttcgtcctgtggtcgcgcccatcgctctggcgttacgtccagcgccaggcgatgaatatggattttagctggcaggttgccgcaaactcttaccgcgaactttatcaacgcttgctgtaa

SEQ ID NO: 253804 - DNA, 2448 bp, Klebsiella pneumoniae
atgaatgtaccttttagctactcatcacccaccctgagcgttgaggcgttaaagcactctattgcttataaactgatgtttattatcggtaaagatccggctatcgcgaacaagcatgaatggcttaatgctacgctgttcgccgttcgcgatcgcatggttgagcgctggctacgttcaaaccgggcgcagctctctcaggaggtgcgccaggtatactatctgtcgatggaatttttgattggccgtactttatccaacgcgctgttatcgctcggtatttatgaagatgtgaatagcgcgctggaagaaatggggctgaatcttgaagagctgattgatgaagagaatgacccgggcctgggcaacggcggcctggggcgtctggccgcctgcttccttgactcgctggcggcgctgggtttaccgggccgtggctacggtattcgctacgactacggcatgtttaagcaaaacatcgtcgatgggcggcagaaagagtccccggattactggctggagtatggtaacccgtgggaatttgagcgccacaatacgcgctataaagtgcgtttcggcggccgcattcagcaggaaggtaaacattcacgctgggtggaaaccgaagagattattgctgaagcctacgatcagattatcccgggttttgataccgacgccaccaatacgctgcgtctgtggagcgcgcaggccagcagcgagattaacctcggtaaatttaatcagggcgactacttcgcggctgtggaagataaaaaccactccgagaacgtgtcgcgggtactttatccggatgactccacctattccgggcgcgagctgcgcctgcggcaggagtatttcctcgtgtcggcgacggtacaagatatcctcagccgccactaccagctgcataaaacctacgccaatctggcggataaaatcgcgattcatctcaatgacacgcacccggtgctgtcgattccggagctgatgcgcctgctgattgacgagcataagttcagctgggatgaggcgttcgaggtaacctgccaggtcttctcttataccaaccataccctgatgagcgaagcgctggagacctggcccgtcgacatgctgggtaaaattctgccgcgtcatttgcagattattttcgagattaatgactacttcctgaagaccctgcaggagcagtatcccaacgatacggcgatgctgggtcgtacgtcgattatcgacgagtctaacgggcgtcgcgtccgtatggcgtggctggcggtggtggtaagccacaaggtcaacggcgtgtcggagctgcactcccggctgatggttgagtcgctgtttgccgaatttgccaaaatttttccgatgcgcttcaccaacgtaacgaatggcgtgactccgcgccgctggctggcgctggcgaatccgccgttgtcaaaagtgctggatgaaaatatcggtcatacctggcgcacggatttaagtcagctgaaggagctggagcagcatatcgactatccgaaggtcaatcaggcggtacgccaggccaagctggaaaacaagcagcggctggcgaactacatcggccagcagcttaacgtggtcgtcaacccgaaagctctgtttgatgtgcagatcaagcgtattcacgagtacaaacgtcagttgatgaacgtgctgcatgtgatcactcgctacaatcgcatcaaagccgatcctgacgctgagtgggtaccgcgagtgaatattttcgccggaaaggcggcttcggcttactatatggcgaagcatattattcatttaattaatgatgtcgcggcggtagtgaataacgatccggaagttggcgataagctgaaagtggtatttattcctaactacagcgttagcctcgcgcagctgatcattccggcggcggatctctccgagcagatctctctggcagggacggaggcgtccggtaccagcaacatgaagttcgcgcttaacggcgcgttaaccattggtactctggatggcgctaacgttgagatgcaggagcacgttggggcggataatttctttatcttcggtaatacggcggaacaagttgaagccctgcgggccaatggctataaaccgcgtgattactacgagcaggatgaagagctgcatcaggcgctgacgcagattggcaccggcctgtttagtccgtctgaaccgggacgttaccgcgacctgctggattcgctgattaacttcggcgaccactatcaggttctggcggattaccgtagctacgtggattgtcaggataaggtggatgagctgtaccgtcatccggaggagtgggccaataaagcgatgctgaatatcgctaatatgggttacttctcgtccgatcgcacgattaaagagtacgccgaccatatctggcatatcgatccggtaaggctgtaa

SEQ ID NO: 253805 - DNA, 1509 bp, Klebsiella pneumoniae
gtggaaaccaaagatctgattgtgatagggggaggcatcaacggtgccggtatcgcggcagacgccgcagggcgtggtttatccgtgctgatgctggaggcgcgcgatctggcctgcgcgacatccagcgccagctcaaagctgattcacggcgggctgcgctacctcgaacactatgaattccgcctggtgagcgaagcgctggccgagcgtgaagtgttattaaaaatggccccgcatatcgccttcccgatgcgttttcgcttaccacatcgcccgcacctgcgtccggcgtggatgatccgcattggcctgtttatgtacgaccatctcggtaagcgcaccagcctgcctggatcaaccggtttgcgttttggtacagaatcagtacttaaacctgaaatcgtgcgcggtttcgaatattccgactgctgggtcgacgatgcgcgcatggtgctggccaatgcccagatggttgtgcgtaaaggcggggaagtgcgcacgcgcacccgcgccatctcggcaaaacgtgaaaacggtttgtggattgtcgaagcggaagatattgatagcggtgaaaagttcacctggcaggcgcgcggtctggttaacgcgaccggcccgtgggtcaaacagttcttcgacgaggggatgcacctgcgttctccgtacggtatccgcttgattaaaggcagtcatatcgtcgtaccgcgcgtacatacgcagaagcaggcctatatcctgcaaaatgaagataaacgcattgtctttgtgatcccgtggatggatgagttctccatcatcggcaccaccgacgtcgaatataaaggcgatccaaaagcggtggcgatcgatgacaaagaggttaactatctgctgaacgtctataacgctcactttaaaaaacaactcacccgggacgatattgtctggacctactcgggcgtgcgcccgctgtgcgatgatgaatctgattcaccgcaggcgatcacccgcgactacaccctcgacattcatgatgagaacggccaggcgccgctgctatcggtcttcggcggtaagctcaccacctaccgtaagctggccgaacacgcgctggagaaactgacgccttactacaaaggcattggcccggcatggaccaaaaccgcggtgctgcccggcggcgatatcggcggcgaccgtgatgactatgcggctaagctgcgccgccgcttcccgtttattagtgaatcgatggcccgccattacgcccgcacctacggcagcaacagcgagttgatccttgataaggcgacctcgctggacgatctgggcgaacatttcggtcatgagttttttgaagccgaactgcgctatctggttgagcacgaatgggttcgttcactggatgacgctatctggcggcggaccaagcagggcatgtggctcacggaggaacagcaggcgcgcattagcgaatggctggcgcagcacgcgggaaagtctgagctgtcgctggcgtcataa

SEQ ID NO: 253806 - DNA, 330 bp, Klebsiella pneumoniae
atggatcactttgaatgtattaacgtagaagaagcccaccagaaaatgcatcagcagacggcggtgctggtggatatccgcgacccgcaaagcttcgcgatgggccatacgccgggggcgtttcatctgaccaacgatacgctgggcgcgttcatgcgcgacaacgactttgatacggcggtcatggtgatgtgctatcacggcaatagcagcaagggcgctgcgcagtatctgctgcagcagggttacgacaaggtgtacagcgtggacggcgggtttgatgcctggcaccggcattttccggcggaagtcgcgcatggcgcagtttag

SEQ ID NO: 253807 - DNA, 825 bp, Klebsiella pneumoniae
atgattacctcttttgccaacccgcgcgtggcccaggcgtttgtcgactatatggcgacgcagggaattattttgactattcagcagcatacgcagagcgatatctggctggctgacgagagccaggccgcgcgcgtgcaggccgaactggcccgatttcttgaaaatccagccgatccgcgctacctggccgccagctggcagtcggggcacaccaatagcgggctgcactaccagcgattcccttttttagcgacgcttcgccacaacgccgggccggttacctggagcgttctcttcgcctgcatcgccgtctttgtcctgcaatcggtcattggcgatcaaccggtcatgatgctgctggcctggccctacgatccttcgctgaaatttgaagtctggcgctactttagccatgcccttatgcacttctcgctgatgcatattctgttcaacctgctatggtggtggtacctcggcggggcggtagaaaagcgaatcggcagcggcaagctggtggtgattaccgcgatcggcgccttactgagcggctttgtacagcatcagtttagcggcccgtggtttggcggtctgtccggcgtggtctatgcgctgatgggctatgtctggctgcggggcgaacgcgatccgcaaagcggcgtttatttacagcgcggcttgatactcttctccttagtatggttagttgctggatggtttgatgttttcggcatgtcgattgcgaacggtgcgcacgtggctggtctggtgaccgggctggcgatggcgtttgttgatacgcagaatgtgcgaaaacgaacgtag

SEQ ID NO: 253808 - DNA, 1599 bp, Klebsiella pneumoniae
atgcgcaaaacggtagcctttggttttgtcggtacggtactggattatgttggccgcggcagccagcgctgggagaaatggcggccaaccttatgcctgtgtcagcaggaaacactggttgttcatcgccttgagctgctttacgacgcccgttcgcgcggcttgtttgagaccttaaagcaggatatcgccagcgtatcgccggaaacggaggtcgtcggcgttgagatgaccatccgcaatccatgggatttcgaggaggtttacgcctgcctgcacgattttgcccgcagccaccggttccatcctgaagatgaagactatctgatacacatcaccaccggcactcacgtggcgcagatctgctggttcctgctggccgaagcgcgctatcttccggcgcgactggcgcaaacctccccgccgcggaaaaaagacaagccccataccccgggcggcgtgacgatcattgacctcgacctcagccgctataacgctatcgccagccgcttcgcccaggaacgggaagagacgcttaactttttgaaatccggtatcgcgacccgtaatccgcgcttcaaccgcacgatcgagaatattgagcgcgtcgctatccgctcccgttcgccgattctgctgaacggccccaccggcgcaggtaaatcatttcttgcccgccgcatttatgagttaaagctggcgcgccatcagtttaacggtccgctcgtcgaggtgaactgcgccaccctgcgcggtgataccgcaatgtcgacgctgtttggccatgtcaaaggcgcttttaccggcgcaagggaagaacgggctggcctgctgcgcagcgctaacggcggaatgcttttcctggatgagattggcgaactgggagcagatgaacaagcgatgctgttgaaggccattgaggaaaaacgcttctatcccttcggcagcgaccagcaggtcagcagcgattttcagctcatcgccggcaccgtgcgcgatttgcgccagcgggttgcgcagggccagttccgcgaagatctctacgcacgtattaatttgtggacctttgaactgcccggtctgcgtcagcgccaggaagatatcgaacccaatctcgagtatgaaatggagcgtcacgccgcgctaaccggcgacagcgtgcgctttaataccgaagcgcgccgcgcgtggctgacgttcgccacctcgccccaggcggcgtggagcggcaatttccgcgaactgtccgccagcgtgacccgcatggcgaccctggcggaaaacggtcgcatcacggtaagcacggtggaggatgagattgaacggctgcgctacagctggaacgatcgccgcccctcagcgctcgacgcgctactgggggcggaggtggaaaatcttgacctctttgaccgcctgcatctacaaaacgtcattgccgtatgccagcaggcaacaacgatttccgatgccggacgccagctctttaacgtttcacgcctcggcaaagcaacggtcaacgacgcggaccggctgcgcaagtatctggcgcgcttcggcctgggctgggaaatgctaaaggatcagcacagctccagctga

SEQ ID NO: 253809 - DNA, 576 bp, Klebsiella pneumoniae
gtgggcattgagcaggctgccgctgcggcgggcgttcaggttagcgtcccctttgctccaggccgcgtcgatgcgcgccaggatcagaccgatgtcgaagcgatggatctgctgcagccgctggccgatggtttccgcaactatcgccgcattggcggcggcatttccaccgaaacgctgctgattgataaggcgcagcagttaacgctgacggcgccggaaatgacggtactggtgggcggcctgcgcgtgctgggcgctaacttcgacggcagccgtcacggcgtgtttaccgaccgcgtgggcgtattgagcaatgatttcttcgtcaatctgctcgatatgggcaccgtctggaaagccgctgatgagcacgctgagctgtttatcggtcgcgaccgtaagagcggcgaagagaaatacaccgcgacccgcgttgacctggtctttggatctaactcagtcctgcgtgcgctggcagaagtgtatgcctgcagcgatgcgcggcaaaagttcgttagtgactttgtcgccgcatggaccaaagtgatgaacctcgaccgcttcgatctgtaa

SEQ ID NO: 253810 - DNA, 2733 bp, Klebsiella pneumoniae
atgactgacatgaaaatagaaaaccggaaaataaaccggtctgcgtcagaaaatgataagcagcataaaaaaagcttcgccattgaaaccgaggcatttaacagtccggatcatacgctggcgcggttaaaaagcagtcgccacgggctcaccaccgaagatgcccttgaacgactggatgaatacggccgcaatgaagtggcgcatgagcaggcgccgccggcgttgatccagcttttgcaggcattcaataacccgtttatctatgtcctgatggcgctggccgccgtcagcttcgtgaccgattactggctaccgctgcgtaacggcgaagagaccgatctgaccgggatcatcattatcgtcacgatggttagcctgagcgggttattgcgtttctggcaggagtttcgcaccaacaaagcggcgcaggcgctgaaatccatggtccgcaccacggcgacggtgctgcgtcgcggtcccgggaatatggggccggtgcaggaagaaattgccattgaggagctggtgcccggggatatcatcttcctggcggcgggggatctggttccggcagacgtccgcctgctggaatcccgggacctgtttgtcagccagtcgatactcagcggcgagtcgctgccggttgaaaagtatgacgttctggccagcgtttccggtaaaggatgcgacaggcttcccgagccgaacaaagataaaagcctgctggagatgggcaatatctgtctgatgggcactaacgtgaccagcggcagggcgcaggcggtggtggtggccaccggaaaccgtacctggtttggttcgctggcgaaatccatcgtcggcacgcgtacccagacggcgttcgaccgcggggtaaacagcgtcagctggctgctgatccgctttatgctggtgatggtaccgattgtgctgctgattaacggcttcagcaaaggtgattgggttgaagcctcgctgttcgccctggcggtagcggttggcctgacgccggaaatgctgccgatgatcgtcagctccaacctggcgaaaggcgctatcgccatgtcgcggcgcaaagtgatcgtcaagcggctgaacgccatccagaactttggcgctatggacgtactgtgtaccgataaaaccggtacgttaactcaggacaatatcatccttgagcatcaccttgatgtcagcggtcatgagagcgaccgggtgctgacgctggcctggcttaacagcagcagccagagcggggcgcgcaacctgatggaccgggcggtgctgcgctttggcgaggggcggattgcgccagcgaccaaagagcgttttgtcaaacttgatgaactgccgtttgattttgtccgccgtcgggtctcggtgtcggtggaagatgtccgccacggtgacaaaagcctgatctgcaaaggcgcggtcgaagagatgctgatggtcgccacgcatcttcgtgaaggcgataacgttgtggcgctggatgaaacccgacgcgatctgctgttagccaaaacgaaggactataacgcccagggcttccgcgtgctgctggtcgcaacccgcaagctggatgactccgcgctgaccacgccgctatgcaccgccgatgagcagggattgacggttgaagggatgctgactttcctcgatccgccgaaagagagcgcgggaaaagccattaccgcgctgcgcgataacggcgtggcggtgaaagtgctgaccggcgataacccggtggttacggcgcgtatttgcctggaagtgggtatcgatgcccacggtattctgaccggcgcccagattgaagcgatgacggatcgcgacctggagcgagaagtggaaacgcgctcggtattcgcgaagctaacgccgctgcagaagtcgcgcatcctgaaaacgctgcagaaaaacggccacaccgtcggctttctcggcgacggcatcaacgatgcgccagccctgcgcgatgcggacgtcggcatttcggttgacagcgcggcggatatcgccaaagaggcatcggatatcatcctgctggaaaaggatctgatggtgctggaagaaggggtgatcaaaggacgtgagacgttcggcaatatcattaagtacctgaatatgactgccagttctaacttcggcaacgtcttctcggtactggtggccagcgcgtttattccgttcctgccgatgctggcgattcatctgctgattcagaacctgatgtacgatctctcccagctctcgctgccgtgggacaaaatggacaaagagtttctgcgcaagccgcgcaagtgggatgcgaagaatatcggccgttttatgctgtggattggcccaacctcgtccatttttgatatcaccaccttcgcgctgatgtggtacgtgtttgcagcaaatcacgtcgaagcccaggcgctgttccagtccgggtggtttattgaaggactgctgtcgcaaacgctggtggtgcatatgctgagaacgcagaaaattccgtttatccagagccgggcgaccttgccggtgctgctcaccaccgcggtgattatggctatcgggatctacattccgttctcgccgctgggagcgatggtcggactggagccgctaccgctgagctacttcccatggctggtcgcgacgctgctcagctattgcctggtagcgcagggcatgaagcgtttctatatcaaacgtttcggtcagtggttctga

SEQ ID NO: 253811 - DNA, 684 bp, Klebsiella pneumoniae
atgttgatgtttccttatatcgcaaatttactcgccgcgatgctgttgggcgcgctgattggcgctgaaagacagtggcgtcagcgtatggccggcctgcgcaccaactcgctggtcgccaccggcgcggcggtttttattctgagctccatttcaacatcgccggacagccccggacgtattgccgcgcaggtggtatccggaattggttttctcggcgccggcgtcatcatgcgtgaaggcatgaacgtgcgcggcctgaataccgccgcaaccctgtggtgctctgcggcgattggtgtactatgcggtttaggccagttctggcaagcagcggcggcaacgctgataatcctctgcgccaatattctactgcgcgaagcggcgcagagaattaatcagatccccggcgcgacagaagaagagaaatgctacgttctgaatattgtctgtcaaagcgaatatgaaaacgcgattcgtcagctattgcttaatatcagtaaagagatgacgctcagccttcagggactggtgtcgacagcagcaaaagaacaagggcataaagaaatccgcatcgaactggtgggaaataccgactgtcgaaaagcgcgagatctcattatgacaagaattggcggggacgaaaagattacgtcagtccgctggtgcgtcgaggggagttaa

SEQ ID NO: 253812 - DNA, 513 bp, Klebsiella pneumoniae
atgtccagaaagcaagttttgcaagcggcgctggcggcggcgctttcgctgaccatgatggcgacgcctgttttcgccaaccccggtaacggcaacggcggcggtaatcatggtaatagcggtaaccatgggaataacggtaacaacggcaatagcggtaaaaacaacgttgataagggcaacaagggtcataaagaaggaaacccggggcagagaaaaaattacggcaaacccgatcatgtctctgccgatatcagcttctccagagcgcgttcgctggcggtaaactacggtttaaccggctatcagtcgctgccgccggggatagcaaaaaacctggctcgcggaaaacctctgccgccggggattgccaaaaaagcggttccggcatcgatgcttaacgaactgccgtactatcctggctatgaatggcgcgtggtgggccaggatttggtgctaatcgcgctgagtacggcgatcgtgacgtcgataattaatggcgtctttgattag

SEQ ID NO: 253813 - DNA, 1410 bp, Klebsiella pneumoniae
atgtctaccacccaggtcctgggcgacgccgcgttcgcctctccgggacgctcccactccagcctgaccgctcgcattgatgcgctgcccgcctccgttggcctgtggtcttttatcacccttctggcgctgggcggtttcttcgagctctacgatctttttcagaccggttatatcagtaccgggctgctggcagagaatattttccataccggcgaacagggtattttcgggatttcagaccaggccgccttcgcctcgtctacctttatggggctgtttatcggcgccagcctgcttgcgccgctggcggacaaactgggccgccgcctgacgtttatgttcgccctcgcctggtacggcgtgttttccctgatgatggccctgcaaagcagcgctgaaggggttatcttctgccgctttctggtgggcatcggtctcggtattgagctggtgaccatcgacacttacttaagcgaatgggtgccgacgcatctgcgcaataaagccttcgctttcgccttctttattcagtttttatcggttcccgccgtggcgctgatgtcgtggatgctggtgccgattaccctttttggcctgaccggctggcgctgggtgattatcttcggcgcgctctgctcattgatcatctgggtcatccgcaagaagctgccggaatcggcgcgctggctggaggaaaagggccgccatgatgaggcccataaggtcatgtgcgaaatggaacagcgctgcggcgtttctccctcgccgcgccatcaggtgcagacgcaggatcatccgcgcaggctgggaagttttaaagcgatctgggcgccgcagtaccgcaaacgcacgattatgctgatggtgatgaacttcttccaggccatcggcttctttggcttcggcaactggctaccggccctgctttccggccagggagcgagcatcacccacagcctgctgtatgcgttttttattaccctcgcctatccgattggctgcctgttttgtacccgcttcgtccatcgttttgaaaacaaatggcaaattgtgctttccgcgctgatgacggtggtatttggtaccctgtttgcgcttcagaacagtccggtgctgctggtgatctgcgggtttatgatcacctggtcaaacgcctggctgaccattagctatcacgcctaccaggccgaagttttcccgacccatattcgcgcgcgggcggtcggcttttgctactcctttagccgcctgtccacggcgatcaccagcattttgatcggcattattctgcaatacgccggtacacccggggtaattagctttatcgtcgccagcatgctgatggtgatgctttcagtaggcatctttggaccaaaaacccgagggattagcctggagaatatttga

SEQ ID NO: 253814 - DNA, 1164 bp, Klebsiella pneumoniae
atgcccggatatctggtacgaataacgttgatcatggcttttgttcaattcatcaacgcgctcgaatatatgatttttaatcccttatttgcctggatggcgccgacgtttcaggtgccggtaagccaggcgggttacgtcaccggcatttatacgctggcttccgtcattgcgggggtcagcgtctggcgatgggtcggtaacgttaaaccacggcgctttttgctctgcaacatggccctgctgggggggttaacaataatgacgctgaccaccaccagttttagcggattgttgttttggcgttttctcgccggtctggtcggcggaacaacgatgggggtgggcagcagtttgctggtcaacattatgccagcacacctgcgtcctcgggcgttggcctcaacgattgccgcattctcgctggtcagcatcgtcggcatgccgacgatgttatttctcagtgaaaaaatcggctggcagatagcccccgcgacgatcggcggactctgcctgattgcgttgccactgataaaactcgcgctgccggaacagcccgttgcggcgaaccgtcaggcagatttgcgctggtcttcatcggtgctgttttacgcctccggcaacgccctcgcgcagttcagtgcgatgttaatcattccgctgctggttccgttactgacggcgaaaatgggggtcagcggcgatcaattaccgtggatctttttcgctggcggactggcggggctgtgcgccactaaactcaccggcaagctatgccagcattacagcggctactgcatcagcctgctggccagtctgctgtttatactgagcctgagcatcgcttttaccttcaaccacggcggcgggctgtttatggtgttgtttctggcggccgcctactgtcgcctggtggcctcatcggcagtggcgatgcgttttccagaggatggcgccagggcggggtttacccttttacagaataccctgatgtcattaagtacggcggcggcttttctgctttcatcatggttgttatcggttgccgggaacggcgagcgggcgatgaatgggatattgctgctctgcgccctgagcgcattgccgctgccgtggctactacgggttcaggagaaaaaattagccgcgcgcgccgccggttaa

SEQ ID NO: 253815 - DNA, 900 bp, Klebsiella pneumoniae
gtgaaaagattggatctcaacgcgctgcgggtcttcgtcaccgtggcggaaaatggctcgtttagcgccggcgcaaaagcgctgcagatgccctcatcgaacgtgagccgacagatatcccagcttgagcagagccttcagctgcgcttgatacagcgcagtacccgacatatgaagctgacctctgccggtcagacgctgctcgccagtatgcgacccgtgctggagcagctagccgctacggaagctgagctaacgcaacagcaggcagaacccgaagggctcctacgcctgtgtctccctaacgaaattggcccctcgctgtttgcgccgctaatggcgcaatttgccctgcgctatccaaaaataaccgtgagctgtacgactaatctggcgggaacggaggtgttaaaagaggatgtggatattgcggtgatcatcactcgcggcaaaatggaagacatctgcgttattgcgcgcccgctcttttcgtttccctgctgcgtggtcgcttctccgcagctgatcgccagaacgggtatgccgacagacagcgagcaattaacctcgctaccctgtataaccaccgtcagcgccctcgcggggcaagcctggcagtttgccgcggcggacgggagctttaaaaaggttaacgtcaacgggcactatcgcgtcaacagtggcgaaatggcgctgcatgccgctcttgccggtgtcggattcgctattctgggggaacaaccctgccgcccgtttattaatcgcggggagctacaggaagtcacgcttgagttaccgccggcgccgttacaactttcagccctctatcgggagcgccattttatgcccgccagaatgcgcgcctggcttgaatttatccagaggcagatggcaggctaa

SEQ ID NO: 253816 - DNA, 906 bp, Klebsiella pneumoniae
atggatattaaacagcttaagtacctgattgcgctcgacagaacacgacattttggccaggccgcagcggcgtgccacattactcagcctacgttatcaatgcgtattcgcaatctcgaagaagagctcaatttaacccttatccagcgcggacagcgctttgaaggatttaccccggagggcgagcgtattctggcctgggcgcgagcgctgctggcggcgcatgacgggttagaagccgaggcggctatctgtcgggggcagatggtcggccagctaagggtggggatggtgcctttagccagccttaatccgatgcagttgataaaaccgctggcggagaactatccggagctgcagttcagcctgctgtccatgacgtcggaacagattatcgacggcgtcagccgcaaccagctggatttagggatctgctacctgcaccacgtcgatagccagctgttcaacgtgctctggctgccgcatacgcgtatggggctgctgcatgataaacgtcattatcaatttaccgatgcgacgccggagtgggagacgctggcggcgctgccgctgggctttctgaccaagggcatgtactaccgagaatcgattgaaatgagctttaaggccaagggactggcgccaaaatacgtttttgaaagcgattccacgtttcagatcatccaggcggtgcaggccgggatctgctgcgcgattatgccgctgaataacggactggaagcgttaagcgataacctggaaatcaggccgatcgccgaaacggaggtcgactcgatgctggcgctgatcatgcgcaacaaagagccggtgtcgtcgctggcggaaaaatgctttgccgatgcccaggcgatttttagcgaacgccagcaggatgaaggcgcttag

SEQ ID NO: 253817 - DNA, 201 bp, Klebsiella pneumoniae
atgccaggcctggaagccatatcgttagtcacggatcagcgctttccgcgccattcccacgaccagttcggtatcgggattttcactcagggcgcgcagcattcatggagccatctgggcaaaattgaggccgtcgccggagatatcattatggttaatccgggcgagatgcacgatggtatctggcgtgggccaccctga

SEQ ID NO: 253818 - DNA, 327 bp, Klebsiella pneumoniae
gtgacaggcatcgagcaacgcaactcgcgtcaggtcatcagccacgcgatcctgatcaatttgctcaaccccaaactaccgctcttctttctcgcctttctgccgcagtttatccagcgcaactcgacgtcgccgatcggcgaaatgctgatcctgagcgctgtgtttatgctgatgacgctgctgatttttctgctctacggcgccttttctgcggcgatgcgcggatacgtgctgacgcgtccgggggttttacaggggctgagagcctgctttgccgccggtttcgtcgggctgggggttaagctcattctggcgcagaggtag

SEQ ID NO: 253819 - DNA, 2301 bp, Klebsiella pneumoniae
atgagtaatagaagacgcgtcgttcccggcgtccatccctatgatggtccggcgggcggctggggtgccttaaaagccaccgcgatcgccgtgcgtacgcaaatggacgcgctcgatgctcccgccacgctgctgcggaccaatcagccggatggttttgattgccctggctgcgcctggcccgacaaagagcataaatcgacgtttcagttctgcgaaaacggcgccaaagcggtgacctgggaagccaccagtaaacgggtcacggctgagtttctcgcggctaacaccgtgacgtcgctgctggcgaggagtgatttcgagctggaaggctacgggcgattaactcagcctctggcctatgataaggacagcgataccctgcgtcctgtctcatgggaagcggtgtttgcccgtatcggcgccattctccggacgctgcagcctcatgaagtcgagttctatacctccggacgcgcctctaacgaagcggccttcctgttccagctgttcgcccgcgaatatggcaccaacaactttccggactgctccaatatgtgccatgagtcgaccagcgtcggcctgccgcagtccatcggtatcggtaaagggacggtctcacttgatgattttgaaaagaccgagctggtgatttctatcggccacaatcccggaaccaaccatccgcgcatgatgggcacgctgcacgaactggcgcgccggggcgtgccgattatcgtcttcaatccgctaaaagagcgggcgctggaacgtttcgccgatccgcagaacgtcattgagatggcgacctacagctcaaccaacattgcatcgacttacttccaggtcaaagcgggaggcgacgcggcggcgcttaagggcatcgcgaaggcgctgctgcagctggaagcagagcagggcaaagtgctggatcgggcgtttatcgatgagcatacgctgggctttaccgactttgcgcaggatctacaggcgacgcagtggcaggatatcgagcgcgagtcgggtttaacgcggggcgatcttgaacgggtagcggcggcctatgccaaatctcatgccaccattatcacctacggcatgggcattacccagcataataagggcaccgctaacgtccgcctgatagccgacctgctgttgatgcgcggcaatatcggtaagccgggtgccggaatctgcccgctgcgcggacactccaacgtgcagggtaaccgcaccgtcggcatcacggaaaagccgagcccccagtttctggccaacctgcagcgggtgtttggttttacgccaccgcaggagcatggtcatgatgcggtaaaagcgctgcaggcgatgatcgagggtgaatcgaaagcgcttctctgcctgggtggtaacttcgcggtggctatgccggatagcgaacgggcttttccggcgatgcggggactggatttgagcgtgcatattggcaccaagctcaatcgttcgcatcttctggtggcgaaagagaccattatcctgccgtgtcttgggcgaaccgaactcgatctgcaggagacgggacggcagtcgatcaccgtcgaagattcgatgtcgatggtgcatgcatcgtcgggcaaactgaaacccggttcgcctgaactgcgctcggaaccggcgattgttgccgggatggccatggcgacgctgacggagagcaaaattgactggctggcgctggtcgccgactacgatcggatccgcgatctgattgagcagaccatccccggctttgaccactacaatcagcgcattcgccatcccggcggttttcgcatgccgctgccgccgacggagcgtatctggcccacgccgaccggcaaagcgatgttttccgttttcgacggggtgcacgaaaaccagcaggtagaagggcatgaggtgatgcgcctggtgacgctgcgcagccacgatcaatacaacaccaccatctatgccatggacgatcgctatcgcggcgtgtttggccgtcgcgacgtgctctttatgaacgaacaggatatggctgagctgggatttgaacacggcgaccgggtggatatccgctccgcgctgccgggccaccatcagcggctggaagatatcacgctggttgcctacaacatcgccccgggcaccgttgcggcctactaccctgaagctaacgttctggttcctctggattaccttgataaagagagtggaacgccatcgtataaatcggcgcccgtgcgcttaaccttgcgctcgaaagagattcgcgcgctgacagggcttcgctaa

SEQ ID NO: 253820 - DNA, 918 bp, Klebsiella pneumoniae
atgattatccggccagaacaacactggttccttcgcttgtttgactggcacggctccgtgctgtccaaaattgtttttcgcctgctgcttaacgtaatgatgtcgattatcgccatcattagctatcaatggtatgagcagctggggatccatcttaccgtcgcgccgtttagcctgctggggatcgccatcgctattttcctcggatttcgcaatagcgccggatataaccgctttgttgaagcgcgcaatttatgggggacggtgctgattgcccagagaacgctggtgcgccagctgaaaaatattctgccgacggaaagcgcagcccatcaacgcctggtgagctatctggtggcgtttagctggagtctgaagcatcagctgcgtaagacggatccgagcgctgatttagcacgtctgctgccgccgcacagcgtgaaggaaattctcgccagctcgatgccgaccaaccgtattctgctgctggcaggtgatgagctggggcgtctgcgcgcagaagggaagattggcgatatcaccttcagcctgatggacaataaacttgatgagctgggccacgcgctggggggctgcgagcggctggccagcaccccggtgccctttgcctatacgcttattttgcagcgcacggtgtatctgttctgcgcgctgctgccgtttgcgctggtcggcgatcttcactatatgacgccgttcgtgtcggtgtttatctcctacaccttcctgtcgtgggattcgctggcggaggaactggaagatccgttcggtaccgccgctaacgatttgccgctgaacgcgatgtgtaacaccattgagcgcaacctgctggatatgaccggacagtatcccttaccggagaaactggtgccggaccgccactacaatctgacctga

SEQ ID NO: 253821 - DNA, 981 bp, Klebsiella pneumoniae
atggcggcgacttattcaggaaaaattaagcctgaacgcgtagtctggctctttttcttcggggaagtgtcggtaatgaaaataagtaacgataagcagcgttcccaggttgcgcgtaaaacgacgctggtcagcgtgatggtcaatctctttttatccagttttcagatactggccgggatattctccggctcgcagggcttaatcgccgatggtattcattctctttccgatttggtggccgatttcgttgtgctgttggccaataaaaaaagcggcaaaccttcggatagcgaccatcactacgggcaccggcgctatgaaaacggcgcttcactggtgattggcgcgctgctgttactggttggcgcgggtatgctgtggtctgcttgcggcaaactactgcaaccggaatctattcagagtgtgcatattaccgcgctgtgggtggcgctcgccgcgctgaccgccaaagagattttattccgctatatgctaagggcggctaagcaaatccagtcctctatgctaattgccaacgcctggcacgcccgctcggacgccgcgtcttcggtagtcgttgcggtcggcatcatcggtaatctggccggttacgcctggtttgacccagtggccgcactggttgtcggcgcgctggtcacccgcatgggctataccttttcgtctgacgccctccatgacctgatggatcggtcagtggatagcgatagcgagcggcaaataatcgccactatcctggcaacgcccggcgtcgtggcgctgcacgacctgaaaacccgtcgtgccggggatttgatcctggtcgatgtgcatgtcgaagtacccgggcatttatcggtagcggaggggcacgatattgctctgctggtgcggacccgggtgctaagccaccataacgttctgcatatgatgattcatattgacccgtgtcgcgcagagagcgacgcgattgtcgcgtaa

SEQ ID NO: 253822 - DNA, 870 bp, Klebsiella pneumoniae
atgatcagcatacgcggaacgattgaagctcaggttctgggcttaaccggcatggcgctaaaagagatcgattttgaacatcccaaaggcgaaccggggctttttgggccgcagtcggctatctggcaggttcacggcgatttcacttccatgctctgcggtggggtcagcgcgctgttgttacaaatgctgcatccgctggccctggcgggcgtctgggatcactcaaatttccgtgaagatatctttggccgcctgcgccgcaccagccagtttatttccgccaccacctttggcaccaccgccgatgccgaacggttgattgcaaaagtacaggggatccatctgcgggtaggcggccaggacaaagacggcacgccctatcaggccagcgatccacacttgctgacctgggtacacgtcgccgaatgcagcagctttatggcctcgcatctgcgctacaagcggaccgtggtcagcgccgcgcgtcaggagcaatactatgaggaagcggccgaagttgcccgtcgcctcggggcgcgggatatcccgcagacgccgcggcagattgctgattacctgcaggatatgcggccggtgctgcgctgcgatgagcgaacccaggaagttgcccacgttctgctgtcgacccgtctgccgggccttatgagccggccggtggggcgaataatgatgcgcgccggaattgacctgctgccgccgtgggcgcaggagatgcttaatttgccgatgagtacgctacagcggcacagcgcgcggtttgcggttcacggcgtcgctcgcatactgcgcgcctcggtgcgcaacggcgcgtatcattgcgcaatgcgccggatgaatcagttttaa

SEQ ID NO: 253823 - DNA, 432 bp, Klebsiella pneumoniae
atggcaatccataagaaaggtcaggcgcattgggaaggggatctaaaaagcggtaaaggaaccgtctctaccgagagcggcgcgctgaaccagcagccttatggttttaacacccggtttgagggtgtgaaggggactaacccggaagagctaatcggcgccgcacatgctgcctgtttttccatggcgctatcgctgatgctgagcgaagagggctacaccgcgacctccattgataccgtggcagtggtaacgctggataaatccggcggcggtttcgccattacccagatcgcgctacagagcaaaatcgtgctgccaggcattgaggccgacgcgtttgacagcattattcagaaagcaaaagccggttgtccggtttctcaggtgttgaatgctgagataaccctcgattatcagctcaattcctga

SEQ ID NO: 253824 - DNA, 480 bp, Klebsiella pneumoniae
atgattgttattcgcccaatgcgcgatgaagagtacgccgcgtacctgaactattttattgccgattatgcggcggagatcgcgaccaattacgcgctttctccggaggcggcattggcccaggcgcagcgcgaaattgccgaggatctgcccgatggcgtcaatactcacggccaggctttacgctgcttattcgatgaaattgacggtacagaaaagcgggttggctatctctggtataagcctgacgcagaaatacgctccgcctttatctgtgatttttatatttttccgtccttgcaggggcagggattgggtaaacaagcgatggcggcttttgagcatgaattaaaaaacctgggtatccgccaaataaaactgcgcgtcgccggcgataatccgcgcgctcgccgactctatgaagtcaccggatttcgcgttaccggcatcaatatgagtaaaaatatcgctgcggattga

SEQ ID NO: 253825 - DNA, 903 bp, Klebsiella pneumoniae
atggatcgagtcattgccgcgcaggtctatatgcgtatttgtgagctgggaagcttaagcgccgccgcgcgggcgctggggatgtcgcggccgatggtgagccgctatcttgaacagatggagcagtgggctggcacccggctggttcatcgctctacccgcaagctgacgctcacggctgcgggggaaaaggtactacaaaaaacgcgcaccctgacgcagctgtcggatgagatcgccgggcagagtgaacgagcgatccccagcggaacgctgcgcgtagcctgcgctcattttaccgcgatgcagctgatttctccgcttttgcccgattttctcgcccgctatccgcagctgcgtcttgagctggatatcaacaatcatccggtaagcctgataggcgaaaggatcgacgtggcgattcggatcaccgacaatccggagccgggagctatcgcccgccgtctcggcgtttgccgttcggtgctgtgcgcgtcgccgcgctggctacagcagaatgggccgctgcaaacgccggacgatctcactcgccacaactgcctgcattacagccattttgccagtcagacctggcagtttagcgaccccagcggcgaaagcgtggcggtggcggtttccggcaaccttagcgccgggatctcctcgctgttgatggaggcggcggtagccggctgcggcatcgcaatgctgccggagctggaggcgcagcgggcgctcaacagcggggcgctgaaacaggttttaccgacctggcggccaaaagccttaaacgtgtatgggatttatctctcgcgggactaccagccgagcgcgctgccgctgtttcttgaagagattcagcaaaaactggcgcaacctaacgatataaaaggacccttgtga

SEQ ID NO: 253826 - DNA, 852 bp, Klebsiella pneumoniae
atgaaattatctgcccttgccatcgccactacgctgttcagcgcttcagttctggcagcccctttaacgttgcaaacctataacccgcaggagaacggtattttcgcggttaactccaccctcgcctccggcccgcatgaagcggtgttgtttgacgctcagttcagcgtgaaggatggcgagaagctggttgaaatgattcagaaaagcggtaaaaaactgacccgcatcgtgattacttccggcgatccggatttctattttggcctgcagccgctggtcaaagcgttcccggaagccaaagtggtggcaaccgcagaagtggttaaacacattaacgccaccaagcaggccaaactggcgtactggggcccgcagatgaaggacggcgcgccgaccctggtttatgtcccgcaggagctgacggctaataccttcactatcgacggcgaaaaggttgagatccgccagccgcaaaattatgccgcctatgtgtggatcccggcgaataaagccattcttggcggtaccggcgtggcgtggggtatgcacgtctggacggcggacactcagagcgtcgaaagccgtcagcagtggataaatacgctcgacgagatggccgcgttgcatccgcagcaggtgatccccggccattatctcggcacgccgccagccggtgaccgggcgattacttttactcgcgattatttgacccagtttgagcaggcgctcaaagagcataaagattccgctggcgtcattaaggcgatgaaacagcgctggccggggctcgcggaagagagttcgctggagctgagcgccaaagtgaataccggcgaaatgaagtggtaa

SEQ ID NO: 253827 - DNA, 141 bp, Klebsiella pneumoniae; identical to SEQ ID NO: 172227

SEQ ID NO: 253828 - DNA, 1698 bp, Klebsiella pneumoniae
atgcaattcactcataagaaaaaccgctctctttacatcccttacgccggccccgtgctgcttgaatttccgctgctcaataagggcagcgccttcagcatggaagagcgcagcagctttaatctgctgggcctgctgccggaagtggtcgaaaccatcgaagagcaggccgaacgcgcgtggatccaataccagggatttaaaaccgagatcgacaagcacatttacctgcgcaacattcaggataccaacgaaaccctgttctaccgtctggtcggcaaccacctcgatgaaatgatgccggtcatctataccccgaccgtcggcgccgcctgtgagcgcttctctgagatctatcgtcgcgcccgcggcgtgtttatctcttaccagaaccgcaataatctcgacgatattctgcaaaacgtaccgaaccataacgtcaaggttatcgtgatgaccgatggcgaacgtattctcggcctcggcgaccagggcatcggcggaatgggcattcctatcggcaaactgtcgctgtataccacctgcggggggatcagcccggcctacaccctgccggtcgttcttgacgtgggcaccaataatcagcaactactcgacgatccgttatacatgggctggcgccacccgcgcattaccgacgatgagtattaccagtttgttgacgatgttattcaggcgattaaagcccgctggccggatgtgctgctgcagttcgaagacttcgcgcagaaaaacgctatgccgctgcttaaccgctatcgccacgaaatctgctccttcaacgatgatatccagggcaccgcctcggtcaccgtcggtacgctgattgccgccagccgcggcgcgggcagtcagctgagcgagcagaaaatcgtcttcctcggcgccggttccgcaggctgcggtatcgcggagcagatcgtcgcccagatccagcgcgaagggttaagcgaagaagaagcccgcaaacgcgtatttatggttgaccgtttcggtctgctcacggatgcgatgccaaatcttctgccgttccagagcaaactggtgcagaaacgcgaacacctgcaagagtgggacaccaccagtgacgtgctgtcgctgcttgacgtggtgcgaaatgtaaaaccggatatcctgatcggcgtctccgggcagcctgggctgttcaccgaagagattatccgcgagatgcataagcattgcccacgaccaatcgtgatgccgctgtcaaacccgacctcaagggtggaagccacaccgcaaaatatcctcagttggaccgacggagaagcgctggtcgctaccggcagtccgttcgctccggtaacgctcaaaggcaagcagtacgtcatcgcccagtgtaacaactcctatatcttcccggggatcggccttggggttatcgcttcaggcgcttcgcgcgtgaccgatgagatgctgatggccgccagcgaaacgctggcgaaacattcgccgctggtgaataacggtgaaggtccggttctgccggagctgaaagatatccagagcgtttcgcgcgctatcgcttttgcggtgggtaaaattgcccaggagcaaggcgtggcggtgaaaacctccgccgaagcgctgctgcaggcgatcgccgataacttctggcagccggaatatcgcaactatcgccggacgtcaatataa

SEQ ID NO: 253829 - DNA, 675 bp, Klebsiella pneumoniae
atgcgcatacttgtctttgcggataaggctctgctgcgtcatcatttgaaagtacagctaacgcagcaagggcatatcgtcgatgatgcacaaaacgtcaaggaagcgaattactatatcgtagagtatccgcctgacatcgcaattattgatctggacgcgacaagtgaagcgggtctggctctgatccgcgactggcgcggccagggggtttctgtaccgatattggttatgagcgcaggcgagtgctggcaggattgcgttaacgccctcaacgccggtgcggacaaccacatccgtaagccatttcatattgatattatggttgcgcgtatcaatgcgctttttcgccgcaactatggattgtcatcagaattaatctcaataccgccatttctgctaaatctttcacgtcgggaattgtcggtaaatggtgttacgttaaatctgaccgcttttgaatatattattatggaaacattaatccgcaactgcggtaaagttaccagcaaggatgatcttatgcgccagctgtatgcagaaggagagctatattgcagcagttcactaatggtccttattgggcggatacgtaaaaagattcgggcgtgttattcatctgagtccatcgtgacgattcgccggcagggctatagatttgatatcaaaaaatag

SEQ ID NO: 253830 - DNA, 1713 bp, Klebsiella pneumoniae
atgagtacattactaactgcacaatctctccatgttgatacggcgtttggcccgctgttcacaaacctctcctttaccctcaaaaaaggcgaccgcattggcctgattggctataacggctgcggaaaaagtaccctgcttagagtgctggacggcacgatgattccgaatgggggcagcgtggcgctggccagccactgcctgatggcacgggtggaacagcatctacccgatacgctgttagcgcaacctctgctacaggtggtcctggaaaaacttcccgcccttgagcgagagaaccagcgctggcaagcggagcggctgctggcggagatgggctttacggccgatgaagcccggcagcgggcatcaaccctgagcggcggtcagcatacccggctgctgcttgccagggcgctgattcagcaaccggatctcctgctgttggacgaaccgggaaaccacctcgacctgccgaccctcctgtggctggaaagcttcttgcaaacctggcaggggagtttcattctggtgtctcatgacaacatcttactggatgctgtaactaatgcgagttggatcctgcgcgacaaaaccctgcatgccttctccctgccctgcagcgctgcccgtcaggcgctggatgagcgagatgccagcgatgcgctgcgccataaagccgagcaaaaagagattgaccgggtcgccgccagcgccaaacgactggctatctgggggcgcacctatgacaacgaagatctctcgcgtaaagctaagcagatggaaaagcaggttcagcgcctgaaggagagccaaaccgatctcaccgccggaacaccctggcggctaacgctgcgcggcgacatgctgcgggcagacaggctgctggagatggatcagcttcccgtcccgcccgcgccgggtctgccggtcctgtttactgcgggtctggctcgtctgaaaagcggcgatcgggtcgcggtaatgggccgtaacggcggcgggaaatcctccctgctgcgtctactgtggcgacatatgcagcaggaatcagcggaggacggcttacgcctgcacccgcggctgaaaccgggttattacgatcagaccctgcatcagcttgcggatgacgacacgcttctcgacgcgctggagccttttgagccggcggcggacgcgcgcaagcgggcgctgatctcagccggatttagctgggctcgtcacgggcaaaaggtcgccaccttaagcggcggcgagcgttcgcgtctgctatttgtcggcctgtctctggcctgctatagcctgctgcttctggatgagccaaccaaccatctggatatggacggcaaaacagcgctggcaagaacgttgtgcgactacccaggcggactgctgctggtgagccacgaccgcgaactcattaaccatagctgcaatcgcttctggcttattgacgagcgcgggctgagcgaatggcacagcgccgaagaggtgtatgaggttttacgcaccgccgttcgttgtccggccccggaggtcgtggcggagaaccgccgcgaagcggaggaagaccatgatacgctgctggaacggttagtgtcgcttgagcaactgctggccgacgatctggcccgtaaaccaaaacatcaaaaaccgcagctgcaggcgcagtggcgtaaggagatagccaccctcaacgctttgctaagctaa

SEQ ID NO: 253831 - DNA, 969 bp, Klebsiella pneumoniae
atgaactcacccgcgcttgttgatgaaattcgtaccgcttcccgcctgatggtgcgtgaactgggctttatgagcaccacgctggccgctacggcgtactcaccttcggcggtacatacgcttgtggaaatttcactacgcggcgcgatgacggccgcgcagctggtgcagatcctggggctggaaaagtctagcgtcagcaggatgctttcccgtctgcttgccgccggcgaacttcaggaaaaaacgtcctcccgcgacgggcggattaagcagcttgcgttaacggcgcaaggtgcggctacggtcgaaaaaattaacgcctacggcgctatgcgggtagtggatgcgctggaacacctgagcgatgcgcaaagacagtgcgtcgctcagggcctcacaacctgggcctgggcgttggaaaaatgccgcgacgtcgaggctacaggctcgaaaaagacgattgatatcgctaccggctatcggcctggaatgattggccgcatagcgcaaatgcacggcgagtattatgcaaaacattatcagtttggtgcttttttcgagagtaaagtcgccagcgggctggcggaattttcagctcgtctcgataaaccgtgcaaccgtgtttggctggccgttcagggcgagcaaattgtcggatcggtagcgattgacggcgaggatctggggaataaccaggcgcatctgcgctggtttattctcgacgatagctgccggggtagcggcattggtcggcgcctgctgagcgaagccatggctttttgcgatagccgggactttgcatcagtacagctatggaccttcagcggcctgcacgccgcccgcaggctgtatgaatcctttagtttcacgctggataaagagtggcagggcgaacagtggggcaggacgatgaccgagcagcagtttagtcgaatcaaaccgcgaccggcgactcatgctaagtaa

SEQ ID NO: 253832 - DNA, 600 bp, Klebsiella pneumoniae
atgcatctggcgaaaaccctcctggccgcaggccttctgctttctaccgccgttgaggcgcaaaacgtgctggattttccgcagccgaacaacaaccctgaagagttttacgccgtaaccgaaatcccggcaggcggcattatcaaatacgaaacggacgccaaaaccggctttctgatcgccgatcgtttccagtcgatgccggtggcctatccggctaactacggctcgctcactcaatcgctggcaggggatggcgatccgctggacgtggtgttttatacccgcgcgccgatggccccgggaacgctgattaagctgcgcgcgattggcgtgctgaagatgattgatggcggcgagaaggacgacaaaatcattgccgttccggcaagtaaaatcgatccaacctacgatgacgtgattaacatcagcgatctgccgaaaattgagcaggagcgtctgcaggctttcttccgggtttacaaacagctgccggacggacgcaaaaaagtcgagctggacggctttaacgatgccgccgccgcgaaacaggaaatcaaagcggcatgggaagcgtggaaagagaaaaatccgcaataa

SEQ ID NO: 253833 - DNA, 1011 bp, Klebsiella pneumoniae
atgaaagctgccgtcgtcacgcaagatcatcaggtcaatgttacggaaaaaacacttcgcccattacagcacggcgaagcccttttaaaaatggactgctgcggcgtctgccataccgacctgcacgttaagaacggcgattttggcgataaaaccggcgtcattctgggccatgaaggcgtgggcgtggtgcagcaggtcggccctggcgtgcactcgctcaagccgggcgatcgcgccagcgtcgcatggttcttcgaaggctgcggtcactgtgaatattgtaacagcggtaacgaaacgctgtgccgttcggtaaaaaatgcgggctacaccgttgatggcgggatggccgaagagtgtatcgtcattgccgattacgcggtcaaagtgccggatggtcttgattctgcggcagccagcagcatcacctgcgcaggggtcaccacctataaagcggtaaaagtttcccatatcaaacccggccagtggatcgccatttatggcctcggcgggttgggtaacctggccctgcaatatgcgaaaaacgtttttaacgccaaggtcatcgcccttgacgttaatgatgaacagctgaaactggccgcagaaatgggcgcagatctgaccatcaattcccgcagcgaagacgcggccaaaattatccacgagaaaaccggcggcgcccatgccgcagtcgtgacggcggtcgccaaagcggcgtttaactctgcggtggatgcggttcgcgccggcggacgcgtagtggccgtcggcctgcctccggaagccatgagcctggatattccgcgcctggtactggacggtatcgaggtggttggttctctggtgggtacgcgccaggatctggccgaagccttccagtttgccgccgagggtaaggtggcaccgaaggtcaccctgcgcccgctgggtgatatcaacgccatctttaaggagatggaacagggacaaattcgcggtcgtatggtgattgatttccgccgttaa

SEQ ID NO: 253834 - DNA, 999 bp, Klebsiella pneumoniae
  misc_feature (896)..(905): n is a, c, g, or t
atgcacatccgttttcgcctgcccgcgctggcggcgctatttttaaccggcgcgttttccgcctgggccgccgacgccccggttaaaggcggtacgttaatctatctggagcagcagccgcatactaatctttacccaccggccggtggcttctaccccaacggcggcattcttaatcaaataaccgataagctcacctggcagaacccgaaaacgctgcaggtggagccgtggatcgccgaaagctggagcgccaacgcggataaaaccgaatatacctttaagcttcgccccggggtgaccttctcagatggcaccccgcttgacgccagggcggtcgccaaaaactttgatacctacggcctcggtgataaagcgcaccgcctgccggtgtctgaggtcattaataactacgatcgcagcgaagtcatcgatccgctgacggtaaagttctactttaaaaagccctcgccgggatttctgcagggcaccgccaccatcggctccgggctggtatccctcagtaccctggcgcgtaattttgaagagctgggcgatgcccgccatattattggctccggaccttttacggtaaaagatgaaaagccggggcgcgaactcactctggtcgcgcgcaaagattatcaatggggaccgaaaaatctcacccagcaggggccagctaatctcgatggcatcacttacatcgttacccctgaagatggcgtgcgcattggcgctctgctggcgggccaggctgactttatccgtcaggtacaggcctacgatgaaaagcaggccaccgggcagggctttaaaatttatgctgcccccacgcgcggcgttaacgatagcctgagcttccggccggataatccgctggttgccgacctgcnnnnnnnnnnccaccgacgccaggcagatagtcgaaacgctgttctccgccaactatccgcaggcgacctccgtcgtcgccagtaccgccgccgggtacgttaa

SEQ ID NO: 253835 - DNA, 453 bp, Klebsiella pneumoniae
ttgcagcttgtcgctcagcagtggcgtcaggtcggcgtcgcgctggcggtcaaagccggcgatgccggcagccgcacgctggataacctcgatccgctgaaaacgccgctcaccgtgtcggaagtgggccgcgccgaccccgacgtggtgaaaagcatgtttttccccactaaccgcgacgcgctgctgcaaaaaggcggctccagcgacaaagtacaggacttccgcgacgataagctcaacgcattgctgagcgcgatttcagccgaagttgaaccgcaaaaacggctccagctcaccggcgatgcccaacgctatctgctggataatgcctacgtgatcccgatatttgaagaaccgcaggtcttcgccggcgccccgtgggtgaaaggcgtcagttttgaagcggtaggccgcccgtcgttctatggcgcgtggctggaaaagcactga

SEQ ID NO: 253836 - DNA, 945 bp, Klebsiella pneumoniae
atgagccattatcttctgcggcgaaccggccagggtttactggtgctatgggcggcatttaccctctccttcatcctgttacaggtgctgcccggcgatgcggtactgatcaagtttcagaatccggatctggggctcagccctgagcagatcgccgaaatgcgcctcgcctggggggccgatagcccggtgtggaagcagtatctccacaccctcttcgccatgctgcgcggggattttggttattcgctgcaggccggactgccggtgagcgcgctgatcgccagcaatctgccgcagacactaagcctcgcgctccccgcctttgcgctggcggtggcgctggcttttatcctcgccttcgcctcacggctgccgggtctgcgctggctaagcaatgcgctgcaatcgctgccggtgctgtttatctccctgccgacgttttggctcgctatcgccctgatacagcttttctcctttcagctgcgctggataccggtgatcaatccgggaccgattgagggactcattctgcccgtcgtcgccgtcgcggtaccgatttccgctccgctggcgcaaattctgatgcgcagtctggatcaggtcgccgcgctgccgtttgtggccgttgctcgtgctaaaggcatgagcgagaccggcgtgctgtggcggcacgttaccggcaatgccctgctaccggtgctcaatatggccgggctgctgctaggggaactgatcgccggagctctgattaccgaaaccgtgtttggccgcggcgggctgggtctgctgacgcagcaggcggtcaataatcaggatatcgcggtactgcaggcggtggtgatgatctcagcccttggttttgtcctgattaatctgctggtcgacctgctgatgccgctgctcgacccgcgcctgaaaaccgctgaaggaggtgcgctatga

SEQ ID NO: 253837 - DNA, 852 bp, Klebsiella pneumoniae
atgagtctggttgattacgcaatcgccgcccgccgccgctcgccagactggcgcacgctacgcttccagcccggcctgctgctggcctgggcgattatgatcgttgctgcgctgatggccgttgtcccgcagctgtttaccgcttataacccgttggaaggtttccccggcgcccagcgcctggccccccaggcgggtcactggctgggcaccgaccagcttggtcgcgatctgtggagtcgaatcgtctacggcgctgcccattcgctctccgctgcgctggcggcagtggcgattggcctgatcatcggaaccgcgctgggtacgctggccggcgcgctggcgggacgcgtggagtcgatcgtcatgcggctggtcgacgtactgctggcgattccatctctgttgctgtccctggcggtcattattctgctcggcttcggcaccctcaacgccgccgtcgcggtcggggtggcggcaatagccagctttgcccgcctggcgcgcgctgaagtcgtacgcgtacggcgcagcgattacgtcgaagcggcctacggcagcggcggcaccttttttgccgtcttctggcggcatattttacccaactcgctcaccgcggtgctggccttcgccacgctccagttcggccaggccgttctggcgctctcaaccctgagttttctcggctacggcacgccgccgccggtaccagagtggggattactgatcgccgaaggccgtaactacctctccaccgcctggtggctaacaacccttcccggtatggcggtgattgcggtcgtgcttgccgccaatcgtattagccgtcaatttagcggagaacgccgatga

SEQ ID NO: 253838 - DNA, 1605 bp, Klebsiella pneumoniae
atgaatgttttaaccgtagaaaacctacgcatcagctatcgttcgcagagtgaatggcgtgaagtcgtgcataacgtcagttttcaggtaaaacgcggcgaaatgctggcgttcgtcggcgaatccggctcgggcaaaaccactaccgcccaggcgataatgggtctgctggcggagaatgcccggcgcgacagcgggcgcatcagtattaacggcgaagatattagcggctggtcaggtaaacgcctcgacggcctgcgcggcgcgcgaattagcctggtaccccaggatccaggcaactccctcaatccggtgaaaaccatcggcgcgcaggtaggtgaaattctgcgcctccatcagaaacgcagcgccgcggaacgtaaaacgcaggtactggcgctgctggctaaggttggactgagccacccggagcagcgcttcgatcaatatccgcaccagctttcaggcggcatgaagcaacgagtgctgattgccatcgccatcgctctgaaaccggatttaatcattgctgatgagccaaccagcgcccttgacgtgacggtacagaaacggatcctcgatctgctggataccctgcgccgggagtccggcaccgcggtgctgttcgtcactcacgatctggcgctggcagccgagcgtgccgaccgcctgctggtctttcgtcatggcgaaattcaggagcaaggcgcgacccgcgatgtggtacggacgccgcagcatgtctatactcgccagctgctcagcgatcttcacggcccgacgctgaccatggctccctccggcggtcgcgtactggctacgtcggcgattcgcgtcgacgacattagcaagcgcttctcattaggccgggcgcatttgcaggctctggacgccgtgagttttgaggttaagcgcgactgcacgcacgcgctggttggtgagtccggttccggtaaaacgacgcttgcgcggatcctgctgggattcgaaaaggcggatagcggccagattgccatcgatggtattgatgccgggcatctcagtcgggaggcgctccgccagctacggcgtaaaattcagtttgtctatcagaacccctttgcctctcttgacccacggcaaacgctgtttgaaatcattgaagagccgttaaagaacttcgaccgcttcagcgccggaatacgacgccagcgcgtcgaaacggtcgccgctcgcgtggcgctcgctccggagctgctgtcgcgaaccgcccgtgagctatccggcgggcagcggcagcgggtggctatcgcccgcgccctaatccttgaaccgacgatccttgtcctcgatgaagcgacttcggcgctggacgttaccgtccaggcgcaaattctcgccttgctgcagcagttgcagcaacagctgggattgacctatctgtttatcacccacgatttggcgacggttcgccgtatcgcccacagcgtgacggtactgcgggcgggccaggttattgaacatggcgatgtcggccgactgttcagcgctccgcagcatgagtatacccgcgagcttattgccgctattccccacttttccccctcgaacatggaggtcgcatga

SEQ ID NO: 253839 - DNA, 990 bp, Klebsiella pneumoniae
atgacgcgtaaacgactgggttttttcactcgcctgctggaccacgtcgcgccaggtgagcgctatcggctggctaccgaacaaattcgccacgccgaacgactgggtttcgacagcgcctgggtcgctcagcaccattttcatgagcacgaaggcggcctgccgtcgccgctggtctttctcgcccacgcggcagcgcacacggagcgcattcgcctgggaaccgccattatcaccctgccgatggaaaacccgctgcgggttgccgaggatgcggcggtgctggatctgctcgccgatggacgactggaagtgggcttcgggtctggcggcacgccgacctcgtttttaccctttggattgaccatcgaccagcgcagcgcagtctttgccgaacacctgcatctgattcaaagcgcctggcgcggagattcactttcgcatccggataatcatctttatccccaggcaccgcagttggcggagcgtatctggattgccaccttttccgttgagggcgcggtgcgcgcggctcaggccggacacggcctgatgctttcgcgtacccagccgcgtccttcagggcagcccacgctgccgctggacgctatccagaatccgattattgacgcctatctcgccgcgctgccgccgggcgtcgagccacggatcctcgcctcgcggacggcctttgtcgccgatagccagcagtatgcgctgcaggtcgcagaacccggtctgcgccagcaggcggcccagcatcgcgccgcaggtcatcatattattggtgacactgtcactgattttttgccgcagcttgacgcgcacgttggcgacccgcagcacgtcgccgcttctctggggcgcgatagcgtcctgcagcgggtaaccgatatttcgttccaggtgcactccgttgaaccctcgcaccgcgacacgcttcgttccattgagctgatcgctcagcatattgccccgcagatacgataa

SEQ ID NO: 253840 - DNA, 1092 bp, Klebsiella pneumoniae
atgacgctcagtcaggatatattggccgaactggcagaaattgcccccgattccgccttagcggcggcgagagccgtgcgcgaggcggccacccatcatgctcagggaagctatgaagcgctgttcggtcagcaggataacgactttccgctcgacgaacgttttgccgttgccgccagggtagcgaagctgcatgagagcgatgcgctggccgcccactatgccgggtttgggattgccgatccgacctcgccgcggctggttccggcgcaggcctttgcccggctgttgaccttcgcgccggtagaagccacgccttcgtctctggaggcattaacccgcgccggatggagcccgcgcgctatcgtgacgctggcccagctgattgcgtttgtcagcttccagagtcgtctgctgaacggtctacgcctgctcaacggtaaaaacgccccggttgccgggaccccggtcgtagccggattctggcatacctcagcgcaaaccctcagcggtaaacgcgcgccggtgcgcttcacccgcgatgaactgcactgggaaccctggctggcggctaaaccgctggcggaatttaccccggatgagcaggcgctgctggcgaaattcggccacagcgactcgccctacttccgcctgctggcgcgcaaccagccggtgctggagcagcgtacgttaaccgataaagggattttttatactcccggcggcctgccgcgcgccgaacgcgagctggcggcgacggtagcgagtaaaatcaacggttgtatttattgcgcctcggtgcatgctcgcaaggccgcgcagttagcgaaagatgaaacggcggtagagaccctgctggcggtgaccccgggagagaagctgagcgatgggcagacgccgcgctggcaggcgctcattgattttgccgcagcgatttccgttacccctcccgccctggccgcgagccaccttgcggccgtcgaacagcaacagctggataccctcgcccaactggatctgctgcaatcggcagccttcttcgcctgggccaaccggttaatgctgaccctcggggagccgtggcaggattag

SEQ ID NO: 253841 - DNA, 1152 bp, Klebsiella pneumoniae
atgaaaaagactattttttcgttagcgcttggcacttttggtctcggaatggcggaatttggcatcatgggggtattacctgaaattgcccgtgatgtcggcatatccattcctgccgcaggcaacatgatttcatattatgcgtccggcgtcgtgatcggcgcgccggtgatggcgatattctccagccgcttttcactaaaatcagtgatgctgtttctcgtagcgctatgcattatcggcaacgccatcttcacgttctcctccagctactcgatgctggcgctggggcgcctcatctccgggtttccgcacggcgcattctttggcgtgggcgcgatcattctgtcgaaaattgcgctgccaggcaaggttaccgcagcggtggcggggatgatcgccgggatgaccgtcgccaacctgctgggggtaccgggaggaacctggcttggccatcagttcagctggcgctataccttcctggcgattgcggtctttgacgtcgcggtgctggtgtccatcgcctggtgggtgccgacgttatttgataaatcaaccacgcgcttgcgctcgcaatttcattttttaacctcgcctgcgccgtggttaatttttgccgccaccctgttcggcaatgccggcgtcttcgcgtggtttagctatattaagccgtttatgatcaacgtctccggcttcggtgaaagcgccatcataatgattatgatgctggtgggtctggggatggttctggggaatttatttagcggtaaagtttccgcacgctacagtccgttacgtattgccgccgtgacggatggcgttatcgttttgaccttattactcctgttcctgctgggtgagaataaaaccgcctcactaaccctggcgtttatctgctgcgcggcgctgtttgccctgtcggcgccgctgcaaatcatgctgctgcaaaatgccaaaggcggcgagatgctgggcgcggcggggggccagatcgcctttaatcttggtagcgccatcggggcgctgttcggcgggatgatgattacggccggccttggctggcgttccgttgccttaccggccgcgctgctttcgtttcttgcgctcagttcactgctgatttatgcccgctatcagcagcgttctgtctga

SEQ ID NO: 253842 - DNA, 342 bp, Klebsiella pneumoniae; identical to SEQ ID NO: 172242

SEQ ID NO: 253843 - DNA, 657 bp, Klebsiella pneumoniae
atgagtaaatcgaaaatgattgtgcgcacgaagtttattgaccgcgcctgtcactggacggtggtcatctgctttttcctggtggcgctgtcggggatctcgtttttcttcccgacgctgcagtggctgaccgaaaccttcggtaccccgcagatggggcgtattctgcatccgttcttcggggttctgattttcgtggccctgatgtttatgttcgtgcgctttgtccaccataatattcccgacaaacaggatattccctggctgaaagggattatcgaggtgcttaagggcaatgagcataaagtggcgcgggtagggaaatacaacgctggccagaaaatgatgttctggacgatcatgagcatgatatttgtgctgctggtcaccggggtgattatctggcggccttattttgcccactatttcccgattcaggttattcgctatagtctgctgattcacgcaacgtcggccattattcttatccatgcgattctgatccatatgtatatggcattctgggttaaaggatcgattaaaggcatgattgaagggaaggtgagccgacgctgggcgaagaagcatcatccgcgctggtatcgcgacgtggagcgcctggaagcgaaaagggaaaatcgcgaagggctgaagtaa

SEQ ID NO: 253844 - DNA, 885 bp, Klebsiella pneumoniae
atggcgatggaaacccaggacatcattaaacgctccgccaccaatccgatcacccccgcgccgcgcgcgcgggattttaaggcggaagtggcaaagctgattgatgtctcctcctgcgtaggctgcaaagcctgccaggtggcctgttccgagtggaacgatatccgcgatgaagtcgggcactgcgtcggggtttacgacaatcccgccgatctgagcgccaaatcctggacggtaatgcgctttagcgaaaccgagcagaacggcaagctggagtggctgattcgcaaagacggctgtatgcactgtgaggatccgggctgcctgaaggcgtgcccgtccgccggagcgattattcagtacgcaaacggcatcgtcgactttcagcaggaaaactgcatcggctgcggctactgcattgccggatgcccttttaacgtcccgcgcctcaataaagaggataaccgggtctataagtgcaccctgtgcgtcgatcgggtcagcgttggccaggaaccggcctgcgtgaaaacctgcccaaccggcgcgattcacttcggcagcaagcaagagatgctggaagtggccaacgagcgtgtggaaaaactgaagaaacgcggctattcccatgccggggtgtataacccgcctggcgtcggcggcacccacgtgatgtacgtgctgcatcatgcggaccagccggagctgtaccataacctgccgaaggatccgcagatagatacctcaataaatctgtggaaaggcgcgctgaaaccgctctccgccgttggctttatcgccacctttgccgggctgatctatcactacatcgggattgggccgaacaaggaagcggatgacgatgaggaggagcatgatgagtaa

SEQ ID NO: 253845 - DNA, 2190 bp, Klebsiella pneumoniae
gtgctgctgtacctgatcgaaaataacaaagtcaatgccgagtacgttaaacactataccaacgccaatctgctggtgcgcgacgattttgccttcgaagatggcctgttcagcggctacgatgccgaaaagcgtcagtacgataagtcttcgtggaactatcagttcgacgaaaatggcttcgcgatgcgtgatgaaacgctgcagcatccgcgctgcgtatggaacctgctgaagcagcacgtttcgcgctatacgccggaggtggtggagaacatctgcggtacgccaaaagcggacttcctgaaagtgtgcgaagtgctggcctcaaccagcgcggcggaccggaccaccactttcctctatgcgctgggctggacgcagcataccgtcggcgcgcagaacatccgcaccatggcgatgattcagctgcttctcggcaatatggggatggcgggaggcggggtcaacgcgctgcgcgggcactccaatatccaggggttaaccgatttaggcctgctttcgaccagcctgccgggctacctgacgctgccgtcggaacagcaggttgatctgcaaagctatctcgctgccaatacgccgaaggcgacgctgcctgaacaggtgaactactggagcaactacccgaagttcttcgtcagcctgatgaaatctttctatggcgacgcggcgcaaaaagagaacgactggggcttccactggctgccgaaatgggaccaggcttatgacgttatcaagtatttcaatatgatggataacggcaacgtcacgggctatatctgccagggattcaatccggtggcgtctttcccggacaaaaacaaggtggtccgcagcctgagcaagctgaagtacatggtggttatcgacccgctggtgaccgaaacctcgaccttctggcaaaaccacggcgagtcgaacgatgttgacccggcagcgattcagaccgaggtcttccgcctgccgtccacctgctttgccgaagaggatggttccatcgccaactccgggcgctggctacagtggcactggaagggccaggacgcgccgggcgaagcgcgcaacgacggcgaaattctggccgggatttaccaccgcctgcgcgagatgtatcgcaccgagggcggcagaggcgtcgagccgctgctgaagatggggtggcactacaagcagccggatcgtccggaatcagaagaggtcgcgaaagagaacaacggctacgcgctggcggatctctacgacgctaacggcgcgccgctggcgaagaaaggccagctgttgaacagcttcgcgctgctgcgcgatgacggtaccaccgcgtcgtcttgttggatctataccggcagctggaccgagcagggcaatcagatggctaaccgcgataacgccgacccgtcaggtcttggcaatacgctcggctgggcatgggcgtggccgctcaaccggcgcgtgctgtacaaccgcgcgtcggcggatattaacggcaagccgtgggatgcgaagcgaatgctgatccagtggaacggtagcaagtgggttggcaacgatattccggacttcaataccgcgccgccgggcagcaaaaccgggccgtttattatgcagccggaaggtctggggcgtctgtttgccctgaataagctggcggaaggtccgttcccggaacactacgaaccgatggaaacgccgcttggcaccaatccgctgcacccgagcgtggtctccagcccggtggtacgtctgtatgaagaagatgccctgcgtttaggtaagaaggacaaattcccgtacgtcggcaccacctatcgcctgaccgagcattttcatacctggaccaagcatgcgcggctcaatgcgattgcgcaaccggagcagtttgtcgaaatcagcgaaggcctggcgaaagcgaaagggatcgccaatggcgatcgggtgacggtcagcagcatgcgcggctttattcgcgcggtggcggtggtgacgcgtcgtctgcaaacgctcaacgtcaacggtcagcaggtggaaaccgtcggtattccgctgcactggggttttgaaggagtggcccgcaaaggttacatcgccaataccctgacgccgaacgtcggggattccaactcgcagacgccggagtataaggcgtttctggtcaacatcgagaaagcgtaa

SEQ ID NO: 253846 - DNA, 732 bp, Klebsiella pneumoniae
gtgggtaataatttgatgcaggcggatctctccgtttggggtatgtatcatcatgccgatattgtcgttaaggtagtgatgatcggcctgattctggcgtcggtcgttacatgggctatctttttcggcaaaggcgcagaaatcctggccagcaagcgccgcctcaagcgcgaacagcagctggttgctgaagcacgctctctcgaccaggccagcgatatcgctaacggtttcgatgcgaaaagcttgacctcgcagctgatcaacgaagcgcaaaatgagcttgagctttctgcgggttctgaagataacgaaggcattaaagagcgtaccggtttccgcctggagcgtcgcgtcgcggcggtaggtcgtcacatgggacgcggcaacggttatctggcgaccatcggcgcgatttccccgttcgtcggcctgtttggtaccgtctggggcatcatgaacagctttatcgggattgcccagacccagaccactaacctggcggttgttgctccgggcatcgcggaagcgctgctggccacggcaatcggcctgttcgctgcgattccggcggtcgtcatctataacattttcgcccgaatgattgccagctacaaagcgtcccttggcgatgtcgccgcccaggttctgctgctgcaaagccgcgatctggacctgagcgccagcggcgttaagccggtacgtaccgcccagaaattacgcgtaggttga

SEQ ID NO: 253847 - DNA, 1188 bp, Klebsiella pneumoniae
atggctgataaacatcttgatactgcgctggttcatgccgggcgcagcaaaaaatatactcagggctcggtcaacagcgtgattcagcgcgcgtcatcgctggttttcgacaccgtcgaagcgaaaaagcacgccacccgcaaccgcgccaaaggcgagctgttctacggtcgtcgcgggacgctaacccacttctccctgcaggaagcgatgtgcgaactggaaggcggcgccggctgcgccctcttcccctgcggcgcagcggcggtcgcaaatactatcctggcgttcgtcgagcagggcgaccatattctggtgaccaataccgcctacgagccgacccaggatttctgcactaaaatcctcgccaaactcggcgtaaccaccggctggttcgacccgcttatcggcggcgatattgcccgtctggtacagccgaatacccgagtggtattcctcgaatcgcccggctccatcaccatggaagttcatgatgtcccggcgatcgtcgcggcggtgcgcagcgtcgctccgcaagccatcattatgatcgataacacctgggcggcgggagtactgttcaaagcgctggagtttggtatcgatatctctattcaggccggaaccaagtacctgatcggccattccgatgcgatggtcggcactgcggtgtccaatgagcgctgttgggcgcagctgcgggaaaatgcctacctgatggggcaaatggtggatgccgataccgcctatatgaccagccgcggcctgcgcaccctggccgtccgcctgcgtcagcatcatgagagtagcctgcagattgccgaatggctggcacagcatccacaggtagcgcgcgtgaatcatcccgctctgcccggcagcaaaggccatgagtactggaagcgggacttcaccggtagcagcggtctgttctctttcgtgctgaacaaacgcctgagcgatgccgagctgtccgcctacctcgaccacttcagcttgttcagcatggcctactcctggggcggctttgaatcgctgattttagccaatcagccggaacacattgccgcaatccgtcctgatgctgaagttgacttcagcggcacgctaattcgggtacatatcggattagaaaatgttaccgatctgctggatgatttagcggcgggcttcgcgcgtatcgtgtaa

SEQ ID NO: 253848 - DNA, 660 bp, Klebsiella pneumoniae
atggttgtcattcaagaaatcgtcgccgctctgtggcagcatgattttgccgcgttggcaaacccccacgttgtgggcgttgtatatctggtcatgttcgcaaccctgtttctggaaaacggtctgctgcccgcctcgtttttaccgggcgatagcctgctgctgctcgccggcgcgctcatcgccaaaggcgtgatggactttgtaccgactgtcgctatcttaaccgctgcagccagcctcggctgctggctgagctatattcaggggcgctggctgggtaataccgccacggttaagcgctggcttgggcatctgccgcataaataccatcagcgggcaacctgcatgtttgacaagcacggcctgctggcgctgctggccggacgcttcctggcgtttgttcgcacccttctgccaaccatggcgggcatttccgggctgccgaaccgccgcttccagtttttcaactggctgagcgcgctgctgtgggttggggtagttaccggtctgggctatgcgttgagtatgattcccttcgtaaaacgtcatgaagatcaggtcatgacctgcctgatgattctgcctatcgcgctgctgatagccgggctgctcggtacagttatcgtggtgattaaaaagaaatactgcaacgcctga

SEQ ID NO: 253849 - DNA, 900 bp, Klebsiella pneumoniae
atgaaccgcgctgagatatgccagctattaacgcataaggttaatcagctgaaagataaagaagaaatgcttaatggtctgctgccggatatccgcctgctgtacggcactcagccggggacgcgtacgccggtcatgtaccagccggggatcgtttttctcttttccgggcataaaattggctatatcaatgagcgtaccttccgctatgacaccaatgagtatctgctgctgacggttccgctgccgtttgagtgcgaaacttttgccaccccggaagtaccgctggcgggaataaggctgaatgtcgatattcttcaactgcaagaactgctgatggatatcggggaggatgagcagtttcagccgtccatggcgtcaagcgggatcaactctgcggtgctgtccgaagagattctgtgcgcggcggagcggctgctggatgtgatggaacgcccgcttgacgcgcgcattcttggcaaacagatcatccgcgaaattctctatcacgtgctgaccgggccgtgcgggggagcgctgctggcgctggtcagccgtcaaacccacttcagcctgatcagccgcgtgctgaagcgcattgaaagccagtacactgagaacctcagcgtcgatcagctggcggctgaggccaatatgagcgtctcggcgttccaccataactttaaatcagttaccagcacctccccgctacagtatctgaagacttatcgcctgcataaagcgcgcatgctgatgatccacgacggcatgaaagccagcgcggcggcgatgcgggtagggtatgagagcgcatcgcagttcagccgcgaatttaagcgttatttcggcatgacgccgggagaagatgcggcacgcatcaggacaatacaggggatgtaa

SEQ ID NO: 253850 - DNA, 1164 bp, Klebsiella pneumoniae
atgaataatttcgacctacataccccaacccgcattctgttcggtaaaggcgcgattgaaaatctgcgcgatcaaatcccggcagatgcacgtgtgcttgtcacctacggcggcggtagcgtgaagaaaaccggcgtgcttgatcaggttctcagcgcgctgaacggcattgacgttcgggaatttggcggcatcgagccaaacccgtcctacgaaacgctgatgaacgcggtgaaaatcgcgcgtgatgaaaagatcactttcctgttggcggtgggcggcggctccgttctcgacggcactaaattcatcgccgcggcggcccactacgatgccagtatcgatccgtgggaaattctcgaaacttacggcagcaaagtggccagcgctatcccgatgggctccgtgctgacgctgcctgcgaccggttccgaatctaataaaggcgcggtgatctcgcgtaaaaccaccggcgacaaacgcgcgtttatgtccacccacgtccagccggtgttcgctattctggatccggtttacacctacaccctgccgccgcgccaggtggctaacggcgtcgttgacgcattcgtccataccgttgagcagtacgtcacctatccggtcgacggtaaaatccaggaccgtttcgccgaaggcattctcctgaccctggtggaagacggtccgaaggcgctgaaagagccggaaaactacgacgttcgcgccaatattatgtgggccgccacccaggcgctgaacggcctgatcggcgcaggcgtaccgcaggactgggcgacgcacatgctgggccacgaactgactgccatgcacgggctcgatcacgcgcagacgctggccatcgttctgccggcgctgtggaatgaaaaacgcgaggctaaacgcgctaaactgctgcagtacgccgctcgcgtctggaacatcaccgaaggttctgaagaagagcgtattgatgccgccatcgccgcaacgcgtgatttcttcgaacgcatgggcgtcccgactcgcctttccgcctacggtctggatggtagctccatcccggcgctgctggcgaaactggaagagcacggtatgacccaactgggtgaaaatcaggatattactctggacgtcagccgccgtatttacgaggctgcacgctaa

SEQ ID NO: 253851 - DNA, 828 bp, Klebsiella pneumoniae
atgacacatccaaccgttataaaactacacgacggcaacctgatgccgcagctggggctcggcgtgtggaaagcaggcaacgaggaagtcgtctccgccattcataaggcgctggaagtcggttatcgctcatttgacaccgccgccgtataccagaatgaaaccggcgtcggcaatgcactgagcagcgcaggcgttgaccgcgatgagctgttcgtcaccacgaagctgtggaatgacgatcaaaagcagccccgtgaagcgctgcaggaaagccttaaaaaactcaaactcgactacgtcgacttatacctcattcactggccggtgccggctacgaaccattacgttgatgcctggaaaagcctaattgagctacagcagcaagggctggcaaaaagcatcggcgtctgtaatttccaggtccaccatctgcaaaaaatcattgatgaaaccggcgtcgccccggtgataaaccagattgaactgcatcctctgctgcagcagcgtcagcttcatgcctggaatgcgacgcataaaattcagaccgagtcctggagcccgctggcacagggcggtgaaggggtattcgatcagaaaattattcaccaactggcggacaaatacggcaaaacgccggcgcaaatcgtcatccgctggcacctcgatagcggcctggtggtgatcccgaaatccgtgacgccgtcgcgcatcgccgagaattttaacgtctgggacttccgtcttgataaagatgaattgagtgaaatcactaagctggacaaaaacaaacgcctcggacctgacccggatcagttcggcggttaa

SEQ ID NO: 253852 - DNA, 456 bp, Klebsiella pneumoniae; identical to SEQ ID NO: 172859

SEQ ID NO: 253853 - DNA, 2112 bp, Klebsiella pneumoniae
  misc_feature (2069)..(2078): n is a, c, g, or t
atgagcgcaatatccctgatccaaccggatcgtgaccttttctcctggccgcagtactgggccgcctgttttggccccgcgccttttctgccaatgtcgcgagaagagatggatcaacttggctgggatagctgcgacatcatcctggtgaccggcgatgcttatgtcgatcacccgagcttcgggatggcgatttgcggacgcatgctggaatcccagggattccgcgtggggattatttcccagccggactggaacaacaaagatgactttatgcgtctgggtaaaccgaacctgttcttcggcgtgactgccggtaacatggactcgatgatcaaccgctacactgccgaccgtaagctgcgccatgacgatgcctacacggcgggtaacgtggccggtaaacgcccggatcgcgctacgctggtctacactcagcgctgcaaagaggcatggaaagatgtcccggtgatcctcgggggcatcgaagccagcctgcgccgtaccgcgcactatgactactggtccgataccgtgcgccgttcggtgctggtggactctaaggccgatatgctgatgttcggcaacggcgagcgtccgctggtggaagtggcgcaccgtctggccgtcggcgagcctatcgggcaaattcgcgatgtacgcaacaccgccatcatggtgaaggaagcgctgccaggctggagcggggtggactccacgcgtctggacacgccggggaaaatcgacccgatcccgcatccgtacggtgaagatctaccgtgcgcggataacaaaaccgtcgcgccgccaaagcaggaagcgaagcgcgttaccgtccagccgccgcgtcctaagccgtgggagaagacctacgtcctgctgccttcctttgagaaagtaaaaggcgataaagttctctacgcgcatgcctcgcgcattctgcaccatgaaactaaccccggctgcgcccgggcgctgatgcagaagcacggcgagcgctatatctggattaacccgcccgccattccgctctcaaccgaagagatggatagcgtgtttgcgctgccctataagcgcgttccgcatccttcttacggcgatgcccgcattccggcctatgagatgattcgcttctccattaacatcatgcgcggctgttttggcggctgttcgttctgctcgattaccgagcatgaaggtcggatcattcagagccgttccgaagattcgatcatcaatgaaatcgaagcgattcgcgatacggtgcccggctttaccggtattatttccgatcttggcggcccgacggccaacatgtatatgctgcgctgcaagtcgccgcgcgccgagcagacctgccgccgcctgtcatgcgtttatccggatatctgcccgcatatggacaccaaccatgagccgacgattaacctttaccgtcgcgcccgcgatcttaaaggcatcaaaaagatcctcatcgcatccggcgttcgttacgacattgccgttgaagatccgcgctacatcaaagagctggccacccaccacgtcggcggttatctgaagattgctcctgaacataccgaagaggggccactgtcgaagatgatgaagccgggtatgggcagctacgatcgctttaagcagttgttcgatacttattcgaagcaggcgggtaaagagcagtatctgattccatactttatttccgcccacccggggacgcgagatgaagatatggtgaatctcgcgctgtggctgaagcagcatcgtttccgcctggatcaggtgcagaacttctatccgtcgccgctggcgaactcgaccaccatgtattacaccggcaagaacccgctgggtaagattggctataagagtgaggatgtggtggtgccgaagggcgacaaacagcgccgcctgcacaaggcgctgctgcgctatcacgatccggccaactggccgctgatccgtcaggcgctggaaacgatgggtaaaaagcacctgatcggcagccgtcgcgattgcctggtaccggcgccgacgctggaagaaatgcgcgaggcgcgtcgccnnnnnnnnnncgtcgccagaaccgccatacccgaccggcgctga

SEQ ID NO: 253854 - DNA, 1413 bp, Klebsiella pneumoniae
atgtcactcagtcggcgtcagttcattaaggctacaggcgtagcgctgtgcgcaggcgccgcgccgctgaaggcacaggctgctggtcagcagcccgcgctgccgattcctcctttgcttgagtcccgccgcgggcagccgctatttttgacgctacagcgtgcgcactggtcgtttacgccgggcacccgcgcatcggtgtgggggattaacggccgctacatggggccaaccatccgcgtctggaacggcgacgatgtgaagctgatctacagcaaccgcctgacggaaaacgtcgcgatgacgatacgcggtctgcaggttcccggtccgctgattggcggcgcggcgcgtatgatgtccgccaacgccgactgggctccggtgctgccgatccgccaaagcgcggcgacgctgtggtatcaggccaacacgccaaaccatatggcgaaacaggtttataacggtcttgccgggatgtggctggtagaagatgaggttagcaagaatttgccgatccctaaccactacggtgtggatgatttcccggtgattattcaggacaagcgcctggataacttcggtacgcctgaatatagcgaacccggcagcggcggcttcgttggcgatacgctgctggtgaacggcgtgcaggggccttttgttgaagtgtcgcgcggctgggtgcgcctgcgtctgctgaatgcgtctaactcccggcgctaccagctgcagatgagcgatggtcggttgctgcacgtcatctccggtgaccaggggctgcttccggcgccggtttcgctgaagcagctgtcgttggctccgggcgaacggcgcgaaatcctggtcgacatgaccaacggcgatgaagtgtcgataacctgcggggaagcggcgagtatcgtcgatcgtattcgcggtttcttcgaaccatcgagcatcctgatttcaacgctgattctgactttgcgcccgacgggcctgctgccgctggtgaccgatagcctgcctgtgcgcttgctgcctacggaaatgctggccggcgcgccgatccgcagccgcgatattacgcttggcgacgatccgggaatcaacggccagctgtgggatccgcagcgtattgatattacggcgcagcagggaacctgggagcgctggacggtgcgcgccgaccggccgcagtcgttccatattgaaggcgtcatgttccaggtgcgtaacgtgaacggttctgcgccgttcccggaagaccgcggctggaaggataccgtctggatcgacgggcaggttgagctgttggtctattacaaccagccctcctggccgcactttccgttccagtacttaagccagacgctggagcttgccgaccgcggctccattggccagattctggtgaatccggcgccgtaa

SEQ ID NO: 253855 - DNA, 738 bp, Klebsiella pneumoniae
atgctatttatttttcgactaattatcgttgtcatttactgtattctggtgtgcatcttcggctgtatctattgtctgttcagtccgcgtaatcctaagcacgtcgccaccttcggtcacctttttggcaagctgtcgccggtcttcggtctgaaggttgaactccgcaagcctgccgatgccgaaagctacggtaacgctatctatatcgctaaccaccagaataactatgatatggtgacggcatccaatatcgtacagccgccgaccgttacggtaggtaaaaaaagcctggcgtggatcccttttttcggccagctctattggttgacggggaatctactgattgaccgcaataaccggacaaaagcgcacggcaccattgcagaagtcgtgaacgcatttaaaaagcgcaaaatctctttttggatgtttccggaagggactcgcagccgcggtcgcggtttgctgccttttaaaaccggtgcctttcatgcggctatcgcggcgggcgtacccattattccggtatgcgtgtctaatacttcgaataaaattaagctcaatcgcctgaataacggtctggtgattgtcgaaatgctgccgccggtcgacaccagccagtacgggaaagagggcgtccgcgcgctggcgacgcactgtcgcgagctgatgtccgcgaaaattgccgagctggataaagaagttgccgaacgcgaagcggccggcaagaaataa

SEQ ID NO: 253856 - DNA, 216 bp, Klebsiella pneumoniae
atgagcgatatggcagagcgccttgcgctgcatgaatttacggaaaacgcctaccttaactactccatgtacgtcatcatggacagggcgctgccgtttattggcgatggcctgaagccggtccagcgtcgcatcgtctatgcgatgtctgaactgggtctgaacgccagcgcgaagttcaaaaagtccgcccgcaccgtcggcgacgtgctatga

SEQ ID NO: 253857 - DNA, 408 bp, Klebsiella pneumoniae
atgaagaaaatcgccgcaatgaccgccatcatcgctttagtttccatgccggtactggctgctgaacagggcggattttccggccctggctccacgcaaaccagccagacaacctcgcaaaatggcgggtttattggcccgaacgggagcgtaacgacggttgcgaatgcgaaaagcctgcgtgacgatacttgggtgaccctgcgcggtaaaatcgtggagcgtatttccgatgatctgtataaattccaggacagctccggcaccgtcaacgtcgatatcgatcacaagcgctggaacggcgtgaccgttacaccgcaggatacggtagagatccagggcgaagtcgataaagactggaactcagtggagatcgatgtaaagcagattcgtaaaatcaccccctaa

SEQ ID NO: 253858 - DNA, 660 bp, Klebsiella pneumoniae
atgcgcattttattggtggaagacgataaactgatcggtgacggcctcaaggcagggctgacaaaaatgggattcagcgtcgactggtttacccgcggtgaggaaggaaaagccgcattatacaacgccccctatgacgccattattctggacctgacccttcccggcattgatgggctggatatcctgcgcgaatggcgcgacaaaggccgccatgaaccggtactgatccttaccgcccgcgacgcgctaagccagcgggttgaagggcttcggctcggcgccgatgactatctatgcaaaccctttgcgctgattgaagtcgccgcccgtctggaagcgctgatgcgccgcgcccacggccagagcagcagcgagctgcggcacggcagcgtggttctcgacccgggccggctcacggccaccctgaacggcgaaagcctggcgctcaagccaaaggagtttgctctgctggagctgatgatgcgtaacgccggacgcgtgctgccgcgtaagctgatcgaagaaaaactctacagctgggatgacgacgtttccagcaatgcgatagaggtgcacgtccaccatctacgccgtaagctcggcagcggtttcattcgcaccgttcacggtatcggctacaccctgggggacgcatga

SEQ ID NO: 253859 - DNA, 1350 bp, Klebsiella pneumoniae
atgaaacgactgggcaaactgagtctgcgcgttcgcctgacgctccttttcctgctgctgaccagcgccgcatggggcatcgccagctttgtggcctggcaacaaacgaccgataagctggataagctcttcgatacccaacagctgctattcgcccgtcgccttagcgcaatgaattttgacgagcttcacactctctcttcgcaggtgcgagagaagaagaaggtcaagcacggtcatctcgacgacgacgcgctggctttcgctatctttaccaccgatggcaagatggtgcttaacgatggcgagaatggccaggatatcccgtggggcagcaatcgggagggattcagcgacggctatctgcgcggcgatgacgacgagtggcgttttctgtggctcaccacacgcgacggccgccatcgtatcgttgtcggccaggagtgggattaccgtcgcgagatggcgctggatatcgtcaccagccagctcacgccctggctgattgcgctgccgcttatgtttttgctactcatcgtgctgttaagccgggaactggcgccgctgaaaaagctggccaacacgctgcgcgcccgggcgccggattccgccgaaacgctgaataatgaaaacgtgcccaatgaagttcgcccgctggtcgacgcgctaaatcagctgtttatccgcacgcatgatgccatgatccgcgagcgtcgctttacatccgatgcggcccacgaactgcgcagtccgctggcggcgctgaaggtgcaaactgaagtagcccagctttcgaaggacgatccgcaggggctggataaagcgctggcgcagcttcaccagggtatcgatcgcgcaacccgcctggtcgatcagcttctgactttgtcgcgcctggattcgctggcgcagctggacgatatccagcgcgtcgccatggacgacctgctgcagtcggcggtgatggagatgtaccaccccgctcagcaggccggcgttgagctgcgtctgcatctgaatgcggataacgtcgcacgcaccggccagccgctgctgctgagccttctggtgcgcaatcttttagataacgccgtacgctatagcgccgccggaagccaggtcgatatcacgcttgaagctggtgaatttcgcgtgcgcgataacggcccgggcattagcgccgaagccctggcgcgtatcggcgagcgcttttatcgcccgccgggacaggaacaacccggcagcggtcttgggttatccatcgtcaaacgtatcgccgcgctgcacggaatgacggccagtttcggcaacgcccgggacggcggattcgaagcgcgcattcgctggtag

SEQ ID NO: 253860 - DNA, 315 bp, Klebsiella pneumoniae
atgttgacagtgattgctgaaattcgcactcgtccggggcaacaccatcgtcaggcggtgctggatcagttcgcaaaaattaccccgaccgttctccaggaagagggctgtcacggctatgcgccgctggtggatcacgccgctggcgtcagttttcagaccacctcgccggactccatcgtcatggtcgagcagtgggaaagcgtcgcgcatcttgaagcgcacctgcagactccgcacatgaaagcctacggtgaagccgttaaaggcgacgtgctggagatgaatatccgtattctggaatccggtatttaa

SEQ ID NO: 253861 - DNA, 1896 bp, Klebsiella pneumoniae
atgacgcaatcttcatataacgctgatgccattgaggtactcaccgggctagagccggttcgccgccgtccgggaatgtacacggataccacacgaccaaaccatcttggtcaggaagttattgataacagcgtggatgaggctctggccggtcacgcgaaacgcgtggaggtcattctccatgccgatcagtcgctggaagttatcgacgatggacgcggaatgccggtggatatccaccctgaagagggggtgccggcagttgaactgattctttgccgcctgcacgcgggagggaagttctccaataagaactaccagttctccggcggcctgcacggcgtcgggatttcagtggtcaacgccttatcgaaacgcgttgaagtgaatgtgcgccgcgacggtcaggtctatagcatcgcctttgaaaacggcgacaaagtggaagatctccacgtgaccggcacctgcggtaagcgcaataccgggaccagcgtccatttctggccggatgaaagcttttttgatagcccacgtttttccgtctcgcgcctctcgcatttgttaaaagccaaggccgttctttgcccgggcgtagagattgttttccgcgatctggtcaacgacagcgagcagcgctggtgctacgccgatggcctgaccgactatcttagcgaagcggttaacggcctgcctctgctgccggaaaaaccgttcgtcggcaccttctctggcgataccgaagcggtcgactgggcgctgctgtggctgccggaaggcggcgagctgctgaccgaaagctacgtcaacctgattcctaccatgcagggcggaacccacgttaacggcctgcgccagggcttactggacgccatgcgcgagttttgcgaataccggaacatcctgccgcgcggcgtgaagctgtcggcggaagatatctgggagcgctgcgcctacgtactctctgtgaagatgcaggatccgcagtttgccgggcaaaccaaagagcgcctttcttcgcgccagtgcgccgcgtttgtttccggggtagtcaaagatgccttcagcctgtggctaaaccagaacgtccagtcggcagagctgctggcggaaatggcgatctccagcgcccagcgccgcctgcgcgcggcgaaaaaagtggtgcgcaaaaagctaaccagcggtccggcgctgcccggcaaactggcggactgcaccgcccaggatttgaaccgaaccgaactgttccttgtggaaggggattcggcgggcggttctgccaagcaggcgcgcgatcgcgaatatcaggcgatcatgccgctgaaaggtaaaatccttaacacctgggaagtctcttccgatgaagtactggcttcacaggaagtacatgacatttctgtcgccatcggtatcgacccggatagcgacgacctgagccagctgcgctacggcaagatttgtattctggcggatgccgactccgacggtctgcatatcgcaaccctgctgtgcgcgctgttcgtcagacacttccgtaatctggttaaacacggccatgtttacgtggcgctgccgccgctataccgtatcgacctcggtaaagaggtgtattacgcgctgacggaagaagagaaaaccggcgtgctggaacagcttaagcggaagaagggtaagccaaacgtccagcgctttaaagggctgggcgagatgaacccgatgcagctgcgtgagacgacgctggatccgaatacccgccgtctggtgcagctgattatcaacgatgaagacgaacagcagacgaccgccatgatggacatgctgttagcgaagaagcgttctgaagatcggcgtaactggctacaagagaagggcgatctggctgagctggacgggtaa

SEQ ID NO: 253862 - DNA, 576 bp, Klebsiella pneumoniae
atgtctacgcttctctacctgcatggttttaacagctcaccgcggtcggcaaaagcgactgcgctgaaagagtggctggcgcggacttatccccacatctctatggtgataccggagctcccggtttatcccgcgcaagcggcggaatatctggaggccctcgtgctggaacacggcggcgaaccgctgggcgttgtcggctcctcgctggggggatattatgcgacctggctatcgcagtgttttatgctgcccgcggtagtggtgaaccctgcggtgcgcccgttcgagctgctgaacaatttcctgggccccaatgagaatccatacacggggcagcaatatgtgctagagtcacgccatatttacgatctcaaagtcatgcaaattgacccgctggaagcgccggatttaatctggttattacagcaaacgggcgatgaagtgcttgattaccgccaggccgttgattatttcgcctcctgccgacaaacggtagaggagggcggtaatcacgcatttgttggctttgaagatcatttcactcagattatcgattttctgggcctgcgctaa

SEQ ID NO: 253863 - DNA, 828 bp, Klebsiella pneumoniae
ttggaaagcctgttaaacctacctttggctggtgaggccagagtcaggatattacaaattactgatactcacctgtttgctgaaaaacacgaaacgctgttaggtatcaatacctgggaaagctatcaggctgtcctggatgctatccacgcctctcagcgagaatgcgacctgattgttgccacaggcgatctggcgcaagatcactccgccgcggcctatcagcattttgctgaaggcatcgcgagttttgctgcaccctgcgtctggctaccgggcaatcatgattttcaaccggcgatgtacagcacgctgcaggaatcaggcatctcccccgctaaacgcgtattgctgggcgaccactggcaaatattgctgatggacagccaggtgttcggtgtgccgcacggcgagctgagcgatttccagctggagtggcttgagcagaagctgacggaggttcctgagcgttacacgctgctgctgttacaccatcatcctctgccgtcaggctgtagctggctggatcagcatagcctgcgcaatgccggggcgcttgattgcgcgctggctgcttttcctcgcgttaagcatctgctgtgcggtcatattcaccaggagctggaccttgactggaacgggcggcgaatgatggccacgccatccacctgcgtgcagtttaagccgcactgcgctaacttcacgctcgataccgtctccccaggctggcgctggctggaactgcatcctgacggcaccttgaccactgaagtttgccgccttgaaggcgtgaaatttcacccggatatcgcttcagaaggatactga

SEQ ID NO: 253864 - DNA, 423 bp, Klebsiella pneumoniae; identical to SEQ ID NO: 172846

SEQ ID NO: 253865 - DNA, 633 bp, Klebsiella pneumoniae
atgagtaatgtcaatcagcaggagattaccttctctaaaaacgatgtagaaattattgcacgcgaaacgctctatcgtggttttttttcgctcgatttatatcgtttccgccaccgcctgtttaacggtgagatgagcggcgaagtgacccgcgaaatttttgagcgcggtcacgcagcagtcttgctaccctttgacccggtgcgtgatgaagtggtgctcgtcgagcagatccgtattgcggcgtatgataccagtgagagcccgtggctgctcgaaatggtcgccggcatgattgaagaaggcgagtcgcctgaagatgtcgcccgccgtgaggcggtagaagaagccgggcttaatgtcggccgtattaagccggtcctgagttacctggccagccccggcggcaccagcgaaaggctgtctattatggtgggtgaagtcgatgcaacgacggcaaaggggattcacggactggccgatgaaaatgaggatattcgtgtccatgtggtaagccgggaacaggcttatcggtgggtagaagaggggaaaatcgacaacgcagcctctgtcattgcgctgcaatggctgcaactgcattatcacaatttacgaaacgagtggacaaaatga

SEQ ID NO: 253866 - DNA, 1461 bp, Klebsiella pneumoniae
atgaagaaactctttcccatccttatcggcctgggcctgactggcttcagcgccatgagccaggcagaaaacctgctgcaggtttatcagcaggcgcgtatcagtaaccctgatctgcgtaaatcagcagccgatcgtgatgccgcattcgagaagatcaacgaagcgcgtagcccattactgccgcagctcggtctgggtgcggattattcctataccaacggatttcgcgacagcaacggcgttaactccaacgtcaccagcggctcgctgcagctcacgcaggtcctgttcgatatgtcaaaatggcgagcgctgacgctgcaggaaaaacaagcgggtattcaggacgtcacctaccagacggatcagcaatcgctgatcctcaataccgcaaccgcctattttaaagtgctggccgcgatcgacacgctctcctataccgaagcgcagaaacaggcgatttatcgtcagttagatcagaccacccagcgctttaacgttggcctggttgccatcactgacgtacaaaacgcccgctcgcagtacgatgctgtgctggcgaatgaagtcaccgcgcgcaacgatctcgataacgccgttgaagaactgcgccaggtgaccggcaactactatccagaactggcgtcgctcaacgtggatggttttaaaaccaacaaaccgtcagccgttaacgcgctgctgaaagaagcggaaagccgtaacctgtcgctgctgcaggcgcgtctgagccaggatctggcgcgtgagcagattcgccaggcgcaggatggtcatctgccgacgttaagtttgtccgcctcaagcggcgtgtcaaacaccagctacgacggctcaaaaacccgtgataatgcgcaataccgagataacgatgccggtcaaaacaaaatcggccttagcttctccctgccgttgtatcagggcggaatggtaaactctcaggttaaacaggcgcagtacaactttgtcggcgccagcgaacagctggaaagcgcccaccgcagcgtggtgcagaccgttcgttcatcctttaacaacgtgaacgcgtctatcagcagcattaatgcctacaaacaggccgtggtttccgcgcaaagttccctggatgctatggaagcaggttattcggtaggtacgcgtaccatcgtcgatgtcctggacgcgaccactacgctgtataacgcaaaacagcaactgtccaacgcgcgttataactacctgattaacgagctgaacatcaaatccgcactcggtacgctgaacgagcaggatctggttgcgctgaacaatacgctgggcaagtctattccgacttcaccggatagcgtcgcgccggaaaatcctcagcaggatgccagcgccgacggctacagcaacaccgccgcggcaaaaccagcatcagcacgcagcaccagcggcagcaacccgttccgccagtag

SEQ ID NO: 253867 - DNA, 669 bp, Klebsiella pneumoniae
atgaaacggacaaaaaatattaatcacgcctcctttcgcaaaagctggagcgcgcgccatttaactcccgttgcgcttgccgttacggccgtgtttatgctcgccggttgtgaacaaagcgatgaaacggtttctctttatcaaaacgccgatgactgctctgccgccaacccgagcaaagccgcagagtgcaccactgcctacaataacgcgcttaaagaagcggaacgtacagcccctaaatacgcctcccgcgaagactgcgtcgccgagttcggtgaaggtcagtgccagcaggcgccggctcaggccggtatggctccggaaaaccaggctcaggcgcaaagcagcggcagcttctggatgccgctgatggctggctacatgatgggccggatgatgggcggcggaatgggcgctcaacagccgctgttcagctcaaaaaacccggccagcccggcctatggtaaatataccgacgctggcggtaagagctacggcgcagcgcagccgggccgtaccatgaacgtgccaaaaaccgcaatggctccaaaaccggccaccaccagcaccgtgacgcgcggcggatttggcgactcggtcgccaagcagtcaacgatgcagcgcagctcggcgagctcctcttcatcacgctcgatgggcggctaa

SEQ ID NO: 253868 - DNA, 1161 bp, Klebsiella pneumoniae
atggaaagaatcagcattaccgagcgcccggactggcgtgaaaaagcgacagaatatggttttaactttcacaccatgtacggcgagccgtactggagcgaagaagcttattacaaactgacgctggcgcaggttgagaagctcgaagacgtcacggcagaactgcaccagatgtgtctgcaggcggttgaaaaagtcatcgccagcgatgatttaatgaccaaattccgcatccccaaacatacctggggattcgtgcgtcagtcgtggaaaacccatcagccctcgctgtattcgcgtctcgatctggcgtgggacggcgtcggtgagccgaaactgctggagaacaatgccgatacgccgacctcgctgtacgaagcggcattcttccagtggatctggatggaagatcagctgaacgccggtcagctgcctgcgggcagcgatcagtttaacagcctgcaggagaagctgatcgatcgcttcagcgagcttcgcgagcagttcggcttccagttgctccacatggcctgctgccgcgataccgttgaagaccgtggcaccgtgcagtatttacaggactgcgccgcagaagcgggcgtggctactgagtttctctacatcgaagacattggactgggtgaaaaaggccagtttaccgacctccaggatcaggtgattggtaatctgttcaagctctatccgtgggaatacatgctgcgcgaggtgttttccaccaagctggaagacgcaggcgtgcgctggctggagccggcctggaagagcatcatctccaacaaagcgctgctgccgctgctgtgggagatgttccccaaccatccgaacctgctggccgcttatttcagtgaagatgcgcacccggaaatggacaagtacgttatcaagcccattttctcccgcgaaggcgctaacatttctattgttgaaaacggcaaagtgctggaggcggtagaaggtccgtacggtgaagaaggcaccatcgtgcaggagttctatccgttgccgaagtttggcgacagctacacgctcatcggcagctggctgattaacgaccagccggcgggtattggcattcgcgaagaccgggcgatgatcacccaggatctatcgcgtttttatccgcacattttcgttgagtaa

SEQ ID NO: 253869 - DNA, 792 bp, Klebsiella pneumoniae
atgtcccgtatccgcatgcccgcgctatttttaggccatggcagcccgatgaacgtgctggaagataacatctatactcgcgcctggcggcatctgggcgagactttaccgcggccgaaagccatcgtggttatctccgctcactggttcactcgcggtacgggagtgacggcgatggaagcgccgaaaacgattcatgattttggcggttttccacaggcgctatacgatatgcattatccggctccgggttcacctgaactggctcagcgcctggttgagctgctggcgccggtgccggtgacgctggataaagaagcctggggctttgaccatggttcatggggcgtgttgattaaaatgtatcccgacgccgatattccgatggtgcagctaagtattgatagcacgaaacccgccgcatggcatttcgaaatggggcgtaagctggctcagctgcgcgatgaaggcattatgctggtggcaagcggcaacgtggtgcataacctgcgcaccgcacgctggcacggcgagaatacggcctatccctgggcggagtcgtttaataactacgtgaaggcgaacctggcatggaaaggccccgtggcggaacatccgctggtgaattacctgacgcatgaaggcggatcgttatctaacccaacggccgatcacttcctgccgctgctgtacgtactgggggcctgggacggcgaggagccgagtacgatcccggtagaaggaatggaaatgggatccctgagcatgctgtcagtggtgattggcgcttga

SEQ ID NO: 253870 - DNA, 774 bp, Klebsiella pneumoniae
atgttgtcctcacccatcattttgactctgctggcagggagcgccacctttattggggcaatattcggcgtgctcggccagaaaccctcgaaccgcttattgggtttctctctgggtttcgccgccgggatcatgctactcatttccttaatggagatgctgcccgctgcgctggcgactgaaggcatgtcgccgctgctcggctacggcatgtttatcatcggccttctgggctactttgcgcttgaccgcatgctgcctcacgcccatgcgcaagatctgatgacccccggcatctcccgcccgcgaaatctgcgacgtacggcgatattgctgacgttaggcattagcctgcataactttcctgaaggtattgccacttttgtgacggccagcaataaccttgagctgggcatgggggtcgcgttagccgtcgcactgcataacatcccggaagggctggcagtagcagggccggtctatgccgccacgggttccaggagtaaagcggtattctgggcagggctttccgggatggcggaaatcttcggcggtgtgctggcctggctggtactgggcagcgtgatctctccggtgatgatgggcgcggtcatggccgcggttgccggtattatgattgcgctatcggttgatgagctcatgccgctggcgaaagaactcgatccgcaaagcaacccgagctatggcgtgttgtgcggaatgtcggtaatgggattaagcctggtggttttgcaaacggtagggattggctaa

SEQ ID NO: 253871 - DNA, 654 bp, Klebsiella pneumoniae
atgaatcagacgctactttcctcttttggtaccgcttttgaacgtgtggaacgtgctttagatgcactgcgcgaaggtcgcggtgtgatggtacttgacgatgaagatcgtgaaaacgaaggcgatatgattttcgccgcagaaaccatgaccgttgagcagatggcgctgaccattcgccacggtagcggcattgtctgcctgtgcctgacggaagatcgtcgtaaacagctcgacctgccaatgatggtagagaacaacaccagcgcctacggtaccggttttaccgtcaccatcgaagctgctgaaggcgtgactaccggcgtttccgccgctgaccgcgtaacgaccgtacgcgcggcaattgccgatggcgcgaagccgtcagacctgaaccgtcctggccacgttttcccgctgcgcgctcagccgggcggcgttctgacccgcggcggccacaccgaagctacaatcgatctggtcaccctggctggcctcaaaccggcgggcgtactgtgcgaactgactaacgacgacggctctatggcgcgtgcgccgcagtgcattgagtttgctaaacagcacaatatggaagtggtcaccattgaagatttagtggcttaccgccgcgaacacgagcgtaaagccagctaa

SEQ ID NO: 253872 - DNA, 282 bp, Klebsiella pneumoniae
atgattgacccgaaaaaaattgaacaaatcgcccgccaggttcatgaatcgatgccgaaggggctccgcgatctgggggaagacgtggagaaaaaaattcgtcaggtgctccagtcgcagttaactcgcctggacctggtaagccgcgaagagttcgacgtgcagacgcaggtgctgctgcgcacgcgtgaaaagctggcgcttctggagcaacgtctgagcgagctggaaaatcgtcctctaaatgcgccggcggcgccggacgccgaagagaagctctaa

SEQ ID NO: 253873 - DNA, 210 bp, Klebsiella pneumoniae; identical to SEQ ID NO: 172837

SEQ ID NO: 253874 - DNA, 555 bp, Klebsiella pneumoniae
gtggtgggtaaactcggtacctctaccgtttcgcctatcgaactggagaacgcggtacgcgggcgctccgagaccggttttggcgtgatgagcgaagaagaactcaagctggcggtagccgcggcgcgcaagcgcggcgagaaagttgtgatgaccaacggcgtgttcgatattttacacgcgggccacgtttcctacctggcgaacgctcgcaaactgggtgaccggctgattgtcgcggtgaacagcgatgcttcaacccggcgtctgaaaggcgagtctcgtccggtcaacccgctggatcagcgaatgatcgtgttgggcgcgctggaggccgtcgactgggtggtttcttttgaagaagatactccgcagcggctgattgccggaattctgccggatctgctggtgaaaggtggggactataagccggagcagattgccggcagcgaagaggtgtgggcaaacggcggcgaggtgctggtgctcaacttcgaagatggctgctcaacgaccaatatcatcaggaagatccagaaagataacaatcagtaa

SEQ ID NO: 253875 - DNA, 894 bp, Klebsiella pneumoniae
  misc_feature (871)..(880): n is a, c, g, or t
atgaaagtaacgctgccagagtttgaacgtgcaggagtgttggtggttggcgatgtgatgctggaccgctactggtatggtcccaccagccgtatttcgccggaagcgccggtaccggtggtgaaggtggaaaatatcgaagaacgtcctggcggcgcggcaaacgtggcgatgaacattgcgtcgctcggcgcgacctcccgcctcgttggtctgaccgggattgacgatgccgcccgtgcgttaagtaaggcgctggctgacgtcaacgtgaagtgcgacttcgtatccgttccgacgcatccgacgattaccaaactgcgcgtgctgtcgcgcaaccagcagctgattcgtctcgattttgaagaagggttctccggcgtcgatccgcagccgatgcacgaacgtattcagcaggcgctgggctctattggcgccctggtgctctctgattacgccaaaggcgcgctgaccagcgtccagaccatgatcaagctggcgcgcgatgcgggcgttccggtgcttatcgatccgaaaggcacggattttgaacgctatcgcggcgctaccctgctgacgcctaacctctcagaatttgaggcggtagcgggtaaatgtaaggatgaagaagagatcgttgaacgcggcatgaaaatcatcgccgatttcgacctctctgcgctgctggtgacccgttccgagcaggggatgacgctgctgcagccggggcgaccgccgctgcatatgcccacgcaggcccaggaagtctatgacgttaccggcgcgggcgacacggtcatcggcgtgctggcggcgacgctggcttccggcaatactctggaagaagcttgctactttgccaacgcggcgnnnnnnnnnngtcgtggtgggtaa

SEQ ID NO: 253876 - DNA, 2835 bp, Klebsiella pneumoniae
atgccgctttcttcgcaattacagcagcactggcagacggtcgctggccggctgccagcggattttcccgtatcgacgttgagcgatcgggcgcaatcagttatggcattcagcgatttcgtcgaacagagtctgatcgcgcagccgcagtggctggcggagcttgaaagtgcgccccccgaggcgcaggagtggcatcactacgccgactggctgcaggtgcgcctggccgaggtcaatgatgaagccgcgctgatgcgcgagctgcgccagtttcgccgtcggattatggtgcgtatcgcctgggcccaggcgctatcgctggtcagcgaagagagcagcctgcagcagctaagtgcgctggcggagaccttaatcgtcgccgcgcgcgactggctatacgctgcctgctgtcgcgaatggggcactccatgtaatgctgaaggtacgccgcagccgctgctgatcctcgggatgggaaagctcggcggcggcgagctgaacttctcctccgacatcgatctgattttcgcctggccggaacatggcgccacgcgcggcggtcgtcgcgaactggataacgcccagttttttacccgcctcgggcagcgcctgattaaggtactggatcagcccacccaggatggctttgtctaccgcgtggatatgcgcctgcgcccgtttggcgatagcggtccgctggtgttgagctttgccgcgctggaagattattaccaggagcagggacgcgactgggagcgctacgcgatggtgaaagcgcgaattatgggcgataacgatggcgtctatgccaacgagctgcgcgccatgctgcggccgtttgtcttccgccgctatatcgatttcagcgtgattcagtctttgcgcaacatgaagggcatgattgcccgggaagtgcgccgccggggattaaaagacaatatcaagctcggcgcgggcggcatccgagaagtggagtttatcgtccaggtcttccagctgattcgcggcggccgtgagccaatgctgcagcagcgggcgctgctgccgacgctggccgccatcgaagagctacatctgctgccggaaggggatgcgcagaggctgcgcgaagcctatctgtttttgcgtcgtctggaaaacctgctgcaaagcatcaacgacgagcagacgcaaaccttgccgcaggatgaacttaatcgcgcccggctggcctgggggatgggcgttgccgattgggatacactcagctcgcggctggcggaacagatggctaacgtgcggcgcgtgtttaatgaactgatcggcgacgatgaaacgcagtcgccggatgagcagcttgaagagtactggcgcgagctgtggcaggacgcactgcaggaagatgataccagcccggcgctggcgcatcttgcagacagcgatcgccgcagcgtgctggcgctgatcgccgattttcgcaaagagctggaccggcgcacgattggtccgcgcggtcgtcaggtgcttgaccagctcatgccgcatctgcttagcgaaatttgttcgcgcgccgatgctccggtaccgctggcgcgcattacgccgctgctcaccggaattgtcacccgcaccacttacctggagctgctgagcgaattccccggcgcgttaaagcacctgattagcctgtgcgcggcgtcgccgatggtcgccagtcagctggcccgccatccgctgctgctggacgaactgctggacccgaatacgctttatcagccaacggccaccgatgcctatcgcgatgaactgcgccagtatctgctgcgcgtaccggaagatgatgaagagcagcaattggaggcgctacgccagtttaagcaggcgcagttgctgcacatcgccgcggccgatatcgccggaaccctgccggtgatgaaagtgagcgatcacttaacatggctggcggaggcgatgattgacgcagtcgtccagcaggcatggctgcagatggtggcccgttacgggcagccgacgcacctgcacgatcgccaggggcgcggttttgcggtggtcggctacggcaagctgggtggatgggagctgggctacagttccgatctcgatctggtgttcctccacgattgcccgatggaggtgatgaccgacggcgaacgcgaaatcgacggtcgtcagttttatctgcggctggcgcagcgcatcatgcatctttttagtacccgcacctcgtcaggcattctgtacgaagtggatgctcgcttacgcccctctggcgcagcggggatgctggtcactaccgccgattcctttgctgattatcagcagaatgaggcatggacatgggaacaccaggcgctggttcgcgcccgcgtagtgtatggcgatcctgagctacaggcgcgctttgacgccattcgtcgggatattcttactaccccgcgagaaggcgaaaaactgcagaccgaagtgcgggaaatgcgcgaaaaaatgcgcgctcacttggggaataagcatcacgatcgctttgatattaaagcagatgccggtgggatcaccgatattgaatttattacccagtatctggtcctacgctatgccagtgataaaccgaagctcacgcgctggtccgataacgttcgtatcctggaactgctggcgcagaacgacattatggacgaggcagaggcgagggcgttaactcatgcttacaccacgctgcgcgatgcgctacatcacctggcgctgcaggaacagccggggcacgtggcgccagatgcgtttagccaggagcgtgaacaggtcagcgccagctggcagaagtggttgatggcttaa

SEQ ID NO: 253877 - DNA, 1407 bp, Klebsiella pneumoniae
atgcgcattgcatggcgattcgccgcaaaatactatttactgacaagaaatatcgttgttagttcgccgcaatttcccggcacagcatataagcggaagaattcagtcatggctcaagaaatcgaattaaagtttatcgttgatcagaatggcgttgacgcgctgcgtcagcacctcaatacgctggaggcaaagcacacgcccgcgggtcaattactgaatatttactatgaaacggcggataactggctgcgccgccacgacatggggctgcgcgttcgcggcgaccaggggcgctatgagatgacgctgaaaatcgccgggcgcgtcgtcggcgggctgcatcagcgtccggaatataacattccgctggaaagtcctgagctggcgctggaaaagcttccggctgaagtctggccgcagggtgaactgccggcggagcttgctgagaacgtacagccgcttttcagcaccgattttgagcgggaaagatgggtggtcaaagaaggcgacagcgaaattgaaatcgctctcgatcgcggcgaagtcaaagccggcgagcatcaggaacccatttgcgagctggagctggagcttctgtccggtaatacgcaggatattctgacccttgcccgtcgcttgctggataccggcgtactgcgtcagggaagcctgagcaaagcggcgcgtggttatcatctggcgcagggcaacgaagaacgcccgctgaccgcgttaacgatccttcgcgtcgcgccgaaagccagcgtcgaacaggggctggaggcggcgctggaaagcgcgctggcgcactggctatatcatgatgaagtcctcaatcgcggcaatgcgaaagcgaaagcggagattttgcacgctatcgcccgcgtgcggcacgcgctggtactgtttggcggtattgtcccgcgcaaggccaccacgctgctgcgtgaacgtctgagcgaagccgaggcggcgctggcggaagccgaaacgacccaggccgcgcttttcagcgtggcgaccgtcagggcgaagctggcgctcaccgatctgctggtaaaccgcggctggcgtcctttcctgaacgcagccggagagcagaaaattgccggatcgtttaaacgctttgcggatattcagctctccagggcggcggcggagctgaaaaacgcttttcgtcagccgtccgctgacggttatgccgatcagcttccgcgtctgacccgcgaaattgacaccgttcagctgttatccggcgcctatgccgatgctgccgcgccgtggctggaaaactggcaagaaacccgccgggcgattgcgcataatgacagcagcgttatcgaatattttcgtcgccaggcgctggccgcagagccgttctggctgcatagtggaaaacgataa

SEQ ID NO: 253878 - DNA, 621 bp, Klebsiella pneumoniae
atgccaaaattacgccttattacattgactttgctggcgctgagcgccgccacggcggttcacgcggaagaaaaacgttacgtttcagatgaactgaatacctgggtgcgcagcggtccgggcgataactatcgccttgtgggcaccatcaacgccggcgaagaagtcgcagtgctgcaaactaacgacagcactaactatgctcaggtgcgcgacagcagcggccgtaccgcctggatccccttgaaagagctgagcaacgagcccagcctgcgcactcgcgtgccggatctggaaaaccaggtcaaaaccctgaccgataaactgaataacattgataccacctggaaccagcgcacggcggacatgcagaagaaagtcgccggtagcgatgccgtcatcaacggcctgaaagaagagaatcaaaagctgaaaaatgagctggttgtcgcgcagaagaaggtgaacgccgcaaatctgcagcttgatgacaaacagcgcaccattatcatgcagtggtttatgtacggcggcggcgtgctgggcgtcggcctgattctgggactggtgttgccgcacctggtaccgagccgcaaacgcaaagaccgttggatgaactaa

SEQ ID NO: 253879 - DNA, 1242 bp, Klebsiella pneumoniae
gtgaaggtttatctggtcggtggtgcagtacgagatgcgttattaaggctaccggttaaagacaaagattgggtcgtggttggcgccacgcctcagcaactcctcgacgcgggctaccaacaggtaggccgtgattttcccgtgttccttcatccgcaaagccgtgaagagtatgccctggcgcgcaccgagcgcaagtccggttccggttacaccggttttacctgctatgccgccgctgacgttacccttgagcaagacctgctgcgccgcgatctgacgatcaatgcgctggcccaggacgccgacggtcagattatcgatccctacggcggccagtctgatttacgccagcgcctgctgcgccacgtctcgcccgcctttagcgaggatccgctacgcgttctgcgcgtggcgcgttttgccgcccgctacgcgcatctggggtttcgtatcgccgatgaaaccatggcgctgatgcgcgcaatggccgatgccggtgagcttgcacatctcacgccggagcgggtatggaaagagacggaaagcgcccttaccacccgcaacccgcaggtcttcttccagaccttacgcgactgccgcgcgctcaaggtgctgttcccggaagtcgacgccctttacggcgtaccggctccggctaaatggcacccggaaatcgacaccggcctgcacaccctgatgaccgtcaccatggcggcgatgctgtcacccgaagtcgacgtacgtttcgctaccctgtgccacgacctcgggaaaggactgacgccaaaagagctctggccgcgtcatcatggtcacggcccggctggcgtaaagctggtcgaacagctctgcgcccgtctgcgggtacccaacgagctgcgcgatctggcaaagctggtcgccgaatttcacgatctgattcacaccctgcccatgctgcagccaaaaacgctggtcaagctgttcgataatattgatgcctggcgcaagccgcagcgggtcaggcaaatcgccttgaccagtgaagccgacgtgcgcgggcgcaccggttttgaggcctgcgattaccctcagggtcgcctgctgctggaagcctgggacgttgcccgagcggtctcaacaaaagaggtcgttgcggaagggtttcagggaattgagattcgtgaagagctgacgcgtcggcggattcaggccgtcgcccgctggaaagaaaagcgttgcccccagccgcaggactga

SEQ ID NO: 253880 - DNA, 384 bp, Klebsiella pneumoniae; identical to SEQ ID NO: 191477

SEQ ID NO: 253881 - DNA, 621 bp, Klebsiella pneumoniae; identical to SEQ ID NO: 172829

SEQ ID NO: 253882 - DNA, 825 bp, Klebsiella pneumoniae; identical to SEQ ID NO: 191479

SEQ ID NO: 253883 - DNA, 1809 bp, Klebsiella pneumoniae
atggcccagacgggtagcggtaaaaccgcagcgttctctttaccgctgctgaacaacattgatcctgagctgagagcaccgcagattctggtgctggcaccgacccgcgaactggcggtacaggttgctgaagcaatgacggagttctctaaacatatgcgcggcgtaaacgtggttgccctgtacggcggccagcgttatgacgtgcagctgcgcgcactgcgtcaggggccgcaaatcgttgtcggtaccccgggtcgtctgctggaccacctgaaacgcggtacgctggatctctctaaactgagcggtctggtactggatgaagctgacgaaatgctgcgcatgggcttcatcgaagacgtagaaaccattatggcgcagatcccggagggtcatcagaccgctctgttctctgccaccatgccggaagcgattcgtcgtattacccgccgctttatgaaagagccgcaggaagtacgcatccagtccagcgtcacgactcgcccggacatcagccagagctactggactgcttacggtatgcgtaaaaacgaagcgctggtgcgtttcctggaagcggaagattttgatgcggcgattatcttcgttcgtaccaaaaatgcgaccctggaagtggccgaagcgctggagcgtagcggctatagcagcgctgcgctgaacggcgacatgaaccagtccctgcgtgagcagactctggagcgtctgaaagacggtcgtctggatatcctgattgcaaccgacgttgcggctcgtggcctggacgttgagcgtattagcctggtggttaactacgatatcccgatggattccgagtcttacgttcaccgtatcggccgtaccggtcgtgcgggtcgcgctggccgcgcgctgctgttcgttgagaaccgcgagcgtcgtctgctgcgcaatatcgaacgtacgatgaagctgaccattccggaagttgaactgccgaacgcagagctgctgggcaaacgtcgcctggaaaaatttgccgcgaaagttcagcagcagctggaaagcagcgatctggatcagtaccgcgcgctgctggcgaaaatccagccgtctgccgaaggcgaagagctggacgtggaaacgctggccgcagcgctgctgaaaatggcgcagggcgaacgtccgctgatcctgccgccggatgcgcctatgcgtcctaagcgcgagttccgcgaccgtgacgatcgtttcgaacgtcgtggcgaccgtaacgatcgtggcccgcgtggcgatcgcggtggcgaagatcgtccgaagcgtgagcgtcgtgacgttggcgatatggaactgtaccgcattgaagtgggccgtgatgacggcgttgaagttcgtcatatcgttggcgccatcgcgaacgaaggcgatatcagcagccgttacattggtaacatcaagctgtttggttctcactccaccatcgaactgccgaaaggcatgccgggcgaagtgctgcagcactttacgcgtacccgcatcctgaacaagccgatgaacatgcagttgctgggcgatgctcagccgcgccctgagcgcagcggcgaacgtcgtggcggcggtgagcgtcgtgaaggcggccgtagcttcggcggcggtgaacgtcgtgaaggtcgtggtttcggcggtgagcgtcgcgaaggcggccgtggtgaaggtcgccgtttcagcggtgaacgtcgcgagggtggccgcgcgccgcgccgcgatgatgcttcagcgccgcgtcgtgacgactccgcaggtcgtcgtcgtttcggtggcgatgcataa

SEQ ID NO: 253884 - DNA, 1245 bp, Klebsiella pneumoniae
atggcgacacttaccactacggcaacccgaccgtccttatttggcggcgtagtgattatcggcgggacaattattggcgcgggcatgttttcgctgccggttgtaatgtccggcgcatggttcttctggtctctggcggcgctggtttttacctggttttgtatgctgcattccgggttgatgatcctcgaagcgaacctgaattatcggattggttcgagcttcgataccattactaaagatctgctcggtaaaggctggaatctggttaacggcgtgtcgatcgcctttgtactttatattctgacttacgcctatatctccgccagcggctcgatcctgcaccatacgtttagcgaaatgtcgctgaacgtaccggcaagggcggctggttttggttttgcgctactggtggcgtttatcgtctggttgagcaccaaagcggtgagccgcatgacggccattgtgctgggagctaagatcattaccttctttctgacctttggcagcctgttggggcacgtccagccgaccacgctgtttaacgtggctgaacaaaatgcctcgtatatgccctatctgctgatgacgctgccgttctgtctcgcatctttcggctatcatggcaacgtgccgagcctgatgaagtactacggcaaagatccgcgcacaatcgtgaaatgcctggtttacggtacgctgctggcgctgggtctgtacgtggtgtggctgctggtgacgatgggcaatatcccgcgccctgaatttatcggtattgcgcagaaggggggcaatatagatgtcctggtccaggcgctcagcggagtgctgaacagccggagcctggatctgctgttagtcatcttttcgaactttgccgttgccagttcattccttggcgtaacgctcggcctgtttgattatctggcggatctgttcggcttcgatgactccgcgctgggacgttttaaaactgcggtactgaccttcgctccgccgatggcgggaggcttgctgtggccgaacggattcctctatgcgatcggctatgcaggtctggccgcgacgatctgggcggcaattgtaccggcgctgctggctcgtgcatcgcgtaaacgttttggcagcccattgtttcgcgtttggggtggaaagccgatgatcgctttggtgctgctgtttgggctgggtaacgttatcgtgcatttcctctcaagctttaacgtattacccacctatcaataa

SEQ ID NO: 253885 - DNA, 555 bp, Klebsiella pneumoniae
atgagtgaaccttcatcattttttcttcatgtacatatcaccgaagaaaagctggagcagttttttgcctccccggtgaaaaatattaccgactatagcgactggctggcctggtttaatgaagaaaaaagagtatgcggcgatccgagcaaaatgctccatcagatggcaggctgcaactcaggtaatagtcgggataatatctacgcagaacatatccattacgataaagaaaagcagatcctcactatggactctatcttcttatccgaaagttttagcgtcttcctgccgttaatcgtctgcctgcgcggcctggagagctatatcacgccagcaacaccaaataacttcctgataatctatccgtactggtggggagacacatcccagagcctgtcgccagaaacggatatgtatcttgagttcgctgatggcagtagccagctgcggtcaaaaacctctgcggaaaatatcgccattgccaacgccttctttgacgaacatggtgaagcgctggcagaggagctctacgaaaaacagggatttatttga

SEQ ID NO: 253886 - DNA, 711 bp, Klebsiella pneumoniae
atgaagagtattgtttttattattgctgtggcaatttttgcggtggtttttgtctggaacatgttgccggagaggagtgattcggtaatcttcctgccgcaggaaaagacaaattcagcctcaacggttaaacagatgatttatcccggcgatcgcctgtttatacgcattctgaaggcggaagataaactggaattgtggttcagtaagagcgggaagccctatgaactctataacacctggaccatctgcgcctggtctggcgggtttgggccgaaaaaggctgaaggggatggtaaaagcccggaggggttttacgctaccaccaaagcgctactgaatcccaatagccgctatcatcgggcttttaacattggttatcccaacgattatgaccgggctaacggctataccggcagctttattatggttcatgggaactgcgtttcggcggggtgtttcgcgatgactgatgctggcattgatgagatctataatctggtggcgcaggcgctgaacagcgggcagaaaaccattccgctttatatctttccgttttccatgaccgagcagaatatgcaacgagctgcgatgtggccggaatatacgttctggcgttcgttaaaaccggcgtacgactattttgagaaatatcaccggctccctgaaattagggttgtcaatcggcgctatgcccttgtcacaccctga

SEQ ID NO: 253887 - DNA, 1008 bp, Klebsiella pneumoniae
atgactgacaaatctgtttcattctcggtgctcgacctggcgccaatcccgcaaggatcttccgcaaaggaagctttctcccactctttagatctggcgcagctggcggaaaaacgcggttatcatcgctactggctggccgagcaccataatatggtcggtattgccagcgccgcgacctcggtgctgattggctatcttgccgcccataccaccactctgcatctgggctccggcggcgtgatgctgcctaaccattcgccgctggtgattgccgagcagttcggcacgctcaatacgctctaccccggtcgtatcgatctcggccttgggcgtgcgccaggtagcgatcagccgaccatgcgcgcgctgcgtcgccatatgagcggcgatgttgataacttcccgcgcgatgtcgcggagctggtggactggttcgacgcccgcgatcctaatccgcacgtacggccggttcccggctatggcgagaagatacctgtctggctgctcggctcaagcctttacagcgctcagctggcggcgcagctggggctgccgttcgcctttgcctcgcacttcgcgccggatatgctcttccaggccctgcacctctaccgcacccacttccagccgtcagaacggttagagaagccgtatgcgatggtatgcattaacattattgccgccgatagcgacagagatgcggaatttctgtttacgtccatgcagcaggcgttcgtcaaactgcgccggggcgagaccggacaactgccgccgccggtgcaaaatatgcatcagctgtggtccgcttcagagcagtacggcgttcagcaggcgctgagcatgtcgctggtcggcgataaagcgaaaatccgccacgggctggcatcgatcctacgggagactcaggccgatgagatcatggttaacggccaaatcttcgatcatcaggcgcgcctgcattcatttgatttggcgatgcaggtgaaagaagagctgatcgggtag

SEQ ID NO: 253888 - DNA, 879 bp, Klebsiella pneumoniae
atgaaatattcattagggccggtgctttattactggccaaaagagacgctggaagatttttaccagcaggcagccagctgcagcgcggacacgatttatctcggcgaagcggtatgcagcaaacgccgcgccaccaaagtcggcgactggatcgagatggcgaaagcgctggcgggaagcggcaaacaggtagtgctttccaccctcgcgctggtgcaggcgtcctcggaactgggcgaactgaagcgctatgtcgataacggcgaatttctgattgaagccagcgatctcggcgtcgttaacctgtgcgcggaacgtaaactgccgttcgtcgccggccatgcgctcaactgctacaacgccgtcaccctgcgtctgctgcttaagcaaggtatggtgcgctggtgtatgccggtcgagctttcccgcgactggctggcgaacttgctgacccagtgcgacgaactgggcattcgcaaccagtttgaggtagaggtgctgagctacggccatctgccgctggcctactccgcccgttgctttaccgcccgttcggaagaccgacccaaagacgagtgcgaaacctgctgcattaaatatcctaacgggcgcgacgtgctctcacaggagaaccagcaggtattcgtcctcaacggcattcagaccatgagcggctacgtctataacctcgggaatgagctgagcaccatgcacgggctggtggatatggtccgcctgtcgccgctgggcatcgagacctttgcgatgctggacgccttccgggcaaatgagaacggcgcagcgccgctaccgctgacggcgaacagcgactgcaacggctactggcggcggctggccggactggaactgcagagctga

SEQ ID NO: 253889 - DNA, 996 bp, Klebsiella pneumoniae
atggagctgctctgcccagccggtaaccttccggcgcttaaggcggccatcgaaaacggcgccgatgccgtctatatcgggctgaaagatgacaccaacgcccgccactttgccggccttaatttcaccgaaaagaaactgcaggaagccgtcagctttgtgcaccagcatcgtcgtaaactgcatattgccatcaataccttcgcgcatcctgatggctatgcccgctggcagcgcgcggtagatatggcggcccagctgggcgccgacgcgctgatcctcgccgatatcgcaatgctggagtatgccgccgagcgctacccgcacatcgagcgtcacgtttccgttcaggcctcggccactaacgaagaagcggtaaaattttatcatcgcaactttgacgtcgcccgcgtggtgctgccgcgcgtactgtcgattcaccaggtcaaacagctggcccgcgccacgccggtgccgctggaggtcttcgccttcggcagcctgtgcattatggcggaaggccgctgctatctttcctcttacctgaccggcgaatcaccgaataccgtcggcgcctgttcgccggcacgcttcgtgcgctggcagcaaacgccgcagggactggaatcacgccttaacgaagtgctgatcgaccgctatcgagatggtgaaaatgccggctatcccaccctctgtaaagggcggtatctggtcgacggcgagcgctaccacgcactggaagagcccaccagcctgaacaccctggagttgctgccggagctgatggcggcaaatattgcctcggtcaaaatcgagggccgccagcgcagtccggcgtacgtcacccaggtggcgaaagtctggcgtcaggcgatcgatcgctgcaaagccgatccgcaaaacttcgtgccgcagtccgcgtggatggagaccctcggttcgatgtccgaagggacgcaaaccacccttggcgcctatcaccgtaaatggcagtga

SEQ ID NO: 253890 - DNA, 525 bp, Klebsiella pneumoniae
gtgttggataaactgcgttcccaactggttcactttggcccgtcgttaataagcgtgccggttaagctggcgccttttgccctcaagcgccaggtgctggaacaggtattaagctggcagtttcgccaggcgctggcggatggggagctggattttctcgaggggcgctggttaagtattcatgtgcgtgatatcggcctgctgtggtatacctcggtgattaacggccgtctggtggtcagcccggcggctgtagcggacgtcagctttagcgccgacgccagcgacctgctgatgattgcggcgcgcaagcaggatccggatacgttgttcttccagcgtcgcctggttatcgaaggcgataccgagctgggtctttatgtaaaaaacctgatggatgccattgagctggagcagatgcccagggcgctgcgtattatgctgctgcagctggcggactttgttgaagcaggcctgaaaggcccgcagaaacctgaacagacatcggtaggtgaggcatgctga

SEQ ID NO: 253891 - DNA, 504 bp, Klebsiella pneumoniae
atgctgattcgagtagaaattgggattgatgcaccgggaatcgacgcgctattacgtcgtaccttcggcagcgatgcggaagcgcagctggtgcacagcctacgtgaagatggcctgatcacgctgggcgtggtggcgacggatgacgaaggtcaggtcgtgggctatgcggcctttagcccggttgccgttgaaggcgaagagctgcagtgggttggactggctccgctggcggtcgatgaaagctaccgcggtcagggcatcggtcgtcagctggtctatgaagggctcgattcactgaacgagtttggctatgccgctgttgtcacccttggcgatccggcgctttatggtcgtctgggctttgaacccgcagcgcgttttaatctgcactgccgttggccggatagcgcggaagctttccaggttcaccgcctggccgataacgcccttgatggcgtcagcgggctggtcgaatacagcgaccactttaaccgcttctga

SEQ ID NO: 253892 - DNA, 285 bp, Klebsiella pneumoniae
gtgtgctggtttctctatctgattcgtaccgccgataatcgcctttataccgggattactaccgatgtctcacgccgcttttgccagcaccaggacggcaaaggcgcgaaagcgctgcgtggtaagggagagcttcagctggccttcagccaggaagttggtgaacactcactagcattacgactggagtatcgtattaagcagctaacgaagcgccagaaagagcgcctcgttgccggagacggttcgtttgaggcgctgctggaaagcctcagaagcggttaa

SEQ ID NO: 253893 - DNA, 444 bp, Klebsiella pneumoniae
atggatacgctcgccgctatcagccgttggctgggaaagcagcatgttgtgacctggtgcgtcgcccgcgatgacgagctgtggtgcgccaatgccttttacgtttatgacccggaaaaggtcgccttttatttgcttagcgatgaaaaaacgcgccacggccagatgaccgggaaaggcgccagggtggccggaacggtaaacggccagccgaagaccgtcgccttgatccgcggcgtccagtttaaaggccaaattcgccgcctgtccggggaggaagaggcggcgatgcgtaagcgttacgtcagccgttttccggttgcccgcatgctatcggcgcccgtctgggagattctccccgatgagcttaagttcaccgataacacgctgggctttggtaaaaagctgcactggctgcgtgaatcaggcaccgagcagacgtaa

SEQ ID NO: 253894 - DNA, 519 bp, Klebsiella pneumoniae
atgagtaagaagatagccgttttaattaccgacgactttgaagactcggagttcacctcacccgcggacgcctatcgtctggccggtcatgaggtcgtgacgattgaaaaacaggcggggaagaaggtaaaagggaaaaaaggggaagctgaagtcgttatcgataaagccattgatgacgtcacccctgccgacttcgacgctctgctgctaccgggcggttattcaccggacgcgctgcgcggagacgaacgctttgtcaccttcacccgcgattttgtgaacagcggcaaaccggtattcgccatctgtcacggtccgcagctgttgattagcgccgatgtgattcgcgggcgtaagctgacggccgtgaagcctatcatcgtcgacgtgaaaaacgccggtggcgaattctacgatcaggaagtggttatcgacaacgagcagctggtgaccagcagaaccccggacgacctgccggcgtttaatcgagaagctttacgtctgctcggtgcctga

SEQ ID NO: 253895 - DNA, 651 bp, Klebsiella pneumoniae
atgagtcaggtactgataacgggggcaaccgggttagttggcggtcacttacttcgaatgctactcaacgcgccgggcgttaagtccgttaccgccccgacgcgtcggccgctggccgatatctccggcgtctttaacccccacgatccgcagctaacggacgccctggcgcaggttgtcgatccgatagatatcgttttttgctgtctggggactacccgccgggaagcgggtagcaaagaggcgtttgtgcatgctgattatacgctggtcattgataccgcgctggtgggaaaaaagctgggcgcgcagcatatgctggtcgtcagcgcgatgggggccaatgcgcattcgccctttttctataatcgcgtaaaaggtgagatggaagaggcgctgattgcgcagcagtggccgcgcctgaccattgcccgcccgtcaatgctgataggcgagcgcgaaaaaaaacgcgccggcgaaacgctctttgcgccgcttttcaatctgctgccgggaaatctgaagtcaatagaggcgcgggacgtggcgagcgcgctactcgcggaggcgctatcgcccacgcaggagggcgtacaaattctctcttcgtcgcagctgcgcgaaagggcggcacgctcgggggattactga

SEQ ID NO: 253896 - DNA, 1041 bp, Klebsiella pneumoniae
atggctggtcagtcttcatctcaggcggcatcaccgtttcaatggtggaagcccgcgctcttttttctcgtcgttatcgttggtctgtggttcgttaaatggcaaccctactatggcaaagccttcaccgccgcagagacgcacagtatcggcaaatccatccttgctaacagtaacgctaaccctttcgctgcggcctgggattacgccctggtctatttcatggccgtatggaaagcggcggtcctgggcgtactgctgggttcgctgattcaggtgctgatcccgcgtgactggctgctgcgcacgctggggcaggcgcgttttcgcggtacgctgctgggaaccgtattctctctgccgggcatgatgtgtacctgctgcgccgcgccggtggcggcaggaatgcgtaaacagcaggcctcgatgggcggcgcgctggcgttctggctgggcaatccgctgctcaatccggcgacgctggtgtttatgggctttgtgctaggctggcagtttgcgctggtgcgcctgctggctgggctggcgacggtcctggtggtcgcaacgctggtgcagaaatgggtaaaagaggcggcgacgcagccggtttcgatgcctgaacagccggttgcaaccgtgcaggacggtttctttagccgctggctgcgcgctctctggacgctgttctggaacactatcccggtttatattctggcggtgctggtgctgggagccgcgcgggtgtggttattccctcatgccgatggggtggtagataacacgctgttctgggtgattgctatggcgattgccggctgcctgtttgttattccgacggcggcggagattccgatagtgcagacgatgatgctggcaggtatgggcgtggcgcccgcgctggcgctgctgattacgctgcctgctgtcagcgtaccgtcactgattatgctgcggaaagcgtttccggcgaaggcgctgtggctgaccggcgtgctggtggcgctgtgcggcgcggtggttggcgggctggctttaatctga

SEQ ID NO: 253897 - DNA, 576 bp, Klebsiella pneumoniae
atgaaggctctctcgcccctcgccattctgctgtctgcgctactgcttcagggatgcgttgccgcagcggtagttggcacggcagcggtcggcaccaaagccgcgacggacccgcgtacggtaggtactcaggtggatgacagcacgctggagctacgcgtcaacagcgcgctatccaaagatgaacaaattaagaagcaggcccgcatcaacgtgaccgcctaccagggtaaagtcctgctgaccggtcagtctccaacgccagacctctccgcgcgcgcgaagcaaatcgcaatgggcgtagaagggacaacggaggtgtttaatgaggtgcgtcagggccagccgatcggcttaggtaccgcctcttcggatacctggatcaccaccaaagttcgctcccagctgctgggtaccgaccaggtgaaatcctccaacgtgaaggtaacaaccgaaaatggcgaagtgttcctgatgggtctggttaccgaccgtgaaggacgcgcggcggcggatatcgccagccgggtaagcggcgtgactcgcgtcaccaccgcttttacctatatcaagtaa

SEQ ID NO: 253898 - DNA, 591 bp, Klebsiella pneumoniae
gtgctcgacagaatcaaagcctgcttcaccgaaagcattcaaacccaaattgcagcagcggaagcactcccggacgccatctcccgtgcggctatgacgctcgtacaatcgctgctgaacggcaacaaaattctctgttgtggtaatggcacttccgccgccaacgcacagcattttgctgccagcatgattaatcgtttcgaaactgaacgccctggtttacccgccattgcactaaataccgataatgtggtcttaaccgcaattgccaacgatcgcctgcatgatgaaatctatgccaagcaggtgcgtgcgttgggacacgccggcgacgtactgctggcgatttctacgcgcggcaatagccgggatatcgtgaaagccgtggaagcggcggtcacccgcgatatgactatcgtggcgttaaccggttatgacggcggtgaactggctggcctcttagggcagcaggacgtcgaaatccgcattccctcgcatcgcagcgcgcgaattcaggaaatgcacatgctcaccgtcaattgtctgtgcgatttgatcgataacacgctttttccacaccaggacgattaa

SEQ ID NO: 253899 - DNA, 387 bp, Klebsiella pneumoniae
atggctcaaataccagggtgggcaaatcgtcgcagccaactaagtaaacagaccggcgatgcctgggaaatgcaggcgcgccgctggctggagcgccagggtttgcgctttatcgccgccaacgtccgcgagcgcggcggcgagattgacctcatcatgcgcgacggtagcgtcaccgtatttgtcgaagtacgctatcgtcgcagcgcaagctacggcgatgccgcttccagcgtcacgccgcaaaagcaacaaagactactcaaagccgcgcgtctgtggctctgccgacagaatgggagctttgagactgtggattgccgtttcgatgtggtagccttcaccggaaacgacatccaatggctaaaaaacgcctttggcgaatag

SEQ ID NO: 253900 - DNA, 2082 bp, Klebsiella pneumoniae
atggtaccgtcaacatttcttcgttctaaacccgtgcgttgtctgcccgtactgctggccgctctgatctttgccggctgcggcacccacaccccggaccaaagcacggcgtatttgcagggtacggcacaggcagactccagttactatctgcaacagatgcagcaaagctcgaatgatagcaagaccaactggcaattactcgccattcgtgcactgctgaaagaaggtaagaaaccgcaggccgttgagctgttcaaccagctgccgtccggtcttaacgctgcgcaaagtcgcgaacggtcgttgctggcggtagaagtgaagctggcgcagaacgacttccagggcgcgcaggcgctgctgagcaaactcgatccggcaagctttgagcagaaccagctgccgcgctactggcaggcgcaaattgacgccagccaggggcagccatcgctgaacctgctgcgggccctggtcgcccagcagccgctgctgagcctggccgcgcaaaagcagaagaacatcgacgcgacctggaaagcgctcaccgcgatgaccaaagatcaggcctacgcgctggtgattaacgccgacgagaacgttctgcagggctggctggacctgcagcgcatgtggtttgataaccgcagcgatccgacgatgctcaaagcaggcatcaaagactggcagacccgctatccgcaaaacccgggcgcgaaaatgctgccgacgcagctcgtcaatatgcaaaactaccaggccgcatcgaccaataaaatcgcgctgctgctgccgcttaacggtcaggcggccatttttggccggactatccagcagggctttgaagcagcgaaaaacggcgcgcctgccgtttccggaagcgcggtgcccgcccaggtcgcccaggcggcgaatgttgccgatagcgcagtggtaagcccgtcgcaggcggaagtaaccgatctgacggcgacgaacagcgctcaagcgccggtacaaacgccagctgccgaccaggcgcaagctcaggcgccggtcaccgcaccggaggcgacatccgccccggcgccggagaccaccagccagccggtacaggcaccgcagactcaggctgtgtccgccaccccggctaacccggccgccgagctgaaaatctatgacaccaccacgcaaccgatgagccagctactggctcaggtacagcaggacggcgcgaccatcgtcgtcggcccgctgctgaaagataacgtcgaacaggtcatcaagagcaatacctcgctgaacgtgctggcgctcaaccagccggagaaaatcgaaaaccgggttaatatctgctatttcgccctctctccggaagacgaagctcgcgacgcggcgcaccacatacacgatcagggtaaacagactccgctgctgctggtgccgcgcggcgcgctgggcgatcgcgtggttaatgcctttgccaatgagtggctgaagctggggggcggcacggtactgcaacagcgtttaggttccacggccgagctgcgcggcagcgttaacagcggtatttcattaagcggtacgccggtttctaccctgccgtcagcgcaggacagcgctctgggaagcccgagcgatgtgccggtcagcagcaccggcggcgtcgacgccgcgtacatcctggcgacgccggaacaaattgcttacgtcaagccgatgattgccctgcgtaacggtagccagagcggcgtgacgttgtacgccagctcccgcagcgcccagggaacctccggcccggacttccgtctggagatggaaggcctgcaatacagcgaaatcccgatgctggcgggaagcaacccggcgctgcagcagcaggcgctggccgccgttcggaacgactactcgctggcgcgcctgtacgccatgggcgccgacgcctggtctctggccaaccacttctcgcagatgcgccaggtgccaggctttgagctgaacggcaataccggcgatcttacggccacgcaggattgcgtgatcaacaggaaactgtcatggctcaaataccagggtgggcaaatcgtcgcagccaactaa

SEQ ID NO: 253901 - DNA, 861 bp, Klebsiella pneumoniae
atgaaacaacacgaatcagcagataattctcagggacagctctatattgtgcccactccgatagggaatctgtctgatatcacgcaacgcgcgctggaagtgttgcaagccgttgatttagttgcggccgaggatacccgccataccggtttgctgctgcagcattttgcgattaacgcccggttatttgcgcttcatgaccataacgagcagcaaaaagcggaaacgctggtggcgaagttgaaagaagggcaaaacatcgccctggtttccgatgccggaacgccgctgattaacgatcccggctatcatctggtgcgcacctgccgcgaggccaatatccgcgtggtgccgctgcccggcccctgtgcggcgattgcggcgctgagcgcggcggggctgccgtcggatcgtttctgctacgaaggttttctgcctgcgaagtctaaagggcgtcgcgatacgctgaaggcgctggaagaagagccgcgcaccattatcttctatgaatcgacccaccgcctgctggaaagcctggaagatatctgcacggtactaggcgagtcccgctatgtggtgctggcgcgggagctaaccaaaacctgggaatcgattcacggcgcgcccatcggcgagctgctggcatgggtgaaagaagatgaaaaccgccgcaaaggcgagatggtgctgatcgtcgaggggtttaaagcgcaggaagaggcgctgccggcggtggcgctgcgcacgctggccctgctgcaggccgagctaccgttgaaaaaagccgctgccctggccgcagaaattcacggcgtgaagaaaaacgcgctgtataagtatgctctggagcagcagggataa

SEQ ID NO: 253902 - DNA, 1077 bp, Klebsiella pneumoniae
atgaagaacgcaatttatcttatgactggcagcctcgctctcgccctgtttgccgcagcaccggcgcgcgcagaggagggcggctgcgaagccgtgggcgggcctgctaattttactaccagctttgccaatgactggacaaaagagcaaaacgtcgccgggactttaatagatctgacctccggcaccacctctggcggcagctacaagatggcttgcaactgccccgccaacaccaaggttaatctctactatgccaccaccacgccgttagctaaccccggctattccggatttcaaaaattaaatgacagtctggatattaaaacggtgattaccgatgtacccggggtatcggcgcttaaggttcccacagatgtgaattcaccggtcagaggagacgggtcttttcaggcctcaaagggcaatagcgtatgcagcggggatcctgaggatcagcgcggggcatttaccgtaggcagtaacgtcagcattacctttcgcgtcacaaggtcttttttaggccggatggagatccccagcacgcatattgctaccctacagtcggcatggagcagtagtagtacctacccaagattcatctaccaggacattgccaatatctatctccagggcagcattaccgttccgcaaagctgtaaaatcaacgaaggggacgtgatccgggtcgaccttgggcaaattcgcgcctcaaaattcactaaaaagaaccacatgcccgacggatatacgcctgtaaggtttgatattgtctacgattgcggggatacgtcattatatcaatactctgacactctcgaacttattgtgcagggtgatgacgtcgtcagtcagtacgtgctcgcagcccgccgcagggaatcagataatgttgctgatgttggtattatgatgcaccaaaacgtcgatattcctatgaatggtggacctataactttagataaatcagctccaggcgctgtacagctgcaagcccaacccattaacctggtcggcggagtactgcaaccaggcccgttccacggctcagttaccctcaccgcaacggttagatag

SEQ ID NO: 253903 - DNA, 2526 bp, Klebsiella pneumoniae
atgcaaagcaacaccacagggaaaaaaaacgtgctggcgcttaaaagccttgcttacagggtcaggcacgctttgccgatgatgctggccggcagcggcctgatatgtcatgtcgcgcaggccgatgacttttatttcgatccttcgctgctggaaaccaacaaaagcggcctgcaaacggtagatctatcagccttctctcaggacagcgcccagctacccggcgagtatatcgttgatatttatattaataataagaagctgacgcagcgtaaaatcccgtttgccgccggagataaccaccagcttatcccccagtttaccgtcggccagctgcgcgagctgggctttaaagttgatgagatcccggcgctggcgaagctggacgatgcagcaaaagtcaccaacctcgcgcaaacggtgccgaacagcagcagcgagctggatctcaaccacggtaagctgaacatgagcgtaccgcaaattatgctctaccgcgatgccagaggctatgttgacccctcccgctgggacaatggcatcccggtgctgttcaccaactataactttaccggttcagagagccgctacgacggcggcgagcgcagcaggcgccagtatctgaacatgcagaacggcgccaacctcggcccgtggcggctgcgcaactactcgacctggacgcacaacagcgacacttcgcagtgggacagcattaatacctggatgcagcgggatatcaaaagcctcaaatcgcagctggtgatgggcgaaagcgcgactgacggcagcgtgttctccagctatcagtttaccggcgcgcggctctattccgatgacagcatgctgcctaacagccagcgcggctttgcgccgacgatccgcgggatcgctaactccagcgctatcgtgacggttcgtcagaacggttacaccatttaccagagcaccgtgcctgccggcgctttcgagatcaacgatctgtacccctcctcattcagcggcgatttagacgtgacgattgaagaggctgacggtaccacgcgccattttgtacagcctttctcctccctgccaatgatgcagcggccggggcacctcaaatatagcgtcaccgccgggcgctttcgggcggcaggctcggaggacagtaaagaaccggagttcattgaaactacggggatttacggcctgagtaacacctttacgctgtacggcggcctgacgggctccgaggattaccaggcgttaactctgggtatcggcggtacgctgggagagtttggcgccctgtcgatggatattggccgggcggatacccgctttgataacggcgacagcgattccggctacagctggcgcacccagtacattaaagatattccagagaccggcaccaatctatcgctgggctattaccgctataccagcactggctacttcacgttctcagatgccaaccagcgggatatcgacgccggcgatcggcagagcagcgaaatccagttcagcattaatcagaatctgtttaccggcgtcagtttttacgcttccggttcgcagcaggaatactgggacaaagggcagaaggacaaaaacctgtcgattggccttagcggcaacctgtggggtgtcagctataacgtcagcggccagtttaccgattatgccgatcgcgacagcgatcgttcgctgtccatcagcctcagcgtaccgctggaccgctggctgccgcacgctaacgccaactggcggatcaccagccagaaggatcaagcgacccagcatgaagtcggaatcaacggctccctactggaagatagccgtctgagctacagcctgaaacagcgtcagagcgagaataacgacagcaacggcagcagcctctacggcagctatcgttccgcctacggcaccgtcaacgccggttacgattacagttccgataaccgccagatgagctatggcctggccggcggcatcgtggcgcacagccacggcgtcaccttgtcgcagccgctgggtaacgcctttgcgctgattgatgccgatggcgcctctggtatacgcgtcaaaaactatcccggaatcgctaccgactacttcggctatgccgtgatcccctacctgacctcttatcaggagaaccgtatctatctggataccaccatgatgcctgacgacgtcgacgtcacccagaccatgaagctggtggttccgagtcagggagcggctgtgaccgcgcagtttagcgccaaaattggccagcgcgtgctgctgacgctgaccgacagaaacggtaaaccgctgccgtttggcgcgatggccagcagcgaaagccagcagcagcagagcattgttgatgaaggcggcgtgctttatctcaccggcgtcaacgaacggccgcaggcctggaacgtgcgctggggcaatgaagagcatcagcagtgccgatttacgtttagcctgcccgctaacggccagcgcacagcctccgttattcgcgccacgacaacatgccgctaa

SEQ ID NO: 253904 - DNA, 693 bp, Klebsiella pneumoniae
atgaaagggaaaaccctggtagcattggccttgttgcttggaggatgggtcagccaaagcctggccggcgggatcgttctgcaaaccacgcgggtgatttacgacgccagtaaaaaagaggccgccctgcccgttgccaatcacagcagcaaaatgccctatttattgcaatcatggattgataatccgcaaggaacaatccgcgggccgtttattatgaccccgccgctgtttcgcctgaatgccggcgacgactcctcattacgcattattaaaaccgaaggcaatatgccggaagataaagagtcgctgttttacgttaacgtgcgggctattccggcccaatcgaaaagtgaagcaggtaaaaccaacgcactgaccctggtatttaaaaccagaataaagcttttctatcgcccggcgcatcttaaaggcgccccgcaggatgcgtggaaatctatacaatataagcgaacgaataataccttagatatctataacccatccgcctattacgtggtatttgccggcatcgcattgggtaaaactgatttaaccaatcaggttgactatatcgctcccggcgagcacaaacaaattccgctacctgccgcatcgggtaattccgtgcagtgggccgccatcaatgactatggcggcaccacggcaaaagaaactcgggtactgcaataa

SEQ ID NO: 253905 - DNA, 570 bp, Klebsiella pneumoniae
atgaatgtaattgcaaagtccgttgcagttggattactggcaatggctgcaggcagcgcctgggcaagcgatggtactattgaattcacgggtgaaatcaccacctctacctgtgaattcgctaacggcgatacggtaaatgttgaactgggtcattacgctaatacccagtttaaaaccgtaggcgacaaatcaccgactaccccgttcaccattccgctgaccaattgcccaactgaagcctggaaacatgttgatggcagcgaaagcaagtcgttccagctctggctggaaacgcgtaatggcggtactacgggcgcaaataacgatctggttgcagtaacgggttcggccacgcctgcgaccggcgtcggtattcgcatcgaccgcgcttccgacggagcccagctggcgctcaataaactgaacgacaccccggtcacttttgatatcacgggtgaacaaacggacgtcaatctgcaggcttactacgtctctaccgttgaatcttcggccatcaccgccggggaagcgaacgcttccgtcgacgttaccatcgattatcgttaa

SEQ ID NO: 253906 - DNA, 774 bp, Klebsiella pneumoniae
atgaactcattcgagcgaaggaacaaaattgtcgaaatggtcaatacgcagggtagcgtattggtgctggacctttcgaatctctttggcatctccgaagtgactatccgggccgatctccgcctgctggaggaaaagggattactcacccgctttcacggcggcgccgcgaggcccggcagcaatttaaccgaaggagatagccaggaagtggtgctggaagagcgttatcaactggccagcgacccgaaaaagcgaatagcccaggccgcggcggcaatgattagcgaaggcatgacggtgatcctggatagcggcagcaccaccctgctgattgccgaggcgctggtacgtatgaccaatattacggtgattaccaatagcttacccgcagcgtttacgctttcagaaaataaagatatcaccctggtggtgtgcggtggcaccgtgcgccacaaaacgcactcgatgcacggcaccatcgctgaacgctcgcttcagggcatcagcgccgatctcatgttcgtcggcgcggacggtatcgacaccaccaacggcatcacgaccttcaacgaaggttactccatcagcggcgtcatggcagccgctgcgcataaggtcgttgccgtgctggatgccagcaaatttaatcgtcgcggcttcaaccaggttctgccgatggagaaaataaactgcgtgattaccgatgacgggattagcggggaatatctcgctgagttaaaaaacacacccattgagttacaaatcgtctag

SEQ ID NO: 253907 - DNA, 468 bp, Klebsiella pneumoniae
atgagtcaattgtttgttcgtaccggcattcattttcgttccagccagcaggcgctggaacacattggcgaagagatgctggcgcgcggcgtcgtgcacgatagctatccgctggcgctgctcgaacgagaagcgactttcccaaccggtattgcgctggagcagcatgcggtcgcgattccccactgcgaggcggtacatgcgaagtctccggctatctacctgattcgcccggacaatccggtcccttttcagcgtgctgacgacgacggcgaaatcgacgtttcgttaatcatcgcgctgattgtagaaaatccgactgcacagctacagctgctgcgccggttatttagtgagctacagaacccgaccacgcttgaagcattgctcgctgccccgcaggagcagctgcccgagctgtttcggcgctctatccttgagtcagagccgagcgctcaggctttataa

SEQ ID NO: 253908 - DNA, 816 bp, Klebsiella pneumoniae
atgcaactgacttgcgcagatatccatttcgatcgcgcgatcaaaacgaaagatgaagcgctgcaacgcgtcattggcaaattaaccgaagccgggcataccacgcccgcttatctgagcggcatgcgcgaccgtgaagaacaaatcagcacttacctcggcaacggtatcgcgatccctcacggcacgccgcagagccgcgatgcggtactgaaaaccggtgtcaaagtactggcctgcccgcagggtgtggattggggagaagaacaaacggcttatctgattgtgggcatcgccgcccaggataacgaacaccttgatattctccgccagcttacccacgccctgagcgatgagcgcgtgccggcagcgctttcgcgcgctgagagcccacaggcggtgctggagatactggccggcaatatcttcccggccggaggagaagagacggaaccgcccccgatgttcgacgaagaggcgacctttaccctgcgcaatccccacggactgcacgcgagaccaagcgcggtactggtgaaagcggtgaagcagtggcaatcgcaaatccgggtggaaaatctagacacgcgttccgccattgttgacgccaaaaatctgatgcgggttgtctctctcggtgcaaaacagggccatcggctgcactttatggccagcggagaggatgctcatcaggcgctggaggctatcggcgcggcctttaatgccggattaggcgaaatcgccgctcagccgcagcgtgccgttccgcccgtagaaaaacctaaacggagctggctgtctcgattatttagttaa

SEQ ID NO: 253909 - DNA, 915 bp, Klebsiella pneumoniae
gtgatccataccctgacactcaatactgcaatcgatatgaatatcttttgcgatccgctgaagccgtcggcagtgaaccgaacccggcacacggaatattgcccgaatggcaaaggagtgaacgtttcgctgatattaaatcactatcagcagcccactcacattatgggcattttcggtggtttcactggccgttatattgtggaagagttacgtcagaaaaacattaaagtgacgccggcatgggtctctgagccaacccgaattaatatttttattaatgacggtgctgaggaatataagctcgttaatcccggagcaaaaattgatgatgagtgcaaacaacaggttattcatcatctgcaatgcgtcacttccggggattatttagcgatcagcggcagcctgccgccgggaattgaaagccgattttatgctgaaatcattgaattatgccagcagaaaggctgtgaagttattctcgatatcagccatccggtactgcgccagctgctggaattgcggccattgttgattaaacccaacgatgacgagctgcgggaaatcttcggtcttgacgtcagtagccgccagcaggtgcgtgaggccatgcgcacgctgcatcaactgggcgctcgcaacgtgctgctgacgatgggagccgagggtctctacttttccaacggcgaaggcgtgtggttttgctccgcaccgaaaattgaactggtcagctccgcctgcgctggtgacgcagcactgggtgcttttctcagtaaatggcttaacaaagaagatgtcactcacgctctggcattagccagcgcgaccggcgccgatgtcgccgcttccgccgggttaggcaaattacaacgcacagaagaattattacaacaaattcaggtcgtccaattataa

SEQ ID NO: 253910 - DNA, 831 bp, Klebsiella pneumoniae
gtggcaaaaccgtctacaagtctgctgaaaaggcgcctggacatcgcggagatcgtgcgcaaaaacggagagatcaaagttgacgatctggctgaaatgctggctgtatctggggtaacgatccgtaatgacctgaactaccttgaacagcagggctaccttaagcgctcgtttggcggcgcaatttacacttcccaggccgggactccgatcgccctggctccggaggccccggtagtaacggacaaagccctggagaccgaaatggctcgccagatcgccgcgcaaatcgaagatagcgaaacgctctttctggggcaggggtcgatcttacgcaaagtgatcccgttccttgctggctatgacgagctttgtctgctgttaaacgacctggcgcatgtgccgctggcgcaggagtttctgaatggggaaaccgtgctgctcggcggcgtactcgggagcagcggcaaaatagtcgaaggcgatctggcgctgaacgcgctgggtcaatatcgcccctcacgagcgctgatcgctgtcgaccacattgcggaagatggcaccttgagcgtcagacaggaagccagcgctcgcctgctgagcgaagcggtggcgcaaagtgagagggtgattgcggtcgttgcgcatcgtccggtgtatggcgataagcgctacgcgattggcgacttgcagcaaattagcggcatagtgacgccgcaggtggtcgccgcggagtatcacgcccgccttctcgccgctggcatgactaacagctataccaacaacgagtgcctgacatggctcaaccctgctttgcagaaggcaaagtaa

SEQ ID NO: 253911 - DNA, 1335 bp, Klebsiella pneumoniae
atgagtctggatgcaacaatagaacagaaaaaaagtgtgccaacccgctatttaattctgttaattatttttattgtcactgccgttaactatgccgaccgcgcgacgctttcgatcgccggtaccgaggtggcgaaagagctgcagctgagtgcggtctcaatgggctatattttctccgcttttggctgggcctacctgctaatgcaaatccccggcggctggctgctcgataaatttggatcgaaaaaggtctactcttacagcctgttcttctggtcgctgttcaccttcctgcaaggctttgtggatatgtttccgctggcgtgggcgggcatctcaatgttttttatgcgctttatgctgggcttctctgaagcgccatctttcccggcaaacgcccgtatcgtcgcggcgtggtttccgacgaaagagcgcggcaccgcatcggcgatctttaactccgcgcagtatttctccctggcgctgttctcgccgctgctgggctggctgacctttgcctggggttgggagcatgtcttcaccgtcatgggcgtgattggctttgtgctgaccggcctgtggataaaactgatccataatcccactgaccatccgcgcatgacgcaagaggagctgaagtttatctccgagaatggcgcagtcgttgatatggaccataaaaagcccggcagcgcggcggccagcggtccgaagcttcactatatcaagcagctgttgaccaaccgcatgatgctgggcgtattcttcggtcaatattttatcaataccattacctggttcttcctcacctggtttccgatttatctggtgcaggaaaagggtatgtcgattctgaaagtgggtctggtcgcatcgattccggcgctgtgcggttttgccggcggcgtgctgggtggcgtgttctctgactatctgattaaacgcggtttttccatcaccgtggcgcgtaagctgccgatcgtcctcggaatgctgctcgcttccaccatcattctgtgtaactacaccaataataccgcgctggtggtcaccctgatggcgctggcattcttcggtaaagggtttggcgcgctgggctggccggtgatttccgataccgcgccgaaagagattgttggcctgtgcggcggcgtatttaacgtatttggtaacgttgcttccatcgtaaccccgctggttatcggttacctggtgagcgaactgcactcattcaacgcagcgctggtctttgttggatgttccgccctgatggcgatggtttgctatctgtttgtggtcggcgacatcaaacgtatggaactgcagaaataa

SEQ ID NO: 253912 - DNA, 771 bp, Klebsiella pneumoniae
atgaataacgatatcttcccgaataaatttaaggcggccctggcggcgcatcaggttcagattggttgctggtccgcgctggcgagcccaattagcaccgaagttttaggcctggccggtttcgactggctggtactggacggcgaacatgcgccgaacgatatctctacctttatcccccagctgatggcgctgaaagggagcgccagcgcgccggtcgttcgcgtaccgaccaacgaaccggtgatcattaagcgcctgctggatatcggtttttataacttcctgatcccgtttgtggaaacggaagagcaggcgattaacgccgttgcctcaacccgctatccgcctgaaggcattcgcggcgtatccgtctcgcaccgcgccaatatgtttggcaccgtgccggattacttcgcgcagtcgaacaaaaatatcaccattctcgtgcaaatcgagagccagcagggcgtggataacgttgatgcgatagccgccacgcctggcgtggacggtatttttgtcggcccaagcgatctggccgctgcgctgggtcatctgggcaatgcttcccatccggaagttcaaaaagcaatccagcacatttttgccagcgcgaagaagcacggtaagccgagcggtattctggcgccggttgaagccgacgcgcgccgctatctggaatggggcgcgacctttgtcgccgtcggcagcgacctgggcgttttccgttctgccacgcagaagctggctgactcctttaagaaataa

SEQ ID NO: 253913 - DNA, 891 bp, Klebsiella pneumoniae
atgacaatgaaagttggttttattggcctcggtatcatgggtaaaccaatgagtaaaaacctcctcaaggcgggttactcgttggtggttgctgaccgtaatccggaagcgattgccgaagtgattgccgcaggcgcagaaaccgccgcatcagcgaaagcgattgccgagcagtgcgatgtgatcatcaccatgctgccgaactctccgcacgttaaagaggtcgcgctgggcgaaggcgggatcattgaaggcgcgaagccgggcaccgttttgattgatatgagctccatcgcgccgctggcgagccgcgaaatcagcgaagcgctgaaagcgaagggcgtcgatatgctggatgccccggtcagcggcggcgaaccgaaggctatcgacggtacgctgtcggtgatggtgggcggtgataaagcgattttcgataaatattacgatctgctgaaagcgatggcgggatccgtggtacacaccggcgagatcggcgcgggcaacgtcaccaagctggccaaccaggtgattgtggcgctgaacattgcggcgatgtccgaagcgctgacgctggcgactaaagcgggcgtgaacccggatctggtttatcaggccatccgcggcgggctggccgggagcaccgtgctggatgccaaagcgccgatggtgatggatcgtaactttaagccgggcttccgtatcgatctgcatattaaagatctggcgaatgcgctggatacttctcacggcgtgggcgcccagctgcctctgaccgccgcagtaatggagatgatgcaggcgctgcgcgcggatggcctgggtaccgccgaccatagcgcacttgcatgctactacgaaaaactggcgaaagtggaagtcactcgctaa

SEQ ID NO: 253914 - DNA, 1146 bp, Klebsiella pneumoniae
atgaaaatcgtaatcgccccagactcttataaagaaagcctctcggccaccgaggttgctcaggctatagaaaaaggttttcgggaaattttccccgatgcgctctacgtgaaggttcctctcgccgatggcggagaaggtaccgttgaggcgatgattgccgcgacgcagggaaccgagatgagcgcctgcgtgacggggccgctgggtctcccggttgatgcctgctgggggctttccggtgacggcaaaaccgcgtttatcgaaatggctgcggccagcgggctggggctcgtgccgcccgcgcagcgtaacccgttattgacgacatcgcgcggtaccggcgagctgattctgcaggcgctggatcacggggcgaaaaatatcatcattggcattggcggcagcgccaccaatgatggcggcgcaggaatggtgcaggcgctgggcgcgcggctttgcgatgccaacggcgcggagattggcaacggcggcggtagtctgtgtagcctcaattcgatagatatctccggtcttgatgcccgactgcatgattgcgctattcgggtcgcctgcgatgtcaccaatccgctgatcggcgatagcggcgcgtcaagaatttttggcccgcagaaaggggctaccgaagcgatgatccgcgagctggacagcaatctggcgcactacgccgatattattaaggccgatctgcatgtcgatgtgaagcaggttgccggtgcgggcgcggcgggcggtatgggtgccgcgctgatggcgtttctgaaggctgaattacgcagcgggattgaaatcgtgacccaggcgctgaacctggaagagcatatccttgattgttcgctggtggtgaccggcgaaggtcggctggatagccagagtattaacggtaaagtgccggttggcgtggcaagcgtggcgaaaaagtatcataagccggtgattggcatcgccggcagtctgacccgggacgtcggtgtggttcaccagtatgggattgatgcggtgtttagcgtgctgaccagcgtaacgacgctcgaagaggcgtttcgcggcgcggcggacaatatttatcatgcgtcgcgtaatattgcggcgacattgcaggttgggatggcgacggaaggatga

SEQ ID NO: 253915 - DNA, 240 bp, Klebsiella pneumoniae; identical to SEQ ID NO: 176355

SEQ ID NO: 253916 - DNA, 789 bp, Klebsiella pneumoniae
atggcttaccgttcacttgcattcaataatgacctcatctggcgggccccgctgccttcggctgagcgcgaactggcgaatgcattacatgacaagatcgctgcgctacgtccccatctgcttgattttctgagactaaatgaagaagccccccatcatgcgctgacgcttacagagtggtcgcagcccgcaatgctaagttccctgttggcgacctggtccgaccatatttatcgtaaccagccggggaaaccccgtgagcagaaaccgctgctttccctgtgggcacagtggtacatcggtttgctggttccgccattaatgctggcgctgttgagtgaagagcgcgcccttagcctggcgccggagcattttcgcgtcgagtttcacgaaaccggccgtgcggcccgtttctggattgaggtacattcggcgggcgcctcgccggaacaatctgcgcaatcaaggatggaaaagctgatcgctacggctctccaacctgtcgttcaggcgcttgaagccacgggtgatatcaatggcaaacttatctggagcaatacgggttacctgatcaactggtatctgggtgaaatgaaaaccctgctcggagatgaaaaaattgccgctctgcgtcagcactgcttcttcgaaaaacagttttctgatggccaggataatccgctctggcgtacggtcgttttgcgggaagggcagctcgtccgtcgaacctgctgccagcgctatcgcctgccggatgttcagcagtgcggggactgcacgttgaaataa

SEQ ID NO: 253917 - DNA, 1344 bp, Klebsiella pneumoniae; identical to SEQ ID NO: 176358

SEQ ID NO: 253918 - DNA, 459 bp, Klebsiella pneumoniae; identical to SEQ ID NO: 176359

SEQ ID NO: 253919 - DNA, 681 bp, Klebsiella pneumoniae
atggaaaaagacctcacagcacgatatgtcgctatcgtagagaaatgtgcgatgacggaagtggcccttcgccacattttaattaatgaaagtggtaagaattatcgcattcaattctttaaagatactcaggcattaaagcgggagttccagtctaaagatttttcggcgattattttttctctttcaggtaaccgccgatcccggcttgaaagcttactctttcttcatgagattgcacgctactgccctgaaatgcaaagaattgtcttagccaatgatgaagctgaaatgcgtctggttagccatctgacgccttcacgcctgcacggcattttgaataaatcagcctgtcggctacagctgcaggaacatctgctgcagcttctcgaacgcagcggtccgccaaatgaaagctcgctaaaccaaaagcagggcatgtgtagtcaaattctgagcccgacggaacataccatcctgcgctatatgtcttatggctattcgttgcctgagattgcgacacagctggagcgcaatattaaaacgattcgggcgcataaatttaatgccatgaccaagctgggcgtcagttctgatatgggactactgagcgcggctgatatattaatgcgcttatcggcaaacaatgatgatgccagggtaatgcgccttgcccagtag

SEQ ID NO: 253920 - DNA, 723 bp, Klebsiella pneumoniae
atgttaccaggacagggtaagttcggcattattatcagcagaataccggttatgcagtccggcttgaaggccattgttggggagcatctacccgattatgaactgagtttttgccgttctcaggatgagctcaccctgctgcaactgcggcgcgcagtactggttattgcagatttatccggtgaaatagagaatccaagaaatatttgtgaacactactactccttaatgacgcaatacagggatatacactgggtctttatggtaggaagcgcctgtttcccattagcggttgaattattaatgcggcctgaaagcacattaatttcagacagtgagccggtaaaacgtctcatcgaagtggttcgcgcgggtgggcttgccgccgagcgaatcagccagacattgttctctcctgaagtggaacacatcggtgacgaacagcaaaaaatggtcattctgacgctttctgagcgaaaagtgttgcggcttctcgctaaaggatggggaattaatcaaattgctgctttattgaagaagagcaataaaaccataagtgcgcagaaaaatagtgctatgcgccgcttgtctttgcgtagcaatgcagagatgtatgcctggattaatagtgcacagggaatgaaggagctgaatatttattcagcctatggagatcaaactgaatggaaaaagacctcacagcacgatatgtcgctatcgtag

SEQ ID NO: 253921 - DNA, 870 bp, Klebsiella pneumoniae
atgcaggcagtgagtaccattcccgttttcaaactgtatggcgaagagcagggctggccgacgcccgatctgctgcactgcgagtcgatactccagcggagccatctttatgaatggcatatccgcctgcatcagcacgcagagctggtgcagctgctatatctgcacaaagggcaggcggaaattgaaatcgaaggtacgacgaccgtgatgagggagtcctgtattcagatcgttccggcgctgtgtattcatggttttcgtttttccccgggtacggaaggctacgtcttgtcgctggcgctgccgctgctcggaagtctcgaaagtcagtttgccagtcagttggatgtactcggccagccgcgatgcgtgccggtcaaggcgtcgcggagccatattcgggcgctgttcaccgctttgcgcgaagagtatcgcgaagagtatgacgcgcgtgaaatgatgctgcattccctgctgggagcgctgctggtgtggttgaaccggcagcatcgcccgcagccgataacggcagacaaagctgagcgcaagcgtagcgtcatgcgtcatttttctcgactgatagaaagtcattatcgcgaacatatgcccttagccgcttatgcaaagctggcgggcgtttctgcaacgcatctgaattatttgtgccatgaattctacggctgcagcgcgctgggagtattacatcaaagattgatgcttgaggcgcgtcgtaatctgcaatacaccagcatgacgattgcacaactttctgattatttaggatttactgatgcagcctatttttctcgtttctttcgccgttataacggtgaatctcccaaagtatttaggaacaaaataaaatga

SEQ ID NO: 253922 - DNA, 1185 bp, Klebsiella pneumoniae
atgaaaacacaggtggcgattatcggggctggcccatccggactcctgctggggcagttgttacatcacgccgggattcaaaccgtcatccttgagcgacagactcctgagtacgtgctggggaggatccgcgcgggtattctggaaagcggaacggtagagctgctgcgcgaagccggcgccgcccggcgaatggaggctgaaggcctggtgcatcatggcgtcgaatttttgtttgagggcaagcgggtaccggttgcgctgacggaactgacggcgggcaaaagcgtgatggtttatggccagactgaagtgacgcgggatttgatggccgcgcgggcggaatgcggggcggcgacgatttatggcgtcagcgaagtcactattaatgaggcaaagagcgatcgaccatcggtctcttttatcagcaatggcgaacactgccgcttagagtgcgactttatcgccggctgcgatggctttcacggcgtgtcccgtcaaagtattcctcctggggtgctgaaagagtacgaaagcgtctggccgtttggctggctggggctgctggccgatacgccgccggtgaacccggagcttatttacgcgcaccacgaacgcgggtttgttctttgtagtcagcgctcactaactcggagccgttattacctccaggtcccgctcagtgaaaaggttgaggcatggtctgatgagcgtttctggaatgaactcaaacgccgcctccctgaagagctgtccagcaagttagtgactggtcactcactcgagaagagcatcgcgccgctgcgcagctatgtggtggagccgatgcagtacggcagattgtttctggtgggggatgcggcgcatatcgtaccgcctaccggggcaaaaggattgaatctcgcggcgtccgatgtgaactatttatggcgcatcctccgtgaatattatcaccatggtcgcgttgacctgctggcgagctactctcgttttgcgctggatagggtatggaaaggcgaaagattcagctggtttatgacccgtctgctgcatgatttcccgcaacaaagcgagttcgatagaaaaatgcaggcggcggatcggcgttattatcttggctcacgcgccggattaaccacgatcgctgaaaactatgtcggtttgccgatggagcgcgtggcataa

SEQ ID NO: 253923 - DNA, 777 bp, Klebsiella pneumoniae
atgcaagcagatcgggcaactcagcgcgcaatcacgcgattgtgcattcaatgtggtcttttcttattacaacacggagcggaaagcgcgctggtagaggagctttcaactcgcctgggcctggcgctggggatggatagcgtggaaagcgccatctcttctaatgcgattgttctcaccaccatcaaagatggcgagtgtctgacgtcgacgcggaaaaacagcgatcgcggcatcaacatgcacgtcgtcacggaagttcagcatattgtgattatggcggaacataaactgctggattataaagacgtcgaaaaacgcttcgcccagatcaagccgctgcgctatccacgctggctgctggttttaatggtcggcctctcctgcgcctgcttttgcaagcttaacaacggcggctgggacggcgcgctggtcactttctgcgccagcacggtagcgatgtatattcgccaggtcctgactcatcgctccatgcatccgcaaatcaacttctgcctcaccgcctttgtcgcaaccaccatctccggactgatgctgcgcctgccggctttcgccagcacgccgacgatcgcgatggccgccagcgtgctgctgctggtacccggctttccgctgatcaatgcggttgccgacatgtttaagggacatatcaacaccggcctggcgcgctgggcaatcgccagcctgttaaccctcgcgacctgtattggcgtggtgatggcgatgacaatgtgggggctacgcggatgggcataa

SEQ ID NO: 253924 - DNA, 474 bp, Klebsiella pneumoniae; identical to SEQ ID NO: 176365

SEQ ID NO: 253925 - DNA, 540 bp, Klebsiella pneumoniae
atgtcttcacgaatattaactaccgattttagcggtctggatgacttcatgcaggatcacgcggcggtgctggcaaaatccaccgccggcgccgtcgccgtatttgccaacaacgcgcccgcattctatgcgctgacgccggagcgtctggcgcagctgctggagctggaagccaaattatcgcgccctaatagcgatattgcgctggatgcgcagttttttgacgagccgacgacggcccccgttgcggtaccgatgggtaaatttccgatgtatgccgactggcagccggatgccgatttccagcgtctggccgcgctgtggggcatcgccctcagccagcccgtcacgccggaagagctggcggcatttgtcgcttactggcaggcggaaggtaaagtctttcatcatgtccagtggcagcagaagctagcgcgcagcgtgcagattggccgggccagcaacggcggccagccgcgacgggatgtcaacgcgattagcgaacccgataaccatattccacgaggattccgaggatga

SEQ ID NO: 253926 - DNA, 744 bp, Klebsiella pneumoniae; identical to SEQ ID NO: 176367

SEQ ID NO: 253927 - DNA, 495 bp, Klebsiella pneumoniae
atgaaatctgcaaaaacgttgttccgcacggcgatggtggccggcgctttattcaccttcggcgcccacgccacctcctggcaggattcgctctccagcgccgcaaaccagctcagcagccagaacggtagccagcaaagcggcgggatgtccctctcttcgctgaccggtttgctcaacggcggcaaccagtcgttgacctccagcagcatgaataatgccgcagggattatgtcttattgcgcgaaacagaagctggcttcagtcaccaatactgaaaacatcaaaaatcaggtgctggataaactgggtctcagcacgccggaaaaacaaaaagaagacaccagctatcttgagggtcttcagggtttgctgaccagcaaagatggccagcagctgaatctgaacaaccttggcagcagcccgctggcggaaaaagtcaaaaccaaagcctgcgacctggtcttaaaacagggcgtgagcttcctctcctga

SEQ ID NO: 253928 - DNA, 2310 bp, Klebsiella pneumoniae
  misc_feature (1960)..(1969): n is a, c, g, or t
gtgtcagagttgttatccatcgccctgtttcttgcttcggtgatgatttatgcattaaaagccggtcgtaatacctggtggttcgccgccacgctcacggtgctgggcctgttcgttattttgaatattaccctctacgccagcaattacttcaccggcgatggtatcaatgacgcggtactttatacgttgaccaacagcctgacgggcgctggcgtgggcaaatatatcctgcctggcgttgggctggtcgtggcgctggtcgcggtatttggcgcactcggctgggtgctccgccgccgccggcatcaccctcatcactttggctacagcctcgtggcgctggttctggcgctggcttcagtggatgccagccccgcttttcgccagattagcgagttggttaaatcccagtcccgcgatggcgatcctgacttcgtggcttactacaaagagccatcaaaaagcatcgccaatccgcaactgaacctggtgtacatctacggcgaaagtctggagcgcacttattttgataacgacgccttcccggacctgacgccggagctcggtaaactcaaaagcgaggggctggatttcagcaataccgcccagttgcccggcaccgactacacgattgccggaatggtcgcctctcagtgcgggatcccgctgtttgcgccgtttgaaggcaacgcctcggcctcggtttccagctttttcccgcagaatatctgccttggggatatcctgaaaaactcgggttatgagaactacttcgtacagggcgcgaatctgcgcttcgccggaaaagatgtcttcctgaagtctcacggcttcgatcatctgtacggcgcggaagagctaaaaaccacggttgccgatccggcctatcgtaacgactggggcttctacgatgatacggttcttgatgaaacctggaaaaaattcgaagcgctttcacagtccggtaaacgcttctcgctgtttgctttgacggtcgatacccatcatccggatggtttcatctcccgaacctgccagcgcaaaagctacgacatggacggcaaaaagaacctttcctttagcgccgtctcctgcagtcaggagcacattgcggcgttaatcgagaagattaaagcttctccgtggttcaaaaatacggtcatcgtagtatcatccgatcacctggcgatgaaaaacagcgcctgggattatctgaataagcaggatcgcagcaatctgtttttcgtcctgcgcggcgatcaaccccagcaggatacgctggccgtcaaacgtaataccatggataacggcgcgacggtgctcgatattctcggcggcgataactttattggccttggccgcagcagcctttccggagagtcgctctccaccgtgttcctcaatatgaaagagaaagtgctggcgtggaagccggatatcatccgcctgtggaatttccccaaagagatgaagaatttcaccgttgatgcgcagaaaaatatgatctccttctccggcagccatttccgcctgccgctgctgctgcgcatctccgacaaacgcgttgagccgctgccggaaagcgaatactccgcaccgttgcgcttccagctggccgactttgcgccgcgtgataatttcgtctgggtcgaccgctgctacaagatgggtcagctgtggtcgccggaagtggcgctctccaccgactggtgcgtatcgcagggccagctgggaggcgaacagaaagtccagcgcgtcgacaaagcccagtggcagggtaaaaccgcgttcaaagatacccttatcgatatggaacgttataagggcaacgtcgatacgctgaagattgtcgataacgacattcgctataaagccgacagcttcctgttcaacgttgccggcgcgccggaagaggtgaagcaatttagcggtatctctcgaccggaaacatgggggnnnnnnnnnncatgggggcgatggtctaacgctcagctcggcagcgaagtgaaaattgaatataaggagccgctgccggagaaattcgatctggtgattaccgccaaagcctacgggccgaatgccaataagccgattccggtacgggtaggcagcagcgaacaaacgatcgtactggctaatgatgtcaccaccactaccctgcatttcgataatccgtcgcgtagcagtacgttgacgattgcgccgccggacccgcagtccacgaacgagggcaatattctcggccactccccgcgtcagttgggcatcggtatggttgaaatcaaagtggtgaaaagcgaagggtag

SEQ ID NO: 253929 - DNA, 963 bp, Klebsiella pneumoniae
atgaaaaaacggatgacctcaacgccgcatgatgcggtttttaagcgatttcttcgccacccggaaacggcgaatgattttctcacgctgcacctgccggaagcgatccgtcagcgatgtgatttttctaccctgcggctggaaccggcgagctttgtcgatgaagatctgcgcgcctggtactcggacgtactatggtcggtacaaaccccctgcggcctgggatatgtgtatgtggtgatagagcatcagagctcgccggataaccatatggcttttcgcctgatgcgctatgcgattgccgccatgcagcgtcatctcgacgccgggcacaaaacgctaccgctggtggtgccgatgcttttttatcacggagcgaccagcccctatcccttttccctgaactggctggacgaatttgccgacccgcagatggcgaggacgctgtacgcctgtccgtttccgctggttgatgtgacggtgataccggacgatgaaattgttcagcaccggcgggtcgcgctgctggaactgatgcaaaagcatattcgccagcgcgatctcagcgggattacggagtcgttggcgacccttgtcatgctgagatacactaaccgcaggcagttgagagtgctgtttcattatatgctgcagtacggcaacaccgccgatccgagcgtgtttctccgccggttggcccgccgtctgccacaatatgaggagaggttgatgtctatcgctcaaaaactcaagcaggaagggatacaagaaggtcgtcaggagggaaggcaggaagggatacaggaaggccggcaggaagggcgcctggaaggtctgcaggaagggagccggcgggaagcgttgcgcattgccggcagtatgctgcaaaacggtttagataccgagacggttcagcggattaccgggctctcagcggatgagttaaagccgctgcatagctaa

SEQ ID NO: 253930 - DNA, 1011 bp, Klebsiella pneumoniae
atgttgggttttaatcaggacgagtacctgaccagtgctcgcgaaatcatcgctgcgcgcaaacaggcggaagacgtcgccgacgatatttatcacagcggctgcagcgccttatttttcgcctcggtaggcggttctttagctccgatgatggcaattaatgagtttgctaaagaattaaccggcgtgccggtttatcttgagcaggcggcggaattaatccatcgcgggcataaaaaattaaataaagatgcggtggtggtgacgttatccaaatccggcgataccaaagagtcggtggccattgccgaatggtgcaaagcacaggggattcgcgtcgtggccattacccgtaatgccgattcgccattagctgaggcggcaagctggcatattccgatgtgccacaagaacggcgtggaatatgaatatatgctgctctactggttattcttccgcgtcatttatcgtcacggcgatttcgcccattacgatcgttttgccagccagctggagttgctgccggaaaatcttctgcaggccaaacgccagttcgatccgcaggcggataaaattgccgctcagtatcacgactgcgactatatgatgtggatcggcggcgcggaaatgtggggcgaggtctatctgttctcgatgtgtattctcgaagagatgcagtggaagcggaccaagtcggtgagttcggctgagtttttccacggcaccctggagttactggaaaaagaggtccccctgttcctggtgaaaggcgagggtaaatgtcgggcgctggatgagcgcgttgagcgctttgctgcgaagatcaccgaccacctggtggttatcgacccgcgtgactatccgctgaacggtattgatgatgctttccgctggatcatggcgccgtgtgtcgtttctactctgctggtggaccggctggcggcccactttgaacatcataccggacacgaccttaatatccgtcgttattatcgtcagtttgattactaa

SEQ ID NO: 253931 - DNA, 1062 bp, Klebsiella pneumoniae
atggtagcaacgatgatgacctatatcagtgaggagtcggcctgtctgacgcagatcctgcgcgactaccggcaaaagctggcggcgattgagacctttgcccgccagcacccggtgcgccgcattctgctgttggcgaccgggtcgtcgctgaacgccgccctgtgcgcgcgctatttctttgagcagcgcttcggcgtcctggttgagattaaagagccgtacaactttacgcactacgaggcggtcgatccgcataccgatctggtggtggcgatttcgcagagcggtaaaagcgcctcaacgctggaggcgatgcgtaaggtgcaggcattgagcctgccggtttttgctctgacctccgatccgcaaagcccgatagcccgggcctgcgacgggatactggatatcaacaccgggattgagagcgtggggtttgtcaccagagggtttagcgcgacggtgctgaatttgctgctgatggcgctgaccatcgcccgtagccagggaaaagccagcgaggccgaggagcagcgctatcttgccgaactgcagcggctggcggcggcgatcccggatgtcattgaccgcacctcgcggtttatcgacaggcatggcgaagcgctgcggggcggcgagcgctttgtcgccaccggctatggcgctctggttggggttgcgaaagagtttgaaactaaatttaccgaaacggtgcgcgtgccttccagcggctttgagctggaagcttatatgcacggtccctatctggaggcgaattgccgccatgtgatgctgtttattgaagatgcgccggatgggcggacccgggcgctgcgggactatatggcgccgtccattgcccgcgcctttacgctgacgctgagcgacgaagaggatgcgcagacgctggcgctaaactgcccgtgtgaacatcacctggcgccgctgctgctgattgttcccgtccagatgctggcctggcataccgccggactgaaaggcatcgatctggctaaacgtatttttgacgattttgaccgcgtcttaaaaagtaaaatctga

SEQ ID NO: 253932 - DNA, 852 bp, Klebsiella pneumoniae
atgacgacgaagatgatttctgaagaaactctgcagccgcaggcgcaggaagaggcccgtattacgccgcgcgatctacgccgggtcttctggcgctccttccagatggagttctcctggaactatgagcggcagatgaatcttgcctttgtttacgcgttgattccggtgctgaaaaagctctatccgcgcaaagaggagctggccggggcgttaaagcgacatctggtgtttttcaataccacgccgcatatcgtcaccctgctgctggggatcaccgcggcgatggaggagaagaatagccagcagaagaacatggacgccaacgcgattgataacgtcaaagcgtcgctgatggggccgctggccgggctgggggactccttcttctggggcacgctgcgcctgatcgccaccggcatcggcaccagcctggccctgaaaggcaacattctcggtcccatcctgtttctgctggtgtttaacgtgccgcacatcctggtgcgctggttctttacccgctggggctatgtgctgggcaccggggtactgcagcgcatccagaagagcggaatgatggagagcctgacctacggcgcgtcgattatcggcctgatggtggtcggggcgatgaccgcttcaatgattgatatcaccatccccatcgcattcggcgccggagaggcgaaaacccaggtgcaggacattatcaacgacattctgccctgcatgctgccgctggtaagtttcggcatcgtttactggctgctggggcgcaaggttaaaccgctctctattatcggggggatggcgctggtgggcattctgggttcgtggattggcttgttttaa

SEQ ID NO: 253933 - DNA, 837 bp, Klebsiella pneumoniae
atggagcttaccgccgtttccgccactcagtttagcgtcgcgcagctgacgacgatcctcagcgactgtttcgaagattacctggttcccgtcacgctgtcggtagaggtttttgtccagcgttttagcgccgaagggctgagcctgctggattcctgcgtctggctggatggtgatgtccctgcggcgatggccgttgtcgcccggcgcggcgatgaagccaggctggcggcatttgcgatgcgacccgcgtatcgcggaaagggcgtcggacgccggctgatgggggcgctgctggatgcattgcgcgagcagggcgtacggcggatgtggctggaggttattcgcgataaccacgcggcggtagcgctgtatcactcgctgggcttcgaggtgcggcacgggctgtgcggctatctgagcgcgcagaccgcgagcgaggagtcatccgtattgcaggagtatgacgtgctggcgctgacgcgcagggccggcgccgagcttaatggccagctgccgtggctgatggacccgctcaccttcagcaccctgccgtgccgggcgctgagcctccatcagcaggctttcgccgtgctggccaccttatccagcaggccgcagctgcagtttttatgggtcgagcccgccgcacgcggccgcgggctagggcgggaaatgctgatggcgcttgcccgacagtttccagggctcgggacctcggtgaccatcccggaacgctttacgcccctgttccagaccgccggctatacgcctggggtattaaaacagtatgaaatgagcgcaacgctgagcgccctgccatcagcagggcgttaa

SEQ ID NO: 253934 - DNA, 534 bp, Klebsiella pneumoniae
atgaaaactaacactataaccgccgccgcgacgttacgcctgactgaggagagagacatccctcttctgcccgccattgagcgctcggcggcccaggcttttcgccagattccggcgctggcctggctggcggaaagcgaagtgataagccccgagcgccaccgcctgttccttgaaactgaccacagcctgctggccgtggccgatgaccaaccgataggcttcctgctgagcgaaccgctggatgatgcgctgtttatcgtcgagatcgccgttcatcaggcatggcaggggcgaggcattggccgcatgatgctggagcaggtcattgagacagcccgccaggcggcttatccggcggtcacgctcaccaccttccgcgatgtgccctggaacgcgccgttttacacgcggctggggttttcaatgttaagtgagcgaagactactggcgggactagcggcgaaaagggagctggaaacggaacacggtctgccgccggagacgcgctgcgccatgcgcctaacgctgtag

SEQ ID NO: 253935 - DNA, 438 bp, Klebsiella pneumoniae
atgcatgattcgttaactatcgcgctgctgcaggcgcgggaagcggcgatggcccactttcggcccatcgttaaacgccacaatctgaccgagcagcagtggcgtatcgtgcgtatcctcgccgaacatccgtcgatggattttcacgatctggcctttcgcgcctgtattttacgtccgagcctgaccggcatcctgacccgtatggaacgcgacggcctggtgctgcgtttaaaaccggtaaatgaccagcgcaagctctacgtttcgctgacgccggcgggttcgacgctttatgaaagcgcccaggctcaggtggaagaggcctatcgtcagatcgaagcccaatttaccgtcgaaaaaatgcgtcagcttaccgcgctgctggaggagtttatcgccttggggaatggagcgcagggagagggagaggaataa

SEQ ID NO: 253936 - DNA, 765 bp, Klebsiella pneumoniae
atgaggcaagcacgtattgagtggcagggacagcggcacgatgtccaggtgaatgaacgtggtcaggtccagctcgccaacggcagtctgcttaaggaaggcgagtttcgttggctgccgcccgccgacggcaccctgttcgcgctgggcctgaactacgccgatcacgccagcgagctggcgtttacgccgccaaccgaaccgctggtgtttatcaaagcgcccaacacctttatcggccataggcaagagtcggtgcgcccggataacgtcgagtacatgcactacgaggctgaactggtggtggtgatcggcaaaaccgcgcgtaaggtcgccgaagccgacgccatggagtacgtagccgggtacaccgtctgcaacgactacgccatccgcgactacctggaaaactactatcgccccaacctgcgggtcaaaagccgcgacaccctgacgccgataggcccgtggatcgtcagcaaagaggcgatccccgatccgcacaacctggcgctgtgcacctgggtcaacggcgagctgcgccagcagggcactaccgccgatctgatcttcagcattccgttcctgatcgcttacctcagcgaatttatgaccctgcagccgggcgacatgatcgccaccggcacgccgaaggggctgtcggacgtggtgccgggcgatgaagtgatcgtcgaagtggaaggcgtcggccgtctggtcaaccacatcattagccagcaggcatatgaggagaagctgtcatga

SEQ ID NO: 253937 - DNA, 1239 bp, Klebsiella pneumoniae
atgggcaggcagatcggcgggcttatccgcgccgccggccagcagggtcgctccttcttcaatgccgaggcggatatagccggagactttctcccagtgctgctggctaatcagcgcgcccacctgagtgttcgggtcggtagggtcgccgacgcgcaggcgattcgcgcgttcggcaaagcgtttaacgaactcggggtagatgctctgctgaatgaagatgcgcgagccggcggtgcagcgttcgccgttgatcgagaaaatggtgaacagcgcggcgtcgagagcgcgctcaatatcggcgtcttcgaaaatcaacaccggcgatttgccgcccagctccatggagtactttttcagcccggcgtttttcatgatgttgcgcccggtggcggtaccgccggtaaacgataccgcgcgtacgtcatggtggcgtaccagcgcatcgcccgccgtcgcgccgtagccctgaaccacgttcagtacgcccgccggaatacccgcttccagcgccagctcgccaagacggtcagcggtgagcggcgacagttcggacattttcagcaccgcggtattccccagcgccaggcacggcgccaccttccaggtcgcggtcataaacggcacgttccacggcgacaccagcgcgcagacgccgaccggctgcacgagggtgtagttgagcatcttgtcatcaaccggataggtcttaccgttcatttgctggcacacttcggcgaagaattcgaagttgtgcgaagcgcgcgggatcagcacgtttttggtctggtggatcggcaggccggtatcggcggtctccatggcggcgatctccgggatgttctggtcgatcagatcgcccagccggcgcatcagacgcgcgcgctctttcatcggcagattggcccatttcggaaacgcctcttttgccgccgccaccgcctgattcacctcgtcagccccgccggaggcgacctccgccagcacttcgccggtggccgggttagtggtatggaaatactccgcggcggcgacgtttttgccgttgatccagtggttaatttttttcatgacagcttctcctcatatgcctgctggctaatgatgtggttgaccagacggccgacgccttccacttcgacgatcacttcatcgcccggcaccacgtccgacagccccttcggcgtgccggtggcgatcatgtcgcccggctgcagggtcataaattcgctgaggtaa

SEQ ID NO: 253938 - DNA, 234 bp, Klebsiella pneumoniae
atgcgtgaagatgaaggtctggcagatcgtgcaaccttcgttgttgacccgcagggcatcatccaggctatcgaagttaccgctgaaggtatcggccgcgacgcgtctgacctgctgcgtaaaatcaaagcagctcagtacgtagcttctcacccaggcgaagtttgcccggctaaatggaaagaaggtgaagcgactctggctccgtctctggacctggtcggtaaaatttaa

SEQ ID NO: 253939 - DNA, 1566 bp, Klebsiella pneumoniae
atgctcgacaccaacatgaaaacccagctcaaggcctatcttgagaagctgaccaaacctgttgagctgattgccacgctggatgacggcgctaaatcggcagaaatcagggaactgctggctgaaattgctgaactgtcagataaagtcaccttcaaagaagataacggcctggcggtgcgtaagccgtcattcctcattaccaacccaggctccagccagggcccgcgttttgccggctctccgctgggacatgaattcacctctttagtgctggctctgctgtggaccggcggccatccgtcaaaagaagcccagagcctgctggagcagatccgcaatatcgacggtgattttgaatttgaaacctactattcactttcatgtcataactgcccggatgtggttcaggcgttgaacctgatggcggtactgaacccgcgtatcaagcacacggcgattgacggcggcacttatcagaatgaaatcaccgaacgcaacgtgatgggcgtaccggcggtattcatgaacggtaaagagtttggccagggtcgcatgacgctgactgaaattgtggccaaagtggataccggtgcggaaaaacgtgcagcggaagagctgaataaacgtgaatcctatgatgtcttaatcgtcggctcaggcccgtcaggcgcagcggctgccgtttactcagcgcgtaaaggcattcgtaccggtctgatgggtgaacgcttcggcggccaggtgctggataccgttgatatcgaaaactatatttcggtaccgaagaccgaaggtcagaaactggctggcgcattaaaagcgcacgtcagcgaatacgatgttgatgttattgattctcaaagcgcttcgaggctgattcctgcgacggttgaaggcggattgcaccagattgaaaccgcctccggcgcggtgctgaaagcgcgtagcgttatcattgccaccggtgcgaaatggcgtaacatgaacgttccaggtgaagatcagtatcgcacgaagggcgtaacctactgtccgcactgcgacggcccgctgtttaaaggtaagcgcgtggcggttatcggcggcggtaactccggtgtggaagcggccatcgacctggcaggcgttgttgaacatgtaacgctgcttgaattcgcgccggaaatgaaggccgaccaggttctgcaggataaagtccgcagcctgaagaacgtcgatattatcctcaatgcccagaccacagaagtggtgggcgacggcagtaaagtgaccggcctgcagtatcgtgaccgcgtgagcggcgatgagcatcacgtcgcgctggcggggatctttgtacagattggcctgttgccgaataccaactggctggaaggggcgattgagcgcaaccgcatgggtgaaatcatcattgatgcgaaatgtgaaactaacgtgaagggcgtcttcgcggcgggggactgcacaaccgtaccgtacaagcagattattatcgctaccggcgaaggtgcaaaagcgtctctgagcgcgtttgattatctgatccgcactaaaacggcataa

SEQ ID NO: 253940 - DNA, 429 bp, Klebsiella pneumoniae; identical to SEQ ID NO: 174890

SEQ ID NO: 253941 - DNA, 411 bp, Klebsiella pneumoniae
atgaccagacccgcaatcatcattaatgaactggatgcagaacgcatcgacaggctgctggaacaaccggcattcgctaactcgccggtagcggacgcactgaacgacgagcttgaccgcgcgcagatgctggctccggaagccatgccgcatgatgttgtcagcatgaatagtcaggtgagattccgcgatttaaccaccggcgaagagcgcatccgcacgctggttttcccggctcaggtgaccgatagcgccacccagctctcggttatggcgccggttggcgcagcgttgctggggctcaaggtcggcagcgccattcactgggagttgcccggcggcacctcaacgcatcttgaagtgctggaactgctataccagccggaggccgcaggcgattttcaccgttaa

SEQ ID NO: 253942 - DNA, 795 bp, Klebsiella pneumoniae
atgttcaggaaggatttcgtcgctctcgctcttttgctaagcgcttctcaggtcagcgccgatccgctgatcgcaacgcaatacggcgatttcgatcgctacgtgctggccctctcctggcaaacggggttttgccagagtatgcaggaccgaaaccgcagcgagccggaagagtgccgcctgcagcaggaaccagacaacaaagccgattttctcaccgttcacggcttgtggccaggcctgcccaaatctatcgccgcgcgcggagtggacgaacgccgctggatgcgttttggctgcgcgacccgccctgttcccaatatgcctgaagcgaaagccgggcaaaaatgtcgggcggctgaaaccggcctttcgctggaaatggcgaataagcttaacggcgtgatgccgggatccggcggcaattcatgtcttgagcgttatgaatacgccaagcacggggtttgttttggtttcgatcctgacaattatttcggcaccatggtgcgcctgaacggcgagattaaacaaagcccccttggtcgtttcctggccagacactatgggcagaccgttagccgggatgatttcaacgccgcggtcgcagaggcctatggaaatcagaacgttaaggctttcaagttaacctgtaacggcaatcccgcctatctgaccgagatgcaaatttccatcaaagcggcggccatcaacgcgcctctctcggtaaattcattcttacctcagcctcatcccgggaactgcggtaaacaatttctgctggataaagccggctaa

SEQ ID NO: 253943 - DNA, 1374 bp, Klebsiella pneumoniae
atgcttacgctagtagagatcctgattgggattgtggtcattgtgggcgtcgcccgctatatcattaaaggttattccgccaccggagtgctgttcgtcggtggcttagtattactcatcgccagcgcgctaatggggcataagattttacctggcgacgcaaagagcaccggctactctgctaccgatatcgttgagtatattaagatactgctcatgagccgcggcggcgacctcggcatgatgatcatgatgctctgcggtttcgccacctatatgacgcatattggcgccaacgatatggtcgtcaaactggcctcaaaaccgctgcgctatattaactccccttacctacttatgatcgctgcttatttcgtggcctgcctgatgtcgctggctgtttcctcagccaccggcctgggcgtcctgctgatggccacgctgttcccggtcatggtcaacgttggtatcagccgcggcgccgccgccgcaatctgcgcctccccggcggcgattattctctccccaacttccggcgacgtcgtgctggccgccaaagccgccgaaatgccgctgattgactttgcctttaaaaccacgctgcctatctctatcgtggcgattatcagcatggcgattgctcacttcttctggcagcgctatctggataagaaggaaaacgtcgcgcatgaaatgcttgatgtgaacgagatcaccaccaccgccccttctttctacgccatcctgccgtttacgccgataatcggggtgctgatttttgatggcaaatggggtccggagctgcacatcattaccatcctcgtactctgcatgctgctggcggcagttctggaattctgccgcggctttaatactaaaaatgtgtttaatgggctggaagcggcatatcgcgggatggccgacgcctttgccggtgtggtgatgctgctggtcgccgctggcgtctttgcgcaggggctgagcaccattggctttattaacggcctgatctccattgcaacttctttcggctccgccagtattattctgatgctggtactggtcattctgaccatgctggcggcgatgaccacaggctctggtaatgcccccttctatgctttcgttgagatgatcccgaagctggcgcactcgtccggcattaacccggcttatctttcgatcccgatgctgcaggcgtctaaccttggccgaaccatttctccggtctccggcgtcgtggtcgccgtggccggtatggcaaaaatttcgccgttcgaagtggtgaaacgcacctctgtcccggtactggttggtttattagtggttattatcgccaccgaagtcctcgttcccggtagcgcaatccgctaa

SEQ ID NO: 253944 - DNA, 570 bp, Klebsiella pneumoniae; identical to SEQ ID NO: 174894

SEQ ID NO: 253945 - DNA, 210 bp, Klebsiella pneumoniae; identical to SEQ ID NO: 174895

SEQ ID NO: 253946 - DNA, 384 bp, Klebsiella pneumoniae
gtgttgcaactccttttggctgtatttcttggcggcggcaccggcagcgttttgcgctggtggctgggtatgaagtttaaccccatgcaccatgctatccccattggtactctcaccgctaacctgctaggggcatttattatcggggccggtctggcctggtttaatcgcctgacggacgtcgatccgatgtggaagctactcatcactaccggcttttgcggcgggttgaccaccttttccacattttccgctgaagtggtgtttttgctgcagcaggggcgcgttagctgggcgctgctgaacgttttcgtcaatctgttaggttcatttgccatgacggccgctgcgttctggctgttttcgcaagccgccagtcgctag

SEQ ID NO: 253947 - DNA, 789 bp, Klebsiella pneumoniae
atgcttgctgctgccggacaatttgccgtaacgccggactggacggtcaatgctcagacctgcgtgagcatgatgcgtcaggccggggagcgcggagcaacgcttctggtgctacccgaggcgttgctggcgcgaaacgacgccgatgcggatttatcagtcaagtccgcccagcagctggacggcggttttttacagcttctgctggcggaaagcgaaaacactcccttgacgacggtgctgaccctgcacgtgccttctgcagaagggcgggcaacgaatacgctggtggcgttacgtcacgggaaaattattgcgcaatatcagaaactgcatttgtatgatgctttcaatattcaggaatcccggctggtcgatgccggtcagcaaattccgccgctcattgaggtcgacgggatgcgagtcgggttaatgacctgttacgatttacgctttcctgagctggcgctatccttagcgctcagcgacgcgcagcttattgtcctgcccgccgcgtgggtaaaagggccgctgaaagagcaacactgggcgactctgctggcggcacgggcgctggataccacctgctatattgtcgctgcgggggagtgcggaacgcgtaatattggtcagagtcgaattgtcgatcctttaggaacgacgattgccggggcaggggagcagccgcagctgattttcgcggagctttcaaccgattatattcagcaggtaagagagcgtctgccggtgctgcagaatcgtcgctttgcgccaccgcaattattatga

SEQ ID NO: 253948 - DNA, 966 bp, Klebsiella pneumoniae
atgagtaaacccattgtgatggaacgcggtgttaaataccgcgatgccgataaaatggcccttatcccggtgaaaaacgtggcaactgagcgtgaagctctgctcagaaaaccggaatggatgaaaatcaaacttccggctgactcgtcccgtatccaggggatcaaggcagcgatgcgtaagaacggcctgcactccgtgtgcgaagaagcctcttgccctaacctcgcggaatgttttaaccacggaacggcgacctttatgatcctgggcgccatctgtacccgccgttgcccgttctgcgatgttgcccacggacgaccgataacgccggacgccaacgagccgcaaaagctggcgcaaaccatcgccgatatggcgctgcgctatgtggttgtgacctccgtggaccgcgacgatctgcgcgatggcggcgctcagcattttgccgactgcatcagcgcgattcgtgaaaaaagcccgacgatcaaaattgaaactctggtgccggacttccgcggccgtatggatcgtgcgctggagatcctccaggccacgccgccggacgtgtttaaccataacctggaaaacgttccgcgcctctatcgtcaggttcgccctggcgccgactacaactggtccctgaagctgctggagcgctttaaagaagcgcacccggagatcccgacgaaatcgggactgatggtgggtttaggcgaaacgaatgctgaaatcattgaagtcatgcgcgatctgcgccgccacggcgtgacgatgctgactttaggccagtatctgcagccgagccgccaccacctgccggtacagcgctacgtgagcccggatgaattcgaagagatgaaagccgaagcgatggcgatgggctttacccacgccgcctgcggaccctttgttcgttcgtcctatcatgccgacctgcaggccaaaggcatggaagtgaagtaa

SEQ ID NO: 253949 - DNA, 954 bp, Klebsiella pneumoniae
gtggacgacaataactctcaggcagaatcaggcgatcggcttgacgatcgccacggtcggcagatgtttcgcattctgcgtacgatagacctcaatttactcactatttttgaagcggtttacgtccataaaggcatcgttaacgcggcaaaggtactcaatatcacgccgtcggcgataagccagtcaatcaacaagctgcgcgcgctcttccctgacccgctatttattcgtaagggacagggcgtgacccccacggcctacgctacgcatttgcataagcatattagtcaggggatggaggcgtttctcaacgcgctggatctcaccggcaatacgcagcgggagcgggtgataacgattgccacttccccggctattggcgcgttaatcatgccggttatcacccaaaaactgcgggccgtctttccccagatactgctgcacaatatcgctatcaacgacgcagtcagtcagctaaaccagcgtcaggtggacctgcttatcgacagctatccccacagcgggcagacgattacgcaccatgtgctttaccaggacagcgtgcacatcttctgccgggcaggacatccggctctcgccttgcctgcaaccgcagataatcttagtcaatatgaattcgctctgctgcagccagaggggcagcgctacaccaccatcctgcgtcgcctgcaggaacacctcggcgaacgccgctgcggttttagtagctacaatctgttaactcaggcggcgctggtcagcgaaagcgatatgctggggctgataacttccgggatgttttctctggttgacagaatatggcctttaaaaatgatcgatttcgcccctctgcgcgaagaaaaaattgatattgcgctgcactataacaagctcagcgcgcaggaacccttgttgaaagagatcgtcgggacaattcgtcaggctttctag

SEQ ID NO: 253950 - DNA, 645 bp, Klebsiella pneumoniae
ttgcagcacaataaaattctcatccgccagctcggcctgcaaccttacgaacctgtctcgcaggcaatgcacgagtttaccgacacccgcgacgagactacgctggatgaaatctggctggtagagcaccatcccgtattcactcaggggcaggcaggcaaagccgaacatgttctcgttcccggcgaaatcccggtggttcagagcgatcgcggggggcaggtcacctatcacggtcccggccagcaggtgatgtacgttctgctgaacctgaaacgccgtaagctgggggtgcgcgagctggtcacgcttctggagcaaaccgtcgtgaacaccctggcggaatatgacatcgaatcacacccgcgcgccgatgctcccggcgtctacgtgggcgatcggaaaatctgctctctgggtctgcgcattcgtagaggttgctcattccacggcctggcgctaaatatcaacatggatctgtcgccgttcctgagaattaacccctgcggctatgccggaatggagatgacgcagatgcgtcagtggcagccagatgcccagccggaaaacgtatcgccacatttggtcgctcatctgctggcgctcctgaacgatccgccctcggaatacattttatcccgctag

SEQ ID NO: 253951 - DNA, 264 bp, Klebsiella pneumoniae; identical to SEQ ID NO: 174902

SEQ ID NO: 253952 - DNA, 1200 bp, Klebsiella pneumoniae
atgaagacctcttttaccgctcgtttactcgttacggcgctctccgtggcagcgctgtcctccgctgcccgcgccgatgacctgaatatcaaaactatgatcccaggcgccccgcagattgacgccgaatcctggattcttatcgattacaactcaggcaaagtgctggcggaaaacaacgctgactcccgtcgcgacccggcaagcctgactaaaatgatgaccagctatgtcattggtcaggccatgaaagcgggcaaatttaaagagtccgacctggtcaccgtaggcaacgacgcgtgggcaaccggtaatccggtgttcaaaggttcttcgctgatgttcctcaaaccgggtatgcaggtgccggtatcccagctgatccgcggtatcaacctgcagtcgggcaacgatgcctgcgtggcgatggccgactacgtcgccggtagccaggacgccttcgtcagcctgatgaacaactacgttaacgcgctgggcctgaagaacacccatttccagaccgttcacggcctggatgccgatggtcagttcagctcagcgcgcgacatggcgctgattggccaggcgctgattcgcgatgttccaaacgaatacacaatctacaaagagaaagagtttaccttcaacggtattcgtcagctcaaccgcaacggcctgctgtgggataacagcctcaacgtcgacggcattaaaaccggccacacggataaagcgggctacaacctcgtggcatcggcaactgaaggccagatgcgcctcatctccgccgtgatgggcggtcgtacctataaaggacgcgagtccgaaagcaaaaagctgctgacctggggctttcgcttctttgaaaccgttaacccgattaaagccggtaaagaattcgcctctgaacctgcctggttcggcgatagcgatcgcgcctctctcggcgtggataaagacgtttatctgacgattcctcgcggtcggatgaaagatctgaaagccagctacgtgctgaataatgccgagctgcacgcgccgctgcagaaaaaccaggtagtgggcaccattaacttccagcttgatggcaaaaccatcgatcagcgtccgctggtggtcctgcaggaaatcccggaaggcaatttcttcggtaaaatcattgattacattaaattaatgttccatcactggtttggttaa

SEQ ID NO: 253953 - DNA, 1101 bp, Klebsiella pneumoniae
atgcgtaagcaatggctggggatctgcatagcagcagggctgctggcggcatgttcgggtgaagacgttcaacagaaaacggtcagcactccacagccggccgtttgcaatggcccaacggtggagattagcggcgccgatccgcagtacgaaacgcctaacgccacggcgaatcaagattatgaacgcgacggcaaaagctacaaaatcgttcaggatccgtccaactttacccaggccggtttcgccgctatctacgacgccgagcccaacagcaatctgaccgcatcgggagaagcgttcgatcctacgcagctcaccgctgcccatcctacgctgccgatcccaagctacgcgcggatcaccaacctggcgaacggccgcatgatcgtcgtgcgcatcaacgatcgcgggccttacggtaacgatcgcgtgatctcactgtcgcgcgcctcagccgatcgtctgaatacatcaaataataccaaagtacgtatcgaccctatcatcgtcgcaccggacggctcgctttccgggccgggcatggcctgtacgacggtagccaaacagacctacgccctgccggcgcgcccgaatcttgacggcgacggcagcgcggcgatggggcaacccgcgccaactgacgtgcacgccatcagcaacgcaacgctgaagccggaagatagcaccggcgcaccggtcaacagcggcggttttctcggcgcgccgacgccgctgaataacggtgtgctggaaggcagcgagcccgtggtgcaaaccgcgccggttaccgcgccgggttctgttcagggaagcgtagcgcccgccgccgtcgcgaccgcagcagtgacgccagccgcagcggcaagcgccaacggcgatttcgtcgtacaggtcggcgccgtcagcgaccagtcccgtgcgcaacagtaccagcagcgtctgagtcagcaattttccgttccgggccgcgtcatgcaaaacggcgcggtgtggcgtatccagcttggcccattcagcagcaaagcggaggccagcacgatccaacagcgcctgcaaagcgaagctcagctgcaatcatttataactcgcgccaactaa

SEQ ID NO: 253954 - DNA, 1113 bp, Klebsiella pneumoniae
atgactgataatccgaacaaaaaatcgctatgggataaaatccacctcgatcccaccatgctgcttatcctgctggcgctgctgacctacagcgcgctggttatctggagcgccagcggtcaggatatgggaatgatggagcgtaaaatcggccagatcgctatggggattgttattatgatcgtcatggcgcaaatcccgccgcgggtctatgaaggctgggcgccctatctctatattttctgtattattctgctggtggcggttgatgccttcggcgccatttccaaaggggcgcagcgctggctggatctcggcatcgtccgcttccagccgtcggaaatcgccaaaatagccgtaccgctgatggtggcgcgctttatcaaccgcgatgtgtgtccgccatcgctgaaaaataccgccatcgcgctggtgctgattttcctgcccacgctgctggtcgccgcgcagcctgacctcggaacctcgattctggtcgccctgtccggtctgtttgtcctgtttctctctggcctgagctggcgtctgattggtattgcggtggtgctggtcgccgcctttattccaatcctctggttcttcctgatgcatgactatcagcgccagcgcgtaatgatgctgctcgatccggaaaccgatccgctcggcgcgggttaccacattattcagtcaaagatcgctatcggctccggcgggttgcgcggtaaaggctggctgcacggtacccagtcacagctggagtttctgccagaacgccataccgactttatctttgcggtactggcggaagaactggggctgattggcgtactgatcctgctggcgctctatatactgcttatcatgcgcggactctggatcgccgcccaggcgcaaaccacctttggccgagtgatggccggtggtttaatgttgattttattcgtttatgtcttcgtaaatattggtatggtaagtggtattttaccggtggtgggggtacctttgccgctggtcagctacgggggctctgccctaatcgtattgatggccgggtttggtatcgtcatgtcgatccatactcacagaaaaatgttgtcgaaaagcgtgtaa

SEQ ID NO: 253955 - DNA, 1902 bp, Klebsiella pneumoniae
atgaaattacagaattctttccgcgactattcggctgaatcctcgctgttcgtgcgccgggcgctggtcgcttttttggggattttgctgcttaccggcgtactgatcgccaacctttataacgtgcagattgtgcgttataccgactatcaaacgcgttcaaacgaaaaccgcattaaactggtcccgattccgccgagccgcggcattatctacgatcgcaacggcacgccgctggcgcttaaccgcacgatttaccagctggagatgatgccggagaaggtcgacaacgttctgcaaacgctggatgcgctgcgcgacgttatcgatctcaccgatgacgatgtggcgaactttaaaaaagagcgcgcccgctcgcatcgttttacctccattccggtcaaagttaacctcagcgaagtgcaggttgcccgtttcgcggtcaaccagtaccgctttcccggggtggaagttaaaggctataagcgccgctactatccctataactccgctctgacccacgttatcggctacgtctctaaaattaacgataaagacgtcgatcgcctggataaagagggcaagctggctaattatgcctccacgcacgatatcggcaagctggggatcgagcgctactacgaagatgtcctgcacgggcaaaccggctatgaagaggttgaagtaaacaaccgcggccgcgtgattcgtcagctcaaagaggtgcccccgcaggccgggcgggatatctatttaacgctcgaccttaagctccagcagtatattgaaaccctgctcgccggcagccgcgcggcggtcgtcgtcacggacccgcgaaccggcgctatcctcgcgctggtttcgacgccaagctacgaccctaatctgttcgttgacggtatttccagcaaggattactccggactcctcaacgatcctaatacgccgctggtcaaccgcgcgacccagggcgtttacccgccggcttcgacggttaagccatacgttgcggtctcagcgctcagcgccggggtcataacccgcaacaccagcctgtttgaccccggctggtggcagcttcccggctcggaaaaacgctaccgtgactggaaaaagtggggccacggccatctgaatgtcaccaaagcgctggaagagtccgccgatacctacttctatcaggttgcctatgatatgggcatcgaccgcctgtctgagtggatgggtaaattcggctacggccactataccggcgttgatctggcggaagagcgctccggtaatatgccgactcgcgaatggaagctcaagcgcttcaagaaaccgtggtaccagggcgataccatcccggtcgggatcggacagggctactggaccgcaacgcctattcagatgaacaaggcgctgatgatcctgattaatgacggagtagttaaagtaccgcatctgctgcaaagcacggtggaagacggtaaaccggtgccctgggttcagccgcatgaaccgccggtcggagacattcactctggcttttgggaaatcgctaaagacgggatgtatggcgtagccaaccgaggcaacggtaccgcacataaatactttgccagcgcaccgtataaaatcgcggccaagtcgggtaccgcccaggtctttggcctgaaagccaatgagacctataacgcgcacagaatcgccgaacgcctgcgtgaccataaactgatgacggcgtttgccccttacaacaacccccaggttgccgtagccattattcttgagaacggcggcgcaggtccggcagtcggtaccattatgcgtcagattctcgatcatataatgctgggcgataacaacaccaatctgccgactgaaaatccggcggtaacggctggggaggatcaataa

SEQ ID NO: 253956 - DNA, 468 bp, Klebsiella pneumoniae; identical to SEQ ID NO: 174907

SEQ ID NO: 253957 - DNA, 318 bp, Klebsiella pneumoniae; identical to SEQ ID NO: 174908

SEQ ID NO: 253958 - DNA, 630 bp, Klebsiella pneumoniae
atgaaattatggttagttcggcatggcgaaaccgaggccaatgtcgcaggcctctacagcgggcatgcccccactgcgttaacggaacgtggaatcagacaggcccaaacgctcggacagcgtctgcatgccgttccgtttgagcgcgtgttttgtagtgagcttgagcgcacccagcgcacggccaaccttctgctgggggaacggagcatcccccgccataccttcgctgagctcaatgaaatgttcttcggcgactgggaaatgcgccaccatcgcgatttgcagcatgaagatgctgaaaactacgccgcctggtgcgccgactggcagcatgcggcgcctaccaacggagagggctttcaggccttttccgagcgcgtttgccgctttactgccaccctctctcagtatcaggaacttaatcatctgctgatcgtcggtcaccagggggttctgagcctgttaatcgctcatcttctgcacatgccggcttcggcgatgtggcactttcccatcgagcatggcgcgtggagcctgatcgatctcctgcctgaattcaccacgctgcgggtgctaaatagccgggccgtttggctggcggaagaagaattgcgcgcagaccattga

SEQ ID NO: 253959 - DNA, 651 bp, Klebsiella pneumoniae
atggttgatatgactcagttacaggcgatgtacggcggcaccttcgatccggtgcattacggtcacctcaaaccggtggaaattctggccaaccaaatcggcctcaatcgcgtcaccattgtgcctaacaacgtgccgccgcatcgcccgcagcccgaagcgaccagcgaccagcgacggcatatgctggaactggctatcgccgataagccactgtttatcctcgacgatcgtgaacttaggcgcgacacgccgtcctattctgcgcagaccctgcgcgagtggcgccaggagcagggtccgggacggccgctggcgtttatcataggccaggattcgctgctgacttttacctcctggcacgactatgccagcatccttgataacgttcatttgatcgtctgccgacgccccggctacccgctgactatggcgtgcgagcaggatcagcagtggctggacaagcatctcacccatgacgtcgagcggctgcatagcgccccggcaggcgttatctacctggccgaaacgccgtggtttgatatctcagcaacccttattcgccagcgtctggaagcaggcgagtcctgcgcggacatgatgccggaaagcgtgcttgagtatatccaccagcaaaagctttactgctag

SEQ ID NO: 253960 - DNA, 1032 bp, Klebsiella pneumoniae
atgattcggttgtacccggaacagctccgcgcgcagctcactgaagggctgcgcgcggcctatctgctgcttggcaacgacccgctgctgttgcaggaaagccaggacgccatccgcgaagccgctgccgcccagggctttatcgaacaccataccgccagcattgatgccagcaccgactggtctgcccttttctccctcagtcaggcgatgagcctgtttgccagccgccagacgctgctgctgatcctgccggagaacggccccaatgcggcaatcaacgaacagctcgccacgcttgtcagcatgctgcatgacgatcttctgctgatcgtgcgcggcaataagctgacgaaagcgcaggagaacgccgcgtggatcgccgctcttgccagccgtgccgttcaggttagctgtcagacgccggaatatgcccagctgccgcgctggcttgccgcgcgcgcaaagcagcatcatctgcagcttgatgacgcagccagccagctgctgtgctactgctatgaaggcaatctgctggcgctggcgcaggctctggagcgcctctcgctactgtggccggacggtaaactgacccttccgcgcgttgagcaggcagtcaacgacgccgcgcatttcacgccttatcattgggttgatgcgctgctggcgggtaaaagcaaacgcgtcctgcacgttttgcaacagctgcggctggaaggcagtgaaccggctatcctgctgcggaccctacagcgtgaactgctgctgctggtcaacctgaagcggcaatcagcccatacgccgctgcgtaccctgtttgacaagcatcgggtgtggcaaaaccgacgccagctggtcagcgacgcgctggcccgcctgagcgccgaccagctgcgccaggccgtcacgttgttgacccgcgccgagctcacctttaagcaggattacgggcactccgtctggcccgagctggaaagtctctctttgttgctctgccataaagcgctggcagacgtttttattgatggttga

SEQ ID NO: 253961 - DNA, 582 bp, Klebsiella pneumoniae
gtgcgatatctggcaacattgttgttaactctggcggtgttaatcaccgccggttgtggctggcacctgcgtagcactacgcaggttccgaccgcaatgaaaaccatgatcttccagtcgggcgatccaaatggtccattaagtcgcgctgtccgtaatcagctgcgcctgaacggcgtcgagctggttgatgccagtacgctgcgcaaggatatcccttccctgcgtctggagtcatcgtccattcagaaagacacggcatctattttccaggatggccgtactgctgaatatcagatggtgatgacggtgaatgccagcgtcctgatccctggtcatgatatctatcccatcacgaccaaagtctaccgttcgttcttcgataacccgcaggcggcgttagcgaaagatgccgagcaggacatgatcattcaggaaatgtacgacaaagcagccgagcagctgatccgtaagctgccgagcgtacacgttgcggatgtcgaagccaccaaagaggatgagaagccggtgaacgccgcttccacctccggcaatcgcgtctccaccacgctgggtaactga

SEQ ID NO: 253962 - DNA, 2583 bp, Klebsiella pneumoniae
atgcaagagcaataccgcccggaagagatagaatcaaaagtccagcaacactgggacgagaagcgtacctttgaagttaccgaagacgagagtaaagagaagtattactgcctgtcgatgcttccctatccttctggtcgactacacatgggccacgtgcgcaactacaccattggcgacgtgatttcccgttaccagcgcatgttaggcaagaacgtgctgcagcctatcggctgggatgcgtttggcctgcctgcggaaggcgcggcggtgaaaaacaacacagctccggcaccgtggacctacgacaatatcgcctacatgaagaatcagctgaaaaagctgggctttggctatgactggagccgcgaagtggcgacctgcaccccggaatactaccgctgggagcagaagttcttcaccgagctgtataaaaaaggcctggtctacaaaaaaacctccgcggtgaactggtgcccgaacgaccagaccgttctggcgaacgagcaggttatcgacggctgctgctggcgctgcgataccaaagttgagcgtaaagagatcccgcagtggtttattaaaatcaccgcctacgctgacgagctgctgaacgatctggataacctggatcactggccggataccgtgaagaccatgcagcgcaactggattggccgctccgaaggcgtcgaaatctccttcgatgttaacgactacgccgacaagctgaccgtctacaccacccgcccggacacctttatgggctgtacctatctggccgtggcggcgggtcacccgctggcgcagcaggcagcagccaataaccccgcgctggcgacgtttatcgacgaatgccgcaataccaaagttgccgaagccgaaatggcaactatggagaaaaaaggcgtcgataccggttataaagcgattcatccactgaccggcgaagcgatcccggtctgggcggcaaactttgtcctgatggagtacggcaccggcgcggtaatggccgttccgggtcacgatcagcgcgactacgagtttgccagtaaatacggtctggagatcaagccggtcattctggccgccgacggttccgaaccggatctctccgaacaggcgctgaccgaaaaaggcgtgctgttcaactctggcgaattcgacggtctggatcacgaagctggctttaacgccatcgccgataagctggcttcacttggcgtcggcgaacgtaaagtgaactaccgcctgcgcgactggggcgtttcccgtcagcgctactggggtgcgccgattccaatggtgacgctggaagacggtaccgtaatgcccactccggaagatcagctgccggtaattctgccggaagatgtggtcatggacggcatcaccagccccattaaagccgatcctgagtgggcgaaaaccaccgtaaacggccagccggcgctgcgtgaaaccgatacctttgataccttcatggaatcctcctggtactacgcgcgctatacctgcccgcagtacgaccagggtatgctggacccggaagcagcgaactactggctgccggtggatatttatatcggcggtatcgaacacgccatcatgcacctgctgtacttccgcttcttccacaagctgatgcgcgacgcgggcatggttaactctgacgaaccggcaaaacagctgctttgccagggcatggtgctggcggatgccttctactacgttggcgcgaacggcgagcgtaactgggtctctccggttgatgcgatcgttgagcgcgatgagaaaggccgcattgcggaagcgagagatgctgaaggccatgaactggtctataccggcatgagcaagatgtccaagtcgaaaaacaacggcatcgacccgcaggtcatggttcaacgttacggcgccgacaccgtgcgtctgtttatgatgttcgcctcgccggctgacatgacgctggagtggcaggagtccggcgtggaaggggccaaccgcttcctgaaacgcgtctggaaactggtttacgagcataccacgcagggtgaagttgccgcgctggacgttgccagcctcagcgaagatcaaaaagcgctgcgccgcgacgtacacaaaacgatcgctaaagtgaccgatgatatcggccgccgtcagaccttcaataccgcgatcgcggcgattatggagctgatgaacaagctggcgaaagcgccgcaggaaagcgaacaggatcgcgcgctgatgcgtgaggctctgctggcggtcgttcgcatgctcaacccgttcaccccgcacgccagctttaccctgtggcaggagctgggcggcgaaggcgatattgacaacacgccgtggccggttgcggacgaaagcgctatggttgaagacaccacgctggttgtcgtccaggtaaatggtaaagttcgtggtaaaattaccgttgcggtagatgcaaccgaagagcaggtgcgcgagcgtgcggctcaggagcatctggtcgcgaaatatctcgacggtgtgaccgtgcgtaaagtgatctacgttccgggtaaactgctcaatctggtcgttggctaa

SEQ ID NO: 253963 - DNA, 675 bp, Klebsiella pneumoniae
atgtacgattttgactggagttctattatcccttccatgccatacctgctggctggactggtcatcacgttaaaaatcaccgtgaccgcgattgttatcgggattgtctgggggacgattctggccgtgatgcgcctgtcgagtttcctgccgctggcgtggtttgccaaaacttacgttaacgtcttccgttctattccgctggtaatggtactgctgtggttttatctgattgtcccgggcttcctgcagaacgtgcttggtctgtcgccaaaaaccgatatccggctgatttcggcgatgatcgccttttccatgtttgaagcagcctattactcggaaatcattcgtgccggtattcagagtatctcccgcggccagtccagcgccgcgctggcgctgggcatgacccactggcaatccatgaagctggtgatcctgccgcaggcgtttcgcgccatggtaccgctgctgctgactcagggcatcgtcctgttccaggatacctcactggtttatgtcctgagcctggccgactttttccgcaccgcctcgacgattggcgaacgtgatggaacccaggtggagatggtgctgttcgcaggcgccgtatattttgttattagcctcagcgcatcgctgttggtcagctggttgaagaaaaggactgtgtaa

SEQ ID NO: 253964 - DNA, 741 bp, Klebsiella pneumoniae
atgtcaatagactggaactgggggatattcctgcaacaggccccgttcggcaatactacctatttaggctggctatggagtggttttcaggtcaccgttacgctgtcagtcacggcctggattatcgccttcttcgtaggctcgctattcggtattctccgtaccgtccctaatcgtctactctcgactatcggtacctgttacgttgagctgttccgtaacgttccgcttatcgtgcagtttttcacctggtatctggtggtgcctgaactgctgccggaaaatatcggcatgtggtttaagtccgagctggaccctaatattcagtttttcgtttcttcgatgctgtgtctgggattatttaccgccgctcgcgtctgcgaacaggttcgttccggcatccagtccctgccgcgcggccagaaaaatgccgggctggcgatggggctgacgctaccgcaaacctatcgttacgtgctgctgcccaacgcctatcgcgttatcgtgccgccaatgacctctgaaatgatgaacctggtaaaaaactcggccatcgcttccaccatcggacttgccgatatggccgcgcaagcgggtaagctgctggactactcggcccatgcctgggaatcgtttaccgccatcaccctcgcctacgtctttatcaacgccgtcatcatgctgatcatgtacgtggtcgaacgtaaggtccgcctgccgggcaatatggggggtaaataa

SEQ ID NO: 253965 - DNA, 912 bp, Klebsiella pneumoniae
atgcaattacgtaaactggccgcagcgatgctggtcatgggactgaccgccggcgcggcgcaggcagaagacgcagcagcaaccaccggccagagcactctggataaaattgccaaaaacggcgtcatcgtcgttggtcaccgtgaatcatccgttccattttcttactatgacaacaagcagcaggtcgtaggctactcccaggactactcaaatgcgatcgttgatgccatcaagaaaaagctgaacaaaccggatctgcaggtgaagctgatcccggttacgtctcaaaaccgtatcccgctgctgcaaaacggtacctatgatttcgaatgcggttccaccaccaacaaccttgaacgtcagaaacaggcggccttctccgacaccattttcgttgtcggtacccgtctgctggtgaaaaaaggcggcgcgattaaggactttccggacctgaaggataaagccgtcgtcgtcacctccggaactacctccgaaattctgctgcataagctgaatgacgagaaaaaaatgaacatgcgcattatcagtgctaaagatcacggtgactctttccgtaccctggaaagcggacgcgcggtggcctttatgatggatgacgcgctgctggcaggcgaacgggcgaaggcgaagaagccggataactgggagatcgtcggcacggcgcaatcccaggaagcttacggctgtatgctgcgtaaagacgatccgcagttcaaaacgctggttgatgagacggtagcccaggcgcagacctccggtgaagccgaaaaatggttcgacaagtggtttaaaaatcctattccgccaaaaaacctgaatatgaattttgaactctctgacgaaatgaaagcgctgttcaaatcacctaacgacaaagctcttaactaa

SEQ ID NO: 253966 - DNA, 1539 bp, Klebsiella pneumoniae
atggtatttgcctctctcattgaacgccagcgcgtacgcctgctgctggcgcttttattcggagccagcggaacgctggctttttcaccttatgacatctggccggcggcgattatttcattaatcggcctgcagggcttaaccctcaaccgccgtcctgtgcaaagcgccgcgatcggctatttctggggcttagggctgttcggctccggtattaactgggtctacgtgagtatcgcgcagttcggcggtatgcccgggccggtcaacgttttcctggtcgttctgcttgccgcctatctctctctgtacaccggattatttgccggtattctttcgcgcctgtggccaaaaaccagctgggtacgcgttgccatcgccgccccggtgatatggcaggttaccgagtttctgcgcggctgggtgctgaccggctttccgtggttacagtttggctacagccagatcgacggtccgctcaaagggctggcgcccgttatgggcgtcgaggcgattaacttcctgctgatgatcgtcagcggtttgctgatactggctatcgtgcagcgcagctggaagccgctggtcgctgccgtcgtgctgttcgccctgcccttcccgctgcgctatattcagtggtatcagctgctgccggagcgcgcgaccacggtttcgctggtacagggagatatcccccaggcgatgaaatgggaccaggatcagctactcaataccctgaaaacctatctggatctcacccagccgcatatgggcaaatcgcagctgatcgtctggccggagtcggcgataccggatctggaaattaatcagcagcgcttcctcagtatgatggatgacctgatgcggtcgaaaaacagctcgctgattaccggcatcgtcgacgcgcgcctgaacgcgcgtaatcgctacgatacttacaacaccattattacgctgggcaaagataacccgtacagctacgactcaaagaatcgctacaacaagaaccatctggtgccgtttggcgagtttgtgccgctggaatcgattctgcgtccgctggcgccattctttgatctgccaatgtcctctttcagccgcggtccgtacgtacagccgcagctggtggcgcataacatgcgactgacggcggctatctgctacgagatcatccttggcgagcaggtgcgggataacttccgcccggacacggattttctgctaaccatctctaacgacgcgtggttcggcaaatctatcggcccgtggcagcatttccagatggcgcgtatgcgcgcgctggagctggcccgtccgctactgcgtagcaccaataacggcataaccgcggtcatcggcccgcgcggtgaaattcaggcaatgatcccgcagttcacccgcgccgtgttaaccagcaaagtgaccccaacgacaggactgacgccgtacgctcgtacgggaaactggccgctgtgggcgttaaccatcctgttcggttttggcgccctgctgatgagtctgcgccagcgccgtcaataa

SEQ ID NO: 253967 - DNA, 945 bp, Klebsiella pneumoniae
atgccgggcgctgagtatacgcgtgacgagcgactatttaaccaacatgagaacccatacgacgccatgagcgacgacaattcacacagtagcgacacagtaaacagcaaaaagggattcttctccctgttactcagccagctttttcacggggaaccgaaaaaccgtgatgaactgctggcgctgatccgtgattccgggcaaaacgaccttatcgacgaagatacgcgcgatatgctcgaaggggtaatggatatcgccgaccagcgcgtccgcgacatcatgatcccccgctcgcagatgattaccctgaaacgcaaccagacgctggacgagtgcctcgatgtgatcatcgaatccgcccactcgcgtttcccggtgatcagcgaagacaaagatcacatcgaagggattctgatggccaaagatctgctgccgtttatgcgcagcgatgctgaagccttcagcatggaaaaagtgttgcgcccggcggttgtcgtgcccgaaagcaagcgggttgaccgcatgctgaaggagttccgctcccagcgttatcatatggctatcgttatcgatgagtttggcggcgtctcgggtctggtgaccattgaagatatccttgagctgatcgtcggtgagatagaagacgaatatgacgaagaagaagatatcgatttccgtcagttgagccgccatacgtggacggtacgcgcgctggcctcaatcgaagacttcaacgaagccttcagcacccacttcagcgatgaagaggttgataccatcggtggtctggtgatgcaggcctttggtcatctgcctgcccgcggcgagtctatcgacattgatggttaccaattcaaggtcgcaatggccgacagtcgacgtattattcaggtacacgtaaagcttcctgatgatgccccgcagccgaagctggaagactaa

SEQ ID NO: 253968 - DNA, 1047 bp, Klebsiella pneumoniae
ttgaatacagacactcgcgaaatcacccttgagcccgcggacaacgcccgtctgctgagcctgtgcggcccgtttgatgacaacattaaacagctggaacgccgtctcggcatcgagattaaccgtcgtgacaaccactttaaactgaccggccggccgatttgcgtcaccgcagcggcggatatcctgcgcagtctgtacgttgataccgcgccgatgcgcggcgaaattcaggatattgaaccggaacaaattcatctggcgatcaaagaagcccgcgtgctggagcagagcgccgaaagcgtgccggattacggcaaggccgtgaatatcaaaaccaagcgtggcgtgattaagccgcgtacgccgaatcaggcgcagtacatcgccaatattcttgaccatgatattaccttcggcgtcggccctgccgggaccgggaaaacctacctggcggtcgccgcagcggtagacgcgctggagcgccaggagatccgccgtattcttctgacccgtccggcggttgaggccggcgaaaaactgggcttcctgcccggcgatctgagccagaaagtggacccgtacctgcggccgctgtacgacgcgctgtttgagatgctcggcttcgagaaagttgaaaagctgattgagcgcaacgtgattgaagtcgcgccgctggcctatatgcgcggccgtacgctgaacgatgcgttcatcattcttgatgaaagccagaacaccaccatcgaacagatgaaaatgttcctgactcgtatcggctttaactctaaggcggtcattaccggcgacgtcacacagattgacctgccgcgcagcaccaaatcgggcctgcgccacgcaattgaagtgctggcagaagtcgatgagattagcttcaacttcttccatagcgaagacgtggtgcgccatccggtggttgcccgtatcgttaacgcctatgaagcctgggaagaagcagaccagaaacgtaaagcagagctggccgccgagcgcaaacgcgaagcccaggaacaggagcataaatga

SEQ ID NO: 253969 - DNA, 1176 bp, Klebsiella pneumoniae
atgacaattcatgcaacagatgtcgttatcgttggcggcgggatggtcggcggcgccctggcgctaggcctggcgcagcagggttttacggtgacggtcattgaaaaaaacgcgccgccggcttttgacacttcttccacgcctgacgtgcgtatttcggcgatcggcgcctcatcggtagggctgctgagaggcctgggcgtctgggatagcgtgcggtccatgcgcgcccatgcctatcgccagctcgagacctgggagtgggaaagcgcgcatgtggtgtttaacgccgcggagctgaagctgccggaactgggctacatggtagagaataacgtcctgcagcgtgccctatggcaggcgctggagacccacgagaacatcaccctgcgggtgggcacatcgcttcaggagatgcgtcgcgcagagacgcacgcttcggtcacgctgaccgatggcagccagcttgatgcgcggctggtggtgggcgcggacggcgccagttcacaggtgcggcagctggcaggaatcggtatccatgcctggcagtaccaacaatcctgtatgttgatcagcgtgcagtgcgcggaggatcccggcgatagtacctggcagcagtttacccctgcggggccacgggcgtttttaccgctgttcgatcattgggcttcgctggtgtggtacgacacgccggcgaggattcgccagctgcagggcatgagcatggctcagctacagcaggaaattaatcaccacttcccggcgcggctgggagagatgacgccgctaagcgcgggcgcgtttccgttgacccgtcgccatgcattgcagtatgtcaaacctgggctggcgctggtgggcgatgctgcgcacaccattcatccgctggcggggcagggggtcaatttgggctatcgcgatgtcgatgcgctgctggatgtcctggccagggcaaaagcccacggcgaagagtgggccagcctgccggtgctcaagcgctaccagacgcgccgtcaggcggacaactttattatgcagtcggggatggatctgttttacgccggatttagcaacgatttgccaccggtgcggatactgagaaatattgggctgatggcggccgagcgcgctggcgtactgaagcgtcaggcgttgaaatacgcgttggggttgtaa

SEQ ID NO: 253970 - DNA, 609 bp, Klebsiella pneumoniae
atgactccaatgcaacgccgtagacataatgcggcccttaatgaggttgccctggctacgcataagcgctatctggggcgggcaaaactcttgaccggcatccagtcaggctggattaaatcattgcttaccgtatggggcgataccatgcgcggtgaagccgcgccacgattgccaggaagccatgaatgctggcgagttattagaggagaacgctggtctgataaatctcttgagcgctttactgcggcaattaagcaggcgagggaggaaggttatcgcggtcagcatgcgttaaatagagcacacgcaattttatggccgaaacccactaccagcataatagataccgctataagagatgatgatgcggatttcgttgaggaatgtgtgttaaaggcattcgatacaacggatccggtttatatcgtaggggtgagtttttataccactcgtaaaaaagtcgcggatattgcccgcgagctggaacgagcagctccatggcttacgttcaagatggcaaaggatcgcgttaactggtgcttacaggtatttcaggcgaaaactttcctgtctgcaaggcaaagcctgaaagctgaatctgaataa

SEQ ID NO: 253971 - DNA, 141 bp, Klebsiella pneumoniae
atgagccgtgacgcaatagagcggatccgccaccgctggcaaaagcttcgtctttgccgtcaccgcggcactgtattagttgactaccgcatcctcaaaaactttatgcgtacctgtcagatccggggggagaaagcatga

SEQ ID NO: 253972 - DNA, 645 bp, Klebsiella pneumoniae
atgactaatccttactgcgaatccctcatagccctacgcaacgcgacatcccattacttaaaagaggttggtgaccagtggcgaacgccggatccgcttttctggggtatcaacgcgatgtttggcccgttgatgctggacctgttcgctgatgacagcaatgcaaaatgtcctgtctggtacaccgcagaagataacgcgctgacacaggactggtcggaaatgctggactcaattggtggtgctgcatttggcaacccgccatacagccgctctcaatatcatgaaaagcaagccatcaccggcatgactcacatcatgaactacgcaactgcgcaacgagagaagggcggccgctatgttttcctggtgaaatccgcaacgagcgaaacctggtggccagaagatgcggatcatgtctgctttatccgtgggcgaattggtttcgatctgcccgtctggtttaaacctgctgacgataaacaaaggccaacaagcgcgttttttgctggcgctattgctgtatttgataagacctggcgaggtgagaaattcagttatatcaaccgcaccgaactggaggcaaaaggccagtcatttatggcgctggcgcagtttgccattgataagaaggtgaccgcatga

SEQ ID NO: 253973 - DNA, 234 bp, Klebsiella pneumoniae
atgagaatcgaagtaaccatcgacaagactaaaaaactgccagaaggggccattcccgcccttgaagttgaattgctgcgccgtcttcatcaaaactatgaaggctgcaaactaaatataagacgctcaagcactgacgggctgaccgttctgggcggcgttgatggcgataaaaagcgcatagagcaaatcctgcaggaaacgtgggaaagtgccgacgactggttttattga

SEQ ID NO: 253974 - DNA, 294 bp, Klebsiella pneumoniae; identical to SEQ ID NO: 180123

SEQ ID NO: 253975 - DNA, 192 bp, Klebsiella pneumoniae; identical to SEQ ID NO: 203155

SEQ ID NO: 253976 - DNA, 294 bp, Klebsiella pneumoniae
atgaaaacaactaaatccaagaaaacacaatacagcggtgaaatcacgatgatcgaatttctcaaggccaatcctgatttgaccaccagagaaatcgccgttgcactgggtcgcggtatgtcgtcggtcggtaatcagcttcgccagttacacggaacgggtcagattacccaaagcggcatgcggaatggcgcggcaatgtggtgctttaacgatatgccgtttggctgcgcgaaccggcttcgggcgaagtttgaaagccttctgcgggaatgtcgcggggtcgctcaatga

SEQ ID NO: 253977 - DNA, 294 bp, Klebsiella pneumoniae
atggctaattttctgcaaagcaacccgatggttaaagcagctcaaagcaaactcgctattgcgcagttcattggtaacagtggcatgtggtctgatgccatggcgtcaataaaagatattcatgaagcagcaaagcacgaagaggacagtatgttttgcggtcgtaaggatgcgctttcaggacttcaatttcgggatgttgttttaaattatgacttgtacggggatttaatttccgtagatggcgacttgcttacagggcaatataaagtaaacaccgaagtttcattttaa

SEQ ID NO: 253978 - DNA, 240 bp, Klebsiella pneumoniae
atgaaaatcgaatttattgataaagatgtaatagcaaccacaattgtcaccagtacggtattcgaattccggctacacaatcgcgccgttgatactgctttattcctggctccttccgttcgttctaagcgtagtggattctttattttaaaaacggttatttccgggaaaacaccccatgtattgcgtgcatacaaggctcttcagtcggaggcttcacgatgctcgagcgtggaatga

SEQ ID NO: 253979 - DNA, 627 bp, Klebsiella pneumoniae
atgattacgctgtggggcagaaataactcaaccaatgtgaagaaagtgcgctgggtgctggaagaactcgacctcccgtatcagcaaattctggcaggcctggagttcggtctgaatcacgatccggcctatctggccatgaaccccaacggtctggtaccgctattgaaagatgcaacgaccgatgtcgtgctctgggaatcaaacaccattatccgctatctggccgcgcagtatggtcagaatcgcctgtgggtggagtcgccagccgagcgcgcccagggagaaaaatggatggactgggccaacggttcgctctcgcctgcccatcgacccgttttaatgggcctggtcaggacgccggttgaaaaacgcgatcctgccgccattgaagccggtattgccgcctgcgagacgctgttcgctattctggacgacgagctgtcgcgccatcagtggctgtcgggcgatgccttcggcctcggcgatatcgccgtcgcgccgttcgtctataacctgctggaaacggtaaaaacctggcagccgcgcccgcatctgcagcgctggtaccagcagatcggcgaacgtcaggcctggcgcaacgtggtgatgatcccggtcacctga

SEQ ID NO: 253980 - DNA, 1113 bp, Klebsiella pneumoniae
atgcaccagaccgtcaccctgatagcgcttaccgcgctgctgttacccactgctgtccttgccgcccgggagcgcgtggaggtgttgcagaaccagctcgaacacccgtgggcgctggccttcctgccggacgatcgcggtattttgatcaccctgcgcggcggcgaactcaagctctggcagcgcgacaaaggcctctcgtcggcgatcccgggcataccgcaggtctgggctaacgggcagggcggtttgctggacgtggcgctggcaccggactttgcccagtcgcgccgggtctggctgagctatgccgagggcggggatgaggataaagccgggaccgcggtgggctatggccgattgagcgaggatcttcagcgtctggaaaacttccaggtggtgtttcgccagcagccgaagctctctactggcaatcattttggcggacggctggcgttcgacggtcgcggtcatctgtttatcggtctcggagagaataaccagcgttcaaccgctcaggatctcgataagctgcagggaaaagtggtgcggctaacggctgatggcaaagtcccggccgataatccttttgtcggccagtctggcgtcaggcctgaaatctggtcttacggaattcgtaaccctcagggattggcgataaacccgtggagcgagacgctgtggttacatgagcacgggccgcgcggcggggatgagatcaacatcgtgcaaaaaggtaaaaactacggctggccgctggcgacgcacggcattaactacagcggcctgccgatcccggaagccaaaggcaaaaaggcggaaggcaccgaagcgccgctatttgtctgggagaagtcgccggcggtgagcggtatggcgttttacaacgcgcaggtttttccgcagtggcaacacaggctgtttatcggcgcgctgaaggatgaatcgctcattgtgctcaaggttgatggcaataaagtcacggagcaggagcgcattctgaccgatcgcggtagacgcattcgcgacgttcgcgttggacccgatggttatttgtatgtattaaccgacgaatccaacggtgagctgctgaaggtgagtccggcgggttaa

SEQ ID NO: 253981 - DNA, 384 bp, Klebsiella pneumoniae
atgaacgttgacagactgtatcgtaacctgatgaataagctgattaatgcctccattgatcttgatgcttatttacagttgcgtaaagcaaaaggctatatgtcagtcagcgaaaacgaccatctacgtgataacttgtttgaactgtgccatgaaatgcgtgaatacgcgccgcgcctgcagcacgccgttgcgccggaggaaaaggaagccctgcgccttgcgggcgaagccgtcgcttccgcggcggtatgcctgctaagcggacatcatgattgcccgtcctacattgcggtcaacgtagataaactggaaagctgcctggcggtattgcggctaaacattcataaattgaatgattttgcccccattacccacgcctga

SEQ ID NO: 253982 - DNA, 1245 bp, Klebsiella pneumoniae
atgattaatcccggcagaagaaactatatcttgttgagtcttttcgacttcctctacctcttcgcctggtcctcgaccatggcattctttgttatctggacgacccagcatctcgggattagcgccacgaaaaccggcctgctctactcggttaacgcctttattgccctgctgatgcaacccttctttggctttatttccgataaattcggcctgaaaaaacgactcatctggtttctcgtcgccatgctgctaccggtgggtccgttctttatttatttatatgctccgctgctggtgcacagcttctggctgggcgcgctgctcggcggggtatacctggggattatttttaactccggctgcggggtgatcgattcgtatatcgataaaatttcgcggcgctaccagttcgaatatggccgcgtaaggatgtggggatcgttaggctgggccgccgcggcgtggatcgtcggtaagtatatcgacagcaatccgaaccttgctttctggctggccagcatcgccattgtgattgccgcgatctgttttatgctgaccaaaatcgaactgagcgaagcggagatgcagaaaaccagcgcgctgaaagtttcccatgccctggagctggcgaagaacgggcagttctggatgctgctggtctttacccttttcgtcacgcaaatctacgatacctacgatcagcagtttgcccagtacttttccctgcagttcccgacgcccgaggaggggaatcgctggtacggcattctggcctccattcaggtgtgcggggagacgctgtttttatgcctgatgccgtggtttgtaaaccgcaccggcgcgaagtgggcgctgatcatcgccggactgatcatgtcggtccgtatcgtaggctccgcgatcccgctgggtccggtgtggatcggcgcagtcaaaatgatgcatgcgctggaaaaaccgctgatcctggtgtcggtatttaaattcattgccgccaacttcgacaacaagctgtcatcgacggtttacctgctggtgctgtttgtcgcctccatcgccaccgccgtttactcgccgctggcggggtatttgtatgacactatcggcttcgcgcagacgtattatatcctgggcggtgtcgccggggtatttacgttaatttcggtatttacgcttcgcgataatagagaaccgaccgcgccggggtctgcgccaggcgctggcgttgcgcaaagccattaa

SEQ ID NO: 253983 - DNA, 519 bp, Klebsiella pneumoniae; identical to SEQ ID NO: 173823

SEQ ID NO: 253984 - DNA, 1326 bp, Klebsiella pneumoniae
atgagcaatgtcacccctcagccgaagatcggctttgtctctctgggctgcccgaaaaatctggtggactcagaacgtatcctgactgaactgcgtaccgaagggtatgatgtggttccctcctacgataacgctgatatggttatcgttaacacctgcggctttatcgatagcgccgtgcaggagtcgctggaagcgattggcgaagcgttgaaagaaaacggcaaagtgatcgtcaccggctgcctgggcgcaaaagaagatcagatccgcgaagtgcatccgaaggtgctggaaattaccggcccgcacagctatgaacaggtgcttgagcacgtccaccactacgcgccgaagcctaaacataatccgttcctgagcctggtgccggaacagggcgtgaagctgacgccgcgtcattacgcttacttaaaaatttctgaaggctgcaaccatcgctgcaccttctgcatcatcccgtccatgcgcggcgatctcgtcagccgtccgattggtgaagtgctggcagaagccaaacgcctggccgacgcgggggtaaaagagctgctggtgatttctcaggacacctccgcctacggcgtcgatgttaaacatcgcagcggcttccacaacggtatgccggttaaaaccagcatggttagcctgtgcgaagaactggctaagcttggcatctgggtgcgcctgcactacgtctatccctatccgcacgttgatgatgtaatcccgctgatggcggaaggcaaaattctgccctacctcgatatcccgctgcagcacgccagcccgcgcattctcaagatgatgaagcgtcccggctccgccgaccgtcagctggcgcgtatcaagcagtggcgtgaagtctgcccggaactcaccctgcgctcgacctttatcgtcggcttcccgggcgagacggaagaagatttccagatgctgctggacttcctgaaggaagcccgcctcgaccgagtcggctgcttcaagtacagcccggtggaaggcgcgaccgccaacgaactggcggatcaggtaccggaagaagttaaagaagagcgctggaaccgctttatgcagcttcagcagcagatctccgccgagcgtctgcaggagaaagttggccgcgaaattatggtgctgatcgacgaagtcgatgaagaaggagccattggccgcagcatggccgatgcgccagaaatcgacggcgcggtgtacctcaacggcgaaagtaaagtcaaaccgggcgacgttgtgcgggtgaaagtcgaacacgccgacgaatacgatctgtggggcagccgggtttaa

SEQ ID NO: 253985 - DNA, 948 bp, Klebsiella pneumoniae
atgccgccattaatccggctatcaggtataagtaaggtgcgattgctcaactggagaagacaagcggttatcaacgcgatgccgggggttaaacccgggcagatacgtaccccgtggcacgagttctggcggcggtttcgcggccagccggtggcgatgggcgcggggatatttgtgctgctgctgattgcggtggcgatcgtggcgccgtggatcgcgccgttcgatgcggaaaactattttgactacgatcggctcaacgatggcccgtcgatgatgcactggttcggcgttgattcgctggggcgcgatatttttagccgggtgctggtcggcgcgcagatttcgctggccgccggggtactggcggtattgatcggcgcggctatcggcaccgtacttgggctactggccgggtattacgaaggctggtgggatcgcatcattatgcgcatctgcgatgtgctgtttgctttccctggcattcttctggcgattgccgtcgtggcggtgatgggcagcggaatgtcgaacgtcatcatcgcggtggcgatcttttcgatcccggcatttgcgcgtctggtgcgcggcaatacgctggtgcttaagcagcagacttttatcgagtcggcgcgcagcattggcgccagcgacgctaacattctgtttaaccacattttgcccggaacggtatcatcgattgtggtctactttacgatgcgcatcggggtgtcgattatctctgccgccagcctgtcatttctgggccttggcgcgcagccgccgacgccggagtggggggcaatgctgaacgaggcgcgggcggatatggtgatggcgccgcacgtggcgctgttcccggcaattgccatttttctgacggtgctggcgtttaacctgctgggtgatggcctgcgcgatgcgctggatccgaagataaaaggttag

SEQ ID NO: 253986 - DNA, 921 bp, Klebsiella pneumoniae
atgctaaattatgtgattaaacgcctgctggggctgatccccacgctgctgattgtagcggtgctggtgtttctgttcgtgcatatgctgcccggggatccggctcggctgattgccgggccggaagccgatgcccaggtggtgggaatggtgcgccagcagcttgggctcgatcgcccgctgcacgtgcagttctggcactatatcagcaacattttgcagggcgacttcggcacctcgatggcttcccgccgcccggtgagcagcgaaatcgccagccgttttatgcccactttctggctgacgattgccagtatgggctgggcggtcatcttcgggatggcggcagggatcgtggcggccgtgtggcgcaatcgctggccggatcgtataggcatggcgctggcggtcaccggcatctcgttcccggcctttgcgctcggtatgcttttgatgcagatcttttccgttgaactgggctggctgccaacggtgggcgccgacagctggcggcactatattctgccttcgctcaccctgggcgcggcggtggcggcggtgatggcgcgttttacccgcgcctcgttcgtcgatgttctgcatgaagactatatgcgcaccgcgcgggcgaaaggcgtcagcgaaacgctggtggtgctcaagcacggcctgcgcaacgcgatgatcccggtcgtcactatgatggggctacagttcggctttttgctcggcggttcaatcgtggtggaaaaggtctttaactggcctggtctcggacgtttgctggtggactcggtggagatgcgcgattacccggtgattcaggcggaagtgctcctgttttcgctggagtttattcttattaatttagtggtggacgtactgtatgccgccattaatccggctatcaggtataagtaa

SEQ ID NO: 253987 - DNA, 1539 bp, Klebsiella pneumoniae
atgactcaacgcgtatcaggcaaatggctgttggcgctgggcgtcgcctcggcgctgacagccgctccggctctggccgcaaaagatgtggtggtggcggtcggttctaattttacgacccttgacccgtatgatgctaacgacacgctgtcgcaggccgtcgccaagtccttctatcaagggctgttcggcctcgataaagagatgaagctacagaacgtgctggcggaaagctataccgtttccccggacggcctggtgtataccattaagctacatccgggggtgaagttccaggacggtaccgagtttaatgccgaagcggttaaggcgaacctcgatcgcgccagcaacccggaaaaccatctcaagcgttataacctgtataaaaatatcgccagcaccgaagcggtagacccgaccacggtgaaaattaccctcaaacagcctttctcggcgttcattaatattctggcccatccggcgacggcgatgatttctccggcggcgctgaagaaatatggtaaagagattggcttccatccggttggcaccgggccttatcagctcgatacctggaaccagaccgattttgtgaaagtgaaaaaattcgccggttactggcagccagggctgccgaagctggactccatcacctggcgcccggtcgtggataataatacccgcgcggcgatgctgcagaccggcgaagcgcagtttgcattcccgatcccctacgagcaagcgccgctgctggagaaaaacagcaagctagagctggtggccagcccgtcaattatgcagcgctatatcagcatgaacgtgacgcagaagccgttcgataatcccaaagtgcgcgaagcgattaactacgctatcaaccgtcaggcgctggtaaaagtcgcttttgccggctacgccacaccggcgaccggcgtggtgccgccgtctatcgcctatgctgaaagctacagcgcctggccgtacgatccggctaaagctcgtgagctgctgaaagaggcgggttatccgaatggctttaccacgacgctatggtcatcgcacaaccacagcacggcgcagaaagtactgcagtttacccagcagcagctggcgcaggtgggcattaaggcgcagctgacggcgatggatgcgggccagcgcgcggcggaagttgaaggtaagggacagaaagagagcggcgtacgcatgttctacaccggctggacggcgtcgaccggggaagctgactgggcgctgtcgccgctgtttgcgtcgcaaaactggccgccgaccctgtttaatacggctttctacagcaatccgcaggtcgataaagatttcaatgacgcgctgaaaaccaccgatgcgcaggaaaaaacgcggctgtataaagacgcgcaggatactatctggaaagagtcgccgtgggtgccgctggtcgtagaaaagctggtctcggcgcacagtaaaaatctgaccgggttctacatccagccggataccggatttagctttgaacaggcggatcttaagtag

SEQ ID NO: 253988 - DNA, 1854 bp, Klebsiella pneumoniae
ttgccgcatagtcaagaaatcgatgccgatgatgttctgcaggtgggcggcctgaacgtcgtgtttaatcagcaacagcaggctttttccgccgtccgcgacctgtcgtttaccctgcggcgcggcgaaacgctggcgattgtcggcgagtcgggctcgggaaaatcggtgacttcgctggccctgatgcgcctgctcgatcgggcggtcagcgaagtgcgcagcgatgcgctacttctgcgccgtcgcagtcggcaggtgattgagctgagcgaacagtctgacgctgaaatgcgcggcgtgcgcggcgcggatatggcgatgatcttccaggagccgatgacctcgctcaatccggtcttcaccatcggcgagcagattgccgaatctatccgcttacatcagggcctgaagcatgatgaggccctgcgcgaagcgaaaaaaatgctcgatcaggtgcgcattccggaagcggaagcgatgctctcacgctatccgcaccagctttccggcgggatgcgtcagcgggtgatgatcgccatggcgctctcttgtcgtccggcggtgctgattgccgatgaaccgacgaccgcgctggacgtcactatccaggcgcagatcttacagctgattgccgtcctgcaaaaagagatggcgatgggcgttatctttattacccacgatatgggggtggtcgccgatatcgccgaccgcgtgctggtgatgtatcgcggcgaagcggtggaaaccggcagcgtggaagagatttttcgcgcgccgaagcacccgtatacccaggcgctgctggccgcggtgccgcggctgggcgcgatgcgcggcacttcgctgccgcgtcgcttcccgctgttaaaccagagcccgtcgtcggaggggcagaacaccgttgtggccggagaaccgatccttaaagttcgcgatctggtggcgcgcttcccgctgcgtagcggaattctcaaccgcgtaacccgtgaggtgcacgcggtcgaaaaggtcagctttgatttatggcccggcgaaaccctgagcctggtgggcgagtccgggtgcggtaaatcgacgaccggccgggcgctgctgcggctggtagagacccagggcggcagcattatcttcaacggccagcgaattgatacgctaacgggcagtaagcttcaggcgctgcgccgcgatattcagtttatttttcaggacccgtacgcttccctcgacccacggcaaacggtgggctattcgattatggagccgctgcgggtgcatcggttgctggagggcgatgccgcccgtgaacgggtcagctggctactggaacgcgtcgggctggagccggaacatgcgtggcgctacccgcacgagttttccggcggccagcggcagcgcatctgtattgcccgcgcgctggcgctcaatccgaaagtggtgattgccgatgagtcggtatcggcgctggacgtgtcgattcgcgcgcaaattatcaatctgatgctcgatctacagcgtgagatgggcatcgcatttctgtttatctcccatgacatggcggtggttgagcgcatcagccaccgcgtggcggtgatgtatcgcgggcgcattgtcgagattggcccgcgccgcgccgtgtttgaaaacccgcagcacccctatacccgtaaactgatggccgccgttccggtggctgaccctgcgcatcgccgtccgcagcgcgtgctgctctccgacgagctgccgggtaacatcttcaagcggggcgaagaggggatcagtacaccgttacagcaggtggggccggggcactttgtcgccagagagtccgccgccgacgtgctggcgcgctaa

SEQ ID NO: 253989 - DNA, 942 bp, Klebsiella pneumoniae
atggggaaggcggttatagcaattcacggcggagccggggcgattagccgcgcgcagatgacgccggagcgcgagcgggagtacgtggcagcgctgtcggcgattgtcgatagtggacaaaaaatgctggcggccggggccagcgcgctggatacggtaaccgaagcagttcggctgctggaagagtgcccgctatttaatgccggtattggctccgtgtttacccgcgatagtcgccatgaactcgatgcctgcgtcatggatggttacagcctacaggcgggagccgtggccggcgttcagcatttacgcaatccggtgctggcggcgcggctggtgctggagcaaagtccgcacgtgctgctgattggcgaaggggcggaagcgtttgccgcttcccgcggtatggcgcgcgtcgataacagcttgttttctactcctgagcgtttactgcagctgcgtcaggcgcaggaaggcgacgatatcgtgctcgatcaccacgccgcgccgctggatgagcggcacaagatggggaccgtcggcgcggtagccatggatctgacgggcaacctcgcggcggcgacctcaaccggcgggatgaccaataagctaccgggacgcgtcggcgacagcccgctgccgggagcgggctgctacgccaataacgccagcgtcgccgtgtcctgtaccggtaccggggaagtgtttatgcggaccctggcggcctacgatatttcggcgctgatggagtatagccagctcagcctgcaggaggcctgcgaaagggtagtgatggagaagcttccggcgctgggcggtagcggcggcctgatcgccatcgacagagaaggcaacgtggcgctgccgtttaacagcgaaggcatgtaccgtgcctggtgttatgcgggcgatacgcccacgattggtatttatcgcgaataa

SEQ ID NO: 253990 - DNA, 756 bp, Klebsiella pneumoniae
atgagcgtggagctgagcgatgcggagatgctgcgctataaccggcagattattctgcgcgatttcgattttgacggtcaggagcagctgaaagcctcccgcgtgctggttgtcggcctcggcgggctgggctgcgccgccgcgcagtatctggcggcggcaggcgtcggcctgcttaccctgctcgatttcgacaccgtttcgctctccaaccttcagcgccagaccctgcacagtgacgccaccatcggccagccgaaggtcgattccgcccgcgccgcactagcgcggattaatcccctcgttcagctcacggcgctcaacgcgcggctggaagacgaggcgctggcggcgcaaatcgccgcccacgatctggtgctcgattgtaccgacaacgtcgcgatccgtaaccagctcaacgccggatgtttccgccataaaacaccgctggtctccggcgcggcaattcgcatggaagggcaaatcagcgtttttacctggcaggaagatgaaccctgctaccgttgcctgagccgtctgtttggcgaaaacgccctcacctgcgttgaagccggggtgatggcgccgctggtcggcaccattggttcgctacaggcgatggaagcgataaagctgctgacccgctacggcagcccggcgacgggaaaaatcgtcatgtacgacgccatgcgctgccagttccgcgaaatgaaattgatgcgtaaccctcagtgtgaggtgtgtggcacgccttag

SEQ ID NO: 253991 - DNA, 2433 bp, Klebsiella pneumoniae
atgacaacgttgaaactggatactctgagcccgcgcatacaggcgcataaaatggcgctggtgcatatcgtcaagccgccggtctgtaccgaacgcgccctgcactatacccaagcctatcagcagcatctggataagccgatcccggtacgccgcgcgctggcgctggcccaccacctggcggaacgcacaatctggatcaagcacgatgaactgatcgtcggcaaccaggccagcgaagttcgcgcggcgccaatcttcccggaatacaccgttagctggatcgaaaaagagatcgacgacctcgccgatcgccccggcgccggttttgccgttagcgaagaaaacaaacgcgtgctgcacgaagtgtgtccgtggtggcgcggtcaaacggtacaggaccgctgttacggcatgttcaccgatgagcaaaaagcgctgctggccaccggcattatcaaagcggaaggcaatatgacctccggcgatgctcaccttgcagtcaactatccgctgctgctggaaaaaggcctcgacggcatgcgcgcgaaagtcgccgagcgccgttcgcgcattaacctgaccgtactggaagatctgcacggcgagcagttcctgaaagccattgatatcgtgctggaagcggtgagcgaacactgtaagcgctatgccgggctggcgcgcagcatggccgcgacggagagccgtgaatcccgccgcgacgagctgctggcgattgccgaaaactgcgacatcatcgcccatgagccgccgaaaactttctggcaggcgctgcagctgtgctatttcatccagctgattctgcagatcgagtccaacggtcactcggtctctttcggccgtatggaccagtatctctacccttactaccgccgcgacgttgagctggcacactctctggatcgcgaacacgccattgagctactgcactgctgctggcttaaactgctggaggtgaacaaaattcgctccggctcgcactccaaggcttccgccgggagcccgctgtatcagaacgtcaccatcggcggccagaatctggtggacggtaaagcgcaggatgcggtgaacccgctctcctacgccatcctggaatcctgcggtaggctgcgttcgactcagcctaacctcagcgtgcgctatcacgcgggcatgagcaacgacttcctcgacgcctgcgtgcaggtgatccgctgcggcttcggcatgccggcgttcaacaacgatgaaatcgtcatcccggaatttatcaagctggggatcgagccgcaggacgcctacgactatgccgctatcggctgcattgaaaccgccgtcggcggtaaatggggctatcgctgcaccgggatgagctttatcaacttcgcccgcgtcatgctggcaaccctggaaggcggccgcgacgccaccagcggccaggttttcctgccgcaggaacatgcgctgtcaaaaggcaacttcgacaactttgaacaggtcctggccgactgggacacgcagatccgctactacacgcgcaaatctatcgagattgagtacgtggtcgataccatgctggaagagaacgtgcacgatatcctctgctcggcgctggtcgatgactgcattgagcgtgcgaagagcatcaagcagggcggcgcgaaatatgactgggtatccggtctgcaggtcggtatcgctaacctcggcaacagcctggcggcggtgaagaaactggtgttcgaccagggcgtcattggtcaacaagagctggccaaagcgctggctgaagacttcgaaggcctgacccacgagcagctgcgccagcgcttaatcaacggcgcgccgaaatacggtaacgatgaagatagcgtcgatattttgctggctcgcgcctaccagacctatattgatgagctgaagctgtatcataacccgcgctatggccgcggcccgatcggcggtaactactacgccggcacctcgtccatctccgccaacgtgccgtttggcgctcaaacgatggcgacgccggatggccgtaaagcgcactcgccgctggcggaaggggcaagtccggcttccggtaccgaccacctggggccgaccgcggtgatcagctcggtaggtaaactgccaaccggctcaattcttggcggcgtactgcttaaccagaagctgaacccggctacgctggagaatgagtctgataagcagaaactgatggtgctgctgcgcaccttcttcgaggtgcacaaaggctggcatattcagtacaacatcgtgtcgcgcgaaacgctgctggaagcgaagaaacatcctgaccagtatcgtgatttagtggtccgcgtggccggatactcggcgttctttaccgccctatcgccggatgctcaggacgatattatcgcccgtaccgagcatacgctgtaa

SEQ ID NO: 253992 - DNA, 816 bp, Klebsiella pneumoniae
atgaccgttaaagttatcgtcaccgatatggacggaacttttctcaatgacgccaagcagtacgatcgctcgcgttttcttgcgcagttcgcgcaactccagcagcagggtattgaatttgtggtcgccagcggcaaccagtactatcagctgatctcttttttcccggaaatccgcgaccaaatctcctttgttgccgagaacggcgcgctggttttcgaacacggtcaacagctgttccacggtgaacttactcgccatgaatcccaggtagtgattggcgaactgctcaaagacccgcagctcaactttgtcgcctgcggcctcgagagcgcttacgtcagcgatcgcgcgcccgacgcctttgtcgcgctgatgtcaaagcactaccatcgtctgcagcgtattggcagctaccatgacatcgacgataagctgtttaagttttcccttaacctgccggatagcgaaattccgcagcttatcgacaaactgcacgtctcgctggacggcattatgaagccggtcaccagcggttttggcttcgtcgatttgatcatccccggcctgcataaagccaacggtatcagccgcttgcttaagcgctggaacatttcgccgcaggcgtgcgtagccatcggcgacagcgcgaacgacacggaaatgctgaagctggtgagatactctttcgcgatggccaatgccgccgaaagcattaaggcggtatcgcgttatgctaccgatgacaacaaccacgacggcgcgctgaaggtgattcaggccgtcctcgaccacgccaccccgttcgacaagtaa

SEQ ID NO: 253993 - DNA, 1266 bp, Klebsiella pneumoniae
atggctattacctgtacctgtgaaactttacctgccgacccaaaagcggccatccgccagattaagcaagagctgcgggcgcaaattggcgacgtgcaggcggtgttcgatcgtctgacggcgcgaatcgctgcgcgtgtggaagagattgatgcccttaaaaccagcggacaggacgtctggccgacgatcccgttcgccgatattgcccgggatcgggttacgcaagcccagcgcgagttcatcaagcgtcgcggctgcgtggtgatcaagagccattttccccgcgaacaggcgctgggatgggataactcgatgctcgcgtatctggaccgcaaccatttcgatgaggtctacaaaggccccggcgatacttttttcggttcactggaagcgtcgcgcccggaaatctatccgatttattggtcccaggcgcagatgcaggcgcgccagagcgatgaaatggccgccgcacagtcatttcttaaccgcttgtggacgtttaaccacgacggcaagcagtggtttaacccggatatcagcgttatttacccggaccgcattcgccgccgcccgccgggaaccacctcgaaaggtctgggcgcgcataccgattccggcgccctggaacgttggctgctaccggcctatcagaaagtgtttgccgatgtttttaacggcaatgttgatgcttacgacccgtgggacgcggcgcatcgtactgacgtcgaagagtacacggtcgacaataccaccaaatgctcggtattccgtaccttccagggctggaccgcgctctccgatatgatccccgatcagggcctgctgcacgtcgtgccgatcccggaagctatggcttacgtactgctgcgtccgctgctcgacgatgtgccggaggatgaactgtgcggcgtcgcgccgggcaaggtattgccgatttcggaaaaatggcacccgctgctgatcaaagccttaagctctattccggcgctcaatgcgggcgattcggtatggtggcactgcgacgtcatccactcagtcgcgccggtggaaaatcagcaaggctggggcaacgtcatgtatattcccgccgcgccgatgtgtgagaaaaacctcgcctacgcgcagaaggttaaagccgcgctggcgcgcggcgcttcgccgggagatttcccgcgtgaagattatgaaaccgactgggaaggccgcttcacgctggaggatttaaatgtccacggcaagcgggcgctggggatggcggattaa

SEQ ID NO: 253994 - DNA, 1074 bp, Klebsiella pneumoniae
atggataaaaagctaaaagtgagcgaaatagcgggccgcacggggctctctgtcagtacggtatcgcgagtgctggcagggaaagcgaataccagcgccagggcccgccagagggttctggagtgcgctcgcgagctgggcgtcatggacggtatcgccgccgggagaatgctgctcaataatctggtggtctttgcccctcagcgggcgttcgatgagcgtacagatatttactactatcgcgttattcagagcatcaattcggcgctggtgccccatgaggtgcatctgcgctactgcgcgctggaggagaatgacagcgatgccaatttgtttttgcagcgtatgcatgaaacatcgacccaggccgccatcttactgggaatcgacgatccgcatattcacgatctggcggcggacctggctaaaccctgcgtgatgattaactgccacgacgccggaatgcgcctcccttccgtcgcgccggatcatcgactgatcggtcaattcgccgcccgctatctgtttgagatggggcaccaggcgatcatgaacgtgatgtgcctgcgccgctataccatggaactgcgtttattggggattaagcaggcgtggcgtgcgcggaatctgcgctttgtcgatagcatggatttaatcgacgtcgccaatttcagcgcccgggatactgagtcaaaagtgggcgagtggctggatcagcgcggtgatggcccgctgccaacggcgtttctggtaggcggtgattttatggcggcagggacgatcgctgctctgcagaagcgcggattacgcgtgccgcaggatatttctatcatgagtatcgacggctttaacctggcggcgattcaggatgtgccattaaccgctgtccacgtcccgcgcgatgaattaggcgttgaagcagtacatttgttgcagcagaggctgattcgtcccgatgcgccgcacggctcactattattgcatggtacgctggcggtacgtgattcggtgcggcggatacgtgctggtaaccgccgcaccgccgttgagcctaaggggttatacgacgattaa

SEQ ID NO: 253995 - DNA, 1302 bp, Klebsiella pneumoniae
atgagccaaggtctcaataatgatatggcggtgagtaaatcaggccgcatagtaaaaaatctgcgctggtggatactggtgctgtttttgctgggcgtgaccgtgaactacattacgcgcaactcgctggggattatcgccccggaattaaaaacctcgttggggattaccaccgaacagtattcatggatagtcggcgcatttcagctggcctataccattttccagccgctctgcggctggctcatcgacgtaatcggcctcaagctcggctttatgatttgcgccacgctgtgggccgtcgcctgcattgcccatgccggtgcgggaagctggctgcacctggcgatcctgcgcttttttatgggcggcgctgaggctgcggcgacgccagccaacgccaaaacgctgggtgagtggtttccaaaatccgagcggccgatagcggctggctgggctggcgtcggtttctcggtcggcgccatgctggcgccgccgattatctactttgcgcacgcctcgttcggctggcagggcgcattcatgttcaccggcgcgctggcgctcttgtgggtcgtgctgtggtgggcattttatcataatccggagaagcaccctaacctcgggaaagctgagctggcgctgatccagcaggataatgaagcaccgccggtcaaactgcccttctttaccgcgctgaaaaccgtatcaaaaaacaagcgcttctacggtatcgccattccggcctttatggcggaacccgcctgggcggtgctgagcttctgggtaccgctctatctggcaaaagagcacggaatggatttaaagcaaatcgctatgttcgcctggctaccgtttctggcggccgacctcggcagcgtcgccagcggctatctgaccaaactgtatacccgctggttcggctgttcacgggtgaactcggtggtcgccagctccgtgaccggcgccttcctgatgatttcgctcgccaccgtggcgatcacccacgatccctatatcaccatcgtactgatttcaataggcggcttcggtcaccagattatctcctgcatgctcagcgcgctggtggtggagtcgttcgataaaggacagatggcgaccgtgaacggcatgcgcggatccgccgcgtggatcgccagctttctgttctcactgttaattggggtcaccgccgacaaaatcggcttcaacccgctgtttatcgccatggggttctttgacctgattggcgcggtattcctggtggcatttattgctgaacgtcgcgcaaaacgcgcctga

SEQ ID NO: 253996 - DNA, 2364 bp, Klebsiella pneumoniae
atgaagactttgaaaaactggactttacgccaacggctggagcaccacgttgagctgaccgtcgacggccaacacaccctgtgtctgtacgttctggaagagaatatgttccgcgtgctgctgaaacggcacggtcagctggcggtggatcgcacctggagtatcgctcccggacaggatgtgccgtgggaaggccgtccgcgcgaagagctaagcggctttagcctccccgcctggcagctcacggaacaggaaggcaccctctgtatcgtcaccgaacagctgcgcgttatcgtccaccagccgctgtggctggaatggagctatcgcgatgaagccggcgagtggcagccgctggcgaacgaccgcccgaccagcgcctatctggcgaatgcgcacggcgacggcgttgcccactacctgagccgacgtaaagatgagcgcttctacggtctgggtgagaaggcgggcgatctgcagcgtaccggcaaacgctatgagatgcgtaacctcgacgcgatggggtataacgcggtgagcaccgacccgctgtataaacatattccatttaccatcgcgcagcgtagcgatgtcagctacggcctgttttacgacaacctgagcagctgctggctggatctcggtaacgaaatcgataattaccataccgcctatcgccgctggcaggcggaagctggcgacatcgattactatctgttcaccggcaagcgcgtactggatatcactaaagccttcgttcgcctgaccggtaaaacgctgtttgggccaaaatggagcctcggctatagcggttcgacgatgcattacaccgacgcgccggatgcgcaaaaccagctgatgaactttatccgtctgtgcgatgaacacgccattccgtgcgattcgtttcagctctcatccggctatacctcgattaatggcaaacgctatgtctttaactggaactacgataaagtgccgcagccgcaggtgatgagccaggccttccacgatgccgggctgaagctcgccgccaatattaagccctgcctgctgcaggaccatccgcgctataacgaagtggcggaacgcgagctatttattcgtgattcacaggccgatgcccccgagcgctccagcttctgggacgacgaagggtcgcacctcgactttaccaacccgcagaccgtcgcctggtggcaggaaggcgtgacaacccagctgctggagatgggtatcgacgccacgtggaacgataataacgagtatgaagtgtgggacggcgaagcccgctgttatgggtttggccaggagattgccattaaacatattcgcccggtcatgccgctgctgatgatgcgcgcgtcgctggaggctcagcagcgctttgcgccgcacaaacgtccgtatcttatctctcgttccggctgcgccgggatgcagcgctatgttcagacctggagtggtgataaccgtactaactgggacacgctgcgctacaacacccggatggggctgggaatgagcctctccggactgttcaacgtcggccacgatgttggcggcttctctggcgataaaccggacccggaactgttcgttcgctgggtgcaaaacggcgttatgcatccgcgctttaccattcactcatggaatgacgaccagacggttaatgaagcgtggatgtatccggaaatcacgccggccatccgtgcggccattgagctgcgctatcgtctgctgccgtacctctataccctgctctggcaggctcacgccgacgatgaaccgatgctgcgcccgaccttcctcgatcacgagcacgatccgcagacgtttgccgaatgcgacgacttcctgttgggtcgcgatctgctggtcgccagcgtcgtcgagcccggtgagcgtcagcgccgcgtctggctgccggctaatcaggacggctggtacgactttgatagccaccagtggttcgccggcgggcagtggatcgtccttgatgcgccgctggaaaagctgccgctgctggttcgtgccggagcaggcctgccgctcagcgaacgcatccgtcacgttgatgcgcaaaaagacgatcgtcgtgagctgaaactgttcccgctgaaaggcgtgggaacccgccgcggcctgctgtttgaggatgatggcgaaagctggggttaccagaagggccatgcgctgtgggtagagtgggaaatggtttgcgatagcgccagcatcaatctgaagttcaacgcgcgcggcgattatcgaccggcgtggaaagcgttgaaggtgtcgttaccggcaggggaaacccgcaggctgctggtgaatggtgaagaaaagagcgagtggcgggtgtag

SEQ ID NO: 253997 - DNA, 2460 bp, Klebsiella pneumoniae
atggatgtttacgaattaatagatattgaagtaaaaaaaagcattttacactccagtgactatgatacaactgaactactaaggcttttagatattgtctatgattatatttatgagtgtcgagatgctgatctaattagaaagtccataaataaaatatcaaatatttttcattctgtgggcgataattctgttgtggttttgacgtttgtattaatgaataagttgagtgatcttaatggaattaaaatactgaaatattcagagagtcatgtagaacctgatttggataagcttaaagagtttattaaaaatgaaataattgaaaataatggtgtgtttgattttttcaatcacaagaaaggttcaacaaccctcggtaagaataagttgtacgcttctattttgtctatgttaagacataatctacaaagtaccattaaagatgatgtcgatataaattgttccttggtgttattaataaatatgtggatattatcaccgaaagtagataggctttatgaattctacataattttttgctcttttttgcataaactacaccttagtcagaaaacacaaatggtaagggatttagcagaaactgcacttgtattaggttttcgagacaagaggttgaattattcattttatgtaagaatggctgtttattctcggcaatacaatgttattgactcgcttttgtcagcacagcttatgttgcacggatataattatattcaccaggaaaatgaaatttttctttcgaagtctcttctggagttggctataacgttacgtaacttccggctttaccctttcgttgaacgagttaaacaagcgcatgatcaattaaatattgaagatagatatgataaacatcagtttgatatggcaatatttaatatgaaattattaatggaggatgaagggctatttgaattggttgatgagtatctaaatgataatgatgttttggaattcgatgttgcttctggaataccatggatagttttattattgaacttaaagagaagtgatatttcacggttcgaaaattatcagaatttaattcagtcactgagtagactcgaatcaaatgaggaaatttataataaccctgtggtagaggattataggaaggccatgtccagtacagtctctgaaaacaaagaagcagtacagaaaggcatttcaaacatacttcaatctcgaagctttactgacgtaaattatgagcttactatgctacagccagctgtcataaatctactcaaaaattcgatcgcatcagatgatatagaaggggttttaatcgcgcattctttgtcctctggtgcctcagggttcgatattagcactgaagaagcaatgacggagtttagccctctaaaaaaagtgttcaatatatcttcgccaacaatatttgatggttatttgagccatctatcaaaactgatagagcaatcagatatgtcagtttttatatgggtcggatgctgtgatgatttttgttatagcgtcagtctaaaagaaagacgattttctctatatataaacgatacttttaataaaaatgatttaagaaattgggaggctacgcaaacagaattacttgcttttaatgatcagcctaatctagagtccatattggattctaacatcaatcactgggagttagagtctcgtgtaataattgaaagtctgccagctttgactgatatacatgaggctagaaatatagttttgtttcgtgatgttaatatgtcgcatttgccgtctaaccttataaaaacaaccgcgggaatattactcgctgatttggcccctttgcatactccctctacagttgagtcgtatattaaaagcgagtcatttattgttgggtacaaaaatatcaagctttgggctcctgtcgaagagggtgatttcgcaatcaatattgcttatgataaaattcaatctttatttaatgatgcatcattgttaaaaataacttcgcttgattctagaattgaacttaatacagatatcaatatatttatttcgcatggaggaaaggatgggttatatggatttaaaagtatctcccctgccgaaggtaaatattttataaatgaaaatgatgtttttggacgaggcaaagtagctattttatttatatgtcattcaggaagttctaaatcatctatgtttgctacgaaaccagatgggctggttagtaaaattttagagttaggttatgaatgtgtattagctccagcttggagttataatgttattcttactggtatctggacaagaagcttcgtcgatgctttaaatgatggtaagaatctgtctgaatcaacatattatgctaataagtccgttaagtctgagtaccctggcgtgggagcctatgctgcgatgcacctatttggtaatgatggtttaattttagttaacgatcggagctga

SEQ ID NO: 253998 - DNA, 1203 bp, Klebsiella pneumoniae
atggcaattaaattagaaatcaagaatctctataagatatttggcgagcacccgcagcgggctttcaaatatatcgaaaaaggactatcgaaagaacaaatactggaaaagacggggttgtcgcttggcgtaaagaacgccagtctgaccattgaagaaggcgagatattcgtcatcatggggctctccggatcggggaaatcgaccatggttcgccttctcaatcgcctgattgaacccacccgcggccaggttctgatcgacggtgtcgatatcgctaaaatctctgaggccgagcttcgcgaagtgcgcaggaaaaagattgcaatggtttttcaatcatttgcccttatgccgcacatgaccgtactggataatgccgctttcggcatggagctggccggcgtgccgactcaggaacgccaggagaaagcgctggaggcgctgcgtcaggtaggtctggaaaactacgctcacgcctggccggacgagctctccggcggcatgcgtcagcgcgttggtctcgcccgcgcgctggcgatcaaccccgatattctgttaatggatgaagccttctcggcgctcgatcccttaattcgtacggaaatgcaggatgagctaactaaattacaggccagacatcagcgcaccgtggtatttatttcccacgaccttgatgaagccatgcgaattggcgatcgcattgccattatgcaaaatggtgaagtggttcaggtcggtacgccggatgaaatactcaataatcctgccaatgattatgttcgaaccttcttccgcggcgtcgatattagccaggtattcagtgccaaagatattgcccgccgtagtccggttggactgattcgtaaaacgccaggtttcggcccgcgttccgcgctgaaattactgcaggatgaagaccgcgaatatggctacgtcattgaacgcgggaataagtttgttggcattgtttccatcgattccctgaaagccgcgctgagcgagggtcagggaattgatgcggcgttaatcgactccccacaggcggtggatgcgcaaacgccgctcagcgagctgctctctcacgtcggccatgcaccgtgcgcggtgccggttgtcgatgaagggcaccagtacatcggcatcatttcaaaacgcatgctgctgcaggctttagatcgcgagggggcaaacaatggctga

SEQ ID NO: 253999 - DNA, 963 bp, Klebsiella pneumoniae
atgacccatttatcgcgcgtcagcgccatcaactggaacaaaattgaagacgataaggatctggaggtctggaatcggctgaccagcaacttctggctaccggagaaggtgccgctgtctaacgatatccccgcctggcaaacgctttccccggcggagcagcagctgacaattcgcgtcttcaccggcctgacgctgcttgataccatccagaataccgttggcgccccggcgctgatggccgacgccctcaccccgcacgaggaggcggtactgtcgaacgtcagctttatggaggcggtacacgctcgctcctacagctccattttctctactctctgccagactaaagacgtcgatgccgcttacgcctggagcgaacaaaacgcgccgctgcagcgtaaagcgcagctgatgctggagtactaccaggctgatgaaccgctgaagaaaaaaatcgccagcgtttttctcgaatcattccttttctattccggcttctggctgccgatgtacttctccagccgggggaagatgaccaacaccgccgatctgattcgcctgatcatccgcgatgaagcggtacacggttattacattggctacaaattccagaaagggctggaaatagtcagcgccgagaagcgtgaagagatgaaaaacttcgccctcgatctgctgatggatctgtatgacaacgagctggcctatacccgcgagctgtatggcgatagcggctgggttgaagaggttaacgccttcctgtgctataacgccaacaaggcgctgatgaatctcggctacgaggcgctgttcccggcggaaatggctgccgtcaacccggcgatcctcgctgcgctttcgccgaatgccgacgaaaaccacgacttcttctccggctcgggttcgtcgtatgtcatgggaaaagcggaagaaaccgtcgacagcgattgggacttttag

SEQ ID NO: 254000 - DNA, 2145 bp, Klebsiella pneumoniae
ttggcaacgacaaccgcagaacgtataaccaccgaggcgccggatttccatgccctcaacgcgatgctgaatctctacgacagcaatggtcgcatcccgtttgacaaagatcgccaggcagtggcggcgtttatggtcaaccacgttgagccgaataccgtgcccttcgccagccaggacgacaagctgacgtggctggtcgccgaaggctattacgatgccagggtcctggcgcgctacgatcgccagtttattcttgagctgtttacctatgcgcaaaacggcggtttttgcttccagacctttctcggcgcatggaagttttataccagctacgcgctgaaaacctttgatggtaagcgctaccttgaaggctttgccgaccgcacctgtatggtggccctgagcctggcgcagggtaacgaggcgctggcccaccagctaaccgatgagatcctctccgggcgtttccagcccgctacgccgacgttcctcaacgccggtaaacagcagcgcggcgaattggtctcctgtttcctgctgcgtatcgaagataatatggaatcgattggccgggcggtgaattcggcgctacagctatcgaaacgcggtggcggcgtggcgtttctgctctctaatcttcgcgaagccggggcgccgatcaagcgtatcgaaaatcagtcctccggcgtcgtaccggtgatgaaaatgctcgaagatgccttctcctatgccaaccagctcggcgcgcgtcagggggccggcgcggtctatctgcatgcccatcatcccgatatcctgcgtttcctcgataccaaacgcgagaatgccgatgaaaaaatccgcataaaaacgctctcgctcggggtcgtcattccggatattacctttcagctagcgaaggaagacgcgcagatggcgctgttctcgccctacgacgtcgaacgtctgtacggtaaaccgttcggcgatatcgcggtaagcgaaatgtatgcgcaactggtggccgacgagcgggtatgcaagcgctggatccgcgcccgcgatctgttccagcggctggcggaaattcaatttgaatccggctacccgtacatcatgtttgaagacacggttaaccgcgcgaacccaattgccgggcgcatcaatatgagcaacctgtgttcggagatcctgcaggtcaatgcgccttccacctttgatgaaaacctggattacgccagcatcggccaggatatctcttgcaacctcggctcgctgaatatcgcccacaccatggactctcccgactttgcccgcacggtcgaagttgccgtgcgcggtctgacggcggtgtccgatatgagcgatatccgttcggtgccgtcggtcgcggcgggcaatgccgcttcacacgccatcggcctcggacagatgaatctgcacggctatctggcgcgcgagggcatcgcctacggtagcgaggaagggctggatttcaccaatttctatttctataccattacctggtacgcgctgcgcacttcaatgctgatagcacgtgaaagagggacccgttttgccggattcgagcagtcgcggtacgccagcggcgactatttccggccctacctggaaggcgactggcagccgaaaacggcaaaagtccgcgcgctgtttgcccgctccgcgataaccctgcccgaccgcgatatgtggcggcagctgcgcgatgacgtgatgcgctacggcatctataaccgcaacctacaggcggtgccgcccaccgggtctatttcgtacatcaaccacgcgacctccagcatccatccgatcgtgtcgaagatagagatccgcaaggaggggaaaaccggacgcgtctattatccggcgccgtttatgaccaacgacaacctggcgctgtatcaggatgcttacgaaatcggcccgcagaagatcatcgacacctacgccgaggcgacgcgtcatgtcgatcaggggctgtcgctgactctgttcttccccgataccgcgaccacgcgcgatatcaataaagcgcaaatttacgcgtggaagaaaggcatcaaaacgctctattacatccgtctgcgccagctggcgctggaaggtaccgaaatcgaaggctgcgtgtcctgcgcgctgtaa

SEQ ID NO: 254001 - DNA, 411 bp, Klebsiella pneumoniae; identical to SEQ ID NO: 173588

SEQ ID NO: 254002 - DNA, 246 bp, Klebsiella pneumoniae
atgcgcattactatttacactaaaaatgactgcgtgcaatgccatgccacgaaacgggccatggaaacccgcgggtttgagttcgacatggtcaatattgaccatcatcctgaagccgtcgatatgctgcgcgagcaaggcttccgccagctaccggtggtgattgccggggagacccgctggtccggcttccgtcccgatatgattaaccgcctgcgtccaacagcctcagcggccagcctatga

SEQ ID NO: 254003 - DNA, 432 bp, Klebsiella pneumoniae; identical to SEQ ID NO: 173586

SEQ ID NO: 254004 - DNA, 1362 bp, Klebsiella pneumoniae
atggatgccaaaaaaatcccgcattaccagcgtatcgcccgacagctcaagcaggcaattgagcgcggcgagctggcgccgggcagcaggctgccggcgagtcgggtctatgctcaggagcttggcgtatcgcgagcaacgattgaaaacgcctggggagagctggtagcgcagggctggctggagcggcgcgggcaggcgggaacctttgtcagcgatcgcctcagcccacagcaaagcgtgcctgaacgctctgttaccggcgatgaaccgacggcgccgctgccgcttcagcttgggctgcccgcgctggatctgtttccacgcggtctgtggacgcggatcatggggcgccggctgcgtacgcaaacgcgtttcgatctcgcgcccggcgatccctgcggggacccgacgcttcggcaggcgatcgtcgattatttgcgcctgtcgcgcagtatagagtgtcgtcctgagcaggtgctggtgacgggtagctacgcggcgtcgatgagcctcattctgcgaaccctgtcccggccgggccagcaaatgtggatggaggatccgggatttccgcttatccggccgatcgtgagcggcgaaggggtggcgatctgcccggttccggttgacgaagacggaatggatattggctgggcgcagcggcattacccaaacgcgaattttgcgctgctgacgccggctcatcaaagcccgctcggcgttgcgctctcattgacccggcgcagacagctcctgctatgggcggcgcagaataacgcgtggattatcgaagatgattacgatagcgaattccgctatcgcggcaagccgctgccgccgctaaaaagcctcgacgccccgcagcgcgtcatctacgccggtgcgttcagtaaaacgtttttcccggcattacgcgcagcgtggctggtggtgccggaaccgctggtggcgcagtttcgccaacaggcggcgctgatgagctgtagcgtgccgacgttgtggcagcagacgctggctgattttatccgcgaaggccatttctggcgccatctgaagaaaatgcgcgccagctatgctcagcgtcgtcagtggcttgaatcggcgctgcgggagcacggtattgtggtggatccgcaagcgggcggcattcagatggtcgtcagggtaagcggcgacgatcgtcaactggccctgcgcggcagacaggccggtctggccatccaggcgttaagcgactggcgaatggatagccggggagaaggggcgctgctgatgagcttcaccaatttaacctcagcggagatggcgggcgaggtggtacgaaagctgactcgggctctcgcttctcaggacaaataa

SEQ ID NO: 254005 - DNA, 327 bp, Klebsiella pneumoniae
atggccaaccgagcaaaccgcaacaacgtagaagagagcgctgaagatatccataacgatgtcagccaattagcggatacgctggaagaggtgctgaaatcatggggcagcgacgccaaagacgaagcggatgccgcgcgtaaaaaagcgcaggcgctgctgaaagagacccgcgcgcgccttaacggcaacaaccgcgtacagcaggcggcatgcgacgccatgggctgcgctgacagctacgtgcgcgacaaaccgtggcaaagcgttggcgctgcagcagccgttggggtatttattggcgtattgttgaatttacgtcgataa

SEQ ID NO: 254006 - DNA, 351 bp, Klebsiella pneumoniae
atgtatttaagacccgatgaggtggcgcgagttcttgaaaaagccggcttcaccatggatgttgtgacgcaaaaagcctatggctatcgccgtggcgataattatgtttacgtgaaccgtgaagctcgtatggggcgtaccgcgttaattattcatccggctttaaaagaacgcagcactacgcttgcggagcccgcgtcggatatcaaaacctgcgatcattacgagcaatttccgctgtatttagcgggagacgctcagcagcattatggtattccacacgggttcagttcgcgcatggcgcttgagcgttttctgagtggcctgtttggcgaagcgcaatacagctga

SEQ ID NO: 254007 - DNA, 450 bp, Klebsiella pneumoniae; identical to SEQ ID NO: 173582

SEQ ID NO: 254008 - DNA, 402 bp, Klebsiella pneumoniae; identical to SEQ ID NO: 173581

SEQ ID NO: 254009 - DNA, 180 bp, Klebsiella pneumoniae; identical to SEQ ID NO: 173580

SEQ ID NO: 254010 - DNA, 501 bp, Klebsiella pneumoniae
atgactatcgctacactttctcccgccgaagcccgggcgctcatcgccagaggcgcccggctggtcgatatccgcgatgccgatgaatacgcccgtgagcatattcccggcgcacaactcgtcccactggaaaccttgaacaaaggcgcagcgctgcacgccagccccgaggagacgattgtttttcactgtcaggcaggttcgcgcactcagaataacgccgcccgtctggccgcctccgccgcgccggcgcaggccaggctgctggctggtggaatacaggcctggaaagcggcaggtctgccggtggaagaggataaatcacagccgctaccgctgatgcgtcaggttcaaatcgccgcaggcgtcctgattttgcttggcgtcgctttaggttatacggttaacagcggctttttttgcttagcgcattcgtcggcgccggactcgccttcgccggtatcaccggcttttgcggcatggcgcggcttttggcgctga

SEQ ID NO: 254011 - DNA, 300 bp, Klebsiella pneumoniae
atgaatacaccagaacagctacaggccagcgcgggcgaagccgccgcgctgctgaaagccatgagccatcccagcaggcttttgattctgtgcatgctgtgcgattcgccgggcaccagcgccggcgagctggcgcggatcaccggattaagcccctccgccgcatctcaacatctggcgcgaatgcgcgatgaagggctgatcggctgcgagcgccaggcgcagcggatccactacttcattacgcggccagcggtgcagcaaatcgtcaccgcgctaaagtcaatttactgtccttaa

SEQ ID NO: 254012 - DNA, 717 bp, Klebsiella pneumoniae
atgaatgttgtgaggctaaatagcctggctgaatccatgacgattctttggctccgggttaagcgtaacttaagccaggtcagcgataatgacgaaaatatgaccgcacgagctaccgccatgaacgtactggaaaccttaaatcaaagcctctttttagcactgaatgcctcgcccggctcaccggacgcgatcctgttattggctcgggttgctgcgagcggaacgatcttcatggtgccgaccgttctgctctggctgtggttttccggagggcaccaggggcatcgacaggcgctgttttgtagcttgagtattcttatcgcgctggggctgggagccatctgcggaatactgtggtttcatccgcgtccgtttatgatccctctgggccatacctggatagctcatccggcggataacggttttccgagcgatcacggtacggtgatgtttagcgccgctttggctttattgtcggcgcgcgcacgggcagttgggatactgttgctgctggcggcgctggccgtggcctgggcgcggatctttcttggggtacatttcccgctggatatggtgggggcggtatttatttcagcctgcggcgtcggtagcgcgcagcttgtctggcagggcgtcgggcgacgattaacctctctgtgcgaaacgataagtaaacgcctgttcgcctggctaccgccgcgcttcacgccctga

SEQ ID NO: 254013 - DNA, 1776 bp, Klebsiella pneumoniae
gtgccaggaaatccatttgccctgacgccagagatcaaagcgagcccgctgctgagcgactcctggtgccgcagccagcgctatggcatcgaccccgctactgacgacttccctcgcctgcacgccagcgagctggccgacaggctcgccagccatagccgtctgcaaaagctggcccagccggtggttaatgccttgtccagcaaggtcaacgatctgcaatcggtggtgatcctctctgacgccagcggactggttttgcaaacctttggtgagacgcaggccatgcagaaagcgcagcgcttcgctttagccccgggcaacctgtggagcgaaagcggacgcggaaccaacgccatcggcaccgcgctggcgatagacgacagctgcgaaattgatggccgtcagcatttcctcaccagcaaccagggcctgtattgcgccgccgtaccgctgcaaaatcccgaggggaaaatagccggggtgctggatatctccggcccggcccactatccgcacgcccggacgctggcgtgggtaaaaggcgccgcgaagcaaatagaatatctatgggtgaaacagagtctgcacccgcagcagtggctgatgagcctgcatccccgggcggaaaaactcgacagcgtagacgaacggctgctggtctttaccgataacgtgctgacggcggctaaccggctggcgatgcgcgaattcgaccttgacgccgcccggtttggtcatctcactttccagcagctttttccgcagctgcggcaaaccgccgttagtatcccgctgccggtcgccgtcggagggcacaactactattaccgtctgcgtgctcccgcgaccgccagcgtggcgacgaccgcgcgcccggcactcgatctgccattctccagcccgcatgaatcaaaaaagctgctgcgtctgcttaatgccgggattggcttatgtatcgaaggagagaccggctgcggcaaagagtacgtcagccgcatgctgcaccggcacagccgctggagcagcggcaaattcgtcgccatcaactgcgccgctattccggaatcgctaattgaatcagaactgtttggctaccagcccggcgcgtttaccggggcaaacaaaaacggctatatcggcaagatccgcgaggccgatggcggcattctttttcttgatgaaattggcgatatgccgttagcgctacagacccggctgctgcgggtcttgcaggagaaagaggtcacgccgctaggcgccagccggagctcgccggtgaacttcgcggtcatttgcgcgacccatcgcaacctggcgcagcgggtggccgaaggcgtcttccgcgaagacctgctctaccgcctgcgtgagtttgccctgacgctgccgccgctgcgcaagtggcctgaactgcctgcgtttattcagcggctgtggcgcgagcagggcggagagaaacgtcgcatcacgctggccccggaggttatacaacggctggcggctcagccctggccaggcaatgtgcgccagctgcaaagcctgatgagagtattgctggcgcttgccgaagatggcgaaacgctgggggtcgatgatttgcctcatgagtaccgaaccccgaccgccgcgccgggtgggctacagcagcacgatgcgcagctgattgccgacaccctggcaagctataacggcaatatcactaaggccgcgcaggctttaggcgtcgcacgcagtacgctctatcgccgcgccgcccgccgcggaggccagtga

SEQ ID NO: 254014 - DNA, 597 bp, Klebsiella pneumoniae
atgaaaaagcaatttcgtattatggcaatgtttgtcggtgctctggtgtctggcagcgcattatccacgccttcacagccggccagttcggcaatgaccgtgaatcccggctcgaatgcgggcacgcaaggaacgggcggtcaggtggaatttaccggctccattaccgactcctcctgtaatgttgatagcaccagcgcgaatcaaagcgtcgatctgggaaaatgggcgagcagctattttaccggcacgggttcagaaaccaccaaaacctcctttcatatcaaagtcaaagattgtccttccaccgtcaccaccgtctcggtgctgtttgacggtacccgcgatagcaacaatagcgatctactggcgattaacggtaccgcaaaaggggtagcgattaagctgtatgaagatgacaaatcgacgccggttgagcttggcgacgtttctcgcggccatagcgttaccgccggtgccagcggcaccactaccggaaccgccgatctcgaattctttgctgactatgtctcgaccagtgcggttaccgcgggttctgccaacggtacagctaacttcaatatggtttacaactaa

SEQ ID NO: 254015 - DNA, 666 bp, Klebsiella pneumoniae
atgattatgaaacgaacgatcgccgcgctagccttgttaatattatccaccgcggcccacgccggtattgtcatgggaggaacccgggtaatctatcaggaagggaagcgagaggccgcaatatcagttactaatgcagatagccattcgccttatctggtgcaatcgtgggtggaaaattatgcggagaataataagagccgggtgccgtttatcgttacgccgccgttattccggctcgatccagaacagcagaacgtgttgcgtattaatttcattggcgcaacgctgcccgcggatcgggaatcggtattttggctcaatgtaaaaagtattgcgccaacgaaaaaagatgaagtgaataagctacaggtcaatattaaatcaaaatttaagatcttctatcgcccgaatggcctgacgggtgaaccagccgatgcatggcgcaagctgacatttaaaattgacggctcacggctggtagcacaaaacccgacgccctattttgtttcattttttaccctttcggtgggcggcaaggagattactgaacccggcatgattggaccctttagccagcaagagtggccgattcatcgcaccggcattattaagtggcgcgccattaatgatttcggcgggatgacggatttcgcgcaacagtaa

SEQ ID NO: 254016 - DNA, 2544 bp, Klebsiella pneumoniae
gtgaaaaataacccctctggtatgacttccggttatacggcgatcgctgcgccaaccggcgggatttcattattagcgacggtgccgacggcgcttttcctgctttgtcaaagcggcatcgcgcgggcggatgagtacttcgatccggcggccttagaatttgccaatccgcagcaaaagaccgctgacttacgctattttgcaaaatcaggcggccagcagccggggacttattcagtcagcatttgggtgaataatcaggaaataacccggggcgaggtgacgtttatcgacagcaacggcgcgctgcagccgcagttaaccccggcgcagctggcggaatatggcgtgaacgtcagcgctttttctgcctttcaatcgctgcatgaggggcaagcgttcacccacatcgagcgctacattcctgatgccagtagccgtttcgattttgccgatcagcgcctgatcttaagcattccccaggcggccatgaacgtccagagccgcggatacgtggatccagcgcgctgggacgacggtatcccggcggcgtttgttaactacaacctgaccgggtcgcaaacccggcagtcggatgacaatagccaatccagctatctgaacctacgcagcggggttaaccttggggcctggcgcctgcgcaacgtatcgtcgatggagtacgatcgcacccggcgctggaattcgcagagcacctggctacagcgcgatgtgaaatccctcaaaagcctgctgcgaatgggcgatacctttacgaccggcgacgtttttgacagcgtgcagtttcgcggtattcagctaatgtccgatgatgaaatgctgccggacagccagcgcggcttcgctccaacgatccgcgggatggcgcatagtaatgccaaggtgacgatatcccagcatggctacgtgatctatgaaacgttcgtctcgccgggggcgtttgcaataaacgatctctatccgacggcgcaaagcggcgacctcgaagtccaggtgaaagagagcgacggttcggtgcgaacctttacgcaacctttttcagccgtaccctttatgctgcgcgaagggcgggttaaatacaacctgagcgccgggcgcttccgttcagcgcagcgccaggggcagtcgccgacgtttttacagggcacgctgttttatgggctaccggctgaattcacgctctacggcggtagccagctggcgcaggattaccagtcgtgggcgcttggcatcgggcgcggtttgggcgaactggggtcgatcggaggcgatgcgacgtgggcaaacaccacagcgccgtcgggaaagcgctcggcaggtcattcggtgcgcgtgcagtatcagaaggattttgccggcacggggacttcattcagtctcgccagctatcgctactcctccagtggctactatgacttcagcgaagcgaatgcgcttgaaagccgcaacgggctgctcgacaacaagcgcagccgcgaagaaatatcgctttctcaggcctttggcggtatcagcagcctggcgatatccgcctggtcgcaggagtactggcacagtcatagccgcgatgaaacgctgcatctcggattttacagcgcctggcgaggcgtgacgtggggcgtgggttattactacacccattcatccgatcgacaaaaagccgatcgttcgtggtcctttaatctgagcgttccgcttttcggcccgctatccgagagcgcgatcagctacagcatgacctccgacaatagcggacgtacttcgcagcaggcgtcgctgttcggttcgcttccacatcatcccaatctctactactccctccagcagggctacgttaacggcggccagggcagtaacagcagcgccgcactggattaccacggcggctacggaaccgcgcagctcggctatcgccacgatagcgccagtcagcagcttacctggggcgcatcgggctccgttgtcgcccatcctcatggcgtgacgctcgggcagaccgtcggcgaaagctttgccatcgtgcgtgcgccgggcgctgcagaggtggcgattcagaacggcagcaatgtgcataccgactggcgaggctatgcggtggtgccttcgctgacggcctatcgcaaaaataccattacgcttgataccgaatcgctggccgacgatgccgatgtcgaacttgaaggacagacggtgatccccggcggcggggcggtggtgcaggcgaactaccagacccatatcggcagccgcgtgctgtttaccctcagcgatagtcacgggccgctgccgttcggcgccagcgttcgcttgcggaaagctgaagacgatcctggcggggccccgggcggcatggtggccgacggcgggcaggtctatctgagcggcattccgcaggaagggacgctggatgttgcctggaatgccgacaacatctcacggagatgcgcgctgcatttccatcttaccgataccgtacagcagaggcagagtccggttaaaaccgtctctggcttctgccagtag

SEQ ID NO: 254017 - DNA, 1095 bp, Klebsiella pneumoniae
ttgcgcatagtatcgtttttattcctgctgatagcgggcatctatagccacagcggctgggcggaaacctgcaaaggggatatcggccagatgaccgttaacgtccagaatatcaagtacctgcccacgctgccgctgaatacgcagatgaccggcgtgatggcggataacggcagcgggattcatttctcctgcgatcttcaggtgccgaaagcggcggcaaagcgtctggtttatcggcagctaaaaacggcctcatcgccgctttccatcggcggtcagcacgtgttcccctcggcgctggagggtatcggatactcactgggcttccagtgcagcggcggcgcggttcgctttattgatggcagccacgcggctgataatgcggagtccgtgacggtgtgtgacagccaggagatggctaacctgctgaaccagcagcagattgtggtgaaagtctttgtgacgttttataagaccggggacgtcgccctggtcagcggtaaccacgctaacgttccggcgcagccgcagattggcgaactgacgatccagcagcaggccgacagccgcgccggttttgtcgccagctcgccggtcacgctcgatatggcggcgctgaacgtcgatatcggcagcagcggcagttgtcaggtttcaaccacgaatattcacgttagcctggggacggtgaataaagcggagttcaagggcaaaagcaccaccggcggcagcgcgaaaagcttctccataccggtcttttgctccacgccaaccgatatccgcataggcttttttggcgtcacctcaccaggcggcggtacggataccctcgcgttaagcaaagccaacgcctctgcgagcggggtgggcgtcaggctcacgtacggcaataacagcgccccggcgcctgcggcagggaccagcgtcaaaatcaacgaggccagcaatctcccggtgctaaagcgggttaacgccagcagcgccggcagcgcggagaatatcaacttcaacgcccagtacgttcagaccgatgatgcggtgaccgccggcaccgccaatagcatggtgacctttgcgctggagtataactga

SEQ ID NO: 254018 - DNA, 795 bp, Klebsiella pneumoniae
atgaaaatcacctttggggagcttaaacccctgttgcaggcgcagcgaatttttgtcggcgggcagaagctggtctgcgcccacgccttttaccgtgacgatctgccgatcgagataccggaaaatttaaccaccgaggcttataccacctactgggggcgctgcggcgaacggctggcctcattgggcgcttttagctatacgcgaaccctgctgccggcgctgattaaagtggggcgctacacatcgattgccgaccggttacaggtacttggcgatcggcatcccctggagtgggccagcgccagcccggttttttatgcccatcactccggcgtgatggcgacgctggctgccgatagcggcaggcccaaccagttttacccttttgaaaaaactccccgaccgataaccatcggcaacgatgtctggattggccagaacgtcacactggcgcagggcatcactattggcgatggcgcagttgtcgccgccaacgcgctggtggtcaaagatgtcgcgccttacgccatagtcggcggtaacccggcgaaagttatccgcatgcgctttagcgaggcgattatcgagcagctgctggcgctacggtggtggcgtttttccgcccaggatattgccggctgtccggttaatcaggttgagcgcttttgcgagcagctcgccgggcaagcggccgacggaacgatctcgcgtttttcgccgccggtattgacggcatccatgattaaagattttatgaacgataaacagaatccgctgcgcagcgcaggataa

SEQ ID NO: 254019 - DNA, 774 bp, Klebsiella pneumoniae
atgaagttgaagtcaggtattgctttcgtcatcgctgctgtcgccttcggcgcccaggcgcgcgacatgaacagcattcaacaaagcggcgaacttaaagtcggcgtaccgggagattacgcgccgctggcgtttcataataaagccggagaactgctgggatacgatgttgatatggcgaaggatctcggcaagcggcttgggctaaaggtaagctttgtgccgaccagctggccaacgctctctgcggacctgaaagcggataagtttgatattgctatgggcggggtgacggaaactgcggcccgggcgaaggaatttgccttaagccagccggtcgtgccgaacggcaaaattgcgctggctaactgcgcggcggcgcccgctctcggcagcctggaaaaaatcgaccaaccaaacgtgaaggtggtagtgaacccgggcggcaccaatcaaagctttgtggatgaacatctcaagcaggcgcagattattcgggtgaaaaataacgtggataaccttgaagcgctgcggcagaaaacggcggatatgatggtaaccgacctgatcgaaggcgtgtattaccaaagcaacgaaccgggcgtgttttgcgtggccaatgagcaacccttcccgggcaccgccagcttcaaagtctatatgatgaataaagataacccgcagctgctggaaaaggtaaatcagtggctggatagccaggacaaaaatgtgctcaaacagaagtggcgcatccatgaccaggtcaacccataa

SEQ ID NO: 254020 - DNA, 777 bp, Klebsiella pneumoniae
atgaacacagcgtttgccggtaaaaaattgttagtggttggcggaaccagcggtatggggctggcaacggccagacgggttgttgaacagggcggtcaggtcgtgctggtgggcaatcgccagcagaaggctgagcaggcccgtcaggcgctggcggctgagggtaacgtggagatcatcgtcgctgacctgatgagcgaagcgggtatggcgcgggttatggagagcatcaacgcgaaacatcaggatatcagcctgctggttaacgccgctggcgttttcttcccgaagccgttcatcgaacatgaaatggccgattacgatcggtatatgaatctcaaccgcgcgaccttttttatcacccgcgacgtggtgcgcaatatgctggccaataatatcaaaggctcaattgtgaatattggatcgatgtgggcgcagcaggcgattggcgcaacgccgtcgtcagcctactcaatggcaaaagcgggtctgcatgcgttgaccaaaaatctggcaattgagctgggcagcagcgggattcgcgtcaatgcggtatctccggcggtagtgcatacaccgatatatgaagcctttctacctgaagatgctgtgaaggatgtgatgaatagcttcgacggcttccatcctattggccgcgtcggtacgcctgacgatatcgcgcaaaccgtagcgtttctgcttagcgatagcacccgctgggtgaccggcgcggtatgggatattgatggcggcgtgatggctggtcgaaatgcctga

SEQ ID NO: 254021 - DNA, 1179 bp, Klebsiella pneumoniae
atgacgttgcccgtcaggcagcaaaaccagaatattgttcgcctggcgacggcgcaggcgctggctggggcaaactcggtggtgttctacgctaccggggcgattgttggcaacgccatcgcgccctctccaaccctggccacgctgccgattaccatttttgtgctgggcatggcggcctgtattttgccgtttggcgcgctggccagaaggcgcggacgcaaaacggtgtttatggtcgggaccggggccggtatgttgacggggctgctggcggcgacggcggtggtcatgagttcgttctggctattctgcatcgcggcctttttcggcggcgcctatgcggcggtggcggtttcctttcgctttgccgctactgacggcgtcagcggcgaacggcgcgcgcgtgcgctctccctggtgatggggggcggagtggcggcaggggtcatcggtccgatgctggtgaccggcaccatgaatctttggccgccgcacacctttgccatgacctttattgctcaggggctggtggcagcggtatcggcgtgggtattactgggagtaaaaaccgccgaaccggcggcgcaggtgacgtccggcgggcgcccgctgggcgaaattgtgcgccagcccgggttttcccgaacggtatttagcggcgcaatcgcctacatggtaatgaacttcctgatgaccgccgcaccgctttccatgcatatgcacggcctgtcgcagcaggcgtcgaatctgggtatccagtggcacgtaatcgccatgtacggccccggatttttcaccggcaaattgatcgctcgtttcggcgcccggcgtattaacgctgccgggttgattctgctggcgctctcggtgatggttggcctggccggtattgatgttatgcactactggctgttgctgatcctgctgggcatcggctggaattttggttttaccggcgcgtcgacgcagattatggatttccaccgaccggaagagaaaaaccaggtgcaatcgctgaacgattttatcgttttcggcgtcatgatgattggctcattttcctcgggcgcgttgatgaacctctttggctggaacgccgtattgtggggatcgctggtgccggttgtggttgcgctggcgctgctggtcggcgaaagggcagcgcgcaggcgctaa

SEQ ID NO: 254022 - DNA, 795 bp, Klebsiella pneumoniae
atgaatattgatctatcggggaaagttgcactggttaccgcctccaccggcggcattggtttcgccatcgccaaaggtctggcggcaagcggcgcggaagcgatcgtgaatggccgcagcgagcgtagcgtgaatgcggccattgcccgcctgcagagcgaggttcccggcgcgaagacccgaccggcgatagccgatctgagcgacgcagaaggcgtgaatcagctgatacaagcggtaaacggcatcgacatactggtgaataatgcgggtatttacggcccgcaggatttctatgccaccgacgatgcaacctgggaaagatactggcaaaccaacgtgatgtccggggttcgtctttcccgcgcgctgctaccggccatggtacagaaaggctggggtcgggtggtttttatcgcttcggaatcggcacgcaacatcccggcggatatgattcactacggggtcactaaaaccgctcagctatcgctggcccgcgggctggcgaaatatgttgccggcagcggcgtcaccgtgaacagcgtcctgccgggaccgaccctttcggatggctttgccgagatgatgaaagacgaagtcgctaaaaccggcaaatcgctggagcagttggccaaagagtttgtgatggcaaaccgccccagttcggtgattcagcgcgcggccacggtagaagaggtcgccagcatggtggtttacgtctgttcgactcaggcttcggcgacgtcaggcgcggcgctgcgcgtggatggcggcgtagtggatgatatcgtctga

SEQ ID NO: 254023 - DNA, 933 bp, Klebsiella pneumoniae
atgactccgttcactatcgtcgtggattgtaacgatcctcaatatgcccaggagatttgcgccgctttcgcgccatttccgcaggcaaaagcggtcctgcctgaccaccccgccgctcgcgaggcgcaatacgcctgctgctggtttcccgatccgcagatcctggcgcgatcgccgcagctaaagctgatccaggcagcgtccgccggcgtcgatcatctcccggccagcattttcgccagcgatgttccgctctgccgggtggttgacgatgattttcgccacggcatgtttgaatacgcgctgtggggcgtgctgtggtttcagcgccgctttgaccgggcgctggctcaccagcgcaagcgcatctggaagatgtatccgcagcgcgcggcggccgattatcacgttggcgtcatgggcctcggtgaaattggcggctatatcgcctcgcagctcgccgggatggggtatcgggtttccggctgggcgcgtagcgagaaatcccttgccggcgtgcgctgctttcacggcgacgcgctggccggtgaatttcttggtcagctggatgtgcttatcaacgtcctgccgttaaccgagcagacgcgaggtatcctcgcccaccctttactggatcggctccccaacggcgcggcgttgataaactgcggccgcggcgagcatatggtgaaccaggacgtgatccgggcgctggatagcggcaagttatccggcgcggtgctcgacgtcttccccgtcgagcctcttccccaggaagacccgctgtggcaacacccgcaggtagcaattacgccgcatatggcctccatcgcccagacggaggcgatcgcccgccagctgctggataacatccagcggctacatcgggcgctgccgctgaaaaaccgggtgaacaaacagagtggttattaa

SEQ ID NO: 254024 - DNA, 198 bp, Klebsiella pneumoniae
atgtattacctgaaccgcgcctgtgaaatccagatggccgccgcgcagctggcttcgctcggctccattcatacgatccccgatcgcctgagccagcacgcctgcgagcagctgatgggagtcgaacatgaacgccagctggtgtggcaggcgtggctgcgtcgcctcgaccgtcttgatacttcttataagagttaa

SEQ ID NO: 254025 - DNA, 804 bp, Klebsiella pneumoniae; identical to SEQ ID NO: 173562

SEQ ID NO: 254026 - DNA, 1077 bp, Klebsiella pneumoniae
atgaccgctgcaaaaagttcttttactgaattaccgaccatcgacatcagcgacctgacctgcgccgatctcacccgacgacaggcggtggccgacgccatcggtcaggcggcccgcgaggtcggctttttctatatcaccgggcacggcattgcgcccgagctgattgccggcatccgcgcggcggcgaaagagatttttgccctgccgatggagcgcaagatggcgtactacatcggacagtcgaaaagccataagggctacgttcccgaaggcgaagagatttacggctccggcaagccggatcgcaaagaggcgtttgatatcggcttccaggccgccgacgaccacccgttggtcgtggctaacacgccgctgattggcgccaacgaatggccggatatacccgaatttcaatcccgggtactggcctggtatgacgcggtcttctcccttggacatcgcctgtttgacgccttcgctctggcgcttggcctgccggaaggttatttcaggtcgatggtcacctgcccaccgtcaaagctgcgcctgatccactacccctttgacgccagcgccgaagatgttcccggtattggtgcacataccgactatgagtgcttcactctgctgctcgccgaccagccgggccttgaagtgttgaacgaagatagcgtctggatcgacgccccaccgctgaagaacgcgaccggagaagaggctttcgtgatcaatatcggcgacatgctggaagtgctgagcgctggcacatttgttgcaacagcacaccgcgtacgtaaggtgccgcaggaacgttactccttcccgctgtttttcgcctgcgactaccacacgctgatccgccccctgccgggcttccttaaggcgggcgaagccagcgagtatcaagaactgagcattggtgaacatatgtggagccaggcgttacagacctatcgctacctgcgcgagaaagtcacccgcggcgagctccagctccccgaacgcgcccgcggcaccaacacctttggccatctgaaaaaacaagcccagcaaaaaaccgttaataacccgtga

SEQ ID NO: 254027 - DNA, 849 bp, Klebsiella pneumoniae
atgcagcttaacgtctttcgcacgctgtggggcgtcaccaccccgtggcagcaaacggttagcgaactacagagcgtcggctgctgcggcatcgaagcgcgagtgccgctgacgacagaagagcagcgaacgctggcccggcgcctcgaagcgtccgcgcttcagtatatcgccattgtcttcagcggcggcggcgtcattccggcccaggccgagacgcccgcgcagcatctggagcgcttaaaagaacgttttgcggcggcaaaagcgcttaatccgcgcttcgtcaatctactggccggtaacgaccgctggccgctggcgcagcaggtggattttctcggcagagcgcatgaactggccgccgagtatgagctgctctgtagctttgaaacccatcgcgccacctcgctgtatagcccgtggctgacgctggagattattcaacagctgccgcagctgcgctttaccgccgatatcagccactggatcgtggtcagcgaacgcctgctggatgacccttgcgatgacttcagcgcctttatcgaacgggtccaccatattcaggcccgcgccggatacgaccaggggccgcaggtgccacacccggccgcgccggaatatcaggcggccctgcggtttcaacagcgcttctgggagcaaatctggcaatcgcagcgccggcgcggctaccagcacaccacgctgaccccggagtttggccccgatggctatctgcatcacctgccgtttaccaacgttccggtcgccgatctctggtcgctgaacgcctggatggcccggcgtgaacagcaacattttgtcgaattcacctcgctaactgcataa

SEQ ID NO: 254028 - DNA, 951 bp, Klebsiella pneumoniae
atggataacgtctttcatcaaccgcagggtggcaatgagatgccgcgttttggcggccgcgccacgatgatgcgcctgccatttattgaggatttacaggggcttgatgccgcatttgtcggcatccctctggatatcgggacctcgcagcgttccggaacgcgctacggaccgcgctatattcgtaccgaatcggtgatgattcgcccgtacaacatggctaccggcgccgcgccttttgattcactgtcggtggcggatatcggcgacgtaccgattaacacctatagcctgctcaaatcggtgcagattatcgaggattactacaccagtttgaatagtttttcgctcatccccctgacgctcggaggcgatcacaccattaccctgccgattttgcgcgcgttaaccaaaaagcacggtccggtaggtctgattcacgtcgacgcccacaccgataccaacgatgagatgttcggcgaaaagattgcccacggcaccaccttccgccgcgccgtcgaagaggggctgctggatcttaaacgcgtcgtccagattggccagcgcgcgcagggctacgccgccggcgacttccagtggggcgtcgatcggggctttcgtctggttcaggcggagcagtgctggcacaaatccctggccccgctgatggccgaagtgcgtcaacaaatgggagatggcccggtttatctcagttttgatatcgatagcctcgatccgatctgggcccccggcaccggaaccccggaagtaggcggcctgacgtcaatacaggcgctggaaattgtgcgcggctgccgcggtctgaacctgattggctgcgacctggtcgaggtctcgcccccctatgacgtcagcggcaacacgtcccagctggccgccaacctgctgtatgaaatgctctgcgttctcccgggcgtgaaatatccatag

SEQ ID NO: 254029 - DNA, 975 bp, Klebsiella pneumoniae
atgtgctggactttaaatcgtccgccgcaaatacttagttcatttatcagtgaactaaacgccatgcttaacgacgcgacgcttaacattcgacagctccaggtttttgaggcggtggcccgccttgagagctatggccgggcccagcaggagctggggatttccgtttccgcgatcagcaacgcgatgtcgcagctggagggccagctgggctttagcctgtgccagcgcggacgcggcggctttgcgttaacggagaaagggcagcattttttacagcaggcgatccgcgtgctgagtgaactgaacgagctggagcgccagtcggcgctgctgaaaggcgagcatagcggcacgatttgcatctcaacgcttgactccatcgaaacggaaaccgcgctgtcgctgccggtggtgctgcgcagctttagcgataagtttcctaacgtacacatcaagctgattattcgcaccccggcggaacagctgaacggcgtactgaataaccatatcgatctcgccatcggtagctacaattcgcgggtgcataacatcatcagcgaaccgctctaccgcgagcagcactggctctactgcagcgacctgcatccgatgttctttagtcgccagctcgataaagatctcatcagccagtgtccactggtgacgcgcagctactggaataccagcgatctgcggcggcgcgggttcagcaagggcagcgccacggttgaaaccgtcgatgcgcagctgctgttgatcctgtccgggaaatacatcggctatcttccagaacactacgcctggccgtggattaaagagaatcgcctgcgtgtgctgctacccaatgagtttggctttcaatctcccttctcggcgatctgcaggcgcgggcgcagcaatgaaccttatctcaaggagtttcgcaatcttctgaagaagaataccgtagccaggccgaagtggagtgcatga

SEQ ID NO: 254030 - DNA, 405 bp, Klebsiella pneumoniae
atgataagaaatagcttattggtattggtgtgtatttctgtgggtgtattgcaggggtgtactaatattaaaaaaacagatagcgcactaataaagaaagatgtgagtcaaaccgaacagcctgcacaagttcctgctttacagcagtgtatccaggatgcggatgctttagttaagctggataacaagttccagaaagattcaagtgaactctatggcttaattaacgacgctaagttttatgcctctgtttcggggcaaacctcagccagcgtaaaatcaaccattaccccgctttttgaatataagataaatgataagtgtaatagtatttctcagaaattaatcaaggagttcgaaacccgcgcccggaaagccgatcttaaagatgggctgaccagatga

SEQ ID NO: 254031 - DNA, 558 bp, Klebsiella pneumoniae
atgcgcggcctggctatcggtggacgaaatatcttctattacccggccatagcggtctttacgtacgatacgctcgccgggctggccggtgagccacttatcgaagctcttctcaacgccctcaatcccttggctatcaacgttagtgaagccaatgaggtgagcggttacttcgcccgacggatagtagcggcgggactcttcccgcaggtgaatccccggcagcttcaatttacggatgtagtcggccatatcagggttcacctgacgcgccaggtagatgaaacgcatccgtgggttggtattgatgcgcgatgccagctgatccagcggcatattcagcgcatcggccagcgccttccagcggttgtccagggtgacgccgcccgcttcatgcagctctttcgggtcagcccagatcgcttttaccggtacgctcaccgccagcggacggccggaacgatcggttatcattccgcgcgcggtagaaacttcctgcacgcgcagagaacgcatatcgccctggcgtaccagcatgtccgggctaatcacctgtag

SEQ ID NO: 254032 - DNA, 366 bp, Klebsiella pneumoniae
atgatcggcagagtgacagaagccctaagcaaggttaaagggtcgataggaagcaacgagcgccatgctttgcctggcgtgatcggagacgaccttctgcggttcgggaagctgccactctgcctgttcatttgcatcattattacggcgattacggtggtgacaacggcgcaccatactcgcctcttaacggcgcagcgcgaacaactggttctggaacgcgacgcgctggatattgaatggcgcaacctgatcctcgaagaaaatgctctcggcgatcacagtcgggttgagcggatcgcgaccgagaagctgcagatgcagcatgtcgatccatcacaagaaaatatcgttgtacagaaataa

SEQ ID NO: 254033 - DNA, 459 bp, Klebsiella pneumoniae; identical to SEQ ID NO: 172598

SEQ ID NO: 254034 - DNA, 1005 bp, Klebsiella pneumoniae
gtgaaactggatgaaatcgcccggctggccggcgtctcgcgaacgaccgctagctatgtgattaatggtaaagcgaagcagtatcgcgttagcgataaaactgttgaaaaggtgatggcggtcgttcgtgagcacaactatcaccccaacgcggttgctgcaggcttgcgtgcaggacgtacgcgttctatcggtttggttatcccggacctggaaaacaccagctatacgcgcatcgctaattacctggagcgtcaggcgcgccagcgcggctatcagctattgatcgcttgctccgaggatcagccggataacgaaatgcgctgtattgagcatctgctgcagcgacaggtcgacgcgattatcgtttccacctcattaccgcctgaacatccgttctatcagcgctgggctaacgatcctttcccgattgtcgccctcgaccgcgctctcgatcgagaacacttcaccagcgtagttggcgccgatcaggatgatgccgaaatgcttggtgcggagctgcgtaagtttcccgctgaaacggtgctgtatctcggcgctttgccggagctttccgtgagcttcctgcgcgagcagggattccgtacggcgtggaaggacgatccccgagaggtacatttcctctatgcaaatagctatgagcgagaagccgcggcccagcttttcgaaaagtggctggaaactcatccgatgcctcaggcgctgtttacaacttcatttccgttactgcagggggtgatggacgtcacgctgcgccgggaagggaagctgccttctgaactggccattgccacttttggcgataacgagctgctggatttcctccagtgccccgttttggccgtggctcagcgccaccgcgatgtcgcggaacgcgtgctggagatcgtgcttgccagccttgatgaaccgcggaagcccaaaccgggtttaagccgcatacggcgcaacctttatcgtcgcggcagcctgaaccgtcgctga

SEQ ID NO: 254035 - DNA, 492 bp, Klebsiella pneumoniae; identical to SEQ ID NO: 172600

SEQ ID NO: 254036 - DNA, 1725 bp, Klebsiella pneumoniae
atggagatgttgtcaggagccgaaatggtcgtccagtcgctggtcgatcagggcgtcaagcaggtgttcggttatcccgggggcgcggtcctcgatatctatgatgcgttacacacccttggcggaatcgatcacgttctggtccgtcatgagcaagcggccgttcatatggcggatggtcttgctcgcgcaacgggcgaagtcggagtggtactggtgacctcgggcccgggggcgaccaacgccatcaccggcattgcgacggcttatatggattccatcccgctggtgattctttccggccaggtcgcgacctccttaatcggttacgatgctttccaggagtgcgacatggttggcatctcccgaccggtggtaaagcacagctttctggttaagcaaaccgaagatattcccggcgtactgaaaaaagcgttttggctggccgccagcgggcgccctggtccggtcgtcgtggatttaccgaaagatattctcaacccggctaaaaaactgccctacagctggccggatacggttagcatgcgttcttataatccgacgacgtccggtcataaagggcagattaagcgagcgctgcagacgctgatagcggcaaaaaaaccggtcgtttatgtagggggcggggcgatcaatgcgcaatgtgaaccgcagctatacgcgctggttgagaaactgaagttaccggtagcttcatctctgatggggctgggcgctttccctgcgtcgcaccagcaggcattagggatgctgggcatgcatgggacctatgaagccaatatgaccatgcacaattccgacgtgattttcgccgttggcgtgcgctttgacgatcgtacgacgaataacctggcccgctactgtccgaacgctacggtgctgcatattgatatcgatccgacttcgatatccaaaaccgttcctgccgacgtgcctattgtgggtgacgctcgcctggtgctggaacagatgctggagctgctcgaacacgaggagacacagcagccactcgatgaaattcgcgactggtggcagcaaattgaacagtggcgcgcgcgtcactgcctgcaatacgacacgcaaagcggcaagattaaaccgcaggcggttattgaaacgatctggcggctgactaacggcgatgcgtacgtaacgtccgacgtcggtcagcatcagatgttcgccgctctctattatcctttcgataaaccgcggcgctggatcaactcgggtggtctgggaaccatggggttcggccttcctgctgcgcttggcgtgaagatggcgctgccggaagagacggtcatttgcgtcaccggcgatggcagtatccagatgaatatccaggagctctccaccgcgctgcagtacgagctgccggtgctggtgctgaacctgaataaccgctacctcgggatggtgaagcagtggcaggatatgctctattcgggccgccattcgcaatcctatatggagtcactgcctgattttgcccgcgtagcggaagcctatggccatgtgggcattcgtattagcgacccgcaggaactggaagcgaaactcgctgaggcgctggcgcaggtgcgtaacaatcgactggtttttgtcgatgtgacggttgatggcagtgagcatgtataccctatgcagatccgcggcggcggtatggacgagatgtggctgagcaaaacggagaggacctga

SEQ ID NO: 254037 - DNA, 951 bp, Klebsiella pneumoniae
atgttaaatgaaggtactgaatataagtcgacctctgaggtagaaaacacaaaaccccagctgcggatggtcgacctcaatctgttaaccgtatttgatgcggtaatgcaggagcaaaatatcacccgtgcggcgcactctctgggaatgtcccagccggcggtcagcaatgcggtctcgcgcctgaaagtgatgtttaatgatgagctgtttgttcgttatgggcgcggcatccagcctacggcgcgggctttccagctatttggttccgtacggcaggctctgcagctggtgcaaaacgaattaccgggctcgggctttgagccgctcagcagcgaacgggtctttaatttatgcgtgtgcagcccgctggataacgctttaacttcgattattttcaacaaagttggcgagattgcgcccaacattcatttggtctttaaatcggcattgaatcaaaacacggaacatcaattacgctatcaggaaattgaattcgttattggttatgaagagtttcgtcgtcctgagtttgcctgcgtacctttatttaaagatgaaatggtactggtggcaagtcgcaagcatccgcgtatttccgggccgctgatggaaaatgatatttatcaggaggagcacgccgttgtcgctcttgatcgttacgcatcatttagtcagccatggtatgacactgcggataaacagtctcgtattgcctatcaaggcaacgcaatggttagcgtattaaacgttgtttcccaaaccaatatggtcgctatcgcgccgcgctggctggccagcgagttcgccgataagctggatttgcaaatattacctctaccgttgaaggtcaatagccgtacctgctatctctcctggcatgaagcggcaggccgcgataaaggccatcagtggatggaagaattgctggtgagtatctgccagcgctaa

SEQ ID NO: 254038 - DNA, 1572 bp, Klebsiella pneumoniae
atgagccagcaagtcattattttcgatacaaccttacgcgacggtgaacaagcgttacaagccagcctgagtgtgaaagagaaactgcagattgctatggccctggagcggatgggcgttgacgtgatggaagtcggttttccggtttcatccccgggcgattttgaatccgtgcaaaccatcgcacgcaccatcaaaaacagccgcgtttgtgcgctggcccgctgcgttgagaaagatatcgacgttgcggcggaatcgctgaaggtcgcggaagccttccgtattcatacctttatcgccacctcaccgatgcacatcgcgaccaagctgcgcagtaatctggatgaagtgattgaacgcgctatctatatggttaagcgcgcccgcaactacactgacgacgttgagttttcctgtgaagatgctggccgtacgccgattgccgatctggcccgcgtcgtcgaagccgcgataaatgccggcgcaacgaccatcaatatccctgataccgtcggctacaccatgccgttcgaattcgccaatatcataaccggcctgtacgaacacgttcccaatatcgataaagccattatctccgtccatacccatgacgatttgggtatcgcggtgggtaacgccctcgccgcggtccatgccggcgctcgccaggttgaaggcgcaatgaacggcatcggcgagcgcgcgggtaactgctcgctggaagaagtgattatggcgattaaagtgcgcaaagacattatgaatgtgcacacccgcattaatcaccaggaaatctggcgtaccagccagaccgtcagccagatctgtaatatgccgattcctgccaacaaagcgatcgtcggtaccggcgccttcgcccactcttccggtattcaccaggatggcgtgctgaagaatcgcgaaaactacgaaatcatgacgccagaatctattggtctgaaccaggtacagctgaacctgacttcccgctccggccgcgcggcggtgaaacatcgtatggaagagatgggctataaggacagcgactacaacatggatcacctgtatgaagcgttcctgaagctggcggataaaaagggtcaggtatttgactatgacctggaagcgttagcctttattaacaaacagcaggaagaaccggagcatttccgtctggattacttcagcgtgcagtccggttccagcgacatcgcaaccgcctccgtgaagctggtctgcggcgaagacaccaaagctgaggccgccaacggcaacggaccggttgacgccatctaccaggcgattaaccgcatcaccggctatgaggttgagctggtcaaatatgacctgaacgccaagggtcagggcaaggatgcgctgggccaggtggacatcgtggcaaactacaacggccgccgcttccacggcgttggcctggcgacggacatcgtggaatcctccgcgaaagcgatggttcacgtcctgaacaatatctggcgcgccgctgaagtcgaaaaagaattgcaacgcaaagctcagaataaagagaacaataaggaaaccgtgtaa

SEQ ID NO: 254039 - DNA, 1092 bp, Klebsiella pneumoniae
atgtcgaagaattaccatattgctgttttaccaggtgatggtattggcccggaagtcatgaaccaggcaatgaaagtactggaagccgttcgcaaccgttttgatatgcgcattaccaccagccagcatgacgttggcggtatcgccatcgatcgtcagggcactccgctgcctcagtctaccgttgaaggctgcgagcaggctgacgcaattctgttcggctccgttggcggaccgaaatgggagcatctgccgcccgctgagcagccggagcgcggtgcgctgctgcccctgcggaaacactttaaattattcagcaacctgcgtccggctaagctgtatcaggggctggaagagttttgcccgctgcgcgccgatatcgccgccaacggcttcgacattttatgcgtgcgtgaactgaccggcggcatttactttggccagccgaagggtcgcgaaggtagcggtcagcatgaaaaagcatttgataccgaggtataccaccgcttcgagattgagcgtatcgcgcacattgccttcgaatccgcccgtaaacgtcgtcacaaagtgacttctattgataaggctaacgtcctgcagtcctctattttatggcgtgaaatcgttagtgaaatcagtaagcagtatcctgacgttgagctgtcgcatatgtacatcgacaacgccaccatgcagctgattaaagatccgtctcagttcgacgttctgctgtgttccaaccttttcggcgacatcctttctgacgaatgcgccatgattaccggttcgatgggcatgctgccgtcagccagcctcaacgagcaaggctttggtttatatgaaccagcaggtggctccgcgccggatatcgctggcaaaaacatcgctaaccctatcgcgcagatcctctcgctggcgctgctgctgcgctacagcctggatgccgacaacgcggccactgcgattgagaacgcgatcaaccgcgcattagaagaaggcgtacgtaccggcgatttagcgcgcggtgcggcggcggtcagtaccgatgcaatgggcgatatcattgcccgctatgtcgctgaaggggtgtaa

SEQ ID NO: 254040 - DNA, 1401 bp, Klebsiella pneumoniae
atggcgaagacgttatacgaaaaattgtttgatgctcacgtcgtttatgaagcgcaaaacgaaaccccgctgctgtacattgaccgtcatctggttcacgaggtgacctcgccgcaggcgtttgacggcctgcgcgcccataaacgtccggtacgccagccgggtaaaaccttcgccacgatggatcacaacgtatcgacgcaaactaaagacattaatgcgtccggcgaaatggcgcgtatccagatgcaggagttgattaaaaactgcaaagagttcggcgttgaactgtatgacctgaatcacccttaccagggcatcgtgcacgtgatggggccggaacagggtgtgaccctgccgggcatgaccatcgtctgcggcgactcccatacggcaacccatggtgcattcggcgcgctggcattcggtatcggcacctccgaagtcgagcacgttctggcaacgcagacgctgaagcagggccgcgccaaaaccatgaagattgaggtcaagggtaaagcagccccgggcatcaccgccaaagatatcgttctggcgattatcggtaaaaccggcagcgccggcggcaccggtcatgttgtcgaattttgcggcgaagccatccgtgatttaagcatggaaggccgtatgactctgtgcaatatggcgatcgaaatgggcgcgaaagcgggcctggtggcgcctgaccaaaccaccttcgattacgtgaaaggccgtctgcacgcgccgaagggccaggattttgacgaagccgtcgcctggtggaagaccctgactaccgatgatggcgcgacgtttgacagcgttgtcacgctgcaggcggaagatattgctccgcaggtcacctggggcaccaacccagggcaagtgatatccgtcaccgacatcatcccggatccggcatcgttcaacgacccggtagagcgcgcaagcgcggaaaaagcgctggcctatatggggctgaaatctggcgtaccgttaaccgaagtagcgattgataaagtctttatcggttcctgcaccaactcgcgcatcgaagacttacgcgcggccgccgagatcgctaaaggccgtaaagtggcgccgggcgttcaggcgctggtcgtcccaggttccggcccggtgaaagcgcaggccgaagcggaaggtctggataaaatctttattgaagccggttttgagtggcgtttacccggctgctctatgtgcctggcgatgaacaacgaccgcctgaatccgggcgagcgctgcgcttccaccagcaaccgtaactttgaaggccgtcagggccgcggcgggcgcacccatctggttagcccggccatggcagccgcggcggccgttaccggtcatttcgccgatatccgtagcttgaaataa

SEQ ID NO: 254041 - DNA, 606 bp, Klebsiella pneumoniae
atggcagagaaatttatccaacataccggcctggtggttccgctggatgccgcgaacgtcgatactgatgcaatcattccaaaacagtttctgcagaaagtcacgcgtaccggttttggcgcccatctgtttaacgactggcgcttcctggacgataaaggcgaacagcctaacccggaattcgtgctgaactttccggagtataaaggcgcctctatcctgctggcgcgagaaaacttcggctgcggctcctcccgcgagcatgcgccgtgggcgctgaccgattacggttttaaagtcgtcatcgcgcccagcttcgccgatatcttctatggcaacagctttaacaatcagctgctgccggtcacgctgagcgaagaacaggttgatgagctctttaagctggtccagtctcagcccggcattaagtttgaagtcgatctgcaagccgaggttgtgaaagctggcgataaatcctggagctttaaaattgacgctttccgccgccactgcatgcttaacggcctggacagcatcggtctgaccctgcagcacgaagaggccatctcggcctatgagaaaaaactgccggcttttatgaattaa

SEQ ID NO: 254042 - DNA, 2034 bp, Klebsiella pneumoniae
atgagccactacccccatcttttttccccgttgaccattaacgggatgacaataaaaaaccgcatcattatgccgccaatggggaccaacctggcgagcctgaacggtgaagtcactcaggaacagattgactactatgagctacgcgcgcggggcggcacaggactcatcactatcgagaatatttgtatcgattttccattcgcttctaatggcacaacccagctgcgtatcgataacgatcagtatattccgcgcctgttcaaattaaccgaaaccttacataaacatggcgcctgcgtcggtattcaattaaaccacgctggcgcatcggcctatgcatatcgcctgaacggcgaaatgccgctttcctcttccagcacgccgtccaaaaagaacggtaatattccccgtccgatgacgcacgacgagatatatcatgccgtcgataagtttggtgatgctgcggagcgcgttcgccgcgctggtttcgactgtgtggaaattcacgccggccactcttatttaattagtcagtttttatcaccgctgtttaataagcgtaccgatgaatttggcggcagcgtagagaatcgcgccagaatattaaccttaatcgtcgataaggtacgcgcctgcgtaggtccgcgtttcccggtcagcctgcgtattagcgccgatgacttcctggagggcgggaatacgctcgaagattccttgcggatcctcgaattgtgccaggagaaagtcgatattatcaacgtctccgccgcgcaaaacgacaacctgaatttccagattgaccagatgtctctggaagatggctggaagcgctatctctcccgtgcggtacgcgacaaattccacaagccaacggtaattgccggcaatatccgtaccccgaaagtcgctgaagatattatcgccagcggcgatgctgacctgatagccattggccgcggactgatcgccgagccggagtgggtacaaaaagtgcagagcggtaacgagcgtttgatgcggaaatgcatctcctgcaacatcggctgcgcggatcaccgcatcgcccgctcccgccctctgcgctgctcgattaacccggatattatccacggcgatgcctataaacagcagcgcgttatccgcgataccaacgtcgtggttatcggcgcgggtacggcgggaatggaagcggcctgcaccgcggcggaagtcggctgccatacctggctgctggaagagaagcacagcatcggcggactggccagcgagatctccctgctgccggagaaaaagcgtatcgccgattttccgcagtttatgaaaaaccgtatcgcctcgctcgataacctgatgctgcaggtcggcaagcgcgccaccgtggcgtccgtttccgctcttcgcccggatttaatcgtcaacgcaaccggttcagttcctctgctgccgccaattgaaggactgcgcgagaacatcgatgtcgaaggcggaaacgtcttctccatcaccaacatgattcatcatctggaccagtttgccgatgctacaggtaaacgcatcgctgtcgtcggcgcaggcgccgtaggtctggatgttattgaatacttctccgcgcgcggcgccagcgccgtgcttatcgagatgcaggacgcgccgggacgcgacctggacatcattactaaaaatgccatgttgaccatgctcgatgaacatcacgtggaacagcacatgcgtacgcagctggttgccgtcaccccaacgcatttcaccgttaaaaatgcggatggcacctttgacattccttttgattacggcttcgtctgcctgggaatgcgcgccaataccgccggtctcactgagattgaacaatgggccagagccaataacgtaaaaataatgaacatcggcgacagcctgatggcccggcgaatcattgatggcgtgcgcgaagggcgcaacgtgctggacacccttgaagatatgggcgctctcggcaaccgcgaatcgacaaaaattccatttctaacatattga

SEQ ID NO: 254043 - DNA, 864 bp, Klebsiella pneumoniae
atggcagaacgtattactggacacaccgagctgattggcctgattgcgaccccgattcgtcacagcatgtcgccgactatgcataacgaagcctttgcccatctgggactggactacgtttatctggcgttcgaagtaggtaatgaagagctgaaagatgtcgtacagggttttcgtgcattaaaactgcgcggctgtaacgtctccatgccgaacaaaacggagatttgccagtatctggacaaactctcgccggcggcagaactggttggcgcggtgaataccgtggtgaacgacaatggcgtcctgaccggccatatcaccgatggcaccggatatatgcgcgcgctcaaagaagaaggcattgatatcatcggcaaaaagatgaccgttctgggcgctggcggtgcggcaaccgcgctctgcgttcaggccgcgcttgatggcgtcaaagcgatctccatcttcaaccgcaaagataaattcttcgccaacgcagaacagaccgttgccaaaatccgtaataacaccaactgcgagatccacctgttcgatctggacgatcatgacaaactgcgcgcggaaatcgacagcagcgtcattctgaccaacgccaccggcgtggggatgaaaccgtttgaaggccagatgctgctgcctgacgacagcttcctgcgcccggacctgatcgtttctgacgtggtctacaacccgcgcaaaacttatctgctggaagtggctgagaaaaaaggctgccgcaccatcaacggtctggggatgatgctctggcaaggcgcgcgcgcttttgaaatctggacaggcaaagaaatgccggttgaacacgtcaaaaatatcctgttctaa

SEQ ID NO: 254044 - DNA, 1215 bp, Klebsiella pneumoniae
atgaaaaatcaatatgtcccaacggcagctgggctatatcttaactatctgatccacggtatgggggttttgttaattaccctcaatatggcgaatctgcaggaacaatggggaaccgacgctgccggcgtctccatcgttatctcgtcgctcgggatcggtaagctcgccacgatcgtgacaggattcctgtccgaccgttttggtcgtaaaccctttatctatctcggcatagccagttatgtggtgttcttcctcggtattctgctgacgaaaaacatctatctggcctactgctgcggcattatggcgggcctggcgaacagcttcctcgactccggtacctatccggcgctgatggagtctttccctaactccgccagccgggctaatgtcttgatcaaagcctttgtctctgccgggcagttcctgctgccgtttattatcggtgcgctgatatgggcgaatatgtggtacgggtggtcgtttatcatcgctgcagcattaatgatcctgagcgcggtctacctgataaaaatgcctttcccggatcatcgggcgaaaaaggaaaccgcagagaaatcagtgactgccgccgccgctccgcaggcggactccggcaaactggatatggtcatctttaccctgtacggttatatcggtatggcgactttttatctggtaagccagtggttagcgcagtacggcgagttcgttgccggcatccctcacgagtcggctattaaactcttgagcgtctatactgccggttcactgacctgcgtattcgtcactgcggcttttgttaaagaggtattcagctcagccgtcgctatgatcatctacactttcctgtcgatgatttcactgctgatcgtttgcctgttcccgacgccaatgattgtgaccggctttgcctttatcatcggctttgccgccgctggcggcgtgctgcagataggcgcgaccatcatggccatgagctttccgaacgggaaaggcaaagccaccgggatcttttataccgcaggaagtctggccagctttacgatcccgttgattacggcaaaactgtcgaagattggtatcgccagcattatgtggttcgatcttctgatcgctatcgtcggctttgtgatcgccctgtacatcggttatcgtcagcttcaggttcgcgccgctgcaaaaacatcccgcgttgcagcaaccgcctga

SEQ ID NO: 254045 - DNA, 756 bp, Klebsiella pneumoniae
atgactaaagcagtaacagtaaaaaacatcaccttccaggaaggggaaaccttaatctgcgtaccgctgatcggcaaaacgcttgccgagctgcagactaacgcacgcgcgctggctaccgccggagccgatattatcgaatggcgcgtcgatcacttcacccaggtcagagaaactgagcaggttctgctggcgctgggcgaaattcgccagctgctgaaagagattcctctgctgtttaccttccgcagcaaaaaagagggtggcgaaacggaaatcagcgacgaagcctattttgagctgaatcgccaggcggccgttagcggtctgaccgacgtgattgatatcgagctgttcaacgacgaagcgcaaattcgctcgctggtgagcgatgcccacgctgcgggcgttaaagttatcatgagcaatcacgattttcataaaacgccagctcaggaagatatcatctaccgtctgcgtcgcatgcaggatcttggcgctgacctgccgaagatcgcggttatgccacagtcgccgcaagatgttctgaccctgctttcggcaacgctgacgatgaaagagaagtatgccactcgcccattaatcacgatgtcgatgggtaaatccggcggcgtgagccgggtaaccggccgtttgttcggttcagcaatgacctttggcaccgtcggtcaggcttctgcgccagggcaaatcgccattacccagctgcgtgaactgatggatattctttcctga

SEQ ID NO: 254046 - DNA, 897 bp, Klebsiella pneumoniae
atgaacctaaagcaactttattattttaagcgactggcagaaactgagcattacactgaagctgcctccagcctttttatcacccaaccgtccctcagccatgccatatctgaactggagaaagagctgggagtggcgctatttgccaggaaagggcgcaatgtcaagattacgcagaatggtaggcgctttctgccctacgtggaagatgcgctggcctcgttagaaaatggccgtatgacgttgcaaaaaaatagcgctgagaacaaagaaaatattcgcattgcatttatttataccatgggcgaatatgttgttccgcagttaattaacaaatattcgctgtcaccatctcgtcacaatgtgacattttcttttactcagggaacctcgttaacccttctccaggaactgaaagccggaaaaagcgatctggctatttgttcctatattgcggatgaaccggatattgactttattcctattattcaacaagaactggtcgtagtgacggcaaaagatcatcctctggccaggctttatgaaaatgaagtcgacctggtggagacgatccactacccctatatctatttttcagaaaatagcggtctgcgaccttttattgataacgtgtttatgcagcaaaaactggttccggatattgcctgctacgttgatgaggatacggcgatggcggggctggttagtattgattacggtattgcgattatgccgagaatttccgcgctgtcgtattacaacgtgcatatcctgacgatcaaaaatgccattcctccgcgttatatctatctggcgactatgaaggagcgggtactttccccggccattcagtcatttaaagatgtcattattaatgacagccaaaaaatcagataa

SEQ ID NO: 254047 - DNA, 1311 bp, Klebsiella pneumoniae
atgaggacactcaatgctcaggaacggccgattttgccgtcggccacgcaaaagcgaactaaaacacgaattgtaattttaatgttactatcgatcgggacgatgataaattatctcgatcgtactattttaggtattgttgcacctaagttaacgagcgaaatccatatcgacccggcgatgatgggtatcgttttttccgctttcgcctggacctacgcgctggcgcaaattcccgggggaatgtttttagatcgcttcggtaataaattaacttacgcgctttctattttcttctggtcaacctttaccctattacaaagcttttccgtaggcttaaaatcattgctgctgctgcgattaggtttaggcatcagcgaagccccctgctttccggtgaatagtcgggttgtgagtaaatggtttccccagcatgaacgcgctcgggcaacggcgacttacaccgtcggtgaatatattggactggccgcattctccccgctactttttttaattctggagcatcatggctggagaacgctatttttcctgaccggcggtttgggcattgcattcacttttgtgtggtggaaattttatcatgaaccgcatcaatcaaagactgcaaataaagcagagttggaatatatcggcgtagaaaatacggctagcgccgatgaaaatatcccgtttaactggcccgatgccaaacgcctgctgtgctgccgacagattatcggcgccagcctggggcagtttgccggtaacaccacgctggttttcttcctgacctggttccccacttatctggctaacgaacgccatttaccgtggcttcacgtgggtttcttcgcctcctggccattcctggccgcggctatcggtatctttttcggcggttgggtatccgataaaatcttaaagaaaacccgttccgtaaatattagcagaaagctacccattatttccgggctgctgctttcgagctgcatcatcattgctaactgggtcgagagtaacaccgctgttattattataatgtcgatcgctttttttggtcagggcatggttggtctcggctggacgcttatttcagacattgcgcctaaaaacatgggcggactcaccggggggatcttcaacttctgtgcaaatatggcgtcaattattaccccgttaattatcggggtcatcatatccatgaccggtaattttttctacgcgctgatttatatcggattaaccgcgctgattggcgttatcgcttatatttttattatcggcgatataaaaaggatcgtgttgaaataa

SEQ ID NO: 254048 - DNA, 1185 bp, Klebsiella pneumoniae
atgctgtggttaatgacgatgggtcgacgtcttaacggcgtttacgccgcttttatgcttgtcgctttcatgatgggaatcgcaggcgcgctgcaggcgccgacgctcagcttatttctcagccgcgaagtgggcgcgcagcctttctgggtagggctattctatacggttaacgccattgccggcatactggtcagcctggcgctggctaagcgctccgatagtcggggcgatcgccgacggctgattatgttttgctgcctgatggcggtgggaaacgcgctgctgtttgcttttaatcgtcactatctgacgctgattacctgcggggttatgctggcctccgtggcgaatgccgcgatgccgcagctttttgccctcgcgcgggaatatgctgatagctctgcgcgtgaagtggtgatgttcagttcgataatgcgtgcgcagctctcgctggcatgggttattggcccgccgctggcctttatgctggcgctgaactacggcttcaccaccatgttttcgattgctgccgggatctttgttattagcctggcgctgattgccttcaagctgccctcggtcgcccgcgttgaacaaccctcggaaggtgctgaagttctggtacaggccggaggatggcacgataaaaacgtacgcatgctgtttattgcctcgacgctgatgtggacctgcaacaccatgtatatcattgatatgcctttgtggatcagtagcgatcttggccttcccgatagcctcgcggggattctgatgggcaccgccgccgggctggagatcccggcgatgatcctggcgggctactacgttaagcgctgggggaaacgcaagatgatggtgactgcggtggcggcgggcgtgctgttttatattggtctgattctgtttcacgaccgcgtggcgctgctggtgttacagctgtttaatgccgtgtttatcggcattgttgccggcattggcatgctgtggtttcaggatctgatgcccggacgggcgggcgccgcgacgacgctgtttaccaacagtatctctaccggggtgattctggccggggtgattcagggcgcactgtcgcaaagctatgggcacgccagcgtctactggacaattgccgctatctcgctggtgacgctatttatgaccagccgggtgaaagatatctga

SEQ ID NO: 254049 - DNA, 153 bp, Klebsiella pneumoniae
atgatggggtcaaccattaaacagttctaccaacgctacttttctgcgacgcaggatgcgtcctggctggcccgcctgatggcaggaagacagcaggaaattctcggcgaactgatgcagtggggagttacgtcgcaggcctctgatcattga

SEQ ID NO: 254050 - DNA, 1656 bp, Klebsiella pneumoniae
atgtcttccggtcgtttacaacagcagttcatccgcctgtggcagtgctgcgacggcaagtcgcaggagacaacgctgaatgaactggcagagatgctaagctgctcgcgtcgtcatatgcgtaccttactcaacatgatggaggcgcgcggctggctgacctgggaggcggaggccggacgcggcaagcgttcccggctcgcttttctctataccggtctcgcgctgcagcagcagagggcggaagatctgctggagcaggacagaatcgatcagctggtgcagctggttggcgataaagccgccgtccgccaaatgctggtttcccatttaggccgcagctttcgccagggtcggcatatcctgcgcgtgctctactaccggccgatgaaaaatctgctgcccggcagcgcgctgcgccgctcggaaacccatattgcccggcagatttttagcgccctgacgcgagtaaatgaggaaaatggggaactggaagccgatattgctcaccattggcagcagatcgcgccgacccactggcgtttttttctgcgtccaggcattcattttcaccatgggcgtgagctggagatggaggatgtcatcacctccctgcagcgcagtaacacgctgccgctcttctctcacatcgagcgtatcgactcccccaccgcctggactctcgacattcatctcagccaacccgaccgctggctaccgtggttgttaagccaggtaccggccatgatccttccgcatgagtggcgaacgatggagaatttctccagcatccccgtggggacagggccttactcggttgtgcgtaataatcagaatcagctcaaaattcacgccttcgatgactatttcggctaccgggcgctgatcgatgaagtgaacgtctgggttctgccggaaatcagcgaagagcccaacggtgggttaacgttacagggcaccacgcaaagcgaaaaggcggtggaaagccgtctggaagaggggtgttattacctgctgttcgatgcccgtagcccgctcggcgcgaacagcgcggtacgccagtggctaagctatgtattccagcccgctaatctgctctatcacgcgggcgagcactatcagggcaactggttcccggcatatggcctgctgccccgctggcatcatgcgcgcagccacgcctgtgaaaaaccacccggtcttgaaacggtcaggctgacctactaccaggaccacgtcgagcatcgcgtgatgggcgggatcatggcgacgctgctggccgagcatcaggttaagctggagatccaggaactggagtatcaggagtggcaccgcggtgaggtggtcagcgacgtatggctcaacagcgccaactttacgctgccgatcgatttctccctgtttgcctggctgtatgaagttcccctgattcgcaattgtatccccatcgactgggagcaggacgccgctcgctggcgcgcgggtgagctgaatccggcgacctggagccagcagctgttggccaatcaaaccgtggtgccgctcattcaccactggctgatgatccaggggcagcgcagtatgcgcggcgtacgcatgaacacgctcggctggtttgactttaaatccgcgtggttcgcgccgccggagccgtaa

SEQ ID NO: 254051 - DNA, 984 bp, Klebsiella pneumoniae
gtgttgaaaaaattactccccctgctggcgctggccgccgcgcccgtttttgccaaaccgctgctcaccgtttatacctacgactcattctccgccgactggggccctggcccggcggttaaaaaagcctttgaagccgactgcggctgcgagctgaagttcgtggcactggaagatggcgtctcgctgctcaatcgtctgcggatggaaggcaaaaacagcaaagccgacgtagtgctggggctggataacaacctgctggaagcggcttcgcaaagtaagctgttcgccaaaagcggcgtccctgccagcgcggtgaacgtacccggcggctggaacaacgacaccttcgtcccgttcgattacggctatttcgcctttgtttacgataaaaacaagctgaaaaatccgcccaggagcctgaaagagctggttgagggcgagcaaaaatggcgggtgatttatgaagatccgcgtaccagcacgccgggtctgggtctgctgctgtggatgcaaaaagtctacggcgataaagcgccggaagcctggcagaagctggcggcgaaaaccgtcaccgtcaccaaaggctggagcgaagcctacggcctgttcctgaaaggcgaaagcgatctggtgctgagctacaccacctccccggcttaccacattatcgaagagaagaaggataactacgccgcggcaaacttcgctgaaggacactatttgcaggtcgaagtcgccgcccgcaccgcggccagcaagcagccggaactggcggaaaaattcctcaaatttatggtatcgccgggcttccagaatgcgatccccaccggcaactggatgtatccggtcactcaggttgcgcttccggcaggctttgacgcgctgatgaaaccgcagacgaccctcgaatttacaccgcaacaggtggccgccgaacgtcagaactggattagcgcatggcaacgcgccgtcagccgctag

SEQ ID NO: 254052 - DNA, 1611 bp, Klebsiella pneumoniae
atggcaacgcgccgtcagccgctagctttcggctggctcctgccgggactcacggcggccatcgttctggtcgtcgtggcgctggccgcctttctggcgctatggttcagcgccccggagaccacctggaaagcgcttatcagcgacggctatctctggcacgtggtgcgtttctccttctggcaggccttcctttccgcgcttttttcggtgctaccggcgatattcctagcccgcgctctgtaccggcgacgtttccccgggcgcacgctgctgctgcgcctttgcgcgatgaccttaatcctgccggtactggtggcggtcttcggtattctgagcgtctacggtcgtcagggatggctggctgaattatgcaacgcgttcggctggcagtgggaattctcgccctacgggctacaggggatcctgctggcgcacgtgttctttaatatgccgatggctacgcgcctgctgctgcagacgctggaaaatatccccggcgagcagcggcaaatcgccgcccagctcggcatgcgcggctacgtctttttccggctggttgaatggccatggctgcggcggcaaatcccgcccgttgcggcgctgatctttatgctctgtttcgccagctttgcgaccgtgctgtcgctgggcggaggcccgcgggccacgacgatcgagctggcgatttaccaggctctcaatttcgactacgacccggcgcgcgcggcgatgctggcgctcatccagatgatctgctgtctcggactggtgttgcttagccagcgcctgagtaaagcgctcgccatcggggccagtcatatccgcggctggcgcgatcccgacgacagactgtacagccggctgtgcgacgcggggctgatcggcgcggcgcttttactgctgctaccgccgctgctggcggtgacagtcgacgggctgaacagcaatctgctgagcgtgctgcagcagcccgcgttatggcaggcgctggggacatcgctgcgtatcgcccttgccgccgggctcttaagcgtcatcctgaccatgatgctgctgtggagcagccgcgagctccgcgcccgccgccgccctctcgccggtcaggcgcttgagctgagcggcatgctgatcctcgccatgccgggcatcgtgctggctaccggtttcttcctgctgctcaataatagcgtggggctgccggaatccgccgacgccatcgtcatcttcaccaacgcgctgatggcgatcccttacgcgctcaaggtactggaaaatccgatgcgcgatatcgccgcccgctacggtaccctctgcgagtcgctggggatgcacggctttacccgcctccgggtggtcgagcttcgcgctttaaaacggccgctggcccaggcgctggccttcgcctgcgtgctgtcgattggcgatttcggcgtcgtagcgctgttcggcaacgaagattttcgtactctgcccttttatctgtatcagcaaattggctcttatcgcagccaggacggcgccgtcaccgccctcctgcttctgctgctgtgctttttactctttagcgtgattgaaaaacttccgggacgcgatgctaaaactgaatga

SEQ ID NO: 254053 - DNA, 702 bp, Klebsiella pneumoniae
atgctaaaactgaatgatgtgacctggctttatcagcatctgccgatgcgtttcacgcttgccgtcgaacgcggtgagcgcattgcggttcttggccccagcggcgccgggaaaagtacgctgctgaacctgattgccggttttctgccgcctgccagcggcagtatcgagatcgatggtcagccccatacctacacgccgcccgcgcgtcgcccggtatcgatgctgtttcaggaaaataatctgtttaaccatctcaccatccgccagaacattgctctgggaatgcatccggggctcaagctgaacgcgacgcagaccgcccgcctgcaggccattgccgggcagatgggaatcgacgccttattagagcggctgccgggcgagctttccggcggccagcgccagcgtgcggcgctggcgcgctgtctggtacgccaacagccggtactgctgctggatgagcccttctccgcgctcgatcccgcgctgcgtcaggagatgctgaccctggttgccgacatctgccggcaacagcagctgacgctgttaatggtctcgcacagcgtggaagatgctgcgcgtatcgcgccgcggtcggtggtcgtggctgagggacggattgcctgggatggtgagaccgccgcgctgctcaacggcagcagcagcgcctcggcgctactgggaattagcgcaaaataa

SEQ ID NO: 254054 - DNA, 759 bp, Klebsiella pneumoniae
  misc_feature (140)..(148): n is a, c, g, or t
atgcaagcattgctggaacactttattactcaatcgacggtctattccctgatagccgttctgctggtcgcctttctcgagtcgctggcgctggtggggcttatcctaccgggaacggtgatgatggccggattgggggnnnnnnnnnaggttaacttctggcaggcgtggctggcggggattatcggctgtttgctcggcgactggatctcattctggcttggctggcggtttaaaaagccgctgcatcgctggtcttttttaaagaaaaacaaagcgctgctggataaaaccgaacatgcgctgcatcagcacagcatgtttaccattttgattggccgctttgtcgggccaacgcgcccgctggtgccgatggtcgccgggatgctggatctgccggtcgcgaaattcattccgccgaatatcattggctgcctgctatggccgccgctctacttcttaccggggatactagccggggcggcaattgatattccggccgatgagaatagcgccagctttaagtggctgctgctgggggcggcgctgctggcgtggctggcggcgtggctgtgctggcgattgtggcgcagcgccaaaagcgccggcgatcgtctcacccgctttctgccgcgttcgcgcctgctgtggatcgcgccgctgatggtatgcgccgccgtcgcggccctggtgctcgccttccgtcatccgctgatgccggtctatctcgacatcctgcataaggttattttgcgctaa

SEQ ID NO: 254055 - DNA, 846 bp, Klebsiella pneumoniae
atggccgaaacgcaaaacgatcctttgttgccgggttactcttttaatgcccatctggtgacgggcctgacgccaattgaggccgacggctatctggatttctttattgaccgtccgctgggcatgaagggctatatccttaatctgacgatccgcggcgaaggggtgatcaataaccacggggagcagtttatctgccgccccggcgatatgctgctgtttccgccgggagagatacatcactacggccgccatcccgatgcccgcgagtggtatcaccagtgggtctatttccggccgcgcgcctactggcatgaatggcttaactggccaacgatttttgcccagaccggctttttccgcccggatgagcagtggcaggcgcactttggcgagctgttcgggcagattgtggaggccgggcagggcgcggggcgttattccgagctgctggcgatcaatcttatggagcaactactgctgcgccgtatggaggccatcaatgaatcgctccatccgccgctggataaccgggtgcgcgatgcctgccagtacatcagcgatcatctggcggacagccatttcgacattgccagcgtcgcccagcacgtgtgcctgtcgccgtcgcgcctgtcgcatctgttccgccagcagttagggatcagcgtactggggtggcgggaggatcagcgcattagccaggccaagctgctgctgagcacgacgcggatgccgatcgctaccgtgggccgtaacgtcggttttgaggaccagctctacttttcgcgcgtgtttaagaaatgcaccggcgccagtccgagcgagtttcgcgctgggtgtgaataa

SEQ ID NO: 254056 - DNA, 1710 bp, Klebsiella pneumoniae
atggcaattgcgattggcctcgattttggcagtgattcagtacgcgccctggcggtagagtgcgcgaccggcgaagagctcgccgcaagcgtcgagtggtatccgcgctggcaggaggggctattctgcgatggcccaaacaaccagttccgtcatcatccacgcgactatatcgaatcaatggaagccgcgctgaaaagcgtcctcgccgcccttagcgccgaacagcgcgctgccgtcgtaggtatcggcgttgatagcaccggctcaacgcccgcgcccatcgacgctgacggcaacgtgctggcgctgcgcgaagagttcgccaacaaccccaacgccatgttcgtgctgtggaaagaccatacctcggtggaggaggcggaggaaattacccgcctgtgccaccagcctggcaaagaagattactcccgctatatcggcggtatctactccagcgaatggttctgggccaagatcctccacgtgactcgccaggaccgcgccgtcgccgaggccgccgcgtcgtggattgagctgtgcgactgggtgccggccctgctttccgggacgacgcgcccgcaggatattcgccgcggccgctgcagcgccgggcataaatccctttggcatgaaagctggggcggcctgccgccagccgggttcttcgatgaacttgacccgataattaaccggaacctggcctacccgatgttcagcgagacctggactgcggatctgccggtcggcacgctgaccgccgaatgggccgcgcgtctgggcctgccgcaaaccgtcgccatctccggcggcgcattcgactgccatatgggcgccgtcggcgccggagcgcagccaaatgcgctggttaaagttatcggcacctccacctgcgacattctgatcgccgataaacagagcgttggcgagcgcacggtaaagggcatttgcggccaggttgatggtagcgtcgtgcctgactttatcggtatggaagcggggcaatccgcctttggcgacatctacgcctggtttggccgtattctcggctggccgctggagcagctggcgcaggcccacccggaacttaaagaacagatcaaagccagccagaaacagctgctgcccgcgctgaccgacgcatgggcgaaaaatccgtctctcgaccacctgccggtagtgctggactggtttaacgggcgccgtacgccgaatgccaaccagcgtctgaaaggggtcattaccgatctgaacctcgccaccgacgccccggcgctgttcggcgggctgattgccgccaccgccttcggcgcccgcgccattatggagtgcttcaccgaacaggggatcccggtcaataacgtgatggcgctcggcggcatcgcgcgcaaaaacccggtgatcatgcaggcctgctgcgatgtgctgaatcgcccgctgcaaatcgtcgcgtccgatcagtgctgcgcgctgggcgcggctatcttcgccgccgttgctgccggcgtctaccacgatattcctgccgcgcaggagcaaatggccagccgggtggaaagcaccctgcagcctcgcccggcgcaggcgcaacgttttgaacaactctatcagcgctaccagcagtggtcgctcagcgcggaacaacgttacctcccttcgactgcaaaagcggaatccgcgccgcaatctcaggcagccttcacccattaa

SEQ ID NO: 254057 - DNA, 1503 bp, Klebsiella pneumoniae
atgacaatttttgataattatgaagtgtggttcgtcatcggtagccagcatctgtatggccctgaagcgctacgccaggtgacaaagcacgcagaacatgtggtgaacagcctgaatgcggaagccaaactgccgtgcaaactggtgcttaagccgctgggtaccacgccggatgagatcacccatatctgtcgcgacgcaaactacgatgataagtgcgccgggatggtggtgtggctgcataccttctcaccggcgaaaatgtggatcaacggcctcacgatcctgaataaaccgctgatgcagttccatactcagttcaacgcggcgctgccgtgggacagtatcgatatggactttatgaacctgaaccagaccgcccacggcggccgcgagttcggcttcatcggcgcgcggatgcgtcagcaacacagcgtggtaaccggccactggcaggataaagaagcccatcagcgcatcggcgcatggatgcgtcaggcggtttcgaaacaggatacccgccacctgaaagtgtgccgtttcggcgataacatgcgtgaagtggcggtcaccgacggggataaagtcgccgcgcagattaagtttggtttctcggttaacacctgggcggtgggcgacctggtacaggtcgtcaatgcggtcaccgatggcgaaatcagcgccctggtcgatgagtatgaaagcagctatcgcctgacgccagcggtgcaaatccacggtgataagcggcagaaccttcttgatgccgcgcgcattgagctggggatgaagcgcttcctggaacagggcggcttccacgcctttactaccacctttgaagatttgcacggcctgaaacagcttccgggtctcgccgtacagcgtctgatgcagcagggctacggctttgcgggcgaaggcgactggaaaaccgccgccctgcttcgcatcatgaaggtgatggcaaccggtctgcagggcggcacctcctttatggaggattacacctaccacttcgagaaaggcaacgatctggcgctgggctcgcatatgctggaagtctgcccgaccatcgctaccgcggagaaaccgattctcgacgtgcagccgctgggcatcggcgggaaagccgatccggcgcgcatcatcttcaacacccagaccggcccggcgatcgtcgccagcctgatcgatctcggcgatcgctatcgtctgctggtgaacaccattgagacggtgaaaacgccgcacgagctgccgaagctaccggtggccaatgcgctgtggaaagcccatccggatctgcgcaccgcgtccgaggcctggatcattgctggcggcgcgcaccataccgtcttcagccatgcgctgacccttgatgatatgcgccagttcgcagagctacaggatatcgaactgaccgtgattgacaacgagacccgcctgccctccttcaaggatgcgctgcgctggaacgaagtgtattacggttcaaaacgctaa

SEQ ID NO: 254058 - DNA, 696 bp, Klebsiella pneumoniae
atgttagaagatcttaaacgccaggttctcgaagccaacctggccctgccaaagcacaatctggtcactctcacctggggcaacgtcagcgccgtcgaccgtgaacgggacgtgctggtgattaaaccctccggcgtcgactacagcgtcatgaccgccgaggatatggtggtggtcagcctggagaccggcgaagtggttgaaggccagaaaaaaccctcgtctgataccccgacccaccgtctgctgtatcaggcattcccgacgctgggcggtattgtccacactcattcgcgtcacgccaccatctgggcgcaggccggacagtcgattcccgctaccggcacgacccacgccgactatttctacggcgcggttccctgcacccgcctgatgaccgacgacgagatcaacggcgagtacgagtggcaaaccggcgaagtgatcgtcgaaacctttcgtgaaaaaggcatcgatccggcgcaaatgcccggcgtgctggtgcactctcacgggccgtttgcctggggtaaaaacgccgaagacgcagtgcataacgccattgtgctggaagagatcgcctatatgggcatcttctgccgccagctggcaccgcagttgccggatatgcagcaaaccctgctggataaacactatctgcgcaagcacggcgcgaaagcctattacgggcaataa

SEQ ID NO: 254059 - DNA, 438 bp, Klebsiella pneumoniae
  misc_feature (384)..(392): n is a, c, g, or t
gtgacgcagccacgagaaggttttttactgacccgtcactggcgggataccccgcagggcaccgaactgactttctggctggcgaccgatgacggcccgcttgaggtcacgctgccgccccaggagtcagtggcgtttatccctgaatcccagcgcgcgcaggttgaacgcctgctgcagggggaaaacggccatcgccttgccccgctcagcctgaaagattttcatcgccagccggtttttggcctttactgccgcgctcaccgccagctgatgcggctggaaaaaaagctgcgcgaaaacggcgtcacggtttatgaaggcgacgttcgcccgccggagcgctatctgatggagcgctttatcaccgccccggtgtgggtnnnnnnnnnagcgctatctgatggagcgctttatcaccgccccggtgtgggttga

SEQ ID NO: 254060 - DNA, 2007 bp, Klebsiella pneumoniae
atggagcgctttatcaccgccccggtgtgggttgaaggggagtcgcgcggccagcagctggtcaacgcccggatgaagcccaatccccactaccgcccgccgctaaaatgggtttcgctggatattgaaacaagccgccacggcgagctctactgcatcggtcttgaaggctgcggccagcgggttgtctacatgctcgggccggagcccgcctcgccccctgccgtcaacttccagctagagtacgtcaccagccgcccgcagctgctggaaaagcttaacgcctggtttgccgctcacgacccggacgtgctgatcggctggaacgtggtgcagttcgatttacgcgtcctgcaaaagcacgccgagcgctatcgcatcccgctgctgctcgggcgcggcaacagcgaactggagtggcgcgaacacggttttaagaatggcgtcttctttgctcaggccaacggccgcctgattatcgacggcattgaggcgctgaaatccgcgttctggaacttctcctcttttgcgctggaatcggtcgcccgcgagctgctcggcgagggcaaagccattgataatccctgggatcggatggatgaaatcgaccgccgttttcaccaggataaaccggcgctggccacctacaacctgcaggactgcgagctggtcacccgcatcttccataaaaccgagatcatgccgtttttgctggagcgcgcgacggtcaacggcctgcctgcggatcgccacggtggttcggtcgccgccttcagccacctctattttccacgcatgcaccggctcggctacgtcgcgccgaacttcggagaagtgccgccgcaggccagccctggcggctacgtaatggattcacgccccggtctgtacgactctgtgctggtgctggactacaaaagcctgtacccgtcgattatccgcaccttcctgatcgacccggtggggctggttgaaggtctggcgcagcccgatgacgctcacagcaccgaaggctttctcggcgcgcgcttctcgcgagataagcactgcctgccggggattgtcgggcagatctggcacgggcgcgacgaagccaagctgcataaaaacaaaccgctgtcgcaggcgctgaagatcattatgaacgccttctacggcgtgctcggcaccagcgcctgccgctttttcgatccgcgcctggcctcttccattaccatgcgcggtcacgcgattatgcgccagaccaaagcgctgattgaatcccagggctatgacgttatctacggcgataccgactccaccttcgtgtggctcaagcgggcccacagcgaagaggaagctggcgctatcggtcggtcgctggtggccttcgtcaacgaatggtgggcgacggagctgggcaaagaggggctcgccagcaccctggagctggagtttgaaacccacttctgccgctttctcatgcctaccattcgcggcgcggataccggcagtaaaaagcgctacgccgggatgattcaggaaggcagcgagcagcgcatggtgtttaaaggcctggagacggtacgcaccgactggacgccgctggcccagcagtttcagcaggagctttatctgcgcattttccgccatcagccctatcgcgactatgtgcgcgaaaccattgataagctgatgaacggcgagcttgacgatcgactggtctatcgcaaacgcctgcgccgtccgctggcggagtatcagcgcaacgtgccgccgcacgtgcgcgcggcgcggctggctgatgagcacaacgttcggctgggtagaccgcagcagtatcagcagcgcggcagcattaaatacgtctggaccaccggcgggccggaaccagtggattatcagcagtcgccgctggattatgagcactatctctctaagcaattagagcctgtcgccgaaggaatacttccctttgtcgacgacgattttgctacaatagtgacggggcaactggggctattttga

SEQ ID NO: 254061 - DNA, 1401 bp, Klebsiella pneumoniae
atggcgacggtgggacaaacgtgtcccgcggccgacgtcatcgaacgggaacaggcgaacagtttttgggaaccgatagtgtcaaaggcaaccgaacaaaacgacaagcttaaacgagcgatcatagtttcagtcgcgctgcacatcgtcttgatagcgctgctgatctggagttcgtttgacgagcatctggatgcttctgccggcggcggcgggggctcttctatagatgcggttatggtcgatccgggggcggttgtgaagaattatgaccgtcaacagcagcagcaggccagcgcccgccgtgccgccgagcagcgtgaaaagcaggctcagcagcaggcggaagagttgcgcgaaaaacaggccgccgagcaggaacggctaaaacagctggaacaggagcgtctgcaggcgcaggaagcggctaaagaggcgaaagagcagcagaaacaggcggaagaagccgcggcgaaagccgccgcagcggccaaagcgaaagcggacgctcaggcgaaagaggcgcaggaagctgccgccaaagccgccgctgatgcaaaagcgaaggccgatgctcaggcgaaagcagccgaagccgctgcggcgaaagcggcggcggatgcgaagaaacaggcagaagcagaagccgcgaaagcggccgcggacgcgcagaagaaagccgaagcggatgcagcgaagaaagctcagcaggaagccgagaagaaagcgcagcagcaggcagagaaaaaagcgcagcaagaagcggcgaaacaggctgcggctgaaaaggctgctgccgaaaaagcggcagaaaaagccgccgcgcagaaagccgctgctgagaaagcagcagccgagaaagccgccgcagcggaaaaagccgccgctgagaaagctgcggcagccaaagccgcagcagcagagaaggccgccgcagacaaagcggcgaaagccgcagccgctaaggcagcagccgcgaagaaagccgctgcggccaaagaggccaacggcgtggacgatctgctcggcgacctgagctccggtaagaatgcgcctaaaactggcggtggggcgaaagggagcaatgcatctgctgccgggagtggtaatactaaaaataatggcgcatcaggagctgatatcagcaattatgccgggcagatcaaatctgccattgaaagtaagttttacgacgcagcgtcttactcaggcaagacctgtaccttgcgtattaaacttgctccggatggcatgttgctaaatatacagtctgaaggtggggatcctgcgctttgtcaggccgctcttgcagcagcccgacaggctaagttcccaaaaccgcctagtcaggcggtatatgaagtattcaaaaatgcgccgttggacttcaaacctcagtga

SEQ ID NO: 254062 - DNA, 429 bp, Klebsiella pneumoniae
atggccagagcacgtggacgcgggcgtcgcgaactgaagtccgagatcaacatcgttccgctgctggatgtcctgctggtactgttgctgatctttatggcgacagcgccgatcattacgcagagcgtagaggtcgacctgccggacgcaacggaatcgcaggcggtaaaaagcaacgatgaaccgccggtgatcgttgaggtttccggagtcgggcagtacaacgtgaaaattggcccggaaacgctatcgcagctgccgcctgaacaggttattgccgaagccaggcgtcgacttgaggcgaatgagaaaacggtgttcctgatcggcggtgcgaaagaggtgccatacgatgagattattaaagcgcttaacctgttgcatagcgcaggggttaaatcggttggcttgatgaccaagccgatctaa

SEQ ID NO: 254063 - DNA, 693 bp, Klebsiella pneumoniae
gtgactgagatgaatatccttgatttgttcctgaaggcaagccttctggttaaacttatcatgttgattttagtttgtttttctatcgcctcctgggccattattatccagagaacgcgcattctcaactcggcgtcgcgtgaagccgaagcgtttgaagataagttctggtcaggtattgagctttctcgtctgtatcaggaaagccagggccgtcgcgataatctgaccggttcggaacaaatcttctacagcggttttaaagagtttgctcgtctgcatcgcgccaacagccatgcgccggaagcaattgtcgaaggggcatcgcgcgcgatgcgtatctcgatgaatcgcgagctggaatccctggagacgcacatccccttcctcggtacggtaggttctatcagcccgtatatcggtctgtttggtaccgtatgggggatcatgcacgcctttatcgcgctgggcgcggtaaaacaggcgacgctgcaaatggtggcaccgggtattgcagaggcgctcattgcgaccgcaattggtctctttgccgctatcccggcggttatggcttataaccgtctgaaccagcgcgtgaacaaacttgagctgaactacgacaactttatggaagagttcaccgctattctgcaccgtcaggcgtttaccagcagcgaaagcaataaggggtaa

SEQ ID NO: 254064 - DNA, 405 bp, Klebsiella pneumoniae
gtgaatacaacgctgtttcgatggccggttcgggtctactacgaagacaccgacgccggtggtgtggtttaccacgccagctacgtcgctttctatgaaagagcacgcacagagatgctgcgccatcatcacttcagccaacaggttttgctggctgaacgagttgcctttgtggttcgcaaaatgacgctggagtattttgcgcccgccagactcgacgacatgctcgaaatccagacggagataacctcaatgcgaggggcgaccctggttttcacgcagcgaatcgtcaacgccgagaacgtagttttgaatgaagctgaagttctgatcgtgtgcgttgatccactcttaatgaagcctcgtgcgcttcccaagtctattgtcgcggagtttaagcagtga

SEQ ID NO: 254065 - DNA, 291 bp, Klebsiella pneumoniae; identical to SEQ ID NO: 175003

SEQ ID NO: 254066 - DNA, 1140 bp, Klebsiella pneumoniae
atgatcgattatgaagtattgcgttttatctggtggctgctgattggcattctgctcattggttttgccgtcgccgatggcttcgacatgggggtgggcatgctcacccgtttcctcggtcgtaacgacaccgagcgtcgaattatgattaactccattgctccgcactgggacggaaaccaggtgtggctgatcaccgcgggcggcgcgctctttgccgcctggccgatggtctacgccgccgcgttttccggcttctacgtggcaatgatcctggtgctggcgtctttattcttccgtccggttggtttcgactaccgctcgaagaatgagaatacccgctggcgtaatatgtgggactggggcatcttcgtcggcagcttcgtaccgccgctggtgattggcgtggcgttcggtaacctgctgcagggcgttccgttccacgttgatgaatatctgcgtctgtactacaccggcaacttcttccagctgctgaatccgtttggactgctggccggtattgtgagcgtggcgatgatcctgacgcagggcgcgacctatctgcagatgcgtaccgtgggcgaactgcacctgcgtacccgcaccgtctcaacggtagcggcgctggtgacgctggtctgcttcgcgctggcaggcgtttgggtctactatggcatcgacggttacgtagtgaaatccgtcatggatcataccggcccgtctaacccgctgaccaaagaagtggctcgtgaggccggcgcgtggatggtgaactttaataatatgccggcgctatgggcgattcctgctctgggcgtggcgctgccgctgctgaccgtcatttcgaccaaagcagataaaggcgcctgggcatttctgttctcctcgctgacgctggcgtgcatcattctgactgccggtatcgccatgttcccgttcattatgccttcaagcacggcgatgaacgcgagcctgaccatgtgggatgccacctccagccagctgacgctgaacctgatgacttacgtggcgattgtcttcgtaccgattattctggcctacaccacctggtgttactggaaaatgttcggtcgcatcactcgcgaagacatcgaaaagaacacccactcgctgtactaa

SEQ ID NO: 254067 - DNA, 1569 bp, Klebsiella pneumoniae
atgttagatatagtcgaactgtcgcgcttacagtttgccttgaccgcgatgtaccacttcctgtttgtgccgctgacgcttggtatggcgttcctgctggccatcatggaaacggtctacgtcctttccggcaaacagatttataaagatatgaccaagttctggggcaagttgtttggtatcaacttcgctctgggtgtggcaaccggtttgaccatggagttccagttcgggacaaactggtcttactactctcactacgtgggcgatatcttcggtgcgccgctggccattgaaggtttaatggccttcttcctcgaatctacctttgtaggtctgttcttcttcggttgggatcgtctgggcaaagtgcagcacatggccgtgacctggctggtagcgctcggctccaacctgtcggcgctgtggattcttgtcgctaacggctggatgcagaacccgattgcgtcggacttcaactttgaaaccatgcgtatggagatggtcagcttctctgagctggttctgaacccggtggctcaggttaagttcgtgcataccgtggcttccggctacgtgaccggcgcgatgttcattcttgctatcagctcctggtatatgctcaaagggcgcgactttgcttttgccaagcgctcctttgctatcgcagccagcttcggcatggcggcaatcctctccgttatcgttctcggtgatgaatccggttacgaaatgggcgacgtgcagaaaaccaagctggcggctatcgaagcagaatgggaaactcagcctgctccggcggcctttaccctgtttggtattcctgaccagaaagcagaggagaaccgcttcgcgattcagattccttacgcgctgggcatcattgcgactcgctccgtcgataaacaggtcaccggcctgaaggatctgatggttcagcacgaagagcgtatccgtaacgggatgaaggcttacgcgctgctggaacagctgcgtgcaggttcaaccgaccaggccgttcgcgatcggtttaacgacgtgaagaaagatcttggctatggtctgctgctgaaacgctataccgacaacgtctccgacgcgacggaagcgcagattgcgcaggcgaccaaggactccattcctgccgtggcgccgctctattttgccttccgtatcatggtggcgtgtggcgtgctgatgctgctgattattggcgcctccttctggaccgtgattcgtaaccgcattggcgagaaaaaatggctgctgcgcgctgcgttttatggcctgccgctgccgtggattgccgtagaagccggctggtttgttgccgagtatggccgtcagccctgggctatcggtgaagtgctaccaacggctgtagcgaactcgtcgctgactgcgggcgacctgatcttctctatggtgctgatttgtggcctgtacacgctgttcctggtggctgaactgttcctcatgttcaagtttgcccgcaaaggaccaagcagcctgaaaaccggtcgctatcactttgaacagtcctctgcggctattcagtcggcacgctaa

SEQ ID NO: 254068 - DNA, 450 bp, Klebsiella pneumoniae
atgaagaaatcaacactcgttattggcgtcattggtgctgactgccatgcagtaggcaataaagtcctggaccgcgtttttactgcccatgattttcgcgtaatcaatctgggcgtgatggtcagccaggatgaatatattgatgccgccatcgaaactggtgcggatgccatcgtcgtgtcgtcgatttacggccacggcgatatcgattgcctgggactgcgcgagcgctgcatcgaacgcggtatcggcgacattctcctttacgtcggcggcaatctggtggtcggaaagcatgactttgccgacgttgaagcgaagttcaaagagatggggttcaaccgcgtttttgcccccagccacgatctggaagacgtctgccagctgatggcaaacgacatcaaccagcgccatggcgttaaacacccgtgtctggaagaggccatctga

SEQ ID NO: 254069 - DNA, 1389 bp, Klebsiella pneumoniae
atgcaaaccgtctcagtcgatatcggctcgacgtggaccaaggcggccctcttcacccaggagggggatgagctgacgctggtaaaccacgttctgaccccgacaaccacccatcacctggcggaaggcttttttgccagcctgaaccaggtgcttaacgttgccgatgcgcgcccgctgctgaaccgcggtgacgtcacgctgaaatactcctcatcggccaaaggcggtcttgccgtcgccgcgatggggctggtgccgtccatcaccctggagtcagcaaaagtcaccgcccactcggcgggggccaaaatcgcccaatactactcttataaactgaatcgccacgacattcaggcgctggaagcctcgccgccggacattctgctgtttaccggcgggaccgacggcggtgaagcgagctacggcctggctaacgcccacgcgctggcggagtcaacgctcgactgcgccattatctatgccggcaaccgcgacattcaggacgagattcagaccatcctcggccataaagatctgaccacggtagacaatattctgcccgatcttgatcacccgaatccgtacgcggcccgcaaggcaatatgcgatgttttcttatcccggatcgtcaaaggtaaaggactggacgttatcgtcgcagaaaccggcgaagagccgatgccaacgccgtggaccgtctacgaactggtgaaaaccatcagtcattacgacagcgcgtggaaagagttcatgctgatcgacatgggcggcgcgactaccgatgtctactccgccagcgccaacacgctctcgccggataccgttctacacggcgttccggagccatatgtaaaacgcacagtggaaggcgatctcggcatgcgcgtctcggcgatggttgtcggtgaaagcgcccgggagctggtgaacgtggtctttgcccaccagccgcagcgtcaggaggctttttaccgctatctgcgccatcttgtcgctcagccggattatctgccggccagtgaagaagaaaagtatttcgacaccgttctcgccgggctctgcgtgggctacgccagcgaacgccacgcgggaaccaaaaaacaggtctgcacctgcgtgggcaacgtcgacctgcagatggggcgcgacctgaccccggtgcgcaaagtcgtcggatccggtggatggctctcccgcgccagccgctttgacatccaccgctggctgaaataccgcgaactggatgacgacggcagacgcattctcttaccgacccagtttgactattaccgcgatgcaaaaggcctgcttccgctgctggcaaacgttgccaggctttatcccgaactcgccgctcgcaccagcattcactgtttaaccctataa

SEQ ID NO: 254070 - DNA, 1446 bp, Klebsiella pneumoniae
atggaacttcgaaataaaaaattaacccatgacgaattcatgaccgagcggcatcaggtgttgcagacctggcataccggcaaggacgttgagcacttcgaagatggcgtgaagtaccagcaaactattccagagaaaaaacgcttttctcacgccctgcttaaggccgaccaggaaggtaaaacgttgagccagccgcgcgcgggcgtagcgctgatggatgaacacattgcgctactcaagacgctgcaggaagagtgcgatctactgcccagtaccatcgatgcctacacccgccttaaccgttacgaagaagcggcggtcggcattcagaaatctatcgaagcgggtacctccaaactcaacggtttaccggtggttaaccacggcgtcgctgcctgccgccggatgaccgaagcgctggaaaaaccggtgcaggtacgtcacggtacgccggacgcgcgcctgctggcggaaatttccatggccagcggctttaccagctacgaaggcggcggtatctcctacaacattccctacgccaagcgcgtgaccctggagaagtcgattcgcgactggcaatactgcgaccgtctgatgggcctttatgaagagcacggcattcgaattaaccgcgaacctttcggcccgctaaccggcactctgatcccgccgtttatgtcccacgcggtggcgattatcgaagggctgctggcgctggaacagggcgtcaaatcaattaccgtcggctacggccaggtgggcagcctgacccaggacattgcagcgattaagtcgcttcgcgaactttctcacgaatattttggcaattacggtttcgacgattatgaactgagtaccgtcttccaccagtggatgggcggttttccggaagatgaatcaaaagcgtttgccattatctcgtggggcgcggcggtggccggcatgtccggcgccaccaaagtgatcaccaagagcccgcatgaagcgttcggtattccaaccgcagcggccaacgcgcagggcctgagggcctcccgccagatgctcaatatggtcagcgatcagaagttcccgccgtgcgccgcggtagatcaggaagtggagctgataaaaagcgaggtacgcgcggtactgaagaaagtcttcgaactgggtaacggcgatatcgcccgcggtacggtgctggcctttgaagcgggcgtgctggacgtgccttttgctccggcatcctgcaacgcgggcaaaattctgccggttcgcgacaattccggcgccattcgcgtgcttgaagctggcgcggttccgctgccgaaggacatcctcgccctgcaccacgattacgtcgcagaacgtgcgcattttgaaggtcgcaagccctcattccagatggttgttgatgacatcaacgcggtatcccacagtcaattaataggaagaccataa

SEQ ID NO: 254071 - DNA, 1242 bp, Klebsiella pneumoniae
atgaaaattaaacaggcccttttcaccgctggctactcctcattctactttgatgaccagcaggcgattaaaaacggcgcgggtcacgatggattcatctataccggcgcgccggttacccccggatttacctccgtgcgccaagcgggtgaatgcgtttccgtgcagctgattctggaaaacggcgcggtagcggtcggtgactgtgccgccgtacagtattccggcgccggcggccgcgacccgctgttcctcgcggaaaattttattcccttcctcaacgatcatattaaaccgctgctggaaggccgggatgtcgatacgttcctgccgaacgcccgcttcttcgacaagctgcgcatcgacggccaactgctgcataccgccgtccgctatggtctttcccaggcgctactcgatgccacggcgctggccagcggccgtctgaaggcggaggtggtttgcgacgaatggcaactgccctgcatcccggaagcgattccgttatttggtcagagcggagacgaccgctatatcgccgtggacaagatgatcctcaaaggggtcgatgtcctgccgcatgcgctgattaacaacgttgaagagaagctgggtctgaaaggggagaaactgcgcgagtatatccgctggctgtccgaccgcatcttaagcctgcgcaccagcccccgctaccgcccgacgctgcatatcgatgtttacggcaccatcggcctgattttcgatatggacccgcttcgctgcgccgaatatatcgccagcctggagaaagaggcacagggcctgccactctatatagaaggcccggtggatgccggcaacaaaccggatcagatccgcatgctgaccgccatcaccaaagagctgacccgcctgggttccggggtgaaaatcgtcgccgacgaatggtgtaacacctatcaggatatcgttgacttcaccgatgccggcagctgccacatggtacagattaaaaccccggacctcggcggcgtccataacattgtggacgcggtgctgtactgcaacaaacatgcgatggaagcctatcagggcgggacctgtaacgaaaccgagatcagcgcccgcacctgcgttcacgtcgcgctggccgcgcgtcctgtacgcatgctgatcaagccaggcatgggcttcgacgaaggtcttaacatcgtgtttaacgaaatgaaccgcaccatcgcgctgttgcagactaaggattaa

SEQ ID NO: 254072 - DNA, 1371 bp, Klebsiella pneumoniae
atggctcgtacctttaagatcttatcgccgaccgcgattctgggttatggctttccggaagagagctttcttaaagccatggcggagtctccggatctgattgccgttgacgccggttcatccgatcccggcccccattatctgggagcaggtaaaccctttaccgacagagccggagtgaaacgcgatctgcgctatatgatcgtcgccggcgtaaaaaacagtattccggtggtgatcggcacggccggcggctccggcgcggccccgcacctggagtggtgccggcaaatcatccatgagattgcgcaggaagaaaaactgtcgttttccatggcgctgatcccgtctgacgtcgagaaatccatcgtgcatcaggcgctggataacggcaaaatcaccgccctcgactttgtgcccgagctgacccacgaagccattgaagagagcacctatatcgtcgcccagatgggtatcgaaccgttccaacgggcgctggccaccggcgcccaggtggtgctgggcggacgggcgtacgatccagcctgcttcgcggcgctgccgattatgcagggcttcgatgagggactggccctgcactgcggcaagatccttgaatgcgcggccattgcggcgaccccagggtccggctccgactgcgcgatggggatcatcgacgacaacggttttacgctgaaaaccttcaatccacagcgcaaattcaccgaaacgtccgccgcggcgcacacgttatacgagaagtccgatccgtacttcctgccggggcccggcggcgtgctgaacctcaaaggatgcagcttcaaagcggtcaacgaaggcgaggtgtacgttagcggctctcgccacgaagagacgccctacgcgctgaagctggaaggcgcgcgtcgggtcggctttcgctgcctgaccattgccggaacccgcgacccgatcatgatcgccgggatcgacacgattcttgcagaggtacaggccagcgtggcgcgcaacctctcgctgagtgacgacagcatccgcatgactttccatctgtatggaaagaacggcgtgatgggcaatcatgagccgatgaaaagcgccgggcacgagctggggattttactggacgtcgtcgccccgactcaggataccgccaacagcgtctgttcgctggtgcgctctaccctgctgcactacggttatgaaaaccgcattgcgaccgcgggcaacctcgccttcccgttctcgccttccgatattcagagcggcccggtgtatgagttctcaatctatcacctgattgaagcctgcgacgcgctgcgctttgacttccatatcgaacaggtcacgccagaaggagttcaggcatga

SEQ ID NO: 254073 - DNA, 318 bp, Klebsiella pneumoniae
atgaaacaatctctatgctcactggcgcaggtgatccgctccaaaaacgccgggccgtatgaattagttttagatattttatttaaaacccgggaggattatcagcgggtaaaacgatctgagcaattaactccgcagcttattgccagcttgtataacgtgagacctgattttattcatcgcattgtctggtttgacccggctaacgcggtaaaaattgtcatgccgcgggatattatttccggcaacgttggcgacaatgatgtttatggcgctcagcaacatgcgccgttattaagtattgagttcgatttctaa

SEQ ID NO: 254074 - DNA, 1308 bp, Klebsiella pneumoniae
atgaaaaaaataagtttaaccaaaatgatcatattaggcctgatactcggcatgattgccggggtggcaattaataatatggcatcggctgatacagcaaaatcatacgcgcaggatatttctattttcaccaccatatttttacgcatggtaaaaatgattatcgctccgctggtaatatccacgctggtagttggcatcgccaaaatgggcgatgctaaaacgctcgggcggatattctcgaaaacttttttcctgtttatttgcgcctcgctgctgtcgattgcgctggggctggtgatcgttaatctgttccagccgggggcggggattaatttcgtcgcccacgatgccggagcggtcgcggccgttcagtctgagcccttcacgctgaaggtatttatctctcacgcggtgccgaccagcatcgttgatgcgatggcgcgcaacgaaatcctgcaaatcgtggtgttctccattttcctcggctgtagcctggcggctatcggcgaaaaagccgaacccattgtgaaagtgctcgattcgctggtccacgtaatgttgaagctgacgggctacgtcatgctcttcgcgccgctaaccgtctttgccgctatctccgggctgatcgccgagcgcggtctgggcgtaatggtcagcgccggtatctttatgggtgagttctacctgacgcttggcatgctgtgggcgatgctgattggcctgtcggcggtcattgttggtccgtgcattggccgtctgaccaaagcgatccttgagcccgccctgctggccttcaccacgtccagctctgaagccgccttcccgggcaccctcgataagctggaaaaatttggcgtctcttccaaaatcgccagcttcgttctgcccattggctactcctttaacctggttggctccatggcctactgctcgttcgccacggtgtttatcgctcaggcctgcaacgtgcacctcggcatgggcgagcagatcaccatgctgctgattctgatgctgacctcaaaagggatggcgggcgtaccgcgcgcctcaatggtagttattgccgcgacgctgaaccagttcaacattccggaagcgggcctgatcctgttgatgggtgtcgatccgttcctcgatatgggtcgctccgccaccaacgtaatgagtaacgccatgggcgccgccatcgttggccgctgggaaggcgagcactatggagaaggctgccgcggcaccgccccggtcaaaaaacccgagcaggagcgtcctgccagcgaaacgtccgaagtggcgatgtcctga

SEQ ID NO: 254075 - DNA, 1002 bp, Klebsiella pneumoniae
atgaacgttaaatttctcggcacctgcctgttcaccgccagcttattgtttagcggcgccgccgcagctcagggcgcaccggactacgccagcattatcgagcaggcgcatcagaaatataaaaataaccacgagggtaaagtcgccgactacatccccgctctggcgacctatagcccggataatttcgccattacgctcgcgacggtagaaggcaaaatttaccagaccggcgacgtaaaaaaagcgttcccgatggagtccctgagcaaagtgttcaccctggcgctggcaatggagcaacgcggaccgcaggaagtgttggataaactcggcgccaacgccaccggcctgcccttcaattccggattagccgtcgaactcacccaaggcgcgccggagaatccgttagtcaacgccggcgccatgagcaccgtgagcctgattgcggcgcaggacaaaaccgaccgctggaataaaatcctcaacaatctcagcgcctgggccgacagtacgctgagcgtgaacgagccggtatttcaatccgaaatggcaaccaaccagcataaccaggcgctggccatgttgatgcattcctaccgcagcttttatggcgatccgcaggaagccgtcgaaatctacacccgtcaatgttcggtggatatcaccgttgagcagctcgccaaaatgggagccgtgctggccaacggcggaaaatcgccgttcaacggcaggcaactgcttaacgccagctatgtgccgcaggtactggcggaaatggcgatagccgggctgtacgacggcagcggcagatggctgtatagcgtcggtattccggcgaaatccggcgttggcggcgggatgatcgccgtggtgccggggcggtacgccatcgccgtctactcccctccgctggatgcagccggtaatagcgttcgcgcccagcaaaccatcgagtacgtcgctaaagcgacgcaggccaatctctttttcgcgaaatag

SEQ ID NO: 254076 - DNA, 1653 bp, Klebsiella pneumoniae
atgtctaaaccctttgtctggcaggaactctttgtacagagtaaagataatacggaatatgaactactcagtaatcaacatgttaaggtgacagagttagatggtgaagaggtcatcaaggttgcgcccgaagcgttaacgttgctggctcagcaggcattttatgaggcttcatttttcctgcgcgccggacatttaaaacagatcgccagtatcctgcacgatccgcaggccagcagtaacgataaatacgttgcgctgcagctgctgcgcaacgccgaagtctcggcaaaaggcgtgctgccaaactgccaggataccgggaccgcaaccatcgtggcgagcaaaggccagaacgtctggaccggcggcaacgatgctgaagccctgagtcagggcgtctacaacaccttccaggaaaataatttacgctattcgcaaaatgcccccctcgatatgtacaccgaggtcaacacggagactaacctgccggcgcagatcgacatcagcgccgtgccgggtagcgaataccgcttcctgttcgtcaacaaaggcggcggctcggcgaacaaagcagcgctgtttcaggaaacaaaatccatcctacagccggaaaaactcaccgccttcctgattgaaaaaatgaaagcgctgggcaccgccgcctgtccgccgtaccacatcgcctttgtggtgggcggcctctcggcggatcaggcattgaaggtggcgaagctggcttcgaccaaatattatgacaatctgcccaccagcggaaatgcgctgggccaggcgtttcgcgataccgcgctggaggcgacgttgcttaacgccagccgcgagttcggcatcggcgcgcagtttggcggcaaatatttcgctcacgatattcgcgtgatccgcctgccgcggcacggcggctcctgccctatcgctatggccctctcctgctccgccgatcgaaacattaaagccaaaatcaacaagcacggcatctggctggagaagctggaacataacccgggcaagttcattcctgattctcagcggatagaaaacggggcgcagaccgtccagctcgatctgaatcggccgctgagcgatatccttcgcgatatgtcagccctgccggtcggtacccggctgtcgctgagcggtccaattgtcgtcgcccgcgatattgcccatgccaaaattaaagagcggctggataatggcgaaccgatgccggcttacatgcgcaatcatatcgtctactacgccggaccggcaaaaacgccagacaatcttgcctgcggctcgctgggtcccaccaccggcggacggatggacgggtatgttgatgctttccaggccgcgggtgggagtctgatcatgctctcaaaaggcaaccgcagcccgcaggtgaccgaagcctgcctgaaacacggcggctttaatctcggcagcatcggcggtgcggcggccctgctggcgcagcagtacgtgaaaagtttacgctgccttgagtatccggaactgggcatggaagcggtatggatgatggaagtcgaaaacctgcccgcgtttgtgctggttgacgacaaaggcaacaacttctttagccagttcgagcagcagcaccgctgcgccacctgtccggcagggcactaa

SEQ ID NO: 254077 - DNA, 603 bp, Klebsiella pneumoniae
atgcacgcgcgaggcaatcctgaccgccatcgtcagcgccagcagaagctgaaaacgcaggttgatacccgcgtggcggcggcaacggagcaaaaaggcatcttgatcgtcttcaccggcaacggtaagggcaaatctactgccgcctttggtacggcaacgcgagccgtcggacatggtaagcgcgtcggcgttgcccagttcattaaaggccagtgggataatggagagtacaatacgctgcatcctctgggcgttgagtttcacattatgggcaccggctttacctgggaaacgcaaaaccgggaaacggatatggaggcggcatcggccgtatggcgagagagtaagcgcatgctggccgatccgagctacgatctggtggtgctggatgagctcacgtatatgctggcgtatcgctatctggatccacaggaagtaattgccgctattgtcaatcgtccgccgcagcagaacgtgattgttactggccgcggctgccatgcccgcctgctggagcttgccgatacggtcagcgagctgcgcccggtgaagcacgcctttgacggaggtattcaggcgcaggcaggaatcgactggtag

SEQ ID NO: 254078 - DNA, 903 bp, Klebsiella pneumoniae
atgagaggaaaaataccgaaaactgaattactggtgacttttgaggttgtggctcgccatgaaagttatacccgggcagcggaagagttggctttaacacaaagcgccgtgttccgacaggtcacggcgctggaggatttcctccatacgtcattatttaatcatgctaaaaaaaggatttttttaaatgaggccggcaagcattatttgtctatcgttaaagaaacgttgaacaaactggagcgtgataccaattcgattatgacctggcaaccgacggtgcaggttcttgaactggccgttaatcccacctttagcacccactggctgatccccaacctgcgcgagtttaataaattaaatcctgacatcatcgttaatattcattcgctggccagcatgagtgattttctgagccgcgagtacgatgccgccattatgcgcgaggatttttgctcgccgtggtctgaagtggagtatctgtttgaagaggagattttgccggtgtgcggctgcggactgctgtcggaacccgggcaaaagctggcggtggaggagctgctgggcgaatttccgctgctgcatcaaagcacgcggattcacggctggcaggagtggtttgcgctgtcgaatatcaccagcccgcagatcaacatcggtccacgtttcgatctgctctcgatgctgattgcggcagtgcgttcaaatctgggagtcgcgctactgccgcgttttgccattcagcatgacctggatagcggtgagatggtgatcccctgcgatgtgccgattcgtaccggtaaccgttttattatgacgtggcaggaggataaaacggaatcccgtcatttgcaggtatttcgcgactggctgctgcaaaaatcggtggtgtcggctgcctga

SEQ ID NO: 254079 - DNA, 693 bp, Klebsiella pneumoniae
atggcggaaaataaaagggataatggcatcgttttttttagttcgttaacagatgttttttcgcgggcaacggggctgacggcgacggttattaaggtaaccgacggtcgcttgcccgattgctatgcgggggcagagttcttttccctaccgctggttcaaagcaatgaaatatgcgggtatattatttttgaccatcgagcagcaaccgataataatcatcgctcggcggcgataaggcttctgcatttcatcgttagtcattactcagcgatggaagaagcagaggaggaaggtgcgagactggcgcgacaaaagagcgctttttattatgcgcaaaaatcgccgcatgaaataaaactggcggctgcgctgcgctatattgatgaacatttatatgatgagctgtctctggaatctgttgccgcccatgtttgtctcagcgctaactacttcagccgtttttttaaaaagcgtcagggcataaattttaaggtgtgggtcaatcagaagaaaatgcagcgtgccggagagctgctcggggacccggctaattccatagacagcgtggcgcgtaagcttcagtttgcgcaaaccagctacttttgccgggtgttccgcgctgctcaccgcacgaccccccagtcgttccgcgaacggaacctctggagatcttcacctcgcatcggttag

SEQ ID NO: 254080 - DNA, 1257 bp, Klebsiella pneumoniae
atggccgtcactacaggcgttatcgccgacgattttaccggcgcaacggatatagcaagctttatggctgaacagggctggcgagtcgcgctgctgcccggcatgcccgatatcactcagagctggaacgaagaggttgacgctatcgtcatctcgttgaagagccgcgctttaccggcagaacaggccgtcgcccagtccctggcctgcgcccgctggctaagacaaaacgccggcgtccgccagctctatttcaagtattgctcaacctttgattccacgccggcgggcaacatcggcccggtaagcgatgcgctgatgaacgacattcaggccccgctaatcgttcactgccccgctctgccgcaaaacgggcgcacggtggtccacggccatctgtttgtgaacggggtgctgcttaacgaatccggtatggaaaaacatccgctaaatccgatgaccgatgccagcgtaccgcgcctgctggccgcgcagacggccagcccggttgggcacattgctctcaatacgattcgcagcggtgtggaagcggtcacttacgccttagcacgctatcagactgaagggacgcgccatgtgattgtcgatacgctggacggcaccgatctccataccctggctcaggcgctgcaggagtatccgctgctggccggaggttccggtctcggcggcgcgctggccgctaacgctggtggtcatcctgttgcgtcgccgcaccgctttccctctcccgccagagcagtcgtgttctccggcagctgttcgacgatgagcaaccgccaggtcaaccgctataaagcccaggcggcatcctgtttgcttgacgttgcccgctgcctgtcggataccgaaagctacagcgacgaactgtctacctgggcgatggcgcatatcagcgacccgctcgcgccgctactttatgccacccagccgccagaggcgctacagcgcattcagcaggaatacggcgaacaggccgccagtcgggcaatcgaacgcactttcgcccggctgagcgccaaacttctggctgcaggcgtcaacacctttattgtcgctggcggagaaacctccggcaccgtcgtggaagcgctacaggtgaagcgcctggccgtcggcagagcgatcgcgccgggcgtaccttgggtcttctcctccggcctggcgctggccctgaagtcaggcaactttggcgacgaagatttcttttttacggcccaggagtatccatcatga

SEQ ID NO: 254081 - DNA, 645 bp, Klebsiella pneumoniae
atgaatccggtgagtgaacaccaactccgcgaacagctggtccactatgggcgctcgctgtttatgcgcggctacagcagcggcggttccggcaatctcagcgtgaagctgccggacggcggctatctggtgaccccaaccaattcctgtctgggtgaactgcaggccgccaccctgagtcgactggatgccgatggcgtgcatctcagcggcgataagccgtcaaaagaggtccctatgcatctggcgtggtaccgccaccggccttcctgcggggccgtagtacatctgcactctccgtggctgaccgcgctctcctgtctaccgtgcgccacgccggaaaactgcctgccgccgctaacgccgtactacgtgatgcgcgtcggacggctgccgctgctgcactatttcaaacccggacacgagggcattgccagcgcgctcagtgacatcgccgcagaccatacggcggcgctactggccaaccacgggccggtagtgagcggtcgctcgctgcgcgaggcggtgtttaacgccgaagaactggaagacagcgcccgtatctggctgaccttaaaaccgctcggctatgtcccgctctcagaagcagcggtggccgaactcgaacaatcccgacaggcctga

SEQ ID NO: 254082 - DNA, 807 bp, Klebsiella pneumoniae
atgatcccggaacaacggcgcgactttatttaccgctacgtgcatgaaaaaaacgccgcctccttcaatgaactggcggagctgatgagcgtgtcgcatatgacggtacgccgcgacattcagctgctggaagaagaaggcaaggttatcgccattaacggcggcgtaaagctcaataatctgcttaaatccgagctgccgtggcgagagaaagcggagttgcatcatgaagtaaaacgcaaaatgggccagctggcggcgatgctcatcgagccgggtcaaacgctctacctcgatgccggcacctcgttgtttgaagtggcgaaagcggtggccgccagccgctgttttaacctgacggtcgtcaccaacgacttttccatcagccactacctaatggatatgccgcatatcacgctctatcacaccggcggcctggtggaccagcgcaaccgctcaagcattggtaaaagcgccgccagctttcttcgcaccattaatattgacgtagcgtttctgagctcctcttcgtgggataccgaacgcgggatgtcaacgccgagcgaagggaaagcctcggtcaaggaggcggtgctcaccgtttcccggcgtcgggtactggtctgcgatagcagtaaatttggcaaatacggcatgttccatatctgcgggctggagcaattgaccgatattgtttctgataaccggctaccggaggatgcgcaacacactattgccagccagggggtgaagctgcatctggtagatagccgggagggagcgcatcatgctgaagctcgcggctaa

SEQ ID NO: 254083 - DNA, 777 bp, Klebsiella pneumoniae
atgctgaagctcgcggctaacctcgactggctatttaccgatttaccgatagcggcacgtttcctggcggcaaaagcggccggttttcacggcattgaagggctatttctctggcaacacccgctggaacagctgcaggcggcacagcggcaaacgtctctaccgctggtgctgatgaacgctccggcaggcaactggtctcagggtgaacgcgggctggcagcgctacccgggcgcgaagaggagtttcaccgcagtctggagcgggctcgtcattatgccacggcgctgggctgccgccgggttcacgttatggcgggcttgcgctgcgatgctctgacgcatcaggcccagcttgagctcttgcgcaacaggctgcgtatcgcctgcgatgtgctggctgttgcgggaatagacgtgctgattgaaccattaaactcgcaggatatgcccggctattttattgatagctttccgctggccgcagcaatcattgaccaggtcgccaggaacaatatcggtttacagtttgatatttatcactgccagaaaattcacggcaacgtcgccaaaaatattgaacgctactttacgcttatcaaacatattcaaattgcttccgttccttatcgccatgaacctgggaccggcgaattaaatgaagcatggttattcgattttattaaaaaaatgaactacaagggctggattggttgtgaatatcaaccctcaacatcaggccccgaatcattacgctggataacgccttacctgtaa

SEQ ID NO: 254084 - DNA, 813 bp, Klebsiella pneumoniae
atgtcggataccgttattatctcgctggcgcccgttgccgcggattgccctcgagtcatacccgaagaactggcgcaggaaatactcgccagcgtagaatatggcgcggcgattgttcatctgcacgtccgtgataagcaggggcgtctgacgccggacaccgtcgattttcaggccacaatcgaccctgtgatgcgccattcaaacctgataattcaggcctctaccggcggcgtctcttcgctgtccatcgccgaacgctgcgcgcccctggcctgctcaggagtggagatggcgtcgcttaacgtcggctccgttaaccttggcgatgccgtttactttaatcccggcccggacgtcgaatattgtgcaagacaaatcatcgcgcataacataattcccgagtttgaagttttcgaaattggcatgattaataatatcctggctctgcaggaaaatatcaaattcaaaactccgatgctgtttaatattgtactggggcatcgcggcactactcccgccacgattgatacattaattgccatgcgcagcatgctcccccgcgaggccttatggggaataacgcattttggcagaaagaatttcgacattatcgctgccgcagtcgccatgggcgccagcgaggttcgaattggctttgaggatagctattatttaagcgcggaagaaaaagcccagaataactatcagcaggtcgccaaactcgccaccctgattcgcagcatggataagaaagtcgccacgcccgacattgcgcggcaaatgttatctattcccccccggcagcaataa

SEQ ID NO: 254085 - DNA, 1344 bp, Klebsiella pneumoniae
atgactatgaccactgttattcacaaaaccggtctcggcgtcagcatcgccggcgccgccctggcggcggttggcgcgctgatgcattcacccgcgctctggcagcctgggctggtgatgttcaccgccggttttgcggcgggagcaggatactggccggggttacgcagctatcagtttaccttgtggatcatcgccggtttcgttgccgcgatgacctggtctacggatctgatcgtctggggcggctttaacatcacccataaatggatcgttttcctggtcatccaggccactatgttcagcatgggcaccaagctgacgatccaggattttatcgatgtcgccaaaatgccgtgggcggtgtttatcggtaccttctgccattttgtcattatgcccctgctcggcctgaccattaccctggtcttcaactttccgccggaagtcgcggtgggcatcctgctgattggcgcgtgtcccagcggcctctcttcgacggtgatggtttacatcgccaacgctaacctggcgctggcggtatcgatagcggcagtatcaaccctggcggccacggtgatgacgccgctgtgggttaacctgctggcgggctcgatgatcgatattcagctgaccgcaatggtgatggacgtggtgaaaatcgtgctcatcccgatcggcgcggcgatcttacacgactacctgaaaacctacgccagtatacgcggccgccgtattgtgcagggactggccgggctcggcgctctgtggctgctgtatatgagcgccggaggctggaacacgctgttcgccagcgccggcgccgaagcgcaaatgtacgccgtggttgtcaacttcgtggctggcggtctcgtctgggcgctgttttacaactggctgtatggtcgcgttgaaggtattaagaaaatcatgccgactatctcgatgatagggattattttcttcacgaccaccgccgccgctgcgggacgcgacaacctggtgcaggtcggcttcctgctctgtttcgccatgctgatgcataacctcggcggtttcctgattggctatctgatgagtcgctggatctttcgcatggacgtacagtccgcccgtaccgtggcctttgaagtcggactgcaaaacggcggaatggcgtcggggcttgccgccgcgatgggcaagctggcaacagtgggccttgcttccgcggtgatgactccgcttggcaacgtcagcggctcgctgctggcgaactactggcgcaaaaaggacgcccgacaggcgcaggccgccgcgaacaaccccgctcaaaccgtttctgaacatctttcaaaaggataa

SEQ ID NO: 254086 - DNA, 420 bp, Klebsiella pneumoniae
atgacgactatcactctggaacaggctttacgcgccgtagcgttcgcgcttgacctcgctgactcctgctatgcaaagcgcccgctaagcgtagcggtgtgcgacgccagcggggagctgctcagcttcgcgcggatggacaatgccaaattgttaaccattgaacttacccagcgcaaggcgcataccagcagtcgcctcggctgtaccacgcaggcatttttacagcgcctgcaaaaagagcagctggacatcagttactttgccgatccgcattttaccgccctgcccggcggggtcccgcttctgtacgacggtaaatgtctcggcgccgtcgcggtaggcgggctatcggcacaggaagatcacgacgcggcgctggccgtcgcagaaaatttgcttaaggagatagcccaatga

SEQ ID NO: 254087 - DNA, 654 bp, Klebsiella pneumoniae
atgaaaaagatcgctatgctgcacaccagttcagcgacgctcgcgatgatgcagcagctgattgccgatatcatgccggaagtggaagtcatgcatctggtggaagaatccatgatcaagcaggtaatgaaggccggaggggtaacgccgaatattgccgcccgcatcgccgactacgtgcatattgccgaaaaagcggactgcgatattttcattaccgcctgctcttctattggcacggcggtggaacagtgccagtttctgacgccgcttcagctcgcccgtattgacaacgcgatggtcgaagaagcgattgaaaaaggcgagcgtatcgccgtgctggcaaccgtagcgaccacgctaaagccgacgctggattacgtccagcgcaaagtacaggagagcggtaagccgcgcgccagtacccccatattaatggaagaggcattccacgcgctgctggcaggcgatatggatacccatgaccgaatcgtcagtgaagggctacaaagcgcgtttagccaggcggatgtagtgatgctggcgcaagcctcaatggcccgggtattgcagcagctccctgccccgccggtaccggtcatgacctcaccagaaagcgggattcgctggctgaaagcgctggcggagagctga

SEQ ID NO: 254088 - DNA, 870 bp, Klebsiella pneumoniae
atgtccgttttaattaataaagacaccaaggttatctgccagggtttcaccggtagccagggcacattccactctgaacaagccatcgcttacggtacgcaaatggtcggcggcgtcaccccgggcaaaggcggcaccacgcatctgggcctgccggtattcaataccgttcgcgaagcggtcgaagccaccggcgcaaccgcatccgtgatctacgttccggcgccgttctgcaaagattctattctggaagctatcgatgctggcattaagctgattatcaccatcaccgaaggtatcccgacgctggatatgctgaccgtgaaagtgaagctcgacgaagcgggcgtgcgcatgatcgggccgaattgcccgggcgtgatcactccgggcgaatgcaaaatcggcatcatgccgggccacattcaccagccgggtaaagtgggcattgtttcccgttccggtaccctgacctatgaagcggttaagcagaccaccgactacggttttggtcagtccacctgcgtgggcatcggcggcgacccgattccgggatctaacttcatcgatatcctgaaactgttccaggaagatccgcagaccgaagcgattgtgatgatcggtgagatcggcggtagcgcggaagaagaagcggccgcttacatcaaagatcatgtgaccaaaccggttgtcggctacatcgccggcgtgaccgcgccgaaaggcaaacgtatggggcacgcgggtgccatcattgcgggtggtaaagggacggcggatgaaaaattcgccgctctggaagccgctggcgtgaaaaccgttcgcagcctggccgatatcggcgaagcgctgaaaaccgtcattaagtaa

SEQ ID NO: 254089 - DNA, 1167 bp, Klebsiella pneumoniae
atgaacttacatgaatatcaggcaaaacaactttttgcccgctatggcttaccggcgccggtgggttatgcctgtactactccgcgtgaagcagaagaagccgcttctaaaatcggcgcgggtccgtgggtagtgaaatgtcaggttcacgctggtggccgcggtaaagcgggcggtgtgaaggtagtaaaaagcaaagaagacattcgagcatttgctgagcactggctgggcaaacgcctcgtcacctatcaaacagatgcgaacggccagccggttaaccagattctggttgaagccgcgaccgatatcgataaagagctatacctgggcgcggtagttgaccgcagctcccgtcgcgtggtcttcatggcctccaccgaaggcggcgtggaaatcgaaaaagtggcggaagagactccgcatctgatccacaagatcgccctcgatccgctggcgggcccgatgccttaccagggtcgtgaactggcgtttaaactgggtctggaaggtaaacaggttcagcagttcactaaaattttcatgggcctggcgaccattttccttgagcgcgacctggcgctgatcgagatcaacccgctggttatcaccaaacagggcgatctgatctgcctcgacggcaagctgggcgctgacggcaacgcgctgttccgccagccggatctgcgcgaaatgcgcgaccagtcgcaggaagatccgcgcgaagcgcaggctgcgcagtgggaactgaactacgtcgcgctggacggcaacattggttgcatggttaacggcgcgggcctggcgatgggcaccatggacatcgttaagctgcacggcggcgaaccggctaacttccttgacgttggcggcggcgcaaccaaagagcgcgtcactgaagcgttcaaaatcatcctctctgatgacaacgtaaaagcggttctggttaacatcttcggcggtattgtacgctgcgacctgattgccgacggcatcatcggcgcggttgccgaagtgggcgttaacgtaccggtagtcgtacgtctggaaggtaacaacgccgaactgggcgcgaagaaactggctgacagcggcctgaatattattgcagcgaaaagtctgacggatgcagctcagcaggttgttgccgcagtggaggggaaataa

SEQ ID NO: 254090 - DNA, 1221 bp, Klebsiella pneumoniae
atgagtagcgtagatattctggttcccgacctgcctgagtccgtagctgacgcaacggttgccacctggcataaaaaaccgggcgatgcggttgttcgtgacgaagtgctggtagaaatcgaaactgacaaagtggtactggaagtaccggcttcagcggatggcattctggacgcagtgattgaagacgaaggcgccaccgtgctttcccgtcagatcctcggccgcctgcgcgaaggcaacagcgcgggcaaagagtccggagcgaaagctgatgctaaagagtcgactccggcccagcgtcagcaggcttctctggaagagcaaaataacgatgcgctgagcccggcaatccgccgtctgctggcggaacacagcctcgatgcggcagccattaaaggcaccggcgttggcggccgtctgacccgcgaagacgttgagaaacacctggcgaaagcgccggcgaaggcggaggccccggccgcagcgccagccgctgctccggctccacagctgggcaatcgctctgaaaaacgcgtgccgatgacccgtctgcgcaagcgcgttgccgagcgtctgctggaagcgaaaaattctaccgccatgctgacaaccttcaacgaagtcaacatgaagccgattatggatctgcgtaagcagtacggcgaagcgtttgaaaaacgtcacggtatccgtctgggctttatgtccttctacgtgaaggcggtagtggaagcgctgaagcgctacccggaagtgaacgcctctatcgatggcgatgacgtggtgtaccacaactacttcgacgtcagcatggcggtctctacgccgcgcggcctggtaacgccggttctgcgcgatgtcgacctgctgggcatggcggatatcgagaagaaaattaaagagctggcagtaaaaggccgcgacggcaagctgaccgtagacgatctgaccggcggtaacttcaccattaccaacggcggcgtattcggttcactgatgtccacgccgatcatcaacccgccgcagagcgcgattctgggtatgcatgccattaaagatcgcccgatggcggtgaatggtaaggtagaaattctgccgatgatgtacctggcgctctcctacgaccaccgtctgatcgacggacgtgaatcggtaggctacctggtagcgattaaagagctgctggaagacccgactcgtctgctgctggacgtgtag

SEQ ID NO: 254091 - DNA, 2451 bp, Klebsiella pneumoniae
gtggcggatctcgatccggcttaccacgatctgaccgaggccgatttccaggagatctataacgtaggttctttcgccatcggcaaagatacgatgaagctgggcgatctgatctccgcccttaagcagacctactgcggctccatcggcgcggaatatatgcatattacctccaccgaagaaaaacgctggatccagcagcgcattgagtcggtagcaggcaaagcgaattttagcgccgaagagaaaaaacgcttcctcagcgaattgaccgcggcggaaggcctggagcgctacctcggcgcgaaattcccgggcgctaaacgcttctcgctggaaggcggcgacgcgctaatcccgatgctgaaagagattatccgccacgcgggtaagagcggcacccgcgaagtggtgctgggtatggcgcaccgcggacgtctgaacgtgctggtcaacgtgctgggtaaaaaaccgcaggacctgttcgacgagttcgccggtaaacataaagaacacctcggcaccggtgacgtgaagtaccacatgggcttctcttccgatatggaaactgaaggcggcctggtgcacctggcgctggcgtttaacccgtcgcatctggaaatcgtcagcccggtggttatcggctccgtccgcgctcgtctcgatcgtctcgacgaaccgagcagcaacaaagttctgccgatcaccattcacggcgacgccgcggtaaccggccagggtgtggttcaggaaaccctgaacatgtccaaagcgcgcggttacgaagtcggcggtaccgtacgcatcgttatcaacaaccaggtgggtttcaccacttccaacccgctggatgcgcgttctaccccgtactgtaccgatattggtaaaatggtccaggcgcctattttccatgtgaatgccgacgatccggaagcggtcgctttcgtgactcgcctggcgctggacttccgtaacacctttaaacgcgatgtcttcatcgacctggtgtgctaccgccgtcacggccacaacgaagccgacgagccgagcgcaacccagccgctgatgtatcagaaaatcaaaaagcatccgaccccgcgcaaaatctacgctgacaagctggaagcggataacgtcgcgacgctggaagacgccactgagcaggttaacctctaccgtgacgcgctggatgccggcgaatgcgtggtgaaggagtggcgtccgatgaatatgcactcctttacctggtctccgtacctcaaccacgagtgggatgagagctatccggacaaagttgaacctaagcgtctgcaggagctggcaaaacgcatcagtacggtaccggaagccgttgaaatgcagtcgcgcgtggcgaaaatctacggcgatcgtcagcttatggccgccggcgagaagatgtttgactggggcggcgcggaaaacctcgcctacgccacgctggtcgatgaaggcatttcggtgcgtctgtccggcgaagactccgggcgcggaaccttcttccaccgccatgcggtgattcacaaccagaaaaatggctcaacctatacgccgctgcagcacgtgcacaacggccagggccattttaaagtctgggactccgtgctgtcggaagaagcagtgctggcgtttgaatacggctacgccaccgctgagccgcgcaccctgaccatctgggaagcgcagttcggcgacttcgccaacggcgcgcaggtggtcatcgaccagttcatcagctccggcgagcagaaatggggccgtatgtgcggcctggtgatgctgctgccgcacggctacgaaggccagggtccggagcactcctccgcgcgtctggagcgctatctgcagctctgcgctgagcagaatatgcaggtttgcgtaccgtccaccccggcgcaggtttaccatatgcttcgtcgccaggcgctgcgcggtatgcgtcgtccgctgatcgtgatgtcgccgaaatcgctgctgcgtcacccgctggcggtatcaagcatggacgaactggctaacggcactttccagccggcgatcggtgaaatcgaccagctcgatccgaaagcagtgaagcgggttgtgctgtgctctggtaaggtttactacgacctgctggaacagcgtcgtaaaaacgagcaaaaagatgtcgctatcgttcgcatagagcagctctatccgttcccgcatcaggcggtacaggaagcgctgaagccttatgcgcacgtgcatgattttgtctggtgccaggaagaaccgctcaaccagggcgcgtggtactgcagccagcatcacttccgtgaagtgattccgtttggggcctctctgcgttatgcaggccgcccggcctccgcctctccggcggtaggatacctgtccgttcaccagaaacagcaacaagatctggtcaatgacgcgctgaacgtcgattaa

SEQ ID NO: 254092 - DNA, 1215 bp, Klebsiella pneumoniae
atgaaattaccgatttacctcgattactccgcaaccacgccggtggacccgcgtgttgccgagaaaatgatgcagttcctgaccatggacgggacctttggtaacccggcctcccgttcccaccgttttggctggcaggctgaagaggcggttgatatcgcccgcaatcagattgccgagctggtcggcgccgacccgcgcgaaatcgtctttacctctggtgcgactgaatccgacaacctggcgatcaagggtgcagccaacttttatcagaaaaaaggcaagcacatcatcaccagcaaaaccgagcataaagcggttctggatacctgccgtcagctggagcgcgaaggcttcgaagtgacctacctggcgccgcagagcaacgggattatcgatctgaaagagctggaagcggcgatgcgtgacgacaccatcctggtttccatcatgcatgtgaataacgaaatcggcgtggtgcaggatatcgctaccatcggcgagatgtgtcgcgcccgcggtatcatttaccacgtagacgccacccagagcgtgggcaagttgcctatcgatctgagccagctgaaagttgacctgatgtccttctccggtcacaaaatctacggtccgaaaggcatcggcgcgctgtacgtgcgccgtaagccgcgtattcgtatcgaagcgcaaatccacggcggcggccacgagcgcggtatgcgttccggtactctgcctgttcaccagatcgtcggcatgggtgaagcttaccgtatcgccaaagaagagatggaaagcgagatggcgcgtctgcgcacgctgcgcaaccgtctgtggaacggcgtgaaggatatggaagaagtgtacctcaacggcgacctcgagcagggcgcgccgaacattcttaacgtcagcttcaactatgttgaaggcgagtcgctgattatggcgctgaaagacctggcggtttcctccggttcagcctgtacttccgcgagccttgagccatcctacgtgctgcgcgcgttaggcatgactgatgaactggcgcacagttctattcgtttctctttaggtcgtttcactaccgaagaagagattgactatgccatcgatctgattcgcaaatccattggccgtctgcgcgagctttctccgctgtgggaaatgttcaaacagggcgtggatctgaacagcattgaatggtcacatcactaa

SEQ ID NO: 254093 - DNA, 1662 bp, Klebsiella pneumoniae
atgtgttcgatttttggcgtactggatattaaaactgacgcaggcgagctgcgtaaaaaggcactggagctctcccgcctgatgcgccaccgcggcccggactggtccggcgtctatgcctgcgataaagccattctggcgcatgaacgcctgtcaatcgttgacgtgaacgccggcgcacagccgctgtataatgccgcaaaaacgcacgcgctcgccgtcaacggggaaatctacaaccatcaggcgctgcgcgcggaatacggcgatcgctatgccttccagaccggttccgactgcgaagtcatcctcgcgctgtatcaggaaaaaggtccggacttcctcgacgatctgcagggaatgtttgctttcgcgctctacgacagtgaaaaagacgcgtacctgattggtcgcgaccacatcgggattatcccgctgtatatgggccacgacgaacacggcaacttctacgttgcttcggaaatgaaagcgctggtaccagtctgccgcacgattaaagagttcccggcaggcagctacctgtggagcaaagatggcgaaattcgccagtactatcagcgcgactggttcgactatgacgcggtgaaagacaacgtcacggacaaaaacgagctgcgtcaggcgctggaagagtcggtgaaaagccacctgatgtccgatgttccgtacggcgtactgctctccggcggcctggactcatcggtaatttccgctatcaccaagaaatttgccgcccgccgcgtcgaggatcaggaaaaatccgaagcctggtggccgcagctgcactctttcgccgttgggctggaaggcgcccccgatctgaaagccgcgcaggaagtggctaaccatctgggtaccgtgcatcacgagatccactttacggtccaggaagggctggacgcgattcgcgatgttatctatcacattgaaacttacgatgtcaccaccatccgcgcttcgacgccgatgtatctgatgtcgcgtaaaatcaaagcgatgggcatcaaaatggtgctctccggcgagggttctgatgaagtgttcggcggctatctctatttccataaagcgccaaacgccaaagagctgcacgaagagaccgtacgcaaactgcaggcgctgcacatgttcgactgcgcccgtgcgaacaaggcgatgtccgcctggggcgttgaagcccgcgtgccgttcctcgataagaagttccttgatgtggcaatgcgtatcaacccgcaggataaaatgtgcggcaacggtaaaatggaaaaacatattctgcgcgaatgttttgaatcttatctgccagcaagcgtcgcctggcggcagaaagagcagttctctgacggcgtcggttacagctggatcgacaccttaaaagaggtggccgctgaacaaatttccgatcagcagttggaaacggccagcttccgcttcccgtacaacacgccatcgtcgaaagaagcctatctgtatcgtgagatctttgaagagctcttcccggtaccgagcgccgcagaatgcgtgcctggcggcccgtccgtcgcctgctcctccgcaaaagcgatcgagtgggatgaatctttcaaaaaaatgaacgatccgtccggacgcgcggtgggcgtacaccagtcggcctactaa

SEQ ID NO: 254094 - DNA, 753 bp, Klebsiella pneumoniae
atgaccattcaaaacgtaatttgtgatattgacggcgtgctgatgcacgacaatgtggccgtaccgggcgccgccgaattcatcaagcgcattctcgaaaaagagatgccgctggtgatgctgactaactacccttcgcagaccggccaggacctggcgaaccgctttgcgaccgccggaattgatgtccctgataccgccttttatacctcagcgatggccacggcggattttctgcgccgtcaggaaggtaaaaaagcctatgtggtcggcgaaggcgcgctgattcacgaactgtacaaagccggctttaccatcactgacgtcaatcctgatttcgttatcgtcggtgagacccgctcctttaactgggagatgatgcataaagcggcgttttttgttgccaacggcgcgcgctttatcgccactaacccggatacgcacggccgcggctactatccggcctgcggcgcgctgtgcgccggcatcgagaaaatctccgggcgtaagccgttctatgtcggtaaaccaagcccgtggatcatccgctccgcgctgaataaaatgcaggcgcattcggaacaaacggttatcgtcggcgataatctgcgcacggatattctggcgggcttccaggccggtctggaaactatcctggtgctttcgggcgttgccacgctcgatgatatcgacagcatgccgttccgcccctcatggatttacccttccgttgcggaaattgatattttctga

SEQ ID NO: 254095 - DNA, 1221 bp, Klebsiella pneumoniae
atgacagcaggcggacaggctcaaattggtaacgtcgatctcgtaaaacagctgaacagcgcggccgtttatcggctcatcgatcagcacggccccatctcgcgtatccagattgcggaacaaagccagcttgcccctgccagcgtaacgaaaattacgcgtcagcttattgaacgcgggctgatcaaagaagtcgatcagcaggcctccaccgggggccgccgcgctatctccatcgttgcggaaacccgcagcttccacgccatcggcgtacgcctgggccgctatgacgccaccctgacgctctatgatttgagcagcaaaacgcttgaagaagagcactacccgctgccggaaagaactcaggaaaccctggaacacgcgctgctaaatattattgccgcctttatggagcgctgccagcgtaaaatccgcgaactgatcgccatctcggtgatcctgccgggactggtcgatccggaaagcggcgtcattcgctacatgccgcacatccaggttgaaaactggggtctggtcgaagcgctggaaaaaaagtttaaggtcacctgttttgtcggtcacgatatccgtagcctcgcgctggcggagcactacttcggtgcgagccacgactgcgaagactccattctggtgcgcgtacaccgcggaaccggcgcggggatcatctccaatgggcggatttttattggccgtaacggtaacgtcggcgaaatcggccatattcaggtcgaccccttaggcgagcgctgccactgcggtaacttcggttgtctggagaccgtcgccgccaacgcggcaattgaacatcgcgttcgtcatctgctggaacagggttatcagagcaaaatctccctcgatgactgtacgatcaaaacgatctgtaaagccgcgaataaaggcgatgcgctggcctgcgaggtgatcgagcacgttggccgtcatctgggtaaaactatcgccatcgccattaacctgtttaatccgcaaaaagtggtgattgccggtgagatcgtcgaagcggaaaaagtgctgttgccggctattgaaggctgcattaacacccaggcgctgaaggcatttcgtaaaaatctgccggtggtccgttctacgctcgatcatcgttctgccatcggcgcttttgctctggtcaagcgcgcgatgcttaacgggatcctgctccagcgtttgctggaaagctaa

SEQ ID NO: 254096 - DNA, 1149 bp, Klebsiella pneumoniae
atgtatgcattaacccaaggccggatttataccggtcatgaaattctggatgaccatgcgattgttatcgccaatggccttatcgaacgtatctgtcctcaaacagagctgccaaccggtatcgaacagcgctcggttgatggtgcaatccttgcccccggttttatcgacgtccagcttaacggctgcggcggcgtgcagtttaacgacacggcggacgcggtgaccgttgaaacgctggaaattatgcagaaagccaatgaacgctccggctgcaccagctatttgcccaccctgattaccgccagcgatgatctgatgaagcagggcgtgcgcgtgatgcgtgaatacctgcaaaaacatcctcaccaggccctgggtctgcatcttgaaggcccgtggctgaatattgttaaaaaaggcacccacaatccggactacgtacgtaagccggatgccgcgctggtcgatttcctgtgtcaaaacgcggatgtcatcaccaaaatcaccctggcgccggaacgcgtggaaccagaagttatccgtaaactggtcgcggcaggcatcatcgtttccgccggtcactccaacgctacgctcaaagaagcaaaagtcggcttccgctccggcatcactttcgctacccatctgtttaacgccatgccgtatatcaccggccgcgaaccgggtctcgccggcgcgattttcgacgagccggatgtctactgcggtattatcgtcgatggtatgcacgtcgattacgctaacgttcgcctcgctaaacgcctgaaaggcgataagctgtgtctcgttactgatgcaacggctccggcaggcgccaatattgagcagttcatttttgctggtaaaacaatatactaccggaacggcctgtgcgtagatgagaacggtaccctcagcgggtcttcattgaccatgattgaaggggtgcgtaacctcgttgagcattgcggcatcgcgctggacgaagcgttacgtatggcaacgctctacccttcccgtgcgattggcgtagacaaacagttgggctgcattgccccggggatggtcgctaacctgaccgcatttacccgcgactataaaatcaccaagaccatcgttaatggtaacgaggtcgtcactgagtaa

SEQ ID NO: 254097 - DNA, 801 bp, Klebsiella pneumoniae
atgagactgatccccctggtaactgctgaacaagtcggtaaatgggctgcccggcatatcgttaaccgcatcaacgcgttcaaaccgactgcagaccgtccgtttgtcctcggtctgcctaccggcggtacgcctctgaccgcttataaagcgctggttgagatgcacaaagcaggccaggttagctttaagcatgttgtgaccttcaacatggatgagtacgttggtctgccgaaagatcacccggaaagctatcatagctttatgcaccgcaacttctttgatcacgttgatatcccggcggaaaatattaatctgctgaatggtaacgcgccggatattgatgcagaatgccgtcgttatgaagaaaaaattcgttcttacggtaaaatccacctgtttatgggcggcgtgggtaacgatggccacatcgcttttaacgaaccagcctcttctctggcttcacgcacgcgtattaaaaccctgacccacgatactcgcgtagcgaactcccgcttcttcgacggcgacgttgatcaggtgccgaagtacgcgctgaccgttggcgtgggcaccctgctggatgcggaagaagtgatgattctggtgctgggccatcagaaagcgctggcgctgcaggcggcggttgaaggcaacgttaaccatatgtggactattacttgtctgcagctgcatccgaaagccgttgtggtctgcgatgagccgtccaccatggaactaaaagttaagaccctgaaatatttcaacgaattagaagctgaaaacatcaaaggtctgtaa

SEQ ID NO: 254098 - DNA, 1950 bp, Klebsiella pneumoniae
atgaatattttaggttttttccagcgactcggtagggcgttacagctccctatcgcagtgctgccggtcgcggcgctgctgctgcgattcgggcaacccgatctgcttaacatttcgtttatcgcgcaggcgggcggggcaatctttgataacctggcgctgattttcgctatcggtgttgcatccagctggtcgaaagacagcgccggtgccgcagcgctggcgggggcggtaggttacttcgtattgactaaagcgatggtcaccatcaacccggccatcaacatgggcgtcctggcaggtatcattaccggtctggtcggcggcgccgtgtataaccgctggtcgggcatcaaactgcctgacttcctgagcttcttcggcggcaaacgctttgtgccgatcgcaaccggcttcttctgtctggtactggcagccatcttcggctacgtctggccgccggtgcagaacgccatccatgctggtggtgaatggattgtcggcgcgggcgcgctcggctccggtatctttggtttcatcaaccgtctgctgatcccgacgggtctgcaccaggtgctgaacaccatcgcctggttccagattggtgagttcactaacgctgctggcgcggtattccacggtgatatcaaccgcttctatgccggtgacggcaccgcggggatgtttatgtccggcttcttcccgatcatgatgttcggtctgccgggcgcggcgctggcgatgtacttcgcggcgcctaaagagcgtcgtcctatggtcggcggtatgctgctgtcggttgccatcaccgcattcctgacaggtgtgactgagccgctggaattcctgttcatgttcctggcgccgctgctgtatctcctgcacgctatcctgaccggcatcagcctgttcgttgcgacggcgctgggtatccatgcgggcttctctttctctgcaggcgctatcgactatgttctgatgtacagcctgccggcagccagcaagaacgtctggatgctgattgtgatgggtgttgtcttcttcgttatctacttcctgctgttcagcgcggtaatccgcatgttcaatctgaaaacgccgggtcgtgaagataaagtggatgatgtggtcactgaagaagccaacagcaataccgaagagggcttaacccagctggcgaccaactacattgcggcggttggcggtactgataacctgaaagcgatcgatgcctgcattacccgcctgcgcctgaccgttgcggactccgcgctggtaaacgatgcggcctgtaagcgcctcggtgcttccggtgtggttaaactgaacaagcagaccatccaggttatcgtcggtgcgaaagccgaatccgtcggtgatgaaatgaagaaagtggttgcccgcggcccggttgccgcagcagcgacttcaaacagcgcgcccgcagccgctccggccgctaaaccgcaggccgtcgctaacgcgaaaaccgtcgaagcgctggtttcgccgattactggcgacattgtggccctggagcaggtgccggatgaagccttcgccagcaaagccgtcggcgacggcgtggcggtgaaaccgaccgataagattgttgttgcgccggcagcgggcaccgtagtgaagattttcaacactaaccatgctttctgtctggagacggaaaacggcgcggaaatcgtcgtccatatgggtatcgataccgttgcgcttaacggccagggctttaaacgcctggtggaagagggcgcggaagtgaaagcgggtcagccgattctggaactggatcttgagttcctgaacgctaacgcacgttcgatgattagcccggtcgtatgcagcaacagcgacgactacagcgcgctggttatccaggcaaccggcaaggttgtagcgggccagacgccgttgtacgaaattaaaggcaaataa

SEQ ID NO: 254099 - DNA, 1668 bp, Klebsiella pneumoniae
atgagtgaggcagaagcccgcccgactaactttattcgtcagatcattgatgaagatctggctactggtaagcacaccaccgttcatacccgttttccaccggaaccgaacggctatctgcacattggccacgcaaaatccatttgcctgaactttggtatcgctcaggattaccagggccaatgcaacctgcgtttcgatgacaccaacccggtgaaagaagatatcgaatacgttgagtcgattaaaaacgacgtgcagtggttaggtttccactggtccggggatgtttgctactcgtctgattatttcgatcagctgcaccagtatgcggttgaattaatcaataaaggcctggcctacgttgatgaactgtcagcagatgagatccgtgagtaccgcggcaccctgaaagagccgggtaaaaatagcccgtatcgcgatcgcagcgtggaagagaacctggcgctgtttgaaaaaatgcgtagcggtggatttgccgagggtaaagcctgcctgcgcgcgaaaatcgatatggcttcgccgtttatcgtgatgcgcgatccggtactgtaccgtattaagtttgccgatcaccatcagaccggaagcaagtggtgcatctacccgatgtacgactttacccactgcatcagcgatgcgctggaaggaattacccactctctgtgtactctcgagtttcaggataaccgccgcctgtacgattgggtgctggataacatcagcattcccgtgcatccgcgtcagtatgaattctcgcgcctcaaccttgaatacaccgtgatgtccaagcgtaagttgaatcagctggtgacggaaaaacacgtcgaaggctgggatgacccgcgtatgccgaccatttccggcctgcgccgtcgcggctataccgcagagtctatccgtgagttctgcaaacgcatcggcgtgaccaagcaggacaacactatcgaaatcgctgccctggaatcctgcatccgcgaagatttgaacgaaaatgctccgcgtgccatggccgttatcgacccggttaagctggtgatcgaaaactatctgcagggaggcagcgaaatcgtcactatgccgaatcatcccaataaaccggagatgggtagccgcgaggtgccgttcagcggcgaaatctggatcgatcgtgccgacttccgcgaggaagcgaacaagcagtacaagcgtctggtgctgggcaaagaagttcgcctgcgcaatgcttacgtcatcaaagcggagcgcgtggagaaagatgcggaaggcaatatcaccacgattttctgtacctatgatgccgacaccctgagcaaagatccggccgacggtcgcaaggtgaagggcgtgattcactgggtgagcgcggcgcacgcgctgccggtcgaaatccgtctatacgatcgcctgttcagcgtaccgaacccgggcgcggcggaggatttcctctcggtgatgaacccggaatcgctggttatcaaacagggttttgccgagccaagcctggcgcaggcgcagccggaaaaagcgtatcagttcgagcgcgaagggtatttctgcctggatagccgctatgcaaccgcaaccaatctggtgtttaaccgcaccgtcggtctgcgcgatacatgggcaaaagccggcgcgtaa

SEQ ID NO: 254100 - DNA, 1404 bp, Klebsiella pneumoniae
atgcgtacgtttagtggcaaacgtagtacgctggcgctggctattgccagtgtcacagccctgtcaggatttgcaatggtgccggatgcaaaagcagaagggttcattgatgattcaacgttaaccggcggcatctattactggcaacgtgaacgcgaccgtaaagatgtcaccgacggcgacaaatataaaactaacctgtcgcactctacctggaacgccaacctcgacttccagtccggctacgccgccgatatgttcggcattgacgttgctgcctttaccgccatcgaaatgggcgaaagcagcgagagcggtcacccgaacgaaatcgctttctcctcgcgcaataaaacctacgacgaagactattccggcgataagagcgggatcagcctgtataaagctgccgcaaaatttaaatttggtccggcgtgggcgcgcgcgggctatattcagccaaccggccaaacgctgctggctccgcactggagctttatgcccggcacctatcagggcgcggaagccggcgctaattttgactatggcgacgcgggcgcgctgagtttctcctatatgtggacgaacgagtataaagcgccgtggcatattgagatggatgagttctaccagaacgataagaaaaccaaggtggattaccttcactctctcggcgccaaatatgattttaaaaacgacctggtgctggaagcggcatttggtcaggcccagggttacatcgaccagtattttgccaaagccagctataaatttgatgttgcaggcacgccgttaaccaccagctatcagttctacggcacccgcgataaagtcagcaacggcggggctaacgatatttatgacggcaccgcgtggctgcaggcattgacctttggctataaggtggccgacgtgctggacctgcgtctggaaggaacctgggttaaagctgacggccagcagggctacttcctgcagcgtatgacgccaacctacgcctcttctaacggtcgtctggatatctggtgggataaccgctcggacttcaacgccaacggtgaaaaagcggtgttcttcggcgcgatgtatgacatgaagaactggaacatgccgggctgggcctttggcgcatcttatgtctatgcctgggatgcgaagccgggcagaatgtcctcgcctgatgcctactacaacccggataaacgcctggaagagtccgcctatagcctggacgccatgtataccgttcaggaagggcgcgcgaagggcacgctgttcaaactccactttacgcaatacgacaaccactccgatatcccgagctggagcggcggttacggtaacatcttccaggatgagcgcgacgtgaagttcatggttatcgcaccgttcaccattttctga

SEQ ID NO: 254101 - DNA, 333 bp, Klebsiella pneumoniae
atgaagaagttactgcttgtcgccattatggcaacaggtctggttgcctgtacgcagtcgccagcgccgaaagaagactcaaagttgagagacgcctacagcgcctgcattactagcgcggaggggaacccggataaggttgaagcctgtcagagcgtactgaacgtgcttaagcaagagaaacagcaccagcagttcgccacccaggaaagcgtgcgggtgctggactatcaacagtgtatccaggcgcgcaaaaccggtaacgatcaggccgtgcaggcgcgctgcgaccagctctggaaagagatccgcagcaacaatacgccccgttaa

SEQ ID NO: 254102 - DNA, 1296 bp, Klebsiella pneumoniae
atgacgcaatcatcatcgcgcgccggtaccttcggcgctattctccgcgtgaccagcggtaattttctcgagcaattcgacttttttctgttcggtttttacgccacctacatcgccagaacgttctttccggcggaaagtgagtttgcggcgttaatgctcaccttcgccgtgtttggttcgggcttcctgatgcgccctatcggggcgatagtgctgggggcctatatcgacagaatcgggcggcgtaaagggctgatggtgacgctggcgattatgggctgcgggacgctgctgatagcactggtccccggctatcacaccatcggcgttctcgcccccattctggtattagtcggccgtctgctgcagggattctcagcgggcgtagagctcggcggcgtgtcggtctacctgtcggaaatcgccaccccggggaaaaaggggttctataccagctggcaatccgccagccagcaggtggctatcgtggtcgcggcgctgattggctacgcgctaaacgaaacgcttggccatgatgagatcgccgaatggggctggcgtatccccttctttattggttgtctgatcattccgctgatttttgtactgcggcgttcgctacaggaaaccgaagctttcctgcagcgtaaacatcgtcctgatacccgagaaatcctgagcacgattgtaaaaaactggcgcatcatctcggcgggcaccttactggtggcgatgaccacgaccactttttactttattaccgtttataccccaacctacgggagagccgtgctgcatctgagcgctcgcgatagcctgctggtcaccatgctggtcggtatctctaactttatctggttaccgattggcggggcaatttctgacagaataggccgtcgtccggtgctgatgggcatcaccctgctggcgctgcttaccacctggccggtgatgcactggctcaccgccgcgccggattttacccgtatgacgctggtcctgctctggttctcgtttttcttcggtatgtataacggcgcgatggtcgcggcgctgaccgaagtgatgccggtctacgtccgcaccgtgggcttttcgctggcctttagcctcgccaccgctatctttggcggcctgacgccggctatttccaccgcgctggtcgagatcaccggggataaaagctcgccgggctggtggctgatgtgcgctgcgctatgcggacttgccgcaaccgccatgctctttactcgcctgagccgcagctatcagccagcagaaataccccgctaa

SEQ ID NO: 254103 - DNA, 927 bp, Klebsiella pneumoniae
atggagcttcgccagctacgctattttgtgcgcattattgaaaccggcagtatgggccgtgccgcgcttgacctgaatatcggcgtctccgcgctcagccaacaaatggcgcgcctggaaaatgaactcgccattcgcctgctacaacggacgtctcgcggcgtaatgcccaccagcgctggcctcgccttctattcacaggcgcagctggcactacgtcacgctgatgatgcggttcttgctgcgcgcgaggcgcggctatctggccacgtcagcgtcggcatggcccccagcaccgcctctgtgctcggcgtaccctttattaacgcgatgcgcgaaagctatgccgacgtccgcctgcatctggtagaaagtctctccggcaaccttgaacgcatgatcaacacccgtcagctcgatttagcgatcgtgttccagaaggagaagcttgtgcgctggagcgccaggccgattcttgaagagcgtctgtttctgattggcacccataagttactggctccccttcccgacgatagcatctcgccggaccagctctccgctgtcccgctgattatgccaagcctggggcatgggctgcgcggcaggctggaggcgatgtgccaggagcatgcgcttaatgtcgatgtggtcgctgaaatcgacggtctggccctgctaatgcgcgccgtgcgcgacggcctcggcgccactttgcagccgggagcagcgatttctcatctcgacggcgagcccctgagagtgatcggcatcaacaatccgatactcagtcggcctaattttctcgtcagtctttccgatgatgaactgaccccatcgggtctcgctgcgcgagtcatactggcaaaagtcatgcgtcagctggtcgaatctggccgctggcctggcgccagcctttacgcacactaa

SEQ ID NO: 254104 - DNA, 453 bp, Klebsiella pneumoniae
atgactgacaacaataccgcattaaagaaagctggcctgaaagtgacgcttccgagattaaaaatcctggaagtgctgcaaggaccggataaccatcatgtcagtgcggaagacttatacaaacgcctgattgatatgggtgaagagattggcctggccaccgtctaccgcgtactgaaccagtttgacgacgccggtatcgtcacccgtcataatttcgaaggcggtaaatccgtttttgaactgacgcagcagcaccatcacgatcacctgatttgcctggactgcggcaaggtgatcgagtttagcgatgattccatcgaagcgcgccagcgtgagattgccgccagacacggtattcgcctcaccaaccacagtctgtacctgtacggccactgtgcagaaggcgactgccgcgaagatgaacatgcccacgacgcggtagagaaataa

SEQ ID NO: 254105 - DNA, 531 bp, Klebsiella pneumoniae
atggcaatcatcggcatcttttttggcagcgacaccggcaacaccgaaaatattgcaaaaatgattcaaaagcagcttggtaaagatgttgctgatgttcacgacattgccaaaagcagcaaagaggatctggaagctcacgatatcttgctgctcggcatcccaacctggtactacggtgaagcccagtgcgattgggacgatttcttcccgacgctggaagagatcgattttaatggcaaactggtagccctctttggctgcggcgaccaggaagactatgctgaatacttctgcgatgcgctgggcaccattcgcgatatcatcgaaccgcgcggcgcaactatcgttggccattggccgaccgctggctaccattttgaagcctctaaaggcctggccgatgacgatcattttgtcggtctggctatcgacgaagaccgtcagcctgaactgactaacgaacgcgtcgaaaaatgggtaaaacagatttccgaggagctgcacctcgaagaaatcaagaatgcctga

SEQ ID NO: 254106 - DNA, 294 bp, Klebsiella pneumoniae; identical to SEQ ID NO: 174942

SEQ ID NO: 254107 - DNA, 774 bp, Klebsiella pneumoniae
atgaaattaaatagccgagcgcaatctgcacagaatcagcacaataatccccctatcgtcctggtccacggcctttttggcagcctggacaaccttgggatcctcgcccgcgatctggttgtcgatcacgatacggtgcaggtcgacatgcgaaaccacggtctctccccgcgcgcgccggagatgacctacgccgcgatggctgaggatctgcttgatactctcaatgaatcgcagattgagaaagccacctttattggtcactctatgggcggcaaagcggtgatggcgctgagcgcgctggcgccagagcgcatcgcaggcctggtagctattgatatcgccccggtggattatcacgtccgccgccatgatgaaatttttgctgccatcaacgccgttaccgatgcgcgcgccgctacgcgtcagcaggcagcgacggtcatgcgtcaacaccttaatgaagagggcgtggttcagtttctgctgaaatcctttgtggatggccagtggcgttttaacgtaccggtgctgtgggagcagtacgacaacatcgtcggctggcaaaccgtcccggcatggccgcatccggcgcagtttatccccggcggcaactccccttacgtgaccgatgcctgtcgtgacgcgctgctggcgcagtttcccgaagctcgggcgcacgttatcgccggcgccggacactgggtgcatgctgaaaaaccggaggctgtgatccgcgccattcgccgttatttgacctctatcgccgcgtaa

SEQ ID NO: 254108 - DNA, 549 bp, Klebsiella pneumoniae
atgaaaacaattgaagttgatgatgaactctatagctatattgccagccacaccaagcatattggcgagagtgcatccgacattttacggcgcatgttgaagttttccgccgtttcccagcccgccgcaccggtagcgaaagccgctccggcaccggcgccaacgcctgtcgttgacgtgaagcccgctaatcctctgaaggataaagttcgcgcgatgcgtgagctgctgttatctgatgagtatgccgaacaaaagcgcgcggtaaaccgattcatgctggttctgactaccctctacaccttagacagcaaagcgtttgccgaggccaccgagtctctgcacgggcgcacccgcgtctatttcgctgaagatgagcgcacgctgcagaaaaacggtaatcagactaagcctaagcaggtccccggtacgccgtggtgggttatcacaaataccaataccggtcgcaaatgcagcatgatcgaacacatcatgcagtccatgcagttccctgcggaattgatcgaaaaggtttgcggtacgatctag

SEQ ID NO: 254109 - DNA, 1641 bp, Klebsiella pneumoniae
atggcaatcgataagcgcgcaggtcaacctgcgcaacagagtgatttgattaacgtcgcccaactgactgcccagtactatgtgctgaagccggaagtaggcaatgcggaacatgcggtgaagtttggcacctccggccatcgcggcagcgcggcgcgccataacttcaacgagcagcatattctggcgattgcccaggcaattgctgaagaccgcgcgaagaacgggatcaccggcccatgctacgtcgggaaggacacccacgcgctctccgaacctgcctttatttccgtactggaagtgctggcggcgaacggggttgacgttatcgtgcaggaaaacaacggtttcaccccgacgccggcgatttccaatgcgattctggtgcacaacaaaaagggcggcccgctggctgacggtattgttattacgccgtcccacaacccaccggaagacggcggtatcaaatacaacccgccgaacggcggcccggctgataccaacgtcaccaaagtggtagaaaaccgcgccaacgaactgctggcggcgggcctgcagggcgtgaagcgtatgacgcttgatgcggcgctggcctccggtcacgtcaaagagcaggatctggtgcagccgtttgttgagggattagcggatatcgtcgacatggcggcgatccagaaagccggactgacgctgggcgtcgatccgctgggcggctccggtatcgaatactggaagcgtatcgccgagcattacaacctaaacctgactatcgtgaatgaccatgtggatcagactttccgctttatgcacctcgataaagacggcgcaatccgcatggactgctcctccgagtgcgcgatggcgggcctgctggcgctgcgcgacaagtttgacctggctttcgccaacgacccggattacgaccgccacggtatcgtcacgccggccgggttaatgaacccgaaccactacctggcggtggcgattaactacctgttccagcatcgcccgcagtggggcaaagatgttgcggtgggtaaaaccctggtctcctcggcgatgattgaccgcgtagtcaacgatctgggccgcaagctggtggaagtaccggttggctttaagtggttcgttgatggcctgttcgacggtagcttcggcttcggcggcgaagagagcgcgggggcgtcgttcctgcgctttgacgggacgccgtggtccactgacaaagacggcatcatcatgtgcctgctggcggcggaaatcaccgcggtgaccgggaaaaacccgcagcagcactacgacgagctggcagagcgcttcggcgcgccaagctacaatcgtctgcaggcttccgcgacttcagcccagaaagcggcgctgtctaagctctctccggaaatggtgagcgccagcaccctggcaggcgatccgattaccgcgcgtctgactgcggctccgggcaacggggcggcgattggcggtctgaaagtgatgaccgacaacggctggttcgccgcgcgtccgtcaggtaccgaagatgcctacaaaatctactgtgaaagcttcctcggcgctgaacaccgtcagcagattgaaaaagaagcggtggagattgtcagcgaagtgctgaaaaacgcctaa

SEQ ID NO: 254110 - DNA, 420 bp, Klebsiella pneumoniae
atgaaactaaaacgtaaacacgtcttccggttctggggcgggatggatctcttttatctcatccagtttctcggctggaatctttaccatcagcgcctgcctttctacgacgacatcctctcttatctccagcttgtacccacccttggcctcgcggccgcctggctgttcccgctgaatgtgctgctgattgtcactattcccgtgtcgatggttctcctctggcggcagagccgctatgccctgcggttggcctgtgcgcaaacgcccctgcggctggcctttatactgccctcactttcgctggtgctatggggcgcgcaggtcctgggagttaaaggcgcggctttctttatcgctctgctgctggtctctgaggcggcaaaaatgatgacgttatggcgatggcgaaagatttaa

SEQ ID NO: 254111 - DNA, 798 bp, Klebsiella pneumoniae
atgttacaagttaaacgtcactcattaattgtggaatatgtcgtagaaaagggatgtgccagagttaatgagctgtcgcgattatttggcgtatctccggaaactattcgacgtgatttaactgcgctggccaggaataagaaaatagtgcgcagctttggcggcgcaatgatttctgaaaacacggcatcgtttttagctgccgatatgccggcaaataacggaaactttgtcgataaagccgaagcctttattaagcgcacgaaagaacagccagaacgtaagatgcgcattgccaaaggtgcgctgcaatttattcatgagcatgagtgcatcattatggataatagcagctcctgctggtttttagcccgtcagctacctgacattgaattgaccgttattactaattctttgaatattattcaaaccttagcctgtcgcaaaaaaataagaattgtcagcgttggtggtgaatattctgagcgtcacggtgactttcacggtccggttgctgagttcattatcaacaattttaaggtcaataagctgtttttttcctgtcagggcctggactccggtctggaaattaaagacagtaatgaagtcaacgtccggctaaagcaagagatgctgaaagttgccgatcaaaaaattctgatggtcgatagcagtaaatttgaacgctattcgctttataaaatatgcgatctggcggatattgatatcttgatcactaatgagttacccggcgatatctatcgccagcatcaggtacatattgtagagaccaaataa

SEQ ID NO: 254112 - DNA, 1074 bp, Klebsiella pneumoniae
atggaacaattacctgaagatatgaaagcggttgtctgccacggtccccaggattatcgctttgagaaaattcgccgcccgatcgccaaagaaaaggaagtggtcattaaggttgacggctgtggaatatgcgccggtgattgcaaggcccaggacggtgcgccgatgttctggggtgataatccgtgggtaaaaacgccggtagtgcccggccatgagttttacggtcgggttgctgaattaggcccgggttccgctgaaaaatataaattaaaaattggcgatcgcattctcgctgaacagattgttccctgccaggagtgccgtttctgtaaaaccggaaaatactggatgtgtgaaacccatgatatttacggcttccagaaagatgtcgccgatggcggtatggctgaatatatgcgtttctccgaacgcgcgattattcataaaattcctgaatcattaagtgaagaagatgcggcgctgatcgaacctatggcctgtgcaatccatacggtacgccgcggggatatcgaactggatgatgtggtcgttatcgccggcgccgggccgctggggctgtgcatggtgcaggtcgctcatcttaagacgccgaagaaactggtggtcatcgataccatggaagatcgcctggcgctggctaaagcgtttggcgccgacgtggtcatcaacgcggcgaaagaggacgccgtcgccatcgttaaatccatgacggacggatacggctgcgacgtttatatcgaagcgaccggcgcgcctgttggcgtgactcaggggctggagatgatacgcaagctggggcgcttcgttgaatttagcgtgtttgggaaagaaaccaccgccgactggtcgatcatcggcgaccgcaaagagctcgatattcgcggtgcgcatctcggcccctatagctatgaaatcgctatcgatctttttgagcgtggcctcttgaccgccaaaggcgtggtaacgcatttctattctatcgatgagtggaaagccgcttttgagatggccaaatcgctggattccatcaaggtcgttatcaagccataa

SEQ ID NO: 254113 - DNA, 915 bp, Klebsiella pneumoniae
atgcctgtaaaatttaataccaaagcattactctcaggacttctggctatgagcatggtcgcctgcgttaatgctaagcctttgactatcggcatgtccttccaggaattaaacaacgaatatttcgtgaccatgaaagagtcgcttgaacagtcggcaaaagatattaacgcgaccgtctatactgcggatgcggcgcatgatgtctccaagcagattagcgatgttgaggatatgctgcaaaagaaaattgatattttgctgattaacccggcagatagcgttggcgcggaaaccgccgtcctggccgccaaaaaagccggtgtggtggtggtggcgatagatgctcaggctaacggtccgattgattcttttgtgggttcaaaaaactatgatgcgggctttattgccggagagcatttagccaaagcgctgggagataaaggcaacgtggcgattctcgacggaattccggtggtgcctattctggagcgcgtgcgcggctttgaagatgcgatgaaaaagcatcccaatattaaagtgcttaccaaactgaatggtaaacaagagcgcgatacctccatgagcgtgacggaaaatatgctgcaatccaacccgacgctcaacggtattttcagcgtcaatgatgttggctcactcggtgccctggcggctattcagtcatctggacgtgatgtcaagctggtcagcgtcgatggatctccggaagcggtggctgaaattgccaaaggtaatacgccgtttattgctaccgcagcacagttcccgcgcgatcagctgcgtattggcttaggtattgccctggcaaaacactggggggcgaatattcctaaagagattcctgttgatgtgaagcttatcgataaaaacaacgccaaagatttccactggtaa

SEQ ID NO: 254114 - DNA, 1485 bp, Klebsiella pneumoniae
atgcccagcttactggaagtcaaaaacgtcagtaaaagcttccccggagtcaaggcgctggataatgttaatatcacccttgctcgtggagaagttcacgctttattaggtgaaaacggcgcgggtaaatcgacgctgatgaaaatcctgtgcgggatctaccaacctgacgccggtaatatttatattgatggtaagcagcagcattttcataactatcgcgatgcgattgcctgcggcgtagggattatctttcaggagttttctcttattccctatctgaacgcttatgagaatattttccttaatcgtgaaaaggtaaatcgttttggcctgttagatcgtaaagcgatgcgtcgggaggcgttacgcatttttaaagagcttggcgtcacgctcgatcccgacgagcaaatctgccatctcagcgtcgccgagcagcaattcgtggaaattgccaaagcgctgtcgctggatgcgcgaattctcattctggacgaacccaccgcgaccctaactcctggcgaggcggaacatcttttccgtgtgatgcgcgatttaaaggctaaaggcgtcggcatgttctttatctcgcatcacctggaggagatatatgaaatctgcgacagcctgagtattctgcgcgacggcaaatatatcggatcggcaaaggtcgacaatatcgatatcgcagagatgatccagatgatggtcggccgtgaggtggagaacatctatcccgagcggcggacgctggcgcatgatgaaatactgctggaggcggaaattcagctgaccgaaagtagtcaggttaatcggctgacgttgcgcaaaggggagatcttaggccttgccgggctggtggggtcggggcgttccgaagcgattctggctctgaccggcgcggataaatgctacaaaaaacgcgtccgtctggccggaaaagaggtgacgataaattcaaccgatcgggctctgcgtctgggtatcggcctgttgccggaaagccgcaaaacgcagggactggtactgcctttttcggtcaaagacaatatctggcttaacaaacacgcctgccagttctcgcttatccgcgataacgaagagcgcctgaccgccgagcgtttaattagccacgttggtgtgaaaacgccagatgccgggaccgcggtggggacgttgagcggcggtaaccagcagaaagtcgttatttctcgttggttaaatcatgacgtcaatattcttatttttgacgagccgactcgcggtattgatgtcggagcaaaatcagaaatctaccagattatgcgcgacctcaccgcccaggggattgcgataattatgatttcatctgagcttccagaggtcataggcgtcagcgaccgggtgatggtttttcgcgacggtaatatcgttgcggagcttgagaacgaccaaattaattccaccgtcattatgctgcatgctgccggtaatattatttag

SEQ ID NO: 254115 - DNA, 987 bp, Klebsiella pneumoniae
atgagtaatgaaaacgtatcattagcgccagccgtgtctcctgataaaaataaaaagatgctgcatagtttattaaaaatgcctgcattcctgccgttcgttggtctggtactcctgttttcctgtatggccatttttaatgactacttcttaacggttgataacttatctaccgtcgcccgtcaggtctcgatcaatgccatcatcgccatcggaatgacctttgccatcctgaccggcgggatcgacctctccgtcggcgcggtcatggccctggccggtacgctgatggcgggattaatgaagtactatggtttagatccgtggttagccattcttatcggcctgggttccggcgtcgcctttggcgcgctgaacggctttttaaccgcctacggcaaaatgccgccgattatcgtaaccctcggcgcgatgattattgcgaaggggctggcactgatctataccggcggctatcccatctccggcttaccggattcattcgctttttggggccgtgaatatctgttcggtattcaggtacctattattctgatggtggttttatatttcatcttttatatcgtgctgaatcatatgccgtttggccgctatgtttattctcttggtggcaatgaagaagcggcgcgcctgagcggactgcgggttaaatattataaattgctggtttatgtgatcagcggttttaccgccagttttgccggtcttatttttacctcacgggtgatgagcggtcagcctaatgcgggcgtcggttttgaactggatgctattgccgccgtggtgctcggcggggcatcgattgccggtgggcgcggaatgattattggcacgctgatcggcgccatgatgctcggcgtactgaataatggattaaacctgttagggatctcaccttacgttcagtacgtggtgaaagggcttattatttggggcgccacctttattagctcagccagacgttaa

SEQ ID NO: 254116 - DNA, 1479 bp, Klebsiella pneumoniae
atgaattttatcggagtggatatcggtggtacggtcaccaaagccgggatatatactgagtgcgggcaggagatccacgtggcttcgcaatatgcacaggtattatccgaacagccgggttttaccgagaggaacatgcatgagctatgggataccgtttgcagcgtaataaaaaaagcgctgtttgaaagccaggtgccagcgttaagtattggcgggatcggcttctcctcgcacggcaaagggctgtacgcaattgataaaaaaggcgagccggtgcgcaacggaattatctcatccgatacccgggcgctggcgttcgtcaaaaaatggtaccgcgaaggggtcgataaactggcctatcccaaagggctgcagcagctgtggaccgggcacccggtatcgctgctggcgtggttaaaagcacatgagcccgccaactacgacagaatcgacgccgttttaatggtgcacgactacattcgctttcgtctgaccggcgaggcgacggcggaaattaccaatatctccggcagcaatttttataaccagctttcctcccgctacgaccgcgacatgatggcgctgttcggcattgaggaagtggcggataagaccgcgccggtggtcaactcgacggactgcgtgggccacattaccctgcaggcctcgctggactgcggattatgtccgggaacgccggtattcggcggctttttcgacgtggtggcctccgccgtctcatcgggcattgaccgggcggataccctgagcgcagtggccggtacatggagtatcgccacctcggtgacggacagcattattgccaacgactatccctacatttggggaaaatactgcattccgggcaaatattttgttcatgagggcagccctacttcggcgagcaatctctcctggtttgtgaaacagtttttccctgacgatgaccgctgctacgaccatttcgaaagctggattgcgcaagagaccgacagtaacctgatttttttaccttatctgttcggttccaatctggcgatggatctgccgggtgcgctggtaggtctggcgggacatcatacgaaaaaggatattattgcggccatctaccgcgggatcgttttttctcacctgatacatcaggaccgcattattgaactcaatcggggtattgaaaaaattcgctttaccggcgggccgagccagtcgagaggctggacccagatgtacgccgacgcggccaatcttcctctggaagtcgtggacatcgaacaggcgggatgtcgagccgccgcgctgtgcgcagccgccggcagcggagcctacgccaacttcagcgaagcgatagcggccacgcagcccgaggtggtcagttatcaaccggacggcaagcggcatcagcagctgcgcgaaggttatgcccgttacgtagaggtcgcgcaaagcctctccagggcaacgggggcggcgcaatga

SEQ ID NO: 254117 - DNA, 900 bp, Klebsiella pneumoniae
atgaaaccgagacttggtatctacgaaaaagcgcttcccaccgcgctggactggccgaaacgcttcgaaatggcggctggcctggagtttgattttatcgaaatctccgttgatgagagtcctgaacgccaggccaggctgcgctggaaccgtggacagcggctggcatttgtggccgacaaaattaacagcggtatcgatgtgccgagcatgtgcctctccgcgcaccgtagccatccctttggtagcgtcaatctcgagacccggctcaaggcgcgggaactgatgcttgatgcgctggattttgccagccacgtcggtattcgcaacatccagctggcaggctatgacgtctattacgaatcctcttcggcgcagacccgggaatactttattgagggcatcaactgggcggtggccgaagcggcgaaagcgcaggtgatgctgtcgatggagattatggataccgcctttatgagcaatatctcccgctggctggatctcgaaaggaaggtctgtagtccgtggttttgcgtctatccggacgtcggcaacttaagcgcatggcaaaacgatgttcccgaagagttgagtaagggaattcataaaatcaccgccattcatttgaaggatacgcagcaggtgtcccacgcttcgctggggcagtttcgcgatgtgccattcggtaccggctgcgtcgatttcacggagatatttcgtacgctctcggcgctgaactatcgcggcgcctggctgattgagatgtgggccaaaaacgacgggctggacagcgagagaatcgccgacgctaaagcgtggctaacggataaataccagcagacatttcgtccaccgcactatgaaggcattgtgaattcaggagtgaagtatgttggataa

SEQ ID NO: 254118 - DNA, 696 bp, Klebsiella pneumoniae
atgttggataacctcaagcaggcggttcttgatgccaatctggcgctgccgaaatttaatctcgtgacctttacctggggcaacgtcagcggcatcgatcgcgacgccgggctggtggtgatcaaaccctccggcgtggaatacgccgtgatgaccgctgacgatatggtggtggtggagctggcgaccggcagcgtggtggaggggcgctataagccctcgtcggatacgccgacccatctcgagctgtataaggcattcagcggcgtgggcggaattgtgcatacccattcgcgccatgcgacgatttgggcgcagtcggggaggtcgctgctggcgatgggcaccacccacgccgactatttttatgggccgatcccctgtacccgtccccttagcgatgatgaaatccgcggtgattatgaaaccaataccggtcacgtgattatcgaaacgctgggcgcgcagcataccgatccgctcagcgtgcccgccgcgctggttcacggccacggcccatttgcatggggaaaagatccggcgaacgcggtgcataatgcggtggtgctggaagagattgcctatatgaatatgtggacccgccagttaagcgctgacgaacagccggtctcttcgaccctgctggataaacactatttgcgtaaacacggcgctggggcctactacgggcagtaa

SEQ ID NO: 254119 - DNA, 678 bp, Klebsiella pneumoniae
gtgattaacgttctgattatcgaagacgaaaatgctatccgccgctttctgcgcaccgcgctggaagccgacggcatgcgcgtatttgaagcagagacgctgcagcgcgggctgatcgaagccgcgacccgcaagccggatttagctattctcgatctgggtctgcccgatggcgacggcaacgcgtttattcgcgaggttcgccagtggagccagatgccgattatcgtgctgtcggcgcgcaccgaggagcaggacaaaatcgccgccctcgacgcaggagccgatgactatctcagtaaaccctttggcattggcgagctgcaggcgcgattgagggtggcgatgcgtcgccatgccggcgcccaggccgacgagccgcgggtgcgttttgccgatattgacgttgatatccccgcccgccgcatcgtgcgcggcgatgaagagatccacctgacgccgattgaatttcgcctgctggtggtcctgctcaacaatcctggcaaagtgctgacccagcgacagctgctcaaacaggtctgggggccaaatgcggtggagcacagccactacctgcggatttatatggggcacctgcggcaaaagctggaggccgacccggcccgtccgcagcacttgctgaccgaaacggggatcggctatcggtttatgccctag

SEQ ID NO: 254120 - DNA, 1839 bp, Klebsiella pneumoniae
gtgtatgttgaaaccccgtcgctgcaccgcctgtcggaggcgaagcggcgggcgattctcgccgcgctcaggctggcgcaggagctgggagcggaaaccgccaccctctccgatccctccgaagagaaggccgttctgcactacgcccgcgaacataatctcggcaagatagtgattggccgccagcagaaaaggcgctggtgggatcgcggcggcttcgccgatcggctggcccgtcacgccccggatctcgatctggtggtgatcgcgctggatgaaaaagccgcctccctgccggctcgcgccagcgatagccggacggcgatggataaatggcgtctacagctccagggctgcgtcgtcgccatcgcgctgtgcgcggtgattaccgttgtcgccatgcagtggctgatggcctttgaggccgccaacctggtgatgctgtatctgcttggcgtggtgattatcgctctcgtgtatggccgttggccgtcggtactggcgacggtgattaacgtggtcagcttcgatctgtttttcgttgcgccgcgcggtacgctggcggtttcagatgtacagtatttactcacctttggcgtgatgctgaccgtcgggctgcttatcggcaacctcaccgccggcgttcgctaccaggcgcgggtggcgcgctatcgcgagcggcgcacccggcatctgtacgaaatgtccaaagcgctagcggtgggccgcagccgtgaagatatcgccgccaccagcgaacggtttatcgcctcgacgtttcaggcgcgcagtcagctactgctgcccgatgagatgaaccggctctctccattgactcaacccaccgcggccatcacctgggacgacgcgatcgcccgctggagcttcgataaggggctgcccgccggggcgggtaccgatacgttacccggcgtcccctaccaaatcctgccgctgaaaagcgccgcccgtacctgggggctggtggtggtggagccggctaacctgcgccagctgatgatccccgaacaacagcgcctgctggaaacctttaccctgctggtcgccagcgcgctggagagactgacgctcaccgccagcgaagagcaggcgcggctgaacagcgagcgggaaagcctgcgcaactcgctgctggcggcgctgtcccatgatttacgcaccccgctgacggtgctgttcggccaggcggagatcctgaccctcgatcttgccagcgaagggtcgaagcacgcgccgcaggccaatgagatacgccagcacgtactgaacaccacccggttggtgaataatctgctggatatggcgcggatccagtccggcggatttaatttgcataaagagtggttaaccctcgaagaggtggtcggcagcgcgctgcgcatgctggaaccggggctcggtgggcggcatattcagctcgatctgccggacccgctgctgctggtacacgtcgatggcccgctatttgaacgggtgctgattaatctgctggaaaacgcggtgaagtacaccgggccgcaggcgcaaatcggcatcgcggcgcatgtcgacccgcaccatttattgcttgaggtgtgggataacgggccgggtattcctccagggcaggaacaggctatctttgataaattcgcccgcggcaataaagagtcggcgatccccggcgtaggcctgggactggcgatttgtcaggccatcgttgaggtgcacggcggaacgattagcgccgagacgcgcccgcaaggcggcgcctgtttccgtgttacactgccgcgagaagcgccccctgaactggaagagttagccgaggaaatgtga

SEQ ID NO: 254121 - DNA, 1647 bp, Klebsiella pneumoniae
atggattcgcaacgcaatcttcttatcatcgctttgttgttcgtgtctttcatgatctggcaagcctgggagcaggacaaaaatccgcagccccagcagcagaccacgcagactacgaccacagcagcgggtagcgccgccgaccagggcgtaccggccagtggccaggggaaactgattacggttaaaaccgacgtgcttgagctgactatcaacaccaacggtggcgatattgagcaggcgctgcttctggcgtatccaaaaacgctgaaatcgaccgaaccgttccagttactggaaaccacgccgcagtttgtctaccaggcgcagagcggcttaaccggccgtgacggcccggataacccggcaaacggcccgcgtccgctgtacaacgtcgataaagaggcgtttgtgctggccgatggccaggatgagctcgttatcccgctgacctacactgacaaagccggcaacgtcttcaccaaaaccttcaccctgaagcgcggtggctatgcggtgaacgtgggttacagcgtgcagaatgccagcgagaagcctctggaagtctcaaccttcggtcagctgaagcagaccgctgcgctgccgaccagtcgcgatacgcagaccggtggcctgtccacgatgcatactttccgtggcgccgcgttctccactgcggattcgaaatacgagaaatataaattcgataccattctggataacgaaaacctgaacgtcagcaccaaaaacggttgggttgccatgctgcagcagtacttcaccaccgcatgggtgccgcggaataacgggacgaataacttctacaccgccaacctcggcaacggcgttgtcgctattggctacaaatcgcagccggtactggtgcagccaggccagaccgacaaactgcagagcacgctgtgggtcggcccggctattcaggacaaaatggctgccgttgcgccgcatctggatctgaccgtcgactacggctggctgtggttcatctcccaaccgctgttcaagctgctgaaattcatccacagcttcctcggcaactggggcttctcgatcatcgttatcacctttatcgttcgtggcatcatgtacccgctgaccaaagcgcagtacacctccatggcgaagatgcgcatgctgcagccgaagattcaggccatgcgtgagcgtctgggcgacgataaacaacgtcaaagccaggagatgatggcgctgtataaagcggaaaaagtaaaccctctgggcggctgcttcccgctgattattcagatgccgatcttccttgcgctgtattacatgctgagcgcctcggttgaactgcgtcatgcgccgtttatcctgtggatccacgacctgtctgctcaggacccgtactacatcctgccgatcatcatgggcgcgaccatgttcttcatccagaagatgtcgccgaccaccgtgaccgacccgatgcagcagaagatcatgacctttatgccggtcatcttcacggtgttcttcctgtggttcccgtctggcctggtggtgtactacatcgtcagcaacctggtcaccattattcagcagcagctgatttaccgtggtctggagaaacgtggcctgcatagccgcgagaagaagaaatcctga

SEQ ID NO: 254122 - DNA, 366 bp, Klebsiella pneumoniae
atggtgctgttcgtgttcgtggtgatgatgctcaatctgggcggcagcgaaatcgagcaggagcgccagtggctgaaacccgggatctggattggccccgccatcctctctgcggtactgctggtggttatcgtttacgccatcctcggtattaacgatcagggaattgacggtgcggcgattaacgccaaagaggtcggtattgcgctgtttggtccgtacgttctggcggtggagctggcctccatgctgctgctcgcgggcctggttgttgccttccatatcggccgcgaagagcgcgccggggaagtgctgagcaaccgcccgaacgacagcgataaaagaaaaacggaggaacacgcatga

SEQ ID NO: 254123 - DNA, 303 bp, Klebsiella pneumoniae
atgatccccttaacacatggactgatcctcgcctctgtcctgtttgtcctcggcctgacggggctggtgatccgccgcaatctgctgtttatgctgattagcctggagatcatgatcaatgccgcggcgctggctttcgtggttgcaggaagctactggggccagaccgatggccagataatgtatatcctcgccatcaccctcgccgccgcggaagcgagtatcggcctggcgctgctgctgcagctccatcgtcgtcgccagaacctgaacatcgattcagtaagtgagttgcgcggatga

SEQ ID NO: 254124 - DNA, 1842 bp, Klebsiella pneumoniae
atgaacatgcttaccctaaccattcttttgccattgattggctttgttttgctggccttctctcgcggacgctggtcggagaatttatccgccaccgtgggggtgggttcggtcggtctggcggcgctggcgacggcgtttgttggcgtcgacttctttgccaacggcaaacaggcggtcagcgttccgctgtggacctggatgtcggtgggcgacttcaatgttggcttcaacctggtgctggacggtctctctctgaccatgctgtccgtggtcaccggcgtcggtttcctgatccatatgttcgcctcctggtatatgcgcggtgaagagggctactcccgcttcttcgcttataccaacctgtttatcgccagcatggtggttctggtgctcgctgataacctactgctgatgtacctcggctgggaaggcgtgggcctctgttcctatctgctgatcggtttctactacaccgatccgaagaacggcgcggcggcaatgaaagcgttcgtagtgacccgcgtcggcgacgtgttcctggcgttcgcactgttcattctctacaacgagctgggcaccctgaacttccgcgaaatggttgaactggcgcctgcgcactttgccgccggtaataacatgctgatgtgggcaaccctgatgctgctgggcggcgcggtgggtaaatctgcgcagctgccgttgcagacctggcttgcggacgcgatggctggtccaacgccggtctccgcgctgatccacgccgccaccatggtgaccgccggcgtctacctgattgcgcgcacgcatggcctgttcctgatgaccccggaaattctgcatctcgtcgggatcgttggggcggtaacgctggtgctggcaggtttcgccgcgctggtgcagaccgatatcaaacgcgtactcgcgtattccactatgagccagattggctacatgttcctcgcgctcggcgtgcaggcgtgggatgcggcgattttccacctgatgacccatgcgttcttcaaagcgctgctgttcctgtcgtccggctcggtgatcctcgcctgccaccacgaacagaatatcttcaagatgggcggcctgcgtaagtctattccgctggtgtacgtctgcttcctggtggggggcgcggcgctgtccgcactgccgctggtgacggcaggcttcttcagtaaggatgagatcctggcgggcgcgatggcgaacggtcatctgaatctgatggtggccggtctggtcggggcatttatgacctccctgtacacctttcgtatgattttcatcgtgttccacggcaaagaacaaattcatgctcacgcagggaaggggattacccatcatctgccgctgattgtgctgctggtgctctcaaccttcgttggcgcgctgattgtgccgccgctggatggcgtactgccgcagaccaccgagcttgagcatggacgcgtcatgaccctggagattgcctccggagtgattgccatcgccggtattctgattgccgcctggctgtggctgggtaaacgcacgttggtcacatcgattgccaacagcgcgccgggtcgtctgctcgggacctggtggtacaacgcctggggctttgactggctgtacgacaaagtgttcgtcaagccgttcctcggcgtggcgtggctgctgaagagcgatccgctgaatgcgctgatgaacattccggcgatcctttcccgcttcgcaggtaaaggcctggtggtaagcgagaacggctatctgcgctggtatgtggcttcaatgggcattggcgctgtcgtggtgctggcgttactgatggtattgcgctga

SEQ ID NO: 254125 - DNA, 1530 bp, Klebsiella pneumoniae
atgttattaccctggctaatattaattcccttcatcggcggcttcctgtgctggcagactgaacgctttggcgtgaagatgccgcgctggatcgcgctgatcactatgggattgacgtttctgcttggcctgcagttgtggatgcagggcggctattctctcacgcaatctaccggtattccgcagtggcagtcggaattcgtgatgccgtggatcccgcgattcgggattagcattcatctggctatcgacggtctgtcgctgctgatggtggtgctgaccgggctgctcggcgtgctggcggtgctctgttcatggcgcgaaatcgagaaatatcaggggtttttccatcttaacctgatgtggatcctcggcggcgtgatcggcgtattcctggctatcgacctgttcctgttcttcttcttctgggaaatgatgctggtgccgatgtacttcctgatcgcgctgtggggccataaggcttccgacggtaaaacgcgtatcacggcggcaaccaagttcttcatttatacccaggcgagcggtctggtgatgctgatatccatcctggcgctggcgtttgtgcacttcaacgctaccggcgtatggaccttcaactatgaagagctgctgaagacgccgatgtcgcacggcgtggaatacctgctgatgctgggcttctttatcgctttcgcggtaaaaatgccggtggttccgctgcacggctggctgccggatgcgcactctcaggcgccgaccgcgggttccgttgacctcgcggggatcctgctgaaaaccgcggcctacggcctgctgcgctttgcgctgccgctgttcccgaacgcttccgccgaatttgcgccgatcgcgatgtggcttggcgtgatcggtattttctacggcgcgtggatggccttcagccagtacgatattaagcgtctgattgcttacacctccgtttctcacatgggcttcgtgctgattgctatctacaccggcagccagctggcttaccagggggcggtgattcagatgatcgctcatggtctgtcagcagccggtctgtttatcctttgcggtcagctttacgagcgtctgcatacgcgcgatatgcgccagatgggcggtctgtggagcaaaattaagtggctgccggcgctgtcgatgttctttgcggtagcgaccctcgggatgccgggcaccggtaacttcgtcggcgaatttatgattctgttcggtagctataagaccgtgccggtgattaccgttatttctacctttggtctggtgttcgcttccgtgtactcgctgtcgatgctgcatcgcgcgtacttcggtaaagcaaaaagcgaaatcgccgccaaagcgctgccgggaatgtccctgcgtgaactgtcgatcatcctgctgctggttgttctgctggtgctgctgggcttcttcccgcagccgattctggacacctcgcactctgcgatgagcaacattcagcagtggtttgttaattctgtttctactacaaggccgtaa

SEQ ID NO: 254126 - DNA, 399 bp, Klebsiella pneumoniae
  misc_feature (370)..(379): n is a, c, g, or t
atgacaataactccacaacaactgatcgcactgctaccgttgctgatcgtcggcttgacggtggtggttgtgatgctctccattgcgtggcgacgcaatcatttcctcaatgccacgctgtcggttctcggcctgaacgccgcgctgatctcactctggttcgtgggtcagaacggagcgatggacgtcacgccgctgattcgcgttgacggttacgcgatgctctataccggcctggtgctgctggccagcctggcaacctgcacctttgcctacccgtggcttgagggttacaaggacaacaaagaagagttctatctgctggtgctgatcgccgcactgggcggcattctgctggcgggcgctaacnnnnnnnnnngttctatctgctggtgctga

SEQ ID NO: 254127 - DNA, 1134 bp, Klebsiella pneumoniae
gtgctgatcgccgcactgggcggcattctgctggcgggcgctaaccatctggcagcgctgttcctcggcattgagctgatttcgctgccgctgtttggcctggttggctacgctttccgccagaaacgttcgctggaggccagtatcaaatatacgatcctgtccgccgttgcctcttcgttcttgctgttcggtatggcgctggtgtatgccaattccggtaacctctccttcctggcgctcggtaagagcctgacggatggcatgctgcatgagccgctactgctggccggtctcggcctgatgattgtcggtcttggctttaagctgtcgctggtgccgttccatctgtggacgccggacgtctaccagggcgcgcctgccccggtatcgacctttctggccaccgccagcaagattgctatcttcggcgtggtcatgcgtctgttcctttacatgccggtgggcgacagcgaagcagtgcgggtggttctgggtctgatcgcctttgcatcgattatctttggtaacctgatggccctgagccagaccaacatcaaacgtctgctcggctactcttccatttcccatcttggctatctgctggtggcgctgattgccctgcagagcggtgagatgtcgatggaagcggtgggcgtttacctggccggttacctgttcagcagcctcggcgcgttcggcgtggtgagcctgatgtccagcccgtaccgcggcccggacgcagactctctctactcctaccgcggcctgttctggcatcgcccgattctgtcggcggtgatgacggtaatgatgctgtctcttgccgggattccgatgacgctgggctttatcggtaagttctacgtgctggcggtgggtgtgcatgcgcacctgtggtggctggtcggggcggtggtcgtgggttcggcgattggcctctactactatctgcgcgtggcggtgagcctctacctcagcgcgccggagaaactgaatcgcgatgcaccgtctaactggcagtacagcgccggcggtatcgtcgtgctgatctccgcgctgctggtgctggtgctcggcgtgtggccgcaaccgctcatcaacatcgtacagctggcgacgccgctgatgtaa

SEQ ID NO: 254128 - DNA, 552 bp, Klebsiella pneumoniae
atgaaaacaaggcgtaagcatttgactgtcggtgaagttcagcgtttggttgatgcagccagacggggggctaacccggaacgcgatgtctgtttattgtggatgtgttttaatcatggatgcagagtgagtgaaattcgtcactggaagctctcggatatcgatattcaaagcggggttatttatattcgacggttaaaaaatggcttttcaacgacccatcccatatataaacaagaggtgaaagttcttaaggaatggctgcgtgtgcgtaaggattatcccggtaatcattccggctggctctttttatcgcgcaatggtcaacctttatcccggcagcgaatatatcagatgatgaagaacctgagtcttgtcgcccagctggagatcagcgctcatccccatatgctgcgccacgcctgcggttttgcgctggctaacaacggtgtcgatacgcgattaatccaggattttctcggccacaggaatattcagcatacggtcatttatacggcaagtaatgatgcaagatttagagaggtttggtaa

SEQ ID NO: 254129 - DNA, 537 bp, Klebsiella pneumoniae
atgaaaaaaacattacttgctgctgtagttgccggttgcgcggcgttctctggtgctgcgctggcggatgacggtcaggtgaagtttctcggcgaaatcatcgatgctggctgtgacgtggttaacgacatgaccaacccgctggaagttcatatggggcagattgccaagaccgcgtttagcggtaccggttctactgcggctgaacaggatttctcgatcaaactggaaaactgcccgacgaccgtcgccaaagcatcggtactgttctccggccctaacgtcaacggtgataatgaaaaactggagctgaccggcgccggtaccgatcctgacgttgccgaaggcgtggccctgcagctggttgatggcagcaacaacaataccctgccgctgttcacccgttccaccagcctgaatatcccggctaccggcaaaatcgatctgccgttccgcgttcgttatatccagactgataccacagtggttgccggtaaggcagacggtagcgcgaacttcactatcagctacaactga

SEQ ID NO: 254130 - DNA, 663 bp, Klebsiella pneumoniae
atgaaacgatacctgaaagtgctaatggctggatggctgttagtgggcgctgcggcacatgcgggcgtcgtcaccgggggaactcgcctgatatatcccgggggcaaaaaagagtcctctctgagcgttaccaataccgatgctacgccttatctcattcaaagctgggttgaagctgcgcagggggccgccccttttctgttgactccgcctttatttcgcctggatggtgagcagcaaacccgtctgcgagtgatttatagcggcggcctgccggaaaacaaagagagcatgttctggatgaacatcaaagcgattccctcttcgcaagcgaaagccggggccaacaccctgcagatcgcgatcaaaacgcgcatcaaactcatctatcgacctaaatccgtcgtgggttcgccggagatggtaacggaacagcttcgctgggcgcgtagcggtaacacgctccaggtaactaatccgaccgcgttctatatgaatttcgccgaggtcaaaataggcggggccgaagtcaaggacgccaactgggtggggccaggggaaacggcgcgctttgaactaccgcgcggcagcgccggcgctttgcagtggaagctgattaacgattacggcggaatcggcgcgcagcaccgcgctaatttgtag

SEQ ID NO: 254131 - DNA, 2547 bp, Klebsiella pneumoniae
atgaaaaataatcataaaaaatggcggcttaaccggatagccggagctctggccgttgcgctgttaccgctgtgtgacgaggtcttggcgcgggatgttttcaacccggccctgttggaaatggatggacctcagacgggcatcagggatttatcagcctatgagcaggtcggaggccagcagccgggcagctatcgggtggatatttaccttaataacgtttttatggatagccgcgatgtgacttttcagcagggtgaaggcgccgggaaaacggaactgcagccgtgcctgaaggttgaagagcttgcggaatggggcgtgcgcgtctcccgatttccagacctggggcgtaagtcagcaaactgtgcggatatgagcgtcataccgcaggcgaaagccgagtttcgtttcagccaacagcggctgttattaagcttccctcaggcggcagtgtccagcgcagcccggggctgggtcgatcctaaacagtgggatgacggagtgacggcgctgctgctgaattacgcttttagcggagccaacaactggtcgcgcaagaacgacacgccggatagcgataatcaatacgttaacctccgtcccggtattaacatcggaccgtggcgtttgcgtaactacacgacctggacccgcagcagcggcggcgagtcgagtaacagctgggatacggtctacacctatgcgcagcgcaatattaatgctctgcaaggggtgatgacgctgggcgacagtagcaccgacgccgacgtttttgaaggcattccctttcgcggagcgatgctggcttccgatgacgatatgctgccggaaagcctgcgcggctatgcgccggttgtgcgcgggatcgcgcggactaacgcccaggtcattattcgccagaacggctatgagatttatcagacctatgtctcccccggggcatttgaaatcaccgatatgtatccgaccgggggttctggcgatctgtcggtgactatcaaagaggccgatggcagcgagcagaacctgatcgtgccctatgcttcactccccgttctgcagcgtgaagggcgtcttaaatatagcgtaactactggggtgtatcgcgcctacgacaacagtattgacgagacgcctctctctcaggcaacggccatctacggtctgccatggggatggacgttgtacggcggcggtcagtttagtagcaaatatcagtcgctggcgttgggtatgggcaaaaacctcggcgaactgggagccgtgtcgaccgacgttacccaggcctggtcgaatcgccaggataaagataaagagagcggtcagtcggttcgtcttcgttacagcaaagatcttccgggattagggaccaacgtcagcctggcaggatatcgctatgccaccagcggttactgggatatgcaggaggtgctggatacctatcgcgatgacgcctatacgccttcagtggaacggcggcgcaaccggggagaggtgacgatcagccagagtcttggtgatgagatggggtcgctgtcgctaagctatattcgcgaggactactggaacaccggtcgtaccatggagtcagtgggcgtcggttacaacaatagctggcgcggcatcagctatagcatgaactatagctacaatcgcaataccaccgatcagaacaccggtaaacgtaatgatgaagaccatctgttcgccttaagcatcagcataccgctgggcgaatggctgcctaatccggtctatgccaactactcccttaacagcagcaaaaatggctcgactaccaacaacctgggcctctccggtaccttgctggagcgtaacaacctgagctggagcgtacaggaaggttacaccagccagggaagaggggagagcggcagcgttaacgccgactggcgtgcgacctacgcggaactgaccggcggctacagtcatgataaatacagccaccgcctgaactacgccctgcgcggcggagtactggcgcatgagaatgggctgacgctcgggcagccatttggtgaaacccttgctttagttaaagccccgggcgccgcgggcgttggcatcaacaaccagaccggcgtcagaaccgactggcggggctatgccctggtgccttacacctcgccgtatcgtaaaaacaccttaacgcttgataccagcatgatgccggatgatgtcgaccttgagctaacgacgcaaacggtggtgccaacccgcggggcggtagtgcgcgctaattacgctaccagcgtcggtagcagggtgctgatgacggtgcgtcaggataacgggcggccggtgccttttggcgccatggtcagcattcctggggccgcgtcatctgagcaagcttttatcgttggcgatagcggccaggtctatctgaccgggctggaatctagcggcgtacttaacgtgaagtggggggccagcgcgcaagatcgctgccgggtccagtatgcgctgccgtcagggaaaagcctcaccggcattatcgtagcccaggggctatgccgttaa

SEQ ID NO: 254132 - DNA, 1044 bp, Klebsiella pneumoniae
atgaaacgattttcatggggattactgaccggtctggcggcgctggcgatatcgtcgcagactatggcggaaacgggctggtgtcagaatacgggtaatggcggagctcctttccaggacagcttttcatttattgaaacttttactaacccttcgcaaaaccaggccggaatggcgttccctcgtctgtaccattggactaccgggggaacttatcaggcgaaatgtgattgcggtagcgatgttactggtactacgtattttcgagccactgttccgggattagtcgcgacgcaaacccgaagcggcttgaattattatcagctgaataaatacctggaaatcgccagcgagctatttattgccggcggggtgaatcagtatttaccgacgcccattcaggataaaagcaatttaaataatcagggttatgcctgtaacccgggcggtacgctgtttaataccggttcagtgggatatatctcgctctactttacccggccgttcgtcggtcaggtgacgatcccgccaacggtgatcctgaacgtttacgggtcgcggaaaacggggagctatagcagtattcctctcacgcagatctcaatgaggggctcggtaacagtaccgcagtcctgcgagattaataccggtcagccgattaatatcgacttcggcgatattgccgcgaataactttaaaacctcaggtcagatgccgacgggctttacgccgcatgttgtcaatatgacggtagcctgtactaatatttcctcaggggtaaaaattgcgctttccttccaggggacggcggatacaaatgacagtaccgcgctggcgaccacaaatagtgatattgcggttcgtatagaaaatattactggtgtcaaaatccccgttatatccggaatgctaccggtcaatctgaattacgcgacccagcaaggggacacgaccatgaaaatctatccgattaataccaccgggaatgtacccgatggcggcggatttacggcgacggcaaccattcaagcagaaatcgaatag

SEQ ID NO: 254133 - DNA, 510 bp, Klebsiella pneumoniae
atgaaaaaggcgctatggctggcattgctgctgcctgttttttcatcctggggcggcatccctctgaacgtgatgggtaatatttattatctcccctgcgacgttagcaccgacacgaagtatcaggaggtgaatttcggcacgctgctgaatatcgattttcaaactgccggcaccgcttctgagtggaaaacctttagcctgaatgttgaaaattgcccggcgggtacgacgaaagcgacggtgaaatttgatggcgtgaccgacggcgatgatgccacgcatttcgccaatatggctgccagcgatgcggcgcaaaatatcgcgctgcagataaccaataccgatcattccacaacctataaaaaccaggatcggatgactattgctattaacggtagcaccggcaaaggcgaattcccgctggccgcgcgcttatattcaacgcagggcggagcaaaagtgggaaaattcgagtcggtggtgcagctgacttttacctatcagtaa

SEQ ID NO: 254134 - DNA, 531 bp, Klebsiella pneumoniae
atgcaggatgagacggaatatctgagcgttaaagacgttgagcgcctggtgcttgccgcacattattgtgcgcaccccgagagaaatagctgcatgatccaaatgtgctttttgcacggttgtcggattaatgaaattaccgcattaactttgcgggatgtcgacctgccgggaaaacgaatttatattcgccgggcgcgtcacgggatctcggggtatcatccattacaacccaaagagattatctcattacagcgctggctgttggccagagagtgttatccagcccataatgatttactctttatctcttcgcggggaaatcagatgactcgccagcgtttttatcaaatcattcgtgaatgctgtgagctggcgaaactgaagcaaaatattcacccgcggatgctgcgccatgcttgcggatatgaattgggtaaaaaaggcatagatgatgactctatccaggattatctgggctatcgcaatttaaaatctattctgcgttataacggttatgttgaagagtaa

SEQ ID NO: 254135 - DNA, 921 bp, Klebsiella pneumoniae
atggaattactctttttggggacatccgctggcgtgccaacccgtacgcgtaatatgacgtcgatggtgctgaatttgcaacagccaactatggcggagatgtggctgttcgactgcggggagggaacgcagcatcagtttctccacagcccttatcatcccggcaagctgaataagatctttattacccatttacatggcgatcatctgttcggtcttcccggcctgctgtgcagccgctcaatgcagggtaattctctgccgttaacgctatacgggccaaaggggcttaaggagtttgtggaaaccgccctgcgtcttagcggttcctggaccgattatccactggcaatcgtcgaagtcgaaccgggtctggtatttgatgaagccggtttccgggtcaccgcctggccgttaaaccatccggttgagtgctacggctatcggatcgaacagcatgataagccgggtacccttgatgccgcacagcttatcaccgagggcgtgcctcccggtccgttgttccaccgcttaaaactggggctgacggttgaactggaagatggtcggttgattgacggcagtcgctaccttgggccggcaacgcccggtaagaagctggcgattttcggcgataccgccccctgcccggaggcactggagctggcgcgcggcgtggacgttatggttcatgaggttacgctcgaacaggcgatggcggaaaaagccaacggtcgcgggcattcatccagccagcaaacggcggcgttagcgagggaagcaggcgtcgggacgcttatcgccactcattttagctcgcgctatgatgccgaaggctgtcagcggctgttggctgagtgtcgggaggtctttccccctaccgtgctggcggaagattttctggtttataacatcgaataa

SEQ ID NO: 254136 - DNA, 462 bp, Klebsiella pneumoniae
atgatgacatggcaggatcttcaccacgctgaactgaccgtcccccaactctatgctgtgctgaaattacgctgtgcggtgttcgttgtcgaacaaacctgcgcctatcaggatatcgacggcgacgatctggtaggggagaaccgccatcttctcggctggcgcggcgatgaactggtggcctatgcgcgcattctcaagagcgatgatgaatatgagccggtcgtgattggccgggtgatcgtcagcccggcggtgcgcggcgaaaagctgggctatcagctgatggagcaggcgctggccagctgccgtcaacactggccgcaaaaggccatctatcttggcgcccaggcgcatctgcaaaaattctacgccagcttcggctttgtgccggtgaccgatgtctacgacgaggacggcatcgaccatattggcatggcatacgaaatcgccacccactag

SEQ ID NO: 254137 - DNA, 1356 bp, Klebsiella pneumoniae
atgtggggtttttactccgtggaggtttgcgtgctgtctgtgtccaccgcgctggaaagcctgtaccgctgcctggatgaagcgtttccgccatcgcccggctggcgcatcttcgatatccccttcgcgctgaatgacgcttttgatccgcttctgtggtgtacccatcagcagcagtggccgcagttctactggcagcagcgcagcggcgatgaagagctggccgctctgggggcggtaaaaatcttttcctctctgccgcaggcgcacgcttttcttcagcaacaagcgcgtgacgatctgcggatttgcggccttaacgcgtttgatccgcagcgcggcatgctgctgttaccgaggctggagtggcgtcggcttggcggtcacgccacgctacgcctgacgctgtatagcgatacctcactccgtgacgatgcctgcgcggcgcgcgagtttctccgctcgctgacgacccggcaagcgcagcccggcacgcttccttctctgctcagtgagcagcatttcccggcttattcgcagtggcgagatctggttgcacaggcgacacaggcgatagcggcaggggggatggataaagtcgtgctggcgcgcgccaccgatttgcagtttgccgccccgctgaacgccggggcgataatggccgccagccgccgcagcaatctgcactgttttcattatctgatggcctttaatccgcaagaagccttcttcggctcaacgccggaacggctatggcgacggcgcggcgcgctgatgcgtaccgaggcgctggcgggaacagcggccagccatgaggacgatcgccaggcgcagcgcctgggcgactggctgatgggcgatgacaagaaccagcgggaaaatatgctggtagttgaggacatctgtcagcgtatgcaggcggagacgcgcgcgctggaggtgctgccgccgcagatcgtccgtttgcgtaaagtgcagcatctgcggcgctgtatatgggccgagctggacgtccccgatgatgcccgctgtctgcgccagctccagcccacggctgcggtcgccgggctgccgcgtcaggtggcgctggattttatcacccggaacgagctttttacccgcgactggtatgcgggctccgccggttatctgtcgctggcgcaaagcgaattttgcgtttcgctacgctcggcgaaggtacggcagcatacgctcaggctctacgccggagcgggcatcgtcagcggctctgacccggagcaagagtggcaggaaattgaaaataaagctgcaggattgcgttcgttactgctcacagaagcagagataaaacgatgcatatcaaaacggcaataa

SEQ ID NO: 254138 - DNA, 1671 bp, Klebsiella pneumoniae
atgtcagtaagcgcatttaaccgacgctgggcggcggtgatcctcgaagctttaacgcgccacggcgtgcagcatatctgcattgcgcccggatcgcgctcgacccctttgaccctggctgcggcggaaaaccgcgcgtttatttaccatacccactttgatgaacgcggccttggccatctggcgttagggctggcaaaagccagcggccagccggtggcggtgattgtcacttccggcaccgccacggccaacctctatcctgcgctgatagaagcgggtctgaccggcgaaaaactcattttactgaccgccgaccggccgccggagctcatcgactgcggtgcgaaccaggccattcgtcaaccgggcatgtttgcttcgcatccgtcgcagaccctggccctgccgcgcccgtcgcaggatatctccgcccgctggctggtctcgaccctcgaccaggcgctcggcgcgctgcactgcggcggcattcatattaactgtccttttgccgaaccgctgtacggcgatatggacgacaccggggtcgcgtggcagcagcagctcggcgactggtggcagagcgacaagccctggctgagtcacaatctgcatctggaaagcgaaaagcagcgcgactggtttttctggcggcaaaaacgcggcgtcgtggttgccggacgaatgagcgcggaagagggcctgaaggttgccgaatgggcgaaaacgctcggctggccgctgattggcgatgtcctttcgcaaaccgggcagccgctcccctgcgccgatctgtggctcggtaacggtcaagcggttagcgaactggcgcaggcgcaaattatcgttcagctgggcagcagcctgaccagcaaacgcgttttgcagtggcaggccacctgcgaacctgaagagtactggctgatcgacaacctgccgggtcgtctggatcccgcccaacatcgtggtcgccgactggtgtgcgccatcgaccgctggcttgaacagcatccggcggaaaagcggcagccgtgggctaccgtcattcctgcgctttcacgccaggcatggcaggcggctgtcgccagcagcgaggatttcggcgaggcccagctggcgcagcgaatccgtcgctacctgccggatcagggccagctgtttgtcggcaacagtctggtggtgcgcttaattgacgccctgtcgcagcttcccgcaggctacccggtctacagcaatcgcggggccagcggaatagatggtctgctggcgacgacggccggcgtgcagcgcgccagcgcgcgtccgaccctggccatcgtcggcgatctctcggcgctttacgacctcaattcgctggcgctgctgcgtcaggcctccgcgccgctggtgctgattgtcgtcaacaataacggcgggcagattttctccctgctgccaacgccgcaggagcagcgcagccagttctatctgatgccgcagaatatccattttgcgcacgcggcggcgatgttcgatctgacttatcattgccccgcggactggagtgagctggagcgcgcgctggacgttgcctggcgagcgcccggcgcaacgctgatcgagctggtggttaatgaaaccgacggtacgcaaactctccagcagttgcttgcgcaggtgagtcagctatga

SEQ ID NO: 254139 - DNA, 780 bp, Klebsiella pneumoniae
  misc_feature (20)..(29): n is a, c, g, or t
atgattctgcacgcgcatcnnnnnnnnnngcacgcgcatgcggaacgcgggctgccgggctatccctggctggtcttcttgcatggttttgccggcgatagcctcgaatggcgggcggtggggctggcgttcgacgcgtatccgcgtctctatattgacctgccgggccacggcggctcggcggatagggcagttaaccgttttacggatgtcagcgagctgattaagaatacgttaattagttacaacatacataagtactggctggtggggtactccctcggcggacgggtggcgatgtattatgccagccagtcgcatgaggggctctgcgggctggtcgtcgagggagggcatccgggtctggcggacgatgatcagcgtgcgcagcgccggcgcagcgatgccgcctgggctgaacgctttcgccgagagccgcttacgcaggtctttgccgactggtatcagcagccggtcttcgcctccctggacgcagcgcagcgtgcggcgctggttgcgctacgcagctgcaacaacggcagggcgttagccgcgatgctgcaggcctgctcactggctgaacagcccgatctgcgcgaggcattacgggcgcgcgatttcccattccattacctttgcggcgaacgcgacggcaagtttcgcgccctcgccgatgatctatccgccatcacgcacgtgattaatcatgccggacacaacgcgcatcgggaaaaccccgatgcagtcgtggcttgtctggcgcagtttttagcgagttaa

SEQ ID NO: 254140 - DNA, 858 bp, Klebsiella pneumoniae
atgatctctcttgatgaagcaatgctttacgctccgattgaatggcaggactgctccgaaggctacagcgatattcgctaccacaaatcggcggacgggattgccaaaataaccatcaaccgcccgcaggtacgtaacgcgtttcgtccgctgaccgtcaaagagatgattcaggcgctctcggatgcccgctatgacgacaatatcggcgtgatcgtcctgaccggtgaaggcgataaagctttttgcgccggcggcgatcaaaaagtccgcggcgactacggcggctatcaggatgactccggcgttcatcatctcaacgtactcgattttcagcgccagatccgcacctgtccgaaaccggtagtggcgatggtggcggggtactccattggcggcggccacgttctgcatatgatgtgcgatctgaccatcgccgcggaaaacgcaatcttcggtcagaccggcccgaaagttggttcttttgacggcggctggggcgcctcctatatggcgcgcattgtcgggcagaaaaaagcccgtgagatctggttcctgtgtcgccagtacgacgcgcagcaggcgctggatatggggctggtcaataccgtcgtgccgctggttgatctggaaaaagagaccgtgcgctggtgccgtgaaatgctgcagaacagtccgatggcgctgcgctgcctgaaggcagcgctgaacgccgactgcgatggtcaggcgggactgcaggagctggcgggcaatgccaccatgctgttttacatgaccgaagagggtcaggagggacgcaacgctttcaaccagaagcgccagccggacttcagcaaatttaaacggaatccgtaa

SEQ ID NO: 254141 - DNA, 966 bp, Klebsiella pneumoniae
atgcggcaggcgcaggtctaccgctggcagctaccgatggacgcgggagtggtgctgcgtgaacggcggttaaaaacccgcgatggcttgcttctgcagctgcgcgatggcgagcgcgaaggctggggggagatttctcccctgcctggattcagcctggaaacgctggatgaggcgcaggcagcgctgctggcatgggcgaacgcctggcgcgaaggccaggatggcgcgttgccgacgccgccttcagccgccttcgggataagctgcgcactggcggagctgggcggtgagctgccgctggcggcggattatcgcgccgcgccgctctgttccggcgatccggacgaactgttcgccaggctttcgcagatgcccggagagaaggtcgccaaggtcaaggtcggcctgtatgaggcggtgcgcgacggcatggtggtcaatctgctgctggaagcgattcccgatctgacgctgcgtctcgacgctaaccgcgcctggacgccgctgaaggcgcagcagttcgctaaatacgtgagcccgcactatcgcaaccgtatcgcctttctcgaagaaccctgcaaaaaccgcgatgattcacgcgcgtttgcccaacaaacgggcatcgctatcgcctgggatgagagcctgcgcgaagcggactttacgtttgctgccgagccgggtctgcacgcggtggtgattaaaccgacgttgaccggcagtctgcaaaaggtccagcagcaggtcgcgcaggctcatgcgctggggctgacgacggttatcagttcagccattgagtccagccttggcctgacgcagctggcgcgaattgccgcctggctgacgccgaataccattcccggtctggataccctgagcctcatgcgcggccagctggttcgctgctggccggaaagcgagctgccgtgtctgaccgtcgatgaactggagccgctgctgtga

SEQ ID NO: 254142 - DNA, 1392 bp, Klebsiella pneumoniae
gtgacctttagcgactggccctggcgccactggcgccagcagcgaggggaggcgcatgctctgcgcctgaacgagcggcagctaagctggcgggaactgtgcgcgcaaatcgatgcgctggcggcaggactgcacgcccagggcgttcgcgatggtgatggcgtactgatgcgggctgacaaccagcccgatgttttgctggcatggctggcgctcctgcagtgcggtgcgcgcgtgttgccgctgaatccgcaactgcccgggccactgctggctgaactgctgccgaccctggacctgcgccacgcgctggtgctgaacggcggcgatcttccggtaacgcttaatccactgactctgtaccctgtcgacggcgagcgcgcggctgactggcgagaagatcgtatggcttccatgacgctgacctcggggtcgacggggctaccgaaagcggcggtacacgcttttcgcgcccatattgccagcgctgaaggggtactggcgttgataccctttgcgccgcaggacgactggctgctgtcgctgccgctgtttcacgtttccggccaggggattctctggcgctggctggttgccggcgcaggcctgacggtgcgcgacaaacagccgctggcgctggcgctacgcggctgtactcacgcctccctggtgccaacccagctctggcggctgctgagcggcgatgacgaggtgtcgttaaaagcggttttgctcggcggcgcggccatcccggtggcgctaaccgaacaggcgcgcaggcgcggtatccgctgctggtgcggctacggactgaccgagtttgcctccacggtatgcgccaaggaagcggatggcctggcggatgtcgggctgccgctgccggggcgcgaattgcgcatcgtggatggcgaagtgtggcttcgatcggacagcatggccgcaggctactggcgaggcggccaaacgataccgctcaccaacgccgatggctggttcgccacccgcgatcggggtcggcttgacaacggcaggctgaccatcctcgggagaatggataatcttttttttagcggcggagaaggcattcagccggaggaagtcgagcgggttatcggcgcacacccgttgattgagcaagtttttatcgtgccgcaggatgatgcggagtttggccagcggccggtggcggtagtagagtgtcgcgatcatggcgatccatccgtgctggctgactggtgcgccgataagctggcgcgctttcagcagcctgtgcgctggttacggctgcctgaatcgctgaaaaccggcggaattaaaatttcccgccgggcgttacgtgactgggtcaaccagcagcagagctccgcctcagatgcgctggacgtgcagtag

SEQ ID NO: 254143 - DNA, 624 bp, Klebsiella pneumoniae
atgaccgtcgcagcatcccgctcggggttaacattcgcagcgctggcgctggccctgattcttatttataccggtatcagcgcaggggaaaagcttacctggctgatggaagtgacgccggtgattatcatcgttccgcttttgctggccacgcgctctcgctatccgctgacgacgctgctctatgtgctgattttcttccatgccatcattttgatggtcggcggtatgtacacctacgcgaaagtgcccatcggctttgatgtccaggcgtggctgggtttgagtcgtaatccctacgacaagctggggcactttttccaggggctggtgccggccctggcggcgcgggagattctgctgcgcggcggctacgttcacgggcgtaaaatgctcgctttcgtggtctgctgcattgcgctggcgattagcgccgtctacgagctgatcgaatggtgggcggcgctggcgctgggacagggggcggatgattttctcggcacccagggcgatccctgggatactcagtccgatatgttctgcgccctgctcggcgcgctgaccaccgtttttgcgctgggccgctggcatacgaagcagctactgcacgtccagcgcatctga

SEQ ID NO: 254144 - DNA, 432 bp, Klebsiella pneumoniae
atgagcgatcgtatttttgccggaatatggctgctgctctgcgtaggggggatgtttatcgcctggcaaatccacagcgaatacgcctatgaacccgtcggcccacgcccctttccggtcggcattatcggcctgatgctgctgtgctccgttttgctgctactgcggcggcccgacgcaatctcctggcccgggcgtctggttttacaacggctgttgacgatggtcgtggcgttggcggtttatgcctggggttttgaatggctggggtttcctctggccaccgcgctgctgaccgctgtttttggcctgctgtttggcgccaccctgcccgctgctggggtagctggcgtcgcgatgggcatcgcgctgtggtacgtctttgacgccctgcttgatgtcaccctgccgctcggcgtctggttaagttaa

SEQ ID NO: 254145 - DNA, 1416 bp, Klebsiella pneumoniae
atgaggtggggtaagccgcagtcgttattcgctcagctgctgctgtttcttggcctgccgctggtgttactgtgggggctgtcggcattcaatagctacgtcagcgctctgcaggcggcgactcaggcttacgatcgtacgctgctctcctccgcccgcacggtggcggaacgcctggtggtacgcggcggcagactggaggtgaatgtcccctgggtggtgctcgatagcttcgagctgaatatgaacgatcgcctgtactataaggtgctcgatcccggtaagcgggtgatttccggttttgacgatctgccatcgatgccgccctcaacctctcgtaccgagctctatccggcgctggcgtggttttatcataccgagtatcgcggtcaggccatccgcgtggcgcggctgctgcagccggttaacgaaggcggcgttgtgggaatggcggaaatctatatcgccgaaacgctgcagtcgcggcgctggctggcgggacagctgctgttttcatcgtggatctcgcaggggctattggtgctgttgacgctggtgctcaccggctggctgctgcgtcgggtgctgcggccgatgcgtcggctttcggcgctcatggtgcggcgcgaacccggcctgttgacgccgctgccggaactgctgccgtggtcggaaacccgtttattgattgttgcttttaaccgctatatcgaccggctgcgggcgatgatctcccggcaggagcggtttagcgccgatgcttctcaccagttaaaaacgccgctggcggtgctgaaaacccaggcttcggtggcgctggcgagcggcgatccccggctgtggcgagagagtctggaggcgatgagcggcacgctggacagtacgattctgcttaccgaacgcctgctacagctggctaccatcaaacgtaaagagcagggagaacacgcgtttccgccggtggatctgtatgagatcgtccacaacagctgcttttcccgtcttcagcaggcgcggagcaaagctatcgatctcggctatgagggggaaccctcaacggtgactatcgccggcgatggcgtgctgttgagcgagctgtgcgcaaatctgttggataacgcgatccgctatacgccgcagggcggtatcgtcacggtcagcctgcatcgtgaaggggaggcggtgctgctggatgttgaagacagcgggccgggaatcgatgatgcgcagatccagcaggcgctcatgccgttccaccgtctggaaaacgttggtgataatcccggcgccgggctcggactggcgctggtcagcgatattgcacgcctgcatcgcagccatccgcagctgctgcgtagcgaaacgctgggcgggctgaaggtcaggctgcgctttttgactgtgggttcagagtag

SEQ ID NO: 254146 - DNA, 426 bp, Klebsiella pneumoniae
atgcgtcaaaggactattgtctgcccgctcattcaacatgagggtcactatctgttgtgcaaaatggccgacgatcgcggggtatttcccgggcagtgggcgctctccggcggcggcgtcgagcccggcgaacgcatcgaagcggcgctgcggcgggaaattcgcgaagagctgggcgaaaaactgcagctaacccacatcacaccatggacctttagcgatgacgtacgggttaaaacctacgccgatggccgtcaggaagaaatatatatgatttatcttatcttcgactgcgtcagcgccaatcgcgaagtaaccatcaacgaggaatttcaggactacgcctgggtaaaagcggaagatcttccccactatgatttgaacgaggcgacccggaagacgctcaccctgaaaggcctactctga

SEQ ID NO: 254147 - DNA, 459 bp, Klebsiella pneumoniae
atgctggaactgttgcaaaagcatattcggcagcgggataggatggacatctcagagcaactggtcagaatattgtccccgggatacactacccgtcggcagtttaaaacgttgctgaattatatgcttcaggcgggcaacgccgccgatccggtggcttttttacgcaagctagcgcaaaagacgtcactcaagccgcataaggagacgatgaagaatattgctcattttctcgaagagcgaggtcgcaaagaggggatgcttcagggaatgaaggcggggatagaaaaaggtttgcgcaagggccgacaggaaggtcgtaatgaaggcagaaatgaagggcaactagcggcgacaaaacgcatcgcccgggcgatgctggaagaggggcttgagcctgaccaggtcgcaaagctaaccggactgtcgctgcggcagctcgctaagcttcagcactaa

SEQ ID NO: 254148 - DNA, 1449 bp, Klebsiella pneumoniae
atgagcaaaaaaggattaaccaccggctccggcgcgccggttgtcgataataacaatgtcatcaccgcaggtcctcgcggcccgatgctgctgcaggatatctggtttctggaaaaactggcccactttgaccgggaggttatcccggaacgccgaatgcacgcgaaaggctccggcgcttacggtaaattaacggtcacccacgatatcagccgctacacgcgcgcaaaaatgttcgccgaggtcggtaaaaccaccgatctgttcctgcgcttttccaccgttgccggagaacgcggcgccgcagacgccgagcgcgacatccgcggcttcgctatcaagttttataccgaagagggcaactgggatctggtaggcaataatacccctgttttttatcttcgcgacccgttgaaattcccggacctgaaccacgtagtgaagcgcgatccgcgcaccaacctgcgcaaccctacctggaaatgggattttttctccctgctgcccgaaacgctgcatcagttgactatcgacttcagcgaccgcggcatcccgcgctcttatcgccatatgcacggcttcggcagccacgcgttcagctttataaatgccgacaatcaacgtttttgggtgaaattccactttaaatcccagcaggggatcgccaacctgatggatgatgaagcaaaacgtctggtggccgaggaccgcgagagttcgcagcgcgatctctatgagtcgattgaaagaggcgattttccgcgctggaccttttacgtgcagatcatgccggaagcagaagccagccgggtcccttaccatcctttcgatctgaccaaagtatggccgcatagtgattatccgctgatagaagtgggggtacttgagctcaactgcaacccggacaactatttcgccgaggttgagcaggttgcgatgaatccggctaacgtggtgcctggcgtcagcttctctccggatcgcatgctgcagggtcgtttattctcctacggcgacacccagcgctaccgcctgggcgttaaccatcatcagattccggtcaatgcgccgcgctgcccgttccataactaccatcgcgatggcgcgatgcgcgtcgacggcaatagcggcaacggcgtcacctatgagccaaacagcttcggcctctatcaggagcagccggactttagcgaaccgcctttaaatcttgaaggcgcggcggctcactggaatcatcgggaagataacgactattttagccaaccgcgcgcgctgttcgggctattaagcgaagacgagcatcagcgtatgttccatcgaatcgccagcgatatgcgggatatccctgaatttatccagcagcgacaaattggcctgtttagtcaagtccatcccgactacggcgcgggcgtggccgcggcgctgaaagtcttacagaaaaccctgtaa

SEQ ID NO: 254149 - DNA, 543 bp, Klebsiella pneumoniae
atgaaaaaaagtatatttgcggccctcgctggcatgatgttcgtctcaacggcggcgcatgcgatcagtttcagcggacaggccggcgagcactacacgaaccttggcgtcggatttggcacggaatctaccggcctggcggtaaccggcaactggctgcataacgatgacgacggcgatgcggcaggcctgggactggggctgaacatccctttaggtccattccttgccaccgttggcggtaaaggggtttataccaatccgaataacggcgatgagggctacgcagcagcggttggcggcggcctgcagtggaagatcggcgacagcttccgcctgttcggcgaatattattattctcctgattcgctctccagcggtatcgacagttatcaggaagctaatgccggcgcgcgctttaccattatgcgtcctctgagcattgaagccggttatcgctaccttaacctggcgggtaaagacggcaaccgcgataacgcggtcgcggacggcccgtacgtcggcgttaacgccagcttctaa

SEQ ID NO: 254150 - DNA, 1197 bp, Klebsiella pneumoniae
atgttaaacgtggaaatgctgtccaccggcgatgaagtgctgcatgggcaaatcatcgataccaatgccgcgtggctggcggatttcttttttaatcaaggattacctttaaagcgtcgccataccgtgggtgacgatcttgactccctggtggcgattttacgcgagcgcagcgagcatgccgacgtgctgatcgtcaacggcggtctgggcccgaccagcgatgatttaagcgcgcttgccgcagcgaccgccaaaggtgaagggctgattctgcatgaagcgtggctggaaaccatgacccgtttctttgccgagcgcggaaggcctatggccgccagcaaccgtaaacaggcggaaattccgcaaagcgccgagatgatcaacaatccggtcggaaccgcctgcggttttgccgtgcagctaaaccgctgcctgatgtttttcactcccggcgtgccgtctgaatttaagataatggtcgagcaggaaatcttaccgcgcctgcgcgaacgttttccgctgcccgccgcgccgctgtgtctgcgtctgaccaccttcggccgttccgaaagcgagctggcgcagagcctcgagcatttacaactgccgccgggcgtggtgatgggctatcgttcctcaatgccgattatcgaactgaagctgaccgggcctgccgaacagcgcgaggcgatgctggcgctgtggccggaagtgcaaaaagtggccggagagagcatcgttttcgaaggcaccgaaggcctgccggcgcagatcgcccgtcgtctgcaggagcgccagctaagcctgacgctaagcgagcagttcaccggcggtctgctggcgctacagctttcacgggtcaatgccccgctgttggccagcgaagtcattccggcgcaggaggagaccctggcgcagtctgcgcgctgggcggcggaacggcgcgaaaaacactttgccggtctggcgctggcggtgagtggtcaggagagcgatcacctgaactttgcgctttccacgccggacggcacccacgcgctgcgggtgaagttcgcgaccaaccgccacagcgtgcaggtgcgtcaggaggtctgcgcgatgatggctctcaacatgctgcgccgctggctgaatggccagcccgtggccggtgaacacggctggattaacgtcgttgactatctcgccgtttag

SEQ ID NO: 254151 - DNA, 783 bp, Klebsiella pneumoniae
atgttggaatcaagcaaagtcccggcgctaacccgcgccatcgatattctcaattttatcgcccgcattggtccgtgcagcgcggcgaccattattgacgaactgggtattccgaaaagcaccgcttacctgctgctgggagaactgagaaaacagcgcttcctcagcatggataatcaggacaactactgtctgtggaccaaactggttgagctggccggtcacgcgctgagcaaaatggatctgcgcgaactggcgcgtccgcgcctgacgcagctaatggatcagtgcggactgctctgccatctgggcattatcgatggcggtaacgcctactacattctgaagattgaatccccggccaccatcagcgtgcgttcccacgaaggtaaaagcctgtcgctgtaccgctccggtatcggtaaatgcctgcttgcctggcagcccgagcgggttcaggagtcaattatcagcgagctgcagtgggagagggcaacgccaaccaccatcaccagcgcccagctgcttcgcgatgaactggggcgtattcgcgcccgcggctggagcttcgataacggcgaagattatcccgacgttcgctgcgtggcggcgccggtttttaatgccaataacgagctgaccgccgccatctccgtggtgggtactcgtctgcaaatcaatgaagacaatcgcgattatctcgctggcagggcgattgcctgcgccaaggacatttctcgtctgctggggtggaaaagccccttcgaacaacaagcctcataa

SEQ ID NO: 254152 - DNA, 1206 bp, Klebsiella pneumoniae
atgaccctaccgaaaattaaacacgtccgcgcctggtttatcggcggcgctaccgcagagaaaggcgctggcggcggcgactatcatgaccagggcgcaaaccactggattgacgatcatatcgccacgccgatgagcaaatataaacagtatgaacagtcccgccagtcgtttggcatcaacgttctcggcacgctgattgttgaagtcgaagccgaaaacggccagaccggctttgcggtatcaaccgccggcgagatgggctgttttattgtggaaaagcacctgaaccgctttatcgaagggaagtgcgtcagcgatatcaaactgatccatgaccagatgctcaacgccaccatgtactactccggctccggcggcctggtgatgaataccatctcctgtatcgacctggcgctgtgggatctgttcggcaaagtggtgggattaccggtatacaaactgttgggcggcgcggtacgcgatgaaattcagttctacgctaccggggcccgtccggacctggcgaaagagatgggctttattggcggcaagatgccgacccactggggcccgcacgatggcgatgcggggatccgcaaagatgccgccatggtggccgatatgcgcgaaaaatgcggcccggacttctggctaatgctggactgctggatgagccaggacgttaactacgccactaaactggcccacgcctgcgcgccctataaccttaagtggatcgaagagtgcctgccgccgcagcagtatgaaggctatcgcgagctgaaacgcaatgccccggccggaatgatggtcaccagcggcgagcaccacggcacgctgcaatccttccgcacgctgtcggaaaccggcatcgatattatgcagcctgacgtaggctggtgcggcggtctgaccacgctggtggagattgcggcgatcgccaaatcgcgcggccagctggtggtgccgcacggttcgtcggtctattcgcatcatgcggtcattacctttaccaacacgccgttcagcgaattcctgatgaccagcccggactgttcaacgatgcgtccacagtttgacccgattctggttgatgagccggtaccggtgaacgggcgcattcataaaaccgttctggataaaccgggtttcggcgtcgagctgaaccgcgactgcaacctgaaacgtccttatagccactga

SEQ ID NO: 254153 - DNA, 546 bp, Klebsiella pneumoniae
gtggctcagcaccagcccgccctgccaggcttcgagacgctcgtcgctgtctaccgctttcgaatcgaaaccgtagttggcgtaaacctcaacgtcgatcggcccggctttaagattatgggttttagtggtcagcgcatagtggccatcatcgccggttccggagccgcctgtacaggtgatgcgcgacgggttagcttcgtcggccatcacttccgggctacaggattccacctgcgacaccgccgccacgtcaaactgtacgccgccgatatcaaagtttttcaccccggcgccctggccgtcgtggttcatccagaagtagtcgttaatcccctgttgcgggcgctgatggaagtcgcggccggcccagatataggcgttggggttagactccagcacgttggtaacgccgacgtaggcttttttcaggttaacttcgtcgctccagtggtcaaacatgacgttgatatcccagatcgcgccttgactgctcttaaaggctttggttatctgaaattcgccgccgttgccttcgttgcctaa

SEQ ID NO: 254154 - DNA, 297 bp, Klebsiella pneumoniae
atgatgaagagaatgagtattgcgctttcgctggcagccagcctgatgctaccccatctggccacagccgcgccgctctccggcctgaagtttgaacagcagaagcagcagatcgtgaaggatgtgaggaaaaactgccctgccagcagcgcgctggatgatacgcagtttgctaaccgcgtgctggaatcagcggaaaataagaccgccgtacaaagcgcgacgcgggcgctggataaaaacaacagcgccgcttatcagaaggccattagcggcattcagtgcccaacgccctga

SEQ ID NO: 254155 - DNA, 978 bp, Klebsiella pneumoniae
atgatgaaaaaaggaacctcctcgacgccgcacgacgcggtttttaagcagtttttatcgcatcccgagtgcgccagggattttatcgacattcatcttcccgcgtcgctgcgccagctatgcgatctgcaaacgctcaggctggagtcaggcagctttattgaagcgaatttacgcgccagctactccgacgtgctgtggtcgctaaaaaccagcgacggtgatggctatatctacgtggtgattgaacaccagagcacgccggatgcgcatatggcattcaggctgatgcgctacgcgctggcggcgatgcagcgtcatctggatgccgggcataaaacgctgccgctggtggtgccgatgctgttttatcacggcgcgaaaagcccttatcccttctcgctttgctggctggatgagtttaccgatacgcagacagcgcgacgactttatgccgccgctttcccactggtggatattacggtggtgccggatgacgacattatgcagcaccggcgtgtggcgctgctggagctgattcaaaagcatattcgccagcgcgatttacttggcctggtggagcgattagcagagctgttggttaaaggttgcgctaatgacagccagttgaaagcgctgtttaattacatgctgcagtgtggtgatgcgcctcatttcggtgaatttcttcacgaggtcgagcggcgcgttcctcaacataaggaggtactcatgacgattgcggaaaggctacggcaggaagggagacaagaaggcaagttggagggcaagttggagggcaagttagagggcaagttagaaggtaaacaagagggtagacaagaagaagcgttgcgtattgcccgttcacttctggagcaggggtttgagcgcgagctggtacggatgactataggactctctgatgacgatctgaatgcattccagaatgcatccctcaagatgggggaaaattaa

SEQ ID NO: 254156 - DNA, 258 bp, Klebsiella pneumoniae
atgaagattgtagagaggctaccgctggaagagataccacaggagttacaacctgagtatttactgggatatctgttggaattatacctggagttttatgaaggatttcaggaaggtaaacgagaagaggcgttgcgtattgctcgttcatgtctggaacagggatttgagcgcgagctggtgcaggtggtttgtgagctgtcggatgacgatctgaagatgctgcaaactcaggtcgcagcatctccggccagataa

SEQ ID NO: 254157 - DNA, 903 bp, Klebsiella pneumoniae
atgggctccagcaaaaaagggatgctgaacgtactgatcgccgccgtgctgtggggcagttccggcgtctgcgcgcaatatattatgcagcaaagtcagatgtcatcgccgtttctgaccatgacgcgcctgctgttcgccggtctgattcttctgatgctctcgttcgttcacggcgataaaattttccgcgtcctgcaaaatcgccaggacgctatcagtttgctgattttttcgctgttcggggcgctcaccgtgcagtacacctttctgatgaccatcgagaaatcaaacgccgccaccgcgacggtgctgcagttcctgtcgccgacgattatcgttgcgtggtttgccatcgcccgcaaaacgcgccccagtccgctggtgctggcagccatcggtacctcgctggcgggcacatttctgctggtgacccacggcaatccgacaacgctgtcgatttctcccgcagcgctgttctgggggattgcttcggcatttgccgccgcgttctacacgacatatccatcgacgctgattgcccgctacggcaccctgccgattgtcggctggagcatgctgctcggcggcgccatgctgctgccgttttacgccggacagggcaaccattttgtggtgaccggcggcctgctgctggcctttttctacctggtggttatcggcacctcgctgacgttcagcctctacctgaacggcgcgcagaagattggcggcgcgaaggcggggatcctcagctgcgcggagccgctgagtagcgccctgctctcgctgctgctgctcggcattacctttagcctgccggactggctgggcacgctgctgattctctcgtcggtggtgctgatcgccatggattcgcggcggcgggtgaaaacaggctga

SEQ ID NO: 254158 - DNA, 309 bp, Klebsiella pneumoniae
atgcagtattacgtttataagaatacaggtcgaattgctgcgtatccttacctccttgatgtacagagtgacattatcggcaagcgcaatactcgggtcgtgattccactgtttccactgaaaaactataaaggtccacgcgccgatcgtttaacaccgcttgtcaccgtagaaggggaagaatacgtcgtgatgactcacgaactcgccagcatcccacatcgtgttctgggtgaagaggtttgtaatctgaatcaccagcgcgaagtcgttaaagcttcaatggattttctttccgacgggatctaa

SEQ ID NO: 254159 - DNA, 237 bp, Klebsiella pneumoniae
atgccagccgcaaaacgcaataagcagaacgtcagcgtgacactggaccctggcctggtcaaacaggctcgtgaggtcggcatcaatatgtctctaacgttgactaacgctctaaaaagcgaaatccacagcctcgaaatagcccgctggcaaaaagaaaatgcccaggcaatcgactacctcaataatttaactgaggaacatggacttctctctgaggaatacaggacgttctaa

SEQ ID NO: 254160 - DNA, 1434 bp, Klebsiella pneumoniae
atggcgaaaataaataaagagatgatagcgcggatcctgcagcacgtgggcggagccgggaacgtcgcgcaggcgggcaactgtatgacccggctgcgcctgaccctacgcgatgaatcacgggccgacagcgccgccatccgtcagattgacggcgtgatgggagtgatcgttagcgatgaacagttccaggttgtccttgggcccggcaaggcgcaaagcgcggcggaaatgatgaacgcgttactggaagacgcgccggcggaggcgccatcgctggccgatgtcgccgccgaaaagaaacaggcgctgaagagcaagcaaaccagcggcattcaaaaattcctcgcgaaattcgctactattttcaccccgctcattcccggttttatcgccgtcggcctgctgctggggttcgccactttggcggagcagatattcgtccttgaaaacgcgcatccgaatgcgacgctgctggcgctgatcggctacatgaaggtattcagcaaggggatgtttaccttcctgagcatcctgatcggctataacgcccagaaagctttcggcggctccggagtcaacggagcgatcatcgctgcgctgtttgtcctcggctataacccggaagccaccagcggcttctattccggaatttcgaccttcttcggccacggtattgacccgcgcggcaatattatcggcgtactgatcgcctcgattatcggcgcgtgggtggagaagcaggtgcgacgcatcatgcctgccaacctcgatatgatcctcacctcggcggtgacgctgctgatcatgggcgcgataacgtttaccgttattatgccgatcggcggctggctgtttaccgggatgtcatggctgtttttgcaccttaacggtaacccgttcggctctgcggtgttggccggcctgttcctgctggcggtgatgttcggcgtccatcagggcttcgtgccggtctatttcgcgctggtggatgcgcaggggtttaactcgctgtttccgatactggccatggccggagccggacaagttggcgcggcgctggcgcttttctggcgggcgaagcacggttctctgctgcgcacgcagattaaaggggcaattatccccggcttcctgggcatcggtgaaccgctgatttacggcgtcacgctgccgcgtatgaagccgtttatcaccgcctgtctcggcggcgccagcggcggtttctttctcgggctcatcgcctggatggggctgccggttggcctgaatacggtgtttggcccgtcggggttggtggcgctgccgctgatgacctccggcagcgggatctacgccggaatggcggtgtatgccgccgggctggcggtctcttatctctgcggatttgccctcacctggctgttcggcagtaaaaacgtcgatttaagctaa

SEQ ID NO: 254161 - DNA, 903 bp, Klebsiella pneumoniae
atgagtatcgacctgagcaaactgctaaccgagcgccgcaacgccaatagcgtcaacattgataccctttccaccgaagagatgctgtcggtgattaaccaggaagatcggaaggtggcccacgccattaccccctatctgccgcaaattgcccaggtcgtggataacgtcgcggcggcgctgcaggcgggagggcgcctgatttacattggcgcgggtacttccggtcgcctggggatccttgatgccagcgagtgcccgccgaccttcggtacccgaccggagcaggtggtgggcattatcgcggggggtcataaagcgatcctgagcgccgtggaaaacgtcgaagacaacaaagcccaaggggcgatggatttgcagaacctgaactttagcagccgcgacgtactggtcggcctggccgccagcggacgcacgccgtacgtcatcggcgcgatggagtatgcccatagccagagcgcttttgtcgccatcatcagctgtaacccgcacggcgaagtggcccaactggcggacgttgccattacgccggtcgtgggtccggaagtggtgaccggctcaacgcgcctgaaggcgggcaccgcgcagaagctggtgctgaatatgatttcaaccggggcgatgattcgcatcggcaaggtttacagcaatctgatggtggacgttgaagcgaccaacgccaagcttatcgagcgccaggtgtccatcgtcatggaagcgaccgaatgcgatcgcgcaaccgcccagagcgcgctggaagcctgcgatcgccactgcaaaacggcgattgtgatggtgctggctgatttaagcgccacggaggctcaggcgctgctggcaaaaaataacggctatatccgcaaggcgctgagccactcctga

SEQ ID NO: 254162 - DNA, 1167 bp, Klebsiella pneumoniae
atgtcccgaatttctctctcctgggtcgtggttctcggtttgcttagcgccattgggccgctgtgtaccgacttctatctgcccgcgctgccggaaatcacccagcagctcagcgccaccggcacgcagacccagctgtcgctcacagcggcgctgattggtctcggccttgggcagctgtttttcggcccgctgagcgatcgcattggccgtaaaaagccgctggcgctctccctgctgctgtttatcttctcctcggcgatgtgcgcgataacctacgatatccatatgctgatcgcctggcgctttctgcagggcttcgccggcgcgggcggctcggtgctgtcgcgctccatcgcccgcgacaagtatcagggcactctgctgacccagtttttcgccctgctgatgaccgttaacggcattgcgccggtgctttcaccggtactcggcggctggatcatcaccgccttcgactggcgtattctgttctgggcgatggcggcgatcggcattattttgctgctgctcagcctgacggtgctgcacgaaacgctgccggttaaaagcgccgcctcggttacgcagcagcaggatgaggcgccggtactgaaaaaccgccgctttatgcgctactgcctgattcaggcctttatgatggccgggctattttcgtatatcggctcatcttcgttcgttatccagagcgaatatgccatgagcgcgatgcagttcagcctgctgttcggccttaacggcatcgggctgattatcgcggcgctgatcttttcccgcctggcacgccgcttcagcgccgaagccctgctgcgcggcggccagctgctggcagtaacgtttgccgccatcaccctgctcttcgcctggctaccgctgccgacgctggcgctggtcggcctgttttttaccgtttctatgatgagcggtatcagcaccgtcgccggtgcggaagcgatgaatgccattaatgcccgtcagtccggcaccgcgtcagccctgatgggcacgctgatgtttgtgttcggcggtattgccgcgccgctggccggactcggcggcgaaacgatgctcaaaatgagtttcgcgatgagcctttgctatctggccgcgctgctgattggcctgaaaaagccgcggcccacggtataa

SEQ ID NO: 254163 - DNA, 1365 bp, Klebsiella pneumoniae
atgtttcgttttaccttagtctttgttgcgctcctgacggcgggctgcgtctctctcgatccgaactatgagcgtccggccgcgcctgtgccggcgaccctgccgggcagccacggcgaggcaaccgcggtggtcagcgactggcagcaggtagtgaatgacgcccgcctcaaaaaagtggtgaacatcgcgttaaccagcaaccgcgacgtgcagaaagcgctggccgacatcgaagccgcgcgcgcccagtttggtgaaacccgcgcctcgctgtttccgaccctcgacgccgagctgagccatacccgcagtaaaacggtggccagcggtctcacctcgtcagcggaagccgacggcgcggtttccagcttcgagctggatctgtttggtaagaaccaaagcctgacgcgcgcggcgcgggaaacctggcttgccagcgaattcaccgctcagaatacgcgtctgacgatgattgccgatctgaccaccgcgtggataaccctcgccgcggacaacagcaatctggcgctggcgcaggaaaccatggccagcgcggagaactcgcgcaacatcgtcacccgccagatggaagtcggcaccgcctcagctggcgacctgagcgatgcggaaagcgtttatcagcaggcgcgcgccagcgtcgccagctaccgcacgctggtagcgcaggataaaaacgcgctcaacctgctggccggagaaaccgtgccggatagcctgctgcccggcacccttgaaagccttggcgatcgtagtatcaccctggtgccggcgggcgtctcttcatcggtactgctgcgccgcccggatatccaggaagcggagcataatctgaagagcgctaacgccgatatcggcgcggcgcgggccaacttcttcccgtccatctcgttgaccgccagcgccggggtcggcagcgactcgctctcgtcgctgttcagccacggtatgcaggtgtggtcattcgcgccgtccatcagcctgccgctgtttaccggcggcagcaacctggcgcagctgcgctacgctgaagcggagaaaaagggtctgatcgccacctatgagaagaccattcagagcgcctttaaggatgtcgccgacgcgctggcgcgccgggaaacgctcagcgaacagctggacgcgcagaataaatacgtcgcggcggagcagaaatcgctgaatattgcgatgaagagctatcaggccggggtcggagattatctatcggtgctgaccgcccagcgaacgctgtggtcggcgcaggccacgctgatctccctccagcagaccgatctggaaaaccgcattaccctctggcagtcgctgggaggcggcgccagctaa

SEQ ID NO: 254164 - DNA, 3108 bp, Klebsiella pneumoniae
atgttctcccgtttcttcgtgcgacgcccggtcttcgcctgggttatcgccattctgattatgctcgccgggattctggctatccgcaccctgccggtcgcccagtatcctgacgtcgcgccgccggcgataaaaatctccgccacctacaccggggcctctgcggaaaccctggaaaacagcgtcacccaggtgattgagcagcagctcaccggactggataacctgctctactttacatccaccagcagctccgacggctcggtcagcattaccgtcacgttcgagcagggtaccgatccggataccgcccaggttcaagtgcagaacaaagtgcagcaggcggaatcccgtctgccgagcgaagttcagcagtctggcgtaacggtggagaaatcgcagagcagcttcctgctgatcctcgcggtgtatgacaaaaacaacaaagccaccagctccgatatctccgactggctggtcagcaacatgcaggatccgatggcgcgtatagaaggcgtcggcagtctgcaggtgttcggcgccgaatacgccatgcgcatctggatggacccgaccaaactggcctcctattcgctgatgccatccgatgtgcaatcggctatagaggcgcagaacgtacaggtgtccgccggtaaaatcggcgcgctacccgcctccaacgcgcagcagctcaccgccacggtacgcgctcagtcgcggctgcaaaccgtcgcccagttcaaagagattatcgtcaagagcaagagcgacggttcggtggtgcgcctgagcgacgtcgcccgcgttgaaatgggcagcgaagattacaccgcttccgccaatcttaacggccatccggctgcggggatcgcggtaatgatggcgccgggcgctaacgccctgaataccgcgacgctggtaaaaaacaagattgccgagttccagcgccagatgccgcagggctacgatatcgcttacccgaaagacagcaccgagttcatcaaaatctcggtggaggatgtgattcagacgctattcgaggcgataatcctcgtggtctgcgtgatgtatctgttcctgcaaaacttccgcgccacgctgatcccggcggtggcggttccggtcgtactgctgggcaccttcggggtgctggccctgttcggctactcgatcaacaccctgacgctatttgcgatggtgctggcgataggcttgctggtggatgacgccatcgtggtggtggaaaacgtcgagcgtatcatgcgcgacgaggggctgcccgcccgcgaagccaccgaaaaatcgatgggtgaaatctccggcgcgctgatcgccattgccctggtgctctcggcggtatttctgccgatggccttcttcggcggctcaaccggggtgatttatcgccagttttcagtgaccattatctcggcgatgatgctctcggtagtggtcgccttaaccttaaccccggcgctgtgcggcgcgctgctgagccattcgaaaccgcataccaaaggtttcttcggcgcctttaaccgcctgtggggacgcaccgagcagggctatcagcatcgtgttgtcggcggcctgcgtcgctcggcgatgatgatgggcgcttttgccctgatttgcggcggcatggcgctggcgatgtggaaattgccgggcagcttcctgccgacggaggatcagggcgaaatcatggtccagtacacgctgcccgccggagcaacggcggtacgcaccgccgaggttcgccgccaggtcaccgactggttcctgacaaaagagaaagccaataccgacgtgatctttaccgttgacggctttagctttagcggcagcggacaaaacgccgggatggccttcgtgtcgctgaaaaactggtccgaacgtaaaggcgaagaaaataccgctcaggccatcgccctgcgcgccaccaaagagctcggcagcattcgcgacgccaccctgttcgccatgaccccgccgtcggtagatggactggggcagagtaacggtttcaccttcgaactgatggccagcggcggcaccgatcgcgacagtctgatgaaaatgcgcagccagctgttggccgcggcgaatcaaagttccgagctgcagtcggtacgcgccaacgatttgccgcaaatgccgcagctgcaggtggatatcgataataacaaagccgtgtcgctcgggctgtcgttaagcgatgtcaccgatactctttccagcgcctggggggggacctacgttaacgactttatcgatcgcggtcgcgtgaagaaggtctatatccagggcgaaagcgacgcccgcgccgtgccgtccgacctcggtaaatggttcgtacgcggcagcgatgacagcatgacgccgttctccgccttcgccaccacccgctggcaatacggcccggagagcctggtgcgctacaacggctccgccgcctttgaaatccagggcgaaaacgccagcggcttcagctccggcgcggcaatggacaagatggaagccctggccaatgacctgccggccggtaccacctgggcatggagcggcatgtcgctgcaggaaaaactcgccagcggccaggcgatgagcctctacgccatctcgattctggtggtcttcctgtgcctcgcggcgctgtatgagagctggtcggtaccgttctcggtgatcatggtgatcccgcttgggctgctcggcgcggcgctggcggcatggatgcgcggtctgaacaatgacgtttacttccaggtggcgctgttaaccactatcggcctgtcgtcgaagaacgccatcctgatcgtcgaattcgccgaatcggcggtggaagagggctattccctgtcgcgtgccgccatgcgcgccgcgcagacccgcctacgacctattgtgatgacctcgctggcgtttattgccggggtgctgccgctggcgatcgccaccggagccggggccaacagccgcgtggcgatcggtaccgggattatcggcggaaccctgaccgcgacgctgctggcggtgttcttcgtgccgctgttctttgtgctggtgaaacgcttcttcacccgccatcgttcttctcaggagtaa

SEQ ID NO: 254165 - DNA, 1125 bp, Klebsiella pneumoniae
atgaaatacactatagcccccatcgcagcagcattatttctccttagcgggtgcgataatgcgcaaacctcctccccgcagcagatgacgccggaagtcggcgtcgtcactctgcaggggcaacctgtcccggtggtaagcagcctgaccggacgcaccaccgcctcgcttagcgctgaagttcgcccgcaggtgggcgggatcgtgcaaaaacgcctgtttaccgaaggcgatatggtcaaagccggacaggcgctgtaccaaatcgacccgtcaagctatcgagcaacgtttaacgaagccgccgcatcgctgaaacaggcccaggcgctggtgaccgccgactgtcaaaaagcccagcgctatgcggtgctggtcaaagataacggcgtctcccgtcaggacgccgatgacgcaatagcgacctgtaatcaggataaagccagcgtcgagtcgaaaaaagcggcgctggaaagcgcgcgtatcaacctgaactggaccaccgtgaccgcgccgattgccgggcgcatcgggatctcatccgtcacgccgggggcgctggtatccgccgatcaggacaccgcgctggcgacgatccgcggcctggatacgatgtacgtcgatctcacccgatccagcgtcgatctgctgcgcctgcgtaagcaaagcctggcgagcaacagcgatacgctcaacgtgaccctgacccttgaagatggcagcacctacagcgaaaaaggccgcctggcgctgaccgaagtggcggtagatgaatcgaccggatcggtcacgctgcgcgcggtcttccccaatccgcagcatgtgctactgcccggtatgttcgttcgcgcccgcatagacgaaggcattatgaacgatgcgatcctcgccccgcagcagggcatcacccgcgatgccaaaggcgatgccaccgcgctggtggttgacgctaataacaaggttgaacagcgcagcgtggaaaccggcgaaacctacggcgacaaatggctcatcgtcaacggcctgaagagcggcgacaggttgattgtcgaaggaaccggcaaagtggcgccgggccagcaggtcaaagccgccgaagtcaaaaatgacggaggcaacgcctga

SEQ ID NO: 254166 - DNA, 417 bp, Klebsiella pneumoniae; identical to SEQ ID NO: 174069

SEQ ID NO: 254167 - DNA, 648 bp, Klebsiella pneumoniae
atgtcagcacaaaaagacaacgaagcaccgcgtcgtcccggtcgtccgcgcgggcaaaaatccggctccgccaaccgcgaacagctgatggatattgccctggcgctgtttgcgcgccacgggatcgcccgcatttcgctgaacgccattgctaaagaggcgggggtgacgcccgcgatgctgcactactacttcagctcgcgcgaagcgctggtggaaaagctggttgaagagcgctttatgccgctacgcagcgagatcggacagatttttgtcgcgcacggcgacgatccggtcaccgcctttacgttgctcattaaaaccctggcgaccatggcggagaaaaacgcgtggttcgcgccgctgtggatgcaggagatcatcggcgagatgccggtgctgcgccagcatatgcacgcgcgttttggcgatgagaagtatcataagatgctggagacggtgcgccgctggcagcgggagggcaagcttaatccggcgctctccccggagctgctgtttaccaccctgataagcctggtgctggtgccgttctcccgcacccacaccgatccgcggttaaaatcggtagaccgggagatgattgtcagccatgccctggcgttaacaggcaatggcatcggcggctaa

SEQ ID NO: 254168 - DNA, 1497 bp, Klebsiella pneumoniae
atgacatctgaagtcgccacccaaccggcggtaccctcgatccgcctgctcttcagcgccctgctgctggtgatgctgctctcggcgctggatcagaccatcgtctccaccgcgctgccgaccatcgtcggtgaacttggcgggctggataagctttcctgggtggtcaccgcctatatcctgagttcgaccatcgcggtgccgctgtatggcaaatttggcgatctgttcgggcgcaaaattgtcctgcaggtggcgattgtactgtttcttgccggttccgttctttgcgggctggcgcaaaatatgacccaactggtgctgatgcgcggcctacaggggctgggcggcggcggcctgatggtgatcagtatggcggcggtggctgacgttatccctcccgccagacgcggccgctatcagggactgtttggcggcgtctttggcctggcgacggtcatcgggccgttaattggcggcttcctggtgcagcacgcctcctggcggtggattttttatatcaacctgccgctggggctgtttgcgctgctggtgatcggtgcggtttttcacagcagcaacaaacgcagccagcatcagatcgactggctgggagcgatctatctcagcatggcgctgctgtgcatcatcctgtttacctccgagggcggcagcgtccgcgcgtggagcgacccgcagctgtggtgcatcctggcgtttggtctggtcgggatcgttggctttattcatgaagagcggctggccagcgagccgattattccgctctccttgttccgcaaccgcagctttttgctgtgcagcctgattggctttgttatcggcatggcgctgtttggctcggtgacctttctgccgctctatttacaggtggtcaaagaggcgacgccgaccgaggcgggcctgcagttaattccgcttatgggtggcctgctgctgacgtcaatcatcagcgggcgcattatcagccgcaccggcaagtatcgcctttttccgattatcggcactttgctgggggtcatcggcatggtgctgctgacgcgcatcactattcactccgcgatgtggcagttgtacctgtttaccggggtgctgggggcgggcctggggctggtgatgcaggtgctggtgctggcggtgcagaacgcgatgcccgcgcagatgtacggcgtggcgacctccggggtcacgctgtttcgatcgattggcggttccatcggcgtggcgctgtttggagcggtgtttacgcatgtgctgcaaagcaatctccagcgcctgctgccggaaggcgcgcagctgccgagggcgctgaacccggcggcggtgcagaatcttccggcggagattcgcctcgattacctggatgccttcgggtccgctattcatgcggcgtttctgatggccgccggcattatggcggtagcgttcgcgctctcctggttcctgaaagaagcgccgttaaaaaccaccgcaggctag

SEQ ID NO: 254169 - DNA, 915 bp, Klebsiella pneumoniae
atggaccgacttagcgcgatggcgctgctggtaaaagtgaccgaactcggcagtatgtcggcggctgcgcgggcgcgaaatatgcccctgactaccgtcagtcgccagattggcgaactggaaaataccctcggcgtacgcctgatgatccgcactacgcgcaagctgacgctgaccgatgctggcgtcgattatgtcgccgccgcgcggcgcattctggaagaggtagagcgcgccgagcgccaggcggcgggtgaatatcaggagccaaaaggcgaactggttctctcagccccaaccatgtttgggcgcctgcatgttttaccgatagtcgcccgttttctcgctcgttacccgcagattcgcgtccgtttgctgctcagcgaccgcaatgccgacctggtgggcgaccatattgacttagcggtacgtatcggcccgctaccggacagcgggatggtggccacccggctgggcgagatgcgcatcgtgacctgcgcccacccggcattgttggaaaaatacggcataccacaacgcccgcgcgagctggccgcgctaccgatcattggtattgaatcaccgatgccttaccgcggctggcgctttcacgccgaagaggcggaggaccggctggtgctggtgcagccggtgctgtcactgaccacgccggagagcgccgccgaggctgcccgccagggagtcggcgtggcccgactgctgcattaccaggcgatcgatggcctggcccgcggcgaattacggatgatcctgcaagcgacggagccggaacctgtgccggtgcacctgctgtacacctcccgggatctggctccgctcaagctgcgtaaatttatcgattttgccacaccggcactgcgccaggcgctgttacgtattgccgccgccgtctag

SEQ ID NO: 254170 - DNA, 627 bp, Klebsiella pneumoniae
atgccagcagaatttcttgatatcgccatgacgccggacgtgatggatgtccagcatgaaatgggcagcgatgagctgtggcaggcgccgcatcgccagcgccggggtgagcgcttcggcgccagcgaggaggcgatgattgtcacccgcgacagcttctatctggccaccctttcgcaaaccggctggccctatgttcaacatcgcggcggtccggtgggctttgtgcatctgctggatgaaaccaccctggcgatggcggatttttccggtaatcgccagtacatcaccaccggcaacctgcgcggcagcgatcgagcctgtctgtttttgatggattacccgcggcgtgccaggctgaaaatctacgccaccgtagaggttgtggcggtggatgccgacccgcagctgctggcgcgggtggccccggagaactatcgggcccggattgagcgcatttatcgtttccgcttacaggcttttgactggaactgcccgcagcatattaccccgcgctacaccgcccgacaggtggcggagtatagccagacgctgcaacagcgtattgacgagctggagcgggaaaatcagcgcctgcagcagcgtattcatacaggagattcatga

SEQ ID NO: 254171 - DNA, 471 bp, Klebsiella pneumoniae
atgaccgaacaacgtccgcctctgccgccgttcacccgcgagagcgccgcacaaaaagtccgtgccgctgaagatggctggaacagccgcgatgccgctaaggtcgcgctggcctataccgtcgatagcgaatggcgtaatcgcagcgaatttgttcacggcagaacgcagattatcgacttcctgcagcgcaaatggcgtaaagagcaggagtaccggctgattaaggagttgtgggcgtggagcgataatcgtattgcggtacgctttgcctatgagtggcacgacgacagcggcaactggtttcgttcatacggcaacgaaaactgggagtttgatcggcacggcctgatgcagacgcgctacgcctgcatcaacgatctgccgataaccgaaagcgagcgtctgtttcactggccccagggccgtcgtccggacgatcacccggggctgagtgagctggggctgtaa

SEQ ID NO: 254172 - DNA, 921 bp, Klebsiella pneumoniae
atgattttatttccggttgcggtttttgcgtttaaaacctccccacaaagtcgttatagtttcagacgaaaaaataataacgatcttctatggactgacggggtgataacaatgaaattgcgtttacggacagccgccgccgtggtgctggcgggcctgctgctggcgggctgcgaccagaagggcagcgatgcgaaacacattaaagtcggcgtgattaacggcgcggaacaggatgtggcggaagtggcgaagaaagtggccaaagagaaatatggcctcgacgttgagctggtgggttttagcggctcgctgctgcccaatgagtccaccaacgccggcgatctggacgccaacgtcttccagcatcgcccgttcctcgaacaggataataaagcccacaactatcacctggtagcggtaggcaacaccttcgtcttcccgatggcgggctactcgcgcaaaattaaatccgtcaccgagctgaaagacggcgcgacgattgccataccgaacgacccgaccaacctgggccgcgcgctgcttctgctccagcaggaaaagctgattaccctcaaagcgggcaccggcctgctgccgacggcggtcgatatcaccgacaacccgcataacctgaaaattatggagctggaaggggcgcaactgccgcgcgttatcgacgacccgaaggtcgacgtagcgatcatcagcaccacctacctgcagcaaacgggcctttccccggtgcgcgacggtatctttattgaagataaaaactcgccctatgtgaacatcatcgtgacccgcgaagacaacaaagacgcggaaaacgtcaaagcgtttatccactcctaccagtcgccggaagtggcgaaagcggcagagacaatctttaacggcggcgcggtgcccggctggtaa

SEQ ID NO: 254173 - DNA, 861 bp, Klebsiella pneumoniae
atgacccggcaacgccaggctgatttgctgctcatagccgcgacggttatcgccgcctgcggatggattttttcccgggaagcgattgccggtatgccggttttcgctttcctcggtctgcgctttttcttcgccgcgctgctgctgctgcctttctgccgcggctttcgcgtcggcagggagcactggccgcgcatcataatcagcggtctgtggtttgccttaaacctgtgcctgtggatctactcggtatcgacgaccccgtcgctgggcgaaggggcgtttatcatgagcctgtcgatgctgttcgtgccgcttaccgcctgggtgatgatgaaggcgaggccggcgcgggcctactgggagtgcctgccgatagcggttgtcggtctcggcttgctcagcctgcatatgccgattgcgtttcaccccagccagggttggtttctgctgaccgcgctggtgcagtcgatctggttttgctacaccagcaaaagcgcccgcgaggtgccgctaatcccgctgaccaccgtgcagctcggcattaccgggattgttggactgggggtctccgccgccgttgaaagctgggatcagccgtttacgctgccgaccttcggctggctgctcgccagtatcgttatcgccaccagcctgcgcttcggcctgcaaatgaaggggcagaagtacgcggcggtcgccagcgcggcgattattatggtgctggagccgctgctgacggtgattgccgcggcgctgtggtacggtgaacagctaccgctgcagaaaattatcggcggcctgctgatcctcgtcgctcagctatggttccgctggcgaatgctgaagccgctacgctaa

SEQ ID NO: 254174 - DNA, 555 bp, Klebsiella pneumoniae
atgaagaagaaactcacctccgacgacctgcatgatgccgaagttctggcgcattgtccgtggttcagtatgcgcaaggttgggattgatatggcgcccggcgatcggcgggatttttattctattcactacccgcacccggcggtagggattgtggcgatgcaggatgacaaagtgctgctgattcgccactaccgttacctgatcgatcgggtggtatgggcaattccttccggcggcgtcgatgaaggcgaagacccgcgcgaggcggccctgcgggaactgcgagaagagaccggctggcaggcgcagcacgctgaagaaattatccgctataacccctcctacggcagcagcgatcagctgtttattacctggctggcccgcgatttggcctgggtgggaatggatgaagatcaggacgaagtgatggaaacgggctggtttaccctcgaagagataggccagatgatcgcccgcggcgatatgccggacgggctatcgctggtgccgctgctgcatctgatggcgcagcggcgtaccggtttagcgtag

SEQ ID NO: 254175 - DNA, 780 bp, Klebsiella pneumoniae
atgaaaatcacccatgtgcgtaatgccacccagcttattgattatgcgggtaaaaagtttctcattgacccgatgctttctgccaaagacgcctgggcgggctttgccggtaccgcgcgcagcgagttgcgtaacccgctggtggacctgcctttttccatcgaagcgatcgttgacgtggatgccgtgattgttacccacacccatcaggatcactgggacgaagcggcgatcgcggcgatccccaaaaccctgccggtttacgtccagcatgaggccgacgctcagctactgcgcgggcagggctttcgcgatattcgtctgctctctgaggacagcgcgtttgctgacgttgcgctggtaaaaaccacctcgggccagcacggcagcgaccgcacttatgcggtgccggcaatggccgagcgcctgggcgaggcctgcggcgtggtgctgcgccatccgcaggagaaaaccctgtggctggtgggggactctatctggcgcgatgaagtggaagccgacatgctcaggctgcgccctgaggtggtggtgctgaatgccgggtatgcgcacgtcatcggttttgggccgatcatcatgggcaaagaggatgtgctgaaggcgcacttcaccctaccggatgccaaaatcgtcgccagccatatggatgcggtgaaccactgtctgctgagccgcgatgagctgcgccagtacgtggctgacaatcagattgccggggcggtcagcatcccgcaggatggggaaagtatggtcttttag

SEQ ID NO: 254176 - DNA, 954 bp, Klebsiella pneumoniae
atgaaactgacggaagtggcgattgtggcggtggacgggtttagtccgtttcactactcggtgccctgtatgctgtttggcgatacagtctcggaaaccaaacgctttaacctgcatatttgcgccgaaccccccgggctgctgaacgctcgcgacggctttgcgctgaacgccagcggcgatttttccactctggagcaggcggatattgtggtggtgccttactggggggcggtgaatcagcgtccaccgcagccgctgcttgacggcctggttcgcgcgcgtaacaacggcgcgcagatcgtcggcctgtgtctcggggcgtttgtgctcggctacgccgggctgctggatggcaggcgtgcggcgacccactgggagttcgagcaggattttcagcgcctgtttccgcaggtgcggctggatatcaacgcgctgtacgttgacgatgaggggatcatcacctcggcgggcaccgcggcggcgctcgactgctgcctgtatctcattcgccagcgcttcggcagccttgccgccaatcagatcgcccggcggatgatcgtcccgccgcaccgggagggaggacaggcgcagtttatcgctcagccggtaccgaaaaacacccgcgacgcgcggataaacggcctgcttgagtatcttcagcagcatatccgcgaatcgcataatctcgattcgctggcgcaggtggcggcgatgagccgccgtaccctgacccgccatttcgccaaagcgaccggtatgggcattgccgactggctggccgccgagcgcctgcggcgcagccagatcctgctggaggccggggatttacccgtcgggcaggtggcggaggaagtgggctatcgctccgccgtaacctggcgtcagcagtttaaagcgcgctttggcgtcagtccggcggagtggcggcgcacctttcgtcgcggggcttag

SEQ ID NO: 254177 - DNA, 1050 bp, Klebsiella pneumoniae
atgcaaatcaacgctattggaacgaattcggccagccagccgttggggtctatggccatcacccgccgcgagccggggccggacgatgtgcagatcgccattgattattgcggcgtctgccactcggatgtgcaccaggcgcgctccgagtgggcagggacgctctatccctgcgtgccgggtcatgaaatcgtcggccgggtgaccgccgtgggcagccgcgtctccggtcacgccgttggcgatttggtgggcgtcggctgtatggtcgatagctgtaaagagtgcgaggagtgccgggacgggctggaaaactactgtgatcatatggtgctcacctataacggcccaacgcaggatgcgcccggccacacgctcggcggttactcccagcagatcgttgttcatcagcgctacgtgctgcgcatatcccatcccaaagaacagctggccgccgtcgcgccgctgctgtgcgcgggtatcacgacctactcgccgcttcgtcactggaacgttgggccgggcaaaaaagtcggcatcgtgggcatcggcgggctggggcatatgggcatcaagctggcccacgccatgggggcccacgtagtggcctttactacctcggaatccaagcgtgacgcggcgcgagagctgggcgcggacgaagtggtggtctcgcgcaacgaaaacgaaatggccgcccatctgaaaagcttcgactttatacttaacaccgtggcggcgccgcataacctcgatgccttcaccacgctgctcaaacgcgacggcaccatgacgctggtgggcgcacccgccacgccgcatccctcgccggaagtgtttaatctgatcttccgccgccggtcaattgccggatcgatgatcggcggcatcccggaaactcaggagatgctcgatttctgcgccgagcacggcatcgtcgccgatattgagctgattcgcggcgaccagattaacgaggcctgggagcggatgattaaaggcgacgtgaaataccgtttcgtcatcgacagcgccacgctcggcggctaa

SEQ ID NO: 254178 - DNA, 303 bp, Klebsiella pneumoniae; identical to SEQ ID NO: 174081

SEQ ID NO: 254179 - DNA, 1008 bp, Klebsiella pneumoniae
atgaaagcgatcgccattactcgcgcagcgaccgaaggcagcaacattccttttttaaccgacatcgagctgccgcagccggttgccgaggggcatgatctgctggttgaagtgaaggccatttccgtcaacccggtggataccaaagtccgcgccggctttaacgccgataccccgcgcgtgctgggctgggacgcggttggcgtagttaaagccgtcggcaacgcggtaaccctgttcgccgcgggcgatgaagtgtggtacgccggcgcgctgggccgtccgggcagcaacagcgagtttcagttagtggacgaacgcatcgtcgcccgcaaaccgcgttcgttggataacgccgccgccgccgcgctgccgctcaccgccatcaccgcatgggagctactgttccaccgccttggcgtagaggaaggcggcaacgcgggcgacacgctgctgatcgtcggcgcggcgggcggcgtcggttcgatactgacccagctcgccagcaagctcaccggtatgacggtcatcggtaccgcctcgcgtccggaaagccagaaatgggtacgggaagcgggcgcgcatcatgttatcgatcacagcaaaccgcttgctgaagagctggcgcggattggcgtcaaagcggtaacccacgtcgccagcctgaccaataccgaccagcactatccgcagctgatcgccgctctcgcaccgcagggcaagctggcgctaatcgacgatccgcaaaccctcgacgtggtgccgctgaaggcgaaaagcatctccctgcactgggaatttatgtttacccgctcaatgttcgaaacgccggacatgatcgcccagtatcagctgctgacccgcgtggcggcgctgattgacgacaacaccattaagaccaccctcggcgagcactacggcgccatcaccgccgccaacctgcaaaaagcgcacgcgcagctggaaaccgggcgttcggtgggcaaaatcgtgctggagggcttttaa

SEQ ID NO: 254180 - DNA, 468 bp, Klebsiella pneumoniae
atgacacccgaactcaaacacagcttctctatcaccattcaggtcgacaaaccggtcatcgtttcccgcagcccgcagagcgggaaacgtcagctgatccctatcctcagcggaatcgtacgcggtgagctcaacggacacgtcttacccggcggcgtcgacagccagatcatcgagcctgacggcacctgccgcctctccgcgcgctatgccttacacgtggaaggaggcacggtatatattgaaaacaacggcattcgccgcctacccgaagagtataaagaacgtctttttggcgacgatatgcgcttttttagcgatataccgccggaagcgatctattttcgtaccgtaccgactttcgaagtggatgcgccggcgctgcgctggctcaccacctcgctgtttatctgttccggcggccgctcccaggacggcgtaacgctcgatttttatcgcgtccgctga

SEQ ID NO: 254181 - DNA, 456 bp, Klebsiella pneumoniae
atgactacactgactcatctcaaccttcccgatcgccaggagagcgaacttgcgcagcgcggacagcgtgagcttgcggcgtatctttccaccaggctggaaacacagcgtattgccattgtaggagaggatgataaagctcataccatagagctacctacaagtgcgctgacatttctgatggagatattgggggagttggctagcggaaatgcggtacaaatcgttcccgtacatgcggaactcacaacccaggaggcggcaaatatactcaatgtctctcgtccgcatatggttaagctcctggaagcgaggaagctcccatttcataaaacggggcgtcatcgcagagtgttgtttgccgatcttatggagtataagaaacgcagggaacaggagagcctggacgcgatgcaatcattggccgatcaggcgcaggacttagggatgtattaa

SEQ ID NO: 254182 - DNA, 1395 bp, Klebsiella pneumoniae
atgaaagatcatattttgtccgtcaaagagaagattggctacggcatgggcgacgccgctagccacatcattttcgataacgtcatgttgtatatgatgtttttctataccgatatctttggtatccctgccggctatgtcggtaccatgttcctgctggcccgcgcgctggacgcgatatccgacccttgcatggggctgctggccgaccgtacccgtagccgatggggaaaattccgcccgtggatactgtttggagcgattccgttcggtctcgtgtgcgtactggcctacagctcgccggacctgagtcataacggcaagctgatatacgccgcggtcacctacacgctgctgaccctgctctacaccgtggtcaacatcccctactgcgcgctgggcggagtcattaccgacaatccgacgcagcgcatctccctgcagtcctggcgctttgtgctggcgacggcgggcggcatgctctccaccgtcctgatgatgccgttggtgaactttatcggcggcgaagataaagcgtttggtttccagggcggcatcgcggtgctctcggtgatcgcgttcctgatgctggcgttttgcttcttcactaccaaagagcgcgtcgaagcgccgccgagctctacctcgatgcgggaagacctgcgtgatatctggcgcaacgatcagtggcgagtggttggcctgctgaccattctcaatattctcgcggtctgcgttcgcggcggcgcgatgatgtactacaccacctggattatgggatccgcgggtctgttcaccgccttcctcaccacctactgcgtcggcaacctgattggctcggcgctggcgaagccgcttaccgactggaaatgcaaagtcagcgttttctggtggaccaatgctctgctggcggcgctgagcgtggcgatgttcttcgtgccgatggacgcagaaatcaccatgttcgcctttatcttcgtaattggcgtgcttcatcagctggtgacgccgattcagtgggtgatgatgtccgacaccgtcgactacggcgaatggtgtaacggcaaacgcctgaccggcatcagctttgcgggcaccctgttcgtgctcaagctgggcctggcgctgggcggcgcgctgattggctggatgctggcgggcggcggttacgatgccgcggccaaaacccagaacagcgccactatcaccatcatcatctcattgttcacccttgctccggcggtctgctacctgctgagcgcggttatcgcgaaacgctactacaccctgaaaacgccgttcctgaaaaagatgatggcggaactggctcagggcgcgcgccgcaacgaacacgacttcacttcagcgccgacaggcaaagaattgcaaaactaa

SEQ ID NO: 254183 - DNA, 642 bp, Klebsiella pneumoniae
atgattcaccagcacgccgtagccgcggttagtcaggtagaacgggatatttttatacgactgttcggtactggtgccgccgtcttcgttccaggtttcgaccgtctggccgttacgcaccagcgcggtaaagcgctcgccgaggccataaacggtgtcgccgacgccgagatccagacgctcgaacatatagttgcgattcgttttggtatcctgcacgtagccgtcatttttcagctggctaccggtaatacgcacgccgtcacgcagaaaatccagcgaccagaaatcgcctttcgtgacgcgtgcggtcaaattgccgcttttcagctcggcatattcagcgccattattaatctccacgttcacgtctttcagcacgttcagcgggtaatgcgggccgttgttcaacgcgccctggaagtgctccatgcgtacgccgatcactccttcctgtggggagaagaagcgcacggtaaagagcggaacgtccagttgggcggcgcgttcgcgaacttcgcgagacgccacatagacgaccatctcgttaccttgctgctcaacctcatagacctgcacgggttggatcagattgagccctggttgaataagccagtttccatcactgattttcatgaatag

SEQ ID NO: 254184 - DNA, 702 bp, Klebsiella pneumoniae
atgctgccgttgtcgacgccactattccgtctggaagacaccggcatggggttacaaatgcaagagtatgcggtgagccaggtgctgcactggttccgtcgttttgatgactatcaggctttaaagcaagaagcgcgctggcagccgctggaggagtatcagcgcgaagactttcccatcgggattatgggggcgggcgtacttggcgcaaaggtcgccgaagctctgcagtactggggattcccgctacgcatctggagccgcagccgcaaatcctggccgcaggtcaccagctttgccggggaaaaggagctgaacgccttcctgaacggaacacgagtgctgattaacctgttgcccaacacggcggaaaccgtgggaattattaacagctcgcgcctggcgcagctgccggataatagctatgtgctgaatctggcccgcggagtacatgtggttgaagacgatctgctggacgcgctgaatagcggtaaattgaaaggcgcgatgctggatgttttcagccgtgaaccgctgcccgaagcgagcccgctgtggcgccatccgcgcgtggcaatgacgccccacgtggcggccgtaacccggcctctggaagccattgcttttatcgccaaaaccatcggtcaaatggaacggggtgaaacggtcagcgggaaggtcgatcgccagctgggatactaa

SEQ ID NO: 254185 - DNA, 555 bp, Klebsiella pneumoniae
atgaacgagttttcaatcctctgtcgcgtgctgggctctctctattaccgtcagccgcaggatccgctgctggttccgctatttacccttattcgcgaagggaagctggcggcaagctggccgctggagcaggatgaactgctggagcgcctgcaaaagagctgcgatatgcaggctctggctgctgactacaacgcgttgtttgtcggtgaagagtgcagcgtagtgccatttcgtcgcgcatgggtagagggcgctacggaagttgaagtgcgagctttcctcagcgcgcatggagttcccacgggtgagggcgcggcggatcacttaggctccttactgctggccgcatcctggctggaagatcacgcggcagaagatgaaagcgaagttctggaaacgctgtttgctgagtatattctcccctggtgcggcgcattccttggcaaggttgaagcgcatgcgactacgccgttctggcgcacgatggctccgctaactcgtgaagcgctttcagccatgtgggatgaactccaggaggaaggtgaacaataa

SEQ ID NO: 254186 - DNA, 495 bp, Klebsiella pneumoniae
atgatacgcgccatgaacatactcttcgcaatcgcattaacgacgggcttactctctgcaatttggggatgggtagcggtcgcactgggtctgctgagctgggcgggatttctcggctgtacggcttactttgcctgtccgcaaggtgggttaaaagggctggttatttccacctgtacggtaatgagcggcgtagcgtgggcgctggtgattattcacggcagcgcgctggcgcctcagctggaaatagtgagctacatcatgaccggtatcgtggcgtttatgatgtgcattcaggcgcgccagctattactctcttttgtgccgggcacctttatcggcgcctgtgcgacctttgccgccagcggcgactggcgtttggttttaccttcactggcgctggggctggtctttggctacgccatgaaaaatagcggcctgtggctggcgacgcgggcggaaaagaataaatccttggctaacgaaagtcgttaa

SEQ ID NO: 254187 - DNA, 306 bp, Klebsiella pneumoniae
atgaaaacaattagatacgtatcacttgcggccctgttttttttacctacgagtttcagcccggcgattgccgaacagacagtcgccggtgttattcatttctatggaagagttgtggaagcgccctgtcagctcaatgctatcaagaatcaggtggtgatggattgtccgagggcggaaacggtgcggatctctgcccgtcagctggagaaaggggatgttcacaatgaaaatatccgttccgcgcagttgagatatattaacccacaacggactctcgctattctggacgttgattatcgctaa

SEQ ID NO: 254188 - DNA, 555 bp, Klebsiella pneumoniae
atggctgttcaacctgaggtaattctcggcgacattaccacgctggcggtcgacgttatcgtcaatgcagcaaacccttcgctgttaggcggaggaggcgtagacggcgcaatccaccgcgcagcaggcccggacctgctggctgcctgcaaagttgtgcgccagcagcaaggggagtgtccgccgggccatgcggtgataacgacggcaggaaacctgcccgccagcgcggtcattcatgccgtcgggccgatctggcacggtggtgacaggcaggaggcggaattactggcggacgcctataaaaatagcctgcagctggcctcggcaaacaattaccgctctattgctttccccgctatcagcaccggcgtttacggctaccctaaacacgctgccgccgagatagccattaatacggtgaatgcatttcttactcgctaccatcctctggaacgcgtttgtttcgtctgctttgatgccgaaaccgccagtatctataaccgattactggaggagagtcgggcacaactcggtcgccataataagttatga

SEQ ID NO: 254189 - DNA, 609 bp, Klebsiella pneumoniae
atgacaggagatttatcggtggctgaagggaaggttctacaaaaacaacggcttcgccggacggagattgtggtcgcggcgcaaaaatgctttgctgaaaagggcctgcacggcgcctcagtggccgatatcgcgcggcgggctggtctgagcgtcggccagctttatcgtgtttttgccagtaaagaagagattatcgaagtcatcgtcagcgagatagtgaacgccagagttggcgagatggttgccgggaatcatgatttggcccgcatggcgtcggttttagccggcgcgatcccggcgagcgagagtacgaaaaatgataattatctgctaatggagattaacgccgaagcctcccgaaatccgcgcctgcgagaaatcatgaaccaggccgatcgacgcctgaaggaagaggggggaaaacttacccggcactaccaccccgaaatgaccgctgaacaaattagcgtcgcctgcgaatttatcgcgatattaaccgaaggggcggcgtatcgctgcgacctggcgactgccccgacggtggataaagcggcgatggaaatgctttatcgcgatgtctttaacctggtgttcacgcgaaaatag

SEQ ID NO: 254190 - DNA, 1161 bp, Klebsiella pneumoniae
atgaataatactccggtacagcgtgaatattttttcgatagcatccgcgcctggctgatgctgttggggatcccttttcacatctcgcttatttactccagccacagctggcacgtcaacagcgcagagccgtcgtggtggttgacgttgttcaacgacttcatccatgcctttcgcatgcaggtcttctttgttatttccggctatttttcctacatgctttttctacgctatccgctgaagaaatggtggaaagttcgcgttgagcgggtaggcattcccatgttaactgccatccctcttttgacgttgccacagtttattatgctgcagtacgttaacggaaaagcggaaaactggcacacgctttcaggctatgacaaattcaatacccttgcctgggagctgatttcccacctgtggtttctgctcgtcctggtggtcctgacctcgttgggcgtagtgatgtttagatggctgacgcgccagcgttctgccgctgcgccaaccttcggtgacaccgtcacattaggtcagctatcgatgatttttcttgccctgggcgtgctgtatgcggtcattcgccgcaccctttttattctttacccgcccattctcagcaacggtctgttcaatttcgtcgttatgcagacgctgttttatctgcctttctttattctcggcgcgcagacgtttatcaattcacgcctgaagctcatgttcactacgccctccccctggtgctataccgcagcgctactgggttttatcgcctatcgtctgaatcagcagtacggttccggcgatggctggatgtatgaaacagaatccgtcattaccatggtgctggggctatggatggtcaacgtggtcttttcgcttggccaccgtctgctaaatttccagtccgcgcgggtaacctatttcgtcaacgcatcgctgtttatctatttagtgcaccatccattgactctgctctacggggcgtggatcacgccgataattaagtccaatacgctgggatttattaccggactggtatttgtggtgggtattgcgctggtcctgtatgaaatccacctgcgaataccgctgttgcgctttcttttttccggaaaattccagcaaaaaacggcgaagccgcagacttctgccggttaa

SEQ ID NO: 254191 - DNA, 1554 bp, Klebsiella pneumoniae
atgaaacataaaccacagatgatgaaaatgcgttggttaagcgcagccgtaatgttgtccctgtgtacttcatctgcatgggcattcagcattgatgacgtcgcaaaagaggcacaaacgttagccggcaaaggctttgaagcgcctaaaagtaacctgccctctgccttccgcgatatgaagtatgcggactatcagcaaattcagtttaatcacgacaaagcttattggaataatctgaaaagcccattcaagctcgagttttatcaccaggggatgtatttcgatacgccggtcaccattaatgaagtgacggcaaccagcgtacgtaaaattaaatatagcccggactattttaattttggcaacgtccagcacgacaaagacacggttaaagacctcggctttgcgggcttcaaagtcctgtatccgatcaacagcaaagacaagaatgatgaaatcgtcagcatgctcggagccagctatttccgcgtgcttggccagggtcaggtatacggtctttccgctcgtgggctggcgattgataccgcgctgccttccggcgaagagttcccgcgttttcgtgagttctggattgagcgtccaaaagcgaccgataaacgcctgacgatttacgccctgcttgattccccgcgcgcaaccggcgcctaccgtttcgtgattatgcccggccgcgacaccgtggtggacgtgcagtctaaggtctatctgcgcgacaaagtcggcaagctcggcgtggcgccgttgaccagtatgttcctgtttgggccacatcagccgtcgccgaccacgaactatcgtccggcgctgcatgactccaacggcctgtccatcctggccggcaacggcgagtggatctggcgtccgctgaataatccaaaacatcttgccgtcagcagctatgcgatggaaaacccgcagggctttggcctgctgcagcgtggtcgccagttctcccgttttgaagatctcgatgaccgctacgatctgcgccccagcgcatggattacgccgaaaggtgattggggtaagggcaaaatcgaactggtcgaaatcccgaccaatgatgaaaccaacgataacatcgtcacctactggacgcccgatcagctgcccgaacccggcaaagagatgaatttcaaatacaccatcacttttagccgcgatgaagacaagctgcacgcgccggataacgcttacgttatgcagacccgccgttctaccggcgacgtcaagcaatcgaacctgattcgccagcctgatggcaccattgcctttattgtcgatttcaccggcgccgagatgaaaaagctgcccgcagatacgccagtgactgccctggccagcatcggcgataacgctgaaatcgttgaaaacaccgtgcgttataacccagtgactaaaggctggcgtatgatcctgcgcgtcaaagtgaaagatcctaagaaaaccacggatatgcgcgctgcgctggtcaataccgaccagacgctgagcgaaacctggagctatcagctgcctgccaatgaataa

SEQ ID NO: 254192 - DNA, 2529 bp, Klebsiella pneumoniae
atgaataagataacgaagtacatcgatgcattgccgctgtcggatgcagaaaagcgcgcgttacctgacgcgagtctgcaggccgtacatcaagcactggacgctgaacatcacgtttataaacgggaagatgactccccgctggggtcggtgaaagcccgactggagcatagctggccagattcactggccggtaatcagctggtgaaggatgatgaagggcgcacgcagctgaacgccatgccgaaagcaaaacgttcctctatgttcccggacccatggcgtactaacccggtcgggcgcttctgggatcgtctgcgcggacgcgatgtgactccgcgctatctctctcgcctcagccaggaggaacaggcgagcgagcagaaatggcgtaccgtcggctctattcgtcgctatattcttctgctgctcaccctggcgcagaccgtcgtggcgacctggtacatgaaaaccattttgccctaccagggctgggcgctgattaacccggcggacatggtgggacagaacctgtggatctcctttatgcagctgctgccgtatgtgctgcagtccgggatcctgattcttttcgccgtgcttttttgttgggtttctgcgggtttctggactgcgctgatgggcttcctgcagctacttatcggccgcgataagtacagtatctccgcgtcaacggtcgggaatgagccgttgaatccggagcatcgcaccgcgcttatcatgcctatctgtaacgaagacgttgaccgcgtattcgcgggcctgcgcgcgacctgggagtcggtaaaagccagcggtaatgccgagcactttgatgtctatatcctgagcgatagctacaacccggacatctgcgtggcggagcaaaaagcgtggatggagctgattgccgaagtgcagggcgaagggcagatcttctaccgtcgccgccgccgccgcgtgaagcgtaaaagcggtaacattgatgacttctgccgtcggtgggggagccagtacagctatatggtggtgctggatgccgactccgtaatgagcggtgaatgtctgagcggcctggtgcgcctgatggaagcgaacccgaatgccgggatcattcagtcttcaccccgcgcatcgggtatggatacgctctatgcgcgctgccagcagtttgctacccgcgtctacggcccgctgtttaccgccggtttgcacttctggcagttgggggaatcccactactggggtcacaacgcgattatccgggtgaaaccgtttattgagcactgcgcgctggcgccgctgccgggcgagggcaacttcgccgggtcaattctgtcgcacgacttcgtggaagcggcgctgatgcgtcgcgccgggtggggcgtatggattgcttacgatcttcccggctcttatgaagaactgccgccaaacctgctggacgagctgaagcgcgatcgccgctggtgtcagggtaacctgatgaacttccgcctgttcctggttaaagggatgcacccggttcaccgtgcggtgttcctgaccggcgtgatgtcatacctgtcggcaccgctgtggtttatgttccttgcgctctctaccgctctgcaggtagtgcatgccttgaccgaaccgcagtacttcctgcagccgcggcagctgttcccggtctggccgcagtggcgtccggagctggctatagccctgtttgcttcgaccatggtgctgctgttcctgccgaagctgctgagcattattctggtttggtgtaaagggcctaaagagtacggtggctttatccgcgtcacgctctctctgctgctggaggtgctgttttcggtgctgctggcgccggtgcgtatgctgttccacaccgtctttgtggtcagcgcgtttctcggctgggaagtggtgtggaactcgccgcagcgtgacgatgactctaccccatggggtgaagcgtttatgcgtcacggttcgcagatgctgttgggtctggtctgggcggtgggcatggcatggctggatctgcgtttcctgttctggctggcgccgatcgtggtctcgctgattctgtcgccgttcgtgtcggctatttccagccgcgccaccattggcctgcgcactaagcgctggaagctgttcctgatcccggaagagtactctccgccgcaggtgctaaaagatactgacgcttacctgacgctgaaccgccagcgttctctggacgatggctttatgcatgcggtattcaacccgtcgtttaacgcgctggcaacagcgatggctaccgcgcgccaccgtcacgggcatattctggatatcgctcgcgaacgtcacgttgaacaggcgctgaacgagacgccggataaacttaaccgcgatcgtcgtctggtcttgctgagcgacccggtgaccatgtcgcgtatgcattatcgcgtgtgggccgctccggagaaatactcttcgtgggtggcagcttatcagcagctgacgctgaatccgctggcgttaaaaaccaagtaa

SEQ ID NO: 254193 - DNA, 228 bp, Klebsiella pneumoniae
atgagagttttgctggttatcgcattgacgctgctgctgagcggctgcgggagtattatcagtcgcacggtgccagggcagggccatggaaatcagtactatcccggcgtgcaatgggatgtccgtgattcctcatggcgctacatcacgatcctcgatctgcccttttcgctggtgttcgatacgcttctgctgccgcttgatgccagccatgggccttacaattaa

SEQ ID NO: 254194 - DNA, 1251 bp, Klebsiella pneumoniae
atgtcgtctgctgatacccctattaactggaaacgtaatctcaccgtcacctggctcggctgctttttaaccggggcggcctttagcctggtgatgccatttctccctttgtacgttgaacagctcggcgtcaccggccacagtgccctgaatatgtggtcagggctggttttcagcattacctttttattttctgccgtagcttctcccttctggggcggactcgcggaccgcaaagggcgcaaaataatgctgctgcgctcagccctcggtatggctatcgtcatgctgctcatggggctggcgcagaatatctggcaatttctgatcctgcgcgcgctgttaggcctgctcggcggatttattcccaacgccaatgcgctgatcgcaacgcaaatcccccgccataagagcggctgggcgctggggaccctctctacgggggccgttagcggcgcgctgctggggccgctggctggcggcttcctggccgaccactgggggttacgcaccgtcttctttatgacagcaagcgtactgtttatttgtttcttatttaccctgtttctcatccgcgagaattttgtcgcggtcagcaaaaaagagatgctcagcgcgaaagacgtcttttcgtcgcttaaaagtccaaagctggtgctcagcctgtttgtaacatcactgattatccaggtcgctaccggttccatcgctccgattctgacgctttacgtgcgcgatcttgccggcaacgtaagtaatattgcgtttatcagcggtatgatagcttcagtccccggcattgccgccctgcttagcgcccctcgcctcgggaagctcggcgatcgtattggtccggagaagatcctgatcgtcgcgctggtgatttcagtcctgctcctgattcctatgtcgttcgtccagacgccgctgcaattggggatcctgcgcttcctgctaggcgccgctgacggcgcgctgctgccggcggtacagacgctgctggtgtataactcgaccagccaaatctcgggcagaatattcagctataaccagtcgtttcgcgatatcggtaacgtcactggaccgctgatcggcgcgtcggtttccgccaactacggttttcgggcggtctttctggtgaccgcatttgtggtgctgtttaacgcggtttactcaactctgacccttggccgcgttcgtcgtcagcgggctacggacaatccgggttccggcaatcattcggtaaattaa

SEQ ID NO: 254195 - DNA, 921 bp, Klebsiella pneumoniae
atgacccatttacctaaattttccgcagcgttgctgcacccgcgttactggttgctttggttaggaatcggcctgctgtggttggtagttcagctgccttatccgctgatttatcgcctcggtactggtcttggccgtatcgccatgcggctaatgaagcgccgggccaaaatagcccatcgcaatctggagctctgttttcctgataaaagcgagcaagagcgtcaccggatggtcgtggcaaactttgaatccgtcggtatggggctgatggaaaccggtatggcctggttctggccgacgaagcgtattgcgcgctggacggactccatcggcgtagagcatatccgcgatgttcaggcgcaaaagcgcggcattttgcttattggcattcattttctgaccctggaaatgggcgcccgcatgttcggcatcaatgagccgggtatcggggtttatcgccctaatgataacccggttatcgactggctacagacctggggacggctgcgctccaacaaagacatgatcgatcgtaaagatctcaagggtatgatccgcgcattgaaaaagggagaagtgatctggtacgcgccggaccacgactatggccccgccgccagcgtgtttgtgccgtttttcgccgttgaccaggccgcgacgacctccggcacctggatgctggcaaagatgtcaaaagcctgcatcgtccccttcgttccgcgccgtaaacccgacggtaaaggttatgagctgatcatcctgccgccagagtgcgatccgccgctggacgatgcggagacgaccgctctgtggatgaataaagttgttgagaaatgcatattaatggcgccggagcagtatatgtggatgcaccgccgctttaaaacacgtccggaaggcgttccttctcgttattaa

SEQ ID NO: 254196 - DNA, 1065 bp, Klebsiella pneumoniae
atgccagtgttacataaccgcatttcaaatgagacgttaaaagcgcaaatgttggctgaaaccgagccgcgcacgacgatctcgttttataaatatttctctattattgacccaaaagccacgcgcgatgcgctgtggattgcgctgactaagcttaatgtctttggccgaatttacctggctcatgaagggattaacgcgcaaatcagcgtcccgcaaagccgggtcgatgcgctgcgcgaattcttatacggttttgaccccgccctcaatgggctccgcctgaatatcgctctggacgatgacggtaaatcattttgggttctgcgcctcaaggttcgcgatcggatcgtggcggatggaattgacgatccgacatttgatgccacggacgtgggggattatctgaaagccgcagaggttaacgcgatgctggacgatcccaatgcggtctttattgatatgcgcaatcactacgagtatgaggttggccatttcgagaacgcactggagatcccggcggatacttttcgcgaccagctaccaaaagccgtggagatgatgcaggaacataaagataagaatatcgtgatgtactgcaccggcggtatccgttgtgaaaaagccagcgcctggatgaagcacaacggatttactaaagtctcgcatattgagggcgggattatcgagtatgcgagacgcgcccgcgagcaggggctgccggtacgctttgtcggtaaaaactttgtcttcgatgagcggatgggggagcgtatctcagatgacgttatcgcccattgccatcagtgcggcgctccgtgcgatagtcacaccaattgcctgaatgatggttgccatctgctgtttatccagtgtccttcctgcgcggagaaattcgccggctgctgtagcgaagcctgcatggaagaacataagctgccggaagaggagcagagaaaactgcgtgccggacgggaaaatggcaataagatctttaataaatcccgcggtcgtctgaatactaagctggggatccccgatcctgagccgtcagaaaaaccataa

SEQ ID NO: 254197 - DNA, 1119 bp, Klebsiella pneumoniae
atgcaatacgatcttatcattatcggtagcggctccgtcggcgctgccgcaggctattatgctcgccaggcagggcttaacgtactgatgattgatgcccatcagcctccgcatcaggaaggtagccatcacggcagcacccgcctgatacgtcatgcttacggcgaaggcgaaagatacgtccctctggtactacgcgcgcagaagctatgggatgaatttgccgccgccagtggggaagccgtttttgagcgtacaggggtgattaacctcgggcctgccgactccgactttctgcgcaacgtggccagcagcgcgcgcgagttccagctcaatattgaagaaatggatgcgcagacagtgatgactcgctggccggaaattcgtattcctgacgattaccgggcgatatttgaacccgcatccgggatactgcgcagcgaactagccgttgaaacctggatccgtctggcacgcgaagcgggagccgcgcaattgttcaactgcccggtttctgctattcaccaccaaccgaacggcgtaaccgttgagacgctggacggcgagtacagcggcaaaaaactccttgtcagcgccggtacctgggttacgcgtctgttgccagaactccctgtccaaccggtacgtaaaattttcgcctggtttcaggccgatggtcgctacagcagcaaaaataacttcccggcgtttaccggcgagttagccaatggcgatcagttttacggtttcccggcagaagataacgaattaaaaatcggtaagcataacggcgggcagcttatttccactccggaggagcgcaagccgtttggctctgttgcaaccgacggttcagaatcttttagcttcttgcgtaacgtgttgcccggtatcggcggctgcctgcacggcgcatcctgcacctatgacaatactgctgacgaagactttattattgatatgctacccggccagccggatacgctgctgatcaccggcctgagcggtcacggctttaaatttgctccggttttaggcgaactggccacacggttcgcgcttgaagaaccctttggatttgatgtatctgcgttttcactggcgcggtttaataaataa

SEQ ID NO: 254198 - DNA, 246 bp, Klebsiella pneumoniae; identical to SEQ ID NO: 174222

SEQ ID NO: 254199 - DNA, 1047 bp, Klebsiella pneumoniae
atgacagcacaatcccaggtattgaaaatccgccgccctgacgactggcatatccatctgcgcgatgacgatatgttaaaaatcgtcgtgccttacaccagtgagttttatggccgggcgatcgtgatgccgaatctggtaccccctgtcaccaccgtcgaagccgcccatgcctatcgccagcgcatcatagcggcaattccggcgggccacgattttacgccgctgatgacctgttatctgacggatacgctcgaccctgctgagctggaacgcggattcaacgagggcgttttcaccgctgccaaactttatccggccaatgcgaccaccaactccagccacggcgtcaccagcactgatgcaatcatgccggtactggagcgcatggaaaagctgggaatgcccctgctggtgcacggtgaggtcactcacgcggacatcgatatttttgacagagaagcgcggttcattgaaaccgtcatggagccgctgcgtcggcgcctgccgggtctgaaagtggtgttcgaacacatcaccaccaaagatgccgctgaatacgtacgcgacggcaatgagctgctggcggcgaccatcaccccgcagcatctgatgtttaaccgcaatcatatgctggttggcggcgtgcgtccccatctttattgcctgccgatccttaaacgcaatattcaccagcaggcgctgcgcgaactggtggccagcggttttgaccgcgccttcctcggtactgattccgctccgcatgcccgccatcgtaaggaagccagctgcggatgtgcaggctgttttaacgccccgaccgccctgggcagctacgccacggtgttcgaggagatgaacgccctacagcactttgaagccttttgttcgcttaacggccctcgcttctatggtctgccggtcaatgaaggctacgttgagctggtgcgcgaagagagcctggtggtagagagtatcgctctgcctggcgacgcgctggtgccgttcctggcaggagaaaccgtgcgctggagcatgaagaaataa

SEQ ID NO: 254200 - DNA, 561 bp, Klebsiella pneumoniae
atgaaaaagatgtttatcgcggccgcgcttatcgtcagcggcctgctgagcggctgtaatcagcttacgcaatattccgtgagtgagcaggagatcaaccaggcgctgcagaaacgtaaccacttcgccaaggatattggcctgcccggcgttgcggatgctcatattgaactacaaaacctgaccagcgcgattggtcgtgaagaacccaataaagtgacgctaagcggcgttgctaatttagatctgaattcactattcgggaaccagaaagcgaccattgacctgaagctaaaagcgctgccgaccttcaacaaagagaaaggcgccattttcctgcaggagatggaggtggtggacgcaaaggttcaacctgaaaaactgcagtccgtggtacagacgctcattccttacctgaatcagtcgctgcgtagctacttcaatcagcagcctgcctacgtcctgcgcgaagacgccagcgcgggcgaagcgttggcgaaaaagtatgctaaagggattgaggttaagccgggtgagattattatcccgttcactaactaa

SEQ ID NO: 254201 - DNA, 648 bp, Klebsiella pneumoniae; identical to SEQ ID NO: 174219

SEQ ID NO: 254202 - DNA, 1209 bp, Klebsiella pneumoniae
atgtcccgcgtatcgcaggcaaggagcctgggtaaatatttcctgttagttgataacatgctggtcgtactcggctttttcgtcgtgttcccgctcatctctattcgctttgtcgatcagatggggtgggccgcgctaatggtcggcattgcgctcgggctgcgtcaactggtgcagcaaggtttagggatattcggcggtgcgattgccgaccgttttggcgccaaaccgatgatcgtcaccggaatgctgatgcgagctgccggtttcgccgcgatggccgtcgcccatgaaccatgggtcctgtggttatcctgcatactctccggtctcggcggcacgctgttcgatcccccgcgggcggcgctggtggttaagctggttcgcccacaccagcgcgggcgtttcttctccattctgatgatgcaggacagcgccggggcggtgatcggcgcgctgctgggtagctggctgctgcagtatgattttcgtctggtgtgcagcgctggagcggccctgtttatcgcctgcgcggcgttcaatgcctggtatctcccggcctggaagctgtcaacggtcaaaacgccggttcgtgaagggctgggccgcgtgctgcgtgacaaacgatttgtcacctacgtcttgacgctaaccggatattacatgctggcagtacaggtcatgttaatgctgccgattatggttaacgatattgcgggttctccggcggcggtaaaatggatgtatgccatcgaagccaccatttcactgacgttgctttatccgattgcccgctggagtgaaaaacggtttcgccttgagcatcggctgatggccggactgctgattatgacgctggcaatgatgccgattggcctgagcagcaatctgcagcagctgtttacgctgatctgcgtgttttatatcgggtccatcatcgccgagcctgcgcgcgagacgcttggcgcttcgctggcggatgccagagcgcgcggcagctatatgggctttagccgtctgggattagccttcggcggcgctttcggctacgcaggcggcggctggctgttcgatgccggtaaggccacgggtcagccggagctgccgtggctgatgctgggcgcgatcggtcttgcgacgtttgttgctctgtggtggcagttcagtccaaaacgttcaacgtccggtatgctcgagccgcgcacctga

SEQ ID NO: 254203 - DNA, 585 bp, Klebsiella pneumoniae; identical to SEQ ID NO: 174217

SEQ ID NO: 254204 - DNA, 648 bp, Klebsiella pneumoniae
atgaaatatcagttaaccgcgcatgaggcgcgagtcataggctgtctgctggaaaagcaggtcaccacgccggagcagtaccccctgtcggtcaacgcggtggtgaccgcctgtaatcagaaaacgaaccgtgaaccggtgatgtcgctcagcgaaaatgacgtgcaggatctcctcgatacgttagttaagcgtcattttttgcgtacggtaagcggtttcggcaatcgggtgaccaaatatgaacagcgcttctgcaactctgaatttggcgacctgaaattaactccagcggaagtggcaattattaccaccttgctgctgcgcggggcgcagacgcccggagaactgcgcgggcgggcgcagagaatgcatgaattcagcgatatggcagaggtggaaaacgtcctcgaaaatttggctacgcgagatgacggcccctatgttgcgcgtctgccgcgggaacccgggaagcgtgaaagccgctatatgcacctgttctgcgatgatatggattcgctgattaccgccgttgaagccgtttcaccggcgggtgacgatctccaggcccgcgttgaggcgctggaagcggacgtcgctgaacttaaagcgcgtctggattcactgctgcctcattcaggagattaa

SEQ ID NO: 254205 - DNA, 924 bp, Klebsiella pneumoniae
atgtcggcgaaactacgcatcggcgtcgttggtttaggtagcattgcgcaaaaggcctggctgccggtgctgggagcggcggatggctggacgctacaggcggcgtggtcgccgggaaaagagaaagcgctgcgcatctgtgaaacgtggcgtatcccctatgcggatactctggaacagctggcggcgcagtgtgatgctgtattcgtccatacttcaacggtttcacattatgaagtggttagtcggttactcaatgccggagttcatgtctgcgttgataaaccgctggccgacaagcttagcgatgcggagacgttggttgagctggcggcccgccgccgtcttactcttatggtcggatttaatcgccgcttctcccctctctatcgcgaacttaaagctcagcttgataacgcggcttcgctgcggatggataaacaccgtagcgacagcgtgggccacgatctgcgctttacgctgctggatgactatctgcatgtcgtcgacaccgcgctatggctggcgggcgataaagcccgtttaaacggcggtacgctgctcacgacggcccagggtgaaatgctttatgctgaacatcatttcagctgcgggatgatccaaatgaccaccagtatgcaccgccgcgctggaagccagcgggagtgggtgcaggcggtaaccgacggtggattatatgaagtccgtgatatgcgggagtggcaggaggagcgggggcgcggcgtgatccagcgtccggtccccggctggcagaccacccttgagcaacgaggattcaccggctgcgcccggcattttatcgaatgcgtgcaaaatcagacggttcctgaaacctccggcgaacaggcgctgcttgctcagcgtatcgtggagaaactctggcgcgaggcgatgagcgaataa

SEQ ID NO: 254206 - DNA, 1536 bp, Klebsiella pneumoniae
atgaatcttttaaaatcactggcggccgtcagttcgatgaccatgttttcgcgcgtgctgggctttgcgcgcgatgcaattgtggcgcgtatttttggcgcagggatggccaccgacgccttcttcgttgctttcaaacttccgaatcttttacggcgtatttttgctgaaggcgcgttctcacaggcttttgtgccgattctggcggaatataaaagcaagcagggtgaagatgcgacccgggttttcgtcgcctatgtttcggggctgctgacgctggtgctggcgctggtgaccatcgctggtatgctggcggcaccgtgggtgatcaccatcaccgcgccgggatttgccaatacgcccgaaaagttcgccctgaccactcagctcttgcgcatcacttttccctatattctgttgatctccctggcttcactcgtgggcgccatcctgaatacctggaaccgcttttcggtgcctgcttttgctccgactttcctgaacgtcagcatgattggttttgcgctgtttgccgcgccctactttaatccgccgatgctggccatggcgtgggcggtgacggttggcggtattttgcagcttgcctggcagctgccgcatttgaagaaaatcggcatgctggtgttgccgcgaatcaacctcaaagatgccggcgcggtgcgggtggtgaaacagatggggccggcgatcctcggcgtctcggttagccagatttccctgattatcaataccatttttgcctcgttcctcgtctccggctcggtgtcatggatgtactatgccgatcgcctgatggagtttccgtccggcgtgctgggcgtggcgctggggaccattctgctgccttctctgtccaaaagctttgccagcggcaatcacgatgaatactgccgtttgatggactggggattgcgcctgtgctttctgcttgcgctaccgagcgccgtggcgttagggatactggccaagccgctgacggtcgcgttattccagtacggaaaatttaccgcctttgatgccgcgatgacccagcgcgcgctggtcgcttattccgttggcctgatgggactcattgtggttaaggtactggctcccgggttctattcgcgtcaggacattaaaacgccggtgaaaattgccatcgtcacgctgatcatgacgcaggttatgaacctcgcctttattggtccgctaaagcatgccggtctgtcgttgtcgattggcctggcggcctgccttaacgccgggctgctctactggcagctgaggaaacagaaaatattcacccctcagcccggctggttcctgttcctgctgcgcttggtgattgccgtcatcgtgatgtctgcggcgctgttgggtgtgatgtacctgatgccggagtggtcgcaggggacgatgccgttccgcctgctgcgtttgatggtagtcgtggtagcgggtgtcgtcgcctatttcgcgacgctgttgctgctgggcttccgcgtcaaagagtttgctcgccgcacggtctaa

SEQ ID NO: 254207 - DNA, 1215 bp, Klebsiella pneumoniae; identical to SEQ ID NO: 189270

SEQ ID NO: 254208 - DNA, 936 bp, Klebsiella pneumoniae
atgaagaagcaggagcgtatagatcgtatcgaattgatgcgtacgttcattcggattgtcgaagccgggtctctctccgctgcggcggtccagatgaacacgacccaggcgacggtaagtcgacgactccagtcgctggaagggctgctcggcgcaaagctgatcctgcgtaccacccatgcgatgaagctgaccgatgacggcgagcgctgttaccagcatgcccgacagatcgtcgatgcgtggctggcgctggaagacgacctgcgcatcaccgatgaccgtccggtggggatattaagggtacgggcgccgcatgcgtttggtcagcagcagctgctggggccgctggtggactttctgcagcgctatccccagctctcggtcgaatggatgctgaatgataaaaccgtggatttcctgagcgatggcatcgactgcgcgattcgcgtgggggctgaggtggatccggctacggtgtcggtcctgctggccgaggtgccgcgcagcgtagtggcatcgccgtcgctgctggcgaactatccgccgttaaccgagccgcaggagatgtcgctgctgccctggatagccatcagcacgttctatcagcatgaggtgatgctgcaatcagaggtggatgagcagcttataacctttagcattgctccgtgcctgagtaccgacagcgtacatgtcgcccgcaataccgcgctggcggggctgggcgcggcgattgtttcgagctgggcggtagcggaggatattgccgccgggcggctggtggagctattcccacagtggcgtgcctcaccgctgccggtacatcttgtctatccctgggcacgctattatccgacgcggttgcgtaagtttctcgatttgatgcgcgaggttatgccgcagattgcggggatgcagcgaccggaaggggaataa

SEQ ID NO: 254209 - DNA, 3246 bp, Klebsiella pneumoniae
atgaaaagaatgttaatcaacgcaactcagcaggaagagttgcgcgtcgcccttgttgatgggcagcgcctgtacgacctggatatcgaaagccccgggcacgaacagaaaaaagcgaacatctacaaaggcaaaatcactcgtattgaacctagcctcgaagccgcgtttgttgattatggcgccgaacgtcatggtttcctccctcttaaagaaattgcccgcgaatacttccctgccaactacagttcccacggccgccctaacatcaaggacgtgctgcgtgaaggtcaggaagtgattgtgcagattgataaagaagagcgcggcaataaaggcgccgcgctgaccacctttatcagcctggcgggcagctacctggtactgatgccgaataacccacgcgctggcggtatttcacgccgtatcgagggtgacgatcgtaccgagctgaaagaagcgctggccagccttgagctgccggatggcatgggacttatcgttcgcaccgctggcgtcggcaaatccgccgaagcgctgcagtgggacttaagcttccgcctgaagcactgggaagccatccagaaagccgcagaaagccgccctgctccgttcctgatccatcaggaaagtaacgtgattgtgcgcgctttccgcgactatctgcgtcaggatatcggcgaaattcttatcgacaacccgaaagtgcttgagctggcgcgccagcatatcgcggctcttgggcgtccggatttcagcagcaaaatcaagctgtacaccggtgaaattccgctgttcagccactaccaaatcgagtcgcagattgaatccgctttccagcgtgaagtgcgcctgccttccggcggttctatcgtaatcgacagcaccgaagcgctcaccgctatcgatatcaactccgcccgtgctacccgcggcggcgacatcgaagaaacggcgtttaacaccaacctcgaagcggccgatgaaattgctcgccagctgcgcctgcgcgacctcggcggtctgatcgttatcgacttcatcgatatgaccccggtacgtcaccagcgtgcggtagaaaaccgcctgcgcgaagccgtacgccaggacagagcgcgcatccagatcagccacatttcacgctttggtctgctggagatgtcgcgtcagcgtctgagcccgtcgcttggcgagtccagccatcacgtctgcccgcgctgtagcggaacgggtaccgtacgcgataacgaatcgctgtcgctttccattctgcgcttgatcgaagaagaagcgctgaaagagaacactaaagaagtccacgctatcgttccggtgccgattgcttcgtacctcctgaacgaaaaacgtgctgcagtaagcgccattgaaacccgccaggccgatgtacgcgtcatcatcgtgccaaacgatcagatggaaacgccgcactactccgttctgcgcgtacgtaagggtgaagagacctccacgctgagctatctgctgccgaaactgcacgaagaagagatggctatgccttctgatgaagagccggccgagcgtaaacttccggagcaaccggcgctggccgcttttgtcatgcctgatgccccaccagcgccggctcagcaagagcctgctaaagctacggttgccgtcggaacaccagccgcttccgcacctgagtcggcagcgccagcgcagccgggtctggttgcacgcttcttcagcgccctgaaaaatatcttctccggcgcagaagaaactaagccgacagaagtccaggttgagaaaaaagcggaggagaaatccgagcgccagcaggaacgtcgcaaaccgcgcgccaacaaccgccgcgatcgcaacgaccgccgggataaccgcgataatcgtgacaaccgcgacaatcgtgccgagaatagcgaagttcgtgaatctcgcgaagaaaaccgccgtaaccgccgcgagaagcagcagaacgtcgaacctcgcgaaatccgccagacaacggcagaagatagcgacaagggcaaagctcgcgacgatcaaccgccgcgccgtgaacgcaatcgccgtcgtaacgacgataagcgtcaggttcagcaggaagctaaagcgcaaactcgtgaagaaccggtcgtacaggatagcgagcaggaagaacgcgtgcagaccatgccgcgccgcaagccgcgccagctgtcgcagaaggtacgtattgaatctgctgccgctgagcaggttgtcgagccggtagccgcgcctcaggtcatcgaagcgccagccgtccaacccgaagccgcagctccgcgcacggaactggcgaaagtcgacctgccggcggttgttgaaaccgctgcggaacatgacgataccggcgaagcacgcgaagctaacggtatgccgcgtcgttcgcgccgttcccctcgtcacctgcgcgtaagcggccagcgccgtcgtcgctaccgtgatgagcgttacccgacgcaatccccgatgccgctgaccgtagcctgcgcatcgccggaaatggcatctggtaaagtgtggatccgttaccctgtcgttcgcccgcaggaccagcagcaagaagaagcgcaggtacaggagttcgctaccaccgcggttgaccccgttatcacccctgcggccgccgttgaaccggctgtctctgaagtggttgccccggaggtagttgaagagcgcgttgttgagccgatcgtcatctctgagcctgtggcggtgatgaacgaacctgaagctccggttgtagaaaccacgcacccggaagctatcgccgcaccggttgatgaacagccgcagctgattgccgaggctgatgaaaccgtcgccgaagaggttgtcgcagaagccgtcgacgtcgtggcaaatgaagctgtcgagccggaagcagcggtcgctgaacctgctgcggttgaagaagccgtggccgctgttgaagaagcgcctgtcgtttgcgaaccggtggttgaaccggcaccggcggcagagccggtagtgaagactcaacctgttgtcacgactgtgccggtcgttaaggtcgccaatcgtcacgccaccgcgccgatgacccgcgcgcctgcgccagactacgtccctgaagcgcctcgtcaaagcgactgggttcgcccgagctttgattttgacggtaagggcgctgctggtggccatagcgcgacccataaagccgctgccgggcctactcgtccgcagcccgtagagtaa

SEQ ID NO: 254210 - DNA, 1146 bp, Klebsiella pneumoniae
atgcctttccgcgctacgcttttgaccctcaccctgctggccgccgccagcgtcaacgcgaacgactggcagcgccagggcgtcgtagaaggcaatttacccgcctcctggcagcagttgaaagcgcagatgacgtatccggactcgtggctctctggaaactatcgtcatttcgatcaatggcgagagcacgcccgcacgctgcttcggcaatccctgctaacaccgacatcagcaagcccgttcaccccacaaacgctgatgagcgaagatcggggcacctatcgcgccgagaaactggcatttaacgtcacggatgaaaaccggattaccgctctgatgttaacgcccaaatcagcaggccctcacccggccattgtcctgctgcacgaccatggctcaaaatttgacataggcaaggagaaactgattcgtcctttgcgggatgccgcacgcctggccagcgccgaggcatgggcagataaatttttcagcggtcggttcatcggggatgagctggcgcagcgcgggtatgttgtcatcgccattgatagcccgggctggggggatcgcggccccatgacctacgagcagcagcaggcgctggccagtaactattttaaccttgggcgctcgctggcaggggaagtcgcctatgaagatctgcgaaccgtcgatttcctcggtacgttaaaagaggttgataataaacgcatcggggtactgggtttttcaatgggcggttttcgcgcctggcaactggccgccctgtctgacaaagtcgccgccactgccgcgatctcctggtttggtacctggaacggcctgatgcagccaggcaacaacgttctgcgcggtcaatcggcgttttatatgcttcatccgggcctggccggacatcttgatattcccgacatcgccagcattgcagcgcccaggccgatgctgatttatagcggagcgcaggataagctgtttcccgctgcagccgttaatgacgccttcgctaaggtgcataacgtatgggcgtcacagaacgcgcaggataagctggagaccagaacgtggccggaactgggccacgtcttttatcaagaacagcaggatgaagtgttcccctggcttgataagtggctcaagccctga

SEQ ID NO: 254211 - DNA, 585 bp, Klebsiella pneumoniae
atgtctgaactgatcctcgcgtcaacctcgccctggcggcgaatgctgctggaaaagctgtcggtgccttttgaatgcgcggcgccggacgtagatgaaaccccgctgcccggcgagcccgcccgtcagctggtggtgcgtctggcgcaggcaaaagcgcaggccctcgccgcacgctatccgcagcacctcattataggctccgatcaggtttgtgtcctggacggtgaaattaccggcaaaccgcataccgaagagaacgcccatcgccagttgagaaaggccagcggcaccatcgtcacgttctacactggcctcgcgctatataactctgccaggggtcatctacaaactgaatgtgaaccctttgacgtccacttccgccatttaagcgatcgggaaattgaaagctatatccgcaaagaaaatccgctgcagtgcgccggcagtttcaaaagcgaaggattaggcatcacgctgttcgagagactcgagggccgcgatcctaacgcgctggtcggtttaccgctcatcgcgttatgtcaaatgctgcgccgggaaggattcaatcccctgctcacctga

SEQ ID NO: 254212 - DNA, 435 bp, Klebsiella pneumoniae; identical to SEQ ID NO: 203113

SEQ ID NO: 254213 - DNA, 735 bp, Klebsiella pneumoniae
atggttggtaccagccaacagcagatccagcgtatcgaaacaggaaaagttgcggccaagttggggctggcgcaagcgatcagcgcggtcttaaagaagccattgagcgctgtttttccagatagcgataagttgttgaagaaactgcgcaatcaaggtagccgtagtgacgatgagctggaaaatatcgcggctaatggcattgaaatggatggctgcatttggacggtgaaactctggctacgagggcaacaagattatttgctgttacctatttccccggctgataagcgtcgtttttactcacactttcaggaaagtgtagtgccagaccgtgagcttttttttgtttttgactctgagcagcatcgttacgccttaaatgcccgagaggtaatttttcaccaattcttgcttgatggttttacacctgttcctgatgatgaggacagtgatggaagtgaaggaagctttgggaatgtccatatcaccatggtgaacggtggcccagttattgggctgtactgtgagtccgaggtttcggacgacggcgaaatcgatgatattggtcaattgaatgcattttttgacattcttgaatcggagccggaatcaacagagcgatatcagttaaccgacatagatggagaagatgctttcatccgtattggctctattgcgatggtccgaatagatcttgatgctttggaatctgtcgaggaagatgatgcataa

SEQ ID NO: 254214 - DNA, 324 bp, Klebsiella pneumoniae
atgttgcgggaatgcctgtggatagccgcacattaccgggacaccgaagcggtactcacccggcagtttcgcctgctggccgtcttactgtatctgggcggttattttccgaaagggaatgccggtggcatgctcccggagaagtgtttcattttactgaacgctccggaattaagctcccttctgacagacgatatgactcccgatgttctggcggcgtcctgccgtaccctcttctactgcagacagatatctccgttaaggtgttaccgccatacgcgctgtctgagcgaacacctgtatcaactgatgatgatttgttaa

SEQ ID NO: 254215 - DNA, 360 bp, Klebsiella pneumoniae; identical to SEQ ID NO: 203114

SEQ ID NO: 254216 - DNA, 960 bp, Klebsiella pneumoniae; identical to SEQ ID NO: 203115

SEQ ID NO: 254217 - DNA, 231 bp, Klebsiella pneumoniae; identical to SEQ ID NO: 203116

SEQ ID NO: 254218 - DNA, 255 bp, Klebsiella pneumoniae; identical to SEQ ID NO: 203117

SEQ ID NO: 254219 - DNA, 213 bp, Klebsiella pneumoniae; identical to SEQ ID NO: 203118

SEQ ID NO: 254220 - DNA, 744 bp, Klebsiella pneumoniae
atgaacacgcttaagcagcaactcatccaacttcgcaaggattttcaactgaagaagcaggtgaaacaagaagataatgtttacgaaaagtaccggcaaattcgcgacgatttgcacaacgttgcttcatctttaaaggagacggcaactcagcttcatgtcattactcaactgccttcaccgttgtcgcaaatcactcttgatgcccatgaaaaagcggcgatttatgacgctgaaacagctctgaaagaatttgcagaaaaattccagcatatggccgatgaggctcagcaaaaagggggattaggcgagatgctcgatgcgctgatgtccgtccaatcgaaatttgcagataaaattgatagcaactggcagacattcatccacgatcttgaaagccaacagatgctggaaacggtcttccttgaacagcaaaagacgttaggattcaataacacctataacgactaccgaaaggcacttgatggcttcaatcatcagaaaatgatggggcccgctaatcccattgtgattaaaaaactacagcagtactgtgatgaaatggtcgagttaaaaggcaaaatggattttaaagcgccagcctgcgtccttgattttttccaggcgctcaataatagcaatcgcgcaccgttgactttgctgacgcctgaagtccttagctggctgacggaaaaagaaatgctgaactcattcaatgtgatgcgcaaaggtttactgggatga

SEQ ID NO: 254221 - DNA, 3138 bp, Klebsiella pneumoniae
atgaaaatgctggaatattggccgtctttaccgaacatcagacagtgcattcgtaccgaggcggaagagctttcggaccatacgctgctggccgttcatgagccagcccgaatcttacgaatgaataccgacggcagtccgttggcgtatgaaacggaagagcagttgctaaaacactttctggaagtgcagcgcccactgccaatcataggcaacacaggggtagggaagtcccatattatccgttggctggatgcgaacctgcgcctgcgccctgaatttaaaaataaacagtggcatattgtccgtatacccaaaagtgcaagcctacgggaagtacttgagcttttactggaagggcttgagggcgaaatttttgatgaagcgcgtgaggatatcaacaaggtcagcgataaacgctcacccaaagagatcgctgaatggcttttgatgttgatggggcaagagcttcgcgatcttcatgcgcgttcaagcgctgattatgagcagcttaagcaggaagcggcggaagcaagcccggagcagcagaatgcactgcgcaagaagtcttctgagttaaagaaaatcaatattcatgccgcagaaaatgccctgccgacgctgatcaacgacgcttatttcaaacagttcttactaaaggaagaacagtgcctgttccgtttcgccagccgtctaatcagtggcgcaaacagcgatgaacttgaagagggtgaacagcaacttaaagccagcgatcttgatttccaaatacacctaagtgatctgagccttccgacgcgttcgtatatcagtcggacgcgactcaatacgcatgaacctggtcggcaggaagccgctgatattctgaacctggtgctcggtaaagcagcacaaaccctttttaatcagctctttaatttccgggggcgcagcttttccgatctatttctacagattcgaaaagcattgcatgaacggggaatgaccctgatggtgctggtggaagatatgtctctgatcaccgctattgaagatgtgcttatcgacagcctggagcgtgaggggacgcgcgatggtgaagaagtgctttgtccggtgtgctcggcctttgcgacgactgaaggttatcagggatataaccgtcgtcgccaggggatgcgtgaccgtgcgaaaggtgaatggcggatcgaagaggttgtaggtgagcgttcagagacgcggcagcggattgtcgacttttgcagtcgctatatcaatgccgcgcgttttggggataagtctctgcgcgagttctggaaaaaacgtaccagcgatacgaactgggtgccaaactgggatcagcatgctgaagccattgagggtattgatgcttttggctacagctctctgggctatgcgctttttccctttaatgaacgcgcaattcatgcgctggcggatgttcactgtggcgatggtaataagggcataaaatttaatcccagaatcatccttaacaaaatcctgttaaacatcttgttcaactatcgggttatggcacaagaaggacggtttccgcctccgcaacttgatggcattaccgcacctcatgggctgcgaacctggctgagtcgaaaaacgttggcggagcaggaccgctctgaaaccgtcgcggctatttggggatatccggcagacaatggtcccgcccttgctaccgcattgcctcctgcggttgtgcgctgctttggcctcaatgatttggcaaacgaactcgcgtcgactgagaaaggcgcgatcaaccccggtaatgctgcaacggttggacgaaaaatcgagcctgtcagtgcgaaaacggtgaagccaaaccctgttccgcaagaatcggttgagcctgttgatcccctagaagcacgtgtttacaagatggaggcaagcgtttccgactggatactgaaagatgtattactcgatcaggatacggcgaaatatatccgtaactcgctggcaatgatttatgaccagcacgccaatgctgactggtatggtgcgaagtctaagcccgatattcgcagtgggaatttcgttaacattaatgtcccaaatgcgcacggtaacaggctgaaacaggtagtgaattttgtctccgaggcggagtataagaaacggtcagtctggataactgaggtatcgctggcccttgcacgtttcgggctctatatggacaaaaaaaatggcccggactggacttattcgaaagctgcggaagattatctggttatacagtcctttgctgaccgttgggtgccctacgctctcaccgaactcctgcgcagcaagcgtgaaaatcaggggatgatactgactgaacatctgcagttggcccgggcccttggcattatcaaaccgaatgcgacctccaaagaggtgctgaatcaattgctaatgaacaaagaggcattgatcggccaacataaatctgccgccacagagagcattgccaaagtacgctctgacgctcttgataagtgggaggaggtgaagtcgaaatggctaaatctctatgccccaaacgatcatgcactggaaggcgatattgtgcagaaaatggtgctggaggccctgaaacaaccagcagacagcaggatagagcaggcggcgaacagaacggtaagagagattgcgtcaacgctgaccgaggtcacgtatttctccgattgcgaaaacagtgaggcattcgctcaacttatcgaggatgccgtatcgttgttggaagagttacgtgaagaaggtgactatccggttaatgctgaggtggactgcagtacgctgcaagcagaactaagtgctttaaaagaaggtggcacgtgggcaatgatcctcaaattacgaagcattacgcagaaagaagaaccacttgctttgtggcagttgctttgcgatttagatggaaaattactcaagcgttttacagatactctgcagcggtggcaaaagatttgtaagcaaaccttgagtgcgattacggggtacaaccaggataaaggtggtcaccgaatcagtgagtgtcgcgcgcaaattgacagagtcctgatggagatgatgcaggatcttcagatcctcaaagagaatgcaggaggtagcgatgaacacgcttaa

SEQ ID NO: 254222 - DNA, 903 bp, Klebsiella pneumoniae
gtggcaatcattaataacgcccatccgggtagccagattcgcttgatctgcacaattgatagggtcctcaatcgccgtggaggaaaaccgattttgcatgaagatttggttgaactgctgcgtccccaggcgctgccgcaatccgatattggtgcggagcgttttcggaagaacctggatttctggttggaagaagggctatggcagcagactgaggcgggtatttcccgacatactccactcgcgaatgagcgcaatctgccgagccgcgtattacgcacattgataacaaacgagccaaaagagtcattgctggaaggcacccgtggacagcctttcctactcagtatcaccgcgttgcttgcgcaggataattttgccttcatcggcaagagcacgctgacaaaagagagtgtcacgggaggcgttggaccgctgctcaaggattcgaacaacgaaggcgtacgtcgccagatcaacttatcaaatgaagcgacaacgttccttgaatttgcttttttcctcggttttgttgagccatttatggatggatatctggttgatccgacgcgagctattgagggcgtactggaccgtgtgctggagaaccacagcaaccttcccgcaattgacttcatatcccggcttgcagaagtcttaccgatgatcgatggcggaagctatcgtcagcaggttgaaccaatgattacggcagataactggacaccgaaagaaccattacatttgagcgcctctctgagtcaggcgctggtgcgtcttgagttggcactgaagataaagtttgagattagggctgatgatcatcaggcgctattgttaaccgggccggacggtaatacccaacggataagcgccattagccctggggagcttttaaaatga

SEQ ID NO: 254223 - DNA, 2481 bp, Klebsiella pneumoniae
atggaattccaatggaggcaactccgtgagctactcgcgatggacgagtgtcaggacaataattttgtaatccatcaggatgacggtcagtttttctatcgtctctggcgatgtctgaacgatgcaggcgcggggatctcagaccgattacatggctattatgacgctttacaatgtgcccgagctcatgggcttctgccgttgcgcctgccgctcaaagagcgcatcttatcagaggatttactgcgtgctggcctacggcgcagccgggattatcctggtgaggttctgttagacgagaacgcattacagatcgcgccagagttattggcagtgtggcgaaaggagaaaagacgtctgctccagaccccgccgctggatacgttgttaccgattctgttgaatgacactaaatacactcattacacatctgttgggcagcagcttgctgtacgcacggtgttgacgagtgataaagaccgttttttgtttattaacctgccaacgggggctggtaagacgttcattatccattctctgatgctggcaactcccgcaagtcaactgacactggtgattgttccgactatcagccttgctattgagcaggctcagcgcgctcagtccatgttactgcaggcaaacgccgaccatggtggcgaatacacttggcactctgggcaaacaccagaggcacgcgaggcgattaaggcccgtatcaaagccggtaaacaaaggttactgttttgttcaccggaggcggcatccagtggttcgctgctattgcttctattttcactggccaagcggaaaatgattggcgccctggtcgtggacgaagcccatcttatcgatcaatggggtgcggaattccggccggaattccaactgcttgcgccgttggtaaaatcattggtggaagtgagtaaggcgagcattcgcacggtacttctttccgcgacgtggagtcaggcaacgctcaatacccttaaagagctctttgccggtgataaccctcaggcgatcgttgaagttaacggcagtttcctgcgaccagagcctatgtggtacgtcagcaaagcggacgatcgtgaagatcatcgtcggcaggtggaagatgcgatttcaacgctaccgcggccgttgatcctttacgttacgacggtcgaggacgccatcgactggcaccagtatttgctcaaagccggctataagcgctgcggattggtccacggtaaagtatctccacgccagagagaaaagcagatagccgactgggctgaggataacgttgatatcatggttgcgacctctgcatttggcgtcgggatggataaaaacaacgtacgcgcggtgctgcatgttaccgtcccggaaaacatcgaccgtctctatcaggagagcgggcgtggagggcgtgacggctatgcttcagtagcacaactcatttatagggacgatcagatctctttggctcgtcaccttaaccgcgataaccttatcggtgcaaaaaaagggtttctacgttggcaaaaaatgcatcagaaccgggaatcggaatcacccggttatttctcagtttatctggataccaagcacgacagcatcaaaattgattctcgtgctaatgtcgcgtggaactggcgcacactcctcatgctccaacgtgccggcttcttgagtctgcattttgctgcaccggatctcgaacagtttgcctcagataatgtggacgatgcgaaggtagaacagtactttaaccattatttcagccatattggcgtcaaactccatcgtgaaggtcatcttgatgtgcaggagtggaatggcacgttaaaagaattgcgttccagagagttgcgtgcccggcaaaaagggtttcaggtgcttgaagattggttgaatcatcaggaaaatccgctatgtagtgtccttgaatcgttctacacgcttgatggttacgccccagaactggcttgtagtggttgcccaggttgtcgctctcaggcgttgtcagcatatacgcctacgctgggcttgaatgcatatttgatttctggcgaagaacgcgagcgcatcggtagcgatatgcgtatttattaccctccggcccgatcctccgctttgctgcttcgccagtggatcgactggatcgcacgtttgctagtcacacgtgagattcaggccatccgcgcaagctcgaccgtactatcccaattaagccaacaactttataagagcgtgccattctggtgcgcgctttcacatgacgatccctcgacaaactggaatgaactggtacttgtcctgcccggagagagcctgccagaacttgacccgtttagtgatatcaaacgaatcattgtggccccagagacgctccctgaaaaaaacgttcggggaaggctatggtgggagagtgatcccagagctcgtacgctggaccaatttataaggagtttaagcagtggcaatcattaa

SEQ ID NO: 254224 - DNA, 2706 bp, Klebsiella pneumoniae
atgaaccctgcccattttcttgctgcccgttcaaacgatgctccgtttttttaccctctgcgcgagcgatttgtcagcgcgtggattaagcagcgtgcagcatgccgatcgatatcttcgttgatcagcagtcgcgttgaggtcgagcctcatcagattgctgttgttcgtcgaattctccaagaccagaaccctaaatacctcctggcagacgaagtggggttaggtaaaaccattgaagctgggttgatcatccgcgagcatattctggaatttaatcgcgacgctagggttttggtagtcgtaccgcaggcgttaaaaggccagtggagtgaggagttgatcggacgctttgcattaggtgaagtgatgattggaggagggcgaacgcggcaaatccggctttgcaaccatgatgagattaccgactccttgatgaaaacatgggggccgacgttgattgtggtggacgaagcccaccaactcgcacgtcacgcttgggctgaaaacgttgctaaacgggctcaatataccgcgttgacaacactttgccatcaaacgggcattgtgttgttactctcagggacgccgatgcatggtaacgaactgaactttcttgcgatgttgcattgcatcaatgaagaagcctggccactggacccggcaggttgtgagcattttctccaacgcgtggcagagcgtgagagccttggcgggatctataccgcgctccagcctgaaaacgacaacggcattatcgaaagctgtcttgaggagttgtctgagaagtttcctgatgatgaggaacttcagggtttaattaatgaggtgcggccgcttgttgattttatcgccgatgaagaaggcgaagagcgtagcgagaaaattttggcgcttcacaattggttaggtgagcattaccgtctgtttcatcggctgttacgtaaccgccgcgaagatccttctcttgcctggcttttccctgggttagcggggctgaatatcgcgcactggtccgtcaagcctgaagatgtcaccttagacgaacttcttgaggactggcgttctagtgccaaaaattctcctgagaagcatcgccatatcaccacggagaatctgagcgattgggtggatgcgctattcaccagtcccctgacattttcacgtcgagcacgcttagcgctggaacagggacccgccagcatagatgaacaaaattaccttgaacaagcgcaggcaattgcgaagcaagagcaacgccaaaaagacgagcaattgatgagcgccctcaacgcatggtttgcgaatcacaaagaagggaaagcggtcatattctgtagtgaagaagcggaatccgctcatcttttcacaaagctggatctacagtccacctggaaaatcgtccgccacgcgccggataagtacgcgcttaacaaccactggcaggtgctgatatgcgacaggcgtggggaggatggccttaatcttcatgggaaaaatcgtctggccgttcattacagcctaagtcgcgatttcaaccgttttgagcaacgtcttgggcgcttcaaccgctactcaggcaacttaaggggcatcaaaccggtagaaagcctcgtcatcctgcctggaagagacggcctgtcatcggagtggaccaggcttttagataagggcattaacctgttcagacaaagcgtagccagcctgcagtttgtgttggatgagcaaatagaggctatgtggcggcgttattttgagggcggtcttgccgtcatcagtactaccatcgatgccctggggggagaaaaagggttcgtagccgttgagcgtaaaaaagtgtttgagcaggagaacctgctttctatggagcaagaggtcattgcttcacaggcattttctgaggcattgctggagtcggaagatgatgcggaacagcgtgcgctggacatgctgcaatggatcaccaaagcactccagtttaatcaacaaattgagcaagataaaaccgggttcaggttacgctttgaacgagatgaatataaggggcgcacgctcgttgatgtgcaaactttcatcgacaactgtttgcttggactggatttttcagagggctatcctccttctacagcaatcatgaccctctcgcgtacccaggctagtttgcacaaaaatacttatcctctccgctacgggcaacctttcgtggataccgtctggcaacttatgcagagtgatcctcgcggtacgacgatggcgatcctacgcatgatgaaaacgattaaactcccgtcgccacagttttatttccattttcaatggttaagcagcgctagcctggatggcgataataagctggtagctcaacgtcagggagatgagcgttttgccccgcggctggaaaccttctggctcgatgctaatggtcgcgaagttgatgaaaagattatcgctgttttggaaaaaccgtacgataaaaaagggactgtgctctacgaagatatgaacctgcgaaccgatgtatggccacagatgacgcgttggtttgatcccgaagcctggaaaaatacggtgctggagttaacagaaaaagcgaagcagcgtcagcaaattcgctacccttcgagtgacgtattgcctattgggcaccagttgatggcggtgaaggcgataattttgtgcagcaaagagactttccagatggagtaa

SEQ ID NO: 254225 - DNA, 192 bp, Klebsiella pneumoniae
gtggctaacgctatcgcggacagcgaaggtttctccatcgccggcggcggtgacaccctggcagcgatcgacctgttcggcatcgctgacaaaatttcctacatctccactggcggcggcgcattccttgaattcgtcgaaggcaaagtcctgccggcagtagcgatgctcgaagagcgcgctaagcagtaa

SEQ ID NO: 254226 - DNA, 375 bp, Klebsiella pneumoniae
atgactgcgccgttgtattcattacttatcacggctgtcgggaaatatgtcaaagactatctacaggagcatcagctgattttattttctgaatccgttcctgacgatattgcgatgtattgcgccgtacatcagagcagtgagctgacagctgaattggcacctgggcagataatgaaaataaatgagactatttatcgagtcacggcggtaggtggtgttgcaacggcaaatttaaaacagcttggccatatcactttaaaatttgatggcgctgccaccgctgaattaccggggatggtgcatctcaatggtgacgtcccccaggctattcagcgtggcgaccaaatctttttctatccggaactaaattaa

SEQ ID NO: 254227 - DNA, 1020 bp, Klebsiella pneumoniae
atgaacataaatatattagagaagatgaataaggtgccaggcggtttaattattattccgttgcttgtggcgattcttattaatacctttgctccagaagtcctgggcatcggcggcccgacgaccgcattattcaaagtcggttccagcgcaatgatggggatttttctgctgatttgtggtacctcgatcaatatccgccaggccggcctgccgctctataaaggcgcggtgctgttgttgctgaaatgcctcgccggcgcgctggccgtatgggtggccggggcgatgtttggccccaacggtttcctcggtatttcgaccctggcgctgattgcctgtttaaccagctccaacagctcgctatatatcgcgctgtgcagcaactacggcgatgccagcgatgccggggcgatctccgtcttctgcgtcaaggatgggccctttgttaccatgatggtgctgggggtcagcggcctggccaatattcctttcgccgcgctgctatcgatgctgatcccactgctgattggtatgctgtggggcaaccttgatgagcgtttcaaacagctgtgtgccgccgctcagccgctgattatcattattatgtcgtttgccatcggcgccaattccagcattaacacggtctttaccgccggactgtccgggatcctgcttggcattatctctgcgctaaccggcattgtgttctattttatctacaacctgttcctgaagaagaaaaccgcgctgggcgccgcgctggggacgaccgccgccagctctgcgctgacgccggcaatggtggctcaggccgatccctcgctggcgatgtacgtggatgccgcgaccgcgcagctggcgacggcgagcatcatcaccatgattaccgcgccgatactggtggcctggtttgataagcgtctgaaaaagcgcgcgccgagggttgaaccggtaaaagaagaaaccagtgaagagaaagtgacattatcttcgcctgccaccaaagggaacaaataa

SEQ ID NO: 254228 - DNA, 1719 bp, Klebsiella pneumoniae
atggaaaaacatctgttaattagcaaaggctgtaagggctggggcgggccgctgaccattaatattagccaggcgaaaaagattgcttatatcaccggggggatttgtcccccggtcgttgagcgcctgagcgaactgactggctggccttccgtcgacgtatttaaaaacggcgagccgccggaagaggagatcggcctgatggttatcgactgcggcggcacgctacgctgcggtctctatcccaaacgcggtattccgacgattaacctccatcccaccggtaaaagtggtccgctggcggagtttattcatgaagggatctacgtctccggcgtgacgcccgcctgtattgaaatgatctggccgcagggggaaggcggtaagctggggatcgtggccgacgatctgaccggtgcgaccaccgtcggggtgctgctggcgcgtagcgggttaaaaaccgccgcgttcttcgatactgaatccttcgcccgcaatgaggtggagtatccggcgatggtcgtcagcagcgacagccgtcctttgccgaaagcggaagcccagcagcaggtcagcgccgcggtgaagcagctgcaggcgcgcggcgcgcactactttaccaagcgtattgataccacgctgcgcggcggcatcggctttgaaattgatgccatgctggaacaattgccgctggaaacggttgccgtcgtcgtgccggcgatgccgcagtcgcggcgtattctggttggcggctattcggtaattgactccgtcgcgctttcgcgaaccgatgtcgcacgcgatgtgcgtactccggttaccgaatcctgggtgccgggattgctggcggcgcagacccatcatcaggtcggacatatcgcgctggcctcggtgatgaaaggcgaggagcaactgcagcgggatctccaggaacagcagcagcgcggcgtgcgggtgatcgtcgtcgatgcgattactgttgacgatgtcgatgcgattgccggggcggtggtggcgctgaactggaacgtgctggcagtcgacccggggccttttaccgagcggcttgcggtccgtcgtggcctgatgcgggaagcgcgcagcagcgcgacagcgtcgtcaggggcggaaaacccgcgcggttcgattctggtggttgccggtagcgccacgccggtgaccaaaaagcagcttcagcatctgatcgctaatgatgaaagagtgtgtcacatccctgttgatgccgaactgctggttgacaggaaaaacgccgctgaaatcgaagtgaatcgcgtggtgcagcatgcccggcagtgcgtgccggcgcagcagaacgctatcttcgtttttgaatccgcgttaaccgggcggctgctgaatcttcaggaagaagagcagcgctttgggctggcccacggacaggctgcggaaaatattaaccagggactggggaatattgttcgtgaagtgcttaactgcgcagccggagaaattaaaggcctgtatatgaccggcggcgatacgatggtgaatgttcttaaagagcttggcgctaccggcattgaaatgattgactacgtgataccgcaaaccgatatggtgcgtattatcggcggcgattatgcgggattgatttgcgtcggcaaaggcggtttaaccggaccagaagatattattagtacaattgttgaaagaatttataaagaagcgcagctataa

SEQ ID NO: 254229 - DNA, 1008 bp, Klebsiella pneumoniae
atgtcacaagagaaaaagcccgttgtcgcacttaccattggcgatcctgccgggattggtccggagatttcagtcgcgacgatgatggagaaaagcgtctacgacgagtgcaaaccttttttgattggctcagcgccgattatcgccagagcaatgaaaatcatgggctgtgattttccgattaacaaaattagccatccgcaggaagctcgcttcagctggggtacggtggacgtgctggaaaccggtgagtatgactgcgagagcattgaatggggcaaagtgcagaagctggcggggcagatgtcgctggactatgtgctgaaatctatcgaactggggaaagccggcctgatcgatgtggtctctaccgcgccgattcataaagaagcaatcaagctggcggggtgtaaactgccgggtcataccgagatctatcaggttgaaacgcaatccgattatggcctgaccatgttccacgttcataacctgcgggtcttcttcgtgagccgtcatatggcgcttaaagacgcctgcgattacgccaataaagagcgcgttctggcctgcgtgcagcagatccaccatgagtttaccgcgctgaatatcaaaaatccgcgcattgcggtagccgcgctgaatccgcatggttcagacaacggcctgtttggccacgaagaagccgataatctcatcccggcagtcaaagcggcgcaggaaatggggattaacgccatcggcccggtgccggcagattccgtcttccatctgggtaaacaggggcgctatgacgccatcctctcgctttaccacgatcaggggcatatcgcctgtaaaaccctcgattttgagcgttccgtgaccattacctttggcctgccgtttatgcgtagctcggtagaccacggcacggcgtttgatattgccggcaccggtaaagcgggcaccgtcagtatgctggagtccacgatggccgcggtgagctactggaaaatgaaaaaccactaa

SEQ ID NO: 254230 - DNA, 795 bp, Klebsiella pneumoniae
atggaacaaatctggttaggaaccagctggaaaatgaataaaccgttatcgcaagccatggccttttgtgaaacgctggcgcagcggttaccgcaggtgaggcatccgaaaatccagccgtttattattccccctttcaccgccatttatcccgtcagccagtatctacagcagcatcagatcccctgcctgaccggcgcgcagaatatgcatgaagcggaaaacggcgcctggaccggtgaaatttccgccgccatgctggctgaaaccggcgcctccctggtcgagcttggtcactccgagcgtcgcggcgcgttcaatgaatccgacgccgccattaaccaaaaagtgcatcgcgccctgcgtcacggccttcgacctctgatctgtatcggcgacagcgccgatgaaaaacgctggcaggtctcacgggaaacggtagtgcggcagatgaaaatcgcgctttatggcctgaatgaacagcaggttttacacactctggttgcctatgagcccatatgggctatcggcgaacacggcacgccggcgacgccggagcaggccgcagagatccaccgggcgctgcgtcaggcgttatgcgagaccttcggcgaagaaatcggacggcgcattcccctgctgtacggcggtagcgtcaatcggcaaaatgccgtagaactgcttcagcaggatgacattaacggactgtttattggccgcgcggcatgggatgccaacggctattgcgacattgttcaacgcgttacagaggaatttattcttcaggcgcagtag

SEQ ID NO: 254231 - DNA, 963 bp, Klebsiella pneumoniae
atgactgaacaagactcagattatgcgctgctgacagaaattgccgtggcctattacgatcaggagcaaacccaggaagagattgcaaaacgctttgggatctcacgcattaaggtcggtcggttgctgaaaaaagctcgccacgaagggattgtcgagatcagcgtgaaataccacccggtcttcagctcccagattgagcagcagtttatctcccatttcggcatcaagcgcgcgcttatcgccctggaccatcacgacgaggatgaacagcgccagcaggtcgcggcgctggtcagcaactatctcgccgggatcctcaaaagcgatatgaccgtgaccgtcgggcagggtcgcaacgtcgccgccgtggccaaccacgtggggatctttccagagcgcaactgtcgctttatttgcggtatcggcggcaccaagcgcgacaaccagctgatcgatgccgatcacatcagtcgaaacctggcgcgtaaattcaacggttttagcgaaacgctgtacgccccggcctatgtcgaaacgccggaactgcgctcagcgtttatgcaaaaccggctgattaaagccacgctcgaacaggcaagcaaggcggatgtagccatcattggccttggcgatatgaacgaaaatagctttatggtgcagctcggctggttctccccacaggaaattgcgactgcgcgccaggaacagggcgtagtgggcgatctcgctggctatagttttttcaatattcagggtaaaccggttgatacggtgatgaacgatcgggttatcggcctgagccttgaacagcttcgcgccatcccgtgcgtgatcgccatcgcttcggaaagcaccaaggcaacggcgatcctcggcgcgctgcgcaccggcgtaattgatgtgctggccaccagcgcatctaatgcccgggcggtgatcaatatgcagaaggcgctatga

SEQ ID NO: 254232 - DNA, 312 bp, Klebsiella pneumoniae
atggatagcccattagcactatctgctgcgatatttttggccgcagtgggggttggcctgtggagtcagtatggcctgcctcgtctttctgatagcagaaatattctgttcatcctctctcttattctcggcgtcgtatccgcggcttcctgcctgtttcatctgctgtttctgatgattgagggccagagcgcgcagggcggttcggcgtggttcgggccgcttatcgtgctgggcgcgttgtggaagccgctgaatgatattgcgggcaagcttgatgctgtcttaacgaaaaatcagggcaagaaataa

SEQ ID NO: 254233 - DNA, 831 bp, Klebsiella pneumoniae
atgcagtcgcgccgcttacatcgattaagccgatttcgccgcaataagcgtcggttacgagaccgtctgcgtcagcggattttcttcggcgaagataaggagacacctgaaacgatggaaaaaccaagagtcgtggtgctaaccggcgcgggtatttcggcggagtcgggaattaaaaccttccgcgccgccgacggcctgtgggaggagcatcgggtagaagacgtcgccacgccggaagggttcgcccgcgacccggcgctggtgcaggcgttttacaacgatcgccgtcgtcagctgcaaagcccggacattgcgcccaatgcggcgcatcaggcgctggcgcggctggaagagagactgggtgaccattttctactggtgacccagaatatcgataatctgcacgagcgcgcgggcaaccgtcgggtgatccatatgcacggcgagctgctgaaggtgcgctgttcgtggagcggccaggtggtggcgtggaccggtgatgtgacgacggaagataagtgtcactgctgccagtttcccgcgccgctgcgcccgcacgtggtgtggttcggcgagatgccgctggatatggatgaaatctacctggcgctggcggaggcggatatctttatcgccatcggtacttccgggcacgtttatccggcggcagggtttgtccatgaagcgcggctgcagggcgcccacacggttgagctaaatctcgaaccaagccaggtaggcagcgaatttgccgagaaacactatggcccggcaagcgaagaagtgccgcgctttgtggaaaagctgctgaaacagctggccgggtag

SEQ ID NO: 254234 - DNA, 912 bp, Klebsiella pneumoniae
atgtactatggatttgacattggcggcagcaaaatagcgctgggcgtatttgataacgcgcggcggctgcagtgggaaaaacgcgtcgccacgccaaaagagagctatgaagattttttgcaagcggtagaagcgctggtggcggaggccgaccagcgcttcggctgtcagggttcggtgggcatcggtattcccggcatgccggagacggaagacggtacgctctatgccgccaacgtccctgccgccagcggcagacggctgcgggccgatctgagcgaacagctggggcgcgatgtgcggcttgataacgacgccaactgttttgccctctccgaagcgtgggacgacgaatttacccaatacccgctggtgatggggatgatcctcggcaccggcgttggcggcgggctggtgctcaacggtaaatcgattaccgggcatcgctatataaccggcgaattcggccatatccgcctgccggtggatgcgctggaagtcgtagggcgcgatttcccgcttacgcgctgcggctgcggccaactgggctgcattgaaaactacctttccggacgcggctttgcctggctgtaccaccatttttaccaacaatccttaacctcacccgagatcgtcgcgctctggcagcagggcgacgcgaaggcgcgcgagcacgttgagcgctacctcgatctgctggcggtgtgcctgggcaatattttaacgattgtcgacccggatctgctggtgttgggcgggggattgtctaactttacagcaataaccgaagggctggcgcagcgcctgccgcgacatctgctccccgttgccagcgtgccgcgcatcgaacgcgcgcgtcatggcgatgcgggaggtatgcgcggtgcggccttccttcatctgactcattaa

SEQ ID NO: 254235 - DNA, 1245 bp, Klebsiella pneumoniae
atggcttctccgttatcgttattgattgccctgcgcttcagccgtggacggcggcgcggtgggatggtgtcgctgatttcggttatttcgaccatcggtatcgcgctgggcgtggcggtgttgatcgttggcctgagcgcgatgaacggcttcgaacgcgagctcaataaccgcattctggcggtggtaccgcacggtgaaattgagccggtaaaccagccgtggaacaactggaacgaggcgctggcgaaggttgaaaaggtcaaaggtatcgttgccgcggcgccttatattaacttcaccgggttggtggagagcggcagcaacatgcgcgcaattcaggtgaaaggcgtcgacccgcagcaggaaagccgtctcagttcgttacccaactttgtgcagaacaatgcgtgggccagctttaaagccggcgagcagcaggtgatcctcggtaaaggcgttgccgatgcgctgcacgtcaagcagggcgactgggtgtcgatcatgatccctaactccgatgccgagcaccagctgctgcagccaaagcgcgtcaggcttcatgttaccggcattttgcagctcagcggccagctcgatcatagttttgccatgattcccatgcaggatgcgcagcagtacctggatatgggcagcagcgtgacggggatcgctatcaaagtgaccgacgtgtttcatgccaatacgctggtacgcgatgcgggcgaagtgaccaacagctacgtttacatcaaaagctggatcggtacctacggctatatgtaccgggatattcagatgattcgcgccattatgtatctggcgatggtgctggtgattggcgtggcctgctttaatatcgtctcgaccctggtgatggcggtgaaagataaaagcggcgatattgcggtgctgcgcacgcttggcgcaaaagacgggctgatccgcgcgattttcgtatggtatggtttacttgccggttcggtaggtagcctgattggcgtggctattggcgttatctgcgcatttaagctgaccgcaatcattaacggtattgaggatctgatcgggcataaattcctctccggcgacatctattttattgacttcctgccgtctgaactgcactggctggacgtcgtttacgtgctggtgacggcactgttgctgagtttgctggccagctggtatcccgcccgccgcgccagccgcattgacccggcgagggtgctgagtggccagtaa

SEQ ID NO: 254236 - DNA, 702 bp, Klebsiella pneumoniae
atgaataagatcctgctgcaatgcgacaacctgtgcaaacgctatcaggaaggcaccgtgcagaccgacgtgttgcacgatgtcagcttcagcattgaagagggcgagatgatggcgattgtcggtacctccggttccggcaaaagtacgctgctgcatctgctgggcgggctggacacgccaacctccggtgacgttatcttttccggccagccaatgagccggctctccgccgccgcccgcgccgatctgcgcaatcgcgaactgggctttatctatcagtttcaccatctgctgccggatttcaccgccctggaaaacgtagcgatgccgctactgattggtaaacagaaggcggcggatatcgagcgtcaggcgaaagcgatgctgcgctccgtcgggcttgagcaccgtagcgatcaccgtccgtcggagctctccggcggcgagcgtcagcgcgtcgcgattgctcgtgcgctggttaataaaccgcgtctggtgctggcggacgaacccaccggtaaccttgacgcccgcaatgccgacagcatttttcagctacttggcgagctgaacgtcgcccagcgtaccgccttcctggtggtgacccacgacctgcagctggcaaaacgtatgagccgccagctggagatgcgcgacgggcgcctgacagccgaactctccctgatgggggccgagtaa

SEQ ID NO: 254237 - DNA, 1209 bp, Klebsiella pneumoniae
atggattacatgtatcaacctgccgcactttttatcggccttcgctatatgcgcgggcgcgcagccgaccgcttcggtcgtttcgtctcctggctttccactattggcattacgcttggcgtgatggcgctggtgaccgttctttcggtgatgaacggctttgagcgcgagctgcaaaacaacatcctggggctgatgccgcaggccattctcagcgcacagcaggggtctataaacccgcaaaaactgccggaaagcgcagccagactacagggcgtcacccgcgtggcgccgctgaccaccggcgatgtggtgctgcaaagcgcccgcagcgtagcggttggcgtgatgctcggcatcgacccggcgcaaaaagatccattgaccccttatctggttaacgtgaagcagagcgatctgcaggccggaaaatataacatcatcctgggtgagcaactggcagggcagttgggggtcaaccgcggcgatcggatccgcgtgatggtgccttccgccagccagtttaccccgatggggcggcttcccagccagcgcctgttcaacgtgatcggtacctttgccgccagcagcgaagtcgatggctatcagatgttgaccaatatcgacgatgcttctcgcctgatgcgttacccccaggggaacattaccggctggcgtctgtggctgagtcagcctctgcaggtcgacacgctcagccagcagaaactgccggaaggcaccaaatggcaggactggcgagagcgaaaaggcgaactgttccaggccgtgcggatggaaaaaaatatgatgggcctgctgctgagcctgattatcgccgtggccgcctttaacatcattacttctctgggcatgatggttatggaaaaacagggtgaagtggcgatcctgcagaccctcggcctgacgccgcggcagatcatgctggtatttatggtccagggggccagcgccgggatcgtcggtgcgctgctcggcgccgggctgggcgcgctgcttgccagccagctcaataatttgatgccgattatcggcgcgttcctcgacggcgccgcgctgccggtggctattgagccgctgcaggtcatcgtcattgccctcgtggccatggcgctggcattactctctacgttgtatccttcatggcgcgctgccgccactcaacccgctgaggctttacgttatgaataa

SEQ ID NO: 254238 - DNA, 3567 bp, Klebsiella pneumoniae
atgacctttgcgatacgggttggcgaatcctggtcgatcgctgataatcagactattgaatatcagcgagttgccctccatatcggcagagcgaatcctcaagagatcatgataccgtctatgcctgaacaataccgatactctctgccggttaaagccggcgatcagcgccagcttggcgaactgaccggcgcggcctgcgccactctggtggctgaaatggccgagcgccacggcggcccggtggtactgatagcccccgatatgcagaacgccctgcgtctgaatgatgaaatcaggcagtttaccgacagcatggtagcaggcctggcggactgggaaacgctcccctacgatagcttctctccgcaccaggatattatctcttcacgtctcgccaccctgtaccagctcccgaccatggaacgcggcgtgctgatcgtcccggtcagcactctcatgcagcgcgtctgtccgcataatttcctccacggccacgcgctggtgatgaaaaaaggccagcggctgtcgcgggatgcgctgcgctcgcagctggatagcgccggctatcgtcacgtcgatcaggtcatggagcacggcgagtacgccacgcgcggcgcattgcttgatctgtttccgatgggcagcgagcagccctaccgtctcgatttttttgatgatgagatcgatagcctgcgtctgttcgacgtcgacagccagcgaacgctggaggaagtcgccagtatcaacctgcttccggcgcacgaattcccgaccgaccaggccgctatcgagctgtttcgcagccagtggcgcgaccgcttcgaggttaagcgcgacgccgagcatgtttatcagcaggtcagtaaaggcacgctgcctgcggggatcgaatactggcagccgctgttctttaacgaaccgctgccgccgctgttcagctatttcccggcgaaaacgctgatcgtcaacaccggcgatctcgaagccagcgccgaacgcttccagaatgaaacccgcgctcgctttgaaaatcgcggcgttgatccgatgcgtccgcttttgccgccggagcagctgtggctgcgcagcgatgaactgttcagcgagctgaaaaaatggccgcgcgtgcagctcaaaaccgaacgcctggcggagaaggccgctaatactaatctcggctaccaaaaattacccgagctggcgattcaggcgcagaacaaagcgccgctggataacctgcgccgattcctcgaatcctttagcgggccggtgattttctcggttgagagcgagggacgccgcgaagcactcggtgaaatgctggcccgcatcaagatcgcgccaaagcatattttgcgtcttgaagaggcaacggctaacggccgctatctgatgatcggcgccgccgagcatggctttattgatagccagcgcaacctggcgctgatttgcgaaagcgacctgctgggcgagcgcgttgcccgccgtcgtcaggattcacgccgcaccatcaatccggatacgttgattcgtaacctggcggagctgcatatcggtcagccggtggtgcatctggagcatggagttgggcgctatgccggaatgacgacccttgaagcgggcggcattaatggcgaatacctgatgctgacctacgccaatgacgccaagctgtacgtcccggtgtcctcactgcatctgattagccgctatgcgggcggggcggaagagaatgcgccgctgcataaactgggcggcgacgtctgggcgcgagcgcggcagaaagcggccgagaaagtgcgcgacgtggccgccgagctgctggatatctatgcccagcgcgcggcgaaagccggctatgcgtttaaacatgataaacagcagtatcagctgttttgcgacagcttcccgttcgagaccacgcccgaccaggcgcaggctattaacgccgtcctgagcgatatgtgccagcctctggcgatggaccgtctggtgtgcggcgatgttggcttcggcaaaacggaagtggcgatgcgcgccgctttcctggcggtcgaaaaccataagcaggtggcggtgctggtgccaaccaccctgctcgcccagcagcacttcgataacttccgcgatcgctttgctaactggccggtgcgtattgagatgctttcgcgctttcgcagcgccaaagagcaggcgcagatccttgagcaagtcgcggaaggaaaaatcgatattcttatcggcacccataaactgctgcagccggacgttaagctgcgcgatctcggtctcctgattgttgatgaagagcaccgctttggcgtgcgtcacaaagagcgcatcaaggcaatgcgcgccgacgtcgatatcctgaccctgaccgcgacgcctattccgcgcacgctgaatatggcgatgagcggtatgcgcgatctttcgatcatcgccacgccgcccgcccgccgtctggcggtcaaaaccttcgttcgcgaatatgacgcgctggtggtacgcgaagcgatcctgcgtgaggtactgcgcggcggccaggtttactacctctataatgacgtggaaaacatccagaaagccgccgagaggctggcggagctggtgccggaagcgcgcattaccatcggtcatggacagatgcgcgagcgcgagcttgagcgggtgatgaacgatttccatcaccagcgttttaacgtgctggtctgtaccaccattatcgaaaccgggatcgacatacccacggcgaacaccattattatcgagcgtgccgatcacttcggcctggctcagctgcatcagctacgcggacgcgttggccggtcgcaccatcaggcctatgcctggctgctgacgccgcatccgaaagcgatgactcccgatgcgcaaaaacgccttgaggctattgcatcgctggaagatctcggcgctggctttgcgctggcgacccatgacctcgaaattcgcggcgcgggcgagctgctgggcgaagatcagagcggttctatggaaaccatcggcttctccctctatatggagctactggaaaacgccgttgacgcgctgaaggccgggcgcgagccctcgctggaggatctcaccagccagcagaccgaagttgagctacggatgccgtcgctgctgccggacgactttatcccggatgtgaatactcgcctgtcgttctacaaacgcattgccagcgcgaagagtgagaatgagctggaggagatcaaagtcgaacttatcgatcgctttggcctgctgccggatccggcccgcaatctgctcgatatcgcccggctgcgccagcaggcgcagaagctggggatccgcaagcttgagagcaacgaaaaaggcggcaccattgagtttaacgagaagaataacgttaatccgatgtggctgattggcctgctgcagaagcagccgcagcactatcgactggatggcccgacgcgcctcaaatttacgcaggacctcgccgagcgtaaaacgcggatggactgggtgcgccagtttatgcttcagctggaagagaacgccaccgcttaa

SEQ ID NO: 254239 - DNA, 960 bp, Klebsiella pneumoniae
atgaagagcttttcacgactttctttctggctggggatgatggctatcgccgccgcgctggcgctgcccgctcgcgccaatacctggcccctgccgcctccgggcagccgtctggtcgggcagaaccagttccacgtggtcgaaaataacggcggctcgctggaagcgatcgctaagaagtacaacgtcggttttctggccctgcttcaggcgaaccccggcgtggatccttacgttccgcgagccggtagcgtactgaccatcccgctgcaaacgctgttgcccgacgcgacgcgggaagggttagtccttaacctggccgaacttcgtctctattactatccgccgggcaaaaatgaagtgaccgtgtaccctatcggcatcggccagctcggcggtgataccatcaccccaacgatggtcaccaccgtatccgacaaacgcgccaacccgacctggacgcctacggccaatattcgcgcccgctataaggcgatgggcattgacctgcctgccgtcatgcccgccgggccggataacccgatgggccaccacgccattcgtctggcagcgtacggcggcgtctacctgctacacggcaccaacgccgatttcggtatcggcatgcgcgtaagctccggctgtattcgtctgcgcgatgatgatatcaaagcgttgtacaatgaaattagcccgggcacccgagtgacgataatcaatacgcccattaaggtatccgttgagccgaacggtacccgtctggtagaagtgcaccagccgctgtcaaagcatattgacgacgatccgcagaccctgccgattacgctcactgacagcatgcaggcttttaaacaggcgcagttgaccgataccgaagtgatggatcgtgcaatgatgctgcgctccggtatgccggttgatgtgacccgtcaccctcgggccagcgaacagtcgctatag

SEQ ID NO: 254240 - DNA, 258 bp, Klebsiella pneumoniae
atgaaaaatgttaaaacattagccatcgccgctgttctcagctcgctctctttcgccagctttgccgctgttgaagttcaatccactccggcgggccagcataaaatcggtaccgtttccgcctctgctggcaccaacctgggttctctggaagatcagctggcgcaaaaagcggaagagatgggtgcaacctcttaccgtatcacttcagtaaccggtccaaatacccttcacggaaccgcggttatctataaataa

SEQ ID NO: 254241 - DNA, 552 bp, Klebsiella pneumoniae
atgacactcttctggcagcacggctatgaagccacctctctcgccgatctggtcgaggcgacgggcgcaaaagcgccaacgctttacgccgaattcgtgaataaagaggggttgtttcgggcggtgctggatcgctacatctcgcgttttgccgccaggcatgaggcgcttttgtttgacgacgagaaaaccgtcgatcgggccttgcgcgattatttcaccgccgtcgcgacctgcttcaccagcaaagagacgccggcaggctgttttatgatcaatacctctgcagcgctggcggcctcctcaaccgatatcgccactaccgtgaagtcgcggcacgcgatgcaggaacagacgctcactcattttctccagcagcggcagctgcgcggcgaactgccgccagacggcgatgttcatcagctggcgcagttcctgaactgtatactgcaggggatgtccatcagcgcccgcgaaggcgccgatttcactaaaatcatgcaaattgccgagatcacgctgcggttgtggccccaggttcttcagcgctaa

SEQ ID NO: 254242 - DNA, 2178 bp, Klebsiella pneumoniae
atgaacaagcgtctctgggtactcaacccactgctgctggcaaccgccctgcccgcctgggccgctgatgacaatatgatcgtcagcgctaaccgaacgcatcgcaccgtcgctgaaatggcgcagaccacctgggtcattgaaggccaggagattgaacaacaggtacagggcggtaaagaatttaaagacgtgcttgcgcagctgatccccggcatcgacgtcagcagccagggacgcaccaactacggcatgaacatgcgcggccgcgcgatcgtcgtcctgatcgatggcgttcgccttaactcctcccgtaccgacagtcgccagctggattcaatcgatccgtttaacattgaacacattgaggtgatctccggcgccacctcgctctacggcggcggcagtaccggtggtcttatcaatatcgtcaccaaaaagggacaacaagagcgtcaggtcgatctggaactgggaggcaaatccggctttgctaatagcaacgatcgcgatgaacgcgtggcggcagcggtcagcggcggtaccgaccacgcttccggtcgtttgtcggtcgcttatcagcgcttcggcggctggtatgacggtaaccacgatgcgctaatcctggataatacccagaccggcctgcagcattccgatcgcctcgacgtcatggggacgggaaccattgaaattgacgataaccgtcagctgcagctggttacgcagtattataaaagccagggcgacgattatggcctgtacctggggaaaaatatgtcggcggtgaccggcgacggcaaggcctttaccaccgatggtctgaactcggaccgcgtacccggcaccgagcgtcacctcattagcctgcagtattccgatgccgatttccttggccagaacctcgtcagtcaggtttattatcgcgatgaatccttgtccttttatcccttccctacgctgagcaaaggccaggttagcagcttctcatcctcaaaacaggataccgatcaatacggggcgaaagtcacccttaacagccagccgctggacggatgggacctgacctgggggctggatgcggaccacgaaacgttcaacgccaatcagatgttcttcgatctgaatcgatcaatgtcttccgggggcctgaataaccaggcaatctataccactggccgttatcccggctacagcattaccaacctggcgccgttcctgcagtccagctacgatctgaacgatattttcaccctcagcggcggcgtacgttaccagtggacggaaaaccgggtcgatgactttgttggctatgcccagcagcaggatgtcgccggcggtaaggtcagctcggcggatgccattccgggcggaaaaaccgattacgataacttcctgtttaacgccgggatcgttgctcatctcaccgaccgccagcaaacctggtttaacttctctcagggcgttgagctaccggacccggggaaatactacggcatcggcaagtacggcgcggcggtcaacggccatctcccgcttctctccagcgttaacgtcggcgactcgccgctgcaggggatcaaagtcaactcttacgaactgggctggcgctataccggtgataacctgcgcacccagctggcggcatactattcgacctccgataagacgattgtcgttaaccgtaccgacatgaccatcgacgtgcagtccgataaacgccgtatttacggccttgaaggggccgtagattacttcttcccgaatagcgactggagcgccggagctaactttaacgtgctgaaatctcaggtgaagagtgacggtagctggcagaagtgggacgtgacgctcgcctcgccgtcaaaagccaccgcctgggttggctgggcgcccgaaccgtggtcgctgcgggtacagagccaacaggtattcgatctcagcgatgccagcggcaataagcttgatggttataataccgtggactttatcggcagctacgcgctacctcttggcaaactgaccttcagtatcgagaacctgcttaatgaagattatgtcaccgtctggggccagcgcgcgccgctgctctacagcccaacctacggcagcagctctctgtacgaatataaaggtcgcggccgtacctttggcctgaactacgcgctgagcttctga

SEQ ID NO: 254243 - DNA, 540 bp, Klebsiella pneumoniae
gtgaataaatctatgttggcgggtatagggattggcgtggctgccgcgctgggcgttgcagccgttgccggtcttaacgtgttagatcgcggaccgcagtatgcgcaggtggtgtccagtacgccgataaaagagagcattaaaaccccgcgtaaggagtgccgaaacgtcaccgtcactcatcgtcgcccggtgcaggatgaaaaccgtatcgccggttcagtcttaggcgcagtggccggcggggtgattggtcatcagttcggcggcggccgcggccgcgacgttgccaccgtcgtgggcgcgctgggcggcggctatgctggtaaccagattcagggctcaatgcaggaaggggacacctacacaaccacgcagcagcgctgtaaaacggtgtatgacaaatcggaaaaaatgctcggctatgacgtcacttacaaaatcggcgaccagcagggcaaaatccgtatggatcgcgaccccggcgcgcaaatcccgctggacagcaatggtcaactgattctgactaacaaagcgtaa

SEQ ID NO: 254244 - DNA, 1305 bp, Klebsiella pneumoniae
gtgactacaccattgaaaaaaatagtgattgtgggtggtggtgccggtgggctggaactggctacccagctgggtaaaaagctgggccgcaataagaaagccaaaattacgctggtcgatcgtaaccacagccacctgtggaaaccgctgctgcatgaagtagcgactggttcacttgatgaaggtgtagacgcgctgagctacctggcccacgcccgtaaccacggcttccagttccagctggggtcagtggtagatattaaccgcgagaccaaaacgatcgcccttgctgaactgcgtaacgaaaagggtgagctgctggtacctgaacgtaagctgccttacgacacgctggtgatggcgctgggaagtacctctaacgatttcaatacgccaggggttaaagaaaactgcattttcctcgacaacccgcatcaggcgcgtcgtttccatcaggaaatgctggatctgttcctcaagtactcggcgaatcttggggcggacggtaaggtgaatatcgccatcgtaggcggcggcgcaaccggcgttgagctgtcggccgagctgcataacgcggtgaagcagctgcacagctacggctataaaggtctgactaacgaagctctgaacgtgacgctggttgaagccggcgagcgtattctgccggcactgccgccacgtatctccggcgcggcgcacaacgagctgaccaagctgggcgttcgcgttttgaccaaaaccatggtcaccagcgccgatgctaacggtctgcacacgaaagaaggcgaatttattaacgcggatctgatggtctgggcggccggcattaaagcgccggacttcatgaaagagattggcggcctggaaaccaaccgcattaaccagctggtggttgagccgacgctgcaaaccactcgcgacgaggatatctacgccatcggcgactgcgcctcctgcgcccgtcctgaaggcggttttgtcccaccgcgcgctcaggctgcgcaccagatggcgacctgcgctctgcacaacattctggcgcagatgaaaggtaaaccccttaaagcctatacctataaggatcacggttcgctggtgtcgctctccaactattccaccgtgggcagcctgatgggcaacctgatgcgcggttcaatgatgatcgaagggcgcattgcgcgtttcgtctatatctctctgtatcgtatgcaccagattgcgctgcacggttacttcaaaaccggcctgatgatgctggtagggcgtatcaaccgtattattcgcccgcgtctgaagctgcattaa

SEQ ID NO: 254245 - DNA, 1029 bp, Klebsiella pneumoniae
gtggctgtgggcccggtaatgttggatgtcgaaggttttgaactggatgcggaagagcgtgagattctggcgcatcctttggttggcgggctgatcctgtttacccgcaactatcacgatccggcgcagctgcgtgagctggttcgccagatccgcgaggcttcgcgcaaccatctggtggtggcggtcgatcaagaaggcggtcgcgtgcagcgtttccgcgagggctttacccgtcttcctgcagcgcaatctttcgccgccctgctaggcatggaagagggcggccggctggccgcagaagccggttggctgatggccagcgaaatgatcgctatggatattgatatcagctttgcgccggtgctggatgtcggacatatcagcgccgctattggcgagcgttcttatcatcaggaccccgacaaggcgctggcgatagctcgccatttcatcgatggcatgcacggcgcgggtatgaaaaccaccggcaagcacttcccagggcatggggcggtgacggcagactctcacaaagagacgccgcgcgatccgcgtgcggaagcggaaattcgcgcgaaagatatggccgtgttccgcacgctgatcggcgagcagcgtctggatgctattatgcccgcccacgttatttacagcgacgttgacccccgtcccgccagcggctccgcgcactggctgaaaacggtcctgcgcggcgagctgggatttgacggcgtaatattctctgacgatctgtcaatggaaggcgcggcgattatgggcagctatgccgaacgcggccaggcgtccctggatgcgggttgcgatatgatccttgtctgcaataatcgtaagggtgcggtcagcgtgctggataacctgtcgccgatcaaagcagagcgtgttacgaaattgtatcataaaggttccattagccgtcaggcgttaagggattccgcccgctggaagacaataagcgcgcagctggagcagcttcacgcgcgctggcaagaggcgaagtccgcgtaa

SEQ ID NO: 254246 - DNA, 819 bp, Klebsiella pneumoniae
gtgctgttcagcaacaataagctcacgcgcgacgaagtgctgtcgcgctttttcccccgctatacgcctgtcgccgcgctgtccgaaaccgggctgagcggcggcagctgtattctcagcgatggccggcgaaagcgggtgctgcgtcagccgcacgacccgcatgcgccgtcctgcgacttccgccgccagtaccgtgtgctttcccgccttcccaataccttagcgcctgcgccggttttttattctcccgcctggatggtggtggaatattgctctggcgacgtggtcaacgcattaccggagtgtccggcgctcgcagggttgctgtatcatctgcaccggcagccacgctttggctggcgtatcgcgctgcggccgctgcttgagcgttactggcagcagtgcagtcctgcgcgccgtacaccgctgtggctacggtggcataagcggctgcttcgccggggcgaaccgcagccgttacgtctggcgcccttacatatggatgtccatgcgggcaacattgttcgcggcgaggcgggactgcggctgattgactgggaatatgcgggcgatggcgatatcgcgctggaactggcggcggtgtggatcgaccccgttgcgcatcgccagcttaccgcagagtatgcgcgacaggcgcacattgatgagcttcagctctggcggcaaattcagcgctggcgcccttgggtgcggctgctgatggcgggctggtatgaacgacgctggcagcaaaccggcgaccggcagtttatcacgctggccgatgagatatggcgtcagttagacaaaaaataa

SEQ ID NO: 254247 - DNA, 636 bp, Klebsiella pneumoniae
atgattaaactatgtcgctatgcattagttaccgcactggcgatattccttgccggatgcgtgggtcaacgtcaggaacccgctcccgttgaggaagcgcagccgaagccgcagcagcctgttcagccgcagccgactgtgccgactattcccgtgataccgacccagccgggtccgattgaacacggcgagcagcctgcgcagccggcgccgcgcgtgcgtcattttgactggcactccgcggtgcagccgatgattgctcagatgctgcaggccagcggcgtaaatgcgggcagcattttgctggtcgacagcgtcaacaaccgcaccaacggcacgttgaatgcgggtgaagccaccacggcgctgcgtaatgcgcttgagggtaacggaaaattcaccctggtttcccagcagcagctgggcgtggccaaacagcagcttggcctgtcgccacaggatagccttggtagtcgcagcaaagcgatgggcattgcgcgcaccgttggcgcacagtatgtgctctattccaacgcaaccggcaacgtcaattcacctgagctgaaaatgcagctgatgctggtacaaaccggcgaaattatctggtcaggtaaaggtgctgttcagcaacaataa

SEQ ID NO: 254248 - DNA, 375 bp, Klebsiella pneumoniae
atgcgtgcagcccatttcggcgcattactggccgtgacattactggccgggtgcagttcgcatccggaaataccggtcagcgatcagcaaagtctggtgatggaatcaaacgtactggcagcaggaattagcgctgaagtaccaacggtaaccgcatccgagattcaggcgacggcaaccaccagattgttcaatgaacgccaggttccggtaaccgtgcattatcgctttttctggtatgacgccaggggactggaaatgcatccgctggagtctgcacgcagcataacggttcctgcgcactcttccgttacgctttatggcagcgccaatattctgggggcgcacaaggcccgactttatctttatctgtaa

SEQ ID NO: 254249 - DNA, 357 bp, Klebsiella pneumoniae
atggcagaagaaacgattttcagcaaaatcattcgccgggagatcccgtcggatgtggtttatcaggatgagctcgttaccgcttttcgcgatatctctccgcaggcgccgacccatattctgatcgttcccaatatcctgattcccaccgtcaatgatgtgaccgcagagcatgagctggctctggggcgcatgatgaccgtagcggcgaaaatcgcccgcgatgaggggctcgccgacgatggctatcgcctgatcgttaactgcaatcgccacggcggccaggaggtctatcatatccatatgcacctgctgggcggccgtccgttaggcccgatgctggctcataaaggttaa

SEQ ID NO: 254250 - DNA, 2184 bp, Klebsiella pneumoniae
atgtctctctccactcattcccgggatgggcgtaacgctccatccctgcttgcgatgggcatagcgctggcgctctccccaaaccttagccaggctgccggtcactccgaagacactattattgtagaaggttccgcagatagcgcttcggatacgcaagaacaggattacagcgtcaaaaccacctccgcagggacaaaaatggagatggcccagcgcgatatcccgcaatcggtcagtatcatcaccgaacaacggatgcgcgatcagcagttgcaaacgctgggtgatgtgatggagcacaccatggggatcagcagcagccaggcagattctgaccgcaccagctactactctcgtggttttgagatcgataactatatggtcgatggcattccgacctggtttgaatcccgctggaatctgggcgacgcgctttccgatatggcccttttcgaacgggtggaggtcgtccgcggcgcgaatggtctgctgaccggcaccggtaatcctgccgcgtcgatcaatatgatccgtaagcatgcgaccagccgcgagttcaagggaaatgtctctgcggagtacggcagctggaacaagcagcgctacgttgccgatatgcaaagcccgctaaccgaagatggcaacgtgcgggcgcgcattatcgctggttatcaaaataatgactcatggctcgatcgttacaacagcgaaaaaacgttcttctcggggattgtggatgcggatctcgcgacgtcgaccagtttatccgccggctacgagtatcagcgtatcaacgtcaatagcccgacatggggcggtctgccgcgctggaataccgatggcagcacaaaccgttacgatcgcgcccacagcaccgctccagactgggcctataacgacaaagagatcaataaagtcttcgttacgctgaaacaacgctttgccgatacctggcaggcaacgctgaacgccactcactccgaggtcaagttcgacagcaaaatgatgtacgtggatgcttacgtcaataaagcgaccgggatgctggaggggccttatagcagctacggtccgggctatgactacgtaggcggtaccggctggaatagcggaaagcgtaaagtcgacgccgtggatctgttcaccgacggcggctatgacctgttcggtcgccagcataatctgatgataggcggcagctacagcaagcaaaataaccgctattttagctcgtgggcaaacgtcttccccaatgagattggcagcttctacagcttcaatagcgctgggttcccggaaaccagctggggcccgcagagtctggcgcaggacgataccacgcgcatgaaatcgctgtatgccgcgacgcgtatttccctgcttgatccgctgcatctgatccttggcgtccgctataacaactggagcattgagacgctgacctacaacatggagaaaaatcataccaccccatacgccgggctggtttacgacataaacgacaattggtcggcctacaccagctatacctcggtcttccagccgcagaacaagcgcgatagctcgggtaagtatctgacgccgattaccgggaataactatgaagtgggcctgaagtcggactggatggacagccgattaaccacgactctcgcgatattccgcatcgagcaggataatctcggccaggcgaccggcgggcaaatccccggtagcaacggcgaagcagcctataaaaccgtcgatggaaccgtgagcaaaggggtggagttcgaaatcaacggtgcgattaccgataactggcagatgacctttggggcgacgcgttttgtcgctgaagataatgaaggcaatgcggtgaatcccaacctgccgcgaaccagcgtcaaactgtttaccagctaccgtctgccggtaatgcctgaactgaccgttggcggcggcgttaactggcagaaccgggtatataaagataccgcgacgccatacggcaccttccgtgcggaacagggcagctacgcgctggttgatttgttcactcgctaccaggtcactaaaaattttgctttgcagggtaacgtcaataacctgttcgataaaacctacgacaccaacatcgatggctcaattgtctacggcgaaccgcgcaacttcagcattaccgccagctatcagttctga

SEQ ID NO: 254251 - DNA, 1293 bp, Klebsiella pneumoniae
atggcagaagcgggcggttcagtcttcgctaacatgccgctgatttttgctatcggtgtcgcacttggcttcaccaataacgacggcgtatccgctctggcatcggtcgtcgcttacggcatcatggtgaaaaccatgtccgtggttgcgcctctggttctgcatttacctgctgaagagattgcggctaaacaccttgcagataccggcgtactcgggggtatcatctcgggtgccatcgcagcgtacatgttcaaccgcttctatcgcatcaagctgcctgagtatctgggcttctttgcgggcaagcgttttgtgccaattatctccggtctggcagcgattttcacgggcgtgatcctgtcctttatctggccgccgatcggtactgccatccagacgttctcccagtgggctgcttaccagaacccggttgtcgcgttcggtatctacggcttcattgaacgttgcctggtgccgtttggtctgcaccatatctggaacgtacctttccagatgcagattggcgaatacaccaacgcagcaggtcaggtcttccacggcgatattccgcgctacatggcaggcgacccaacggcgggcaaactgtccggcggcttcctgttcaaaatgtacggtctgccggctgccgctatcgctatctggcactctgctaagccagaaaaccgcgcgaaagtgggcggtatcatgatctccgcagcgctgacctcgttcctgaccggtatcaccgagccgatcgagttctccttcatgttcgttgcgccgatcctgtacattatccacgcgattctggcgggcctggccttcccgatctgtatcctgctgggtatgcgtgacgggacgtcgttctctcacggcctgatcgactttatcgttctctccggcaacagcagcaagctgtggctgttcccgatcgtcggtatctgctacgcgatcgtgtactacgtggtcttccgcgtgctgattaaagcgctggatctgaaaaccccgggtcgcgaagatgcaaccgaagacagcaaagctggcgcgaccagcgaaatggctccggcactgatcgctgctttcggcggtaaagagaacattactaaccttgacgcatgtatcactcgtctgcgcgtgagcgtggcggatgtggcgaaagttgatcaggctggcctgaaaaaactgggcgccgcaggcgtggttgttgcaggttcaggcgttcaggctattttcggtactaaatccgataacctgaaaactgaaatggatgaatacatccgcaacagctaa

SEQ ID NO: 254252 - DNA, 1242 bp, Klebsiella pneumoniae
atggctcgcggcgtgacgccgcgggtgatggatacccgcgttgcgccggcggggctggataaactgccggaagctgttgagcgctatgttggcggtcttaatgaagactggctgttgacggcagacctgattgtcgccagtccgggtatcgctctggcgcatccttccctgagcgccgcggcggatgctggggtggaaattgtcggcgatatcgaactgttttgccgcgaggcgcaggcgcctgtcgttgcgatcaccggctctaacggtaaaagcaccgtgacttccctcgtgggagaaatggcgaaagcagcgggtatgaacgttggcgttgggggcaatattggcctgccggcgctgatgctgctggatcctgaacgcgaactctatgttctggagctttcaagcttccagctggaaactacctccagcctgcgggcggtagcggcgacgatcctgaacgtcaccgaagatcatatggaccgctatccgctggggcttcagcagtaccgcgccgccaaactgcgaatttacgagaatgcgcgggcctgtatcgtcaatgccgacgatgcgttaaccatgccggtacgcggcgcggacgagcgctgcatcagcttcggcgttgacgttggcgactatcacctgaaccgccagcagggcgaaacctggctgcgcgtcaaaggcgaaaaagtgcttaacgtcaaagagatgaagattagcggccagcacaactacagtaacgctcttgcggccctggccctggctgacgccgcgggtttgccgcgcgccagcagcctgaaagcgctaaccacattcaccgggctggcgcatcgtttccaactggtgctggagcacaacggcgtgcgctggatcaacgattctaaagccaccaacgtcggcagtaccgaagcggcgctcaatgggctgcatcttgatggaacgctctatctgctgctgggcggagacgggaaatccgctgatttcacgccgttaagccgttacctgaccggcgacaacattcgcctgtactgcttcggacgcgacggcgcgcagctggcggcgctgcgcccggatgtcgctgtgcaaacggaaacgatggagcaggcgatgcgccagattgcgccgcaggttgtcccgggcgatatggtgctgctgtctcccgcgtgcgccagcctcgatcagtttaaaaactttgaacaacgcggcgacatctttgctcgcctcgcgaaggagttaggttga

SEQ ID NO: 254253 - DNA, 1260 bp, Klebsiella pneumoniae
atgcgtttatcactcccgcgcctgaaaatgccacggctaagactgccgcgtctgccgggaatgtttattttcgcatggctgttcgccgcgctgaaaggctgggtgatgggctcgcggcaaaaagataccgatagcctggtgatgtatgaccggatgctgctgtggctgacttttggcctggccgcaatcggcttcatcatggtgacctcggcgtcgatgccggtaggccagcgtctggcgaacgatccgtttctgtttgccaagcgcgatggcttatacattctgctggcgctagggctggcgatggtgacgctgcgcctgccaatggagttctggcagcgccacagtaccgcaatgctgattgcttctatcgtcatgctgctgattgttctggtggtcggcagctcggttaacggggcctcgcgctggattgcgctggggccgctgcgtatccagcctgcggagttcaccaagctgtcgctgttctgctacatcgccaactaccttgtgcgtaaaggcgacgaagtgcgtaacaacctgcgcggcttcttaaagccgatgggtgtgattttcgtgctggcgattttactgctggcgcagcctgacctcggtaccgtcgtggtgctgtttgtcacgactctggccatgctgttccttgcgggggccaagctgtggcagtttatcgcgattatcgggatggggctttcggcagtcgtactgctgattctggctgaaccgtaccgtattcgccgcgtgacctctttctggaacccgtgggaagatccattcggcagcggctaccagctcacccagtcgctgatggcctttggccgcggcgaaatgtgggggcagggcctgggtaactcggtccagaagctcgaatatttgcccgaggcgcacaccgatttcatcttcgccattatcggtgaagaactcggttatatcggtgtggtactcgcacttttaatggtattcttcgtcgcttttcgcgccatgtccattggccgcaaagcgctggagattgaccaccgtttctccggttttttggcctgcgccattgggatctggttcagctttcaggcgctggttaacgtcggtgcggcagcgggaatgctgccaactaaaggcctgacgctgccgctgatcagctacggtggctcgagcctgctgattatgtcgacggccatcatgttgctgttacgaattgattatgaaacgcgtctggaaaaagcccaggcgtttacacggggtgttcgatga

SEQ ID NO: 254254 - DNA, 408 bp, Klebsiella pneumoniae
atggtgatggcgggcggtaccggaggacacgtgttcccggggctggcggttgcgcaccatttaatggaccagggctggcaggttcgctggctgggtaccgcggatcgtatggaagcggatttagtgccgaagaacggcattgaaattgacttcattcagatttccggcctgcgcggcaaaggcctgaaggcgcagctgctggcaccggttcggatattcaacgcctggcgccaggcgcgggcgattatgcagcgttttcaaccggacgtggtgctgggaatgggcggctatgtgtccggccccggcggactggcggcatggtcgctggggatcccggtggtcctgcatgaacagaacggaattgccggtctgacgaataagtggctggcgacaattgccaaaaagtga

SEQ ID NO: 254255 - DNA, 1476 bp, Klebsiella pneumoniae
atgaatacacaagatctggcaaaactgcgttccatagtgcccgagatgcgtcgcgtccggcacattcactttgttggcattggcggtgccggcatgggcggtattgccgaagttctggccaatgaaggttatcagattagcggctccgacctggcgccgaatccggtgacccaacagttgactcagcttggcgccacgatttatttcaatcatcgccctgaaaacgtgcgcgatgcgagcgttgtcgtggtttccagcgcgatttctgcggataacccggaaatcgtcgccgctcacgaagcgcgtattccggttattcgtcgcgctgaaatgctggcggaactgatgcgttttcgccacggcattgccattgccggcacgcacggcaaaaccacaactacggcgatggtctcaagtatttatgcagaggctggacttgatccgaccttcgtgaacggtggtctggtgaaagccgctggcgtgcatgcgcgccttggacacagccgttacctgattgccgaagcggatgaaagcgacgcctcgttcctgcatttacagccgatggtcgctatcgtgaccaatatcgaagccgatcatatggatacctaccacggcgacttcgaaaacctgaagcagacgtttatcaacttcctgcataacctgccgttctatggacgcgcggtgatgtgcgtggacgatccggtgattcgcgagctgctgccgcgcgttggtcgccagctcaccacctacggttttagcgatgatgctgacgttcgcgtggaagagtatcgtcaggtcggcgctcaggggcatttccgcctggtccgtcaggataaagacgtcattcaggtgacgctgaacgcaccgggtcgccacaacgcgcttaacgcagcggcagcggtggccgttgcgacggaagagggcattgatgatgaagcgatcctgcgcgcgctggaaagtttccaggggaccgggcgtcgttttgatttcctcggcgaatatccgttagctgaggttaacggtaaaacgggaaccgcgatgctgatcgatgattatggccaccatcctacggaagtggatgccactatcaaagcggcgcgagcgggctggccggataaaaatctggtgatgttgtttcagccgcaccgttttacccgtacgcgcgacctgtacgacgattttgccaacgtactgacccaggttgatgctctgctgatgctggacgtttattctgctggcgaagccgccattcctggcgctgatagccgctcgctgtgccgtacgattcgcggccgcggaaaagtcgacccgattctggtttccgatccggcgcaagcggcagagatgctggcatcagtattgaccggcaacgatctggtgctggtgcagggggcgggaaatatcggtaaaatcgcccgtcacctggcggaaatcaaattgcaaccgcaaaaaacgcaggaggagcgccatggctga

SEQ ID NO: 254256 - DNA, 921 bp, Klebsiella pneumoniae
atggctgataaaatcgcggtcctctttggcggaacctccgctgaacgtgaagtctctctcaattcaggttctgcggtgctcgccggcctgcgtgaagccggcgttgatgcgcacccggtcgacccgcgcgacgttgatattacccaattgaaaaacatgggctttaagaaagcgtttattgccttgcatggtcgcggcggtgaagatggtacgttgcaggggctgctggagctgattcagcttccctacaccggtagcggggtgatggcttcagcgatctcaatggataagctgcgcagcaaattactgtggcagggcgccggactgccggttgcgccgtgggttgcgctaacccgtaaacagttcgaggcagggctttctgctgacgttgaacagcaactcctggccctcggactgccgctgattgttaagccgagccgggaaggctccagcgtcggtatgtcaaaagtcagcgaaagttgcgcattacaaaatgcattggcgctggcttttcagcatgatgatgaagttctgattgaaaaatggctcagtggcccggaatttaccgtcgctatggttggagaagaaattttgccgtcaatacgtatccaggcggctggaaccttctatgattatgaagcaaagtatctctctgatgagacgcaatatttctgcccaggcttcgaagatcccgcgcgtgagtcagaaatccaggctctggtgcaaaaagcctgggatagccttggctgcaagggatggggaagaattgacgtgatgctggacagcgatggccagttttatctgctggaagctaacacctctcctggcatgaccagccatagcctggtgccgatggcggcgcgtcaggcagggatgagcttctcgcagcttgttgtacgaattctggacctggcggggtga

SEQ ID NO: 254257 - DNA, 834 bp, Klebsiella pneumoniae
atgtcgcaggctgcgctgaatacgcggaaccacgaagaggaagaagaatcttcttcgcgtcgaagtaatggctctcgtctggcaggtattttcttcctgctggcggtgctctgtaccgtgctggtcagcggctggatggttctgggctggatggaagatgcacagcggttaccgctgtcgaagatggtcgtcaccggagagcgtcactacacgcgcaacgatgatatccgtcaggcgatactggcattggggtcgccgggcacctttatgactcaggacgtcaatattattcaaagccagattgaacgcctgccgtggattaagcaggcgagcgtcagaaagcaatggccggacgaattgaagattcatctggttgaatatgtgccgattgcgcgctggaatgatcagcatatggtagacgtcgaaggcaattctttcagcgtgccgtcagatcgcaccagtaaacagaatttaccgatgttatacggcccggaaggtagtgagaacgaagttcttcaggggtaccgtgacatggggcaggtgctggcaaaggataaattcacgttgaaagtggcggcaatgaccgcgcgtcgctcctggcaattgacgcttaataacgatattaagctcaatcttggccgaggcgacaccatgaaacggcttcagcgctttatggaactctacccggttcttcagcagcaggcgcagaccgacggcaaacggataagctacgttgatttgcgttatgactcgggagcggcagtcggttgggtaccggttcccgcagaggaaactaatcaacaacagaatcaggcacaggcagaacaacaatga

SEQ ID NO: 254258 - DNA, 1257 bp, Klebsiella pneumoniae
atgatcaaggcgacggacagaaaactggtagttggactggagattggcaccgctaaggttgccgctttagtaggggaagttctgcccgacggtatgattaatatcattggcgtgggcagttgcccatcgcgtggtatggataaaggcggagtgaacgacctggaatccgtggtgaaatgcgtacagcgcgccattgaccaggctgaactgatggcggattgccagatctcgtcagtctatctggcgctttcaggcaagcatatcagctgtcaaaatgaaattggtatggtgccgatttctgaagaagaagtcactcaggatgacgtcgagaacgtggtgcataccgccaaatcggttcgcgtgcgcgatgaacaccgcgttctgcacgttattccgcaagagtacgctattgactaccaggaggggataaaaaaccccgtcggcctgtctggcgtacgtatgcaggcaaaagtgcatttgattacctgccataacgatatggcgaaaaatattgtcaaagcggtggagcgctgcggtctgaaagtcgaccagctcattttcgccggtttagccgccagctattccgtattaacggaagatgaacgtgaactgggtgtctgcgtggtggatatcggcggtggtacaatggatatcgcggtgtataccggcggcgcgctgcgtcataccaaagtgatcccttatgcggggaacgttgtgaccagcgatattgcttacgctttcggtacgccgccgagcgatgccgaagccattaaagtgcgccacggctgcgcgctgggctccatcgttggtaaagatgaaaacgtcgaagtgccgagcgtgggtgggcgtccaccccgcagcctgcagcgtcagactctggcagaggttattgagccgcgttataccgaattgctcaacctcgtgaatgaagagattctgcaactgcaggaacagcttcgtcagcagggcgtcaagcatcatctggcggcagggattgtattaaccggcggtgcggcgcaaattgaagggcttgccgcctgtgcgcagcgcgtgtttcacacgcaggtgcgaattggcgcgccgctgaacattaccggattaacggattatgcccaggaaccgtattactcgacggcggttgggctgctgcactacgggaaggaatctcatctcagtggtgaagcagaagtggaaaaacgcgtaacggtcgggtcgtggatcaaacgactcaacagttggttgcgaaaagagttttaa

SEQ ID NO: 254259 - DNA, 1152 bp, Klebsiella pneumoniae
atgtttgaacctatggaactgaccaacgacgcggtgattaaagtcatcggcgtcggtggcggcggcggtaacgccgttgagcacatggtgcgcgagcgcattgagggtgttgaatttttcgcggtgaacaccgacgcgcaggcactgcgcaaaacggctgttggccagactatccagatcggcagcggtattaccaaggggctgggcgcaggcgcaaacccggaagtgggccgtaacgcagcggatgaagaccgtgaagcgctgcgtgccgctcttgatggcgccgacatggtgtttatcgcagcaggtatgggcggcgggaccggaaccggtgctgcgcccgtggttgctgaagtcgccaaagatttaggcatcctgaccgttgccgtcgtgactaagccgttcaattttgaaggcaagaagcgtatggcattcgccgagcagggtatcaccgagctgtccaagcacgtggattctctgatcaccattccgaacgataagctgctgaaagttctgggtcgcggtatttcgctgctcgacgctttcggtgcggctaacgacgtgctgaaaggcgcggtgcagggtatcgctgaactgattacgcgcccaggcctgatgaacgtcgactttgcggacgtacgtaccgtgatgtctgaaatgggctatgcgatgatgggctccggcgtagcgagcggtgaagaccgtgcggaagaagcggctgaaatggctatctcttccccgctgctggaagatatcgatctgtccggcgcccgcggcgtcctggttaacatcaccgctggcttcgatctgcgtctcgatgagttcgaaaccgtgggtaacacgatccgtgcatttgcttcggataacgcgaccgtggttatcggtacctctctggacccggatatgaacgacgaactgcgcgtaaccgtggttgccactggtatcggtatggacaaacgtccggaaattaccctggtcaccaacaagcaggttcagcagccggtgatggatcgttaccagcagcacggcatgtccccactgaatcaagagcagaaaccggtttcgaaagtggtaaacgacaatacgccgcaaaccgcaaaagagccggattatctggatattccagccttcctgcgtaagcaagccgattaa

SEQ ID NO: 254260 - DNA, 918 bp, Klebsiella pneumoniae; identical to SEQ ID NO: 172583

SEQ ID NO: 254261 - DNA, 510 bp, Klebsiella pneumoniae; identical to SEQ ID NO: 172582

SEQ ID NO: 254262 - DNA, 393 bp, Klebsiella pneumoniae
atgaaaacactacagatttccgtcggtattatccgcaatgcgcgaggcgaaattttcatcacccagcgagctgccgacgcgcatatggcgaataagcttgaatttcctggtgggaaaattgaagagggcgagtcgtcagagcaggccttagtgcgtgaactacaggaagaagtaggtattacagtgagagcttccagcctgttcgataagctggagtatcagtttcccgaccgtcatataacgctgtggttctggctggtggaaagctgggatggcgagccgtgggggaaagaggggcagccagggcgctggatagcgcaaagcgcgctcgtcgccgaagattttcctccggcaaatgaacccgtgatagcaaaactagcgggcgggaggtaa

SEQ ID NO: 254263 - DNA, 195 bp, Klebsiella pneumoniae
atgtcagaagagataaccgttaattgcccaacctgcggcaaaattgtgatctggaatgagcagagtccacatcgtccgttctgctccaaacgctgtcagctcattgatttaggcgaatgggcagcggaagagaaacgcatcccgagcagcagcgatctgtcagatagcgatggctggagtgaggataaagagtaa

SEQ ID NO: 254264 - DNA, 744 bp, Klebsiella pneumoniae
atgcatacccctgttctttttgaacatccgcttaatgaaaagatgcgcacctggctacgcattgagtttttacttcagcagttatccgttcatccggcgattaccactcatgcggatgcgctgcatttcttccgcaatatcggcgatcttttagatgttttagaacgcggtgaagtccgtaccgatctgatgaaagagctggatcgccaacagaggaaactgcaatcctgggcagaagtaccgggggtcgatcaggatcgcatcaatgaattacgccagcagctaaaacaatccggcagcacattaatgtccgccccgcggatcggccagtatctgcgagaagaccgtctgatcgccctggtgcgccagcgcttaagcatcccaggtggctgctgtagctttgacctcccgacgctgcatatctggctgcatatgccgcaggcataccgcgatgagcaggtcggtaagtggctgaccagccttgaacctttaacgcaatccttgctgcttgttctcgatctcatccgcaactcggcacctttccgtaagcagaccagcctgaacggtttttatcaggacaacggcgaggacgccgacctgctgcgtctgcgcctggatcttgccagccagctctacccgcaaatttcaggtcataagagccgttttgccatccgctttatgccgctggacagcgagcacggtattgtgccggaacgttttgattttgaactggcctgctgttaa

SEQ ID NO: 254265 - DNA, 621 bp, Klebsiella pneumoniae; identical to SEQ ID NO: 172577

SEQ ID NO: 254266 - DNA, 1044 bp, Klebsiella pneumoniae
atgcgtattgaagaagatctgaagcttggttttaaagacgttcttattcgcccgaaacgctctaccctcaaaagccgttctgacgtacagctggaacgtgaattcactttcaaacattctggccagacctggtctggtgtgccgatcattgccgccaacatggatacggtgggctcgtttgctatggccaaagcgctggcttcttttggcgttctgactgcagttcataagcattacagcgttgaacagtggcaggcgtttgttcagggcgtttctgcggatgtcctgcagcatgtcatggtctcaaccggcacttccgatgcggatttcgaaaaaacgaagcagatactgctgcagaacccgcagctaagctttgtgtgcattgatgtggcgaatggttactccgagcacttcgtgcagtttgtggccaaagctcgcgaagcctggccgcagaaaactattattgcgggtaacgttgtgaccggtgaaatgtgtgaagagctggttctttctggcgccgatattgtgaaggttggtattggtccggggtccgtatgtacgactcgcgtaaaaactggcgtcggatacccgcagctttccgccgtaattgaatgcgccgacgcggcgcacggcctgggcgggcagattatcagcgacggcggttgtactatgccgggcgatgtggctaaagcattcggcggcggcgcggatttcgtgatgcttggcggtatgctggccggtcacgaagaaagcggcggtaccgtagttgaagagaacggcgaaaaatttatgctgttctacggtatgagctccgagtcggcgatgacccgtcacgttggcggcgtagcgcagtatcgtgcggctgaaggcaaaaccgttaagctgcctctgcgcggcccggttgaaaataccgcgcgcgatattcttggcggcctacgttccgcatgtacctacgttggtgcttcacgcctgaaagaattgactaaacgcacgacttttattcgcgtacaggaacaagagaaccgcgtgttcaacagcctgtaa

SEQ ID NO: 254267 - DNA, 1206 bp, Klebsiella pneumoniae
atggcgactaaacgactctggcgctggcacggtatcgatggtcaggggatgccctgccagggaacgctctggcaggataatcgccctgaggcattgcaaagcctggagcgagagcgaatcatcccgcttacgctgcgccgctgtagtgtgcaaaagtccctctggcatccacgctacagcggtgaggttattcgccagctggccgcccttctccaggccggtcttccccttgctgaggggcttggactgctggcgcagcagcagcctaacgcgcagtggcaggcattgctacaaaccctggctgaggatctggcgcaaggcatttcgctttcaggctcccttgaaaaatggcctgaagcttttcctccgctttatctggcaatgatccgcaccggagaacttaccggtaaactggagctatgctgcgcgcagttagctcatcaacagcgagaacagctactgcttagtgaaaaagtcaaaaaggccctgcgctatccactgattattttgtccctggcgctactggtggtgatgggaatgctgtgctttgttttgccagagtttgctgccatttatcaaaccttcaataccccgctaccgctgctgacccgcgcggtcatgggcattggcgaagggttaactcactattggccattgctcgctgcgctgctcgttttacctgcgatactcaaccgactgatttgccagaggcccgactggctgctgtatcgtcagaaacttctccataagctgccagtgtttggcaaactgctgtgcggtcagcggcttagccagatatttaccgtactcgcattgacgcaaagcgccggtatcagctttctgcagggcctgcaaagcgtggaagaaaccctgagctgtccgctatggcgacaaaggctgcagcaggtttcccggcaaatcactcacggcgcgcccatctggcaggcgctcactgacagcggaggattcacgccgctctgtttgcaactgatacgtatcggtgaagcttcgggttcgctggataccatgctggaaaatctggctcaccatcacagtgagcagacgcaacagcaggcggataacctggccaccttactggaaccgatgatgctggtcgttaccggaacgattgtcggcgtgctggtagtcgcgatgtatttacccatttttcatctgggcgacgccattagcgggatggggggatag

SEQ ID NO: 254268 - DNA, 1386 bp, Klebsiella pneumoniae
atgaaaactgaacaattaatacctctctgccagcgctatcacgccttgctgcttgacagcaatgaacacactatcgctatcgccgtggttgattcccctgccccggagctgctggaggcgctacgttttgcgactcagaaaaggattgatatcgaatgctggagccaggatcggatggacaagcggctgcaggcaccgggaatagcaacgcttgccccgcctgtcgaagcgtcagccagcatcgttgaacaggtcaataatcttctggaacaagctctgcgccagcgcgcatcggatattcatatcgaaccaggcgaacagcaactgagaattcgcctgcgggtagatggcgtactacattctctgacgccgctggccccggaacttgccgcacctattaccgcccggcttaaggtgctcggcaatctggatattgccgaacatcgaacgccgcaggacggccagttcacccttacgctctcagatcgtccgatctcgtttcggatcgctacgcttccctgccgtggaggagaaaaaatcgttcttcgcctgttacaccaggtcgagcagacgctggacctcgaagcgctagggctctcttcacaacagcttgccgcctttcgttcggcgcttaaccaacctcagggactgatactggtcaccggtccgacgggaagcggaaaaaccgtcactctttatagcgcgctgcaggcgcgaaatcgtgatgaggtcaacatctgtagcgtggaagatccgctggagatccccatcgtgggaatgaatcaaacgcagattaacccacgcgcggggctcacttttcacagcgtactgcgcgccctgctacgtcaggatcccgatatcgttatggtgggagagatacgcgatgctgaaacagcggaaattgcgataaaagcagcgcaaaccgggcatctggtactctcaacgttacacaccaattcaacgtgtgaaacgctggttcgcctgcagcagatgggcgttgcgcgctggatggtctcatccgcgctctcgctggttgtcgctcaacgcctggtacggaaactgtgcccgcactgccgccgtgaaaccggcagttcgaccaacgtcccgcatagcctgtggccgcgatcgcttcctcagtggcaggctccgggctgccagcactgctatcacggctactacggtcgcctggcactcttcgaactgctgccggttaataccgcactgcggcaggcgattacccagggccttagcgctgaggaaatcgaaacgctggcgcgggaatccggcatgatgacgctgtttgagagcggctgtctggctgtagagcgtgggatgacaagtctggaagaagtggtacgcgttttagggatcccgcatggcgactaa

SEQ ID NO: 254269 - DNA, 432 bp, Klebsiella pneumoniae
atggacaaacaacgtggttttactttaatcgaactgatggtggtcatcggaatcatcgcgatactcagcgcaatcggcattccggcttatcagaactacctacgaaaagcagcgcttaccgatatgctgcaaaccttcgtccctttccgcaccgccattgagctttgcgcgcttgagcacggcggcataaccacctgcgatggcggtagcaacggtatcccttcgcccgcgactactcgctatgtctcggccatgaccgtggcggcaggcgttgtcacgctcaccggacaggagagtctcaatggcttaagcgtcacgatgacgccgaactgggataacgctaacggcattaccggctggcagcgcgtgtgcaatattaccggtgatagcgcactcaagcaggcctgtgaagacgtgttccgttttaactga

SEQ ID NO: 254270 - DNA, 894 bp, Klebsiella pneumoniae
atgacgcctcgtcgctacaatcccgaccgccgccgtgacgcgctgctggagcgtattaatcttgatattaccgatgccgtggcccaatccctgcgggaagatttaggcggcgaagtggatgccaataatgacattagcgcccaattgttgccgcaggacgcacgctcgcacgcggtagtgatcacccgtgaagacggcgtattttgtggtaaacgctgggtggaagaggtctttattcagcttgcgggcgatgatgttaacttcacctggcatgttgccgatggcgatgcggtaaaagccaatcagccgctgttcgagctggaaggcccttcgcgtattttgcttaccggcgaacgtaccgcgcttaatttcgtgcagacactctccggggtggcaagcgaagttcgtcgctatgtcgacctgctggccggcactaaaactcagctgctcgatacgcgcaaaacgctgcctggactgcgcacggcgctaaaatatgccgttctttgcggcggcggcgccaaccatcgtctgggtctctccgatgcctttctgattaaagagaaccatattatcgcctccggctcggtacggcaggcagtagaaaaagcgttctggctgcacccggatgttccggtagaagtcgaagttgaaaaccttgaagagctggatgaagcgctgaaagccggtgccgacattattatgctcgataacttcactaccgatatgatgcgcgaggcagtcaaactcaccaatggccaggcagcgctggaagtctccggcaacgtcacattcgacaccattcgtgaattcgctgaaaccggcgtcgattacatttccgtaggcgcattgaccaagcacgtccgcgctcttgatctctctatgcgtttccgctaa

SEQ ID NO: 254271 - DNA, 552 bp, Klebsiella pneumoniae; identical to SEQ ID NO: 172571

SEQ ID NO: 254272 - DNA, 855 bp, Klebsiella pneumoniae
atgacgttgttcactacgctgttagtacttatagccgagcgtttgtttaagcttggcgagcactggcagctcgatcaccggctggaagtgctgtttcgccgggttaagcattattccctgctgaccaccctactgatgacggcagcggcggcggtggtcgtgtatgttattcagcgcctgctgcaagggcagctgtttaacgttcctttgctggtgttctggatcctgcttggtttgctgtgtattggcgcaggtaaagtgcgtttgcactatcacgcctatctgaaagccgcggcgcgcgacgatagccgcgcctgcgatgcgatggccagcgagctcaccctgatccacggcgtgccgcccggctgcgaccagcgtgaatatctgagcgagctgcaaaacgcgctgctgtggattaactaccgctactatctcgctccgctgttctggttcgttgtcggcggaccgtgggggccgctaactctggtggcctattgtacgctgcgggcctggcagacctggctggcgcgttatcagacgccgcgtcatcgcttacagtcggggattgacggcattttgcacgtagtcgactgggttccggtacgtctggtcggcgtggtctacgcgctgattggacacggggaaaaggctttgcctgcgtggtttgcttcgctgggcgaccgccactcttcgcagtatcaggtgctgacgcgcctggcgcagtattcacttgcgcgcgagccgcatgtggataaagtggcaacgccgaaggcggcagtctcaatggcgaaaaaaacatcgctggtggtggtcgtgattatggcgctgctgacgatttacggtacgttgatttaa

SEQ ID NO: 254273 - DNA, 951 bp, Klebsiella pneumoniae
atgaaaaactggccgaacccatttattgaacaacgcgcggacccttatattctgcgccatcaggatagctactactttatcgcctcggtaccggagtatgaccgtctggaaatccgtcgctcagccacccttgaaggcttgcgcgacgcgcagccggtggtcgtctggcgtaagccggacaacggcccaatgagccagctcatatgggccccggagctgcataaaattaacggcaaatggtatatctactttgccgccagccacacgcacgatctggatgcgctgggtatgttccagcaccgcatgttcgcgctggaatgcgcggacagcgacccgttaaccggtaaatggcaggaaaaaggccagattaaaacgccgcttgatacctttgcgctggatgccacgactttccgccatcagggtaagcagtggtatctatgggcgcaaaaagatcctgaaattaaaggcaataccaacctctatctggctgaactggaaaatccgtggacgctaaaaggtcagccggtcatgctgagtcaacccgagttcgactgggagtgccgaggttttctggtgaacgaaggcccggcggtactgttccatggcgacaagctgttcgtcagctattccgccagcgccaccgacgaaaactactgcatgggcctactgtggatagccgtcagcgccgaccctctccgcccggaaaactggcataaagcgccgcagccggtatttcgtaccagctatgagaatcgtcagtatgggcccggccacaatagctttacgcaaacaccggagggagaagatgtgctggtgtaccatgcgcgcaactacaccgaaatcgaaggcgacccgctgtatgatccgaatcgccatacgcgcctgaagctgattcgctggcaagaaaacgggatgcctgattttggcatcccggcagcagagacgaattaa

SEQ ID NO: 254274 - DNA, 1407 bp, Klebsiella pneumoniae
atgaatggcaataagctttcagttaaagagaaaataggctacggaatgggcgatgccggatgtaatattatcttcggcgccatcatgttgtttgttaactatttttatacggatatttttggtctcgcaccggcgctggtcggggtgcttctgctttccgtacgcgttattgatgccgtgaccgacccgattatgggggcaatggcagaccgtacccgcagcaaatatggccgttttcgcccttggctcctgtggatcgctttcccgtacgcgctgttcagcgtcctgatgtttaccaccccggaatggacgtacaatagcaaggttatctatgctttcgtcacctacttcctgctctctctgacctacaccgcgatcaacatcccctactgctcattgggtagcgtgattacgaacgacccgcaggaacgcgtggcctgtcagtcatatcgtttcgtattggtcggcatcgctaccctgttgctctccctgacgctgctgccgatggcggactggttcggcggcgaggataaagccaaaggctaccagatggcgatgaccgtgctggcgattatcggtatgtgcatgttcctgttctgcttcgccaccgtccgtgaacgcgtaaaacccgcagtccagaccaacgacgagctgaaaaaagatctaaaagacgtctggaaaaacgaccagtgggttcgcatcctgctgttaacgctgtgcaacgtctgtccgggctttatccgtatggccgcgaccatgtactacgtcacctgggttatgcagcaaagcacccacttcgccacgctgtttatcagcctcggggttgtcggaatgatgatcggcagtatgctggctaaagtcctgaccgaccgctggtgcaaactgcaggtgtttttctggaccaatatcgtcctggcgattttctcctgcgcgttctatttcttcgacccgcacgccaccatgatgattatggtgctctacttcctgctgaacattctgcaccagatcccgtcgccgctgcactggtcgctgatggccgacgttgatgactacggcgaatggaagaccggtaagcgcatcaccggcatcagcttctccggcaatctgttcttcctgaaagtcggcctggccatcgccggcgcgatggttggcttcctgctatcctggtacggttacgatgccggcgcgaagcagcaaagcgcttccgcgattaacggtatcgtattgctgttcagcgttatccccggcgtcggctatctgattaccgccggcgtggtgcgtatgctgaaggtaaaccgcgaatttatgcggcaaattcagtccgacctcgaaaaacgtcggattaactacagcgagctcaacgactatcaggaactgaaaaccggcgaacatgtaaggaaagcataa

SEQ ID NO: 254275 - DNA, 1368 bp, Klebsiella pneumoniae
atggaaggtcaacagcatagcgatcggctaaagcgcggccttaaaaaccgccacattcagcttattgcgctgggaggcgctatcggtaccggtttgtttctgggtagtgcatccgtcatccaaaatgcaggtcccggtattattctgggctacgcaattgccggtttcattgccttcctgatcatgcgtcagctgggcgagatggtggtagaagagccggtagccggttcatttagtcatttcgcctataaatactggggcggctttgcgggctttgcttccggatggaactactgggttctctacgttctggtggccatggccgagctgaccgcggtcgggaaatacgttcagttctggtggccggaaattcccacctgggtttctgcggccattttctttatcgccatcaatgctatcaacctgactaacgtcaaggtgtttggcgaaatggagttctggttcgcgatcattaaagttgtcgccgttgtggcgatgatcctgttcggcggctggctgttattcagcggcaacggaggtccgcaggctaccgtacgcaacctgtgggagcaaggcgggttcctgccgcacggcttcaccgggctggtgatgatgatggcgattattatgttctccttcggcggccttgagctggtgggtattaccgccgcagaagcagataacccggagcaaagtatcccgaaagcgaccaaccaggttatctaccgcattctgattttctatgtaggatcgctggccgttctgctctctctgctgccgtggagccgcgtgaccgccgataccagtccgttcgtccttatcttccacgaactgggcgataccttcgtcgctaatgccctgaatattgtggtattaaccgcagcgctttccgtttacaacagctgcgtatactgcaacagccgtatgctgttcggtctggcccagcaggggaacgcgccaaaagcgctgatgagcgtcgataaacgcggcgtgccggttaatacgatcctcgtttccgcgctggtcaccgcgctgtgcgtactgattaactacttcgcgccggaatccgcgtttggtctgctgatggcgctggtggtttctgcgctggtaatcaactgggcgatgattagcctggcgcacattaaattccgccgcgctaagcagcagcagggcgtggtcacccgcttcccggcgctgttttatccgttaggcaactggatctgcctgttatttatggtcggggtgctggttattatgctgatgactccggggatggcgatttccgtctatctgatcccggtgtggattgccgttctcggcgtcggttatctgttcaagcagaaaaccgccagcgccgttaaagcataa

SEQ ID NO: 254276 - DNA, 780 bp, Klebsiella pneumoniae
atggcctacagcaagatccgccaaccaaaactatccgatgtgatagagcagcagctggagtttttaatccttgaggggacgttgcgccccggtgaaaagctcccgcctgaacgtgaactggcaaaacagttcgacgtttcccgaccctcgctacgtgaggctattcaacgcctcgaagctaaggggttgttgcttcgtcgccaggggggcggaacgtttgtacaaagccgcctgtggcagagcttcagcgacccgctggtagagctactgtccgaccaccctgaatcccaatttgatctgctggaaacccgtcacgcgcttgaaggcattgccgcatattacgcagcgctgcgcagcaatgatgaagatcgcgaacgcattcgcgagctgcatcaggctatcgagcgggctcagcagtcgggcgatcttgatgctgaatccgatgccgtcgtccagtatcaaatagccgtcaccgaagcggcgcacaatgttgtgctgctccatctactacgctgtatggagccaatgctggctcagaacgttcgccagaattttgaattgttgtacgcccgccgggaaatgctcccgcaggtcagcaatcatcgcactcgaatttttgaggcgataatcgccggggagccggagcaggcgcgtgaagcctcgcatcgtcacctggcgttcatagaggaaattttgctggatcgtagccgtgagcagagccgtcgtgaacgctcactgcgtcgtttacagcaacgaaaggatgagaactccggttcttaa

SEQ ID NO: 254277 - DNA, 2664 bp, Klebsiella pneumoniae
atgtcagaacgtttaccaaatgacgtggatccgatcgaaactcgcgactggctacaggcgatcgaatcggtcatccgtgaagaaggtgttgagcgcgctcagtatcttattgaccaactcctttctgaagcccgcaaaggcggggtgaaagtggctgctggcgcatcgaccggcggctacgtgaacactattgccgttgaagatgagccggaatacccgggtaatctggatctggaacgtcgtatccgttctgcgatccgctggaacgccatcatgaccgttctgcgcgcatcgaaaaaagatctcgaactgggcggccacatggcttctttccagtcttccgcaaccttctacgaagtgtgctttaaccacttcttccgcgcacgcaacgagcaggacggcggcgacctggtttacttccagggccacatctctccgggcgtctatgcgcgtgctttcctggaaggtcgtctgactgaagagcagatgaacaacttccgtcaggaagttcacggtaaaggtctgtcctcttatccgcacccgaaactgatgcctgaattctggcagttcccgaccgtctctatgggtctgggcccaatcggtgcgatttatcaggctaaattcctgaaatatctggaacaccgcggcctgaaagacacctctaaacagaccgtttacgccttcctcggcgacggtgagatggacgagccggaatctaaaggcgcgatcaccatcgcaacccgtgagaagctggacaacctggtcttcgtaatcaactgtaacctgcagcgccttgacggtccggttaccggtaatggcaagatcattaacgaactggaaggcatctttggcggtgctggctggaacgttatcaaggttatctggggcggtcgctgggatgagctgctgcgtaaagataccagcggtaaactgatccagctgatggaagaaaccgttgacggcgattaccagaccttcaaatccaaagacggcgcctacgtgcgtgagcacttcttcggtaaatatccggagaccgcagcgctggttgccgactggactgacgagcagatctgggccctgaaccgcggcggtcacgatccgaagaaagtctatgctgcactgaaaaaagcgcaggaaaccaaaggcaaagctaccgtaatccttgcccataccatcaaaggttacggcatgggtgacaccgccgaaggtaaaaacatcgctcaccaggttaagaaaatgaacatggacggcgtacgctacgtccgcgatcgtttcaatgtgccggttgccgatgctgatatcgaaaaactgccgtacgtaaccttcccggaaggttccgaagagcacacttatctgcacgcccagcgtcagaaactgcacggctatctgccgagccgtcagacccacttcactgagaagctggagctgccgaccctggaagatttccgtccgctgctggaagagcagaacaaagagatctcgaccactatcgcgttcgtacgtgccctgaacgtgatgctgaagaacaaatccatcaaagatcgcctcgtgccgatcatcgccgatgaagcgcgtacctttggtatggaaggtctgttccgtcagattggtatctacagcccgaacggccagcagtacactccgcaggaccgtgagcaggttgcttactacaaagaagacgaaaaaggccagattctgcaggaaggtatcaacgaactgggtgccggcgcctcctggctggctgctgcgacttcttacagcaccaacaacctgccgatgatcccgttctacatttactactccatgttcgggttccagcgtatcggcgatctgtgctggcaggctggcgaccagcaggctcgcggcttcctgatcggcgggacttccggtcgtaccacgctgaacggcgaaggtctgcagcacgaagatggccacagccacattcagtctctgactatcccgaactgtatctcttacgatccgtcttacgcgtacgaagttgcggtcatcatgcaggatggtctggaacgtatgtacggtgaagcgcaagagaacgtttactactacatcaccacgctgaacgaaaactaccatatgccggcgatgccggaaggcgccgaggaaggtatccgtaaaggtatctataaactcgaaaccgttgcaggtagcaaaggtaaagttcagctgctgggctccggttctatcctgcgtcacgtgcgtgaagcagcgcagatcctggccagcgactacggcgtaggctctgacgtgtacagcgttacctccttcaccgaactggcgcgcgatggccaggactgtgaacgctggaacatgctgcacccgctggaaactccgcgcgttccgtacattgcccaggtgatgaacgacgctccggcggttgcgtctactgactatatgaaactgttcgctgagcaggttcgtacttacgtaccggctgatgattaccgcgtactgggtaccgacggcttcggtcgctctgacagccgtgaaaacctgcgtcaccacttcgaagttgatgcttcctacgtggtggtagcagcgctgggcgaactggctaaacgtggcgaaatcgataagaaagtggttgcggaagccatcactaaattcaacatcgatgcagataaagttaacccgcgtctggcgtaa

SEQ ID NO: 254278 - DNA, 1593 bp, Klebsiella pneumoniae
atggctatcgaaatcaaagtaccggacatcggggctgatgaagttgaaatcaccgagattctggtcaaagtgggcgacaaagttgaagctgaacagtcgctgatcaccgtagaaggcgacaaagcctctatggaagtcccgtctccgcaggctggcgttgttaaagagattaaagtctccgtcggcgacaaaaccgagaccggtaaactgatcatgattttcgattccgccgatggtgcagcagccgctgcacctgcgcaggaagagaagaaagaagccgctccggccgccgctgcgcctgccgccgcgagcgctaaagaagttcacgtaccggatatcggcggtgatgaagttgaagtcactgaaatcatggttaaagtgggcgacaccatcgccgctgaacagtcgctgatcaccgtagaaggcgataaagcctctatggaagttccggcgccgtttgcgggcaccgtgaaagagatcaaaatcagcaccggcgacaaagtctcaaccggctccctgattatggtcttcgaagtggaaggcgcagcgcctgcagcggctccggctaagcaagaagccgctgcacctgcggcagctccggctcaggcggcgaaacctgctgcagctcctgctgctaaagcggaaggcaaatctgagttcgctgaaaacgacgcgtacgttcatgcaacgccgctgattcgtcgcctggcgcgcgagttcggcgtcaacctggcgaaagtgaaaggtacgggtcgcaaaggccgtatcctgcgcgaagacgttcaggcttacgtgaaagaagcggttaaacgcgctgaagctgcgcctgcggcaaccggtggcggtatcccgggcatgctgccgtggccgaaagtggacttcagcaagtttggtgaagtggaagaagttgaactgggccgcattcagaaaatctctggtgctaacctgagccgtaactgggtgatgatcccgcacgttactcacttcgacaaaaccgatatcaccgatctggaagcgttccgtaaacagcagaacgccgaagctgagaagcgtaaactggacgtgaaattcactccggttgtcttcatcatgaaagccgttgccgctgcgcttgagcaaatgccgcgcttcaacagctcgctctctgaagatggccagcgtctgacgctgaagaaatacatcaacatcggtgtggcggttgataccccgaatggcctggtggttccggtctttaaagatgtgaacaagaagagcgtaaccgagctgtctcgtgaactgaccgtgatttctaagaaagcgcgtgatggtaagctgaccgctggcgaaatgcagggcggttgcttcactatctccagcatcggcggcctgggtaccacccacttcgcgccgatcgttaacgcgccggaagtggctatcctcggcgtgtccaagtccgcgatggagccggtgtggaatggtaaagagtttgttccgcgtctgatgatgccgatctctctgtccttcgaccaccgcgtgatcgacggtgctgatggtgcgcgctttatcaccatcatcaacaatatgctgagcgacattcgccgcctggtgatgtaa

SEQ ID NO: 254279 - DNA, 435 bp, Klebsiella pneumoniae
atgaaaaggattgcatttggctgcgatcatgtcggttttatcctgaaagacgatatcgttgcgcatctgcgccagcgtgggattgacgtcgtggataaaggcgcatggtctacggaacgtaccgattatccgcgctatgccagcgccgtcgctgagtccgttgccgctggtgaggtcgacggcgggatcctgatctgcggcaccggcgtcggcatctctatcgctgccaataagcatcccggtattcgggcggtggtgtgcagcgagccttactcggcgcagctttcacggcagcataatgacaccaatattctggcctttggcgcgcgggtgatcggccttgaactggcaaaaatgatcgtcgatgcctggctggatgccgaattcgagggggggcgccaccaggggcgggtagacgcgatcgcgcttgattaa

SEQ ID NO: 254280 - DNA, 333 bp, Klebsiella pneumoniae
atgaaacgttatactaccgctttgcttttttgcaccctatccctcgccggccagctggcgcacgccgatgtgattgacgacgctatcggcaatattcagcaggctattaacgatgcttaccacccgggcgatagccgttccgacgacgatgactatgatgatgggcgctatcagggcagccgtcagcaaagcgccgatcgccagcggcagtatgaagacagacgacgacagcttgaagatcgccgccgccagcttgacgagcgtcagcgccagctggacagcgatcggcgacagttagaaaacgactggcgtcgtctggatgatgattactga

SEQ ID NO: 254281 - DNA, 408 bp, Klebsiella pneumoniae
gtgacaggacgaatgattcatcatgcaggctggttcgtggcccttgggccgttaataccgctaccgctcattctctttttacccagggtcatctcagttgatgagctcctcaatcatcttccggaagtattatccctcacctggggtattggctttttacccgcattgttaaccggcattttcatggctatcctgacgggccacgctgattgcgcctggtactatcggatgctggcaggcgggattgccgggcctctgataacggccatttgctgcggcatcatcggcgcctttattccgatgtttttctatttaatcccgctgttgcttatctcggcgctgccgtccggcatcgttatggggctgctgattccctggctcccgccgcggatcgcccggcatcagtaa

SEQ ID NO: 254282 - DNA, 330 bp, Klebsiella pneumoniae
ttgatcaacgtgctgtttgtttgtagccgcaatcaatggcgaagcccgacggcggaacaggtgttccgccgttatcctggcatgaacgtgcgctctgcgggcacgagccggaacgccagaaaaacccttactcctgaactgattaactgggcggatattatctgcgtgatggagcagaaacataaaaatagactggtcgctgaatatcgtcgcctggtcgaaaataaaccgctttacgtgctggatatccccgacgactaccgctatatggaccccgaacttgtcgccctgctgaaagagctggtccccgccctgcccgaactgagctaa

SEQ ID NO: 254283 - DNA, 225 bp, Klebsiella pneumoniae
atggaaacaacccgtagccgggactggcgcatggcgcaaaagcagcgcaataagtctcgcgatgttcacaccgccctcttacgttttcgtcgcgagaaaaactggaagcatctctatttgcgttcagaaaaattgctacgcgccgcgcagctgggaatggaatatccccgtaaaactcgtcgccagctggcgcatcagggaatggaagagctgttatcgaattga

SEQ ID NO: 254284 - DNA, 468 bp, Klebsiella pneumoniae
atgaccacaacacgacgcacgcttcgccatgcctgctggtatacattcattggcccctatattggcctgctgtgggccatcgtcgccatcgtcatacagtcgcgccgttcggtgggtagtttctttgaatttgtcttttctgaactgccgtattttctcatcgtcccctgggctgctggcgccatcccggcgctactgaccgggattgccgtcgcttttttgcccacgggcattcatgcgattcattaccggcgtatcctcgccagcgcgaccattggcctggccatatgcgcggcaataccgctaaccggcgtgctgcttttctccgataccgatctgacgacctttattctgcgtggtcatgggttccgggtaatcgcaggttctggcctgttctccggactgattatgggatggctgatagcctatctgccgggcagggagcagagaaaaacgccaaatgaataa

SEQ ID NO: 254285 - DNA, 759 bp, Klebsiella pneumoniae
atgagcctgagtatccgcttaaccggcaccggcggcgcgcagctggtgccggtttttggctgcgattgccccgcctgtcgccgcgcccgctccgacgaagcgcatcgtcgtcgcccctgtagcgcgatagttaaattcaatagcgcggtgacgctgctcgatgccgggctgccggatctgatgacgcagtggcccgccggcagctttcagcagtttctgctcacccattatcatatggatcacgtacaggggctgttccccttgcgctggggcgtgggcgaatccattgcggtatacggccccccggatgatcagggctgcgatgacctgtttaagcatccgggcctgctggatttcagccacaccgtcgaaccatttgtgcggtttgaacttcagggattgcgcgtcacgccgctgccgttgaatcactcaaggctcacgtttggctatctgctggagtcggcccatagccgggtcgcctggctctccgataccgccgcgctgccggaaaaaacgctgaagttcctgctgaataatcagccgcagcttatcatcatcgactgtagccacgagccgcgcccgcagccgccgcgcaaccactgcgacctgaacaccgtgcgggccattaaccaggtcatcggctgcccgcgagtgatcctcactcatattagccactgcttcgacgcgtggatgatggagcactctctgccggcggggtttgaagcgggatttgacggcatggagattgtgctgccttaa

SEQ ID NO: 254286 - DNA, 564 bp, Klebsiella pneumoniae
atggcaggaaaactgatttggctggtcggtgcctccggctccggtaaagacagcctgctggcagcgctgcgccagcgtgagcatccgcagctgctggtagcgcaccgctacattactcgttcgcccaatgcgggcggtgaaaaccatatcgccctcagcgagcgagagttttttacccgcgccgagcagcatctgtttgccctcagctggcatgcaaaccaccattactacggtattggcatcgagattgacctgtggctgcacgccgggttcgacgtggtcgctaacggttcacgcgcgcaccttgcgcaagcgcaggcgcgctatgctgacgccctcctgcctatctgtttgcaggtttcaccggaggtgctcagacaacgcctggcgcggcgcgggcgggagaacgaaacagaaatcgcccagcgcctggcgcgcgcggcgcgctatacgccgagcgcgtgtctgacgctaaataacgatggtcgccttagccagtcggtggacgctctggtttcgctgattcgcattcacggcaaccgacgcgaacggcagccagcctga

SEQ ID NO: 254287 - DNA, 1137 bp, Klebsiella pneumoniae
atgattatcaacaacgtaaagctggtcctcgaagacgaggtggttaacggttcgctggaggtgcgggacggcagaatttcagcctttgccgaaagccagagccggctggcggaggccattgacggcgacggcggctggctgctgccgggacttatcgagctccataccgacaacctggacaagtttttcaccccgcgaccgaaggtggactggcccgcccactcggcgatgagcagccacgacgcgctgatggtcgccagcggcatcaccaccgtgctggatgccgtggctattggcgatgtccgcgacggcggcgatcgtctggagaacctggaaaagatgatcaacgccgtggaggagacgcaaaagcgaggcctcaaccgcgccgaacaccggctgcatctgcgctgcgaactgccgcatcacaccactctgccgctgttcgagaagctggttggccgcgaaccggtgagcatggtctccctgatggatcactcccctggccagcgccagtacgccgaccgcagcaaataccgcgactactaccagggcaaataccatctgaccaacgaacagatggacgccttcgaagaggagcagatggcgctggcggctgcctggtcacagcccaaccggcagcgcatcgccgcgatctgccgcgagcggaatatcgcgctggccagccacgatgacgccacctgcgaacatgtgctcgagtcacgccagcttggcagcgttatcgccgaatttcccaccactatcgccgcagcgcaggcctcgcgccagcatgggatgagcgtcctgatgggcgcaccgaatatcgtgcgcggcggctcgcactccgggaacgtcgccgcccatcatctggcggccagcggactgctggatattctctcctccgactattatcccgccagcctgctggatgccgctttccgcatcgctgacgacgagggcaacgcttttaccctcgcgcaggctattcgtctggtaagtcaaaacccggcgcaggcgctggggctgcacgaccgcggggcgattgccgaaggtaagcgggcggacctggtgctggcgcgccgtcacggcgagcatatccatatcgatcacgtctggcggcaaggtaagagggtcttctga

SEQ ID NO: 254288 - DNA, 687 bp, Klebsiella pneumoniae
atgaacgccattcgcgtggaaaacatccataaaacctttgttctgcaccagcagaacggcgtgcgtctgccggtactcgccgacgcctcgctgagcgtaaacgtcggcgaatgcgtggtgctgcacggccactccggcagcggaaaatcgaccctgctgcgttcgctgtacgccaactatctccccgatagcggccacatctatatccgccacggcgatgaatgggtggatctggtcactgccacgccgcgcaaagtcctggaagtgcgtaaaaccaccatcggctgggttagccagtttctgcgagtgatcccgcgcatctccgccctcgacgtcgtcatgcagccgctgctcgagctgggcatcccgcgcgaagagagcgccggtaaagccgcccgcctgctgacgcgcctgaacgtgcccgaacgtctgtggcacctcgccccctcgaccttttccggcggcgaacagcagcgggtcaatatcgcccgcggcttcgcggtggactacccgatcttgcttctcgacgaacccaccgcctcgctggacgacaaaaaccgcgccgccgtggtggaactgatccaggaagccaaagcccgcggcgcgtcgatcgtcggcattttccacgacgaggccacgcgtaaacaggtcgccgaccgcctgcaccccatggggatttcagcatga

SEQ ID NO: 254289 - DNA, 759 bp, Klebsiella pneumoniae
atgagctatccgttactggcggtgaataacctgacccacctctatgcgccgggtaaaggcttcagcgacgtatcgttcgagctgtggccgggagaagtgctgggtatcgttggcgagtccggctccggtaaaaccacccttctacaggcgatttccgcccgcctgacgccgcagcagggtgaagtgcggtaccagaatcgttcgctgtacgcgatgagcgaagcggatcgccgccgcctgctgcgcaccgagtggggcgtggtgcatcagcatccgatggacgggctgcgtcgccaggtgtcggccggcggcaatatcggcgagcgcctgatggcgatcggcgcccgtcactacggccacattcgcaccaccgccgggcagtggttacaggaggtggagatcccgccttcgcgcattgacgacctgcccaccaccttttccggcggcatgcagcagcgtctgcaaatcgcccgcaatctggtgacgcagccgaagctggtgtttatggatgaacctaccggcgggctggacgtgtcggtgcaggcgcgcctgctcgatctgctgcgcggcctggtcgtggagctcaatctggcggtagtcattgtgacccacgatctcggcgttgcccgcctgctggctaaccgtctgctggtgatgaaacaggggctggtggtggaaagcggcttaaccgaccgggtgctcgacgatccccatcatccttacacccagctgctggtgtcgtcggtattgcagaactga

SEQ ID NO: 254290 - DNA, 849 bp, Klebsiella pneumoniae
gtggctaacgcactgaccggctacaactttgcctacctcgacgagcaaaccaaacgcatgatccgccgcgccatcctgaaagcggtggccatccccggctaccaggtacccttcggcggtcgcgagatgccgatgccctacggctggggaaccggcggtattcagcttacagccagcgttatcggcgaaaatgatgtgctgaaggtgatcgatcagggcgccgacgacaccaccaacgcggtatcgattcgtcagtttttcaaacgcgtaaccggcgtcgcgaccaccgaacgtaccgaggacgccacgctgatccagacccgccaccggatcccggaaacgccgctgaccgaagatcagatcctcatcttccaggtgccgatcccggaaccgctgcgctttatcgagccgcgcgaaaccgaaacccgcaccatgcatgcgctggaggagtacggcgtaatgcaggtgaagctgtacgaagatatcgcccgcttcggccatatcgccaccacctacgcctacccggtgaaggtcaacggccgctacgtcatggacccatcgccgattccgaaatttgataatccgaagatgcatatgatgcctgcgctacagctgttcggcgccgggcgcgaaaaacgcatctatgcggtaccgccttataccccggtggagagcctcgatttcgacgatcatccgtttaccgttcaggagtgggatgaaccctgtgcgatctgcggctcacgccacagctatcttgatgaagtggtgctcgacgacagcggcaagcggatgtttgtctgctccgataccgactattgccgccaacagtgcgaggagcagaaaaaatga

SEQ ID NO: 254291 - DNA, 1065 bp, Klebsiella pneumoniae
atgtacgtagccgtcaaaggcggcgagaaggcgatcgtcgccgctcacgccctacaggaacagcaacgccgaggcgatggacggcttcctgaaatcagcgttgaccagattagccaacagctcaatctggcggtggatcgggtcatgaccgaaggcggtatcgccgaccgggagctggcggcgctggcgctaaagcaggccagcggcgatagtgtcgaagcgatttttctgctgcgcgcttaccgcaccacgctgcaaagactggcggtcagcgagcctgtcgacaccgccgctatgcgccttgagcgccggatctcggcggtctataaagatatccccggcggccagatgctcggcccgacctacgattacacccaccgtctgctcgattttaccctactggccaacggcgaaacgccgctgctggcgaccgatagcgcgccgcaggaagccacgccgcacgtttttaatctgctcgtccagcagggactggcgaaggcggagcaggatactgacgcgcagcccgacgacatcacccgccatccgccggtttatccctgttcgcgctcgtcgcgcctgcagcagctggtgcgcggcgacgagggttacctgctggcgctggcctactccacccagcgcggctacgggcgcaaccatccgtttgccggggaaattcgcagcggctacgtcgcggtggagatcgtcccggaagagctgggcttcaccgtcactattggcgaactgttgatgaccgaatgcgaaatggtcaacggctttgtcgatcctcaggatgaaccgccgcactttacccgcggctacggcctgacgtttggtatgagcgagcgcaaagcgatggcgatggcgctggttgaccgcgcgctccaggcgccggagtacggcgaagaggcggcgggtccggcccaggacgaagagtttgtgctggctcatgccgataacgtcgaggcggccggtttcgtttcgcacttaaaacttccccactatgtcgatttccaggccgaactggcgctacttaaacgcctgcaacgggagaatcaacgtggctaa

SEQ ID NO: 254292 - DNA, 585 bp, Klebsiella pneumoniae
atgaccttacaacccgcttttaccctggctgtgcaggatgcccagcacagtttccgccgcctgctgaaagcgatgagcgagccgggcgtgattgtctccctgcagcagcttcagcacggctggcagccgctgaacgtcgccaccaccagcctgctgctgacgctggtggatcacgagacgccggtctggctcgctccgacgctgcataacgatctggtcggccagaatttacgctttcataccggcgtgccgctggttgagcagccgcagcaggcaaccttcgccgtcgccagtgacagcatcagcgccgaacagctcaacgtgctctccgccggtaccgtcgtcgccccggagaccggcgttacgctgattgttcagctcgccagcctcagcggcggccggatgctgcgcctgaccggcgccgggatcgccgaggagcggatgatcgccccgcagctgccggaatgcattatcgcagagttaaccgagcgcccgcatccgttcccgctgggtatcgatctgattctcacctgcggcgaacgcctgctggcgattccgcgcaccactcacgtcgaggtctgctaa

SEQ ID NO: 254293 - DNA, 453 bp, Klebsiella pneumoniae; identical to SEQ ID NO: 175233

SEQ ID NO: 254294 - DNA, 726 bp, Klebsiella pneumoniae
atgtacttatccagacatccgaccagttaccccacgcgatatcaggaaattgccgccaaactggagcaagagctttgccatcattaccgctgcggcgactatctgcccgccgagcagcagctggcgtcccgctttgaggttaaccgccataccctgcgccgggccatcgatcagcttgtcgagcgcggctgggtccagcgccgtcagggcgtcggcgtgctggtactgatgcgcccgatagattacccgctcaacgcccaggcgcgctttagccagaatcttctcgaacagggcagccacccgaccagcgaaaaactgctgtcggtgctgcgtccggccagtagccacgttgccgatgcgtttgccatcagtgaaggcgataacgtcattcacctgcgcaccctgcgccgcgttaacggtgtcgccctgtgcctgatagaccactactttgccgacctgcagctatggccggttctgcaaacctttacccacggctcgctccatgatctgttgcgcaatcgtcttgatatcgaactgacccgcgtacgcaccaaaatcagcgcccgccgcgcgcaggccaaagagagccgcattctcggcattcccaatatggcgccgctgctgtgcgtgcgcaccctgaatcatcgccagggcgagcagagcgcgacggagtactccgtcagcctgacccgcgccgacatgattgaattcaccatggagcactga

SEQ ID NO: 254295 - DNA, 435 bp, Klebsiella pneumoniae; identical to SEQ ID NO: 175231

SEQ ID NO: 254296 - DNA, 336 bp, Klebsiella pneumoniae
atgcaactcccacactgcccgaaatgccattctgaatacacttatgaagatggcggcatgtttatctgcccggaatgcgcccatgaatggaacaatgccgagcctgcggatgataacgacgcgctggtggtcaaagatgccaacggtaatttactcaccgacggcgacagcgtcaccgtagtaaaagatcttaaggttaaaggcagttcttcaatgctaaaaatcggtactaaagtgaagaatatccgcctggttgaaggcgatcataatattgactgcaaaattgatggttttggcccgatgaagctaaaatccgaatttgttaaaaagaactga

SEQ ID NO: 254297 - DNA, 1503 bp, Klebsiella pneumoniae
atgcttaaaaggaaaaaagtaaaacccatcacgcttcgggatgtgaccatcattgatgatagcaaactgaagaaagcgattaccgcagcgtcgctgggtaacgcgatggagtggttcgattttggggtatatggttttgttgcgtatgctcttggtaaggtctttttccccgatgctaaccccagcgtgcagatgattgccgcgctcggtactttctcggttcccttcttaattcgtccattaggcggcctgttcttcgggatgctgggcgataaatatggtcgacaaaaaattctggcgataaccatcgtcattatgtcgataagtacattctgtatcggtcttattccgtcgtatgccaccattggtatctgggcgccgattctgctgctgctgtgtaaaatggcgcagggattctcggtgggcggagaatataccggggcatcgatctttgtggcggaatactcgcctgaccgtaaacgcggctttatgggcagctggctggacttcggttcgatagcgggcttcgtgatgggcgcgggcgtggtggtactcatttccagcatggtaggcgaagagaacttcctcgactggggctggcgtattccgttcttcctcgcgctgccgttaggcattattggtctttatctgcgccatgcgctggaagagacgccggcgttccagcagcacgttgataaaatggagcagggcgaccgcgagggcctgcaggacgggccgaaagtctcctttaaagagattgccactaaacactggcgtagcctgctgacctgtatcggtctggtgatttccaccaacgtgacctactacatgctgctgacctacatgccgagctacctgtcgcataacctgcactattcagaagaccacggggtgctgatcatcatcgccatcatggtcgggatgctgttcgttcagccggttatcggtatgctcagcgaccgttttggccgtcgcccgttcattctgattggtagcgtggcgctgttcgcgctgtcgattccggcattcatcatgattaacagtaacgttctcggcctgattttcgccggtctgctggtgctggcggttgtgctgaactgctttatcggagtgatggcttcgtcgctgccggcgatgttcccgacccacattcgttttagcgccctggccagcgccttcaacatctcggtgctgattgccggtctgacgccaaccctggcggcgtggctggtagaaagcacgcagaacctgatgatgccggcttactatctgatggtaattgcagttatcggtctgattaccggcctgtcgatgaaagagaccgccaatcgtccgctgaaaggggcgacgccagcggcttcggatattcaggaagcgaaagaaattctcggcgagcactacgataacatcgagcataaaatcgaagatatcgatcaggagatcgccgatctgcaggaaaaacgttctcgtctggtgcagcagcatccgcgcatcaacgactaa

SEQ ID NO: 254298 - DNA, 942 bp, Klebsiella pneumoniae
atgatcgataaaccccgcgcagcgcatcccgccgacgcgtatatgagcagcagcgacgatcgactgccccgcagcccgctggcgctctactctgaataccagcggatggatatcgagctgcgtactccttatgccatgaccgccagccactggcacggtcaggtggaggtgaacgtccccttcgacggcgatgtcgagtatctgatcaacgatgaagcggtacgtatcgagcagggctatatcaccctgttctgggcctgtacgccccatcgccttacccgaccaggggcctgcaggcagatggctatcttcaacctgccgatgcatctgtttttatcctggccgctggatcgggagcttattaaccacgtcacccacggtatggtggtgaaatcgctggctgcccagcagctcagcgtatttgaagtccagcgctggcagcaggagctgaacagcgataatgagcaaatccgccagttagcgatcgatgaaatcgctctgatgctcaagcgcctgagcctctccggctggcagccgattctggtgaacaagacttcacgcacgcataagaacagcgtttcgcgccacgcccagttttacgtcagccagatgctggaatatattgccatccactacgatcgggcgctcaccgtcaacgatgtcgccgagcatgtgaagctgaatgccaactacgcgatggggatttttcagcgggtgatgcagcaaaccatgaagcagtacattaccgcgatgcgcattaatcacgttcgggcgctgctcagcgacaccgataagaccatcctcgatatcgccctgaccgccggtttcggctccagcagccgcttttacagcacttttaataaatatgtcggcatgccgccgcagcagtatcgcaggctgagccagcagcgtcgccataatctggcgcccgccggggcataa

SEQ ID NO: 254299 - DNA, 1347 bp, Klebsiella pneumoniae
atgtctgcccccaaaattacctttatcggcgccggttcgacggtattcgtcaaaaatatactcggcgatgtgtttcagcgcccggcgctaaagtccgcgcatatcgccctgatggatatcgatgcgactcgtctggaggagtcgcatattgtggtgcgcaaactgatggattctctgggcgcggagggggaaatcagctgccatcgcgaccagaaagcggcgctgcaggatgcggattttgtggtggtggccttccagattggcggctatcagccctgtacggtcaccgattttgaagtctgtaagctgcatggcgtggagcaaactattgccgatacgcttggcccgggcggaattatgcgcgcgctgcgcaccattccgcacctgtggcgcatctgcgacgatatgaccgaagtttgcccgaatgccactatgcttaactacgtcaatccgatggcgatgaatacctgggcgatgtacgcccgctatccgcatattaagcaggtcggactgtgtcattcggtgcaggggacggcggaggagctggcccacgatctggatctcgacccggcggatttacgctaccgctgcgccggtatcaatcatatggccttttacctgtcgctggagaaaaagctcagcgacggcagctatgtcagtatttacccggagatgctgcaggcatttgccgaaggacgcgcgccgaagcatcgcgaagattcgcgctgccagaacatcgtccgctatgagatgtttaaaaagctgggctattttgtcacggagtcgtccgagcacttcgcggaatacacaccctggtttatcaagccggggcgtgaggatctgattgcgcgctatcaggtgccgctggatgagtatccgaaacgctgcgtagagcaggtggcgaactggcacaaagagctggagcggtataaaaccagcgagcgcattgaggtcaaaccctcgcgcgagtacgccagtaccattatgaacgccatctggacaggcgagccgagcgtgatctacggcaacgtgcgtaacgataatcttatcgataacctgccgcagggctgctgcgtggaggtggcctgtctggtggacgctaacggcattcaaccgaccaaagcgggcaagctgcctgcccatctggcggcaatgatgcaaaccaatatcaacgttcagaccctgctgacggaggcgatactcacggaaaatcgcgactatatctactatgcgacgatgatggacccgcatacggcggcggtgctgggcattgaggagatctatgcgctggtggacgatctgatcaacagccacggcgactggctgccggcgtgggtgcatggctaa

SEQ ID NO: 254300 - DNA, 306 bp, Klebsiella pneumoniae
atggctaagataacagtgacgtttacgattaccgaattttgtctccacaccggcctttccgaggaggagctgaacgaaattgtcggcctcggcatgatcgagccgcgccagccgcagcgggaaaagtggctgtttgacgatagtgcggtgacaattgttcaccgcgccgtacgcttacgcaaagagctggagctggactggccggggatcgccgtcgccttgacgctgcttgacgagaacgcgcgcctgagccgtgaaaatcaaattctgcagcagcggctggcgcgctttctgacgcatggttaa

SEQ ID NO: 254301 - DNA, 918 bp, Klebsiella pneumoniae
atggaattaaaggattattatgccattttaggggttcagccaacggacgatctgaaaaccattaagaccgcctatcgccgtctggcacgcaaatatcaccccgatgtcagtaaagaaaacgatgccgaagccaggttcaaagatctcgccgaagcctgggaagtgcttaaagatgaccagcgccgcgctgaatacgaccaactgtggcagcaccgcaacgatccgcactttggccgtcagcagcactcccacgagcagagctacagccagcaggactttgacgacattttctcctccatgtttggccagcaggcgcatcatagccgccgccagcagggcgtgcgcggccatgatttagagatagaagtcgcggttttccttgaagagactttagccgagcagacgcgcactatcagctataagctgccggtgtataacgtctttggcatggttgaaagcgaaacgccgaaaaccctgaacgtaaaaattcccgcaggcgtcgtcgacggccagcgcatccgcctgaaaggccagggcacccccggcgagaatggcggcccgaacggcgacctgtggctggtgatacatatcgccccgcatccgctgtttgatatcgtcggacataaccttgaaattgtcctgccgctggcgccatgggaagcggcattaggcaccaaagtcactatcccgacgctcaaagagagcattctgttgaccatcccgccgggcagccaggccggacagcgcctgcgcgtcaagggcaaagggctggccagcaaaaccaccactggcgatctgtacgccgtgattaaaatcgttatgccgccaaaaccggatgagaagagccgcgagctctggcagcagctggccgatgcgcaatccagcttcgagccgcgtaagacatgggggaaagcctga

SEQ ID NO: 254302 - DNA, 684 bp, Klebsiella pneumoniae
atgaatgagtttttcagtcagtgggacgtagcggttatcctgctgcaaattatcgctatcgacctgttattaggcggcgacaacgcggtggtgattgcgatggcctgccgtaagctgccgccgcatcagcggaccaaagcgattattatcggcacctttggtgcgatagcggcgcgcgtgctgctgctggccgtggctatttatttgctctcattgccgtggttgaaagtggttggcgctctgatgctgttgtggatcggtatcaagctggtcaccaatcaggaagaagagaatgaaatcagcagctccagcagcctgtggcgtaccgcggtcaccattaccgttgccgatgtcattatgtcgctggacaacgtactggccgtcgccgccgccggaaaaggccatctgctgctggtcgcgctgggggtgctgatcagcatcccgattattgtcgcgggcagtaaactggtattggcgatccttaaccgcttcccgtcggtggtgatgctgggcggcgcgcttatcggctggatagccggctcaatgatggtgagcgatgccaccatcgttcatctgttccccaacgcgccagccgcccttccgttgatcggcggtgccattggcgctgccctggtgctgctggaagggctgcgcaggaaccgcagcaggccttctgccgaatag

SEQ ID NO: 254303 - DNA, 783 bp, Klebsiella pneumoniae
atgcccggccataagaatttactgacactcgcctttattggcgccgcactgcttccggtgatggcaactgccgctgatgcacccaccttcacgcccgaacaggaagcccgtatcggcaaaattgccgcggactatttagtcgcgcatccggaagtgctgctgcaggccagccagaagctgcagcaaattcaggaacagcagcaggccagcgccgcgacgcaggcggtactgaagaacgcggctgcgctgacgcaggataaaaacaccccaacctatggcccgaaagagggcaaagtgaccgttattgaattctttgattatcaatgcgtttactgcagccgtctggctccggtcatggagcaggttattaaagagaacccgcagacccgctttgctttcaaagagtggccaatttttggcagccgttgggaaacctcgctggaggcggcgaaaaccgggctgcagatttatcagcagaagggtgcagaggcctatttgacctaccataacggcatctattccaccgggcataacgaaggcaagctaaccgccgctgacgtgcagcagcaggcgaagaaggtcaatttcgatgcgaagaaagcggcggacgttgagtcggtactggaaagtaccaaccagctggcgcaggagatcggtttaagcggtacgcccggcgttatcgtaatgccgacgaccggcgccacggaggcgacgatcaccgtattccctgggctggcggataaagcctcgctggatgcggcgattaagaaagcgggcggctga

SEQ ID NO: 254304 - DNA, 621 bp, Klebsiella pneumoniae
atgtctcaacccctcgtacggcagcgtttaacgcgagaagagcggcgcaagcagctaatagacgtcgcctggcatattattcgcgaggaaggaaccgatgccctgacgctgggctatctggcgacccaggcgggggtgactaaaccggtggtttacgatcattttgacagccgttccgggcttttcgcgacgctgtatgcggaatacgaccagcgccagagcgtaaagatggatgaaattctgcgcaacaccgaacccagggcggagacattggcttcggcgatcgctaatgcctacattgagtgcgtcctgctccagggccgcgaaatgcccagcgtgatggccgcgctggccgggacgcctgagctggagaaaatcaagcaggagtgcataaccgcatttaccgcgaaatgccggcaatatttttcgccgctttgcgagagtgaaaacctcagcgaagcagccattctcgccatgcttggatccgccgacgggctatcggctgcggtagtaaacggcgtcatcacggagcagcaggcgaaagatgagctatttcaggtgattatgtcgatgctgcagcgctgctgccgtggcgaagaagcgctacccggtagcggctag

SEQ ID NO: 254305 - DNA, 588 bp, Klebsiella pneumoniae
atgcatgcattaatcgtggtttctcatcctcttaatacttctctgactcacagcgtagcgacggctattgcgcaagggattgccgaatccggccagcagcacactgctgaaatagcagatttaacgcaggaaggctttaacccggtgtttactgagccggatatcgccgcatttctgcaaaccggcgccacgccgcccgatgtggttgctgagcaggccagactcgatcgagccgacgcgctggtgctggtctttcccgtttactggtggtcgatgcctgcgctgctgaagggctggatcgaccgcgtgtttgccaacggctgggcctatgaggaaaccgccgggggcgaggtggtgaagaagctcgggcgcctgcgagtgcacctggttgcgttaggtgcagccaatcagaaaacgtatgataagcatgggtttaccgctgcttttcatgcgcagatcgcccacggcatttttgattactgcggggcgacggtggccagttcgcagctgctgctgttaccggagctggaaacggcgaaagcgcatcttgaggcggggtatcagctagggaagacgatatttaactga

SEQ ID NO: 254306 - DNA, 2091 bp, Klebsiella pneumoniae
atgcgctctcttctttgggctgccattatggggctgtgttcgacaccgcttctggcagcctctccgcaaggtttctctttcgcgcataaagactgggagctcgcctgcgacaacaccggcacctgccgggccgcaggctatggcgtcaccatgggcgaagtcagcgttctgctgacccgcaatgcgggcgcggcgcagcacgtcgtcgccgttgcgaccttcgcgcaaaccgaacgcgatattccgcccgacgccacggtcactctgttcatcgacgatcgcgacaacggcgccctcgaagccgtcgacgagagccattttcgctttgatgatagccagacgtcgggcctgattcaggccctggagcataacggcaaaattgagctggcgattaacggcgagcgcaaggtgctgtccagcgcaggcagcagcgccgcatttctgaaaatggatgagttccagcagcgcctgggcaccgccgatgcgctgatgcgtcaaggagatgccggcgatgacaacgttttgccggcggcgcccgcgccggaaatcatcgccgcgccggtcattaacaatgccgctgccgcgacgctgacggcaaaacagcggcagaagcttcttccgcagctaacccccgtgcttaacagccattgcgacgactggcaaaacgccgacatcccggcctccgagcgtcagctcaccgccaccccgctggataaaaaccacaccttgattcaggccctttgctggcgcgcggcctacaacgacggctacgccatatgggtggtcgacaaagcatttatgactcagcctcagctgatcgctaccgacgcctccagctatggcgatggcgtgcttacctttttcaacaagggccgcggtattgccgactgcatcagcggagaagagcgcgtgtgggacggccggacctttgttcagagcctgaaatacaccaccggcgactgccgggaaatcgcccccggcggcgcatggatgttgcccactttcgtcagtcaggttatccccaggcagcaaaaagaagccgataataatgcgctgaaagcgctgtataacgccgtgttaaaagagcagaaggtcaaccctgaactggatctgaataagatcgccgaacagtttcccctcagcggcaaggtcagccattttacgctgacctacgcggacgactctctggtctcgacgagcaaaccttccgccgatatcagcgatgatgagtggcaggcgtttctccagtccgatatcagcgccgactccgaaaacggcaaagtcagcttcaccctggtggatctcgacggtgacggcagacgcgatttaattatcgacagctacgtcggcggcaccggactctttagctataccggagtcttaaaacgcaacgacgacgctttcgaaacggtcaacagcgacgatagcggcaacggcgatgattttgacgcaggggttcccggcgcgcttttttcccttaacggccgcggcgccaaccagtggagccaatgggtacgcattaatggccaggtttatgccctctggtacaacggtcagtttggcgaagataatctctatttattgcgcccgtttgccccctcgggcagtagcgcgcccgcggtgacaatccgctatcgctatactctcaatgacatccgctcgccggaaaaaggccagccgctgacgcccgcgttaagcgacggggaaaaaacggatctgctgaagtcgctggaggtgatgcagagcagcctgcttaaggataagccgcagagcgacggcgaagcgccaatctgccctattcctccgggcacgtcggccgacgatgcggaaagttactacagcggcgtggcgtctaactatatttatgaaaccgtcgcctatattccggtctggctgaatgataaatgttttatcggcaccatctttagccaccacggcgcataccgtcacggcgtcgacgcggaaattaccatcagctcgccgcgcgatgacgaagacgtcgtcggcgactacgcgatctccggacttcgccacgcgatctcagtgaccagcggctggaagaaccgcgaaggcgataacggcatgatgtaa

SEQ ID NO: 254307 - DNA, 591 bp, Klebsiella pneumoniae
atggaggagaagaccgtgcaacgtgaagaagtcctgggtgaagccatccaaatcctcgaaatcgagggtatcgctaacaccacgctggaaatggtcgccgagcgcgtggcttacccgctcaatgacctcaaacgtttctggcccgatcgcgaggcgctgctgtatgacgcgcttcgccatcttagccatcaggtcgatgcctggcgccgtcagcttttactcgacgagtcgctaagcgcagagcagaaactgctggcccgctacgccgcgctgaccacctgcgttagcaaccatcgttatcccggctgcctgtttatcgccgcctgtactttttacccggacgctcagcacccgatccatcagttggccgagcagcagaagcaggcttctctggcctatacccacgaactgcttagccagctggaggttgacgatccggcgatggtcgcgaagcagatggagctgatcatcgaaggttgcctgagccgcctgctgatcaaacgtagccagactgacgtcgataccgcacgtcgcctggcagaagatattttgcgttttgcccagtgccggatgggcggtgcgctgacctga

SEQ ID NO: 254308 - DNA, 1764 bp, Klebsiella pneumoniae
atggctcaacgcatcattacgctgatcctgctgctttgcagcacatcggccattgccggcctgttcgacgcccccggtcgttcgaactttgttcctgctgaccaggcttttgccttcgattttcagcagaatcaacacgatctcaatctgacctggcaaatcaaggagggttactatctttaccgcaaacagattaagctgacctccgccgatgcgacgtttatcgaaccctcgctgccgtcaggcgaatggcatgaggacgagttttacggtaaaagtgaaatttaccgccagcgcctgaccgtcccggtcactctgacgcacgccgccgctggcgcaacccttaccgtcacctggcagggctgcgcggatgcgggtttttgctatccgccagaaaccaaaatcgtgccgcttggcaaagcgctggcgcgctccagcaacgatgcgcacgccgggcaacccaggctgaacccgccgctgccgctggaaacgcgcccggcgctgccggtcgagtcgccgtccgaccttccttctcccgtcgcggacaaccacagcgccgatctcccctttagcgcgctttgggcgctattaattggtatcggcatcgcgtttaccccctgcgttctgccgatgtatccgctgatttccggcatcgtgctgggcggtcaaaaacgcctctccaccgcccgcgcgctgctgctggcctttatctacgttcagggaatggcgttaacctacaccgcgctgggtctggtcgtcgccgctgcgggcctgcagttccaggcagcgctgcagcacccttatgtgctgatcggcctgtcggtcgtgtttatcctgctggcgctgtcgatgtttggtctgtttacgctccagctgccttcgtcgctgcaaacgcgtctgacgctgatgagcaataaacgccagggcggttcacccggcggcgtattcgccatgggggcaattgccggattaatctgctcgccctgtaccaccgcgccgctgagcgccattctgctgtatatcgcccagagcggtaatctgtggctgggcggtggaaccctgtatctctacgcgctcggaatggggctgccgctgatcctggtgaccgtatttggcaaccgcctgctgccgaaaagcggcccgtggatggctcacgtgaaaaccgcttttggcttcgtgatcctcgcgctgccggtatttttactggaacgcatcctgggagacctgtggggcctgcggctttggtcgctgctgggcgtcgccttttttagctgggcgtttatcacctcgctgggcggcacgcgcccctggctgcgtctcgtacaaatcgccatgctcggcgccgcgctggtcagcgcccgtccgctgcaggactgggctttcgatgcaccggtcgtgcaacggcaatcccatctccagtttacccgtatccatagcgtcgatgagctcaatcaggcgctggcgcaggcgaaaggcaaaccggtgatgctcgatctttacgccgactggtgcgtggcctgcaaagagttcgagaaatacacctttacctcacctgaggttcaacaggccctgaaagagaccgttctgctacaagtggatgtcacgaaaaatagcgcacaagacgcggcgctgctgaagcacctcagggtgcttggcctccccacgattctgttcttcaacgaacagggcgaggagcagcccgcgcagcgtgtcaccgggtttatggatgccgcggcattcagcgcccatttgcgcgatcgataa

SEQ ID NO: 254309 - DNA, 324 bp, Klebsiella pneumoniae
atgactacgcctgatgctgttgttgtactctgtaccgcgccggatgaagcgaccgcccaggacctggcggccaaagcattggcggaaaaacttgccgcctgcgccacgctcctgccgggagcgacgtcgctctattactgggaaggaaaactggagcaggagtatgaagtgcaaatgctgctgaaaaccgaccttgcccatcagcaggcgctgctggactgtctgaagtcccatcacccgtatcaaacccctgaacttttggttctgcccgttattcacggagacaatgattacctctcatggctcaacgcatcattacgctga

SEQ ID NO: 254310 - DNA, 1302 bp, Klebsiella pneumoniae
atgtttggtgcagaactcgttattgtcctgctggctatttatctgggagccagactcgggggtatcggcatcggtttcgccggtggcctgggcgtcctcgtcctgaccctcttttttcaaattaaacccggcgcgatccccttcgacgtcatcgaaatcattatggcggttatcgccgctatcgccgccatgcaggtcgccggagggatggactacctggtcagtctcgccgaacgtatgctgcgacgtcaccccaaatacatcacctttctcgccccgctggtcacctggtttatgaccatactggccggaaccggacacactgctttctctacgcttccggtgatcaccgaagtagcgaaagagcagggtattcgcccctcgcgccctctttccatcgccgtggttgcctcacagattgcgatcaccgcctcgccgatttccgctgcggtggtcttttttgccggcatccttgaaccgctgggcgtcagctacctgactctgctggcaatctgtattccggttaccctgattgccgtgatgctcaccgccatcgtctgtaacttcctcggctgtgagctaaaagacgatccgatttatcaggagcggttggcgaaaggggaagtcaagctgcgcggcagccaggttttcgagcttaaaccgcacgccagacgctctgtgctgctgttcctgattggtatcgtcgcggtaatgttttacgccaccgccattagcgacaccgtcggcctgattaaagatccggttttgccgcgcaacgaagcgatcgtggtatttatgctgactatcgcgacattgatcagcatcacctgcaaaatcgacaccggtgaagtactcaacgccagcacgtttaaatccggcatgagcgcctgcgtttgcgttctcggcgtcgcatggctgggggatactttcgttaaagcccacatcagcgatatccagacggtagcaggcgacctgctgcacaactatccgtggctgctggcggtcgtgctattcttcgccgcaaccctgctctattcccaggcagccaccaccaaggcgctgatgcccgccgcgctgatgctgggcgtaagccctctcaccgccatcgcctcatttgccgccgtctctgcgctgttcgttctgccaacctacccaactctgctggcggcggtcgaaatggatgacaccggctccacccgcatcggtaaatacgtcttcaaccacgccttcctgatccccggcgtcatcgccattacgctatgcgtgatcctcgggtttatttttggcggcatcatgctgtaa

SEQ ID NO: 254311 - DNA, 1437 bp, Klebsiella pneumoniae
atgttaaacaacattcgtatcgaagaagatctgttgggcaccagggaagttccagctgacgcttactacggcgtccatactctgagagcgattgaaaacttctacatcagcaacaacaaaatcagcgatattcctgaatttgtccgcggaatggtgatggtgaagaaggccgctgcgcaggctaacaaagagctgcaaactatccctaaaagcatcgccaacgccattattgccgcctgcgatgaggtgttgaataacggcaagtgcatggaccagttcccggttgatgtgttccagggcggggcaggcacctccgttaacatgaacaccaacgaagtcctggcgaacatcggccttgagctgatgggccatcagaaaggcgaatatcagtatctcaaccccaacgaccacgttaacaaatgtcagtccactaacgatgcttacccgaccggtttccgcatcgcggtctacgcctctattctcaaactgatcgatgcaatcaaccagcttggcgaaggtttccagcaaaaggccgttgagttccaggacattctgaaaatgggtcgtacccagctgcaggacgcggtgccgatgaccctggggcaggagttccacgcgtttaacgttctgcttaacgaagagaccaaatgcattctgcgcaccgctgagctgctgctggaggtaaacctcggcgcgaccgctatcggcacccgcctgaataccccggatggttatcagcagctggcagttcaaaaactggcggaagtcagcaacctgccggttgtgccagccgaagacctgatcgaagccacctccgactgcggcgcctacgtgatggtccacagttccctgaagcggctggcggttaaactgtccaaaatctgtaacgacctgcgcctgctctcttccggcccgcgcgccggcctgaacgaaattaacctgcccgaactgcaggcgggctcctctatcatgccagccaaggtaaacccggtggtccctgaggtcgtcaatcaggtgtgcttcaaagtgattggtaacgatacaaccgtcaccatggcttccgaagcggggcagctgcagctgaacgtgatggagccggtgattggccaggcgatgtttgaatctatccatattctgactaacgcctgctacaacctgctggaaaaatgcgtgagcggcatcaccgccaacaaagcggtatgcgaaagctacgtctacaactccattggcatcgtcacctacctcaacccgtatattggtcaccacaatggcgatatcgtcggcaagatttgcgccgaaacgggcaagagcgtcagagacgtggtgcttgagcgcgggctgctgaccgcggcggagctggacgatatcttctccgcgcaaaacctcatgcatccggcctataaagcgaagcggtatactgatgaaagcgaacagtaa

SEQ ID NO: 254312 - DNA, 477 bp, Klebsiella pneumoniae
gtgcgttggattccgttaattgccgtttttttatacgtttacattgagatatcgatctttatccaggtcgcccacgtgcttggcgtcctgctgacgctgattctggtgatctttagctcggtcgtggggatatcgctggtaaaaaaccagggctttaaaaacctcatgctgatgcagcagaagatggcggcgggagagagcccggccgctgaaatgatcaaaagcgtgtcgctgatcatcgccggtttgctgctgcttctgccgggattctttaccgatttcctggggctgctgctgctgctgcctccggtgcagaagcacctgaccttaaagctgatgccgcatctgcgctttagtcggatgccgggcggcgggtttagcgccggaaccggtggcggcgatacctttgaaggcgaatatcagcgcaaagatgacgagcgcgaccgcctcgaacataaagacgatcgtcgtgattaa

SEQ ID NO: 254313 - DNA, 1260 bp, Klebsiella pneumoniae
atgagtggtttaaaacaggagttgggacttgcccaaggagtggggttactctccacatcattactgggaaccggcgtcttcgccgttccggcgctggccgcattggtcgctggtgacaacagcctgtgggcctggccggcgctgattttactggtgtttcccatcgctatcgtcttcgccacgctgggtcggcactttcccagcgccggcggcgtggcccattttgtggatatggcttttggaccgcgtctggcgcgcgtcaccggctggctctttttatcagtgatcccggtcggattacccgcggccctgcatatcgccaccggcttcggtcaggcgctttttggctggcacgatagccagctgctgctggctgaactgggaacgctggcgattatctggtgggtcggctctcgcggagccagctccagcgccaatctacaaacgctggttgccgtgctgattgtcgccctgatcgtcgctatctggtggcgcggcgggatcaaccccacgcagatccccttcccggcgcccgctgaaatcgatagttcgcagcttttctccgcactttcggtgatgttctggtgttttgtcggtctggaggctttcgctcatctggcctctgaatttaagcaaccggagcgcgattttccccgcgcgctgatgatcggcttattactggcgggttcggtctactgggcctgtaccgtgctggtcctgcactttcatgcctttggtgaggagatggccgccgccgcgtcgctgcccaatatcgtcgtacgcctgttcggcattcaggcgctgtggattgcctgcgttatcggctatctcgcctgcttcgccagcctcaatatctatatccagagctttgcccgcctggtgtggtcgcaggcgcagcataagcctaagagctatctggcccgcctgtcgccgcgacaaattccgcgcaatgcgctgaacgcggtactcggctgctgcgtgattagcgccttgtgcatttacgcgctcaatatcaacctggacgccctgatcgtctacgccaacggcatttttattatgatctatctgctgtgtatgctggcgggctgccggttgctgcatgggcgttatcgcgtgttagcggcgtttggcagcgtgctgtgcctgctgctgctggcgatggtgggctggaagagcctgtacgcgtttatcatgctggcggtactgtggctgtttttaccaaagcgcaggctcgcggagagagtcaccaggccggagtga

SEQ ID NO: 254314 - DNA, 294 bp, Klebsiella pneumoniae; identical to SEQ ID NO: 175212

SEQ ID NO: 254315 - DNA, 711 bp, Klebsiella pneumoniae
atgattgaactcgtcattgtgtcgcgccttcttgagtaccctgacgctgccttatggcagcaccagcaggagctgttcgacgctattgcctcttcggaaaagctcgcgccggaggatgcccataagctgagcgttttcctgcgcgacctgaccgcccaggatgtgctggacgcgcagtctcgctacagtgagctgttcgatcgcggccgtgcgacctcgctgctgctgtttgagcacgtgcacggcgaatcccgcgatcgcggccaggcgatggtcgacctgatggcgcagtatgaacgccacggtctgcagctggatagtcgcgaattgccggatcatctcccgctgtatcttgagtatctggcgcagctgccggaggcggaagcgcgcggcggattgcaggacgttgcgccgattctcggtctactgagcgctcgcctgcagcagcgcgatagccgctacgcggtactgtttgagctgctgctcaagctggcaaacgcccaggtagatagccagaaagtggcggaaaaaatcgccgatgaggcccgcgacgatacgccgcaggcgctggacgccgtctgggaagaagaacaggtgaaattctttgccgatcagggctgcggcgagtcggagatctccgctcaccagcgtcgttttgccggagccgttgccccgcaatatttgaatatctctaacggaggacagcactaa

SEQ ID NO: 254316 - DNA, 678 bp, Klebsiella pneumoniae
atgcacttcctgaatatgttcttctttgacatctatccgtatatcgccgggacggtatttctggtcggcagctggctacgttacgactatgggcagtacacctggcgtgcggcctccagccagatgctggaccgtaaagggatgaatctggcctcgaacctgttccatatcggtattctgggaatttttgccggtcattttctcggcatgctgacgccgcactggatgtacgagtcattcctgccggttgacgtgaagcagaagatggcgatgatcgcgggcggcgcctgcggcgtcatgacgctggtgggcgggctactgttgctgaaacgccgtctgctgagcccccgcgtgcgcgccaccaccaccggagcggatattctgatcctctccctgctgatggtacagtgcgctctgggtctgctgactattccgttctccgctcagcatatggacggtagcgaaatgatgaagctggtgggctgggcgcagtcggtggtgaccttccacggcggggcttcgcagcatctggacggcgtggcgtttattttccgcgtgcatctggtgctggggatgacgctgtttgtgctgttcccgttctcccgtctggtgcatatctggagcgcgccggtcgagtacctgacgcgcaaataccagattgttcgcgcccgtcgctga

SEQ ID NO: 254317 - DNA, 843 bp, Klebsiella pneumoniae
atgcattcattacaacgtaaagtactacgcactatttgccctgatcagaaaggcctcatcgcgcgtatcaccaatatctgctacaagcatgaactcaacattgtgcagaacaatgagtttgttgaccaccgtaccggtcgtttctttatgcgcaccgaactggaaggcatttttaacgacgctactctgctggccgatctcgacagcgccctgcctgaaggctccatccgcgaactgaatccggcaggccgtcgccgggtggtgattctggtgacgaaagaggcgcactgtctgggcgatctgctgatgaaagccaactacggcgggctggatgtcgatattgccgcggttatcggcaaccatgacaccctgcgctcgttggtggagcgctttggtattccgtttgagctggtcagccatgaaggactgagccgcgaagaacacgatcagcggatgggcgatgctatcgccgcccacgaaccggattacgtggtgctggccaagtatatgcgcgtcctgacgccagaatttgtcgcccgcttcccgaacaaaatcatcaatatccaccattcgtttttgccggcgtttatcggcgcccgtccctatcatcaggcctatgagcgcggcgtgaaaatcattggcgctaccgcccactacgtgaatgacaatctggatgaaggcccgatcatcatgcaggacgtgattcacgtcgatcatacttataccgcagaagatatgatgcgcgctgggcgcgatgttgaaaaaaacgtcttgagccgggcgctgtatcaggtactggcgcagcgcgtcttcgtttacggtaaccggacgattattctttaa

SEQ ID NO: 254318 - DNA, 1437 bp, Klebsiella pneumoniae
atgaaatactttgcgcgtagtgcgctttctctgggacttttcgccgtttttagcacctctggttttgcctctggcctcgttctggccgataacgaattccgcaatgatttagcctggttatccgaccgcggaaccctctctttaagtttgtccacctggcctttgagcgaagaagagattaaccgtgcactggccaatgcccatccgacaacatccgcagagcgggtggttctgagtcgggtaaatcagcgtttaagggcgctcaaagccgacgtgcgcgttaccggttacagttccactgataagccgggaactccgcaggggtttgcccagtcttatcccgctgaccagtcgctttctctcgccctgaacaacagcggtgaatggtgggatctgcacctacagggcaatgttgaaggcgacaaacgcatcgacaacggctccagcgtaaacgccaacggcgcatacggcgcggtaaaactgtggaaccagtggctggcgttcgggcaaatcccgcagtggtggggaccgggttatgaagggagtttgattcgctccgatgccgcgcgtcccatgaccggttttctgctgcagcgtgcagaacagcgggcgccggaaacctcatggctaagctggattggcccctggcagtatcaactttccgccagccagatgaaccagtacgccgccgtaccgcataccaaaatcttcggcggtcgcctgacgttttcgcccatctcctcgctggaactgggcgcttcgcgcgttatgcagtggggcggcgaagggcgaccttcatcattcagcagcttctgggacggcctgaccggcaatgataacaccggtgaatcggccgacgatcccggcaatcagctggccggttttgatttcaagctgaagctggcgccagccttgggctggccggtgagcatttacggccagatgatcggcgaggatgaagccggatacttgccctcggcgcacctctaccttggcggcgtggaagggcaccatcagtggaacagcaatgcggttaactggtatctggaagcccacgatacccgctcgaatatgggacgcaccaactatatctataaccactttatctataaagatggctactatcagcagggctacccgctgggcgatgcgatgggcggcgatggacgcctgtatgccggtaaggtggagctggtcaccgaagcaaatcagcgctggagcgcgcgcctggtctacgcggaagtcaatccgaagaaccaacgaatcaataaagccttcccgcacgccgacacgctgaagggcgtacagctgggctggagcggcgatgtcatgccgacggttcgcctgaatacctccatgtggtacaccgatgcaaaccacagcgccagcgacgatgttggggccagcatcggcattgaactgccgttcagtttataa

SEQ ID NO: 254319 - DNA, 474 bp, Klebsiella pneumoniae
atggactataacgttaaatccgtaggcaagaagaaaattgccggttttcatctggtcggcccctgggaacagacggttaaacaggggtttgaacagctgatgatgtgggtcgacaacagccaggttccggcgcaggagtgggtggccgtttactacgacaatccagacgaagtcccggcggaaaagctgcgctgcgacaccgccgtcacggtggcggaagactatcagatccctgaaggaagtgaaggcgtgatgatgaccgaaatcgccggcggcgagtatgccgttgcccgcgccagagtcgagaatttcgattttgcgactccgtggtatcagtttttcgaaagtctgatgcaaagcacagagcatcagatggcgatgaagccctgttttgaagtctaccttaacgatggtaaccaggacggctactgggacattgatatgtatatcgcggttgaacccgtagtgaagtga

SEQ ID NO: 254320 - DNA, 1059 bp, Klebsiella pneumoniae
gtgcgcgcggataaatcacttaagccatttgaaattcggctgtatcgccattaccgcatcgtccatggcgtgcgaatagcattggcctttgtgctcacctttgtgctggtgcgcctgcttaacgtgccggaaggtacctggcctctcatcaccctggtggtggtgatggggcctatctccttctggggaaacgtcgtcccgcgcgcgtttgagcgtatcggcggcacgatcctcggctcggcgctcgggctggtggcgctcaagctggaacttatctctctgcccattatgctgctgtggtgcgcggtggcgatgttcctctgcggctggctggcgttgggtaaaaagccctaccaggcgctgttgatcggcatcacgttggcggtggtggtcggcgcgccgccgggcgatatgacgaccgcgctatggcgaagcggcgacgttatctttggctccctgctggctatgctgtttaccggtatctggccgcagcgggctttcctgcactggcgcatccagatggccagctacgtcaccgccttcaaccgtctgtatcaggcgggtttctcgccgaacctcgtcgagcgtccgcgtctggaaaagcatatgcagaaggtgcttaacgatgtggtcaaaatgcgcggattaattacgcccgccagcaaagagacgcatatccagaaggccatctttgaagcgatccagaccgttagccgtaatctggtgtgcatgctggagctgcaaatcaacgcctactgggcatcgcgtcccggccattttgttatgctgaatgcccatacgctgcgcgaaacgcagcaaatgacccagcagacgttgctgactatcgcccatgcattgtatgagggcaatccgcagccgattcttgctaacaatgaaaagctcaacgaaattgtggccgagctgcgccagctcatcaaagagcagcaggacgacaatttctctgaaacgccaatccatggttatgtctggctaaccatcgaactggcgcggcagcttgagctgctgtcgcatttaatctgccgggcgttgcgtaaataa

SEQ ID NO: 254321 - DNA, 336 bp, Klebsiella pneumoniae
atggaaacaactaagccttctttccaggacgtactggagtttgttcgcctgtatcgtcgtaagaataaactgcagcgtgaaattcaggacgttgagaaaaagatccgtgataaccagaagcgcgtactgctgctggacaacctgagcgactacatcaagccgggcatgagcgttgaagctatccagggcatcattgccagcatgaagagcgattacgaagatcgcgttgacgactacatcattaaaaacgccgagatctccaaagaacgtcgcgatatctctaaaaagctgaaagcaatgggcgaagcgaaagtagaagataaatctgccgagtaa

SEQ ID NO: 254322 - DNA, 741 bp, Klebsiella pneumoniae
atgattaagtcattttttgccgcattatcgtttatcagccgcctgccggtcccggcgcgtttgtctcaggggctggaaattgaacaatatcaacgcagtatcgttacttttcccttggttggcctgctgctgggggcgatcgcgggggttgtcgtgatactgctccagccctggtgcggcggcccgcttgccgcgctgctcggcgtgctggcgctggcgctgttgaccggcggcttccatctggatgggctggcggatacctgtgatggtattttctctgcccgccgccgcgagcggatgctggagattatgcgcgacagtcggttgggcactcacggcgggctggcgctgatttttgtgctgattgcaaaagtgctggtggtcagcgaggtcacgctgcgcggtacgtctgcggttgccgccctggcggccgcctgcgccgtggcccgcggtatggcggtgctgctgatgtaccgtcagcgctacgcccgcgaagaggggctgggcaatctgtttatcggtaaaatctcgctgcaacagacgctgatcgccatggggatcgctctggcgctggcgacgctgctgctcggcgttaacggtctgcgcgcagcgcttatcacgctggtgctggtctgggcgctaggccaggcgctgaagcgtactctgggcgggcaaaccggcgacaccttaggcgcggcgattgagctcggtgaagtcatatttttgctggccctgctgtaa

SEQ ID NO: 254323 - DNA, 1110 bp, Klebsiella pneumoniae
ttgaataacaagataaaattagagaaagaaatcgcatgggccagccagaatatgccgcgtacgctgcgccaggtcgccgccctgcccgacctcagccaggttcgtctggcctgctgtatgcacctggatatgaaaatgatcccactggtgcagggaattctggaaaaaggggcgaaggttttcctgaccacctgtaacccaaccacggtgcaggatgatgtggtcgcctggctggttgagcgcggcgctgaggcttgcgcatggcgtgatatgagcgatgccgactggcagcaatcgtgggaaaaagcgattgcctggcagccgacgcatctgtgcgaaatgggcgcggatataacaaccctactgcatcagcgcggggagttcggcaatgttgtcgccgggcttgaagcgacaggctctggcgttagccgcctcggcgatattcggcccggctatccgatttttaactgggatgatttgccggttaaggaaggtctgcataaccgtcatatggtcggcctgaccgcgtggcataccttcttccagacgacccacctgaccctgcatgagaaaaaagtaatggtcatcggctatggtctggtcggccagggggttgcggcggcggcgaaggccttcggcggccaggtcatggtggcggaaatcgacccggcacggagattacaggctgcctacgacggctggcacgttgttgaattacaggaggcgatagcttcggcggacgtggtggccacggctaccggcggcaaaaaagtcgttaacagccaggcgcttgataaatgcaaagatggagtgtttatcctcaacgtgggtcacgtggcggaagagattgattgcgagtacctgcgccagttcagccatgaagaggtcatgccctatatcaacgcttaccggatgggccagaaaacgatctatctgatggcgaacggttcaatgctcaacctgaccgcgggttttggcgatagcctgaacgcctttgacgtcaccctggcggtgatggccagcggcatccagcatattgtgaccgacggcatgacggcgccggcggacgtttatctgctgccgcaaagcgtatggcaaaaagcgctgtaa

SEQ ID NO: 254324 - DNA, 738 bp, Klebsiella pneumoniae
atgttaagcgttttacccggatcgctcttttcacggatccgcattttccttggccgccttaagccgcacgcgttaccggtcgccagaaaacatatcgttctggcgtcaataggcgccgggacggggctggcggtcaccagtatgtttagccactggctattaggcgaggtcaatatctggtttatcgccccgatgggcgcgtcggcggtgctgctgtttggcgtgccgagcagtccactggcccagccgtggtcgatagtcggcggtaatgtcctttcagcgctgattggcgtgaccgtgggaatcgccatcccgaacctggccctggcctgcggcgtggcggcagggttggcgatcgccggcatgtatttcctgcgctgcctgcatccgccgggcggcgcggtggcgttaacggcgatcctcggcggggcggggatacagagcgaaggctatcactttgtcctgaccccggtgttactcaactcactgatgctggcgatgctggccattgtttttaataacctggtcggacggcgctacccgcatccgctggcggcggaggaagtgaaggcgaaagcggaggcggtgccgctgggcatatccgtgacgcgcgaagatattcatgcggccctgctggacggtcagtttctcgacattgatgaagacgacgtgcaggagctgctggaaaatattgaacaaaaagccagacagcgtatcgccagcgcccagcgatcctga

SEQ ID NO: 254325 - DNA, 1425 bp, Klebsiella pneumoniae
atgaccgatcatgtgataactgaaagtcgtaaaacagataatgataagaaaatcagattaataaccctcgtctcaaccattggtgggctgtgttttggctatgacaccggggttatttccggcgcgctgattttcatgaagaacgatctgggcctcactcctctgcaggaagggctggtgacatcgtttttattattcggcgcggcaatcggctccgttggcggcggctggctgtccgaccgccaggggcggcggaaaaatattctgtgggtagcggtgatttttatctttggcgccctcggtaccgccgtcgcgtgggatatgtcgtcgatgataatcgcccgctttatcctcggcctggcggttggttgtgcgtcagtgacggtgccgatttatatttcagagctggcgcggcccgcgcagcgtgaacggctggtgacggtcaacgaactgatgatcgtcaccgggcagtttctcgcttactccgtcaacgcttccatcgtcaatttctatcccgacatgtcgcacaactggcggctgatgctggctattccggcgctgcccggcgcgctgctgtggattggaatgctggtaatgccggagtctccgcgcttcttcgtgcgtaaggggcaaatagacaaagcggttgcggtgctgaaaacgattcgtcggcctgaagaggtggagcaggagatccgcgatatccagcaggtgagtcagattggcatcaaccatggccgatttgttgacgagctgaagaaaaaatgggtgctgcagctgattttgatcgggctgatgattgtgctggcaacgcgcgtaaccggcgtgaataccataatgtactacgcgccgacggtgctgaaagccaccggacttggcgatgcggcggcggtgactggcgccgtggctaatggcgtcgtgtctattctggccacgctactagggatgctgttaattggcaggcattcccgacggaaaatgttctttaccggacagatcggcgtcacccttagcctggtgttgattggtctctcgttcaagctcttcttccatatggaaaccgttgatggcgtcagcggcttgcacgccaactttaccggcgccagctacatcatccttgccctgatgctgatgtttctgacctttatgcagggttggatcgcaccggtgttctggctgatgctcgcggaaatttacccgctgcggatgcgcggtctgggtatgggttttgcggtattcggtttatggatatttgacttcatcattcagtctattttcccgattttactcaacagctacggcggcggaatgaccttcggtttcttcgcggtaaccaacgtcataatgctgattctgctggtgaagttcctgccggaaacccgtggcttaacccttgaacaaattgaacaaaaattcagattctga

SEQ ID NO: 254326 - DNA, 1011 bp, Klebsiella pneumoniae
atgacagttaatatcggtttaattggtttaggtatgattgggcgcgatcatctccagcgttttcagacggtgattcagaacgccagggtcagcgccgtctgcgatatcaatcgtaatgttaccgacactcttgcccgcgaatatggcgctcaaccctattacgatgcggtcgaaatgattcaatcggacgacgtggatgcgatctttatttgctctattggtccggtccataaagaacaaattctggccgccatcaaggcaggtaaaccggtgttttgcgaaaagccgctgaccccaaccgcggatgaagccaaagcgattattgatgctgaagtggcctacggcaaacgtatgctgcagctgggttttatgcgccgtttcgacccagggtacaaccagcttaaagcgactctggatagcggtgaactgggggaaatattgctcatccattgcgcacatcgcaacgcctccgtgccagaaagctacaccctggagatggcgattaacgattcggcgacccacgagatcgatattatccgctatctgcttaacgaaaatatcgtttcggtgcgcgtcgataaaccacagaagaaaacgcgcagagcctgcgcgcatctgcaggatccgttgattgtgatttttgaaaccgaatccggcgtacgtattgatgatgagctgtttgttaactgcgattatggttacgacattcgctgtgaagtgattggcgaaaatgccattagcgcattgaccgaacaggctctcaccaccgtccgttcggcacagggttatagccgcgctatccccaaaacctgtatggaacgtttcgccaccgcctacgatcgcgaggtgcagaatttcgttgaccgggtaaacctgggggcggagatgagcgggccatcatcgtgggacggatttgtcgtggctatggtatgcgatgctggcctggcatcgctgaaggatggcgaaaagcacgcggtctctctgccggagtgtccggcgctctaccgctga

SEQ ID NO: 254327 - DNA, 450 bp, Klebsiella pneumoniae
atgttaacgctgaaaccagaagatatttttattggctgtcgggcgaattcaaagaaaaaggcgctgcgtattgccgcggattccctgcaggccagcggctacgtcagcgagggtttttttgaatcgatggtggatcgcgaaaaggcgctctctacctggctcggggcgggagtggcgatgccccactgtagcaaagaggggatcgacctggtgcggcaaaccggtttccagctgtttcagttcccggatggcgtgggctggggggagggaaaagtggctttccttgtggtcgccgtggcggcaaaaaataatgaacacattgatgttatagcggatctggcagacctgcttgatgacgaagtgaaaaccacgctgctggccagcgccgacagcaaagacgcgtttatgcagatcctcgaaggacactcatttaagaaggatagaatatga

SEQ ID NO: 254328 - DNA, 942 bp, Klebsiella pneumoniae
atgaaactggcactctgtaccgatgttctcgccggcctggcgttcccggaaatgctcgatcgcgtcaagcagtacggcattacgggcgtggaaatgaccgcaggcggttggtcgccctgtccacatgttaaaactgaagaactgctggcttcttcggcagcgctggcggcgtttcgcggagaactggaaaagcgcggaatggagatcgttgcgctgaactgttcgggtaacccgctggcccccggcgcgctgggcgagaagcataccgccagcagctatcgtaccgtcgagctggcggcaaagctgggggtgaaaaagattgtcatgatgagcggcctgccgggcggcgggccggacgataaaatccctaactggatcacctcgacggtttcctggccggactatatgccaggcgtgatcgattaccagtggaacgaggttgctattccctggtggcaggcttttacccgccatgcggctgaacacggcatcgaacagattgctctcgaggaattccccagccagctggtttacaacccgagcacgctgctgcgcctgcgtgaggcggttggcgacataatcggcatgaatctcgatccgtcgcatctgatcgccatgggggcagacccgattgccgcagcccgtaagcttgaaggggtgatttatcacgtccacggtaaagacgcgcgtattgaacgcgggctggcggatgtcgacggcttactggaataccagccggtcacgcagaccaaaacccgcacctggaactacgtggcggttggctgtggacaggatttgaagtggtggaaagagttcttctcggtgctgcgcatgaccggatataacggttatgtgtcgctggagatggaggacctgacgatgagcgttgaagcagggctacggacgtcgattgatgccctcaacgccacattaagtcagtga

SEQ ID NO: 254329 - DNA, 1005 bp, Klebsiella pneumoniae
atgagcgccccaaaacgacaaaaagcgaccgccagcgacgttgcgttactggctggcgtctccaaatggacggtttcccgggcatttacccccggggcctccatccagcccaaaacccgggaagaggtgatgaaagccgctaatattctgggatatcgaccaaatttactggcgcgtagcctgacgcaaaagcaaacgcatattattggcgtggcggtcgacgagttacgcaatcccaacatggtgctgctgcttaacgaagtgactcgccagctgcagaatcgtggctacatggcgctggtgattaacgtcaccgatgaagaaaatacccgcacagcgatggcgctggcttaccagctccaggttgacggtatcttgtttatggccacggtgctgacaccggaacttatcgcgattgccactgaaattcatcgcgttccgctggtgcagattggccgtaataccgatcatccggaaatccaggtggtcaatatcgatggtcggcttgccggaaaacagcttgctgaactgctactggcgcaggggcatcgcacttttggctatatgaagggtccggataccgcttcccaccatttaatgaggatggaaggatacgaagcggcgctggagcaggcaggctgccggcttgatactctgctggttgcaggccagtatttacgtacccggggatatgcggcgatgagtgactatctggatgcgacgcccgcaggcgaaagagtagatgccctgttttgtgaaaacgatattctggcgataggcgcgcttcaggcgctgcgcgagcgcgatttaacgatgggtattgtcggtttcgataatatcgatgaggcggcggcgccggaatggcagctaacgacctacgatcagcgacgggagcggctggtggaagaggcgttgaatcggctcattgatgctgctgaagggccgacggcgacgtggcgcaccggggaacccatcgtgcgccagtcgcatcgtcggcagagctaa

SEQ ID NO: 254330 - DNA, 390 bp, Klebsiella pneumoniae
atgccattactgacgtttgatatcattgaaggacgcagcgaaaacgagatcaaaaccctgctggatgcggcacatcgcgccgttgtccaggcgttcaaggtgccagagcgtgaccgctaccagattgttcacgaaaacaaagctcaccatatgattattgaggataccgggctggggctgacgcgaagccgggacatagtggtggtgagggtttataccagcccgcgcagcgaagcgcagaagcagcttttttatgccactctgcaggctgagcttgaggagcactgcggtctgagcggcgaggatctcatgatctcggtaatcagcaaccacaaaggggactggagttttgctcacggcgtagcgcagtatattaccggcgacctttag

SEQ ID NO: 254331 - DNA, 921 bp, Klebsiella pneumoniae
atgatgagcgaaatccgcccggacatttactggacccacctgtactggctgacggtactggaggagcaaaaaagctatactcgcgccgcggaaaagctggcggtcagcaagtccgccattagccagaaaataagcgaactggagcgggtcaccggcaagacgctggtgcaccgcaccacccgcagcgtgaccctaagcgaagatggccagcggctggtggcggaactaaacgaaccgtttgggcagatccgcgagatctttaccggcacctgcgacgatgagggcggcccgctgcgcggaacgctgcgccttaccgcgccggtggcgttctctcgacagcagctggttccggccatcacgccttttctgcatcagcacccgcagcttcatctgcagctggaggtgaccgatcggctggtgtcgctcgccagcgaagggtttgatattgccattcgccactgtcgtcgcgagctgctgccggagacccacgtagcctggccgctgtgccgtacggcaaccctggtggtcgcctcggcggactatattcgccgctttggtcgccccgattcgcctgacgcgttgcgtcagcatcaatgcctgacctacccgcgcgggccgcaaagcccgcactggacctttgagcgcgacgacgagcgggtgagcgtgaaggtgcagggacccttcgccaccaataacagcgaatccctgcgcgatgcggtgctggcggggctgggaattgccttactgccggattttagcgccagggaagcgattggccgcgggctggtacaggagctcttgccggaatggcggccggtggatgtatttgcggaaagtctctacgttattcgcccctacgcgccgcgcgtatcgcgggcagtagagacctttagccgctatctgaagacgaccttcagctaa

SEQ ID NO: 254332 - DNA, 732 bp, Klebsiella pneumoniae
atgattcaggagccctgctggccgcagcgctttcatcaccagcagctgccgcttcactactgcgccgatccgacgcttgccgagcagccgctgtttgaccgggcacgcgacggggaagcggtggcccagctctggcaggccccgcagggatttgtggtgccgggaagctatcgcaaatttgccgaactcccggcggtaagcgagcagtttgccagccggggatggccggtctggcagcgccgctccggcggcggcctggtcccgcaggggccgggaattgtcaatctcagcctggcctggccggtttatcactcgctgggcgaagccgcagagccgatttatcttttcctctgcggcctgttgcagcgtacgctttcaacctttggcgtagccagccactttcaggcggtcagcggttcattttgcgatggacgctataatctggcctgcggcgaaggcgggcaggtgcgaaaaatagccggcacggcccagtactggcgccccatgccggcaggacggggccatgtggtcctcgcgcacgcggtgatcctgctggacgtcgagctgcaggctgcccatcgggcggccaatgatttcgaagcccggctcggcagcggacgggtataccgcgccgagaaaaccgtgacgcttgccgaacttgtgacacaaccagccgatttgctcccccgctttcgcgaggcgctggtgcaggagttacagaatattagctga

SEQ ID NO: 254333 - DNA, 1335 bp, Klebsiella pneumoniae
atggaatcaacgttaatttctcagggccccggcaaggaggcatgttcactcaaccgcgcccgcagagcggcctggggcagcttcgccggggccgtggtcgactggtacgactttctgctctatggcatcaccgccgcgctggtatttaaccgggagtttttcccgcaaatcagcccggcaatgggtaccctcgccgcgtttgccaccttcggcgtcggtttcctctttcgcccgctgggcggcattatcttcggtcattttggcgatcgcctcgggcgcaaacgcatgctgatgatgacggtgtggatgatggggatcgctaccgcctgcatcggtctactgccctcgttcaaccagataggctggtgggcgccagttctgctggttctgctgcgcgccgtacagggttttgcggtgggcggagagtggggcggcgcggcgctgctggcggttgagagcgcgccgaaaaataagaaagcgttctacagcagtggcgtgcaggtgggttatggcgtcggattgctgctctcaacggggctggtgtcgctgataagcgcctgtaccaccgatgcgcagttccttagctggggctggcgtctgccgttcttgtttagcgtcgtgctggtgctggcggcgctctggatccgcaacggcatggcggaatctgccgaatttgaacagcagcagcgcgaacagcagcaacagccgcagaaaaagcgtctgccggtagtagaagcgctgttccgccatccgggcgcgttcttaatgattatcggtctgcgcctgtgcgaactgctgacaatgtatatcgtcaccgccttcgcgcttaactactccacgcagaatctcggcctgccgcgcgagctgtttcttaacattggcctgcttgtcggggctatcagctgtctgacgatcccctgcttcgcctggctggcggaccgctttggccgacgccgcgtctatatcaccggggcgctgatcggcaccctcagcggcttcccgttctttatggcgctcgaaagccagtcatacttctggatcctgtttttcgcgctcatgctggcgaatattgcgcacgatatggtggtttgcgtccagcagccgatgtttaccgaaatgttcggcgccagctatcgctacagcggggccggagtgggatatcaggtcgccagcgtcgtcggcggcggttttacgccgtttattgccgccgctctggtcaccctatccggaggctcctggcatagcgttgcgatctatttgaccgtgggttgcctgctatctgcccttacggcgatgctgatcaaaccttgtcgccacggcgatgaaccgctttaa

SEQ ID NO: 254334 - DNA, 498 bp, Klebsiella pneumoniae
atgcgtttaatttttgcagctttattttgtgtcatggttttgccttccgcttttgcagaaaaactgccggcgcccgtgggtaaacccgttttaactatttccggcctgattactaatacgaatgagggcgataccgccgtttttgatgtggcggcactggaaaaactgggcatggaaacgatcgtaacaaccaccccgtggtattcgggaaaggttcgctttgacggcgtttccctcagtaaactcatggatttagtcggtgccaaaggcaagtcggcgcgggtgctggcgctgaatgattacaccaccattgttcccatcgatgactttcataaatttccagtaattttggctttaaaaatgaacggcgaatatatgcgcattcgtgataaagggcctttatttattgtttatccctacgacagtagcccggaattgcagaatcagatttattattcccgttcggcatggcaggtttcgaagattataattgagtaa

SEQ ID NO: 254335 - DNA, 990 bp, Klebsiella pneumoniae
  misc_feature (954)..(963): n is a, c, g, or t
ttgaatcgaatactcactgccattattttgtcgctcttcattgtgaccggttacattacttatctggtccatgagcggcaaagtgagctgcaaaaattaacccgttatactgattcgtggtccgtttcccagatagtctccgagtacatgcgtcttgaggcgcgactgagtgcgatgggactggaggtaaagggaagcgaccacgaggaggtgcgcctgcgtctggaaatcatgatgagccagattgcgctgctgcagcagggtgatttgggaaagtttatcggcaaagatcctcatcgtaaggcgatagttgacagcctgattactcttctggaccggctggataagcagctggataccatgacgacagcacagctgaagctgatgttacaagagatgagcaccctggacgggccgttgacctcgctcgcgtccacctctctcgcccaggattttaatctggttaatctcacccacgataaaatacagaacctctattacatctattcggccatttctattctgctgattattctctgtatcacgctcgggatgttgatgctgaagcagaataacaccctgcgtcgcgctcacgtgcggatgaaattactggctaccgatctgcaggcttccaaagaaaagctacaggtgcaaaaccgtcggctgcagtacgatgcctatcatgattcgctgaccgggatgcccaaccggctctctttctggcaacgcctgcaggaggtggttaaccaggtgcggccctatcacggctcggcggtggttatgttgttcgatctggataatttcaaggacgtcaacgacacgcagggtcatgacgccggagataagctattgcaggatttggctagccgtctctcattttttcgtaaaacgtcagaaacgctgtaccgactggggggagacgaatttgctctggtgacccacgatcttagcgannnnnnnnnnagatggcgctggagcgggcaacggtga

SEQ ID NO: 254336 - DNA, 945 bp, Klebsiella pneumoniae
gtgatccgggaaaagattagccagccgtatcagatttacgactcgcagattcagatcggcgcctgtatcgggattgtcatctctgacggagaaagccgcaccgactatttatacaaatgcgccgacctggcgctgtatgaagcgaaaaaagagggctccggttacgtccagatattccgccccggtatgcttcagcgccagcaggagaataaatctttcgaagatgacctgatgcaggcgctcgagagaggggagttcagggtttactatcagccgattgccgatgccatgaatggtgaaatctacggctatgaagcgctggttcgatggtttcatccgctacgcggcagcgttccgccgacggaatttatcccggtggcggagaaaatcggcctgattaatgcgttgggcgagtgggtattgaaaaccgcctgtgaagcggccgccagctggtcgtcgccgctcaaggtgtcggttaacgtgtcgccggttcagttaatgaacagttcactgaccgataccgtggtaactatcttaagaacaaccgggctggatccgtatcggctggatttggaaattaccgagtctgacgtatttaatgaaaatacccgctcgttagagatcctgagccagctgcgtgagcttggcgtgcagatctctattgacgactttggtaccggctattcctcgctctcgcgtttaagctatttcccgtttgataagataaaaatcgatcgatcatttgttattaatataccccatcagcaagacgatctcgatatcgtgcgcctgatcatcagcatgggtaaaagcctgcatatgcgaattgtggcagaaggcgtcgaaacggaagaacagctgaagtcgttacgaaaattaggttgtgatctggttcagggctatttgatcggtaaaccggggccgcttacttcagcagggaaataa

SEQ ID NO: 254337 - DNA, 333 bp, Klebsiella pneumoniae
atgcagcgaatcatcatcccgacccactatgtgcatacccgtagcaccccgctgtggacaaaagagacggcgccagcgtcgatctggaagcggcatctggacgcgggcacccggcagggcgtctacccacgactgtcggtgatgcgcggcgcgatacgctatctgggctacgctgatgagaccagcccggatccggtcgaaaccctgaccattgctgaaggggagtttggcgttttcccacccgaaaaatggcactgcattgaggcgttaacggaagacatcgtatttaacgtcgacttttacgttgatcctaaaattcttatcgagggataa

SEQ ID NO: 254338 - DNA, 339 bp, Klebsiella pneumoniae
atgaacagtgaaaataaaggttatgcgttagcggtaatcaacggcaataataaagataaaaaagaaaaagtgtatgttaaacccatggccctgtacgtgcctgatatcgcggcgcaggccatcgctgagcttatttctgatctctcagtggataacgccggggataagggatttatcgtaacggtaaccaacaataataatggcgtgtcggtcgacagtgaatttgcaactttggctgaattgcaggatccgcagatggctgccgatgcggtaaaagatctgattaatatcgtgcgcggctacgagtccgacgaagagactaacgtctgcggctggtaa

SEQ ID NO: 254339 - DNA, 699 bp, Klebsiella pneumoniae
gtgatatacaaatccattgccgaacggctgaaaaatcgcatcaacagcgatgagtttgaagtcggagatgcgttaccgagcgagaaagcgttagccagcgagctacaggtatcagtgatgaccatccgcaaagcgctaacgctgctggaaagggaaaaattgatcgtcaaacgccacggcagtggttcatacgttgcgcgaaagagcaattatcacggcggggagcttgatgggttcaactatcagatgcatatcgttggcgagaccaactatcgcaacaaggtcatcgagttcactatgctcgatgcgcctctggccatcgcacaacagttaaaaattgagcccggagaaaaagtctattatgtcaggcgcattcggatgattgatgacgtgcccattctgatagaaaacagctatataccggtagcgattttcccatggcttagcatcggaaatctggaaaggtcaaaatttaactactttaagaaggagtgcaacatcaccattctggaaagccaccgtagctattccccggttctggcctcccgcgaacaagcggaactcctgcaggttgcgcaaaacagcctgctgctacgcgtgcaatcgatcagctatgcgcagaataatctcatcgtcgatttatccgatatttaccaaaataccaataaatacaatgtaaaacatatcactcgccgttga

SEQ ID NO: 254340 - DNA, 1536 bp, Klebsiella pneumoniae
atgatcggggtaaaaaaattacaagatttttccagggcgatgattgggccggttttatatctgccggttgtgggtctattgattgcgttgctcagtatgaccaccaataaattatgggtggcagaagacagctcgcttttcctgctggggaaatatgcttccagtatgctctgggcaatcatgaacaatcttggcttcttcttttgcctcggtctggcgagcgggctggcaaaaactcgcaaagcggaagccgcgtttgtcgccgcaatgacctggtttatgtacctggcggccaataatagctggcttactctgaccgggcggcttgttgaggggagcagcaacgcgcagctttacggcagcgggcaaacctttattttcggtttccaggtcatcgatatgggcgtgtttcttggcatcattctgggctgcgcggtggctttcattcataaccgctttgtcgatatcgagtttcgcggcgcattctcaatttatggcaacagtaagctggttctgatcgtaatgatcccgctggtcggcgtgtttgccatcgccacggtctatttctggccaattgttgaacacggtatatcggcgctgaccggcgtcatgaaaactttcggcgccgccggcgtttttctgtatggttttctcaatcgttttcttatcccgaccggtttacatcatctcatttggtcacccttcgtttttacctctattggcggacagctgttaattgatgggcagacgatagtcggggcaaagcccattttcctcgctgaaattgccggtaacaccgggggagcgttaagcgactcggcgcgattcctgacctatggaatggtcaaaatttttggcacggccggaatggccctggccttttataagacggcgaaacctgaaaataaacaaaagttgaaagtcacgcttatcccgctgattgtgacctccttcctcgtcgggataaccgaaccttttgagtttttatttatcttcaccgcaccggtgttatggctggtttattcgttagtggatggctttttccagatgctggcgtggctgctcgatgttcgggtctgcgcaaccaacggcattatcgattttattgtttataacataccggcgggagcccatctgacgcgctggcctgtttttgtcgccctggggttagcggaaacagcggcgatgtattttatcggtaaattcctgattctgcgtttcaggatgcgcacgccaggccaggaacaacaggatgaggcgctaagccgagcggcgagcgcaagcgccccagccaaggcttccggtgaacaggtcattctggggcttggcgggaaagacaatgtgtgttctgtcggcaattgttttacccgacttcgggttgacgtgcgggatccggcattaattcaggaacatattctgaaaaccagcggcggtaccagcgtcattatcaaaggtaatcacgttcaggttatttatggtttaggggtgaataaaatccgtaatgctgtggatcgctatttagatgtacatgaataa

SEQ ID NO: 254341 - DNA, 1329 bp, Klebsiella pneumoniae
atgcaaaataaatttgttgttacgatagctggcggcggcagtacttatactccagggattattatgatgctgctggaaaatatggacagatttccgctgagcgaaattcgtctctatgataatcatcacgatcgtcagcgcgtgatcggtgaagcctgcgcgattctggtggctgaacgttatccgcaagtggcttttagctacaccaccgatccgcaggaagcttttaccggcgttgattttgtgatggcccatattcgcgtcggcctctacgagatgcgcgaaaaggatgagaaaataccgcttaagcatggcgtgattggccaggaaacctgtggccctggcggtatcgcttatggtatgcgttccattgccggggtacttgaactggttgactatatggaaacgtactcccccggcgcgtggatgctcaactattccaatccggcggcgatcgttgccgaggccactcgtcgattacggccagcggctaaaattattaatatctgcgatatgccggtggcaattgaaggattattcgccgatatccttggtctgaaatcacgtaaagagatgaacgtgcgttatttcggcctcaaccatttcggctggtggaccagcattaccgataaggccggtaatgatttaatgccgacgttaaaaaagcatgtgtctgagctggggtattgcagtccgaaagaggattttcagcacaaagcgccaagctggattgagaccttcaaaaaggtgaaggacgtctttgcgctggatacggacacgttgcccaatacctacctaaaatactatttttatgccgactacgaggtagcccactcggacccgaactttacgcgcgcgaatgaggtgatggccgggagagagaaagaggtattcgatatggcgaaagacattgtcgcccggcggagcgccaaagcggcgcatttccatgccggggcgcatgccacctttattgtcgatctcgcctgcgccatcgcctttaatacccaggaaagaatgctgttgattgtagagaacaacggcgctatcgcgaattttgacgagaccgcgatggttgaagtgccttgcctggtcggcgttaacggtcccgaaccgctggcgatggggaaaataccgctgtttcaaaaggggctgatggagcagcaggtggcggtggaaaaactggttgtcgacgcctgggttgaaggaagctaccaaaagctctggcaggcgttgaccttgtccaaaacggttccgagcgcgtcggttgcgaaagctattctcgatgaactgatcgaggccaatcgtggttactggccggagctgagctaa

SEQ ID NO: 254342 - DNA, 1458 bp, Klebsiella pneumoniae
ttgtttacgaataacctcccggagagtgacggcatcctgtcgccctgttcgctggtcacagagggcctggtgcggttgatggaagacgggggcgcccggcccgtggtgttaacttcagcgtcaccgacgctgccccctgacgtacgccgtctggtggtgtttctccctgaatctcctgttcggctactctcaaccctgaagcgggccgctatgctgctggaacagtccgcaacgccgctaccgatgctgtttctcagccgcagcccggccagttggctatggtccaccctgctacaccaggtcgcagagcggcgtcagctttccgcggtgcgggcggccgcctccgacctcccggtcccctgtctggcggcgctactgcgcgacgtcatacccgagggatatccttcccttgaacagctggcagatgaagaagcgcgggcattgggtaagcgccctgccgggctaacccgaccggagctgaacgccatcctcggtttgctctgcggataccgcgccagcgatcaggccaaacgccgcggcatcagccacaagacgctctacaatcaaagaaccgcaggattgaaaaaaatggtggaacaccacccgcagatggccgcccgctttcccggcagccagataagagaacagaaaagcgagcccatcgccgccctttgcgctttcgagcgtgaatttgtccatgcaatccatagccgacaaattttcccggttttccagcccataaccgatgaacatcgtcagctaagggggatggagatccttgtccgctggcgccggaacggcagcgttttgtttcccgctgattttttaccgcagctacgctcggaatatgcgtggctggtgctcaccgcgtttgtgctgcaggaagccgtgcagaatatcaatctgtacagtggtgaattttatttcgcggtgaatattcccgcggctgtcgccagcaatgaaaacctgatccgcatgatggaaaccgcgcgccagcagctgcgtcagccgcaaatatcgccgcggctggtgctggagcttgccgaaaatgccgacctcagccgccacgggaaaatagccggaaatatggcccggctacagcagcgcggcttccgaattatgcttgatgactgcttctcgcaaagcagcgtgctgttcccggtgcgggcgttgacgttcaacgcctacaagctggatatgggcatcatcaatgatatgcagcgcgatgcgcacgccctggcgctgattaaaagcctcatctactactgccggctgatcggcagccgctgtattgccgaaggcgtagatagcctggagaaattcaacaaactgaaagcgctgggagtcgaccattttcagggaaacgccatctcggcgccggttgacagagaaaacgtggcggaggtcatacagcaactctccggcgaagcggagtatccgtccggcatcgcagtgtag

SEQ ID NO: 254343 - DNA, 813 bp, Klebsiella pneumoniae
atgaaaaagataatccccctgctgatgacgctgctgctggcaggctggtcgtttaacgcctggtctttcgcctgtaaaaccgcggcgggcgtgaccattcccatcggcggcggctcggcgaacgtgtacgtaaaccttgcgccggcggtcagcgtcggacagaacctggtcgtggatctttcgacacagattttttgtcataacgattttccggaaaccatgaccgattacgtgacgctccagcgcggatcggcctatggcggcgtgctgtcgagcttttccggtaccgtcaggtataacggcaccagctacccgttccccaccaccagcgaaacggcgcggatgacctacaactcgatagtcgatagaccctggcctaccgttctctatctgacgcccgtcagcagcgcaggtggggtcgccatttccgccggttcgctaatcgctgtcctgatcctgcgccagaccaataacaaggataacgacgacttccagttcgtgtggaacatatacgccgacggtgacgctgccggaatatcccgcttcggccgccattccgctaacggtttactgcgcgcaaaaccagaacctgggctactacctctccggtactacggagaacgcggccaattcgatatttaccaataccgcatcggcctctccggccctgggggttggcgttcagctgactcgcaacggcagcgtcgttcccgcgaataccacggtgtcgttaggcaacgtgggaacctcggcggtcagccttggcttaaccgccaactatgcgcgcaccagcggacaggtgaccgcgggtaa

SEQ ID NO: 254344 - DNA, 501 bp, Klebsiella pneumoniae; identical to SEQ ID NO: 176866

SEQ ID NO: 254345 - DNA, 531 bp, Klebsiella pneumoniae
atgatgagaaaaaccctgtatctgttgagcgccctcgtctcgctggcggccagcaacgccggcgcggcggacagtaccattactatcagcggctacgttcgcgataacgcctgcgccgtggcgggtgaatcaaaagattttaccgtcgatctgatggataacgccgcaaagcaattccatgcggttggggcaaccacgccgctggtcccctttcgtattgtgctgtcgccctgcggtagctcggttaccgcggtgaaggttggctttgttggcgttgccgacagcatcaatagcgatctattgaagctcgacggcggggcttcggcggcggcggggatgggcgtgcagatccttgacgcgcagcagacgatgctgccgctcaacgcagcctcatcggccattgcctggaccacgctgacgcccagccagcccaacaccctgaacttttatgcccggctaatggccacccagctaccggtcaccgccgggcacgttaatgcaaccgcgaccttcacgcttgaatttcagtaa

SEQ ID NO: 254346 - DNA, 2637 bp, Klebsiella pneumoniae
atgtcacatctgaaatatggactcgacgatctgggctccggacgtaaaagcagccacgggccggggaatgcgcgcgctttcgctcaaatcacgctggctctgttatttgcggcaccgatcttttccgtgcaggcggagctctattttaatccacgttttttagcggatgaccctgccgccgtggcggacttatcaggatttgccaacggccaggaggtccctccgggaacctatcgcgtcgatatttacctcaatgacgggtttatgactacccgcgatgtcacttttaatagtagcgaaagcgatcgctcgctggtcccctgcctgacgcgcgggcagctggccgggatgggcgtcaacacgacatccattaaagggatcggcgctctggcatccgatgcctgcgtaccgttaaccgaaaccatcaaggacgccactacccgcttcgatgtcggcctgcagcggctgtacctgaccgtaccccaggcgtttatgggcaaccgcgcccgcggctatattccgcccgagctctgggaccacgggattaacgccgggctgctgaactacaacttcaccggcaacaacgtccataacgacatcggcggcagcagcaactacgcgtacctgaatctgcagagcgggctgaatctcggcgcctggcgtctgcgcgataacaccacctggagctacagcagcagcggcagttcatcgaccagtgaaaacaggtggcagcacgtcaatacctggctggagcgcgacatcaccgcgctgcgctcgcgtctgaccctgggcgacagctacaccaacggcgacgtcttcgacggcattaacttccgcggcgcgcagctcgcctccgatgacaacatgctgccggacagccagaaggggtttgccccggttatccacggcattgcccgcggtaccgctcaggtgtcggtgaagcagaacggctatgagatctaccagagcacggtgccccccggcccgttcaccatcaacgatctctactccgccggcaacggcggcgacctgcaggtgaccatcaaagaggccgacggcagcagccaggttttcaccgtcccttactcgtccgtgccggtgctccagcgcgagggccatacccgctatgcggtcaccgccggggagtaccgcagcggcagcaatcagcaggaaaaaccgaaatttttccagagcaccgtaatgcgcggtcttccggcaggctggaccctgtacggcggcacccagctggcggaccgctaccgcgcctttaacctcggcgtcggcaaaaatctgggccaactgggggcgctgtcgctggatatcacccaggccaacgccaccctgcccgatgacagcgagcatcaggggcagtcggtgcgtttcctctataacaagtcgctgacggataccggcaccaacattcagctggtgggctaccgctactcgacgcgcggctatttcagcttcgccgacaccacctataaccggatgagcggctacaacgtcgagacccaggacggcgtgattgaagtgaaaccgaagttcaccgattactacaacctcgcgtacaacaagcgcggcagggtacagctcagcgtcacccagcagctggggcgtaccgccacgctctacctgagcggcagtcaccagacctactggggaaccggtaaggccgaccagcagcttcaggccgggcttaacgccgccgtcgacgatatcaactggaccctgagctacagcctgaccagaaacgcctggcagcaggggcgcgatcagatgctggcgctcaacgtcagtatcccgttcagccactggatgcgttccgacagcaaatcggcgtggcggcacgccagcgccagctacagcatgtccaacgatctgaacggcaggaccaccagccttgccggcctgtacggcacgctgctggaggacaacaacctgagctacagcgtacagaccggctacgccggcggcggcgatggcaacagcggcggcaccggatacgcggcgctgaactaccgcggcggctatggtaacgccaacgtcggctacagccgcagcgacggtatcagacagctctactacggcctgagcggcggcgtgctggcccacgctgacggcgtcaccctgagccagccgatgaacgacacggtcgtgctgatcaaagcccccggcgcggatggcgtgaaggtagaaaaccagaccggggtacggaccgactggcgcggctacgccgttctgccctacgccaccgaataccgggaaaaccgggtggcgctggacaccaatagcctggccgataacgtcgaccttgatgatgcggtggtcagtattgtgcccacccacggggcgattgcgcgcgccgaatttaaggcgcacgtcgggctcaagctgctgatgtcgctcatctataacgggaagccggttcccttcggcgcgctggtgacctccgacgacagccagggcagcagcatcgtcgccgataacggccaggtctacctgagcgggatgccgctggcgggcaaggtgcgggcgaaatggggcgagggtccgaacaccagctgtgaggccagctacagcctgccgccggaaaatcagaaccagacgctgagccagctctccacggagtgccgctaa

SEQ ID NO: 254347 - DNA, 366 bp, Klebsiella pneumoniae
atgaacgtcaaagcgatcccgtcgatggataaatcaaagctcagcgacaacactctccagctggcgatcatcagccgcatcaagctctattaccgtccggcaaagctggcgctgccgccggatcaggctgcggaaaagctgaaatttcgccgcggcgcaggcacgcttacgttgatcaaccccaccccctactacctgacggtcaccgaactcaacgccggtacccgggtgctggaaaatgcgctggttccgccgatgggtgaagccagcgttaaattacccgccgatgcaggtcgcgagattacataccggacgattaacgactacggcgcgctgaccccgcggatgcagggcgctacgcaataa

SEQ ID NO: 254348 - DNA, 786 bp, Klebsiella pneumoniae; identical to SEQ ID NO: 203152

SEQ ID NO: 254349 - DNA, 195 bp, Klebsiella pneumoniae
atgaacgatttaccaaaatgcccggtttgcggaatgagtcctgagtttcagtggaaagattatacgtttggttgttgctcaggcgcgctgaaatgtcctaacgatcattatcgcgtccagcatggttattgggctggtggaaagttaaaagccaaacaaatgcttaaaagaaaatggatggaagaggtttattaa

SEQ ID NO: 254350 - DNA, 669 bp, Klebsiella pneumoniae
atgaataacgtacttaacgtagttagggctatggaaaaagctacatgtcgtgagattgctgcacgaatgaaaaaggatattcgggatatgctcaaaattctggacgacatgaaagataaagggctggttaaatttgttaatggttactggtcagctgctgatattcagccatcatacgaaacacataaatcaacaccattagcccccgcaaacaccgttgtgaaagttaaagccaaaaagcaaagtggcctacgtgagaaagttatagcgctgctgaaggattcaggttgcgcgctagatacgaacgaaataaccacaaagcttgaactaaaaacgaatgctcttaacggtacgctgggcaaactggccgctgaaggtcttatcgttaaatgtgttgtggggaaattagtaacctggacacttccgaatgaggcagacaaaaaggtatcacttggcacaaatacgccatcggcaaaaactacaactgaaattgttgctgagataccagtttttacccgcagagattcagatttaattgttccgacagcttcaggtatcactaatgaaattcgtcgcacaaaagcgaaattggccagtttggaacgattaagggttattacacgcgatctccggcgtcagtcgaaactactgcaggagttagcgcaatga

SEQ ID NO: 254351 - DNA, 990 bp, Klebsiella pneumoniae
atgagcaatcaggtctttgaaattgttcaggccatgtcagggcagggaaactgcataactattcctggaccatatttagattttttcgcgggagatcgtcagcagcatctgctggccgctattttgaaccagcttgtgttttggtctggtaaatccacgctcgaaaatggctggttttataaagaacacgcagcccttgctaaagaggttcgagtagttgagggcgatgttgtccgaagggcaatctacaagattactgagcaatatttacccggtgttattcaggaagaagtgcgccaagttaatggcactcctaagaagcattatcgcatcgttcaggaagcgctaatgctcaaaatcttcccgtcaatactggaaacggcacaaacgccgaatggaaacggcacaaatgccgaatggaaacggcataaacgccgaatccaagaaacggcacaaacgccgaatggaaacggcgcaaacgccgaatcctatctctatacagatcttaaaaaaacagatcttataacagatcttaaaaaccgtgatggagaggttttccctgtggataacttttctgaaaaacacccggaagcggtgatttttaatgctgaaaaaagcttgtggggaagcgctgaggatttagagttttcacaatggttttatgctcgcgttgttgagttgcatgaacgagctgctgaatttgacggaatgatttcaagaccacctgagccgaattgggcagtttgggctaacgaaattcgtttgctgcgtaatggtcagggctgcactcacgaaaatatgcgcaccttgattgagcgggtacaaagcgacggtttctggtgcaataaaattaaaaccgctatgacgctgcgtgaaaaatggcatgaactagcggtgaaactctgccctgtaaatctaacgacagggggcgatgcattcagaatcagcaaaaaattggataacaaaattccgaagggctttcgcggttaa

SEQ ID NO: 254352 - DNA, 255 bp, Klebsiella pneumoniae
atgtgtaaccagtctgctgctgaattgattgctcgtctgaaaagggcttacccggcgtatgtgccgtctgaagttagccgggcatcgaatggtattccgaaagcgggagctcgttttcagcacaggcacaaaggccacatggttacggtaattatcgctacagagaaagatgtttcttaccgcaaatcctgtggtgctgttggttgggtgggattgcgtgaatttttacggctacacaatgaggtattggtatga

SEQ ID NO: 254353 - DNA, 507 bp, Klebsiella pneumoniae
atgcaactacttaaaatagaaatgactaaaaaccgtctctgtcttaatcttctacctatggtagaaaaaacgaataaacaccaagacttcgcagaccggcttaaccgtgagatgagtaaaaaaaacttatctgttaaacagttgagtattgcgggacaagtcacctatgaaatggctcggcgttatacgctgggcacggctaagccacgcgatgagaaactgataagaatcgcagaatggcttaatgtgctgcccgcctggctggattatggggctgtagatagcggagttgaaacaggtggtaatgctgaaactgttacatctgctcctatagagctatccgatgaaacagagttctcaaatttgagcgatgatgaaaaacgattgctcagggtttttcgtaagttccctgataccgaagccaacaacatgcttcttgcctttgaggttcgctataaaaaacttctagaattttatagcgaatacgccgatccagatagaaaatag

SEQ ID NO: 254354 - DNA, 285 bp, Klebsiella pneumoniae
atgatgctcaatcaccagttattagcagcacagaacaaattggtaattgctcaggctattggcgacaacatcatgtgggaacaggctatgcatacgatgagaggaattttcatagccgctaagaatacagaagatcgtatgcttgagggttatgctaacccgctttcgaatcttcttattgaagatgttgtttgtaattatgaaatttacggtgatttaataatggctgatggcgatttgcttttaggtcacgcaaaaataaacacagaaataattaatcactaa

SEQ ID NO: 254355 - DNA, 939 bp, Klebsiella pneumoniae
  misc_feature (893)..(902): n is a, c, g, or t
atgaatatgcccgctggcgtagaactacatggaaagggaataagaattagctttctatatcgcggcattcgctgccgcgaagttttgcggggctggactgtttcgagtagtaatatacgaaaagctggtaatcttcgtgctttaattgtaagtgagattcagcaaggtaaatttgactatgcagagcactttcctgaatcaaaggcgctcaaaaagttcacaacgactcaaataatccgcacgtatgcggagttgtgcgatgtttacctaacatcaaaaattcacgaagtttctgcagcgtcctatcgtggcatagtttcaagactggaaacattaagatcagttattggaggcaacacatacattgctgatattcaacacagcgatctgttgaactatcgaaaccaattgttgaccggggaatctgtctcgccccattccccctggcttaacaaaactggtcgtgctgtatcgactgtcaatggattgatgaatactcttacagcgatgctgaaactagcccagcgaagtaacttcattagccatgccccgcacgatggaatcaaaatgctaaagaggtctcgtaaagacccagatccgttgctacatgatgagtacaatgcttttataaaagttttggcacctaaagccgcgttgctatggacaatagcggtacataccggccttcgtcatggcgagttggctgcgctcgcgtgggaggatatcgacttagaacacggagagatccatgtttgcagaaacaaaaccaatgaaggattatttgtaccacctaaaacagacgcaggtaagcgaacggttacccttttaaagcccgcgttggacgctttgcgccttcagtttcagaaaacaggtgctctcaggaaaatggaagnnnnnnnnnnaagttacatttcatcatcgggaatatggcttaactga

SEQ ID NO: 254356 - DNA, 279 bp, Klebsiella pneumoniae
atgcgtatcaataccaaaatgaggctggcagcactgttataccttatggcggcctacgctgttgccctgccggcactggcgctgttcacggacctggtgataaacggcgggattattgatatgtggcaaggctcgtattcatttttgaaccttcttgatctgcgtaaaattctctatctgcagtttgccgggctgggcgctatcctgggttttgtctactggctatttttctttagaaaataccgtcatcacgatccgctggataaatattttaagtaa

SEQ ID NO: 254357 - DNA, 1032 bp, Klebsiella pneumoniae
atgaaaaaattacttcctacttcaacggccggcagtttaccgaaaccttcctggcttgcagagcctgagaaactatggtctgcatggaaactcgaaagccaggaattaatcgacgggaaaaaagacgcgctgagtttgtccttattcgatcagctacgcgccggcattgatatcgtcagcgatggcgaacaaacgcgccagcattttgtcaccacgtttattgagcacctcagcggcgtggatttcgcaaagcgcgaagtcgtcaaaatccgtaatcgttatgatgcaagcgtcccgaccgtcgtgggggccgtcgagcggcaaaagcccgtttttgttgaagatgcgcgttttttacgtcagcttaccaaacagccgatcaaatgggcgctccccgggccgatgactatgattgatacgctctatgacgatcactataagagccgcgaaaaactcgcctgggaatttgcgaaaatactcaatcaggaagccaaagagttggaggccgccggcgttgatattattcagtttgacgagcccgcctttaacgtattctttgacgaggtcaatgactgggggatcgcggcattagaaagagccgttgaagggcttaactgcgaaactgcggtgcatatctgctatggatatggcatcaaagccaataccgactggaaaaagacgctggggacggagtggagacagtatgaagaagcgtttcctcaactgcaaacctccagcatcgatatcatttcgctggaatgtcataactcgcatgttcccatggatctgcttgaactgattcgcggtaaaaaagtgatggtgggcgctatcgacgtggcgaccaatgcgatcgaaacgccggaggaggtcgccgcaaccttacgtaaggcgctgcagtttgttgatgccgataagctttatccttcaaccaactgcggtatggcgccgctatcgcggcgggtcgcaaccggcaagctcaatgcgttaagcgccggggcggaaattatccgcagggaacttcagggtaaatag

SEQ ID NO: 254358 - DNA, 978 bp, Klebsiella pneumoniae
atgaataaagattttacgtttaccattaaaagcacactgtttgatgaaaactataacccctcggaaagtacgcgtattacgaccaactttgctaatctggctcgcggcaaaaatcggcaggagaatttgcgcaacaccttaatcatgatagacaatcggttcaatacgctggcgcactgggataatcccaaaagcgatcgctactctgttgcgttgaatattatttccgtggaaatggttattgaagagactggaaccacctttccggcgattgagatattgcaaaccacaattattgataaaagaacgggtgagcgtattgaaggcatcgttggcaataatttctcctcgtatgttcgcgactatgacttcagcgtattgctaccggaccataataaacaacgttctggctttagcatcccagatgattttggcaacttgcacgggaagatctttaagcatttcgttcattccgccgaatataaagccaatttcaaaaagccgccggtgatctgcctcagcgtgtccagtaaagacacctatcagcagaccggaaaccgccatccggtattaggccttgagtatcggcctaacgcctcgtctttgaccgagcagtattttgcaaaaatgggcctgcaggtccgctattttatgccgaaaaacagcgtagcgcctttggcattttattttaccggagatttactgagcgattacagcagccttgagctgatgagtaccatcagcacgatggagacgttccagaagatataccggcctgagatctacaacgctaactccgcagcaggcctgtgctatcagcccgatctgaatcatcaggatcattcgttaaccaaaatagtttatgaccgggaagagcgtagccagctggctatagagcaggggaagtttactgaagagcactttatcaaaccgtataaaaatattcttgagcagtggtctgcttattccgctctttaa

SEQ ID NO: 254359 - DNA, 1230 bp, Klebsiella pneumoniae
atgctgacaaccctgatttacagaagtcagatacctttaactcatgaaattaatctctctttgctggttgaaaaagcgaatgttaataacatgtctcatggcgtttcaggcattcttctttttaaagataatgttatccttcaagtgcttgaaggtgacgaaagtattctggagcagctcttcagcaagattaaacacgacagccgacactttggtgtcgtcgagctgatgcgagattacgccccgcgcaggcgcttcgaaaacgtcggtatgatgtactttgatctggatacgctagaagccgatgccgtgctgaaaaccgttcgccagctaagcaagttgaagagctatcttctgacggaagagcgcgtttataaatttattcatacgtttataacgcaaaaaagagctctcccggtttcccagtatttccagcctgaaaaatggtcagttagcccacaaagatcgccttttcatacacctgaacgctccccagttgataatcaatgctgccagtttgcatttcagcccattattgagcccctggccggtcatatcacttcactggaagcgcttattcgtaataaagatggtgggagtccggcgagcttttttgcttcaatcgaccataataaacgttatgaaattgacctcaactctaaatcggtggctttcgcgctggcaaaagaaatagacatcggcgatcataaaatatccattaatattctgccgatgtctttggtggtggttcccgatgccgtggaattcctgctgcaggaaattaaaaagtatgggttgatgcctgaacaggttatcgtagaagtgactgaagacgaaatgatctccggtttcagccagtttagtagtgcgattaaaaaactgcgcgtctccggaatggggctggctattgatgattttggtgccggttatgccggactgtcgttgttaaccaaaatccagcctgacaaagtcaaaatcgatcgtgagattattaccaatatccacctgagcggccctaagcaggccgtcgtccgttctatcatcagctgctgtcatgagctggaaattgcggtggtggcggaagggattgaacgtatcgaagagtggtgctggcttgaatccgcgggtatcaagcgttttcaggggttcttgtttgccctgcccgaactgaacggcgtaggagagatacgctggccggtgaacacagcggatagcctcgtacaggcgtaa

SEQ ID NO: 254360 - DNA, 459 bp, Klebsiella pneumoniae
atgatggtattaaaagagaaagagcacctggagtctgttgactggcgcagggttgcggagatcattgccgatgcgggacttaatcagcgcgatgtggcattggttgaacgggcgtttcgtcatagtactttttgctggtttggctatgaaaagggtcagctggtcgccgttgcccgcgcgattagcgatctgacctggtgcagctatcttgcggatgttgcggtggccccgaactgccaggggaagggatacgggaagttgctgatgcaggcggccagcgagcggctgcggccgtttggcaaaacctttatctattcggtggtggataaagtcggcttctaccgccgttttggttttgaaatgctgactacgggtatggtctgcgccagcgccgagagtctactgcgcatgcgcgagcagggatatatttgccaggacagcgacactagccagctttag

SEQ ID NO: 254361 - DNA, 915 bp, Klebsiella pneumoniae
  misc_feature (5)..(14): n is a, c, g, or t
atgtnnnnnnnnnngctggcgggtaagtccgcgccgtcgattgggctgattaccgcctcgctgacgctgcacgcgccttcgcaaatcgccgcggcggtgaaaagctatgctggtttgcatcagcttgaggtctcaattgcgatgccggtgcaggtcgattacgcgtctctgcaggcgcgactcaatgagtttcgcgcccagcatattcgcggagcgattatcagcctgccgctggaaagtagtcttgcggagcgtctggtggcggagaatccagatatagcctgcatgtttctcgatgtttcgccggaggccgacgtttgcggcgtgcgtttcgatcatcgtgatggatgtggcgcctgcgtgcggcatttgtgggacgccggacaccgcgagttcggactgcttgccgggccggagagctcgatctccgcgcgaatgcggctcagcagctggcgcgaggcgctgcaccgcctgggcgtcagtaatgcggtaacggtatttggcgactggagtgccgccagcggctggagtaaaacgttcgagctgctgcatcagcatccgcgcattagcgcgatcgtggtcgctaacgatcaaatggcgctcggggtgctgagcgcgctggcgcagctttatcgtaccggcagccaggccatctcggtgaccggttatgatgacacggcggacagcctctacttccagccgccgctgaccaccgtcgcccaggatttcaacgtgctggggaaaagggcggtcgagctgctgatcaagcttatggctgccccacagctgaaaattcgcgaactgttgcccacgcgcctgattatccgccagtccacctggcccgttacggggaacggggagggggagaaagatgagctgattagtcaacttaaggcgctggtggaaaagctatga

SEQ ID NO: 254362 - DNA, 3108 bp, Klebsiella pneumoniae
atgcaacaacaccactctatttccgccgcaggagccacgttccatcagattctcgcccgcgaggactggcagaaccagaccattacccatctcaaccgtttaccggcccacccgactttcgccagctggcgcgataccgacgcggcgcggaaaaaccagccctccgcgttccgccgtcggcttgacggccagtggcaattctcctgggcccgcagcccgtttgacgtggatgcccgctggctggaagacgatctgccggacagccgcagtacgccggtaccctcaaactggcaaatgcagggctacgatgcgcccatctataccaacgttcgctaccctatcgacaccaccccgccgcgcgttccgcaagagaacccgaccggttgctactcattgacctttcgcgttgatgagagctggcgggccgacggccagacgcagattatcttcgatggcgtcaactccgcgtttcatctgtggtgcaacggcgaatgggtcggttattcgcaggatagtcgcctgccagcggccttcgatctctccccctatcttcagccgggcgataaccgtatctgcgtgatggtgatgcgctggagcgcgggaacctggcttgaggatcaggatatgtggcgcatgagcggtatcttccgttcggtctggctgctgaataaaccgacgctgcacctctgcgacgtccagcttacgccgcagctggatgccctctaccgcgatgccgaactgctggtgaacttaagcgtcgccgcaccggtcgcgctgctggaggagctgacggtgaaagtcgaactgtgggatgacgatcgcctggtcgccagccaccagcagtcgcccggttcgccgattatcgatgagcgcggaaactatgcggagcgcgcggccattcgtctgccggtagaacgtccggcgctatggagcgcggaaacgccagactgctatcgggcggtcgtgtcgctgtggcgcggcgatgaaccgatcgaggccgaagcctgggatatcggtttccgccgcgttgaaatcaaaaacggcctgctgctgttgaacggcaaaccgctgctgatccgcggcgtcaaccgtcacgagcatcaccaccagcgcggacaggtcgttaccgaagaggatatggtgcaggacattctgttgatgaagcagaacaactttaacgccgtacgctgctcgcattatccaaacaccccacgctggtacgagctgtgcaaccgctacggcctgtacgtcgtggatgaggccaatatagaaacccacggcatggtgccgatgaatcgaatatccgacgatccggcctggctaccggccttcagcgcccgcatcagtcgaatgctgcaaagcaaccgcaaccatccgtccattattatctggtcactggggaatgagtccggcggcggcggcaaccatgaagcgatgtatcactggctgaagcgcaacgatccctcccgcccggtacagtacgaaggcggcggcgccgacagcagcaccaccgatattatctgcccgatgtacgcccgcgttgaccgcgaccagccgattccgacggtgccgaaatggggaatcaaaaagtggatcagtctgcctggagaacaacgcccgctgatcctctgcgaatacgcccatgcgatgggtaacagcctcggcaactttgctgattactggcaggcatttcgcgactatcctcgcctgcagggcgggtttatctgggactgggcggatcaggccatcagtaaaaccttcgacgacggcagcgttggctgggcctacggcggtgattttggcgacaaaccgaacgatcgccagttctgcatgaacggtctggtgttccccgaccgccgcgcgcatccttccttaatcgaggccaaacatgcgcagcagtacttccagtttgcgctgctcgcgcaatccccgctgcgtatccgcctcagcagcgaatatctgttccgcgccaccgataacgaagagctgcgctggcaggttcaggccgcgggtgaaacttttgctgagggtagcgtgaagctggcgctttgcccggagggccagagtgagctgacgttgtgcgatgcgctgacgctgcccgccggcgcggaagaggtgtggttgacgctggaggtggtccagccccaggccaccgtctggtccgacgccgggcatcgcgttgcgtggcagcagttcccgctcgccgcgccgctggtgctacgcggccctcggtctgccggtagcgcgccagcgctggagagcagcgacgcggcctggattgtccgcagcggctcgcagcaatggaccatcgatcggcaaagcggtctgttaacccactggcaggtggacggcgtggaacagctgctgaccccgctgcgcgaccagtttgtgcgcgcaccgctggataacgacattggcgtcagcgaagtggagcgtattgaccctaacgcctgggtagagcgctggaaaagcgccggactttacgagctcagcgcccgctgcgtccagtgcgacgctcagcgcctggcccatgaagtggttatcgatagccgctggcactatctgcgcggcgacgaagcggtgattgtcagccactggcggatgacatttgatagcgaaggcaagctgcatctggcagtcgatggcgaacgtgccggcaccctgccgccgctgccgcgcatcgggctgaatttccaggttccggaccagcaccaaccggtatcctggctcggctacggtccgcatgagaactatccggaccgccgcaccagcgcctgcttctcccgctggcagctgccgctggaggagatgaccacgccgtacattttcccgacggaaaacggcctgcgctgcgacagcaaaacgctggactgggggcgctggcacgtgggaggcaacttccacttctccgtacaaccctatggcaccacgcagttaatggagaccgatcactggcactggatgaagccggaaaacggcgtctggatcaccctcgacgctcagcacatgggcatcggcggcgatgactcctggacgcccagcgtactacagcaatggctgctgcttgagacacaatggcaatatcagttaacgattcacttccaataa

SEQ ID NO: 254363 - DNA, 1251 bp, Klebsiella pneumoniae
atgaaactctctgaactggcgccacgagaacggcataattttatatatttcatgctgttctttttcttctactatttcatcatgtcagcctattttccctttttcccggtgtggctggcggaagttaaccatttaaccaaaaccgagacggggatcgtcttctcctctatttcgctattcgcgataatcttccagccggtttttggcctgatttcggataagctcggtctgcgcaagcatctgctgtggacgattacgattttgttaattctgtttgcccccttttttattttcgtcttttcgccgctgctgcagatgaatatcatcgcaggcgcgctggtgggcgggatttatctggggatcgtcttttccagcggctccggggcggtagaagcctatattgaacgcgtcagccgcgccaaccgttttgaatacggtaaagtccgcgtctccggctgcgtcggctgggcgctgtgcgcgtcaatcaccggcattttatttagtatcgacccgaacattacgttctggatcgcctccggtttcgctctgatcctcggcgtactgctgtgggtatcaaagccggagagcagcaacagcgccgaggttatcgatgccctgggcgccaaccgtcaggctttctccatgcgcaccgccgcagagcttttgcggatgccgcgcttctggggctttattatttatgtcgttggcgtcgccagcgtctatgacgtttttgaccagcagttcgccaacttctttaagggctttttctccagcccccagcgcggcactgaagtattcggcttcgtcaccaccggtggggaattacttaacgcgctaatcatgttctgcgccccggcgattattaaccggattggcgctaaaaacgccctgctaattgccgggatgattatgtcagtacgcattttaggatcgtctttcgctaactcggcggtggaagtgatcattttaaaaatgctgcatatgttcgagatcccgttcctgctggtcggcacctttaaatatatctcttcggcatttaacccgaagctctcggcgaccctgttcctgatcggtttcaatttatcaaaacagctgtcaggcgttgtgctctcggcgtgggtaggacggatgtatgataccgtcggcttccatcaggcctatctgatcctgggctgtattaccctgagctttaccctcatctcgctgttcaccctgaaaggcagcaaaaccctgctcccggccgcggcataa

SEQ ID NO: 254364 - DNA, 1089 bp, Klebsiella pneumoniae
atgattaaccatatccggataaaaaatttcagatcggtcagggatattgagctggaactcggcgcgctgaatatcgtctttggccccaacggctgcggcaaatccaacatttataaagccatccatctgttaaccgcctgcgccgatggaaagttctccggttatatcagcgatgaaggcggcctggagaacattatgtggtccgggccgagcgcgccgaacgatcgctttccgcggcggctgcagattgcctgcctgaccgatgagtttgactaccagctgcaggtaggtttcccggaaaaactgccgtatccgactcagttccagctggatcccatcgttaaagaggagtctatctggctggcaggattttcccgacgcccttcatcgcgcgtgctggaacgcaaaaaccaggcggcgttcctggttgacgtcaatggtgaaaaaagcacttttaccgacgcgatttatgagaatgaatcgatttttggccaactgggcgagccgcaccgctttcctgaagtctccagggtcagggaaaccatgcgccactggcgcttttatcacgaattcaatataggcagactctcgccgttgcgtcatccgacggtaggttaccgctcgccggtgctggacagcgatgggcacaaccttgccgccgcttttcagaccatcgtggaaatcggcgccgaagagctgctgcatgagatcctcggcgaagcgttcccggagtgtacattttactgtgaaaatgagaattcgcgtttctcgataaagatgcgccgcaatggcgtctggcgacctttactggcgacggaaatgtccgatggcacgctgcgtttcctgtgcctggcggtggcgctgttgagcccgcgtccgccggcatttctggctattaacgagccggaaaacagcctgcatcgtcaaatgttccccgcgctggcccggctgattgtcgaagcttcccgctatagccaaatctggctaaccagccactccgcggagctggctgagctggtttcatccatggcggaagcccggatttacgggctggaaaatagcgatggggaaacgcggatcgccagctag

SEQ ID NO: 254365 - DNA, 264 bp, Klebsiella pneumoniae; identical to SEQ ID NO: 171972

SEQ ID NO: 254366 - DNA, 255 bp, Klebsiella pneumoniae; identical to SEQ ID NO: 171971

SEQ ID NO: 254367 - DNA, 327 bp, Klebsiella pneumoniae
atgacaaaactccctctgatacttcttctggctggcgcggggctattacagggctgctcggcgttcgataaacatcacggcgttaactggggcgaaggtacctgcccgactcccgcgccagaagcgattagcaaatcgaagcagctgattattgaggatggtaaaaccctcaaatgccagattcgtccttatgtcagcaatatggcctgtcaggggatcaccgataaaactcatgccgatggcgtcgtttgccagaacggattagggcagtcaattttgtttaccttcgacgataaaggcgtactgcaaaaacacggtagcgtgtaa

SEQ ID NO: 254368 - DNA, 273 bp, Klebsiella pneumoniae
atgtcatcacaagagtatgaaaacgacgcgcagaatctggccgataaagtgggcaataaagtcaatgaatttgccggggaagcccagcagcagtttggtgatgcggtagattcgccgaaacatcagctaaaaggcgcggcccgtaaatacgccgctcaggcttcggatgccgtttcagaggtgtccgagcgcgtcagggaaaatccgttaaccggactgctggccgccggcgctatcggtctggtcattggtctgttggcaggacggaagtaa

SEQ ID NO: 254369 - DNA, 312 bp, Klebsiella pneumoniae
atgattgtcagaacctggcatggttgtgttcccgttgagtttggcgatgcgtttgcggggcatttgcaggcaaccggagtgcagcattcgcggagcattgccggcaacgcgggcgccttcgtcaggcgggaaacgcagggggagtgggaacacttctttctggcgacctactggaacgatctggatgctatcatcgcttttgccggtgaagagtaccatatcgccgtcacctatgccgatgatgagcaattccagctgctgtccgatccgtacgttttccagtttgaggtggctgcggtggtgggaatttaa

SEQ ID NO: 254370 - DNA, 540 bp, Klebsiella pneumoniae; identical to SEQ ID NO: 171967

SEQ ID NO: 254371 - DNA, 483 bp, Klebsiella pneumoniae
atggcgatgaacggaacgatcacaacgtggtttaaagataaaggttttggatttatcaaagatgaaaacggcgataatcgctattttcatgtgattaaggttgccaaccctgagctgattaaaaaggatgcggcggtcacttttgaacccacaaccaataacaagggtttgtcagcgtacgccgtgaaggtcctcccggaaagcaaatatatctatatcgcaggcgagcggattaagctcacgtcgataaaatcttacctggtttataacgaggaggagcctgccgacgcccgtattgataaagagaacgcggtcctctccgtgggcctgctgatgggaaatatcaggccaaaatcagccgctaagcccggggaaatgcgctcggtcaaaaagctggccatcaccaccttccagggcaccacgctcatcttcacggaagatgagatagacatcgacgccacggtgaaactgcttaaggtgtaa

SEQ ID NO: 254372 - DNA, 453 bp, Klebsiella pneumoniae
atgagacgggtcgctttaatcacgatgctcacgttgttaggggggtgtgcgcaggatatttccccgaatagctattccgtgggttcggtaggcatggtgaatcgctctattgccggcactatcattagcgcgcgaccggtcgatattcgtggcacatccgctttgggcggtgctgcgggtacggccgcgggagcggctgcagggtctgcaattggaggaggcactcgcgcgaatattgtcggcgctattggcggggcggttgtcggggggctaaccggcgcagcgcttgaagcttctgcgacaaaacagacggggatggaatatgttatcgaaacggaaaacggtaatctgatgaccgttgtacaaggtaatactcccttgtttgtcgaaggtaataagatactcgtactatacggcagtccttcacgtatcattgccgatcctcggcattga

SEQ ID NO: 254373 - DNA, 561 bp, Klebsiella pneumoniae
atgaaaaaactactcttaattgctgttgttattgggtctttaacaggatgtgccagcgttccacctctgaatttttctacacctggcgttggcgttagccaaaagaaaattgatgcacagctaaaatcactcacggtttcgcttgcgcgtcccgatgagcagaaaggcgatatcgtcgcggggatggaaaccattacccccatttggcgagactcgttacaagaggcgctcgatagaatggcgatctttaaagataactctgctaatacggtgagccttaacgtgaaagtcttagcgattgacgttccgagctttggcatggccatgacaacgaaagccgttgcgcgttatgaggtaattaaccgctctaatggcgatattatttatacgcaagatatcgaatctactggaactgtgcctgcatcctatgccttcgtgggcgttgttcgcgcccgtgaatcaataaaccgcgcggtacaaaacaatattacgcagttcttacaagcgttagaaagcattgaactctcccgcccgatgttcccttcgaaggtagataaatga

SEQ ID NO: 254374 - DNA, 612 bp, Klebsiella pneumoniae
atgactgtacttaaaagctttttcttcttccttggcgcggcttgtacctgcgcatttgtggtactttgcctgtgggtcgatatacattattgggattataatatttcggaattgtcactcactgaaattgttcaggagttggtgttagctaccatcgttgttattcattttctgctggcgaagcagtataaatccatgcgctactgcaatattcttattggcggttttttccttgccatgctaattcgtgaactggacgccctttttgatcttatttctcacgggagttgggtgtggtttgcgctgattgccgctctggcagccttaattaatccacttattcattatcgtcagaccatggaacagcttacacaatatacccgtacgcccgggtacggcatgttaatcagcgggctgctggctattctggtcttctcccgactcttcggtatgcaaggtttatggcaggccatactcgatgacggttacgttcgggttgtaaaaaatgtcgttgaggaaggcagtgaatcattcggttatatgctttgtctcaccgcctctattggttattactgcaattttcgcggaaccctggggcaggaatcaacctga

SEQ ID NO: 254375 - DNA, 261 bp, Klebsiella pneumoniae
atgtatagttacaatgacatagaaataattaaagccaaccttgagtggattgttaatcaaacgactgcgaattcccggagcccctcagtttccgatcgcaaaacgctcaacagccttcaggagctcatacagagctatgaagggctacttgagttaatcatccagtatggaattgctgtagtagataaggaaatcatcgaagggctgtcccttacagagaagtttattgctaaggttaaatcgaatgcgcatgcattttag

SEQ ID NO: 254376 - DNA, 408 bp, Klebsiella pneumoniae
atgttctccaggaaaattaaaatttttagtctgtttctatctttaatggccgccggtcaggcgatttccgccgttaagtccccagacgtcactgtctatgcgcagaaagagggggccggaagtgtatggaacagcgtgacggggaaagctgagcatttgctatcatatcaggttacggttaacaacaactccagtgaacctttggttcctggtaaagataataaaatgtgtttttacctcgatgataatatggggaaaaccttaatggggcatgggatacagttagaacttttatccccatataagccaggagagtcccgcactggcgtcatttacttttccagtactgaacccgatatgctgtcattaccttatgtcaaacttggtttaggttcccggtgtaaataa

SEQ ID NO: 254377 - DNA, 360 bp, Klebsiella pneumoniae
atgaagatatcattattagcatttatatttatcaccctgaccggctgtgtggaccccggccttgtcgggatacatccagaattacgcacgagttattttaatggttataaaaatgaagtcgcgtcatgcttacaatccgcagcggtgaacaacgacttattgatgcaacaggatgactcgctgccagacggttcctatagatataacattctggacgcaggaggaaacaccgtagcatgggttgatatagcagattttagcggaaagcaaagcaccgtaagtttttattatgcccgccataacaaggatatgtatgaagctatttcatcaataattgcacagtgtaaaagggtgtcttaa

SEQ ID NO: 254378 - DNA, 1056 bp, Klebsiella pneumoniae
atgaaaagaaaagtactggcaattctggttccagctttattagtcgctggcgcggctaatgcagcagaaatctataataagaacggcaacaaactcgatttctacggcaaaatggttggcgagcacatcatgacccatgatggcgacaacaacaactccgacgatacctcctatgcgcgtttcggcattaaaggcgaaacccagatcagcagcgaactgaccggttacggccagtttgaatacaatatcaaagcagacaaaccagaaggtcagcaggctgatgatacccgtctggcgtttgctggtctgaaattcagcgactacggctcatttgactatggtcgtaactacggcgtggtttatgacgcggcaggttacaccgacatgctggttgaatggggtggcgatggtctggtttataccgacaactttatgaccggtcgtaccaacggcgtagcaacctaccgcaacaccgatttcttcggcatggtagatggcctgaactttgctctgcagtatcagggtaaaaacaacgacactgaccgcgctaaagccaacggcgacggcttcggtttctccgttaactataacatcgacggcttcggtttcgttggcgcatacagcaactctgaccgtactgatgaacaggctgcggaccgcagaggcgagaacgctgaagtctggagcctcgccactaaatatgatgctaataacgtctacgcatctgtcatgtacggtgagtcccataacatgactcacatggagtctggtggctttgctaacaagactcagaatattgaagccgttgttcagtatcagtttgacttcggcctgcgtccgtccctgggctacgtctatgccaaaggcaaagacctgaacggtaaccgtgatgccgatatcatgaactacgttgaactgggtacctggtactacttcaacaagaacttcaacgtttacaccgcatacaaattcaacctggtggatgacgaagattcttatatcactggcgcatcaactgacgatcagttcgctgtaggtatcacctaccagttctaa

SEQ ID NO: 254379 - DNA, 549 bp, Klebsiella pneumoniae; identical to SEQ ID NO: 203120

SEQ ID NO: 254380 - DNA, 756 bp, Klebsiella pneumoniae
atgagtctgaatgcaaattaccagaaactggagccgggtgatgaaattcggttgttcgaaatagacggccgcgcttttaatatgggcgaggtcttgtatttccacggttataacgttccacattcagcagaggaaatcatcgccgccggtggggatgaagcagcattacccgcgaaaagtatctggtggcagggtatcgaatataaagcctggccgtgcgagctggaagggattgaatccagcacttcggggagcgatgcgcaaccgacgctgcgtgtaggcaatatcgacgggtcaattacagcgctatgcctgtattacgacgacatggcgcaggcgcgggttacgatacacgagacccaaaagcagtatctcgatgcgcaaaacttcccggagggaaacgcgtccgcagatcccacgcaggaaaagcgtcggcagtattttatcgatgccaaaaatcttgaaaccgacgaagcggtggagttcaccctatcaagcccgctggacctgcaggggctaatgatccctacccggcaataccactcgatttgcacctggtgtattcgcaaccagtaccgcagcggcgatggttgtgattatgccgggacaaaatatttcgataagaacaataagccggtcgatgatccgtcacaggatgtttgcccaggcaccatggcggcctgtaaggcacgtcatggaccagataatcctctgccattcggtgggttcccaggcaccagccttataaggagctga

SEQ ID NO: 254381 - DNA, 339 bp, Klebsiella pneumoniae
atggccatcgagatattcacctggagtccccgggtaaaccctgcgcaaaccgtgaagtttcgcaccagaaaggcggaatttggtgacgggtatacgcaggtttcaggggacggattaaatacccggtcacaggaatgggagttgagttttgtcggtactgaggagtatatccgaccgataaaacagttcctggaccggcatgcaggtacaaagtcgtttcagtggactccgccgcttgaagatgcggggctattccgttgtgaacaatataagcccgtgccgatgggcggcgggaattattcactttcagccacttttattcagggatttaaaccatga

SEQ ID NO: 254382 - DNA, 3183 bp, Klebsiella pneumoniae
atgagtgatgtagccagcttgtcggttgccctgcatctgaattcagctgcattccggtcgcaaattaccgaggcatatcagaacgcagggcaggccagtaaaaaatttaatcagcaggcgacagcacaggctaacgagctgacaacagcgatagccaaaaccgtcgaggccgcaaaaaaaatcggcgtgcagggtgctaatgatgatcagtttgccggtgccacccgaggtgctggccaactgaacttcgtgcttcatgaagttgcagccgggagtaatgtcgccagcagcagcataattaatgcacttatccccgccgttcataccttaaaggggcgacttgacagttcggcaggaggctggaagacacagcaggatgcagcccgtcaggcagctgccgaactggagtcggcggcaaaggcacaaattgcggcggcacaggccgaaaggcagtctgcgctgaataaagcagctatcgctgaaaagacgatagctgcagcgcaggcccagcgtgagcaggcgattgcgctggacgagtattacgcgaaacaaaccgaagttaataagctgtacgggctgaatgtcagctatcaggatgaacacctgaagaatgagcgggccatcattgaagcgaaccgtcttgaggccagcgggcttgaaaaattaaaagccgccaaagcggttgttgtgaccgctgatgccgccgaaacaggtggaaaggcggcactaacagcagcaacagaagctgctgctgcggcaaatacccagcttactgtgacccagcgtattgcagcgaccagcagccgggcgcttagttcggcgatgagtctgctgggtggacctgttggtattggcttgtcggtgcttgctgccggtggctcaatgatttacagcgagtttaaaaaatccgaggagcaaacaaaaaaactgaatgcggcgctactcggaacgagaacgtcagctcagttatctctcactgaactgagaagcctcaatgctcagcttggtggtacagaacattccctttctgctgtggtcgctgcggcaaacggtggtttcagtggtgcattgctgcatgaagttgcatctattgcgacagcctacgctgaagccggtgggaacgctgaggatctggtcagcaaaatatctgccctgaagggagacccgcttaatgcgatggcccagctgacagcccagggcatttcgctgaatgaatccattgtcgcacaggttatcagcctgacgaataaaggggaaacagcgaaagcaacgcagctcatcatggaacaagctcttgatgcggaaagcgttaagctgaaagagctggcggcacatgcggaaacttatcttgataagttaaaaaatcttgggcgtgagtgggggatactcggaagtcttggtgaaaccattgctttgaccgatctcctcactaaagaccagaaagagtttgacgaaaagacacgccgctttatcgctacaagcaaagcaggatacgccgaggcacaaagtgaccgtataaaaaacgctgccgggctgaagagctacatggatgccgggagtaccgcagcagaaaagcgtgctgcagcgataaaaaaactcaataacagcatttacgcatccggctcgcaggagtatcagcggatcctgaaagggattaatgatgaatacgacaaggccacgaagaaagataaacccaaaaagtctggtagcggcgagacagaagggcagcggctactgaagcaggcgcaggagcgtaattcagtactgaaagaacaggctcagacgaccgataaactgactgaatcggaagttcagctgtcgatttttaatgaaaaggtttcggctcttaagggtgaaaacctgaccaaaagccagcaaagcctggtgaatctgcaggaccaaatccgggcgcaactgcagtcgaatatccagctggagaaagaggccgcgttgcgtaaaaccgtgctgaaatatgaggcagagagccggaaatgggtggaagagaaggaggcgatgcagcgggaagccgcgttaaggcttcagcaatacagcctttcagaccgggaaaccgcagaagctgaagcccgtcttgctatagagaaccgctttaatcagcggcgcattgcgctggagaaagattttaccgataccacttcggctgaatatcaggcccgtctggccgatctggagcggataaagcagcaggaactgcagattaccgagcaaagcgtgcaggatcgtctgagagcagaacaggattacagtgcgggattcaggcgtggggcgaagaactggacagataatgcgcgggatgcaaacagccagatagccagctttaccacgagtgcctttgacagcatggcaagctccctcgcttcctttgccataaccggtaaaggaagcttcaaaagctttactatttcaatcctttcagatttggcgcaaattgccacgcgtatcgcgctttccagtgcactgcagagtatttttggcatggttggttctgcttttggcggtgcgatcggaggaagtgcaggtgcggcaggaggtggaaatacgccgtccggatcgtatgaagccgctgcagccacggtggaattcaacgcaaaaggtggcgtctacgattccccttcattaagtgcctacagcaaccagatccacgacaccccgcagttcttcgcctttgccaaaggcgcgggggtatttggtgaggctggtccggaggccattatgccactgacccgagggactgatggttcgctgggcgtccgtgccattggtgaacagtcctccggcccggccctgtcggtcattaaggggctgattgatatggcgacacagtcacttctgaccacgattcaaagtcttgtcggaacaggtttcagcacaagcgcagaggggatcaccggaatgggggctgctccgatgatacctgcgccgcgtgccgcggatgagttttcaggcatccgggcgatagcatccggccagccttcagcgtctgttgaagggccaaaagtctggatcaccatttctggcgacaaaacctcgactgacagcacgtcagggtttgaagagtttggccagcagattgggtcgttcgtcgagaaaaaatatcgtgagctgcaggcgaaggatatgcgcccgggtggcgctatctggagcgccgtaagaggacaacgctaa

SEQ ID NO: 254383 - DNA, 345 bp, Klebsiella pneumoniae
atgaaagatgacgttaaatcccgccttctggcccctgacagtgatgcagttcctgttcaattgtttggcagcgaattccatatcaggcgtcttaccgcctttgagatgtcagagtttgaagataaagcatcacagctgaccggtcccgataatacgcgagggctaatgctggaagctgcagggctggtcctgagcgctctggtcgacgaaaatggccttcccctgcagaacctgccttctccgctggaactgatgaaatcacgctcctatgcatcgataaccgaggcgatgagcaaggtccagcgttttagctacggtacgctggaggaagcacaaaaaaactaa

SEQ ID NO: 254384 - DNA, 405 bp, Klebsiella pneumoniae
atgatacggatggaagttaaagggttggatgagctggaacggcagttaaccgccctgggagaaaaggtcgcgatgaaggtgttacgggatgccggtcgtgaggcgttaaaggttgtccaggaggatatgaagcagcatgctggccttgacaaggaaagtcccggccctcatatgcgcgatagtgtaaaaatcagctcaaggaagggatcagctaagtaccgcagtaccgttgtcacactccgggtcggaccgagtaaaaagcatcatatgaaagcacttgcgcaggagtttggcaccgttaaacaggtggctcaaccattcatccgaccggcgctggatcacaacgtccagaaggttctacgcatactggcggtcgaaatccgcaacggcattcaaaacaggtag

SEQ ID NO: 254385 - DNA, 273 bp, Klebsiella pneumoniae; identical to SEQ ID NO: 203133

SEQ ID NO: 254386 - DNA, 1287 bp, Klebsiella pneumoniae
atgccacagattgaagaattacgtcgtcagcgtgcgggtatcaacgaacaagtccaggcgctggccacgatcgaagcgagcggcgggacgttgacagcagagcagctgaacgaatttgcgagcctgcagcagcagttcaccgatatcagcgccaaaatggaacgcctggaaacagctgaacgtgccgccgcactggtcgcgacaccggttagagcaacacagcaggctccggggattgttgtgaagcaggagccgaagcaatacaccggtgccgggatgactcgtcttgtcatggccgtcgctgccggggccggtaatctgcaggactcggcaaagttcgctgcagaggaactgaatgatcagtcggtatcgatggccatctccacggctgcggcatccggtggcgtacttattccgcagaacctgcacagtgaagtgatcgagctgctgagtgaccgcaccatcgtccgtaagctgggtgcccgttctattccgctaccgaacggtaatatgtcgctgccacgcgtagccggtggtgcaacggctggctataccggtgaaaacaaagacgccaaaacatcagaaacacgcttcgatgacgtaaaactgacagcgaaaaccctgattgcgatggtaccgatttccaatgcgctgattgggcgggccggatttaacgtagagcagttggtactgcaggatattctgacagctatctccgttcgcgaagataaagcttttatgcgtgatgacggtaccggcgacacgccgattggtatgaaagcgcgcgcaactcagtggaaccgcctgctgccgtgggaagcagatgcagcaatcaacatgaacacgattgacgagtatctggacaacatcattttgaaggccatggacggtaacagcaacatgatcaacagtggctggggcatgtctaaccgtacctacatgaagttgttcggactgcgtgacggcaacgggaacaaagtctacccggaaatcgctcaggggttactcaaaggctatccgattcagcgtaccagcgctattcctgccaatctgggtaccggcggtaaggagtccgagatctactttgccgacttcaatgacgtggttattggtgaagacggcaatatgaaggtcgatttctcgaaagaagcctcatatatcgacgccgatggcaacctggtatcggcgttctcccgtaatcagtctcttatccgcgtggttactgaacacgatattggtttccgtcacccggaaggtctggtgctgggtactggcgttctgttctaa

SEQ ID NO: 254387 - DNA, 921 bp, Klebsiella pneumoniae; identical to SEQ ID NO: 203134

SEQ ID NO: 254388 - DNA, 435 bp, Klebsiella pneumoniae
atggctgctggtattagatcgtctggagggggaagaaaacccgttttacccaccgggcaaaaaagtaaactgacccgaatcgcgcccccggctgagttgatgggggaggcggctataagaatatggaagactcaaagtaaaatcctgatcgaaagaggcgtttttgagcttgaagatgcccctttactactggcttactgcaacgccttccatctgatgctcgaagccgaaaaattactggctaacgggctgacaactgaaagcgaaatgggagggttaaaaaaacatcctgccgtaaacgtcagaaatgactctgtttcccagatagcccgtctgggctcgctactggggttagatccgctcagccgtatccgaatgaccagcggcaaaaatgatcaggacgatgacgggaatgaatttgatgagtttgactga

SEQ ID NO: 254389 - DNA, 135 bp, Klebsiella pneumoniae; identical to SEQ ID NO: 203135

SEQ ID NO: 254390 - DNA, 270 bp, Klebsiella pneumoniae; identical to SEQ ID NO: 203136

SEQ ID NO: 254391 - DNA, 441 bp, Klebsiella pneumoniae
atgttcagtcgtgatgatttaaccatttcaatgtactacgcatcatccactgatgctgaatcgggtaacaagctggccacgatgactatcgaagtgcgcgatacaactccgattgctgatctggccctgatgacacagctgcagtgtgtgaccgataaggcgaaaaagaaaacctactcggtaggcaagcaaagtattgccaacggttcagatcctctcctggtcgccattgaaggccactggcggacgggtacggaggctctggttaaagagctgctggcagaagtgatggacttcatctctggcagcgttgggcaggaaagcacttgggttggccagtacggtctcaaagtatttgagaatgccccgctgattgagcgtttgccggaaagtgtgcttcaggctgatggtggagttgcaccggcaccaactgaatcctga

SEQ ID NO: 254392 - DNA, 336 bp, Klebsiella pneumoniae
gtgctggccgtgccacagaaagaaaaccgcgacagagggaacacgatgaagaatttaaaaattgaatacgttgatggccagctcgttgctgttgaggttgaggggatctcgatactcaaggcagggctatcgggtctgaacttcagccattttctggggaaagaaccgcatctcaagtttgaggtaggtggcgaaattcccgaaggactggttcccgctcaaccgcaatcgcaagagccagcgcaagcgttcgaaggcgtgcacctgccagccgaaaccgcaccgcgccatcagcgtaaccgcaataaaaatcgcaaccgtaaccggagccattaa

SEQ ID NO: 254393 - DNA, 1278 bp, Klebsiella pneumoniae; identical to SEQ ID NO: 203137

SEQ ID NO: 254394 - DNA, 504 bp, Klebsiella pneumoniae; identical to SEQ ID NO: 203138

SEQ ID NO: 254395 - DNA, 348 bp, Klebsiella pneumoniae; identical to SEQ ID NO: 203139

SEQ ID NO: 254396 - DNA, 561 bp, Klebsiella pneumoniae
atggatatcaacctgccaggcaaaaatggtctcctgttagcacgcgagctgcgtgagcaggcggacgtcgcgctgatgttcctcaccggtcgcgataacgaagtggataaaatccttggcctcgaaatcggcgccgatgactatatcactaaaccgttcaacccgcgtgaactgacgatccgcgctcgcaacctcctctcccgtaccatgaacctgggtaccgtgagcgaagaacgccgcagcgtagaaagctataagttcaacggctgggagctggatatcaatagccgttcgctggtaagcccaaatggtgagcagtataagctgccgcgcagtgaattccgcgccatgctgcacttctgcgaaaatccgggcaaaatccagtcgcgtgcagaactgctgaagaaaatgaccggccgtgagctgaagccgcacgaccgtaccgtggacgtgaccatccgtcgcattcgtaagcattttgagtccactccggacaccccggaaattatcgccaccattcatggcgaggggtaccgcttctgtggcgacctgcaggaataa

SEQ ID NO: 254397 - DNA, 1371 bp, Klebsiella pneumoniae
atgttgaaatcaccactattctggaaaatgagcaccctgctgggatgtattttactgttgtcgatcccgctgatgattgtcagacagctgatcgacgaacgcgcggattatcgtagcgacgtcattgaggctctggagagcagcaccagcggggcgcagaagctggccgggccgctcatcgccattcccgtaaccgagacgttgactcgggttgagggcaaaaaaacggtcgaatatcagaaccaatgggtgcattactggctgccggagacgctggcggttaacggtaatcaggacgttgaatcccggcgagtcggtatctatgaagggcaaatctggcacaataatctcagtatcaaggcgcattttgacccggcacgaatcacggcgctcaggaaaagtacgattacgctggggaggccatttctggtcgttagcgttagcgatgcgcgcgggattggcgagattaaggctcctgaggtcaacggcgagacgctgtccgttgagccagggcccggcactggcgagagcggagagggcattcatatgccaatgccgctgttgttacctgaacaaaaagcgctggatattgaattcacacttaatctgaatggtagcggcagcttctcggtggtaccgcttgggcgcaacagcacgctacagctaaccagcaactggccgcatccgggattccttggcgattttttacccggcaagcgtgaggttagcccaacaggctatagcgcacagtggcaaagcacctggtttgccaacaatatggccaggttttttgtcgatgaccgggaaattgagtggcgtcagctacctgcattcaacgtgaatgtcaccacgcctgccgatcaatatcagctgaccgacagggcgacaaaatatgccattctattgatagcactgacatttatggcgttctttgtgtttgaaagtttaaccctttatcgtatgcaccccatgcagtatatgctggtggggctgtcgctggttatgttctatctggtgctgctggcgctgtccgaacatatcggctttacgtcatcatggattgccgccagtttgattggcgcgctcatcaatggcgtgtatcttcaggcggtgctgaaagggtggcggaatagcttcctgttcgtctgtgcgctactgctgctggatggcattatgtggctgctgctgcgttcggaagatagcgcattattgctgggtaccggtgtgctgctgctggcgttaagtgcgcttatgttcctgactcgccatgttgactggtacgcgttatctctgccgaaagccaaagataatcagccatgcgttggcgatgatgttggcgatgatgacgataggctcaggatctggaaataa

SEQ ID NO: 254398 - DNA, 1425 bp, Klebsiella pneumoniae
atgcgcatcggaatgcggctgctgctgggctattttttgattgtcgctatcgcggcctggtttgtgctttccatctttgtccaggagattaagcccggggtgcggcgggcaacggaaggtacgctgattgatacggccaccttgcttgccgagttggcccgcgaggatttactctccgccgatccccagcatgggcggctggcccaggctttccagtcgcttcatcgacaaccgattaacgccaatatcgccggcattaataaagtgcgtaacgaatatcatatctatctgaccgacgcgcagggcaaagtggtatttgattcggcgggcaaagcgctgggacaggactattcgcgctggaacgatgtctggctcactttacgcggtcaatatggggcgcgcagtacccgcagcgacccgaacgacgacaacagctcggtgatgtatattgccgcgccggtgagcgacaatggccggatcattggcgtgctgagcgttgggaaacccaatctggccatggccccggtaatcaaacgcagcgagcgccgtattctgtgggccggaggcgcgctgctgggtatcgcgctactgatcggcgccgggatggtgtggtggattaatttctccatcggcaagctggttcgctacgcggactccgtgaccgccgaccgcccggttccgttgccggatgtcggcggcagcgaactgcgtaggctggcgcaggcgctggagagtatgcgccttaagctggaaggaaaaaacgccattgaaaactacgtgtatgccttgacccatgagctgaagagcccgctggcggcgattcgcggcgcggcagaaattctccaggaagcgcctccgcctgagatcgccgcgcgttttacccgtaatatcctggcgcagaatgcgcgtatgcagtcgctagtagaaaatttactccagcaggcccgactggagaatcggctggagatcgccaggcgtcccgtctctgtagcggcgctttttcgccgccttgccgaggagcgagagatcgcgctggcggcgaaaaacctcaggctacgctggcaggagacaaccctgacggttgagggcgatcgcgagcttttggcgcaggcgttgggcaatctccttgataacgctatcgatttcactcctgtggaaggagagatcctgcttggcgcggaagaaaacgatggcggcgtactcttgaccgtaagcgatacgggaagcggtattccagactatgcgctggggcgtatttttgagcgtttctactcactgccgcgcgacgatggacataaaagcagcggcctggggctggcatttgtgcgtgaggttgcgcgcctgcatcagggggatattcagctgattaatcgccctgaaggcggggcgtgcgctttgctgagacttcacgctcacttcacatag

SEQ ID NO: 254399 - DNA, 687 bp, Klebsiella pneumoniae
atgcaacaaccgcggatctggttggtggaagatgagctcagcattgccgatacgcttgtctacatgctgcaacaggaaggatttatcgttacggcgtttgagcgcgggctacccgctctggatgccgcccatcatcaaatacccgacctggcgatcctcgacgtcgggctgccggatatcagcggttttgagctatgccgtcgtctgctggcccgctatccggcgttgccggtgctgttcctgacggcccgcagcgaagaggtggataagctgcttggcctggaaatcggcgccgatgattatatcgccaagcccttttcccctcgtgaagtgtgcgccagggtgcgcaccgtcctgcggcggctgcaaaaatttgccgcgccttcgccgctgctacgggtaggggaatttactctgcatgacgctgcggctcaggttacgtggtgcggacagcccctgaatctgacccgctatgagtttttattattaaaaacgctgcttcactctcccggccgcattttttctcgccagctgctgatggagcaagtttggggcgacgcgaacgagagcttcgatcgcaccgtggatacccatatcaaaacgctgcgcgcgaagctgcgagaagttaaccccaatatctcccctattagtacgcatcgcggcatgggatacagccttggaggttag

SEQ ID NO: 254400 - DNA, 522 bp, Klebsiella pneumoniae
atgcaccatgttgtctcagctaccactaatcccgccaaaattcaggcaattctgcaggctttcaacgagatcttcggcgaaggatcctgccacattgagtccgtctccgtcgagagcggcgtgccggaacagccttttggcagcgacgaaacgcgcgctggcgcacgaaatcgcgtggctaacgcgcgtcttgcgcagccaaatgcggacttctgggtcgccattgaagccggaatcgacgagggcagcacttttagctgggtgatcatcgataacggtagcctgcgcggcgaagcgcgctcggcaaccctaccgctgccgcaggtcattcttgaaaaagttcaggcaggggaagcgctgggtccagtgatgtctcagcataccggcatcgatgaaattggccgtaaagagggcgcaattggcgtatttacggccggaaaactgacccgcagcagcgtttatcatcaggccgtcgtgctggcgctaagtccgtttcataacgctatttatcgccagcgttaa

SEQ ID NO: 254401 - DNA, 333 bp, Klebsiella pneumoniae
atgacccaacaatccccctattcagcagcggtagccgaacagcgtcatcaggagtggctgcgttttgtcgcgctcttacagcaggcgtacgccgacgatcttcatctgccgcttttacagcttatgctgacccccgacgagcgcgaggcgctgggtacgcgggtacgtattattgaagagctgctgcgcggtgagatgagccagcgcgagctaaaaaatgaactcggcgccggcatcgcgactatcacccgcggttcgaacagcctcaagtcagcgccgccggagctgcgtttatggctggagcagtcgttgtttaacgctggcgataaatag

SEQ ID NO: 254402 - DNA, 1365 bp, Klebsiella pneumoniae
atgaaggcgggaaataccagcctggtaagggttctggctcaacagatgccgtccgattatcaaacgattgcgacggcggttatcgcgctggctaacgatccgaatagcgttatgacctttgcccgtacaaccggcgcaacggattttacccgccagatggcggcggtcgcctttgccagcgttgcgcggcaggacgtggaaaatgcgcgcctgatgatcccttcattagcgcaggcgcagcagcttaatgaagatcaaatccaggagctgcgtgacatcgtcgcctggcgactgatgggcagtgacgtgaccgaagagcaggccatctggcgcgacgacgctatcatgcgctcccaatccacttcgttggtggagcgccgggtacgtatggcgcttggtcttggcgatcgtcgcggcctgaatacctggctggcgcgtttgccgatggaagcgaaagagaaggatgaatggcgctactggcaggccgatctgctgctggagcgcgggcgcgatgatgaagcgaaagatattctgcgctcgctgatgcagcagcgcggtttctacccgatggtcgcagcccagcgcctgggcgaggagtacactttccgtattgataaagctcccgctaatctcgatccggcgctgacctccgggccggaaatggcgcgagtccgcgagctcatgtactggaatatggacaataccgcccgcagcgagtgggccaatctggtcaccagcaagaccaaagatcagcaggcacagctggcgcgttacgcgtttaatcagaactggtgggatctcagcgttcaggccacgatcgccgggaaactgtgggatcaactggaagagcgtttcccgctggcctataacgatcttttcaaacgctacatcagcgggaaagatattccgcaaagctacgcgatggccattgcgcgtcaggagagcgcctggaacccgaaagccggttcaccggtaggtgcccgcggtctgatgcagattatgccgggtacggcgacgcatacggtgagcatgttcagtatccctggctatagcggtccatcgcagctgctggatccggaaatgaacatcaacattggtaccagctatctgcagtatgtttatcagcagtttggcaataaccgtatcttcgcctcagcggcctataacgccgggccagggcgggtgcgcacgtggcggggcaacagcggcggccgtattgacgcggtggcgttcgtcgagagcattccgttctctgaaacgcgcggctacgtcaaaaacgttttgtcctatgatgcctactatcgctattttatgggccagaaagatgctctgctgagcgatgcggagtggaagctgcgctactag

SEQ ID NO: 254403 - DNA, 306 bp, Klebsiella pneumoniae
gtggaaaaagccaaaactgtgacgtggcgtcttctggccgccggcgtaagtctgctgacgttaagccaactggcgcatgcggattcactggatgaacagcgcagccgctatgctcaaactaaacaggcatgggacaaccgacagatggatgtcgtcaatcagctgatgcccaccctgacgacctatccgctttatccttatctccagtatcgtcagataaccgacgatctgatgaaccaaccggcgctggtggtcaccaattttatcgccgctaaccctacgctgcctcccgcacgatatcgctga

SEQ ID NO: 254404 - DNA, 972 bp, Klebsiella pneumoniae
atgccaaacagtttgacctggtgcgacctgcctgaagatgtttcccagtggcctggattgccgctttccctgagcggtgatgaggttatgccgttggattatcatgccggacgtagcggctggctgctgtatggtcgcggtctcaacaagcgtcgtctgaccgagtggcagcgagagctgggggcggccctggtgattgttgcctcctgggcggttgacgactatcaggtgattcgtctggctggttctttaacgctacgagcgacccgtctggcccatgaggccgggtttgacgtcgcgccgctggggaaaatcccgcatttacgcacgccgggcctgctggttatggatatggactcgacggcgattcagatcgagtgcattgatgaaatcgccaaactggccggtaccggcgagctggtctctgaagtgaccgagcgcgcgatgcgcggcgaacttgatttcaccgccagcctgcgtcagcgggtagcaacgctgaaagatgccgatgccaatattcttctgcaggtgcgtgaaacgctgccgctgatgccggggctgacccagctggtgctgaagctggaaacgctcggctggaaggtggcgatcgcctccggcggcttcaccttctttgccgagtatttgcgcgacaagctgcatctcgacgcggtgttcgccaacgaactggagatcatggacggtaagctgaccggcaacgtcatcggcgatatcgtcgatgcgaaatataaagccagtacgctgcgtaaactggcggaaaagtatgaaatcccgccggcgcaaaccgtcgctattggcgatggcgcaaacgatctgccgatgattaaagcggcaggactcggcatcgcctatcatgctaagcccaaagtgaatgaactggcggaagtgacaatccgccacgctgacctgatgggggtattctgtattctctccggcagcatgaatcaaaagtaa

SEQ ID NO: 254405 - DNA, 642 bp, Klebsiella pneumoniae
atggtacgcgcaaaacttaaattccggctgcatcgcgcggtgatagttctgatctgtctcgcactcctcgtcgcccttatgcagggcgcttcgtggtttagccagaacagtcagaagcagcgcaatccgcagctggaagaactggcccgcacgctcgcccagcaggtcacgctgaacctggcgccgctgatgcacagcgaaacgcccgacgaaaagcgaattagccagttgctggaccagcttacccataaaagccggatcctcgacgccggcgtgtatgacgaacagggtgacctggtggcgcgttccggcgaaagcgtcgaggtacgcgatcgcctggcgctggacgggaaaaaagcgggcggctacttcaaccagcaaatcgttgagcctgttcagggtaaaaacgggccgctcggctacctgcgcctgacgctggatacccacacgttagccaccgaagcgcagcaggtcgataataccaccaatatcctgcgtctgatgctgctgctatctctggccatcggcgtcgtcctgacgcgcaccctgctgcagggaaaacgtacccgctggcagcaatcgcctttcctgctcaccgccaataagccggtgcaggatgaagataaagatgaatcagaataa

SEQ ID NO: 254406 - DNA, 723 bp, Klebsiella pneumoniae; identical to SEQ ID NO: 176902

SEQ ID NO: 254407 - DNA, 1224 bp, Klebsiella pneumoniae
atgaaacgtgcatttattatggtgctggactcattcggcatcggtgcgactgaagacgctgaacgctttggcgacgtcggttcagacaccatgggccatattgcagaagcttgtgccaaaggcgaggctgacaacggccgtaaaggtccgctcaatttgcctaatctgacccgcctggggctggttaaggcccatgaaggttctaccggtaaagttgcagccggtatggacggcaacgcggaagttatcggcgcttacgcatgggcgcatgagctctcttccggcaaagacaccccgtcaggccactgggaaatcgctggcgtgccggttctgtttgactggggctactttcctgagcatgaaaacagcttcccgcaggagctgcttgataaactggttaagcgcgcaaatctgccgggctacctcggcaactgccactcttccggtaccgttatcctcgatcaactgggcgaagagcatatgaaaaccggcaagccgattttctatacctctgctgactcggtgttccagattgcctgccatgaagagacctttggtctcgataagctgtacgaactgtgcgaaatcgcgcgtgaagagctgaccgaaggcggctataacatcggccgcgttattgcgcgtccgtttatcggcgacaaagccggtcacttccagcgcaccggtaaccgccacgatctggccgttgagccgccggcaccgacggtgctacagaagctggttgacgagaaaaaggggcaggtggtttcggtcggtaaaatcgccgacatctatgccaactgcggcattaccaaaaaagtgaaggcgaccggcctggatgcgctgtttgacgccaccataaaagagatgaaagaagcgggggacgaaaccatcgtcttcaccaacttcgtggacttcgactcttcctggggccatcgccgcgatgttgctggctatgctgcgggcctggagctgttcgatcgccgtctgccggagctgatggaactggtaggggaagatgacattctgatcctgaccgctgaccacggctgcgacccgacctggaccggtactgaccatacccgcgaacatattccggtactgatttatggcccgaaagtgaagccgggttcgctgggtcaccgcgaaaccttcgccgatatcggccagactctggcaacgtacttcggtacgtctccgatggaatacggcaaaaacatgctgtga

SEQ ID NO: 254408 - DNA, 1323 bp, Klebsiella pneumoniae
ttgtttctcgcacaagaaattattcgtaaaaaacgtgatggtcatgcgctgagcgatgaagaaattcgttttttcattaacggtatccgcgataacaccatctctgaagggcagatcgccgcgctggcgatgaccatttttttccacgatatgtctatgccggaacgcgtttcgctgaccatggcgatgcgggattcaggaaccgtcctcgactggaagagccttaatcttaacggcccgattgtcgataaacactctaccggcggcgtaggcgatgtgacttccctgatgctggggccgatggtcgctgcctgcggcggttatgtaccgatgatctccgggcgcggactcggtcataccggcggtacgctggacaagctggaagcgatccccggtttcgatatcttcccggacgatagccgcttccgtgaaatcattaaagatgtcggcgtcgcgattatcgggcagaccagctctctggcaccggcggacaaacgtttttacgccacgcgtgatatcaccgcgacggtggactctatccctctgatcaccgcctcgattctcgccaagaagctggcggaagggctggacgcgctggtgatggatgtcaaagtcggcagcggcgcctttatgcctacttatgagctttccgccgcgctggccgaagcgatcgtcggcgttgctaacggcgccggcgtgcggacgacagccctgttgaccgatatgaaccaggtgctggcttccagcgccggtaatgcggtggaagtgcgggaagccgtgcagttcctcaccggcgagtaccgcaatccgcggctgcttgaggtgacgatggcgctctgcgttgagatgctgatttccggcaagctggcggagaacgatgccgatgcgcgggctaagcttcaggcggtgctggataacggtaaagccgcagaagtctttggccggatggtggcggcgcaaaaaggccctggcgatttcgtggaaaactacgataaatacctgccgggcgcgatgctaagcaaagcggtctacgccgaagacgaaggatttgttgccgaaatggacactcgcgcgctgggcatggcggtggtctctatgggcggcggtcgccgtcaggctgcagatctaattgattacagcgtcggcttcaccgacatggttcccctcggcgcgcgcattgatacgcagcagccgctggcggttatccatgcgaaagatgagaacagctggcaggaagcggccaaagcagtgaaagcggccataaaacttgacgataaagcgcctgaaattacgccgacagtctatcgtcgtatcaccgaatag

SEQ ID NO: 254409 - DNA, 804 bp, Klebsiella pneumoniae
  misc_feature (8)..(17): n is a, c, g, or t
atgatgannnnnnnnnngtatgaaatgactgatttaactgcaagcagcctgcgcgcgttgaaactgatggacctgaccaccctgaatgatgacgacactaatgagaaagtgatcgcgttgtgtcataaggccaaaacaccggtagggaataccgccgcagtgtgtatctacccgcgctttatcccgatcgcacgcaaaacgctgaacgaacagggaaccccggatatccgcattgcgacggtgaccaacttcccgcacggtaacgatgatatcgatattgcgctggcggaaacccgcgcggcgattgcctacggcgcggatgaagtcgacgtcgtgttcccttatcgcgcgctgattgcgggcaacgaacaggtgggttttgacctggtcaaagcctgtaaagaagcctgcgcggcagcaaacgtgctgctgaaagtcattatcgaaaccggcgagctgaaagaagaagcgctgattcgtaaagcgtctgaaatttccatcaaagccggcgctgattttatcaaaacgtcgaccggtaaagttccggtgaatgcgaccccggaaagcgcgcgcattatgctggaagtcatccgcgatatgggtgttcagcagagcgttggcttcaaaccggcaggcggcgtgcgcagcgcggaagacgcgcaaaagttcctcgccattgctgatgagctgttcggggccgactgggccgattctcgccactatcgcttcggcgcttccagcctgctggcaagcctgctgaaagcgttgggtcacggcgatggtaagagcgccagcagctactaa

SEQ ID NO: 254410 - DNA, 780 bp, Klebsiella pneumoniae
gtgaccttgcgatttattgatacccactgtcacttcgatttccctcctttcaccggcgacgaaactgccagtattgcccgagcggctcaggctggcgtgaggcaaatcatcgtaccggcgacggaagcggataactttgcccgcgtattagggcttgcggcgcagtatgctccgctctacgcggccctggggcttcatccgatagtaattgagcggcatgaagaagagagtctggcgcggcttgaagcctgcctggcgaaacgcgatgctaagctgatcgcggttggggaaattggcctcgatctctatcgcgaagatccgcagttcgagcgccagatttctctcctggaggcgcagttgcgtctggcgaaacgctacgacttgccggtcatcctccactccagacgcactcatgacaagctggcgatgctgctaaaaaagcacgctttaccgcgtaccggcgtggtgcacggttttgccggtagtcttcagcaagccgaacgttttgtccagctgggctataaaatcggcgttggcggtaccattacctacccgcgcgccagcaagacccgcgatgtgatggcgcagctaccgctttctgcgctgttactggagaccgatgcgccggatatgccgttaaacggtttccaggggcagccgaacaggcctgagcaagcggctcgcgtcttcaccgccctatgtgagctacgctctgagcctgctgaagagatagctaataccatgttttgtaatacaaaagaggtttttgctattttataa

SEQ ID NO: 254411 - DNA, 1074 bp, Klebsiella pneumoniae
gtggggcagcgaattcccgtgacgttgggcaacattacgccgttatctgttaaacccttccagccgggcaggcttgcgctggtgtgcgaaggtgggggacagaggggcatttttaccgccggggtgctggacgaatttatgcgcgcgggatttaacccgttcgatatgctgtttggcacctctgccggggcgcaaaatctctcggcctatctgtgcaaccagcccggctatgcccgcaaggtgatcacccgctacaccaccgcccgcgagtttttcgatccgatgcgttttgtccgcggaggcaacctcatcgatctcgactggctggtcgacagcaccgccaaaaaaatgccgctggcgatggcttatgctgaagaccgttttgctcagggtaaagagttctggatgtgcgcctgccgcggcgatgattatacgcccaactacttttcccctacccagcaaacctggctcgatctgattcgcgcctccagcgcgattcccggtttttaccgcagcggcgttatgctggatggggtgagctatctggacggcggcgtcagcgatgcgatcccggtgcaggaggccgcccgtcggggcgcgcaaacaatcgtagtgatccgcaccgtgccttcgcagatgtactacaccccgcagtggtttaaacggatggagcgctggcttggcgaaagtagcctgcagccgtttgtgaatctggtacagcaccacgaaaccacctatcgctccacgcaagagttcattgagaagccgccgggtaagctgagaattctggaaatatatccacagaagccattgaaaagtatggcgttaggcagccgtcttcctgctttactggaagactacaaaaccgggcgccagtgcgggcgctatttcctcgctacggtcggtaaactgctggccgacaggcctcctttgctgcgtcatgcgccacgcattgcggtaccgaaaacggtggttatcccgccggcgcccgtggccaacgagatccctcaggttccggtcatcgcggctgagcaggccaatgatgccagctttgataatgaggacctcgcgtga

SEQ ID NO: 254412 - DNA, 162 bp, Klebsiella pneumoniae; identical to SEQ ID NO: 176909

SEQ ID NO: 254413 - DNA, 612 bp, Klebsiella pneumoniae
atgacaagacttaagagcggcaagacactcctggccctcttcctgggctcagcaataatcagcgcttcggcgtatgcagaaaactcgaccgtagacagcgcaaaatctgcagccagcaatgccggtcaagccgttgataattcgatgaacaaagtcggaaactttatggacgacagcaccatcaccgccagggtgaaagcggcgctgatcgatcataaggatattcgcagcaccgatatctcggtgaaaacggaaaataaagtcgtcacgttaagcggtacagttgatagttcagagcagcataaacaagcgcttagcgtagctaaagccgttgaaggcgtgagctcggtaaacgacaagcttagcgtgcagaacgaaaaatcagcgtcgctgaagggctacgcgggcgatacagcggtgaccagcgagatcaaagctaaattactggctgacgatatcgtcccgtcgcgtaacgtgaaagttgagaccaccgatggcgtcgtacatttatccggcacggtcgagtccagcaagcagtcggaacgtgcggaaggcattgctaaagccgtttccggcgtcaaaagcgtgaagaacgatcttagcgttaaataa

SEQ ID NO: 254414 - DNA, 1590 bp, Klebsiella pneumoniae
atgacgttgtctccttatttgcaggaggtggccaagcgccgcacttttgccattatttctcacccggatgccggtaaaacgaccattactgaaaaggtgctgttattcggacaggctatccagaccgccggtacggtaaaaggccgcggctccagtcagcatgcgaagtctgactggatggaaatggaaaagcagcgcggtatctccattaccacttccgtaatgcagttcccgtatcacgactgtctggtcaatctgctggatactccggggcacgaagacttctccgaagatacctatcgtacgctgacggcggtggactgctgtctgatggttatcgatgccgcgaaaggcgttgaggatcgtacccgtaagctgatggaagtcacccgtctgcgcgatacgccgatcctgacgtttatgaacaaacttgaccgtgacatccgcgacccgatggagctgctggatgaagtggaaaacgagctgaaaatcggctgcgcgccgatcacctggcccattggctgcggcaagctgttcaagggcgtttaccacctctataaagatgaaacctatctctaccagaccggtaaaggtcacactatccaggaagtgcgcatcgttaaagggttaaataacccggatctggacgcggcggtgggcgaagacctggcgcagcagctgcgcgacgagctggagctggtgcagggcgcgtctaacgaattcgataaagatctgttcctggcgggcgaaattacgccggtattcttcggaaccgcgctgggtaacttcggcgttgaccatatgctggacggtttagtggagtgggcgcctgcgccgatgccgcgtaaaaccgatacccgcaccgtggaagcctcggaagagaagttcaccggctttgtctttaaaattcaggccaacatggacccgaaacaccgcgaccgcgtggcctttatgcgcgtggtttccggtaagtacgagaagggcatgaagatgcgccaggtgcgtatcggcaaggatgtggtgatctccgacgcgctgaccttcatggccggcgaccgttcgcatgtggaagaagcgtatccgggcgatatcctgggtctgcataaccacggcaccatccagattggcgatacctttacccagggtgaaatgatgaagttcaccggtatcccgaacttcgccccggaactgttccgccgcattcgcctgaaagatccgctcaagcagaaacagctgctgaagggtctggttcagctttctgaagaaggcgcggtgcaggtgttccgtccgatcgccaataacgatctgatcgtcggcgcggtgggggtactgcagtttgacgtcgtcgtcgctcgcctgaagagcgaatacaacgttgaggcgatctacgagtcggtcaacgttgccaccgcccgctgggtggaatgcagcgacgcgaagaaattcgaagagtttaagcgtaagaacgaaattcagctggcgctcgatggcggcgataatctgacctacatcgccccgaccatggttaacctgaacctgacgcaggagcgttatcctgacgtccagttccgtaaaactcgcgagcactaa

SEQ ID NO: 254415 - DNA, 678 bp, Klebsiella pneumoniae
atgaagtgggactggattttctttgatgccgatgaaacgttatttacgtttgactcgtttagcggcctacagcggatgtttctcgactatagcgtgaccttctccgcagaggattttcaggactaccaggccgtgaataagccgctgtgggtggattatcagaacggcgctatcacttctcttcaactgcagcatcagcgctttgacggttgggcggagcgcctgaacgtccctcctggtgagctgaacgccgcgtttatgaacgcgatggcggagatctgctcgccgctgccgggcgcggtgtcgctgctggattcgctgcagggtaaggtgaaaatgggcatcatcaccaacggttttacctcgctacagcagacgcgtcttgaacgtaccgggttacgcgatcattttgatttactgattatttccgaagaggttggggtcgctaaaccggatacgcgcatctttgattatgccctggcgcaggcgggtaaccccgatcgttcacgggtgctgatggtgggtgatacggcggaatctgatattcgcggcggcgtgaatgccggcctggccacctgctggtttaaccctcatcaacgcgagctgcctgccgacctccgcgcggactggacggtcacctctttaagcgaactggagcaactcctgtgtaaacactga

SEQ ID NO: 254416 - DNA, 447 bp, Klebsiella pneumoniae
atgaacacgatttctaccctcaacgcggctgatttgccacgggcctggcaaattgaaacgcgcgcccacgctttcccctggagcgagcagacgtttgccagcaatcagggcgatcgctatctgaatcttcagctgtccgtagacggggagatggcggcctttgctattacgcaaatcgtgctcgacgaggcgacgctgtttaatatcgccgtcgatcccgcttttcagcgtcgtggtctgggcagagcgctgctggagcaggtgattgatgaagtagaaaaacgcggcgtcgtcacgctgtggctggaggtgcgcgcgtctaacgtcgccgccatcgcgctctatgaaagcttaggctttaacgaggcgacgattcgccgcaactattaccccacggtcgacggacgtgaggacgccgttattatggcactgccaatcagtatgtaa

SEQ ID NO: 254417 - DNA, 414 bp, Klebsiella pneumoniae; identical to SEQ ID NO: 176914

SEQ ID NO: 254418 - DNA, 231 bp, Klebsiella pneumoniae
gtgctgctggataccctcagcagctttattgccaataacgccgagccgggaaaaacgtcgctgctgttggggattcatcgcaatacgctcacctaccggctgcagcagattaaaaagcatattcagctcgatccgatggttttcaccgacctgacgcagctggcggtgtcggtacactgctatcgtcggcagaacccgcgccagagcgaatggattgataccttaagctaa

SEQ ID NO: 254419 - DNA, 1650 bp, Klebsiella pneumoniae
atggcgcaaatgaatgaaaacatcgcgaccgcaccggtctctcccctacgcgattttttcgcgaaaccacgtatcatcgccaggcccggttttaaccgctggctggtgccaccggccgcactggccgttcatctctgcataggtatggcctatgggttttccgtttactggctgcctatgtcgcagctcataggaggaagcgagtcccttcaatgccccgtcaatatgtcgttctggcagcagctgtttacccgcgattgcgactggaaaatctccatgctcggctggacctacacgctgttttttgtttttctcggctgttcggcggcgctgtggggcagctggcttgagaaggttggaccgcggctggtgagctttattgccaccttatgctggtgcggcggcctgctgctatccagcgtcgccatctatttccatcagctatggttgctgtggctgggggccggggtcatcggcggaatcggtctcggactgggctatatttcaccggtttcgacgctgttgcgctggtttcctgacaagcgcggaatggcggccgggatggcgatcatgggttttggcgggggagcgctggtgggggcgccgctggcaaatggtctgatgaattacttcgccggtccgaccggcaacggggtatggcaaagcattctggcgctggcggcgatttatgcgctatttatgcttgccggtacctttggctatcgcctgccgcccatgggctggcacccttcgggcgagaaggcgcaaaaaacgatccgcaataatcccacgatccaggtgcacgtccgcgtcgcctgccgtaccccacagttctggctgctgtggatggtgctatggctcaacgtcaccgcggggatcggtattctcggtatggcttcgccgatgctgcaggagatctttgccggcaaactgctgtcgctcgatctcagctggcatgagctgaacggcgagcagctgaaacgcattgctaccatggccgcaggatttaccggcctgctcagcctgtttaacatcctgggacggtttttctgggcatcggtatccgatctgtgcgggcgaaaaatgacctttgcgatcattttctgcctgggcgccgtgctgtacgggacgttgccgctggtgaatcacggcggctatatcgcgctttatgtctgcgcgatgtgcattatcatttcgatgtacggcggaggctttgccagtattcccgcctatctggctgatgtctttggctcacaaatggtgggcgcgattcatggacgcttgttaaccgcctggtcggcggcggggatcagcggcccggttctggtgaactatctgcgcgagtatcagctgacgcacggggtcccgcccgagcgcgtctacgatataacgctgatggtcctgaccggcctgctggtgttgggttttatctgtaatcagctggtgcgtccgctgacggaagagcatgcgatgaccgcggaacagcagcagcaggcgaaaggtctgtataccatcaataaggatgctcagctcacgtgggaggcccgcccgtccacgctgctgttaaccgtaagctggttagcggtgagcgtgccgcttttatggggcgtcggcaccaccctccagcaggccgtgaagttctttatgtaa

SEQ ID NO: 254420 - DNA, 441 bp, Klebsiella pneumoniae
atggtaaatatttatattgcgagtccttttttcagcgacgaccaggttgatcgcgtccagcgcgtcgaacaggcgctgaccgtcaataaaacggtagataaatttttctcaccgcgcctggccgatgcggagaatctggaatacggcactttaccctggcgcgatttcatctttaagaacgatatcaagcatcttgacgaagccacggtggtggttgccgttgttgatttctttgacgatcacgtcgatagcggtacggcgtacgaaatcggctatgcccacgcgtttaaaaagccgttgattatcgttcaggaaaaagggaataagcttaacctgatgatttcagaaagtctgacttactatacccaaagcgctgaagagctggcgacttacgactttactcaactgaaaaagaatatctttaccggcgacgttttctga

SEQ ID NO: 254421 - DNA, 513 bp, Klebsiella pneumoniae
atgttactgatctttggcggcctgcccggtaccgggaaatcaaccattgctcgcctgctggccgccaggctgggggccgtctggttacgaatcgattcgattgagcaggcgctgatccgcgccgaaaccgtcacccggcacgatataggaccggccggatatctggcggcctacgccattgctgcggataacctcaggctgggcaacgtggtgattgccgatgcggtgaatcccatcgccattacccgccaggcctggagagaggtcgcgaccgagaatgccgcgccttatctggagatagaagtgacctgctccgaccaaacgcagcatcgggatcgcgtggaaaaccgcgcagcggacattcgcggccatatcctgccggactggcaaaaggtcatcacccgtgattacgaaccctggcattctgccagcctggtgctggatacctcagtactgagcgccgaagaggcggtagagcggatcgttgcgcatattgagtcgcaccgccggtaa

SEQ ID NO: 254422 - DNA, 1260 bp, Klebsiella pneumoniae
atgaataccccgccacggcgtttaatccagtacggcagcgtcatgttgtttccgctggcgatgattatttatgatttttcggcttacctgaccacggatcttattcagccaggcattattcatatcatcaacgagcttcaggctgatgtcacccttgctccggcatcggtcagcctgtatatggctggaggcctggcgctgcagtggctgctgggccctctgtcagatcgtatcggccgccgccccgttctgctcaccggcgccctggtttttgctctctcctgcctgagcatgctgtttgtcgcttcgatcgcgcaatacttcgtcgcccgctttatccagggaaccagcatctgttttatctcgaccgtgggctatgtgtcgattcaggaagcgtttggggaaaccgattcaatcagaatcatggctgcgctgacctctatcgtcctgcttgcgccggttatcggaccgctggccggcgcggcgctaatgacggtgatgcactggaaactgctgtttgccattattggcgcgctgggcctggtggcctgggccctgctgctttttaagatgccggaaaccgttatctctcaggggcgggggtttaaaccgggggaagtgctggctgatttcatcgcggcgtttcgtcatcccgtggtgctgacaggttcgctggcggtggcctttggcaacgtgccgatgatcacctgggtggcgctctctccggtgattctgattgagcacggcggcatgtctcccgcggcatatgcctggactcaggtgccggtgttcagtgggctgattatcgccagcgcgatcgtggcgaacgtggtaaaagaccccacttcgccgcgctttatctggcgtaccgttccgatacagctgaccggcctgctgatcctgctggtcggtaatcttctgtggccgcatgtctggttctggtcggtgctgggtaccagcgtttatgcgctggggattgggctactctacccggtgctgttccgcttcacgctcttttcccatcatctgccaaaaggcaccgtgtccgccacgctgaatattctggccctgagcgcgtttgccgcttccattgaggcaacccgttggctctacttccatgccggtggcagaatcgccttccactgcgcggcgctgatggccggtctcgccgtggtaatactggtttcccggctgctgaaactgcgtaagcggcatcaggaggcatcaacagataatcgtcacctccatgacaacgtttag

SEQ ID NO: 254423 - DNA, 537 bp, Klebsiella pneumoniae; identical to SEQ ID NO: 179812

SEQ ID NO: 254424 - DNA, 1293 bp, Klebsiella pneumoniae
atgctactggcaggtgctatttttatcctgaccattattctggttatctggcagccgaaggggctgggcatcggctggagcgcgacgcttggcgcagtactggctttgatatctggcgttgtgcatgtgggggatattccggtggtgtggaatatcgtctggaacgcgacggcgacctttattgcggtgattattatcagcctgttgctcgacgagtccggcttttttgaatgggcggcgctgcatgtctctcgttggggaaacggtcgtggccgtttgctgtttacctggatcgttctgctcggcgctgcggtggcggcgctgtttgctaacgatggtgcggcactgattctgactcccattgtcatcgccatgttgctggcattaggattcagcaaggggacgacgctggccttcgtgatggctgccggatttattgccgatacggccagcctgccgcttattgtgtctaatctggtgaacatcgtatcggcagatttctttagtctgggattcaccgaatatgcctcggtgatggtgccggtggatattgctgctattatcgccacgctggtgatgctgcatctgttcttccgcaaagatatcccgccgacttacgatctggctctcctgaaggcacctgaaaaagcagtaaaagatccggctacgttccgcaccggctggattgttttgattcttctgctggtaggttttttcgtcctcgagcctctcgggattcccgttagcgcaattgcggcagttggggcggtaatactgtttaccgtggcgaaacgaggtcatgccattaacaccggtaaagtgctgcgtggcgcaccctggcagatcgttatcttctcattggggatgtacctggtggtctacggtctgcgtaacgccgggctaaccgaatacctttcaggggggctaaacgtactggcggataaaggactctgggccgcgacgctgggtactggcttcctgatggctttcctgtcttcgatcatgaacaacatgccttccgtgctggttggtgcgctctctatcgatggaagcaccgcaaccggcgttattaaagaggcaatgatctacgccaacgtgattggctgcgatctgggtccgaaaattacgccgatcggtagcctggcaacgctgctctggctgcacgtactttcacagaagaatatgaccatcacctggggctactatttccgcaccgggatcgttatgactctgcctgtgctgtttgtcacgctggccgcgctggcgctacgtctctctttcactttgtcatga

SEQ ID NO: 254425 - DNA, 396 bp, Klebsiella pneumoniae
  misc_feature (272)..(281): n is a, c, g, or t
atggatgagaaatcgttactaatagctaaaaaggtgatatttgacagcgctaaaatgacattaaccaacggtgataaaatcattaaaatttcagaatcggagacaaatttactccttgccttctatcgcggaatatataaaaaggaagatattattaattttgtctggaagaaccgtgcgggttgtgtttccgaatcgagttattacaagctcattaaccagatgcggaataattttgttcttgttggcctgaatgcggccgatattgttannnnnnnnnnatattgttacgcgaccacgaattggcgtctcgttatcattggcgttagaacccatcaaaaaagaacctacgccacgatgcgaaaacgtcagggatgccgggtgcgaaaaagatag

SEQ ID NO: 254426 - DNA, 441 bp, Klebsiella pneumoniae
atgctggcaacgctggtatatcaaggagccaggcgcgatgcagacgaaatacataatcttatttgcactgccaaatcaactatttatataaagccgagagagctcatactgaacggaactttggtgctggatcttaagtcgaaccgcattgctattcattattccgtgcaggatcaacggcgagagcagcggttattctttcaggatgttgcaatcaccccgcttaaccgcaccggcatgaaaacctacacctttcgggttaaagccgtgcacaaatttaattctgatacgacgggtgagatgttttcctggctgcgtctcctgcagccggcaaccgagaatgagctgacgataaataaaatcggtccgagggcctatcttttttcactgaaccggcagatctataatttctgcaccaccagcggcagcgctaaagcataa

SEQ ID NO: 254427 - DNA, 1563 bp, Klebsiella pneumoniae
gtgaaactaaagctatcttttgtgatttgttcagtgcttgtgccgctggtcgtgatgattatattagcgctgctggtcagcgtactacagtttaaacaggacgtcgccctgagcgcgaataccttattacgtttcagtaacgatgtatcaaccgcctcatggcgggtcaccgcaaaaaccgtaaaaatagcggacagaccctgcgctgaaatgctgtcggagcttaaccgaacccgcgcctttaccccttatatccgcgatatcggtctgctggaaaacggcaacctgctctgttcctttgttaccagggagcaggcgcacccttttcctttgccgccgggtaaaacgctcccgacgccgttacctgccagatgggtccgttcatttgacttgatggccggaggaccaggcagacccgcggtggtttacacggagcaggtgacggcgcaaaaatcagcgtttgtcatcgtcgattctcgctatattcaggaactgatggatgtcctcgcagaggaaagagccgccgtattcagcctgcggtttggcgagggcgataggattatcagccaaccagcgcagcgtgacataatagtgatgacccagcatttcgtcaccgccgacggtaagatttcgcttaccgtcggcgcgcctctcgcggcattgatggctctgtggatgaaatctctgcttatctttatccctctctcgctttgcttctcatttatgaccctttttgtttaccgacattgggcccagaaacggctatccatggcccgagaaatcacccgcggtatgaaaaacgggcagttcacagtgcattatcaacctgtatttaacgtcagccgcgctcattgcggcggcgtggaggcattaatgcgctggccccttccggatgggagttttattactcccgacatcttcatcaccgcggcagaaaacgaagggatgatcgttccgctttcgcgtcacttatttaagctcatcgcccaggatgtcgaacggtggcaggttgccggggatttttatatcagcgtaaatatttcacctgaacatctggtgcatgagagttttattgccgatgttgaatcgctactggcaagcttagggaaactgcgcctcatgctggagctcaccgaacgcagcctcattgtccaaccggctttagtgtcagataagctcatgcagctgcgtgagaaaggcgtactgatagcgattgacgattttggtaccggctactgctcgctttcttaccttcagcagcttccggctgattatctgaaaatcgatcgtacttttgtcgatacgattgataccagcggcagcgacgtgcccattctggataccattattatgcttagtcaaaggctgggacttaatatcgttgcggaaggcgtcagttcagagcatcagctacgctatatcctcgatcataacgtaggttttatacagggctatctttacgcaaagccgatgaattcagatgattttacggtctggcttgatacacggggcaatgagcaaaatgaaaggattaaaagtaaaaacctttcaatagttcggtag

SEQ ID NO: 254428 - DNA, 738 bp, Klebsiella pneumoniae
atgagtaagaataagtacctaattgataagaaagtcattcttgattgcgagcggatgaccttatcacgcgatcgcgaaagcttaaaaatttctgaatctgaatgcaatttgctccttgcttttcatcagggactttttaaaaaagatgatttaatcgcctgggtgtggggacgaaaaggtgtggtggtttccagtgccagctattacaaattaatcaatcaattacgcggttcgtttgaaaaaatcggcctttccagttctgcggtattaacgcgccctaaggttggtgtgacgctctcggtaactatcgaaccactgccagatgaatcaacacccgcaacgcaaaatagagccagcgacaccgttgcgccagttgcagaatcgttgcctgaaccaacgcagtcttcgcaggcagtttcaaagcgaaaagagtggctatttttaatctgcgcaacgctgttcctgctgatggtcatttatctctacagcaaacgccatccagactacttttctgagctgggaacctataacggatataccttttatggtgtcactgaagataatcggtctctcgaggatgcggtgggggctttttccgaactgagtcagcaagtctataagcaaaacggcaatttcatttattatattcgcgttcctgacaccaatatttttgttcagtgtctgaatcaactgaatgtttcggagcccaaatgcatcactatcaaagaacggtattaa

SEQ ID NO: 254429 - DNA, 489 bp, Klebsiella pneumoniae
atgcatcactatcaaagaacggtattaagaggcattacgctacttattctggcagcatcttttgtgctgctgattttacaggcacgccagcagcgctatcctctgtcagatgcggattcatttctatgcaccactaaaacggtaacttcagtcctgcctggcaattttctcgctaatggcaatatcgtcctcgatttcaaaaacaaacgcattacattgcagtatgacatcaccactaaagagcaaatcaaaaaagtgttgtatcgcgatgtgtatatgaagaacctgcaaatgcctggccccggcatttatacatttgatgtcgattcggtaaaagttttttctaccgacaccgccggtgattttttagcacattttcgcgtattgcaccccgatgctgccaatgaaattcgcatcaccagggtcggtaacagcacttatttgtactcaatcaatcggcagatatataacgtatgtaccgcgcaataa

SEQ ID NO: 254430 - DNA, 537 bp, Klebsiella pneumoniae
atgcagcgtgctttttcaccatggattatagcagcactattattttcgccctcattagcgttggcgatggaaaaccataccctctcccttggctatgcccaaacgcatcttagcgcgttaaagaaatctgcaagtaaggatcttcgcgggctcaatctaaaatatcgctatgagttcaattctgactggggtgtattgacctctctcacggcaactcgtcatgaagtacaacattaccgttgggacgcaggaaaactacataaagatggcgataataccactagctatagttcgttaatggtaggaccgacctaccggattaatgactatgttagtttatatggtaatgtaggtatggctggtatgaaggtcaaaaaccgtgacaatcaatcttcctcagaagatgcttttgcctatggtgcaggtcttatttttaatccattcactaacctttccctggatgtgtcatgggaaacagctaaattactttacgttgatacaaacacatttggtgtgagcgtaggttatcgtttttaa

SEQ ID NO: 254431 - DNA, 636 bp, Klebsiella pneumoniae
atgtcgttggttcttttgcgcatgaacaaagattcttctttcgtcaatattggacatttagcctggtgcgctttggtggctctcggccttcagcggcacgatcggcttgttgttaccgaggcgcaggaaaacatatttctgatccgctggttggccgatgccagaaaacagaagagattccccagaaatttaactgggcatatagactggctacttgctcaggggcgtcgacttggcgttcgggcgcgtctgaatcagaaactgcattatttatggcttatgagcagcggcgatcttcacaatatgccggatctacttcgattgacctatgctatcgaaatggcaaaagccggcggttggcagtatgaccttgttgatgagaagaagatggcggctggtatcagcaaattccagaatatggattcgttttgcctggaaagaacagctgtcgaggaaggatttgatgctaacgggaagcaaatagccccactttatgtccgcgtttttggtcaagttgagaaactgctgtcacttctggcctgctttggacttaaacttgacgtaatcgaatcgtattcaaatgaattctctgtaaccaaatcaccgatttttttgctacagccagtgatggcctga

SEQ ID NO: 254432 - DNA, 561 bp, Klebsiella pneumoniae
atgagcgttcaacaaaacactttaaatatcctgagcgaattgcagcaaaatgcgatgaagattgatgatgcccaggctgcgcaattcgtcaaacagatcaagaatgccaaacatatctttctgcagggcgcaggccgtagcggcatcgccatccgcggctttgcaaaccgtctgctccacctcggtttttcagtaagcgttgtcggcgaaatttcttctcctcatacgaagccgggcgatctggtcattattggttccggcagcggtgagaccggcagtctggtgagcctggcgcagaaggccgtagcctgtggcgtggatgtggcgcttgtcacaatgaaagcggagtccacaatcggcaaactggccaaaagcacgcttgtgttgcctggaaccgtgaaagaagacaacgagcgtgaagacgatgctttttcacagcctatgggatcggcttttgagcagctctgctttatcgcctatgacgcaatcgtgcttgagctgatggcccagctcggcgaaaccagcgaaacgatgtttaagagacacgctgaccttgagtaa

SEQ ID NO: 254433 - DNA, 450 bp, Klebsiella pneumoniae
gtgggcacaatttctatcaatgtcgcggatggtgcggcatacaaaaattatgatgaagtgctggagcatattcaccagaaacatctggctgatgggatagtaagagacacttacctccaggcgctgcgtgaacgtgaagccgactacccaaccggaattttacttgatggctatgctgtcgctatcccacattgcgatagccagcatgccgtcagcccggcgatttacatcatccgtttgccacaggaaattgaagttaatcaggcagatggtgacgagaaattgtgggttcgcctggttgttaacctggttgttactcaaccagcagatcaattgcagttgttgaaggcgttgtttaaccatcttcagctagctgatttttaccaccagatgctggaacttcctgctgaagaagcaagagcattgtttattaacacgataattaaataa

SEQ ID NO: 254434 - DNA, 459 bp, Klebsiella pneumoniae; identical to SEQ ID NO: 177357

SEQ ID NO: 254435 - DNA, 531 bp, Klebsiella pneumoniae
atgaccatcatgaaaaagtacgccctcgttttaaacgagttatcttcgcttgtggataaaatcgatgagcaagaatttaacacactggttgattctattatcactgccggacatgtatttcttgccggtgctggtcgctcagggcaaatgataaatgcttttgctaaccgactgatgcaccttggtctgtccgtcagcgtggtaggagaaattagctctccacattctcgcaaaaacgacttgatgatcgttggttcaggctccggagagacccaacgcctgatcaaccaggtgaaaatagcaaagaataatggcgtgtatatcgctctcatcactaccgcaccagattcaactttggcaactctggcagattacatactcactatcccggcaggtcacagcgcccaaccgatgggttctctgttcgaacaggcttccctactgacctatgacactattgtgcagtcattaatggccaatcttaatgaaacaagccagacgatgaaggaacgccacgccgatattgaataa

SEQ ID NO: 254436 - DNA, 426 bp, Klebsiella pneumoniae
atgtatgtccctatgtgggtggatgacgaaagtttagcccagaaactcgcagacgatcaggctgttcaggatacgcaaaagttttactcaagtatggatgtcgttattacgggcattggggcctggaaaaccggttcttccagtctgtgcgatatattccctgaagcatggcgtgagactttaatgagccaggacattaccgctgatgtatgcgtaaccctggtaaatagtaaaggggaaatactcgatagcccgctaaaccgcctggggttcggcattacgacagaacaattgcgggccacaaagaaactgattggggttgctggaggggacgaaaaatatgaaggcattgttgcctctctcaaatcaggccttctgaatgtgctgatcactgattttgatacggctatcaaactgctggattaa

SEQ ID NO: 254437 - DNA, 1119 bp, Klebsiella pneumoniae
atgaaacaggtcggcattattggttggcgtggcatggtaggttctgtattgcttcaacgcatggttgaagaaaacgatttccgtgatatcgctgcacatttttttagtacctccagcgcggggaccgttggcccaactatagatggcgagagttatatccttaaagatgcgaattcactcagtgaactcgccgatatggatattattatcacctgccagggcggcgattatactaaaaccatttatcccgcacttattacgcatggctggcagggttattggatcgatgcggcatcggcgcttcgcatggatgaaaaagcctgtatcattctcgatccggttaaccgtacccatatcgatcgggcaatccaacaagggctaaaactttttgtcggcggtaattgttcgattaccctcagcttgatggggctcgccggcttgctcaaggctgacctgatcgaatggatgagcgtgatgacctatcaatctgcatccggcgctggcgctaaacatgtcagagaattaatcgcgcaaagcgcctgggtgagcaatcatttgtcggcagaggaattgaccagctccggctcagtccttcctttagtcaataaagtcagcgaactgattaacagcgcgggcatgcccgtccaacacttcggcgctcccctaatgggaagcatcattccctggattgatgccgatttaggcgacggcaatagccgcgaagagtggaaaggcgaagcagaaacgaacaaaattctgggcctgccccgcggaactattcccgtgaacggtttatgcattcgggttggcgtcattcgctgccatagcgcagcgattactttaaaattaaagcgtgaagtcagcgaagctgaatttgctgaattagtgggtaatgcccatccctgggttaactatgtccccaataataaaaacgacagcgtcagcaaattaaccccagcctatatcagtggctcgctgcaggtaggcataggccgttataaaaaaatggccctgaataatgaacctgtatattcggtactcaccgttggggatcagcttttatggggagcggcggagcctttgcgtcgtatgttaaatatcttgcttaatcgcgtttaa

SEQ ID NO: 254438 - DNA, 429 bp, Klebsiella pneumoniae
atgctgaaaacgctcggtgcggtgctatccattttgatcatgatgacgggcgcggcatccgccgccggcagggagaacgcggtgaagattgagtttgtatttaagggcgtcacggtcgtcggcttgctggacgagagcgctgcggctagtgcgtttgtggcgcagctgccaatgacggtgaagcttgaggattatggttctacggaaaagatcgcctggctgccggagaagctgcgcgaagtggatgctggcgaatcaatgactccgcgacgcggcgatatggcctattacgcgccgtggggcaacctggctatttttcgcgaagactttcgccactcgcccggtctgataaagctcgggagggtggaagagggactggcctcgctcgaccagcccggcgcggcaacggtgaccatcaggcgttactaa

SEQ ID NO: 254439 - DNA, 801 bp, Klebsiella pneumoniae
atgaaagcttttattgccgctgcggcaatgtcgttgatgctgggcgcgcctgtccaggcagaagaaaagagaggtgaaaaaatggttccacttagcccaaccgtactgtccgctgaggatgtccagtccgtcgcgcccgcgcttgtccgcttcggcagcgaggtgctgatagacgatctctggcagagaagtgaactctcgcgtcgcgatcgcagcatcgtgacggtggcgattctgatcgcgcgtaaccagcccgccgagctaaaacagtatgttgaagttgctctggataacgccgtcacgccggtcgaaatttccgagatcatcacgcatctggctttttattccggctggcctaacgcgatggccgccgttgcggtcacgaaagatatctttgccgcccgcggtatccgccgcgagcagctggcttcggcatcccccgagctgctggcgcttaatcaggcggcggaaaatcagcgctcgtcaacggtggagcacaacttcggcgcaatttcgcccgggctggtgaagtttaccgctcaaccgctgtttctcgacctgtggcagcggccggggctgaaaccgcgcgatcgtagtctggtgacggtcagcgcgctgatcgccgccgggcaaagcgcgcaaattggctaccaccttaaccgggcgatggataacggccttaccgcgcaagaggcgggggagattgttgcccatgccgcgttctatgccggctggccaaacgccttttcggcagtagctgtggtgggggaagtcctgcgtgctcgcggtctggcagggtga

SEQ ID NO: 254440 - DNA, 597 bp, Klebsiella pneumoniae
atgacatattcgccccgcaatttcgccggtctgctgtggtttgtggccatcgccatcgttctgtttagtcataaccgcgtcagccatgccgccgaggttaaaacgctggttatcgtctctcatccttaccctgagcaatcggtgttgacgaaaggtcttgaagccgcagcgcaaagcgtgcccggcgtgaccgtacgcaatcttgagacgctttacggctatgacagccgcaatatcaatgccgatgccgagcgtcgattgatgcgggaacactcgcgcgtcgtgtttatcttcccgacccactggttcaacatcacgccaatgatgaaggcctggctgaacgatacctggggcagcgtggggccgggcgtatggcagggtaaagagatgctgattgttacgaccgccgcgggaggagaatcgacatacggcgaatccgggcgaactggcgtcagcctcgccgacgtcttcacgccgatgaaggccagcgctctgcatgcgggaatgatctggcttcctccgctggtttttcagagcgccagccgcagtcaactgcctgagtaccagcgtcaactggtggaaaggctgaagaattaa

SEQ ID NO: 254441 - DNA, 870 bp, Klebsiella pneumoniae
atgaatgtaaaccgttccgatatggccgacctggtctatttttgcgccatcgctcgtcatcgcagttttagtaaggccgccgtcgagctcggcgtaagcgcctcgacgctgagccatgccctgaaggggtttgaggcgcggctgggcgtgcgtctgctgaaccgtacgaccaaaagcgtaaccctgacggcggcaggcgagagtctggccagcgcggtgagcgagccggtggccgccatcgatggcgcgattgaacagctcaaccagtttcgcgactcgcctgcgggacatattcggctcaacgtcgccgtcgaggcagccacgctgctgctggcgccgatcctgcccgtttttgccgaacgttatcccgatattgagctggatatcgtggccagtaaccgcattgttgatgtcaccgaagcgcgttttgacgccggtatccgctatggcggaaccgtaccggaagatatggtggcgcagcgcctctccgccgatgtgcgctgggtcgtcgccgcgtcgcccgattatcttgcccgcttcggcgagcccctgcaccccaacgatcttcagcaccaccgctgcgtcagcaaccgtctgggaaacaatcggatttataaatgggagtttgagcgcggtgaagagcagctgacgatcaaagtgccgccgctgttaaccgtcgatctggcggagacgggcgtggtggccatccttcaaggattcggcctgatgtacctgccggagccgctgattaggcagcacgtcacgaggggcgcctgcgtctggtgctcaccgactgggcctcttacgggccgggattctatatctattactccagccgacaccagatccctaccggattgcgcctgctga

SEQ ID NO: 254442 - DNA, 1194 bp, Klebsiella pneumoniae
atgagtcccttacttaacccctactttggcgaattcggcggtacgtacgttccgcagatcctcatccccgcgctacgccagctggaggaggcgtttgttagcgcacgtgaagatgcgcgctttcaggcggaattaacccatctattgaaaaactacgccggtcgcccgacggcgctaacgcgctgccgtaacctgacgcagggtacgcgcactaccctgtatctcaaacgtgaagatctgctgcacggcggcgcgcataagactaatcaggtgctcggccaggcgctgctggcaaaacggatgggcaaaaccgaaattattgccgaaaccggcgccggtcagcacggcgtggcctcggcgctggccagcgcgctgctgggcctgaagtgccgcatttacatgggggcgaaagatattgaacgtcagtcgccaaacgtctttcgtatgcgcctgatgggggccgaagtgatcccggtgcacagcggctcagccaccctgaaagatgcttcgaatgaagcgctgcgcgactggtccgggagctatgagaccgcccactttatgctgggcaccgccgctggcccgcatcctttcccgactatcgtacgcgaatttcagcgcatcatcggcgaagagaccaaagcgcagatcctcgaaaaagaggggcgcctgccggatgcggttatcgcctgcgttgggggaggttccaacgccatcggcatgttcgctgactttattgatacgccccaggtcggactgattggcgttgagcccgctggcctgggcattgagaccggggaacacggcgcgccgttgaaacacgggcggaccggcatctatttcggcatgaaaacgccgctgatgcaaaccgatgacggccagatcaaagagtcctgctctatttccgccggcctcgatttcccggccgtcgggccgcagcatgcctatctgaacagtattggccgcgcggaatacgtttcggtcaccgacgatgaagcgctggcggcatttaaaaccctgagccgttctgaaggcattattccggcacttgagtcatcccacgccctcgcgcatgccttaagaatgatgcgcgacaatccgcaacaagagcagctgctggtggtgaacctttccggccgcggcgataaggacatctttaccgtgcacgacattctgcaagcgcgaggagaaatgtga

SEQ ID NO: 254443 - DNA, 813 bp, Klebsiella pneumoniae
atgaaacgctataacgatatgttttcgcgactgcaaactcggggagaaggcgcgttcattcccttcgtgatgctcggcgacccgcagccggatctgtcgctgcaaattatcgatgcgctgatcgagggcggagccgatgcgctggaactggggattcccttctccgatccgctggccgacggcccgacaatacaaaatgccgccctgcgcgcgtttgcagccaacgtcacccctgcgcgctgctttgacatgctggccgccattcgcgccaggtatccggcgctgcccatcggtctgctgatgtacgcaaacctggtgtataaccggggaatcgagacgttttatgccacctgcgcccgcgcgggcgtcgattctgtgctggtagcagacgtcccgttcgaagagtcggcgccgttccgcgaggccgcgatgcgccatgatattgcgcccgtgtttatctgcccacccaatgcggacgatgagctgctgcgacacattgccgctcacggccgcggttacacctacctgctgtcgcgcgcgggcgtaaccggcgcggaaaaacgcgccgcgctgccgctggaacatctggtctctaagcttggtgactatcaggcgccaccgccgattcaggggtttggtatttcaaccccggaacaggtggcggatgccatgaaagcgggagccgccggggctatttccggctcagcaatagtgaaaatcatcgaacaacaccaggacgatcgggaggcgatgctctgtcagttgaaggctttcgcccgcaacctgaaaacagccaccgtcaggccaacatag

SEQ ID NO: 254444 - DNA, 600 bp, Klebsiella pneumoniae
atgttacctgagtgtgataaagccatcatcctgctgcatgaaatctacggcattaatgcgcatattcagcgaaccgccgcgacctggcgcagccgcggcttcgatgtctacacaccagcgctttttccccactctgcgccgttcgcctatgagcagcaggagcaagcctggcgtcactttaacgataatgtcggattcgacaccaccgccattgagtcgctgctggccgagctgaaaacaaaatatggcatgctaatcctcgtcggctatagcgtgggcgccaccttagcctggctggccgccagaagcggtttctgcaacgccgcgatttgccactacggctcgcggatccgccactacagcgacgttgcgccgccctgcccgacgctggtgattctcgccagcgaggaaccggcgttcgatccccgggtaatgcaagatcagctggagaacgttccctccgtgacctgccggatgttcaatgcgcagcacggcttttgcgacgctgacagtccggcgtgggatccgcgccttacgcagcaggcagacgaagactcgctgcggtttttaacgcttattcagcaaagacaggaggcctga

SEQ ID NO: 254445 - DNA, 573 bp, Klebsiella pneumoniae
atgcaacaggtatttcaatggattaacgaacccgcgacatggtcggaagaggacggctcacttagcgtcgtaaccgatgagaaaaccgacttctggcgcgaaacctggtacgggtttgagcgcttctccgggcatatctatgccacggaagccgcgggggatttcacctttcaggtgcgggtgcgcgcagatttcagcaccctgtatgaccaggcggggattatgttaatgcaggacgcccggcactggcttaaggccggtatcgagtacaacgacggcgcgcccgccatcggtagcgtactgacgctgggaacttcagactgggccaccggcatttttccaggcaaccccgccgagttctggctgcgcctgacccgtcggggcgaagcgctgcgcctgcagtactcaacggatggccaccagtggccgctactgcggctgtgcccttttccgaccggcgccgcgaaagtgggcatcatgtgctgtacgccgcagcgcagcggcctgcgggttaatttcgacgaaatatcgctgctgccgcccaacgataaagatttgcacgatttaagctga

SEQ ID NO: 254446 - DNA, 393 bp, Klebsiella pneumoniae
atgttttcctatattatgctcggcactaacgatctgccgcgcgctattcgtttttacgatcctttgatggagatgctggggcagccgcaaagcggccgaagcgatcaaggcgcatcgtgggggacattcagcggaaacagcaccatcgggctgtgcgttggccaaccgtttaatcagcagcaggcaacaaccggcaacggcgttatggtggctctgaacgcacgttcggttgagcatattcagcagctgcatcagctggcgctcagtctgggaggaagcgatgaaggcgctccgggacatcgcccgcagtacggtgaaggcttccacagcgcctacgtcagagatccggacggcaataagctggcgtttgtttattacgcaaacgccgactga

SEQ ID NO: 254447 - DNA, 603 bp, Klebsiella pneumoniae
atggatacgcgtaaagaagtgctgtttgtcctcatccaggagtatgccgactgggagttttcgctgctggcacccggcctgcgccgggggtttggcgtatgggagccgcgctacgaagtcaggaccgtagctgcggatgaggggcccgtgaggtcaattggcggggtgcgctgtctgccggattataccttccagacgatacctgatgactacgctgctctggtgctggtggggggaatgaactggtggggagaggaggctcagcgggttgtgcctctggttcagcaagcgcaggcgcggcagatcgtcgtcggcgcaatatgcgatgcttcggcattcctcggcgcacacggttttcttaatgatgttgaccatacctccaacggcctggcatacctgcagagcagggcggggtcagcctatcgcggcgcctcacggtacaaaaacgtgccatcggtccgcgacggcaacctggtcaccgccaacggcgttggctttctggattttacctgcaatatgctgtctgccttaaacgcggcccgccaggaagagatcgaagccatgagggcgacctttacgtcgggaatgtttaccgagggctga

SEQ ID NO: 254448 - DNA, 624 bp, Klebsiella pneumoniae; identical to SEQ ID NO: 172088

SEQ ID NO: 254449 - DNA, 615 bp, Klebsiella pneumoniae
atgatgtgtgaacgcgatgaaatgagcgggcgtgaaacgaaaatcattctgtccggtgagctgggtaaacggtttggaaaaaagcacgtgcggcacctcgatagcgccgccgaagctggcgtggctctggctcatacactggaaggattcgagagcttcatgattcaaagtgaggcgcggggcttgcggtttgccgtttacctcgacggtgaaaacgtgaatcaggaggatttggcgcgccgtggtgtttattcgtttgatgtgatccgcattgtgccggtagttgttggcagcaaaaaggcgggggcgttacagctgatcatcggtgtagctctggtcattgcgtctatctggatgcccggcctctctattgcggcaagtgacatgcttttcgctgcaggtgcggccacggcgctgggtggcgctatccagatgctatcaccgcaacccgccggactatcccggagtgagtcgccggataataaagcctcatacggttttggcagcgcgaaaaacaccacggcgcagggctacccggttggcttgctttacggacagcgccgcatcggcggggcgattatctccgcaggaatttatgtagaagaccagcagtaa

SEQ ID NO: 254450 - DNA, 714 bp, Klebsiella pneumoniae
gtggaggctcagacgattgaagatatccgacatcatgccattgctgactacccgcgcgaggcttgcggcgtggtggctaaaaacggcgatgttgaacggtatttcagatgcgggaacatcaccggcggaaactcagaggaatgttttactttgaacccgcgcgactatgccgccgctgaggattggggagagattgtggctatcgtacatagccaccccgacgcgaccgcgcgcgccagccctaccgatttggcgatgtgcgatgcaacgcggttaccctggcatattttcagttacccggagggcgacttgaggacatatcacccgcgcgacgatctcccccttatcgggcgtgattttgtgctgggggtttacgattgctgggggctggttatgtcctggtttcagcaaacgcatgggatcatcctggatgatttcagggtgagctatccgtggtgggaggatgaatacccggacaatttttatcacgattgctggtatgcatgcggattccgtgaatttgacggaccaccacgcgacggcgatttagtgattatgcaagttcagtcgaataagtggaatcacagcggggttttagtcgatggcggcatgttgttacatcacctttatggccacttaagtaagcgtgcgccttatggcggatactggcgtgacaggactatgaaaatagtcagacacaaaaaacttatttga

SEQ ID NO: 254451 - DNA, 753 bp, Klebsiella pneumoniae
atgattaccaatgattaccagaaattagagccgggaaacgaaatcatattatttgagatagacgcaacgaattgcggtttgtccgataaaatgtattttcataatcacttgataccgtacaccgaggcggaattaaaagcggctggatttgaagctgataaattgcgctcaaagtctatctggtggcagggtaacgagtataaaccgtggccgtgtcattatgagggggaggaatcatccaccaccgggagcgccgcccggcctaaattgagcgtgggtaatattgatagctcaattactgcgttatgcctcgcctacgatgaccttttaaaagctcgcgttattattcatgagacattagcgcaatatctcgacgctgagaattttaaagacggtaacccgaacgccgacccgacgcaggaaaagcgctcgctatggatgattgatgccaaaacgcaagagctcgatacggtagttgagtttgagctggccagtcctatggatctggaagggctgatgattcctacgcggcaatatcatgccgtatgctcgtggtgtattcgcaaccagtaccggagcggcgacggctgcgactatgccgggacgcgctattttgaccggaacaataagccggtttctgacccctcaaaggatgtgtgttctggaacggttgcaggctgtaaggcccggtttggcgaagacagtgaattacccttcggcggctttccgggaacaagtctaatcagaagctga

SEQ ID NO: 254452 - DNA, 348 bp, Klebsiella pneumoniae
atgccgattgaaacattcgcatggcgtatacaggcaaacagccagcctactatcagcagcaaagacaatatcagaaaggtgcaatttagcgatggttacacgcaggtttcaggctctggcctgaatgatgaacagctgatatttagttttgcttttagtgggaatatagataccgctatggatattcacgcatttctcaggcggcataaaacaaagtcatttgcatttaaaccgccctttggtgagcttacgctctggcgtgtgcaaggggattctttgcaatattccgctgtgagtaaaacgattgttaatgtaaccgcaacttttgaacaggcatttaacccatga

SEQ ID NO: 254453 - DNA, 3093 bp, Klebsiella pneumoniae
atggcccagcagattagcgatttaatcataaatctcgatgttgattcggcatcattcgccacgcagatagcgaaaataaaaggccagttaaatggcatgggggccgatgcgacgaccgcccgccgaagtattaacgaatcagctcaggctcagaccgaggcacttaaggcaacaatgagcggcgctgcagacgccgcaaagatcgcgcagcaaagacaggagaccgcaagcgccagggtaacgaaaagctatgaacaaacggcgcaatcagttgatgaggttcaccggcgcataaaggccataaatgaccagtaccgcgccggtaatggtgacgccgcaaagctggctcagcagcaggacgcattaaccgaatcatttttcaaacagattgaagcaatccgatccctgaaaggggaagccggttccctcgcggcggtgcaagcaagagtaagggcggcgcggggctctggtgaaatatcgcagggtgattatctttccctgatttctgagctgaccgcccgacagaaatcattgcaggaagcagaagcgaagacgacgcaacagaaagagcgttttctccggtcgctgaaatctcagcttaccgcgcaaaagctgactacatcggagctcttgcgcgtcaaagctgcagagctgggtgtgagtgatgctgctgatatctatatcaggaagatggaaaaggccgggaaagccgcgcatgggctgggattaaaaagcgcgggagcgcggcaagaaatcagcgttttgatttctgagctggcacgcggtgagtttggttcagtgaaaacttcagggatcaccctggcgaaccgggccggatggattgaccagcttttatcattgcgtgggctggggattgccgggctggtgggcggtgttactggctcactctatcttttagcaaaggcatggtatcagggcgcgcaggaaggggaggagtttaacaaacagctgattttaaccggcgactacgccggaaagagtcgcgatcagctcatgcagctggcgcgctcgatgtccggtaatgggtttaatcagcatgcggccgctggcgcgctggccaaagtggtgggctctggcgcttttcagggagacgagctgcagaaagtgacccgtaccgcgttactgatggaaaaagccgtggggcaatcagtagacgagacggttaagcaatttcagcgcctgaaagatgatccggtgaacgcggcgaacgagctcgacaaagcgatccactttctcaccgctgagcaaaaagaaaatatccgcgtactgagcgaacagggcagggagacggaagccagtacgatagccgttaacgcctttgctgaggcgatgggcgagcgtatgcccaaagttgtggagaatctcggatatctggaatcggcatggcgcgccgtgaaggaagccgccagcgatgcgatttccgcgatgatggatataggccgcgacaggacactagagcaaagaatttctgagctcagggataaggtggcggcgggcggtgttcaggtaggaaacgcatatatcccggccagcaatgaagaccgggcgcagctggcagcgcttgaggaggaaaaataccagaaagatttagccgcggctaaagaccgtgcggaaaagaacgcgcaggagctgcagaaacgccgggacgctcagaacgccgcactgaatagactcaatgaggatgaaaactcacggcataccagagagctggcaaaaattaaggctctgcaatacgccgacgctaaagttaaaaacgcagcgatagagcgcgaaaacaagcgacataaaaaagcgcttgagaatgaaaataagaagccgaaaaccccgaagggggcgaagtaccgcgcgcccgccggtgagctggccagtgaaaaggctcaggccgagattttaacgcttcaggctcagttgaagacgctgcagcgctattccgggccggatgatcgcataagcccgcaacggcttgcactgcagaaagccgaggataaatacacggtcttagaagaagccgcgcgccgtcgaaaactgacggatcaagagaagtctattctggccacaaagacagaaaccctcgaacatcttaaacaggtcgccgcgctgggtgaccaggtggcccggcaggagcggttaaaccagctcagggacgcggccagcaaattcaccgaccagaaaaacgcagagataacccggctgcaggggctctccaccggcaagactgagcgtgaatctcagcgtgattcgacgctggacagcctccgcactaaatatcaggacgattccgccaccagtgagcaggtattagcgaagcagcgcgagctgtatgccgccgaggatgatttgcgcggaaactggcttgccggtgcaaaggccggatgggctgaatatcgcgacacggcaaccgacgcatacagcgccctgaaatctgtatctggtagcctgttttcggggctggcgtctcagctaaccgagctcaccacgaccggcaaagcgaacataaaggaattcggtgtttcgatcctcaaaatgctggctcaggtactcagccaattaatcgtagtctggacgatacaaagcgcgctcggatgggctaccggtagcgtgaacaccggcgcgctttcatcgttgctcggaggtgccgcaaacgctgcaggaggcgctgcaggtggcgcgaaaatggcaagttatgacgttggcggctttactggccacggcgggaaatatgaaccggccggcaccgttcacaagggggaatttgttttcactcaggaggccacgaagcggatcggggtggctaacctttatcgccagatgcgcggctatgccaccggcggctatgtgggtaatgcatccagtccggcaaacacgcgcacgtttgctggtggcggtatcagtgtttatgcgccggtaacgttcgttaatggctcaggagagggagaaagcgacagcagcgaagccgataataagaagatggaaaaaagtctgagaatggttgtagagcgctctgtgaccgagggaataaaagtagcgctcaggccgggcgggatgatttatatggctcagaggagaaagtaa

SEQ ID NO: 254454 - DNA, 459 bp, Klebsiella pneumoniae
atggatatgttgaaaaaaggtgatttcacttaccgtgatattacagtgacgctctctgagctttcagcgctgcagcgcattgattatctggacttcctagcgaagtctgaaaaggttttgccgtcccttgatgattcgctttcagagtctgaaattacgcgcttgctcttgcgtctcgatattgaaaccggcgctttgctggtgggtatgtcgctatggcaagagaaccgaaaagggccgaagccggacgagctcgccgctaatattgtggaatcgtggccaccagaggctatccgggcggctgagctacgcgtgaaagaactttctaacatgttgccgccggaagtggtggagcctgaagaagtcgcgcaggaagaagcggaacagggcgacgaagacgccaggacactacgcgaagacccgcctatgacggcggaaaagcctacgccagtgaattaa

SEQ ID NO: 254455 - DNA, 735 bp, Klebsiella pneumoniae
atgccaaaatcaactaccgcgccaatgaagggcgcagaaacaacactttgggtgtactcaggcaccggcaacgctctttcaaatccgctatcagatgctgactggctccgtttggcgaaagtgaaagaattaacgccgggagaaatgacggcagagtctgaatctgatgattatctggatgatgaaaacgccgactggacgaacacaatgcagggcgcaaaatccgccgggaacacctcatttaccctcgcatggatgcccggcgacactggacaaaaagcgctggtggcgtggtttatgtctggtgatgtgcgctactacaaaatcaaatacccaaatggcaccgtggatgtattccggggctggggctcatcgctgggtaaagcgatcaccgcgcgtgaagtagtgacccgtaccgcgcaaatcactaatacaggcaagccgtcactcgcagaagacgacgccgcacccatttcgctgaccggtatcaaattagataaaagtgcgctcagcgtagcggtgaaagcaaccgccacgattgcgatcacgttcacgccggatagcgccagcgataaaagctatcgcgtggccagctctgacccatcgaaagtcaaagccgtggccagcggtagcaatgtcattgttaccggcgtggcggcgggtacttcaaatattgtcattatgaccaatgacggaaatatcgtggcaacttgcacggcaacggtaacgggttaa

SEQ ID NO: 254456 - DNA, 402 bp, Klebsiella pneumoniae
atgagtaaacactcagacattcgtgcgtctgtaattaatcatctgaaaacgatttgcccggaaaatgtaaacattattgatggccttccggtatttatcgagcagaaccagttaccggccatcgctgtatatttaaatgatgctcagtatgcggggcagacaattgatgctgatgattgggaagcgattctacatattcaggttttcctgaaagcaaacaagccagattcagagctggataaatgggtggaggattttatttatccggtagtgaataaaaacgatgcgttaggggcattggtcgaaaacatctatccgattgggtacgactacactcgcgatgatgaaatggctttttggggctccgccgatatcacttttaaaattgaatatacgatgtaa

SEQ ID NO: 254457 - DNA, 579 bp, Klebsiella pneumoniae
atgagcataaaaaatctggaaaaggcgattaataacctgaatagccttagccgtttgattgtgccgactgcgaccgccaaagcgcttaaccgcgtggggcaagcgacaatccggcagggaagccggattgtcgcaaaagaggccgtagtgggcgacggcaagaaaaaggggattccggtgaaacttgtcaggcagcgcgtaaggctgaaaaaagctaacccgcagcgcctgagcgccggtattaagattaaccgaggtaatttgcccgccatcaaattaggagccgctcaggtgcgcctgtcccgcaggaagggtaaccagaaggggcgcggcagctatcttaaaatcgggccttatcgtttccgcaatgcatttatccagcagctggctaatggccgctggcaggtgatgcgccgtgtgagcgattcgcgttatccgattgatgttgtgaaagtgccactggccaggccgctaacggtgagcttctggaaaatatcgcggcagctgattaacagcgacatggggaaagaaatttcctacgcgctaaaaaatcaattaagaatccatctcacgcgataa

SEQ ID NO: 254458 - DNA, 282 bp, Klebsiella pneumoniae
atgtgtaacccattcgagcggctggcggcgcgtatggacgcggtaacagttaaccgtatggctaggtcgatagagattaacggtttgccattcgacgccattccggcggagtcgctagaggaaatgggctcgctggcgggtatgggtactacgttagtggttttctctggcgagtaccgaccccgaagcggtgacactgttttctatgatggccaggagtggacggtgacccggtttgagacattcaacggaaagccaaaaatcacacttgaacaggaatga

SEQ ID NO: 254459 - DNA, 327 bp, Klebsiella pneumoniae; identical to SEQ ID NO: 203121

SEQ ID NO: 254460 - DNA, 1986 bp, Klebsiella pneumoniae; identical to SEQ ID NO: 203122

SEQ ID NO: 254461 - DNA, 1461 bp, Klebsiella pneumoniae; identical to SEQ ID NO: 203123

SEQ ID NO: 254462 - DNA, 219 bp, Klebsiella pneumoniae; identical to SEQ ID NO: 203124

SEQ ID NO: 254463 - DNA, 2223 bp, Klebsiella pneumoniae; identical to SEQ ID NO: 203125

SEQ ID NO: 254464 - DNA, 516 bp, Klebsiella pneumoniae; identical to SEQ ID NO: 203126

SEQ ID NO: 254465 - DNA, 426 bp, Klebsiella pneumoniae
atgtttaaacgtgatgagctagtgctggctatgtattaccgcagcacaaaagacgctgacaccggcgataaactggcgcttgttaccgtgaaggtgaaagaggccgcgaatcagagcaacgttgtacagagctctgagctgatttgtcgcacgtctacaggtaacaaaaaagcctatcaagttggcgctcaaagtatctcaagcggttccgatccactgctaagcgccattgagaactattggcgctctaatactgagacgctggcgaaagagctcattgctgagtcgttggagttctttatggaaaacgtctcacctgaaaatacgtggatgagctcagatggccttgagatattcgcagcggccgagctgggttcacacctaccggatagtgtcttgaacgccgacagcgccgccagcgcgtaa

SEQ ID NO: 254466 - DNA, 204 bp, Klebsiella pneumoniae
atgcggccgcgttgtgcggccacactgcagggattatttaccctgttctgcaacttgctttttcagctggacgacttcagcgcgcagactatctacaacaccggcaatctgcgtaagctggttgttctggctagtaacggcgcgctgcagttcggttactttgttttcgagacgttcaatttttgtatcttgggacatctttga

SEQ ID NO: 254467 - DNA, 267 bp, Klebsiella pneumoniae
atgaaagattttaaaattgaatattttgatggccagctggtggcccttgaattaaacggtctctctttactggataatgtgcagggcatttcctttaagcatgagctgggtgagttgccggtgattaacgttactcagggctacaaaatcaaaggcccggatgatgagccacagcgtgaggtaagcggggaagtgatccaagccgatagcggctatcagcaaccgcagcgccgcagcaagcgacagcgccaagctaagcgccgttag

SEQ ID NO: 254468 - DNA, 282 bp, Klebsiella pneumoniae; identical to SEQ ID NO: 203128

SEQ ID NO: 254469 - DNA, 501 bp, Klebsiella pneumoniae
atgggcgttaagagaggcgttgttatcgggctaatcatcaccggtgcttttaccgctggcgctctctggaaggaatcagagtgggaggcaaaatggtttaaacgtgacgccgcagacgctaccgcgctggccatttctgagcacggtaaccggctgattgagcagggccgactgattgcacgtgatgaggctgtaagtgatgcaagagataaagaaagggccgcgcgcgttaatgctgatttgctttctggcactgtgcagcagctgcagcaacaagccaaaaagctcgctacccgtctggacgcagcaagagaaaccgcaaatcttgccgctaccgcaggaagcaaagcagaaaccaccgccgccggaatgctcgccgacatgctcggagagattgcaggagaagctaaacgttatgctgcaatcgctgacgaacgctatcggggaggggtgacgtgtgagcggatttatcaatcgcttgaaaccccaaatactcagtaa

SEQ ID NO: 254470 - DNA, 537 bp, Klebsiella pneumoniae
atggccaaccttaaatcaaaactcagtgcggcaatgctggttctaattgctgctggtgcgagtgcgccggtgatgcttgatcagttcttagatgagaaagaggggaacacattaaccgccgtggttgatccgggtggcgtttggtctttatgtcatggggtaacccgtattgatggccgggcagtcaaaaagggtgaccgggtatcagcgcagaagtgtaaagagttaaacgctatagagcgcaatcgcgctttacgttgggtagagcaaaacatacatgtcccgctaactgaggttcagaaagtgggtattgcgtctttttgcccttacaacattggccctggaaagtgttttccgtcaactttttacgctcgccttaatgctggtgatacagctggcgcgtgtgaggctttgcgctggtggatacgggatggcgggaaagattgccgggtacgctcaaataactgttacgggcaggtaatacgccgtgatcaggagagcgcgctagtgtgctgggagcttgatgatgggcgttaa

SEQ ID NO: 254471 - DNA, 249 bp, Klebsiella pneumoniae
atgaacaaaatcatgcctgacaaaattgcatcctctttggggtattgcacttctggcggtcttatctgctggggcagtattgcccgttggatacatgagctggattggaatctcattgcggtaatcggtggattcatcattggtctgctgacctttttggttaatttctacttcaagagacgtcaaacgaaagcctatgaaaaggcgttagcgcggggttacgtaactccaccaccgcaggatcattaa

SEQ ID NO: 254472 - DNA, 408 bp, Klebsiella pneumoniae
atgatttatccgctctttatatttaagactgaagaagggacatttgacggctatttccccgatgtagaggggtgtttctttgcaggtgatactcttgagtctgccgttcgcaatgctgagatggctttcggacaacacatggacgtactaacggagcaaggcgggcatgtacccgcgccaaacgatcccgccatctatctcggtgatttgcgattatctgaaagcggcgggtttctagcgatggtggatatagatccgtcaaagtacgaaacgaaagccgtaaaatttaatctcaccatgcccggcaatctgataactgctatggatcgctacatcgagcagagaggtctaaaaaaccgctctgctttcctcgcagatttggcgagaaaagagattgccagaggataa

SEQ ID NO: 254473 - DNA, 276 bp, Klebsiella pneumoniae; identical to SEQ ID NO: 176733

SEQ ID NO: 254474 - DNA, 1194 bp, Klebsiella pneumoniae
atggttccgcgttttgccacgctcagccgtatcccaaaaggggtttgggtgctgggcggcgttagcttgctgatggatgtttcctcagaaatgatccacagtctgctccctttatttatggccaccacgttgggagccagcgtgattattatcggcattatcgaaggcgtggcggaagccaccgcgctgatgctgaaggtgttttccggcgtcatcagcgattatgtcggcaaacgtaaagggctggcgctgctcggctatggtctgggagcgctgagtaagcctctttttgctatcgcccctacctccggcatggtgtttagcgctcgaatgatcgaccgcatcggcaaaggaatacgcggcgcgccgcgggatgcgctggttgccgacgtcactcccccggaaattcgcggggccgcctacgggctgcgccaggcgctggacaccatcggcgcgtttctgggcccgctgcttgccgtcgcgctgatgtttctctgggataacgatttccagtcgattttctgggtcgcggcgattcccgccgtcctctcaatcgctctgttgggctttgggttaaaagaacccaacacatcggtcgtccagaaacgtaccaatcccctgcgccgcgagaatctcaagaagctttccgccgcttactggtgggtggtggctattggctcgattttcaccctcgcccgcttcagcgaagcctttctggtgctacgcgcccagcaaatggcgatcccgctattcgccataccgctagtaatggtcgccatgaacctggtctacagcctgactgcctatcctttcgggaaattatcggacaggatgagccacagcaaaatgctgcagtggggcctgctggtgctgattgccgccgatatcgtgctggcgctgagtagccactggagcacgcttttagtcggcgtcgcgctgtggggtattcatatgggcatgacgcagggtctactggcggcaatggtggcgcataccgccccgcctgaactgcgcggcactgcattcggaatgttcaacctgatgagcggaatcgcgctactgctggccagcgccggtgcaggcgtgctgtgggaaatgttgggcgccgcctcgacgttttatgctggcgcgataatttgcgtcgtgacgctgataggtatgcgctgtatgccgtcggcttatcaacaacgttaa

SEQ ID NO: 254475 - DNA, 855 bp, Klebsiella pneumoniae
atgctgtcgaaacatattccgctcggcatctatgaaaaagcgctccccgccggggagtgctggctggaacgcctgcagctggctaaggcgctcggttttgatttcgtcgaaatgtcggtcgatgaaactgacgcccgcctggcccgactcgactggagccgggagcagcgcttcgcgctggttaacgcgattgccgaaaccggggtgcgcgtgccctcaatgtgcctgagcgcccatcggcgcttcccgctcggtagcgaagacgacgcggtacgggcgcaggggctggagattatgcgcaaagccattcggttggcgcaggatgtaggcattcgcgttattcagctggcgggttacgacgtttactaccaggaggccaacaacgagacgcgccgtcgtttccgtgacgggctaaaagagagcgttgaaatggccagccgcgcgcaggtaacgctggcgatggaaatcatggactatccgctgatgaactcgatcagcaaggcgctgggctatgctcattacctgaataatccgtggttccagctctatccggacatcggcaacctttccgcctgggataacgacgtgcagatggagctgcaggccggtatgggacatatcgtgggggtgcatgtaaaagatacgaaacccggcgtatttaaaaacgtgccgttcggcgaaggcgtcgtcgattttgaacgttgtttcgaaacgctcaagcagacgggctactgcggcccgtatctaattgaaatgtggagcgaaacgaccgacgatccggccgccgaggtcgcgaaagcgcgcgattgggtgaaggcgaggatggccagcgccggtctggtggaggcagcataa

SEQ ID NO: 254476 - DNA, 651 bp, Klebsiella pneumoniae
atgtcattacctatgttgcaggttgcgctcgataatcaatccatgtcttccgcgtatgaaacgacgcgcctgatagccgatgaagtggatattattgaagtcggcaccatcctttgcgtggctgaaggcgttcgtgccgttcgcgacctgaaggcgctctatcccaacaaaatcgtgctggcggacgctaaaatcgccgatgccggtaaaatcctctcccgcatgtgctttgaagccaacgccgactgggtaaccgtgatctgctgtgcggacatcaacaccaccaaaggcgcgctggacgtggcgaaagagttcaacggcgacgttcagattgaactgaccggctactggacctgggagcaggcgcaggagtggcgcgaagcgggtatccagcaggtagtctatcaccgtagccgcgacgcccaggcggccggggtggcatggggcgaggcggatattaacgctatcaaacgcctgtccgatatgggctttaaagtcaccgtcaccggcggcctggcgctggaggatttgccgctgttccagggaattccgatccacgtctttatcgccgggcgcagcattcgcgacgccgcttcgccggtggaagccgcccggcagttcaaacgttctatcgcccaactgtggggctaa

SEQ ID NO: 254477 - DNA, 468 bp, Klebsiella pneumoniae
atgaaattacgtgattcgctggtggagaataactccatccttttacaggctgatgccagcacctggcaggaagccgtcaagctgagcgttgatttgctggtgaaagccgatgtggtagagccgcgctactaccaggccattctggatggcgtagctcagcacggcccttattttgtgatagctccaggcctggcgatgccgcacggtcgcccggaagagggagtcaagaaaactggctttgcgctggtcacgctgaaaacgccgctggttttcaatcatgaggataacgacccggtcgacatcctgatcaccatggcggccgtggatgccaatacccatcaggaagtgggcatcatgcagatcgtcaatctgtttgaagacgaagccaattttgaccgtttacgcgcctgtcgcaccgcgcagcaagtgctggatttaattgataacgccacggcggcggccgtttaa

SEQ ID NO: 254478 - DNA, 306 bp, Klebsiella pneumoniae
atgaccgtacgtattctggctgtatgtggcaacgggcaaggaagttccatgatcatgaagatgaaggtggaccagtttttgacccagtcaaatatcgatcacacggtgaacagctgcgcggtgggggaatataaaagcgaactaaacggcgcggacattatcatcgcctccacccatatcgccggtgagattagcgtctccggcaataaatacgtggttggggtacgcaacatgctctcgccagcggattttggcccaaaactgctggaagtgatcaaagcgcactttccgcaggatgtgaagtaa

SEQ ID NO: 254479 - DNA, 1065 bp, Klebsiella pneumoniae
atgagtaaagtgcaaaccatcacccgcgaatcatggatcctgaacacttttccggaatggggcagctggctgaacgaagagattgagcaagagcaggtggcgccgggcacctttgccatgtggtggttgggttgtacgggcatctggctaaaatccgaaggcggagccaatatctgcgtcgacttctggtgcggcaccggcaagcaaagccacggcaacccgctgatgaaaacgggccaccagatgcagcgcatggcgggtgtgaagaagctccagccaaacctgcggaccactccgtttgtcctcgatccgttcgccattcgccagatcgacgccgtgctgtctacccacgatcataacgatcatattgatgtgaacgtagccgccgcggtcatgcagaactgcgccgaagacgtaccgtttatcggcccgcaaacctgcgtcgatctgtggatgggctggggcgttccgaaagaacgctgcatagtgatgaaaccgggcgatgtggttaaaatcaaagatattgaaatccacgcgctcgacgcctttgaccgtaccgccctgatcaccttacccgcagaacaaaaagccgcgggcgtgctgccggatgggatggatcagcgcgcggtgaactacttgtttaaaacgccgggcggcaacctgtaccacagcggcgattctcactactctaactactacgcgaagcacgggaatgagcaccaaatcgacgtggctctgggctcctatggcgagaacccgcgcggcattaccgacaaaatgaccagcgccgatatcctgcgcatggccgagtcgctgaataccaaagtggtgatccctttccatcacgatatctggtcaaatttccaggccgatccgcaggagatccgcgttctgtgggaaatgaaaaaagaccgcctgaagtatggctttaagccatttatctggcaggtcggcgggaagttcacctggccgctggataaagacaactttgaataccactatcctcgcggattcgacgattgcttcaccatggaaccggacctcccctttaagtccttcctctaa

SEQ ID NO: 254480 - DNA, 756 bp, Klebsiella pneumoniae
atgacggaagcgcaaagacatcaaattttactggatttgctggcacaaacgggatttgtcaccgtggagcaggtgatttcccgactgggaatttctccggcgacggcacggcgcgatatcaataaactcgacgacagcggcaaactaaaaaaagtccgcaacggcgcggaagccatcagcgagcagcgcccgcgctggtcaccaatgaatattcaccaggcgcaaaaccacgacgagaaagtgcggattgcacgtgcggcttcgcaactggtcaaccccggcgaaagtattgttatcaactgcggctctaccgccttcctgcttgggcaagagctgtgcggaaaaccggtacagatcatcactaactatttgccgctggccaattacctgatcgatcaggaacacgacagcgtcatcattatgggcggacagtataaccgcagccactccatcaccctgagcccgcagggcagcgaaaacagcctgtacgccgggcactggatgtttaccagcggcaaaggtctcaccgccgaagggctatataaaaccgatatgctgacagcgatggcggagcaaaaaatgcttaatgtcgtcggtaaactcgcggtactggtcgacagcagtaaagttggcgaacgcgccggaatgctgtttagccaggccgggcaaatcgacctggtgattaccggaaaacaggcggatgaagcgatcctcaagcagcttgaggatcagggcgttcaggtgattcgcgtttaa

SEQ ID NO: 254481 - DNA, 717 bp, Klebsiella pneumoniae
atgattgcactagaaatgcgtaaccttgcgggtggggaagttctccatgcgtgcccgcacggcgctgcggattcaccgctgccttgcatcgtcttttatcatggatttacctcttctaagctagtctacagctactttgccgttgctctggcagaggccgggtttcgggtcattatgcccgatgcggcggaacacggtgcgcgctatcagggagatgaacaagggcggatgcagcgcttctggccgatcctgatgcaaaattttgctgaatttccggcattacaggaggcgattcgtacgcagggatggcttgctgacgacaggctggcggttgccggagcatcgatgggcggaatgacggcgctggggataatgacccatcatccagagctgaaaagcgttgcctgcctgatggggtctggctatttcagtacgctctcgcagaggcttttcccttcgccttcatttgatgcagcacagctggcggattgggacgtcagccagcagctggcgacgcttgccagtcggccgctgctgctctggcacggcgatgaagatgatgtggtgcctccggaagagactttccgtctgcagcaggcgctgcggcaacatgagatgaccgataagttaacctgcctctggcagaagggcgtccgtcaccgcattacgccagaggcgttagcggcgacggtggcattttttcaacgccatctttaa

SEQ ID NO: 254482 - DNA, 309 bp, Klebsiella pneumoniae
atggctatgcgtaggtttataccctggctattggctatcgctttaagcggctgtagtgcgctacaagggacgccagaagcgccgccgccagcaaccgaccatccgcaagagatccaacgtaatcagacgatgggcttgcagaagatgggcacggtgagcgtcttaaggtacggctcgccgatggatgtcgaggctgcgctaagagtcaaagctgaagcagctaaggcggattactacgtcatcattatgattgatgacaccatggttcccggccagtggtattcgcaggcgattttgtaccgtaaatag

SEQ ID NO: 254483 - DNA, 288 bp, Klebsiella pneumoniae
atggagctgacgatgaaacgaaatttttccctacccagcctgatgttgaccaccgtcacggccaatacctccgcgcagtcagcggagtttgccagcgctgactgcgtgactggcctgaacgaaattggcctgatttgcgttaacaatatttccggcagccagcaggacgttgaacatgctatcgccttgcaggccgatgagcagggcgcgtcctggtatcgcatcgtccagatgtacgaagagcagcagccggataactggcgggtacaggccattctctatgcctga

SEQ ID NO: 254484 - DNA, 1638 bp, Klebsiella pneumoniae
atgcactggcaaactcataccgtatttaatcaacccgcgccgctgtgtaacagcaacttattcctgtccgataccgccctgcgtgaagccgttgtccgcgaaggcgcgggctgggatggcgatctgctggcgagtattggccaacagctggggacggcagaatcgctggagctggggcgtctggctaacggtaatccgccggaactattgcgctatgatgcgacgggatcgcggcttgacgatgttcgtttccatcccgcctggcatctgctgatgcaaggattatgcgctaaccgggtgcataaccttgcctggcaggatgacgctcgcgaaggcgccttcgttgcccgcgctgcccgctttatgctgcatgcgcaggtcgaggcgggaaccctgtgccccgtcacgatgacctttgccgctattccattgctgcagcgctccttacccggggcttttagcgactggctatcgccgctcctaagcgatcgctacgatccgcatctggcgccgggtaaccagaagcgagggctgcttatcggaatggggatgacggaaaagcaggggggatccgatgtcctgagcaacacgacgcgtgcggaaaaaaccgccgaagacttttatcatcttatcggtcataaatggtttttctcggtaccgcagagcgatgctcatctggtgctggcgcaggcgccggcgggactctcctgcttttttgtcccgcgcctgctgccggacggtcagcgtaacggcgtacgcctggaaaggctgaaagataaattaggtaaccgcgcgaacgccagtggcgaggtagagttttacaatgcttgcggctggccgatcggggaagagggcgatggcatccgccagattcttaagatggggggcctgacccgatttgactgcgcgctgggcagccatgcgctgatgcgccgggcttattcagtcgccctgtatcatgctctgcagcgccaggcatttggcaaaaatctggtcgatcaaccgatgatgcgtcaggttctggggcaaatggcgctgcggctggaagggcaaaccgcctttctgttccgcctggcgcgcgcctgggacagacgcggtgatgcgcaggaagcgctgtgggcaaggcttttcacgcccgcggcaaaatttgcggtctgcaaatccgggatcgccttcgtcgctgaagcgatggaggtgctggggggatcgggctattgcgaagagagtgaactaccgcgtttgtaccgcgaaatgccggtaaacagtatctgggaaggttccgctaatattatgtgcctggacgtgatgcgtgtactgatgaagcagccggcggcgcttgaactactggcggcggagtgcgcggaagtgaaagggcaaaaccgtcatttcgatcgcgcatggcggcagttgcagcaatggttgcggcgacctgtggaagcgcaggggcgggaaattacccggctggtctataggctgggtgctggcgcgcaggtattacgcgttgcttcaccgccgttggcggaagcctggtgccgtatgatgctcgacacgcgcggcggcatgcgtctggacgagcagacgctggacgacttgctgctacgggcaatggggcgtggacgtcaggcgcctcaggcatag

SEQ ID NO: 254485 - DNA, 363 bp, Klebsiella pneumoniae
atgattcatttaattattgaagatcgggaaaacgcactgacctatattccgcttatccgtcggcatctaccccatctggcgattaacgccatcaagcagaacctgaacgcttcgggctacgttacctcatttgatgaaagcaaaatttgcgacgatatccttgaagagcagaatcccgttggaaattttctcaatctcatcaagatattaaaaaatcggggcgcgcagcttaaattcatcgagcaaacgggagatgaaccaggagaggcgttatccttaagccagctattgaactatgtggaaagaggtctggaaatcgcccgtcagacggaacgagaagatgaacaggcaagacgaagataa

SEQ ID NO: 254486 - DNA, 732 bp, Klebsiella pneumoniae
atgagtgaaatgatttacggcatccacgcggtgcaggcactgctggagcgcgcacctgagcgttttcaggaagtctttattctgaaaggccgtgaggataagcgccttatgccgctgatccatgctctggaagcacagggcgtagtgattcaggtcgccagccgccagtttctcgatgagaaaagcgaaggcgccgttcatcagggaattattgcccgcgtgaagcccggacgtcagtatcaggagaacgatctgccggatctgatcgcttctctcgatcagccattctttttgatcctcgacggcgtgaccgatccgcacaacctcggcgcctgtttgcgtagcgctgatgccgcaggcgtacatgcggtgattgtgcccaaagatcgctccgcgcagctgaatgccacggcgaaaaaagtcgcctgcggcgcggcggagaacgttccgctcattcgcgtcaccaacctggcacgcaccatgcgtctgctgcaggaagagaacgtctggatcgtcggtaccgcgggtgaagccgaccatacgctgttccagagcaagatgaccggttcgctggcgctggtgatgggcgcggaaggtgaaggcatgcgacgcctgacccgcgagcactgcgacgaattgatcagcattccgatggccggcagcgtctcgtcgctgaacgtatcggtcgccaccgggatttgcctgtttgaagcggtgcgtcagcgcagctaa

SEQ ID NO: 254487 - DNA, 2448 bp, Klebsiella pneumoniae
atgtcacaagatcctttcctggaccgcgaatctgaaaaatacgctaatccaatcccgagccgggaatttatcctcgatcatttagcaaaacgtgaaaaaccggccagccgggatgagctggcaattgagctgaatattgaaggcgaagaacaacaagaagcattgcgccgcagactgcgcgcaatggaacgcgatggtcaactggtctttacgcgtcgtcagtgctatgcgctgccggaacgtctcgatctgctaaaggggaccgttattggccaccgcgacggttatggcttcctgcgcgttgaaggccgtaaagatgacctttatttgtcgtccgagcagatgaaaacctgcattcacggcgatcaggtactggcgcagccgttaggcgccgaccgtaaaggccgccgggaagcgcgtatcgtccgcgtgctggtgcccaaaaccagccagattgtgggccgctactttaccgaagcaggcgtaggcttcgttgtgcctgatgacagccgcttgagcttcgatatcctgattcctcccgaagagatcatgggcgcgaggatgggctttgtagtggtggttgagctgacccagcgtccaacccggcgcaccaaagcggtcggcaaaattgttgaggttctcggcgacaacatgggtaccggcatggcggtcgatatggctctgcgcacccatgaaatcccctacgtctggccgccagcagtagaaaaacaggttgctggcctgaaagagcaggtaccggaagaagcgaaagccggtcgcgtggatttgcgtaatctgccgctggttactattgatggcgaagatgcccgtgactttgatgatgccgtgtactgcgagaagaaacgcggcggcggctggcgtctgtgggtggcgattgccgatgtgagctactacgtgcgtcctggcacgccgctggatggcgaggcgcgcagccgcggcacctcggtctacttcccgtcgcaggtcgttcccatgctgcctgaagtactctctaacggcctgtgctcactgaatcctcaggtcgacagactctgtatggtttgtgaaatgacgatttcggctaagggtcgtctcaccggcttcaaattctacgaagcggtgatgagctctcatgcccgtctgacctataccaaagtctggcatatgctgcagggcgatcgggatctgcgtgagcagtacgcgcctttggtcaagcacattgaagagctacacaacctctacaaagtgctggacggcgcgcgtgaagagcgtggcggtatctcatttgagagtgaagaagctaaattcatctttaatgctgaacgtcgtattgaacgtattgagcagactcagcgtaacgacgcgcacaagctgattgaagagtgcatgatcctggcgaacatttccgcggcgcgcttcgttgagaaggccgaggagccggcgctgttccgtatccatgacaaaccaagcaccgaagcgattaccgcattccgttcggttcttgcagagctggggcttgagctgcctggcggcaacaagccggagccgcgcgactatgcgcaattactggagtctatcgccgaccgtcctgacgctgagatgctgcaaactatgctgctgcgctcgatgaaacaggcagtatacgatccggaaaaccgcggccactttggtctggcgctgcaatcttacgctcactttacttcgccgattcgccgctatcctgacctgtcgctgcatcgcgcgatcaagtatttactggcgaaagagcaagggcataaaggtaatagcactgagaccggcggctggcactacagcatggatgagatgctgcaactgggggcgcactgttcgatgaccgagcgccgtgctgatgaagcgacgcgcgatgtctcggactggttgaagtgtgatttcatgttggatcaggtcggtaacgtctttaagggcgtgattgccagcgtgaccggctttggtttcttcgtacgtcttaatgaactatttatcgatggtctggtgcacgtctcttcccttgataacgattactaccgtttcgaccaggtaggacagcgtctgatcggtgaatccggcggtcaaacctatcgtctgggcgatcgcgttgaagtacgcgttgaagcggtgaatatggatgagcgtaaaattgatttctcgcttatctccagcgagcgcgccccgcgcaacgtcggtaagaccgagcgtgaaaaggcgaagaaaggggcggcaggtaaagcttccggacgtcgccgccaggctggtaagcaggtaaacttcgagccggatagcgcattccgtaaaccgaaaggtcaatcccagccgaaggccgctcagccaaaaggcgagaagaaagcgaagaagccgtcggcgaaaacccaaaagatagctgctgcgaccaaagccaggcgcgcggcgaaaaagaaaatagctgagtaa

SEQ ID NO: 254488 - DNA, 426 bp, Klebsiella pneumoniae; identical to SEQ ID NO: 176716

SEQ ID NO: 254489 - DNA, 1299 bp, Klebsiella pneumoniae
atgggtaacaacgtcgtcgtactgggcacccaatggggtgacgaaggtaaagggaagatcgtcgatctcctgactgaacgggctaaatatgttgtgcgctatcagggcggtcacaacgccggccatactctcgtaatcaacggtgaaaaaaccgtcctccatctcattccatcaggaattcttcgtgagaatgtcaccagcatcatcggtaacggtgtggtgctgtctccggctgcgctgatgaaagagatgaaaggtctggaagaccgtggtatccctgttcgcgagcgtctgctgctttctgaagcttgtccgcttatcctcgaatatcatgttgcgctggatgttgcgcgtgagaaagcgcgcggcgcgaaagctatcggtacgaccggtcgcggtatcggcccggcttacgaagataaagtggctcgccgcggtctgcgcgttggcgatctgtttgataaagctaccttcgctgacaaactgaaagaggtgatggaatatcacaacttccagctggtgaatttctataaagctgaagcggttgattaccagaaagttctggatgacgtgatggcgattgccgacatcctgacctccatggtggttgatgtttccgatctgcttgaccaggcgcgtaagcgtggcgatttcgtcatgtttgaaggcgcgcagggtacgctgcttgatatcgaccacggtacctatccgtacgtaacgtcttccaacaccaccgcaggtggcgtggcgaccggctccggtttgggcccgcgttatgttgattacgttctgggtattatcaaagcttactctactcgcgtaggcgcaggcccgttcccgactgagctgtttgatgaaaccggcgagttcctgtgtaaacagggtaacgagtttggcgccaccaccggccgtcgtcgtcgtaccggttggctggatgccgttgcggtacgccgcgcggtgcagattaactccctgtctggtttctgcctgactaagcttgacgtcctggacggcctgaaagaagttaaaatctgcgttgcctaccgtatgccggatggccgtgaagtgaccaccactccgctggctgccgacaactgggaaggtattgagccggtttatgaaacaatgccgggctggtctgaaaccaccttcggtgtgaaagagcgcagcggtctgccgcaggcagcgctgaactacatcgtccgcattgaagagctgaccggcgtaccggttgatattatctctaccggtcctgaccgtaccgagacgatgattctgcgcgatcctttcgacgcataa

SEQ ID NO: 254490 - DNA, 198 bp, Klebsiella pneumoniae; identical to SEQ ID NO: 176714

SEQ ID NO: 254491 - DNA, 1005 bp, Klebsiella pneumoniae
atgcgtaaatctgttatcgcgataattgtcatcgtgctggtggtgctctatatgtccatctttgttgtcaaagagggcgagcgcggtatcacgctgcgttttggtaaagttctgcgcgacgatgaaaacaaaccgctggtgtatgcgcctggccttcacttcaagattccatttattgaatctgtgaagatgctcgatgcgcgtattcagacgatggacaatcaggccgaccgctttgttaccaaagagaaaaaggatctgatcgttgactcctatatcaagtggcgcatcagcgactttagccgttactacctggctactggcggcggtgacgtctcccaggccgaagtactgttgaagcgtaaattctccgaccgtctgcgttctgaaattggtcgtctggatgtgaaagacatcgtgaccgactcccgcggtcgtttgaccctggaagtgcgcgatgccctgaactcaggttctgcgggcacagaagatgaagtcagtacgccggctgccgatgatgcaattgccaaagcggcggagcgagttgaagcagaaacgaacggtaaggttcaggtgatcaacccgaacagtatggcggcgctgggtattgaagtcgtcgacgttcgtattaagcagatcaacctgcctgctgaagtgtctgaagcgatctacaaccgtatgcgcgctgagcgtgaagcggtagctcgtcgccatcgctcacagggccaggaagaagctgaaaaactgcgcgcaactgcggactatgaagtcaccaaaacgctggcggaagccgagcgccaggggcgtatcctgcgcggtgaaggcgatgcggaatccgcaaaactgtttgctgatgcattcagtcaggatccaggattctacgcctttatccgtagtctgcgtgcgtacgagaacagcttcaagagcaatcaggacgtaatggttctcagtccggacagtgatttcttccgctatatgaaatctccagcggcagcgactcgctga

SEQ ID NO: 254492 - DNA, 1257 bp, Klebsiella pneumoniae
atggcgtggaatcagcccggtaataacggacaggaccgcgacccgtggggaagcagcaataaccaaggcggcaactctgggggaaatggcaacaaaggtggtcgcgagcagggacctcccgatctggatgatatcttccgtaagctaagtaaaaaacttggcggcctgggcggcggaaaaggtggactgggcggcggtagcggctcacagggaccacgcgggcctatgggcggacgtatcgtcggcatcgttgccgccgctgcggttattatctgggcagccagcggtttctataccattaaagaagctgaacgtggcgtcgtcactcgctttggtaaatttagccatctggttgagcctggccttaactggaaacccaccttcattgataacgttcaggcggttaacgttgagtcggtgcgcgaactggcggcctctggcgtcatgctgacgtcagacgaaaacgtcgtgcgcgttgagatgaacgtacagtaccgcgtgaccgacccggaacgctatctgtttagcgtgaccagcgctgacgacagcctgcgtcaggcaaccgacagcgcgctgcgtggcgttattggtaaatacacgatggaccgtatcctgaccgaagggcgtaccgtcattcgtagcgatacccagcgtgagctggaagagacgattcgtccgtataacatgggtatcaccctgctggacgtcaacttccagacggcgcgtccgccggaggaagtgaaagccgcatttgatgatgcgattgccgcacgtgaaaacgaacagcagtacattcgtgaagcggaagcttacaccaacgaagttcagccacgggctaacggtcaggcgcagcgtatccttgaagaggctcgtgcgtacaagacccagaccgttcttgaagcgcagggtgaagtggctcgctttgcaaaaattctgcctgagtataaagcggctccggaaatcacccgcgagcgtctgtatatcgaaaccatggaaaaagtgctgagccatactcgcaaagtgctggttaacgataaggggaacaacctgatggttctgcctctggatcagatgctgaaaggcgctggcgcgccagcggcaaagagtgatagcagtggcgcaagcgatctgctgcgtctgccgcctgcatccagctcaagcagcgccagtaacgcttctacctctacgggaggcaccattatggaccaacgccgcgccaacgcgcagcgtaacgactaccagcgtcagggggaataa

SEQ ID NO: 254493 - DNA, 1281 bp, Klebsiella pneumoniae
ttgtttgaccgttatgatgccggtgagcaggcggtactggtacacatctatttttcgcaagacaaagatatggaagatctccaggagtttgaaactctggcctcttccgccggtgtcgaagcaatgcaggtgattaccggtagccgtaaagcaccgcacccgaagtattttgttggtgaaggtaaagctgtcgaaattgcggaagccgtaaaagcgaccggtgcatcggtcgtgctcttcgatcatgccctgagtccggcgcaggaacgaaatctcgaacgcttatgcgaatgtcgggttatcgatcgcaccggcctgattttagatatttttgcccaacgagcgcgtacccacgaagggaaactgcaggttgagctggcgcagctgcgccacatggcgactcgcctcgttcgcggctggacccaccttgaaagacagaaaggcgggattggtttgcgcggcccgggtgaaacccagctcgaaactgaccgccgattgctgcgtaaccgtattatgcagatcctgtcgcgactggaaaaagttgaaaaacagcgcgagcaaggacggcggtcacgggccaaagccgatattcccaccgtgtcgttggtcggttataccaacgccggtaaatccacgctgttcaatcagataactgaagctgaggtctatgcagcgaaccagctgttcgccactctggatccgacgctgcgccgcatcgatgtccctgatgttggcgaaaccgtgctggcggataccgtaggtttcattcgtcatctgccgcacgatctggtggccgcgtttaaagcgactctccaggagacgcgccaggcgacgctgctgctgcatgtcattgatgcggcggatgttcgcgtgcaggaaaatattgacgcagtaaatacggtactcgcggaaatcgaggccgatgagatcccggcgctgctggtcatgaataaaatcgacatgctggatgattttgagccgcgtatcgatcgggatgaagaaaacaaaccgattcgggtctggctttccgcccagaccggggttggcgtaccgctgctttttcaggctttgacggaacggctctctggtgaagtggctcagcatacgctgcgcctgccgccgcaggaaggccggttgagaagccgattctatcagcttcaggcgatagagaaagagtggatggaggatgacggtagcgttggtctgcaggtgcgcatgccgatcgttgactggcgtcgcctctgtaaacaagagccagcgctggttgaatacgtgatttga

SEQ ID NO: 254494 - DNA, 309 bp, Klebsiella pneumoniae
atggctaaggggcaatctttacaagatccgttcctgaacgctttgcgtcgggaacgtgttccggtttctatttatttggtgaatggtattaagctgcaagggcaaattgagtctttcgatcagttcgtgatcctgttgaaaaacacggtcagccagatggtctataagcacgcaatttctaccgttgttccgtctcgcccggtgtcacaccacagcaacaatgctggcggcggtactaacaactatcaccacggtggtggtgcgcagggttcttctgcaccgcagcaagacagcgaagacgccgaataa

SEQ ID NO: 254495 - DNA, 906 bp, Klebsiella pneumoniae
atgggcccgacggcctctggtaaaaccgcattggctatcgccctgcgtaaagttttgccagtagagttgattagcgttgattcagccctaatctatcgagggatggatatcggtacggccaagcccgatgccgcggagctgagcgctgcgccgcatcgcctgctggatattctggacccggccgaggcttattccgcggcggatttccgtcgcgatgcgctggcagagatggctgatatggttgcggccgggcgtattccgctactggttggcggaacaatgttgtatttcaaagcgttgctggaaggattgtcgcctttgccttcggcagatccgcaggtcagagcgcggattgagcaacaggccgcagagcagggatggaacgcgttacaccagcagctacaggaaatagatcccgttgccgcagcgcgtattcatccaaatgatccgcaaagactttcccgagcactggaagtttttttcatttcgggtaaaactttaacggagctgacgcaaacgtcaggtgatgctctgccgtataaggtgcaccagttcgccatcgccccggcgagccgtgaactgctccatcagcgcatagaacagcgttttcatcagatgttggcttcaggttttgaagcagaagtgcgggcgctttttgcccggggagatttgcatacggatatgccttccattcgttgtgtcggatatcgccagatgtggtcttaccttaatggcgagatcccgtatgatgaaatggtttatcgaggtgtttgcgccacgagacagttagctaaacgtcaggttacctggctgcgcggttgggaaggtattcactggttagacagtgaacaacctgaacaagcgttcaacaaagtattacaggttgttggtgctagcctggactga

SEQ ID NO: 254496 - DNA, 1896 bp, Klebsiella pneumoniae
atgccgattcaggttctaccgccgcagctcgccaaccagattgccgcaggtgaagtggtggaacgaccggcgtcggtggttaaagagctggtggaaaatagcctcgatgccggggcgacgcgcatcgatattgatattgagcgcggcggcgcgaagttaatccgcatccgcgataacggctgcggcattaaaaaagacgagctggcgctggcgctggctcgccacgcgaccagtaaaattgcttcgcttgatgatcttgaagcgataattagcctcggttttcgcggcgaagccctggccagtatcagctcagtcgctcgcctgacgttgacctcgcgtaccgaggatcagcaggaggcctggcaggcctatgccgaaggacgcgatcaggcggtaaccgtgaagccggcggcgcacccggtgggtacgacgctggaagtactggatctgttttataacacccccgcccggcgcaagtttatgcgtactgagaaaaccgagtttggccatatcgacgagatcgtacggcgcatcgcgctggcgcgctttgacgtgaccattaacctcagccacaacggaaaggccgtgcgccagtaccgggcggtatcgcaggatggccagcgcgaacggcgtctgggcgcaatctgcggtttgccgtttctcgaacatgctctggctatcgagtggcagcacggcgacctgaccctcagcggctgggtggccgatcctctgcataccaatccgacgctggcggagattcagtattgctatgtcaacggacggatgatgcgcgatcgcctgattaatcacgcgatccgtcaggcctgcgaagacaaactgggcgccgatcagcagcccgcttttgtgctgtacctgaagatagatccgcatcaggtggatgtgaacgtgcacccggccaagcatgaggtgcgttttcatcagtcgcgcctggtgcacgattttatctatcaaggcgtgctaagcgttctgcagcagcaactgaacgctcccctggcagaagagggcgcagagcccgcgccgcgtcaggtgcctgaaaaccgcattgcggcaggcggcaatcattttgcccagcccgccgttgcgcgtgaaactgccgctccccgttatcgtgacgagcccgtcgcgccgcgctttaataccagcaccggcggctcgcgagaatccgctgccacggggtcatctggcggagccggctggccgcatgcgcagccaggttatcaaaaacagcagggggcgctctatcgccaactgctggatactccggccgcggagcgaaaaccaaaatctcctgcgccggtagcggaaggcctggcaggccatagccaaagttttggccgcgtgctgacgatcgtcgataacgactgtgcgctgctggagcgcgatggcaagcttgcgctgctggccctgccggttgccgagcgctggctacgccaggcgcagctaacgccgggcgcggaggcggtctgtgcccagccgctgcttatcccgctgcggataaaagtgtccggggcagaaaaggacgcgcttgagcaggcgcagtcggcgctggcagaagtcggtattgaactgcagtccgatgcgcactacgtgacgatccgcgcagtgcctttacccttaagacaacaaaatttacaaatcttgattcctgaactgataggctacctggcgcagcaaaaaacatgcgacgccgacaatattgctcagtggatagcgcgtaatctggcgagcgaacatgcgcagtggaatatggcgcaggcgattgccgtcctggcggatatcgagcgtttatgtccgcagctggttaaagcgccgccgggtggcctgttacaacctgttgatttacattcggcgatgaatgccctgaaagatgagtaa

SEQ ID NO: 254497 - DNA, 1329 bp, Klebsiella pneumoniae
atgtatcgcttaaccagttggctgaccgccgcactgatgctgttcagcattcaggccactgcggcaagtttatccgatatccaggtctcaaatggcgatcggcaggcccgtattaccataagttttatcggcgaccctgaatattcgtttagcccgcagggcaaacgcaccgtcgcgctggatatcaaacagagcggcgtactccagggcttgccgctgcagtttagcggcaataatctggtaaaaagcattcgttccggagcgccgcaggatacccagtcgctgcgtctgttggtggatttaaccgccgacggcaaaacgcgcgcggtgaaacagcagaacggttctaactataccgtggtgtttacgattaatgccgatgaaccgcctccgcctccgccaccgcgtgtcgtggtgaaacaggcagaacggcccgtggcgcagcccgtgcgtccgagcgagccggcgcgcaacccgtttaaagccgataacgaccgcctgactgcggtgaccagtacgaccagcgtaacgcgtcctgcggcacgtaccgtttctaccgacgataaagtgattatcgccattgatgccggtcacggtggccaggatccgggagcgattggtccgaacggcactaaagagaagaatgtgaccattgctattgcgcgtaagctccgcgcgctgctgaatgccgatcctcagttcaaacccgtgctgacgcgcgacggcgattatttcatttcagtaatggggcgttctgacgtcgcgcgtaagcaaaacgccaatttccttgtctcgattcacgccgacgctgcaccgaatcgcgatgctaccggagcatcggtttgggtgctttccaaccgtcgcgcgaacagcgaaatggccggctggctcgagcaacatgagaaacaatccgaactgctgggcggtgcaggcgatgtgttggccaacagccagtcggacccttacctgagccaggcggtgctggatttacagttcggccattcccagcgcgtcgggtatgatgtggcgactaacgtgctgagccagctgcagcggatcggcgatttacataagcgtcgtcctgaacatgccagcctcggcgtactgcgctcgccggatatcccgtcaatcctggtggaaacggggtttatcagtaataacggcgaagagcggctgctggggagcgatgcttatcaacagcaggtcgcagaggccatttataacggtctgcgtaactactttatgcaacatcctctacaatccgcgccgcgcggggcagccgcgcagactgccagcgcaggttcgtcagatgggacgctgttaaattaa

SEQ ID NO: 254498 - DNA, 462 bp, Klebsiella pneumoniae; identical to SEQ ID NO: 176706

SEQ ID NO: 254499 - DNA, 1512 bp, Klebsiella pneumoniae
atgacgaaaaacgccgacagtataccacatatcatctggtcggcggatgcgctacggcgggcggaaaaagaggcggcggatgccctcgggctgacgttatacgagctgatgcgtcgtgcgggcgaagcggcttttgaacgggcttacgagcactatcctgaaaaccggtgctggctgattctctgcggtcacggcaataacggcggcgacggctacgtggtggctcgcctggcgcagtcgcgaggtattcaggtcacgctggtggcgctggatagcgagaagccgctgccggaagaggccagtaccgcgcgtgaagagtggctcaacgccggcggtacgattcatgccgccgacatcgcctggccagaagatatcacgctaattattgacggcctgctcgggaccggattgcagagcgctccacgggaaaacgttgcggagcttatcgcgcgcgttaatgcccatccggcgccggttgtggcgctggatatcccctcaggtctgaatgcgcagacggggaccacgccgggtgcggttatccaggccgctcataccatcacctttatcgcgcttaagcccggattactgaccggcaaggctcgcgatgtcgttggccgcttgcatcaccacgccctggggcttgagggttggctggtaggccagacgacggcgcttagtcgcttcgatgcctcgcagcttgccgactggctaccgcccagacgcccaacgtcgcacaaaggcgaccacggtaagctggtcattatcggcggcgaaccgggtacggcgggagccatccgcatgagcggcgaggcggctctgcgcgcgggcgctggcttggtgcgagtcctgactcaccgggacaacattgcgcccattctgaccgccaggcctgaactgatggtccatgagctgacctcccgctctctcgaagagagcctgcaatgggcggatgtcgtcgcgattgggccgggtctggggcagggcgagtggggtaaaaatgcgctgcgccaggtggagaattttcgcaaaccgatggtctgggatgcggatgcgctgaacctgctggcaatcaatcccgataaacgtcacaatcgcgtgctgacgccgcatcccggcgaagccgctcgtctgctgaacgtgagtgcggcagaaattgaaagcgatcgcttacattctgcacaacgtctggtaaaacgttatggcggcgtcgtagtgctgaaaggcgcaggtacgatcgtggcgagtgacgctggcgagacgggtattatcgatgccggcaacgccggaatggccagcggcggaatgggcgatgtcctgaccggcataattgctgcgttgttaggccagcagctgacgccgtatgatgccgcctgcgccggatgcgttgttcatggcgaagccgccgatcgtctggcggccagatacggcacccgcggcatgctggcgaccgatcttttttccacgctcaggcgtgttgttaacccggatgtgattgacgtagaccatgattaa

SEQ ID NO: 254500 - DNA, 1140 bp, Klebsiella pneumoniae
atgtcacagcccctcgatctcaatcagttagcgcagcaaatcaaacaatggggcacagagctggggttccagcaggtcggtattaccgataccgatctcagcgccagcgaacctaaactgcaggcgtggctggataaacaataccatggcgaaatggagtggatggcgcgtcatggcatgatgcgcgcgcgacctcatgaactccagcccggtacgctccgcgtgattagcgtcaggatgaactatcttcccgctaatgccgctttcgcccgaaccctgaaagatcccgcgttgggttacgttagccgttatgcccttggacgggactatcacaagctgttacgtaatcgcctgaaaaaattaggtgagatgattcaggggcagtgtgcttcgctcaattttagaccttttgtcgattccgcgccgattcttgaacgccctttagccgaaaaagcggggctgggatggacaggtaagcactcactcatccttagccgcgatgccggctcgttctttttcctcggcgaattgcttatcgatctccctcttcccgtcgaccagcccgttgaagaagagtgcggacgctgcattgcctgcatgaccatctgcccaaccggcgccatcgtcgagccctataccgttgatgcccggcgctgtatctcctatctgactatcgaactggaaggcgctattccggaagaatttcgtccgctgatcggtaaccgcatatacggctgtgatgactgccagctgatttgcccgtggaaccgcttcgcgcaattaaccgatgaagatgatttcagcccgcgtcaggcgctgcatgccccggcgctggtagaactgttcgcctggagcgagccctggtttttaaaagtgacggaaggatcggccattcgccgtattggtcatctgcgctggctgcgtaatatcgccgttgcgttgggcaatgcgccctggaatgaagcgaacctgcaggcgctggaaagccgccggggtgagcacccacttctcgacgaacatatcgaatgggcgattgcgcagcaaattgcaaaaagaaatgccaatgtgattgaggtgcaactaccgaaaaagctacggctggtcagggtggttgaaaaagggttaccgcgcgacgcctga

SEQ ID NO: 254501 - DNA, 2763 bp, Klebsiella pneumoniae
  misc_feature (1470)..(1479): n is a, c, g, or t
atgaccagttatccacgaattttgcgtccttttactttaccgaacggtaccgagcttaaaaaccgcctgttaatggcgccgatgacaacctgtaccggttattttgacggaaccgtaaccagcgaactggtggagtactatcgcgctcgcgccggcagtatcggcaccatcattgttgaatgctgctttatcgatgattacggcctggcgttcccgggcgctatcggcatcgataacgatgaaaaaatagccggactggcgaaaatcgccgccgctatcaaagcggaaggctcaaaagcgattctgcagatttaccacggcggccggatggtcgatccgcagcttatcggcggacgccagccggtcgcgcccagcgccattgccgcgccgcgcgatggcgctgcgacgccgcgcgcgctgagcggtgatgaagttgaaggcatgatcgcgaagtttggcgacggcgtgcgccgcgccattctggccgggttcgacggcgtagaaattcacggcgcgaatacctatctgatccagcaattttattcgccaaactctaaccagcgcgacgacgagtggggcggcagccgcgacaatcgagcgaaattcccgctggcagtgctggatatcactcataaaatggcccgccagtacgccgacgatgcctttatcatcggctatcgtttctccccggaagagatggaagtcccgggcatccgttttgatgacaccctgtatctgctggaaaagctggccgcccgcggcgtggattatctccacttctccgttggcgcaacgctgcgcccgtcgattgtcgataccaccgatcccacgccgctaattgaaaaatattgcgccatgcgctctgaaaccctggctcaggtaccggtgatgggcgtgggcggggtcgttaacgcagccgatgcggagcaggggctggatcatggctatgatctgatggcggtggggcgtgcctgcattgcttaccctgactgggcggcgcgcattgccgccggcgaagagctggaattgtttattgacagcacccagcgtgaagctctgaacatcccggaaccgctgtggcgcttctcgctggtggaggcaatgatccgcgatatgagcatgggcgacgccaaattcaaaccggggatgttcgtcgaaaccgttcaggacgacgccaacgagctggttatcaacgtcagccttgaaaacgaccgcatcgccgatatcgagctggcggcaagcccggtgcagaccgtcgagttcaccaccagctttgaagagatccgcgaacgtattctcagcgctaataccccgcacgtggatgcgatttccggcgcaaccagccagagcgaagcggtgaaaaaagcggtgtccaaagcgatgctgaagtccagtaaagcgctggccgccgaagagggcgcgggcgaagcggcgccgaaaagctacgatgtggtggtggtcggcagcggnnnnnnnnnncaggcgcacgatgaaggcgcgagcgtgctgatcgttgaaaaaatgccgaccattggcggcaacacgattaaagcttcagccgggatgaacgccgcagagacccgcttccagcgcgtgaaaggtattgaagatagcaaagagctgttttaccaggaaacgctgaaaggcggtaagaacaaaaacgacccgcagctgctgcgccgcttcgtggaaaatgcgccggaagccattgagtggctggcgcgtcgcggcattatgcttaacgatatcaccactaccggcgggatgagcatcgaccgcacccaccgtccgcgcgacgggtcggcggtcggcggctacctgatcagcggcctggtgcgtaatatcactaaacgcgggatcgatgtcctgctggatacgtcggttgaagagatcctgatgaccgacgatgaggtgagcggcgtacgcctgcttaacgatgaacaagaaaccgttgtggtacagacgaagagcattgtcgtggctaccggcggcttcagcgccaacagcgcgatggtggtgaaataccgcccggatctggccggcttcgtgaccaccaaccatcgaggggcgaccggcggcggtatcgcgctgcttgaacgcatcggggccgggacggtggatatgggcgaaatccagattcacccgaccgtcgagcagcaaacctcgtatctgatttccgagtcgatccgcggcggcggggcgattctggtgaaccagcagggcaaccgcttcttcaacgaaatggagacccgcgataaggtttccgccgcgattatcgcgctgccggagcacttcgcttatatcatctttgacgagcacgtccgggcgaaaaacaaagccgccgacgagtacattgctaaaggtttcgtcaccagcgccagctcgccgcgccagctggcggagaaactggggatggattaccatgccttcctcgatacgctggaacgctataatggctttgttaaaaaacagcatgacgatgattttggccgcactaccgcgctgcgcgcgccgattaatgaaggcccgtaccatgcgattcgcatcgccccgggggttcaccacacgatggggggcgtgaccatcaatacggaaaccgcggtattgaacgccggtcaacagccgattgcgggcgcttttgccgcaggtgaagtggttggcggcatccacggcggtaaccgcatcggcggtaacgcagtggccgatatcattatcttcggtaccctcgcgggccatcaggcggcgaaacgcgccagaggttaa

SEQ ID NO: 254502 - DNA, 951 bp, Klebsiella pneumoniae
atgtccgacaaccgcgtctacagctactccgccgtgctgatgggttcgcccattctcctcaagctctatgttcacgatgaaccgctcgcttcacgcgtttttcagctgattaagggctacgaagatcttttcaccgttaaccgcgcgcactcccaggtgatggatatcaaccaggccgccgggcggcatccggtgacggtaagccgtccggtctacgcgctgatcaaatgcgccaaagccgccagcatggtgcgcgacagcgcgtttaacctggcgattggcccgctggtgaagctgtggcgcatcggctttcagggccgcagcgtgcccgcggcacccgatattgccgcccgactggcgctaacgcgtccgcaggatgtgatcctcgatgatgccgccagtagcgtctaccttgcgcggacggggatggagatcgatcttggggccattgccaaaggctatatcgccgatcgggtgcgcgactatttgcagcagcaaggcataaacgccgcgctgattaatctcggcggcaacgtccacacgctcggtgagtggtctatcgggctgaaaaagccgtactcagcggcggatgcgctgatcggcagcattgcggtggcggggcagtcggtggtgacctcgggcatttacgaacgctattttgagcaggatggcaaacgctggcaccatatactcgatccacgcagcggttatccgctggataatgagctggaaagcgtaaccattatttccgccgactcgctggacggcgatatctggacgaccctgatttatggccttggcgtggagaaaggctgcgcggccctgcgccagcgtgaggatatcgaagcgattttcgttaccaaaaaccgcgacgttatcctctcttcacagcgccagttccgctttcagctgctggatgacggctaccggcttagtgactgtactgcttaa

SEQ ID NO: 254503 - DNA, 720 bp, Klebsiella pneumoniae
gtgataaatgtgttaattgttgacgatgatgccatggttgctgaactgaaccgcctgtacgtgggacgagtcagcggcttccgctgtagcggcaccgcgtctacgttgagtaaagccagggagatgattaacgacaaggatctggagatagacctggtgctgctggatgtctatatgcagcaggatagcggcctggatctgctgcccgctatccgcgcctcgggacgggccatcgacgtgattatgatcacctcagccgctgacgccgcgacggttcaggcttctatgcgctacggcgtggtggactatctgatcaaacccttccagtttccgcgttttgaagaggccctgactgcctggcgcgaaaaacgtaagctgatgaccggtcaaccctattacgaacaagcggacgttgaccggctgctgcacggcaatgtgccggatgccgcggatgcccgtaaattgccgaaaggcttaaccccccagacgctgcgcaccctctgtcagtggattgatgcccacccggacgtagagttttccaccgacgaactggcggcggcggtgaacatatctcgggtctcgtgccgtaaatatctgatttggctggcgcaaattaacattctctataccagcattcattatggcgccaccggacgtccggtgtatcgctatcacctgatagccgagcaatacaatctgcttaagcagtacagtcactaa

SEQ ID NO: 254504 - DNA, 1620 bp, Klebsiella pneumoniae
atgaatgaattagcgcagcaggcagcgcccgcgcgtaaacgcccgatgagtatgaagctgagcaccgccgtgaccttaatgattggcagcgtcatcggttccgtattgattctggtctacgccctgtggtttatgcagataagcggcgcaacccgcgatggcgtcaaggatacggcgctggcggtggcgcggacgctggccgactccccggaagttaagcggggtctgacgctgccgcctgaacgcggaatcattcagccgctggctctggccgtcagcaaacgcaatggcctgctgtttgccgtcgtgaccgatatggacgggattcgctactcgcatcctgatggccagattatcggcaaaccctttatcggcgatgacatcctgcctacgctgaagggcaaagagaatgtagccgtcaatcacggcgtgctggcccccgcgctgcgggtattcaccccggtctttgatgatagccgccggcaaatcggcgtggtggcgattggtatttcgctgagcaaagtcgatacgcagatcgccgacagccgctgggatgtgctcctcaccgtactgttcagcgcgctggtttgcgccgtcggtacctggagcctggttcgcggcctgaagcgcgttctgctgggcctcgagccgcaagagatctcaacgcagttccagcaacgccaggcgatgctgcattcattaaaagagggggtggtggcggtagatgccgacggcaaggtgacgctgattaaccccgccgcgcgcgacgttctgtttagcggccctggacgcgatatcgcgcaaacgccgctgctggctgatttgcaggaagttttacataccggcgagccgatctacgatcgggagctcggctgtaatggtctgctgctgatcagtaatacggtgccggtccgcagtcaggatgaggtggtcggcgcgattagtaccttccgcgacaagaccgaagtcagccagctgctgcagcggcttgacgggatggtgaactatgtcgacgccctgcgcaccacctcacatgagtttatgaacaagctgcacgtaattctcggcctgttgaatatgaaaagctacgataagcttgaagagtacgtgctgcagaccgcccacacctatcaggcggatatcggcgaaatccagcatcggatcaaatcgccagtggtggccggctttttgatcggcaaaatacagcgcgccaaggagcgaggttttaccctcacccttgccgaagagagcctggtgccggactgcccgaatgaaaaacaggtcaccgtgctggtcacggtgctgggcaacttaatcgagaacgcgctggatgctatgagcggccaggccgaaggcgaagtcggcctgctgctgcattatcagaacggctggctgagcggcgaagtcagcgatgatggccccggcatcccggcagactttatcgaggatatttttaataaaggcttctccaccaaaggcgaaaatcgcggcgtcgggctgtttctcgccagccagcagcttcgtgaactgggcgggtcgctggccgtagaatccgagcccggtgtgtttacccaattttttgttcacctcccctgggacagtaaaaggaaaagtgcgtga

SEQ ID NO: 254505 - DNA, 906 bp, Klebsiella pneumoniae
atgagcagtaagccaaccgcttcaatgatggaacgacgccaccctgaaacgacccatatagagagtcttgccaccctcgatatgctgacgctgctgaataaggacgatcggcagattgccgaagcggtcgaagcatgtttgccggagatcgcgcgcctgattgataacgccacggcgacgctgagtcggggagggcgactggtgattatcggtgccggggcgtcaggtcgtgccgccgtgcagacggtaagtgagtttacgccggaggggaaacattcgctggtcggacttatcgccggcggccctgccgctgcgctgcaggagatggaaaccgcggcgaatgattacgatcttggcgcctttgaactacaggcgttacagttcagcaaccaggatatgctgctggcgctgacggtaagcggcaagacgccgtgggtctggggggcgatgcgtcatgcctggtcgctgggcgcgccaattgcggttctgacgcagcaggccaatagcgaagccgcccaactggcggatattattatcgccccgcaaaccgggccggaagcggtggctggctttggcaatccgaaggcgcaaattgcgcagcgacagatcctcaatatgctgaccaccgggctggctattcgtagcgggcgagtgtacgaaaacctgcgcgtcgatctgcaggccagcacgccgcgctgggccgagcggcagattgccatcgtaatggcggcgacggcgtgctcgcgcagtgaggccaaagccgcgctggccagctgcaatcagcactgccggacggcaatcttgatgcttctcagcgggctggatgcctggcaggcgcgcgagctgctggcagagcataacgacagtctgcggattgcgctacgggcagcgcagccggtggcctga

SEQ ID NO: 254506 - DNA, 927 bp, Klebsiella pneumoniae
atgaaagacgatattaatcaggacatcaccttccgcaagctgtcggtatttatgatgtttatggcaaagggcaatattgcccgaaccgcagaatcaatgcagctgagcggcgttagcgtccaccgggcgctgcatacgctggaagagggcgttggctgcccgctgtttattcacaaagggcgcaacctgctgcccctcccggcggcgtggacgctgctggagtactgccaggacgtgatcagcctgatgacccgcggactggaagccacgcgtaaagtagcgggtgtcggacaagggcggctgcgaatcggcacgctttactctctgacccttgaaaccgtaccgcgcattattatgggcatgaagctgcggcggccggaactggaactggatctcaccatgggttccaatcagatgctgctggatatgctggaagatgacgcgctcgatgcgatcctgatcgccaccaacgaaggtgaattcaacaattcagcttttgatgtggtcccgctgtttgaggatgatatctttcttgccgccccggcgacggaacaactggacacctcaacgcccgccgagctgcgcgactatgcgcggcgtaaattcgtttctctggcggaagggtttgccacctatgccggatttcaggacgcttttcaggtggcgggatttcaacctgaaatcgtcacccgggttaacgatattttttcgatgattagcctggtgcaggcgggcgtgggctttgcgctactgccgggacgaatgaaaaaggtgtatgaaaatgacgttcagctgttgaagctggcggagccctatcagatgcgccagctgatctccattgtctactcacaccatcgcgagcgcgacgccgacctgctggcgctggcggcggaagggcggatgtacgcccgcagccttagccattaa

SEQ ID NO: 254507 - DNA, 903 bp, Klebsiella pneumoniae
atgaaaattctctttacctttcccggtcagggaaaccagcggccggatatgctcgccgcccttcccgaccgccagaacatccttgccgaggcgcgtaccgtgctcggcgatgaagtagaccatttagataccgccgctgcgttaaaacatacccgtgcagtgcagctgtgcttgctgatcgcaggcgcagcctgggcgcgggagctacagcgtcaaggtgtgaagccggacatggttagcggcctgtcgataggggctttcccggcggcggtcattgccggcgcgctggatttcaccgacgccctgcggctggtggcgctgcgcggcgatttaatggagcaggcttatccccacggctacgggcttaccgcgattatgggcctgacgctcaaccgcgtggaaaagctgattgccgatagcgacctctatattgccaaccttaacgctgaaacgcagattgtcattgccggacgcgacgacgagatggcccgcgtggctcagctggcgctggctgctggcgccagtaaagctcagcggctggcggttagcgtcccttcccactgcgcgctgctgaatgaaccggcggctaagctggcaaaagccttcgctgacgtcacgctgcaacgaccgtgctgtgcgtatctgagcggctccacggcgcgcgttttatgggacccattaaaaatcgccaacgatctggcgctgaatatggcgcgaaccgtgcgctggcaggaagcgatgatcgccgctgatgaacgggacgcgcggctggcaatcgagatgccgcccggcggcgtgctaacctgcctcacccgccaggcgggctggcggggagagagcatttcgctggagcgcagcggtatcgacgtcgcccgtcacctggcaaaccggcttaatggctaa

SEQ ID NO: 254508 - DNA, 621 bp, Klebsiella pneumoniae
atgctatcaacgccgcgtcctcacgatttagtctggttgaatagtgccgccgcgctggaggcgatcgaggaacattgggtcgctcagcactggcgcaccagcctgccggtggtggtacgacgcgacgttgacatcagcgcccgcattccggtgggcgtgcggggcatgaagcgcgaagagcgcgctgcggggtgggtacggatggagaatatcgtccgaaccattaccccggaaacgctcgccgatcgcctgctgcttctgcgttcgccgtttgtctctcagccgccggtacaggcggcgatatcactgaccttgcacgactggccgtggcgctggggcattaccggcagtaccggctatgcgctggccaccgaaattcccgtgcttcacgccgccagcgatctcgatctgctgatccgcgcgccgcagccgctcgaccgcgaagcgctgctcgcctggcagtcccgcgtcgcccgtctgccctgccgggcggatacccaggtcgaaacgcctgcaggggcattcgcgttaaacgagtggctacgagatggccgcaccctgctgaaaacgtcccgcggcgcgcgcctgaccgctacgccatggaacagggaggaagcatga

SEQ ID NO: 254509 - DNA, 960 bp, Klebsiella pneumoniae
atgacttatgtgattattcatgccctcgcgccgatttttgtcatcatgctgctgggcttctgggccggcaaggccaaaatggtcgataacaaaaacgtctctttactcaatattttcgtgatggattttgccctccccgcgacgctgtttagcgccacggtgcaaaccccatggaacggtatcgtcgcgcaatcgccgctggtactggtactgaccggggccatgtggattacctatgcggccatctacttcctcgctacccgcgtattcaagcgctcgccgcaggatgccgccgtgttgaccctgaccgtagcgctgcctaactacgccgctcttggtctgccgattctgggcagcgtgctcggcgaaggcgcatcaacatccctctccgtcgccgtttccatcgcttgcggctcggtactgatgacgccgttctgtctgctgattctggagcgtgaaaaagcgcttgccgccggcgagaacagcggttcgacgctggcgatgctgccggtactgatgtggcgttcagtgaaaaaaccgatagtctgggggcctctgctgggggttgtcctttcggcgatcggtctcaaaatgccggatctgctgctggcctctattaaaccgctgggcctggcggcgaccgccgcggcgctgttcctgaccggtgtcattctgtcggcgcgtaagctgcagctcaatgcgctgattgccacttccactctcgtcaaactgctggttcaaccgtttatcgcctggggtctggtgatgctgctggggctgcacggttctatcgccattaccgccattctgatgattgcgctggcggccggtttcttcggcgtggtcttcggcaaccgctttggcgtacagtcgccggatgcggaagcggtgctgctgttaagctcggttctgtgtatcctgtcgctgccgctgtttatcactataacttcagggatctaa

SEQ ID NO: 254510 - DNA, 846 bp, Klebsiella pneumoniae
  misc_feature (427)..(436): n is a, c, g, or t
atgagccagttcactaatcgcgccgcgctgtggctaaatcagctggcgccgaatgccccgctaatgaccggtctgtgcccatcggtgcaggttgccgacgccgattttaacggtgaaagcgcccgttttatcgccgtggtaccggatgctaataaccattacccacgcgccgctcagggtgaagttggcctgctcgaaggctggacgctggcaaaagtggtcaacgaaaccctcgacgccgatgccgataaaacggtgaagcgcccgattatcgcggttatcgatgtccccagccaggcctatggccgtcgcgaagaagcatttggtattcatcaggcgctggctggcgccgcaggcgcatacgcgaaggcgcgtcttgccgggcatccggtgattggcctgatcgtcggcaaagcgatgtccgggnnnnnnnnnntgattggcctgatcgtcggcaaagcgatgtccggggcgtttctcgcccacggctaccaggctaatcgactgatcgcgtttaacgacgccggggtactggtgcatgcgatgggtaaagagtcggccgcgcggatcaccctgcgtaccgttgaagcgctggagaaactggcggcaaccattccgcctatggcctatgacgtcagcaactacgcgacgctcggcctgctctccgctctgctggatatcagtaatcctgacgcaccggacgcccgcgatctgacgctggtcaccgataccctgcgcgacgccatcgctgacgcccgccgggatgcctcactgaagtgccgcctcggcgcggagaaccgccgtagttcccaactagtacgcgatcgcatgcgcgccagctggtag

SEQ ID NO: 254511 - DNA, 834 bp, Klebsiella pneumoniae
atgcgtaacgatcgcagctttattgaactccgcgctcgtgaacgcgcccgcaccctgctggatgacggcagctatcgcgaactgctggatcctttcgacggcatcatgtcgccgtggctcggcgcgcagggcatcgtcccgcaatccgacgacggtatggttgttgctaaagggaccatcaatggccagccggcggtggtgattgccattgaaggtaccttccagggcggcagcatgggtgaggtctccggcgcgaaaatggccgccgcccttgagctggcggcggaagataaccgcaacggtattcccactcaggccgtgctgtgtctggaaaccggcggcgtgcgcctgcaggaagccaacctgggccttgctgccatcgccgatattcatgccgcaatagtcgacctgcgccgctataccccggtggtcggcatcgttgccggcaccgtcggctgcttcggcggaatgtccatcgccgcggcgctgtgtagctacctgattgtcacccgtgaagcgcgtctgggcctcaacgggccgcaggttatcgagcaggaagcggggattgaagagtatgactcccgcgaccgtccgtttatctggagcatgaccggcggcgaaattcgctacgccagcggcctggtcgatgccctggtaggcgatggtatcaacgcggtgaaaagcgcgatgaacgaggcgatcgccaaaggcgtgcccgcgcagcatcgcagcgacaaatatgaagatttcctgacccgtttgacccgattcgatacccgccagcaggcggactccgcgcagatcaaacagctattcgcccgggaggtgaaataa

SEQ ID NO: 254512 - DNA, 300 bp, Klebsiella pneumoniae
atggaacagattaaattgtcattccctgccaaccgcgccctcagcggcaaagcgctggcaggcgttgtaggctccggcgatatggaagtgctctataccgccggacagagcgatacgcttaacgtagaaatcaccacctccgtggacaacagccaggcgcgctggaacgcgctattcgaacggctgagcctgattaacggcctgcccggcggacagctgatcatccacgacttcggcgccacgcccggcgtcgcgcggatccgtattgaacaggtttttgaggaggtggctcatgcgtaa

SEQ ID NO: 254513 - DNA, 843 bp, Klebsiella pneumoniae
atgaaaaaactctctccccagtttgctgaaacccgggcccgctggctggcccataccgccagcgcctgcctcgttgacgaggcgcgactcagccctaaaccgggcctggtcgatagccgcggcaacggcgcgcatcaggatctgagcctggcgctgatggagcgttcagcccgcagcctgcagccaacgtttcatgcgctggcccagcagagctggctgcggccggcggacgttgccctgcgtgaaaccgttggccggctgggccgcgaaggcgaagcgcagatgatgcaggcgactgccggggtcaatacccatcgcggcgctatctgggcgctgggcctgctggtcagcgcgacggcgatgctgggaggagagggtcatgcacagaggattgcggaaaccgccgccgccctcgcccgtctgccggatgcctgcgcgccgaaaactttcagtaaaggcctgcgcgccagccgccgctggcaggttccgggcgcgcgggaagaagcgcagcgcgcttttccgcacgtcactacccttgccctgccgcggctattgcgcagccgggccgagggagccagtgaagagcaggcccggcttgatgcgctgatggcgattatgacttcgcttagcgatacctgcgtgctctcccgcgccggaatggcgggccttgaagcgatgcggcaaggcgctggcgaggtgctggcagcaggaggatgtacgacagccaggggacgcgccgcgctggcgcgtcttgatgcgcagatgctggcgcagaacgcctcgccgggtggcgcggcggatcttcttgccgccaccctgtttctcgaccgggtttccgcttaa

SEQ ID NO: 254514 - DNA, 1656 bp, Klebsiella pneumoniae
atgagtgccgaacaaacgacgggacgcgtctggaaccgtcgccgtacggaaaaacagcggcgactggccgaggccagagtctccggcaaagtgatccccaccgaccagctggttgcggtccttgagcagctgctggcccccggcgaccgcgtggtgctggaaggtaacaaccagaaacaggctgatttcctctcgcggatgctggcggaagttaacccgcaaaaaattcacgacctgcatatgattatgccgagcgtcgggcgcagcgagcacctggacctcttcgaaaaaggtatcgcccgcaagctcgatttctccttctccggtacccagagcctgcgtatttcgcagctgctggaagatggcctgttggaaatcggcgctatccacacctatatcgagctttattcccgtctttatgtagacctgtcgccgaacgtcgcgctgatcgccggttataaagccgaccgcaagggcaacctgtacaccgggccgagcaccgaagacactccggcgctggtagaagccgccgcgtttcatgacggcatcgttattgcccaggttaacgaactggtcgatgacgaatgcgatctgccgcgcgtggatatccccggttcgtggattgactacgtagtcgtcgcggataaaccgttctttatcgagccgctgtttacccgcgatccgcgcctgattaaacaggaacatatcctgatggcgatgatggcgattaaaggcatctacgccgagcatcaggtgcaatccctgaaccacgggatcggctttaacaccgccgccatcgaactgctgctaccaacctacggcgaacagctcggtctgaagggtaagatctgtaaacactggacgctgaatccgcacccgacgctgattccggcgattgaaagcggctgggtagagagcgtccactgcttcggcggcgagctggggatggaagagtacattcgcgcgcgtccggatatcttctttaccggcgccgacggctccatgcgctccaaccgcgccttctgccagctggcgggacagtatgcggtagatatgtttatcggttcgacccttcaggttgacggctacgctaactcctccacggtgacccgcggccgcctctccggcttcggcggcgcgccgaatatgggccatgatccgcacggtcgccgccacgccacgccggcatggctcaacatgattaccgaaccggacccgatgcagcgcggtaaaaagctggtggtacagatggtggaaacgttccaggcgggcgtgaaaccgaccttcgtggaaaaacttgacgccgttgaagtcgccaaaacctccgggatgccgctggcgccggtaatgatttacggcgatgacgttacccatgtactgaccgaagaaggcatcgcctatctctatcgggcggaaagccttgaagagcgccgggctatggtagccgccgtggccgggatcaccgatatcggtctcggcgttgatgccaaacgcgtggccgcactgcgccaaagcggcaaagtcgtgtatccggaggatatcggtatccgccgcagcgatgccacccgctccctgcttgccgccggtagcgtggccgatctggttgagtggtccgacggtctgtacaacccaccggcaaaattccggagctggtaa

SEQ ID NO: 254515 - DNA, 363 bp, Klebsiella pneumoniae
atgttttattggattttattagctttagctatcgttgctgaaattaccggcactttgtcgatgaaatgggcaagcgtaagcggcgggcatactggttttattttaatgctggttatgatcgcgctttcctatatttttctcgcgttcgcggtgaaaaaaatcgccctcggcgtagcctacgccctgtgggaagggattgggattttactgatcaccatttttagcgtcctgttgtttgatgagacgctgtcgatgataaaaatcgccgggctggtcaccctggtcgccgggattgtcttgatcaaatccgggacgcagaaagcggtaaaaccaggcaaggagaaagcgcatgcaacagtttga

SEQ ID NO: 254516 - DNA, 330 bp, Klebsiella pneumoniae
atgcaacagtttgagtggatccacgccgcctggctggcgctggcgattgcgctggaaattatcgccaacgtttttcttaagttttcagacggctttcgccgtaaattctatggcgtgatgtcgctggctgcggtgcttggtgcctttagcgcgctctcgcaggcggtcaaggggattgacctgtcggtagcctatgcgctgtggggcggtttcggtatcgcggcgaccattgccgccggctgggtgctgtttggccagcgtttgaaccataaaggctggatcggggtgatcctgctggtggccggcatggtgttaattaaactcgcctga

SEQ ID NO: 254517 - DNA, 2157 bp, Klebsiella pneumoniae
atgattcacttgccaggttggcgcaatattccctccgccagaacgctttccatcatgatctttttcgccgggatcggcctcatcgtgtcggtggtttttctgctctatctctcccagcatctgattggccagaaagcgaacgaaattgataagcatcgctccgttttatcggttaatggcgcggtgcagacgtcggttaaccgcgtgctgtcgctggttctggataattccgtctgggatgatgccgtgagtcagacctatgccggaaggctcgatccgcagtggctctataattcctggggttctggtttcaagattaacaatctctatgacggtactttcgtactcgatcagcactaccacgtactgtggggatcgtttcgcagccagcccttctccgggcaggatacgcagtttctcggcagcggcttccacgcgcttatttcgcagcatgccgccgcgctgcgcagcggtaaaagcgcctgggcaggcattacccgcacccgcgctggtattgcttttatcggcatcggcctgatccgtccgacggtcggacgcctgcaggtgtttgatgatacccgccgctatctggtgattacccgccatatcaacccgcaaatgcttgaacgtctaggcgatacgttccagattcgcaatctgcacgtcacccagaccggtggcgaatacagcattccgctacgtacccaggccggggaaaccgtgggctacctgagctggcagcccggcctgcccggcgccgaagcgtcgcgggcggcatcgaacagcattcggctgattgcagcggtggcggcagggctgatcctgctgtttatcctgttcagctgcctcgggctgtacaaactggcgcgtggcgaaagcgtggcgcgtcataccgccatgaccgactggctgagccgcctgcctaaccggcgggcgctgatcgaacggcttaatcaggtttgtgaaaattcgcgctatcagacgcaaagcgtggtgtttatcgatctcgacggctttaaggacgttaatgataactacggtcacgacgtcggcgatgcgctgatcctgcatattgcgaaggcgctgcgggagcgggttcccccggaagggatgctggcgcggatggggggcgacgagttcgcaatgacgataagcggcgcagaggcggccaatcaggcttcagcctttgcccgcgcggtgctggaactgttaaacgcaccgattatcctgagcggacgcaaaatctatatcagcgccagtatcggtattgccagcggcgtgccggcaagctgctccagcacggagctttttcgtcgcgccgatattgctatgtaccactctaaaaagactggcaaagggcgtaccacctggtatgacgaagcgctcagcgacgcgcggcagtatcagctcaatatcgagaatggcattcgtcagggactggagaacgaagagttcgatgtctggtatcagccgatcgtcaacgctgatacgctggtgatggaaggggtggaagcgctgctgcgctggccgcgacgcccgcagggggcgctgccgccggatgcgtttatcggtatcgccgaaagcagcggcctgatatacgccctcggtcaatttgtcctgcatcgcgcctgcagcgatctgcagccgttaggcgatctgcttctgtcggtaaatatctccccggctcagttccgcgatccggagttcgagtcgcgggtggtccaggtgctgggacgctgccattttccggcccgtcgccttcagcttgaggttaccgagagctatgttctggagaatcccgaccgcgcgagaacggcgattaaaaatttaaaatcgctgggtatcgcggtagcgctcgacgattttggtaccggctactccagcatcggctacttacgcagcttcagcttcgacagcctcaagatcgataaatcgctggccggattggtggatgttgatacccaggccgcagagctggtgcgcggtaccgtgagaattgccggggcgctggacatcacggtggtggcggaaggcgtagagaatcaaaaacagctggcgctgctgcggcgggcgggatgcgacagattgcagggctactattttagcgaaccgatgcccgtcacgtcgttactgcaactgcgccagcagcagggctga

SEQ ID NO: 254518 - DNA, 813 bp, Klebsiella pneumoniae
atgcgtagagacgtactgttattactgtgttcgatctgtcttttccctgcgctggtgcaggccgatgatgatggcatgagtgcgaaagatattaagacgctgttttttggtcatgacgaccgtaaacccgtcagcgaccccacagacgatccctgggatgctatcgggcagctggaaaccgccagcggtaatctctgtaccgccacgctgatttcccccaatctggcgctcactgccgggcactgtctgcttacgccacctaaaggtaagccagacaaacccgtcgcgctgcgttttatctcgcgtaaaggcggctgggtgtacgaaattcacggcatcgaaggtcgggtagatccttcactgggcaaacggcttaaggcagacggcgatggctggatagttcccagcgccgcggcgccgtgggattttggcattatcgtgctgcgctacgccccttccggcattacgccggtgccgatttttagcggcagcaaagccgatctgaccgccgcgctaaaaaccgccgaacggaaagtgactcagtctggctatccggaagatcatctggataatctctacacccatcaggattgcgtggtcaccggctgggcgcaggcatcggtgctctcccatcagtgcgatacgctgccgggcgatagcggctcgccgctgctgctgaaaactgatgatggctggcaggtgattgcggttcaaagctcggcgcctggaccaaaagatcgctggcgagcggataaccgcgccatctcggtgaccggttttcgcgataagctggaagcgctggccgcccagtaa

SEQ ID NO: 254519 - DNA, 936 bp, Klebsiella pneumoniae
atgccgccgctctacgcactgcgcgcttttgaaaccgccgctcggcttggttcgtttagtcaggccgccgcggcgctgcacgtcacgcccggcgccgtcagtcgccacgtcagcaccctggagtcatggtttgcatgccgactttttgttcgccatggcccaaaggtcacgcttaccgatgccggctatcagctggcgaaggcgctgaatgagagtttttcatcgatagaccgggcctgccagaccctgcgtcgtcaggcaggcaagctacggctgaaagcgccgtcaacgcttacgatgcgctggctattggacgtcctgcaacagtttcgtcagcagcaccagcgaccggatgtggaaatgagtagcctgtggatggatcgcgacagcgtcgattttactcaggagccattcgactgcgcgatcctcctgggagatggcaattttggcaataataaccgctgcagcctgctttttgccgaatggttaatcccgctttgcgcaccggggatgatgcagcaggccaggcaagatttagcggcctgcacgctgatacatccgtccaccgatcgccgtgactggcggcgctggctcgagcattatgagcgacctgcgccggatattgctcagggcatcgtctttgatacccttgagcaaggcaccatggcggcgatgagcgggcacggcgtcagcattggcgatctgctgcttaatctacccgcgatacgcgccgggctgctggccttacccttcccgacggcggtaactaccggcgaaggctactattttgtctggccgaaaaaccctctcagcccacagcccatcgctttactgcataactttttaaatcagcatatccccggcccgctccccgataatattctccgccggggagaggggcccgaattagagaacgtgaaccgcggcaaccagtag

SEQ ID NO: 254520 - DNA, 609 bp, Klebsiella pneumoniae
atgaatatctctttgctgacggcctactctttgacggtactggcgcttattgccaccccggggccggtggtggtgttagtgaccggcgcggcggcgcgggaaggctttgccagtgcggtgcgcacgatgattggcgggaatctggcttctttagtgctgctggccgctgctgctgcgatgctgaacggcatagtggcgcttgatccacgcgcgctaacgctgatggcgacgatcgggtcgctgtttattattcgacttgcgctggggatgttgcgtgcagagccggtgaggcaggatgcatcgaaaaagcgtagtggggtgatggcaggatttgcgaccgcgttaagcaatcccaaagatatcctgttttttgccgcgttttttccgcagtttattcctgtaaccgacagcttcggttttagcctggggctcctgacggcggtatgggtgatgatcgacttaggcgtgcttacgctctatattctggcggttcgtcgttggttaacggcgcgttacgcccagcgattaacaacggtgtcggcgtttttcctgctaattctggcgctttacggcctgggctacaacctctggcagctaagtcttcagtag

SEQ ID NO: 254521 - DNA, 369 bp, Klebsiella pneumoniae
atgaaaaaagtattagctctggtcgttgccgctgctatgggtctgtcttctgtcgctttcgctgccgatgccgccaccaccgccactccggctccggctgctgcaactcacagcaccaccgctaaagcgacccatcacaagaaacaccataaagccgctgttaaaccggctgcagagcagaaagcgcaggcggctaaaaagcacaagaaagcagaagctaaaccggctgccacccagaaggctcaggccgccaaaaaacacaaaaaggccgccgctaaaccggtagctcagaaagcccaggctgcgaaaaagcaccacaaaaccaccaggcaccataccgctaaagctgctgcccaaccggctgcttaa

SEQ ID NO: 254522 - DNA, 1488 bp, Klebsiella pneumoniae
atggaaaaaagatcgccgtatcagtcacttgtaaagaccttccagcgcctttcccgcttttcgcacctctccgccatcgccggctgggacatgttcaccatgatgccgcccggcggcagcgcggcacgcggcgaagcgctggctgagcttggcgttttgcaacatcagattctgaccgataaaaaagtgggcgaatggctgcgcaatgcgcttcaggaagagctgaacgatgctgagcaggcaaacctgcgcgagatgacccgtcagtacgagcaggcggcgctgctgccggaaagcctggtggaagcgaaatcgctggcggggagccgctgcgagcacgcctggcgcagccagcgcccggcgaacgactggcagggttttgctgaaaacctgcgggaagtggtcaagctgagccgcgaagaggcgcagattcgcgccgcggcaaaaggctgctcccgctatgacgcgctgctggatatttttgaaccggatatgaccagcgcgcgtcttgatgtgctgttcgctgacctcaagtcatggcttcccacgctgctggagaaagtggttgaaaagcaggcgcaaacgccgctcatcgaacctcaagggccgtttccgattgccgaccagcgcgaactggggctggaagcgatgcgcgtgctgggctttgattttgatggcggacggctggatatcagcgcccaccctttctgcggcggcgtgccccaggatgtgcgtatcaccacgcgctacaacgagaacgatctgctcagcgcgctgtttggcgtgattcatgaaaccggtcacgcacgctacgaacaaaatctaccgcgtaactggatcgatcagcccatcgctctcgcccgctctaccgcaatccacgagtcgcaaagcctgtttttcgaaatgcaactcggccgcagcgaagcctttcttcaacgcctgctgccaacggtacgccggtactttggcgagcagccggcctttagccgcgacaactttatcgcctggaatcagcgcgtcaaacagggctttatccgcgtcgacgccgacgaggtgagctatccggcgcacgtcattctgcgctacgaaattgaacgtgcgttgattgatggcgatatcgaggttgatgatattccggcgctgtgggatgaaaaaatgcagcactggctgggactgtctactaccggcaactatcgggacggctgtatgcaggatatccactggaccgatggcggttttggctacttcccgtcctacacgctgggcgctatgtacgccgctcagctgatggcttccgccagacgggcgctaccgcagctagaaagcgatatcgccaacggtaactttaccgccctcttcgattggctgcggcagaatatctggcagcacggcagccgtttcaccacctcgcagctgatacagcatgcgaccggggaagaccttaacagcgactttttccgccagcacctcacctcgcggtatctgtaa

SEQ ID NO: 254523 - DNA, 1251 bp, Klebsiella pneumoniae
gtgagccgtacaactaccgctgacgccgtcccggcaagcgacgtcagcgacaccatcgctcctcagccaaaccagtttatcaaacgcggcactccgcaatttattcgcgttacgcttgcgctcttctctgccggactggcgactttcgcgctgctttattgtgttcagccgatcctgcccgtgctctccactgaattcggcgtctcaccagccagcagcagtatctcgttgtccatctccaccgccatgctggcggtcggcctgctgtttaccggcccgctctctgacgcgattggccgcaaacaggtaatggtgacggcgctggtgctggcttcctgctgctccctgctgtcgacgatgatgtccagctggcacgggatcctgattatgcgcgccctgattggtctgtcgctgagcggcgtggcggcggtcggcatgacctacctgagcgaagagatccatcccagcgtggtggcgttctcgatggggctgtatatcagcggtaactccatcggcggcatgagcggtcgtctgctgaccggtgtattcaccgatttcttcggctggcggattgcgctggcggtcattagcggcttcgcacttgccgcagcactgatgttctggcgcatcctgccggaatcgcgccacttccgtccgacctcgctgcgaccaaaaacgctgctgatcaactttcgtctgcactggcgcgatcgcgggctgcccctgctgttcctcgaaggttttttgttaatggggtccttcgtcactctgtttaactatattggctatcgcctgatgctctcgccgtggtcattaagccaggcggtcgtaggcctgctttcggtggcctatttaaccggaacatggagctcgccaaaagccggtgcgatgaccgtgcgctatggccgcggcccggtgatgttgttttccacggcggttatgctcggcgggctgttgatgacgttattctcatcgctgtggctgattttcatcggcatgctgctgttctctgcgggatttttcgcagcccactcggtcgccagcagttggatcggcccacgagcccgccgcgcgcgtggccaggcctcgtcgctctatttattcagctactatctgggatccagcatggcggggacattaggcggcgtgttctggcataactacggctggaacggcgttggcgggtttattgcgctgatgctgctggctgcgctgcttaccggcgcctgtttgcacaagcgcctgaagtaa

SEQ ID NO: 254524 - DNA, 354 bp, Klebsiella pneumoniae
atgcaggtaaaatatttagcagggattgtcggcgcagccttactgttggcaggttgcagttccagcaatgaattaacctctgccggccagaatgtgcgtttcgtgcaggagaagccgggcgcagaatgtcagctgttagggaccgcgacgggtaaacagagcaactggctctccggccagaatggcgatgagggcggttccatgcgcggtgcggcgaacgccttgcgtaaccaggcagcagcaatgggtggcaacgtgatttacggcgtcagcagcccgacacaaaacctgttgtcgagctttgtacctaccgacagcgaaatgaacggccaggtttataagtgcccgaactga

SEQ ID NO: 254525 - DNA, 951 bp, Klebsiella pneumoniae
atgctgccggttctggaagccgtagcgaaagctggcaaaccgctggtcatcatcgctgaagacgttgaaggcgaagcgctggcgaccctggtggttaacaccatgcgcggcatcgttaaagtggctgcggtgaaagcaccgggcttcggcgaccgtcgtaaagctatgctgcaggacatcgctactctgactggcggtaccgttatctctgaagagatcggtatggagctggaaaaagcgactctggaagacctgggccaggcgaaacgcgtggttatcaacaaagacaccaccaccatcatcgatggcgttggcgaagaatccgcaatccagggccgcgtagctcagatccgtaagcagatcgaagaagcgacctccgactacgatcgtgaaaaactgcaggaacgtgtcgctaaactggctggcggcgtggcagtaatcaaagtcggtgcggctaccgaagttgaaatgaaagagaaaaaagcacgcgtcgacgacgccctgcacgcaacccgtgctgcggttgaagaaggcgtggtggctggcggcggcgtagcgctggttcgcgttgcggcgaaactcgctggcctgaccggtcagaacgaagatcagaacgtcggtatcaaagttgcgctgcgcgcaatggaagcgccgctgcgtcagatcgtttccaacgccggtgaagagccgtctgttgtggcaaacaacgtgaaagcaggcgacggtaactacggttacaacgcagcaactgaagaatacggcaacatgatcgacttcggtatcctggacccaaccaaagtcacccgttctgcactgcagtacgcggcttccgtggctggcctgatgattaccaccgagtgcatggtgaccgacctgccgaaaggcgacgcgcctgacttaggtgctgctggcggcatgggcggcatgggcggtatgggcggcatgatgtaa

SEQ ID NO: 254526 - DNA, 612 bp, Klebsiella pneumoniae
atgaatcgactgttccgcctgttgccgctggcaagcctcgttctgaccgcctgtgcgattaatgctccgaaagggccgggtaaaagcccggattctccacagtggcgtcagcaccagcaagatgtccgcaatcttaatcagttccagacgcgcggcgcttttgcttatctttctgatgagcaaaaagtctatgcccgcttcttctggcagcagacgggccaggaccgctaccgcctgctgctgactaacccgctcggcagcaccgaactgtcgttaaccgcccagccgggcaacgtgcagctgattgacaataaaggccagacttacacggcgaccgacgccgaagagatgattggccgcctgaccggcatgccgattccgctcaatagcctccggcagtggatcattggcctgccgggcgaggccaccgactactcgcttgatgaccagtatcgcctgcgcgagctgaactacacgcaaaacggcaaaacctggcacgtcacctggggcggctacacctcagacaccaaaccttcgctaccagccaatatggaacttaacgacggcagtcagcgcatcaagctgaaaatggataactggattgtgaaatga

SEQ ID NO: 254527 - DNA, 1257 bp, Klebsiella pneumoniae
atgacccttttagctcttggcattaaccacaaaacagctcctgtagcgctgcgagaacgcgtaacgttttcgccggatacgctcgatcaggcgctggagagcttgctggcccagccaatggtgcagggcggagtggtgctgtcgacctgtaaccgcacggaactttatctcagcgtcgaagagcaggataacctccaggaagctcttattcgctggctgtgcgactaccacggtttaaatgaagaggacctgcgtaaaagcctctactggcatcaggacaacgaggcggtcagccatctgatgcgcgtcgccagcggtcttgattcgctggtgctgggcgaaccgcagatcctcgggcaggtgaaaaaagcctttgcggattccagccgtgggcacctgaacgtcagtgaactggagcgcatgttccagaagtcgttctcagtggccaaacgggtgcgcaccgaaaccgatatcggcgccagcgcggtctccgtggcgttcgctgcctgtactctggcgcggcaaatcttcgaatcactctccagcgtgaccgtgctgctggtcggcgccggtgagactatcgaactggtggctcgccatctgcgcgaacataaagtccgcaagatggtgattgccaaccgcacccgcgagcgcgctcaggcgctggccgatgaagtcggcgcggaggtgatcgcgctgagcgatatcgacgagcggctgaaagaggccgatatcatcatcagttctaccgccagcccgctgccgattatcggcaaggggatggtggagcgcgcgctgaaggcgcgccgcaatcagccgatgctgctggtggatatcgccgttccgcgcgatgtcgaaccggaggttggcaagctggcgaacgcctatctctacagcgtggacgatctgcaaaacatcattcagcacaatctggcgcagcgtaaagccgcggcggtgcaggcggaaaccattgttgagcaggaagccagcgagtttatggcctggctacgcgcccagagcgccagcgagaccatccgcgaatatcgttcccaggccgagcaggtccgcgaggagctgacggcgaaagcgctggcagcgctcaatcagggcggcgatgcgcaggaaatcatgcaggatctggcgcgcaagctcactaaccgcctgatccactcgccaacaaaatctcttcagcaggccgcccgtgacggggatgatgaacgcctgcatattctgcgcaacagcctcgggctggaatag

SEQ ID NO: 254528 - DNA, 372 bp, Klebsiella pneumoniae
atgctgggaacgttcgtcctggcattcgacaacaatgccggtcggcaggtgggtaatacgaattgccgagtcggtggtgttaacgtgctgaccgcccgcgccggaggagcggaaggtatcgatgcgcaggtcgctcgggttgatatccggcatttcggcttccgggagctctggcatcaccgccacggtgcaggcggaggtgtggatacgcccctgggattcggtggccgggacgcgctgaacgcgatggccgccggattcgaacttcagtcgcccatagacgccgtcgccgctgattttggcaatcacctctttgaagccgccgtgctcgccttcgttggcgctcatgatttccacgcgccagcggcgtga

SEQ ID NO: 254529 - DNA, 1434 bp, Klebsiella pneumoniae
atgataaaaatcgcgcgaatcgcactcgcactagggctgcttacttctgccagctcacttgcctatgcctccgggttggtaatgaacgacaacgaactgcgcaacgatctggcgtggctctccgaccgcggcgttattcatctcagcctgtcgacctggccgttaagtcaggaagagattaatcgggcactaaagaaagcaaaaccctcttattcatccgaacaggtggttctggcgcgaatcaaccagcgcctcgactctttgaaagctgattttcgggtcagcggctatacctcaacggataagcccggcaccccgcagggatttggtcagaatcagcctgctgacagctctttatcgttagccttcaataacagcggcgagtggtgggatgttcacctgcagggaaacgttgagggcgacgaacgcatcagcaatggttcacgttttaatgctaacggcgcctacggggcggttaagttctggaaccagtggctttcctttggacagatgccgcagtggtgggggccaggttacgaaggcagcctgattcgcggtgatgcttcccgtccgatgaccggctttttgatgcagcgtgctgaacaggccgcgccagaaacctggtggctgcgctggatcggcccatggcagtatcagatctccgccagccagatgaatcaatataccgccgtaccgcataccaagattatcggtgggcgtctgactttttcccccttccagtcccttgagcttggcgcatcgcgcattatgcagtggggaggggagggaagacccgagtcgtttagcagcttctgggatggtttgacgggtaaagataacaccggtacagctaatgaaccgggtaaccagctagccggttttgatttcaaatttaagctagagcctacgcttggttggccgattagcttctatggtcaacttattggtgaagacgaggccggctatcttccctctgcgaatatgttcttgggaggagttgaggggcaccatggttggggtaaagatgccgtcaactggtatgtggaagctcatgacacccgttcgaatatgaaccgtctcaactatagctataatcatcatatttacaccgacggctactatcagcaaggttttccgctgggtgatgcaatgggtggtgatggtcaattgtacgcaagtaaggttgagttggtaacagaagataatcaacgttggggtgcacgcttggcttatgccaaagtcaatccaagaagtcagagaattaataaagcattcccgcaatcggatactctaaaaggagtgcagttgggctggagtggggatatatataaatcagtgcgtttaaacacttcgctctggtacaccgatgctgataatagcgatagcgatgaggttggtgccagtgccggtatcgaaataccattcaatttatag

SEQ ID NO: 254530 - DNA, 849 bp, Klebsiella pneumoniae
atgcacatgttgcccgccaccaaggccattccgaaagagatgctgccgatcgtcgacaagcctatggtgcagtacattgttgatgaaattgtagctgctggcatcaaggaaattgtgctggttacccattcatccaagaatgcggtggaaaaccatttcgacacctcctatgaactggaagcgctgctggagcagcgcgtcaaacgtcagcttctggccgaggtacaggctatttgcccgccaggcgtaacgattatgaacgtgcgccagggtcagcagctgggtttaggtcactccattctttgcgcgcgcccgctgattggcgataacccgtttgtggtggtgctgccggatatcatccttgatgatgccagcgccgatccgctgcgctataaccttgccgctatggtcgcgcgtttcaatgaaacaggtcgtagccaggttctggcaaaacgtatggaaggcgatctttccgagtactcggtcattcagaccaaagacgcgctggaaacggcgggtcaggtggcgcgcatcgtcgagttcatcgaaaaacctgatgaaccgcaaacgctggattcagacctgatggcagtagggcgctatgtgctttctgctgatatttggccggagctggagcgtactgaacccggcgcatggggccgtattcagttaaccgacgccattgctgaactggcgaaaaagcagtcggttgatgcgatgttgatgactggcgagagctacgactgcgggaaaaaaatgggctatatgaaggcctttgttaattatggtctgcgtaaccataaagaaggcgcaaaattccgcgagagtattaagaagctgttagcgtaa

SEQ ID NO: 254531 - DNA, 1587 bp, Klebsiella pneumoniae
atggaatggattgccgacccctcgatctgggccgggcttataacgcttgtcgttattgagctggtacttggtattgataatctggtctttatcgccattctcgcggaaaaacttccccccgctcagcgagaccgcgcgcgcgtcaccggcctgctgctggcaatggtaatgcgtcttctgctgctggcgtcaatctcctggctggtaacgctcaccaaaccgctgattacctggcacgatctgagctttagcgctcgcgatctgatcatgctgtttggcggtttattcctgcttttcaaagccaccgttgagcttaatgaacggctggaggggaaggacagcaataatcccactcagcgcaaaggcgcgaaattctggggagttgtcgcgcaaatcgtggtgctggacgctatcttctccctcgactcggttattaccgcggtcggcatggttgaccatctggcggtgatgatggcggcggtgatcattgccatcagcctgatgctgatggccagtaaagccctgacccgcttcgttaacagtcatccaaccatcgtcattctctgtctcagcttcctgttgatgattggttttagcctgattgccgaaggcttcggcttccctattccgaaaggctacctgtacgcagcgattggcttctcggtcatgatcgagtcctttaatcagctggcgatttttaaccgccatcgttttctttcggccaacctgacgctgcgtcagagaaccactgaagcggtgatgagcctgttgagcggccgcaaggacaatagcgagctggatagcgataccgcctcgctggttgccgaccgtgacgataacccgctgtttaatcctcaggaacggcggatgattgagcgggttctcaatctcaatcagcgcaccgtcagcagcataatgacctcgcgccatgatattgaacatattgacctcagcgctccggaagaagagattcgcgccttactcgacaaaaatcagcatacccgcctggtggtaaccggcggcaatgatgacgaagatatgctcggcgtcgtgcacgtgatcgatcttctgcaacaatcgctgcgtaatgaaccgctcgatctgcaggccctgatccgtcagccgctggtgttcccggaaacgctgccgctgcttcctgcgctggagcagttccgtaaagcccgaacccattttgcctttgtggtcgatgagttcggttccgtagaggggatagtaacgctcagcgacgtgatggagaccatcgccggtaatctgcctaatgaagtggaagagatagacgctcgccatgatattcacaaaaacagtgacgatagctggacggttaatggacatatgccgctggaagatttggtccagtacgtgcccctgccgctggatgacaagcgggaataccataccgtcgccggtctgctgatggagtatctgcagcatgttccgcaggaaggtgaagaggtgaatattgacggttacgttctgcgcacgctgcaggtagagagccatcgcgtgcaaaaagtgttgattgtgccgccggcgcaggaagaagatgaactggactatgaagtgtag

SEQ ID NO: 254532 - DNA, 1848 bp, Klebsiella pneumoniae
atgagacgaattctgaccacgctgatgatcttactggcggttgttgtcgccggtcttaccgcgctggtattgctggtcaaccccaacgattttcgcgcctatatggtgaaagaggtagcggatcgcagcggctatcagctcgaactcgatggtccgctgcgctggcacgtctggccgcagctcagcattctttcaggccgcatgaagctgaccgcgccgggcgcggaggagccggttatccgcgcggataacatgcgcctcgacgtcgggctgctgccgctgctttctcatcagctgcaggtcaagcaggtgatgctgaaaggcgcggtgatccaactgacctcaaaaaccgaagccgtacgtagccagagcgcgccggttgtcccgcacgataacacgctgcctcaggtgccggaggatcgcggctggtcgtatgatgtcgaaaaactgcagattgccgacagcgtgctcttcttccagcatgaagatggcgaacaggttacggtgcgcgatatccgtctgcagatggagcaggatgacagccatcgcgcgacggtcgatttttctggtcgggtgaaccgcgaccagcgggatttggcgctctccttctccgcccgggtgcagggcggcgactatcctcactctttgaaggctgatttttcacagctcaactggcagcttcgcggggcagaactcccgccggaagggatgagcggccaggccagcctgcaggcgagctggctggaagatgccaaaaagctcagcttcgataacctgaacgtaacggcaaacggcagcacgattaccggcagcggcagcgttgtgctgggcgatcggcctgactggacgcttaaccttcatgcgggcacgctgaatctcgatagcctgctttcgcgtggcgctgcagccagcaataatggcgtcaaccagcaaggtcaaagccagacccggcagctccgcccggtgattgccgataacgattttcagcgggactacagctcactgcgcggttttaacgcgcggatgaccctggcggcggaccagctgcagtggcggggcatgaattttactcaggttaaaagcgatatcagcaaccagcaggggctgctgaccatcagccaaatgcaggggaacctggacggcggacagctttcgcttcccggctcgctggacgcgcgcggcgagacgccgcatgcttcgtttaagcctcagctcgacaacgttgagataggcacgattctgcaagcgtttgattactcgattaacctcaccggcaagctttcgctgaccggcgaattttccggcgacaagattgatgctgatgaattccgccgcagctggcaggggcaggcgcaaattcagatgaaggatacgcgcacggaaggacttaacttccagcagctggtgcagcaggccgtcgagcgcagtactaacgttcaggcccaggaaaattacgataacgcgacccgactcgacgacgtcagtaccgagctgcagctgaataacggactggttaccttaaagggtctgcaagggcagtctgaactcatggcattgaccggtcagggcgagcttaacctgctgaaagaggagtgcgatatgcgctttaacgttcgggttctgggcggctggaagggtgagagcaagctcattgaccgtctcaaacagaccgcgatccctctgcgtatttatggcaactggcagacgctgagctacagcctgcaggtggatcagatactgcgtaagcagttgcaggatgaagctaaaaagcggcttaatgaatgggtcgaacgcaataaagatacccaggatggtaaggatgtgaaaaagctgctcgacaaactatga

SEQ ID NO: 254533 - DNA, 582 bp, Klebsiella pneumoniae
atgcgtctgtgcgatcgagatatagaagcctggttggatgagggccggctggccattaatccgcgcccgcccattgagcgtattaacggcgcgacggtcgatgttcggctgggaaataagtttcgcactttccgcggccacacggcgggatttattgacctgagcggccccaaggcggaagtcagcgcggcgctggaccgggtgatgagtgaagagattgttctgccggatggcgaagcgttctttttgcatccgggcgaactggcgctggcggtaacctatgaatcagtgactctgccgccggatctggtcggctggcttgacgggcgctcttcgctggcgcgtctgggcttgatggtgcacgtgaccgcacaccgtatcgatccgggctggtccggctgtatcgttcttgagttctataattcaggtaagctgccgctggcgctgcgtccagggatgcttatcggggcgttaagctttgagcctttatccgggccggctctacgtccttataaccgccgcgaagacgcgaaatatcgcgatcagcagggcgcggtagcgagtcgaatcgacaaggattga

SEQ ID NO: 254534 - DNA, 642 bp, Klebsiella pneumoniae
atgactgatacgtctcatcagtgcgtcattataggcatcgccggcgcatcggcttcgggcaaaagccttatcgccagtacgctttatcgtgaattacgtgaacaggtcggcgatgaacatatcggcgttattccggaagacagctattacaaggatcaaggtcatctgtcgatggaagagcgggtaaaaaccaactatgaccatccgagctccatggatcatagtctgctgtttcagcatttacagatgttaagaaacggccagccgatagagctgccggtgtatagctacgttgagcatacccgtatgccggaaaccattcatattgaaccgaagaaagtcatcattctggaagggattctgctgctgaccgatgcccgcctgcgcaacgaactcagtttctccatattcgtcgataccccgctggatatctgcctgatgcgccgcatcaagcgcgacgttaacgagcgcgggcggtcaatggattcggtgatggcgcagtaccagaaaacggtgcgcccgatgttcctgcaatttatcgatccttccaaacagtatgccgatattattgtgcctcgcggcggtaagaaccgtatcgccatcgatatactgaaggccaaaatcagtcagttctttgaataa

SEQ ID NO: 254535 - DNA, 849 bp, Klebsiella pneumoniae
atgacgctgctaccctggaatcccccctacgactggcattggatgttcagctttcttggcgctcgtgcggtgcaggggattgaaaccttcggcgacgatggctatcgccgcagctttgcccttaatggctgcgccgggctgattacggtgatgccggatgaggccgcgcagggcatgcgggtgacgctttccgccggactgcagccggtggcggacgagtgcctgatgcgggtggggagattgttggacttatcctgtgacccgcagcaggttgccctgacgctgggggcgctcgcgcggccgaggccggggctgcgtttgccgggctctctcgacccgtttgagcaagcggtacgcgcggtgctgggtcaactggtcagcgtggcgatggcggcaaagctcaccgggaaagtggtggccgccttcggagaaccgctggccgacgcgccgggtttttacctgtttcccggcgcgcagcggctggcgcaggccgacccgctggcgctaaaggcgctgggcatgcccctgcggcgcgcggaggcgctggtacacctggcgcgggcggccatcagcggcgatctcccgctggtggcgccggataatatcgacgccggcatgaagcagctgcagacgctgcccggcatcggccgctggacggccaactatttcgcgctgcgcggctggcaggcgccggatatctttctgccggatgattatctgattaaacagcgtttccctggtatgaccccgacccgtattgcgcgctatgccagccgctggcacccctggcgctcttacgctttactccatatatggtatacggaaggctggtcgccggagccggaatag

SEQ ID NO: 254536 - DNA, 825 bp, Klebsiella pneumoniae
  misc_feature (809)..(818): n is a, c, g, or t
ttgcttttaaattccagttgtcgcagtgccgtcgatccgctaaagtcgccccccttcttcaccggcatggggattttgcaggctatgtatattggttttgactacggtaccgctaactgttcggtcgcggtgatgcgcgaaaatacaccgcagctgctgacgctggaaaacggcagttcactgctgccgtccatgctttgcgcgccgacccgcgaagcggtcagcgagtggctctaccgccatcatgacgtcccgcccaacggtgatgaaaaccaggcgctgctgcgccgcgcgataagcttcaatcgtgaggaagatatcgatgtactcagcaacagcgtacagtttggcctcgcttcgctgcatcagtacgttgacgatccggaagaagtttacttcgtaaagtcgccgaaatcgttcctcggcgccagcgggctcaagccgcagcaggttgcgctgtttgaagatttagtctgcgccatgatgctgcatatcaaactccaggcgcaaacgcagctgccggacgccatcgaccaggcggttatcggacggccgattaacttccaggggctgggcggcgatgacgccaacgcccaggcgcagggaattcttgagcgagcggcaaagcgcgcgggctttcgcgacgtcgtatttcagtttgagccggtcgccgccggtctggatttcgaagcgacgctgagcgaagaaaaacgcgtgctggtcgtcgatatcggcggcgggaccaccgactgttcactgctgttgatggggccgcagtggcgggaaaaagccgatcgccagcaaagccnnnnnnnnnngccatag

SEQ ID NO: 254537 - DNA, 561 bp, Klebsiella pneumoniae
atgccgctgctgggcatgggcggcgatacggaaaaaggtatcgcgctgccgattctgccgtggtggaatgcggtggcgattaacgacgttccggcgcagaccgatttttacagcgccgccaatggtcgtctgcttaacgatttgctgcgcagcgcccgcgatagcgagaaggtcgcgctgctgctgaaggtgtggcgtcagcgtcttagctaccgtctggtgcgtagcgcggaagagagtaaaatcgccctttccgcgcagccgaccgtgacaaccgatctgccgtttatcagcgatgagctggccacggctatcagccagcaggggctggaagccgcgctggatcagccgttaacccgcattatggagcaggttcagctggcgctggataacagcaatgagcagccggatgtgatttacctgaccggtggcagcgctcgctcgccgttgattaaaaaagcgctggcagcccatctgccgggtattccggttgccggcggcgatgattttggctcggtcaccgccggtctggcccgctgggcgcaggtggtatttcgttaa

SEQ ID NO: 254538 - DNA, 1287 bp, Klebsiella pneumoniae
atgacgacgaaatcgctaacgctttctttggatgaacagcagtctattcctttgggtacggtggcgggaacgctgggccacctcggcatggatatccgtccgctggcgtcttcaggcctgtgcagtttcgaccccggctttgctaataccgccggctgcacgtcggctatctcctggatcgataccgagaacagcgttctgctgcaccgcggctatccggtcgatcagctggctcgccagtgtgactttcttgaagtggcctggattctgctgcagggcgatgcgcctgatgaagccagctatcaggtgttcaaaaatacgattacccgccatagcctggtgcacgagcagattgcccggatgtgcggcagcttccgccgcgactcgcatccgatggccttaatgtgcgccctggtcggcacgctggcggcgttttatcacgatgtgctggacgttgaaaacccggagcaccgggctctggccgccacccgtctgctgtcgaaaatgccgacgctggcggcgatgagctacaagttctctattgagcaaccggcgcagtatccacgcaacgatctctcttatgcgggcaatttcctgcatatgctgtttgccatcccggcggaaccgtaccagctgaatccggtgattgaacaggcgatgaaccagatcctggtgctgcacgccgatcacggccagtgcgcatcaaccaccaccgttcgggcggcgggctcttccggggcgaacctgtttgcctgtatcgccgcagggctcgcttcgctgtgggggccgacccacggcggggctaatgaagccagtatgcggatgctggaggagattaaaaccgttgatcaaatccctgcgttcctgagcaaagcgaaacgcgacccgcaggcgttacgtcgtctcggattcggtaactctcgctaccgtaacctcgacccgcgagccgctattttgcgtgaaacctgtcaccgggtgctggaggaactggggatgtgcgatatgccattgcaggtagcgatggccctcgaagaggtggcgctgaccgacccgtacttcgtggaaaatggcctgtcgccgagcgttgatttctatacagcggtgatcctcaaagcgatggggctgccttcatccatgtttgtggtgatcaccgccgttggcagaacgctcggctgggtggcgcactggaacgaaatgcacgaagcgccgctgaatatttatcgcccgcggcagatttataccggtgaaaagaggcgggattacgtttcgcggcgtgaagggcgctga

SEQ ID NO: 254539 - DNA, 1893 bp, Klebsiella pneumoniae
atggccctgcagatgtgtacgccggcgcgcgcggaagtccgtcagctgggtatcgatattcccgttgactggtacgccgacgccagcggccagatgtccctcgacgcctttcttgcgctaccgcaagaggcgctaaaaacggcgtcgctgatcccgtcgtttgggtattcaaaaaaaactttctggctgcgcacgtcactcccggcggcttatttttccggcgagcagcgctggctgcagcttggcccaccgtttatcgatcgtttaaccgtctattatcgcccctacggcagcgatagcccgtggaaacaaaaagagtttggcgaccatgccccagcccgcgatagcgacctcgactaccgcgaaagcgtgctgattttagcgcccccgcccacggcggcaggctacgaaatggtgttccgtctgcagagcagcagcaccctgatcctgctggcgacgctctcatccccgcaggaattcgtccgttcggccaccctcgataccgctttctggagtttctatttcggtctggcggtcattgccagcggcatcgccctgtggcttgccgttgcactgcgccgacgtctgctgtgggggatctgcctgttttcgctgaactatccgctcgtcgcggccctgcatggctacccggaatggttattcggcgacgcccttctgccggttcaggattacatgattagctgcctgtcgctggtaagctatgccaccgcgctgtggctgcatagcgaggtcttcgatctgaagaagaacatgccgcggctgcatcaactgctgctggcggcgatcggcttaaacattgcgctgcaaatcagcattccgctgggattttacggccgggcaatgcaaattgaagcggggatattttttatcgcctccccggtgctgttgatcacctcatggatgctgtggcggcgtaaagcggttgatatgaatacgctgctgctcgggctgctgccgccggtttacgtggtgtcagccgggctggccctgctctcggtacacggcgtgattccgtttcataccagggtttattccacctggcagtatgcgctgatcatccatatcgtcacggtcctgatcatcgccgtactgcgggtgcgggcggaaaaccgtaccctgatgcgcaagcagcagctggcgagagagttacaaattgaacgcgaggccagtttccaccagcgccagtttatggggatggtggcgcatgagttcagaacgccgctggccatcctcgaggcggcgctggaaaatctgcgcctgtgccccactgtgtccacgcagagcgcgcgcctcgatcgtatgcagcgagcgaccacccgcctggtgcagctcaccgataattgcctcgccgatgcccggctttcctccagagacctgcaagccgaccggcagaatgcggagctgctgccggttatctataccgccgccacggtagtggatctgtcgctgaatcattatttacatgtcatctgcgaagggcaaactgtcgggccgcaatcgccttcaccggtgctgtttattgatagcgggctgctgtgtattgcgatcgctaatctgctcgataattcagtcaaatattcggcatcaggtgaaataagaatcgagatttatcgcctgcaaaaagggtttgaaatacgcattggcgatcgcggccccggcattgcgcctgaacaggttgagcatatttttgatcgctatcgacgcggcgaaacccatacgaccacgccagccggcaccggcctgggtctgtacgtcgcccgacaaatcatacaggcccacgggggggagctgtgcctggcgaagaataccgctgacgggtgcgaatttgcgctcacactgccgctggatggacagcagaaggacaaatcatga

SEQ ID NO: 254540 - DNA, 699 bp, Klebsiella pneumoniae
atgacattacgcgtcgctatcgttgaagatagcgctgatttactcgacgaactgctggcctttttacgccatcgcggcttcgatgcatggggcgtgcgcagcgctgaagccttctggcggcagctgcaccgcgatccggttgatatcgtgctcatcgacatcggtttaccgggagaagacggatttagcgtgctggattatctgcatgaaattggccatttcggactggtcgtcatcaccgccagaggccatgagcaggatcgcctgcaggcgctgaacgccggcgccgacctgtatctcatcaagccggtcaacttttccgacctcgcggagagcattcacgcgcttggcgcccgtctccgccagcaatccgcgccccagcccaccgcgccgacgatatcagcggaacggtcagcctcttccacctggatattacaaagcgaacagttgattgcgccatcggggctgatcctgccgctaacgcagcaggagtaccgtctgctggaactgttaatgcgcaaccgcaatgaagtgtgcagcaaagttgacctgcacgcctctctgttcaccgatgaaggcgaaccggaactgcaccggatcgatgtcgtcgtcagccgcttgcgccacaaggcccgccttcagggcatggccctgccgattcgcgctatttttggcaaaggtctggcgtttctttcctga

SEQ ID NO: 254541 - DNA, 618 bp, Klebsiella pneumoniae
atgaaaaaaataaacatcgcaatcaataccagcaacacttttctgcggcaatcgctggcttccatggtcaatgagctcacccgccgcgacggtcatctgcacgtcagcttttcgtataagaaaaatgatttttttgataaggatattattatcgccgaggttctccccggtgaaatctacctgtgtaataccagtctaaaaaatcgcaaatcagatagctcagttattatactgcacagctacgaccagctcccggagcaggaactgattgttaactgcctgaaaggggttattttcgtgtcgataaaattagttaatattgacaggatgttggccatccttgcccaggagctaagaaagtgcgaaggtctggttctggcccggcgggccgactcagcgatagtctgcagcaactgcccgcacaaaatgctgtcaaaatcgcaggttgccgtcgcctccggaattattcatggctttgatatcagtaaaatctccgccctgcacaaagtcacgcccaaaaccatcacctggcacaaaagtaaaatcatggaaaaatatcgcctcaataaccattatgactttttccagtttattaatttgttaaaagagcgctggtaa

SEQ ID NO: 254542 - DNA, 1275 bp, Klebsiella pneumoniae
gtggcaagtgcaaacaaactcacgctgttcatcgttatctttatgctgttggggatcctctccggcgcggccattcacgcatacgccgcgcaaacgaccataaccgcatggtctgaaaatattacgctgctgaccgacgtgttcctgcgcctgattaaaatggtgattgcgccattagtcttcagtacgctcaccgtcggcattatgcggcttggcgaaacggctaccattgggcgggtcggcggtaaagccatggtgtggtttgttacctcttcgattctctccattctggttgggctggtgattgttacccttgagcaccccggcgccgggttgaatctggcaattccgaaagagtcggtcgataccggcctggcggtgagcgggatgagcctgaaaggctttctgacgcatactattccgaccagtattaccgaagcgatggccaacaacgaaattctgcaaatcgtggtgttctcaatgttcttcggcattgccggagcgtcgctgggggagaaattcaacgctccgctggtggcggccctgaacgtggtttcccatattatgctgaaggtcaccgggtacgtgatgtacgtggcaccgctggcgatttttgccgccatctcttcggttatcgcctcgcaggggctggggatcctgcttaactatgcttcgttcatcggcggttactacgttgcagtgctgctgaccagcatggtgctgctggcggtgggatatatggtgctgaaaaaagaggtttttcgcctgcttaatatgctgaaagatccggtactggtggcgtttaccaccagcagctcagaagctgcctatccgaagacccttgagcgcctcgtggagttcggctgctcgcgtaatatcgcgtcgttcgtgctgcccatcggttactcctttaacctcgtcggctcgatggtctactgctcgtttgccgcgatgtttatcgctcaggcctacaatattcatctgagctttagcgagatcaccgtgatgatgctgaccctgatgctggcatcaaagggaatcgccggggtgccgcgctcggcgctggtggtgctggccgcgaccatccccagcttcaatattccggtggcgggtattttgctgctgatgggtattgaccattttctcgatatggggcgttccgcgattaacgtgctggggaatgggatcgcgacggcgatgctgtcaaaaaatgaaggtctgttgcaggaagaggtcgcggaagaagaagccgcggctcagcaggtcgaggcctga

SEQ ID NO: 254543 - DNA, 1119 bp, Klebsiella pneumoniae
atgaaaattaaacacgatacattacctcaacatgcgctcggtgggcagcggcaattaagccattttcatttcggcgcgcccggcaccggcgagaaagtctatctgcaggcggggctgcacgccgatgaaattccgggcatgctggttctgcattatcttaaaagattactcagccaggcggaacgacggggcgagctgcgcggtgaaattattatcgtgccggtagccaatccgccggggctggctcagctgctgcttaacagcggcattggccgtttcgatctggcgagcgggcgcaatttcaaccgcgactttcccgatctggcggagctggcgcagccctggctacccgcggaatcgcccgctacgcgcgccgaatatctccagcaggtgcgcgatgccatgcagaaggcgctggcggcgcttcccgtggcaagcgaggttcaggccctgcgtcaacatctgctgagcctcgcctgcgatgccgatctggtgctcgatctccattgcgatgaccaggcgattttgcacctttacgccgatccggcctggcaacgcgaggcgaacgtactggcggcttttctcggtattggcgccgtgctgctgtcccaggagagcgggggcaactcgtttgatgaggcctgcggcctgccgtggcagcgtttgagcgcgctaaacccggcgtggggcccgcagcagcccggctgtatggcggtgaccgtcgagctgcgcggccagcacgaggtgaatcacgctaccgcctgcgacgacgccgaacgtatttaccgttatctgcagtaccgcggcgtgctggcgggcgacaagcctgcggtgccgcagcaggaaacggtgatgctgccgtttgctgccggagagattgtcaccgcgccggcgaccggcatcctggtgccgctaaaacagccgggcgaatgggtcggcgccgacgatgtcgtcgcggaaatcatcgacccgctgaccgatatggtcaaagcggtgcggccgacatcgggcgggctgatttatgccagccggcgggcgccgtttgtcacgctgggggcggaaataatgaaaatcgccggcgagcagccattcagcggcggcggcgggctggcgatgtaa

SEQ ID NO: 254544 - DNA, 456 bp, Klebsiella pneumoniae
gtggaaaagaaaacccggcttgaccgtatcgatcataagatccttgaaatcctgcgccgggatggccgcatttcttatcagaagctctcggagcaggtaaatctcaccgcgcgtccatgtctggaacgcgtgcgcggcctcgagcgtgacggcatcattcgcggctacagcgccattatcgaactgcccgagccggagcatgcgtttgtggtgcaggcgcaaatcgccctggccgaccacggccgctcgcagccggtatttgaacaggagatgcgccagacgcccgaagtgctggactgctggctggtgagcggcagcttcgactttctggtacgcatcggctgtcgcagcatggcgcactattgccagctggcggatagctggctgaccagtaaaaagtttcacgttgataaaatcgttaccctgaccgaactccaggcgattaagcgctcctga

SEQ ID NO: 254545 - DNA, 726 bp, Klebsiella pneumoniae
atgaatctgcaaacctttctcgatgcgatcccgagctttatctggagcgatggcaacggcgccgccagcgggttggcgataacggcggagctgtttttgctctccatcgttcccgggatggcgctggcgattgcgatggcggtggggcaggtgtacggcccgcgcgcgctggcgctgcccatccgtggttttacgtattttttccgcagcacgccgctctatctgcaactgatgctgatttactacggcctgtcgcagttcgatattgtgcagacgggttggatgaacgagcagccgttttggctgctgtttcgcgatgcgactttctgcgccacgctggcgctggtgctgaacacctccgcttacgttgcggagctgctggcggggatgatgctgacctttccccgtcaggagtgggttgccggagaagcctatgggatggggaaatggcagattattcgtcgtctggtgctgcccgcgacgctcagacgcgggatcccggcgctgaataatgaaatggtctttttactccacgccacctcgctggccagcacggtaaccctgctggatattaccggcgtggcccgcgcgttctacgccatgacctggtcgccgtttattccgtttctgatggccgcggcgctctatctcctgtgcacctttctgctgattttcgccttttcccgcgccgaacggcgctggctggcgtttatccgccgcggctaa

SEQ ID NO: 254546 - DNA, 693 bp, Klebsiella pneumoniae
atggtcgcagactatttacccttactgttacgcggcgcggcgctttcgctgtgcgtgatgctctgctcattgctggtcgcgctgctgctgggcctgatcaactcgctggttaaactctttggcccgccgtggctgcgcctgttttccaccgcctacaccaccctggtacgcggtattcccgagctggtgattatgctactgctgtttttcggcggcgagatgctggttaacctgctgctggcagcggtggggctggggccggtgcgcttcaatacctttttttccggcgtgctggcgattggctttgtgttcggcgcctattacaccgagacctttcgcggcgcatttctgaccgtcgatcgcgggcaaaccgaagccgcgcaggcctacggaatgcgcccatggacggtatttcgccgggtgatgctgccgcagatgctgagcttcgcgattcccgggatcaataataactggctggggctgatgaaagcgtcggcgctggtgtcgatcctgggcctggaggacatggtatggctggccgagcaggccgggcgcgccacgcaaaaaccgttcctcttctatttcctggtttccctgatttatatggtcattaccgcgctctccagctggttgttcagccgcctggcgaagcgttatgcgctgcgttcttccacggcgggggccgcgctatga

SEQ ID NO: 254547 - DNA, 774 bp, Klebsiella pneumoniae
atgaaactacgccttgccgcactactggcctgcatggcgctcagcgcgccgctggccgcccagcagtttgataccattagctttggcgtcgatggcggctatccgccgtttgacgtactggcccccagcggtgaaattaccggttttgatattgatatcgccaacgcgctgtgcacccagctaaaagccaaatgcgttttcgttaagcagccgttcgaaagcatgattgccgctctcaacgcgcataagttcgatgccattatcgcttcgctcaatatgaccgatgcgcgtaaaaaggaagtggacttcaccgaccgctactaccgcagcgcagcgcagctggtggcgcgcaaaggtagcccgctgctgcctgaggtcgccagcctgaaaggcaagaccgtcggcgtccagaccggttccacccatgaagcgtttgcgaaggctaactgggccaaccacggcgtgaagatcgtcagctacgcgaatcaggataacgtctacctcgacctgctctccggacgtattgacgccgctttgcaggataatatccaggcggcgaccggctttattgataccccgcgcgggcagaaattcgcttttgccggtccggtcattcaggacggcggtatctcttccgatgtggggattgcggtcaataaagataatccggcgctgcgggatgccctgaacggcgctatcaaggctattcgcgccgatggcacctacgacgctatccagaaaaaatactttagcattgatatttatggcaaataa

SEQ ID NO: 254548 - DNA, 762 bp, Klebsiella pneumoniae
atgcattttacccaagctatcgcccgtctaccggccgccacctgcggcgcaggacaaactaccgcccaactgggcgcgccggatatcgctgccaccacgcgccagtttctcgcctatatagagacccttctccagctcggcctgaaggtcaccgtgcttcctgccgcggcggaatatcccgatgcgcactttgttgaagataccgcggtggtcatgccggaactggcggtgatgactcatccgggcgcgccgagccgtcagggcgaagtcgataccattgcgccggtgctggcggggtttcgtccactggtgcagatgagcgaaagcggacatatggacggcggcgacgtgctgctggtgggcaaacgattttttatcggcctgacggcgcgtaccgatgagcaggggatccgcgaatttgccgccgccgttgagccgcacggttacacggtgacggcgattgacgtgagcgccggtctgcatctgaaatcgatcgtcaactacgtgggccgcaatacgctgctgctgacggaaggctacgttaaccatccggcgtttagcggcttcaaccgtatcgtgatcccggaggaagaggcctacgccggaaatacgctgtggatcaacgataccttaattacgccgcagggctacccctgtaccctgggcgaaatcagcaagctgggaatgcctgtcgtgcagctcgacaccagcgaatttaagaaaatggatggcggcctgacctgcctctcactgcgtttttaa

SEQ ID NO: 254549 - DNA, 1254 bp, Klebsiella pneumoniae
atgaaaggtagcaataaaagccgttgggcagccgtgctggtggtagcgatcgtcgcgggcgccgcgtactggttctggcagggtcgcgaagcggcaaatagcggcgcgccgacggcgacaggcgcgcgtcagcagggccccggaggcggacggcccggtcgttttggcgccgccctcgcgccggtacaggcggcaaccgcgaccagcgaagcggtgccgcgctacctttccggcctcggcaccgtgacggcggcgaataccgtcaccgtgcgcagccgcgtcgacggccagcttctggcgatccactttaccgaaggccagcaggtcaaagcgggcgatctgctcgcggaaatcgatcccagccagtttaaagtcgccctcgcccaggccgaggggcaactggccaaagatcgggcgaccctcgccaacgcccgccgcgatctggcgcgctaccagcagctggtgaaaaccaatctggtgtcgcgccaggagctggatacccagcagtcgctggtcagcgaaacccagggcacgattaaggcggacgaagccgctgtcgccagcgcccagctgcagctgaactggagccgcatcaccgcgccgattgacggccgggtcggcttaaaacaggtggatatcggcaaccagatctccagcggcgacaccaccggcattgtggtgctgacgcaaaaccaccctattgatgtggtctttacgctgccggaaaaccaaatcgccaccgtcatacaggcgcaaaaggcggggaaaaagctggcggtcgaagcctgggaccgcaccaataaacagaaaatcagcgaaggctcgctgctgagcctcgataaccagattgacgccaccaccggcaccatcaagctgaaagcgcgctttacaaaccttgatgacgccctgttccccaatcaattcgtcaacgcccgtatgctggtcgataccgagcaaaacgcggtagtgatcccaaccgccgcgctgcaaatgggtaacgaaggtcatttcgtctgggtactgaacgacgagaataaggtcagcaagcacaccgtcacgccgggtattcaggacagtctgaaagtggtgattaacgccggtctttccgctggcgatcgcgtggtcactgacgggatcgatcgtctgacggaaggcgcaaaagttgaggtcgtcgaagcccacgatgcggcaaccgccgccgagccggaaaaagccaccagccgcgaatacggtaaaaaaggagcgcgctcctga

SEQ ID NO: 254550 - DNA, 1593 bp, Klebsiella pneumoniae; identical to SEQ ID NO: 203096

SEQ ID NO: 254551 - DNA, 2022 bp, Klebsiella pneumoniae; identical to SEQ ID NO: 203095

SEQ ID NO: 254552 - DNA, 828 bp, Klebsiella pneumoniae; identical to SEQ ID NO: 203094

SEQ ID NO: 254553 - DNA, 1131 bp, Klebsiella pneumoniae; identical to SEQ ID NO: 203093

SEQ ID NO: 254554 - DNA, 1344 bp, Klebsiella pneumoniae; identical to SEQ ID NO: 203092

SEQ ID NO: 254555 - DNA, 867 bp, Klebsiella pneumoniae; identical to SEQ ID NO: 203091

SEQ ID NO: 254556 - DNA, 1644 bp, Klebsiella pneumoniae; identical to SEQ ID NO: 203090

SEQ ID NO: 254557 - DNA, 504 bp, Klebsiella pneumoniae; identical to SEQ ID NO: 203089

SEQ ID NO: 254558 - DNA, 990 bp, Klebsiella pneumoniae; identical to SEQ ID NO: 203088

SEQ ID NO: 254559 - DNA, 969 bp, Klebsiella pneumoniae; identical to SEQ ID NO: 172776

SEQ ID NO: 254560 - DNA, 555 bp, Klebsiella pneumoniae; identical to SEQ ID NO: 203085

SEQ ID NO: 254561 - DNA, 1488 bp, Klebsiella pneumoniae; identical to SEQ ID NO: 203084

SEQ ID NO: 254562 - DNA, 1446 bp, Klebsiella pneumoniae
atgggctcccccgggggcgaagaggacacgaaaatgacaccgtttatgaccgaagatttcctgcttgataccgagtttgcccgccgtctgtaccacgattacgcgaaagaccagccgattttcgactaccattgccacctgccgccgcagcagattgcggaaaattaccgctttaaaaatctgtatgacatctggctaaaaggcgatcactataaatggcgtgcgatgcgtaccaacggcgtagccgaacgtctgtgcaccggtgatgcttccgatcgcgagaaatttgacgcctgggcggccaccgtaccgcataccatcggtaacccgttataccactggacgcatcttgagctgcgtcgtccttttggtattacaggtaaagtcctctctccggctacggcggacgaaatctggaatcagtgcaacgatctgctggcccaggagagcttctccgcccgcggcatcatgcagcagatgaatgtgaaaatggtcggcaccaccgacgatccggtcgattctctcgagcatcacgcttccgtcgctaaagacagctccttcaccgtgaaagtgctgccaagctggcgtccggacaaagccttcaatatcgaacaggcgaccttcaacgactacatggcgaagctgggcgaagtgtctgacactgatatccgccgctttgccgatctccagtccgcgctgactaaacgtctggatcacttcgccgctcacggttgtaaagtttctgaccatgcgctggacgtggtgctgtttgccgaagccaacgaaagcgaactggatagcatcctggcgcgtcgtctggcgggcgaggcccttagcgagcatgaggttgcgcagttcaagacggcggttctggttttcctcggcgcggaatacgcccgtcgcggctgggtacagcagtatcacatcggcgcgctgcgcaacaacaacctgcgccagttcaaactgttagggccggatgtgggttttgactccatcaacgaccgtccgatggcggaagagctgtccaaactgctcagcaaacagaacgaagaaaacctgctgccgaaaactatcctctactgcctgaacccgcgcgacaacgaagtgttgggcaccatgatcggcaacttccagggggaaggtatgccgggcaagatgcagttcggttccggctggtggtttaacgatcagaaagacggtatggaacgtcagatgacccagctggcgcagcttggcctgctgagccgctttgtcgggatgctgaccgatagccgcagcttcctctcctacacccgtcatgaatatttccgtcgcatcctgtgccagatgattggtcgctgggttgaagcgggagaagccccggcggacattcagctgctgggcgagatggtgaaaaatatttgctttaacaatgcgcgtgactacttcgccattgaactgaactaa

SEQ ID NO: 254563 - DNA, 1302 bp, Klebsiella pneumoniae; identical to SEQ ID NO: 203082

SEQ ID NO: 254564 - DNA, 777 bp, Klebsiella pneumoniae; identical to SEQ ID NO: 203081

SEQ ID NO: 254565 - DNA, 663 bp, Klebsiella pneumoniae; identical to SEQ ID NO: 191533

SEQ ID NO: 254566 - DNA, 384 bp, Klebsiella pneumoniae; identical to SEQ ID NO: 203079

SEQ ID NO: 254567 - DNA, 369 bp, Klebsiella pneumoniae; identical to SEQ ID NO: 191535

SEQ ID NO: 254568 - DNA, 306 bp, Klebsiella pneumoniae; identical to SEQ ID NO: 203077

SEQ ID NO: 254569 - DNA, 399 bp, Klebsiella pneumoniae; identical to SEQ ID NO: 203076

SEQ ID NO: 254570 - DNA, 300 bp, Klebsiella pneumoniae; identical to SEQ ID NO: 203075

SEQ ID NO: 254571 - DNA, 393 bp, Klebsiella pneumoniae; identical to SEQ ID NO: 191539

SEQ ID NO: 254572 - DNA, 987 bp, Klebsiella pneumoniae; identical to SEQ ID NO: 203073

SEQ ID NO: 254573 - DNA, 369 bp, Klebsiella pneumoniae; identical to SEQ ID NO: 203072

SEQ ID NO: 254574 - DNA, 897 bp, Klebsiella pneumoniae; identical to SEQ ID NO: 203071

SEQ ID NO: 254575 - DNA, 702 bp, Klebsiella pneumoniae; identical to SEQ ID NO: 203070

SEQ ID NO: 254576 - DNA, 162 bp, Klebsiella pneumoniae; identical to SEQ ID NO: 203069

SEQ ID NO: 254577 - DNA, 411 bp, Klebsiella pneumoniae; identical to SEQ ID NO: 203068

SEQ ID NO: 254578 - DNA, 705 bp, Klebsiella pneumoniae
atgcggctggttcagctctctcatcattccatcgccttcccctccccggaaggcgctttgcgcgaacctaatggtctgttagcgctgggcggcgatcttagcccggcgcggttactgatggcctatcagcgcggtatttttccatggttttcgcccggtgacccaattctctggtggtcccccgacccgcgagcggtactgtggccggagaaattccatctcagccgcagtatgaagcgttttcatcagcgctccccgtatcgcgtaacgttgaatcacgccttcggtcaggttattgaaggctgcgccgatcatcgtgatgaaggaacatggataacgcagggtattgttcaggcataccatcagctacatgagctggggcacgctcattctgttgaagtgtggcagggagaggtattagtgggtggcatgtacggtgttgcacagggggcgctgttttgcggagaatcaatgttcagccgagccgaaaatgcctccaaaaccgcactgttggtctttagccaggcgtttatgcacgatggtggaaaattaatcgattgccaggtgctaaacaagcatacggcttcgttgggcgcagtggaaattcctcgccgcgattatctcgactatctctccgtactgcggacgtatcgtctgccggagcggttctgggtgccaagggtgctatttgcaggagaagcataa

SEQ ID NO: 254579 - DNA, 1722 bp, Klebsiella pneumoniae
atgcgcgcattatggccttacctggcgctgtacaaacgacacaaatggctgctgctgctcggtatcgtgctggcgatcgttacgctgctggccagcattggcttattaacgttatccggctggttcctgtcggcatcggccgttgttggcgtagcgggcatctacagctttaactatatgttgccagccgcgggcgtacgcggcgcggcgatcattcgcaccgctggccgttattttgagcgtctggtcagccatgacgcaacctttcgcgtcctgcagcatctgcgggtatttacctccagcaaactgctaccgctctcccccgccgggctggcgcgttttcgtcagggcgaactgcttaaccgggtggttgcagatgtcgataccctggatcatctctatctgcgcgtcatatcgccgctggtaggcgcgctggtggtaattctcgtcgtcaccgtggggctgagcgtactggacgttactctggctctgaccctgggcggtattatgctacttaccctgctggtgatgccgctgctgttctatcgcgccggtaagcccgccggtgaaagcatgactcatttccgcgggcagtaccgccagcagttgacctcatggctgcaggggcaggcggagctgatgctgttcaacgccagcgatcgttaccggcagcaaatggaaaaaaccgaagcgcattggctggatgcgcagcgtcggcaggcggaactgacggccctctcccaggcgctgatgctgctgattggcggagtggcggttattactatgctgtggctcgcctccgcaggcgttggcggcgatactcaaccgggcgcgctgatcgcgttgtttgtcttctgcgcgctggcggcgtttgaagcgctggcgccggtaaccggcgcatttcagcatctggggcaggtgatcgcttccgcaaagcgcattacgcaaattaccgaacaagagccggaagtcgccttcactcagggcgaaaaccaaaagctggatcgcgtttcgttaagcttaaatcaggttaccttcagctatccgcagcagccctcccctgcgctggagaaaatttcattgcagatcgaggccggagagcatatcgccatcctgggacgaacaggctgcggtaaatcgacgctgttacagctgctgacccgtgcctgggatccggcggagggagagatattactcaatgatcagccgctgacgcagcttaacgaagcgacgttgcgccaggcgatgagcgtcgtgccacagcgcgtacatctgttcagcgcgaccctgcgcgacaacctgctgctggcttccccgggggccagcgatgcccggcttgcagaaacgcttgaacgcgtcggtttagccaggttgctggaagatagcggcctgaatagctggctgggagaaggtggtcgtcagctttccggcggcgagctgcgcaggctggctatcgctcgcgccctgcttcacgatgcgccgctgatgctgctggacgaacctactgaaggccttgatgcgacgaccgaaagccaaatacttgatttacttgctgaagttatgcgtgaaaaaaccgtgctgatggtaactcatcgtctgcgcgggctggcgcggtttaatcagataatagtcatggacaacggaaagattattgagcaaggtagtcacgcagaattgctggctgaacaggggcgttactaccagtttaagcagcgtctgtag

SEQ ID NO: 254580 - DNA, 1767 bp, Klebsiella pneumoniae
atgaataaaacccgtcaacaagagttaacccgttggttaaaagatcaaagcattatctcccgtcgctggttgatgatttcccgtctcctgggcgtcattagcggcctgctcatcgttgctcaggcctggttcctggcgcggatccttcatcgcatgattatggaaaatattcccgccacggcgctgctgctgccttttgtgttactggtgctggtctttgtgctgcgcgcctgggttgtctggctgcgtgaaagagtgggttttcaggcgggccaacatatccgcgttgagattcgccgccaggttctggatcgcttacagcaggcggggcctgcctggatacaggggaaacccgcgggtagctgggccacgctgatccttgagcagatcgacgatatgcatgactactatgctcgctatttaccgcagatgacgctggcggccagcattcccttactgatcgtcatcactattttccccatcaactgggccgcagcgctgattctgttgggcacagcgccgcttattcctctgtttatggcgctggttggcatgggagcggccgatgccaaccgacgtaactttctcgctctggcgcgcttaagcggccattttctcgaccgcctgcgcggtatggagacgctgagaatttttcatcgcggtcaagcagagacggaaaacatacgcgaggcttctcaggatttccgtcagcgaacaatggaagtgctgcgtctggcgtttctctcctccggcgtgctggaatttttcacctcgctctcgattgcgctggtagccgtttactttggcttttcctatctgggagagctcaactttggccactacggcgccggtgtgacgttgatggccggtttcctcgcgctgattctggcccccgagtttttccagccgctgcgcgatttaggcaccttttatcatgcgaaagcgcaggctattggcgccgcagatagcctgaagacctttatggaaacgccgctggcgcagccagaacgtggggaaaaagtattaagcgataatgaaatgattagcatcgaagcccgcgacctgctgatcaaatcccctgagggtaaagtgctggccgggccgctgaatttttccctacgcgctggcgagcgcgtggtgctggttgggcaaagcggctccggtaaaagctcgctattgaatacgctaacgggttttcttccctatgagggctcgctcaaggtcaatggcgttgagttgaagagtctggatgccgaccgctggcgccgtctcctgagctgggtagggcaaaatccgcaactgccggcggcaacgctgcgtgacaacgtcctgctgtcatgccctgatgccaccgaagcacagctacagcttgcgctggataaagcgtgggtcagcgagttcctctcccttctgccgcagggtattaacacgcctgtcggcgatcaggccggtcgcctgtcggtcgggcaggctcagcgtgtcgccgtcgcgcgggcgctgttggtaccctgccgcctgctgctgctggacgaacccgcagccagcctggatgcccatagtgagcagcgcgtgatgcaggcgctgaccaatgcatcaacgcagcaaaccacgctaatggttacccaccagctggaaggccttgcgaactgggatgcaatctgggtgatgcaggatggtcaaattgttgaacaaggcagttattcgcaactggcgaccgcaggcggcccttttgcaaccctgcttgctcatcgtcaggaggagatttaa

SEQ ID NO: 254581 - DNA, 969 bp, Klebsiella pneumoniae
atgggcacggccaaacacagtaaactgcttattcttggttctggacctgcgggatataccgctgcggtctacgcagcgcgcgcaaatctgcagccggtactgattaccggaatggaaaaaggcggtcaactgaccaccaccactgaagtggaaaactggccaggcgatcctaacgatctgaccggaccgctgctgatggagcgcatgcacgaacatgccaccaagtttgagaccgaaattattttcgatcatatcaacagcgtcgatctacaaaaccgtccgttccgcctgaccggcgacagcggtgaatacacctgtgacgccctgattatcgccaccggcgcatcagcgcgttatctggggcttccatcagaagaggcatttaaaggccgcggcgtttctgcctgcgccacctgcgacggtttcttctatcgtaaccagaaagtcgccgtcatcggcggcggcaatacggctgttgaagaggcgctgtatctgtccaacatcgcttccgaagtccatctgatccaccgtcgtgacggcttccgcgcggaaaaaatcctcatcaaacgcctgatggataaagtggaaagcggcaacatcgtgctgcataccaaccgcaccctcgaagaagtaaccggcgatcagatgggcgtgagcggcctgcgcttgcgcgatacgcagaatgctgacaatgttgaatccctggaggttgccgggctgttcgttgctatcgggcatagcccgaacacggcgatttttgccggtcaacttgagctggaaaacggctacattaaagttcagtccggcatccacggcaacgccacccagaccagcattcctggcgtcttcgctgcgggtgacgtgatggaccatatctatcgtcaggcgattacctctgccggaacaggctgtatggctgcgctggatgcagagcgttatctggatggtttagccgacgcttgcaaataa

SEQ ID NO: 254582 - DNA, 495 bp, Klebsiella pneumoniae; identical to SEQ ID NO: 173885

SEQ ID NO: 254583 - DNA, 4095 bp, Klebsiella pneumoniae
ttgagccaggaatacaccgaagacaaagaagtcaagttcacaaagctgagtagcgggcgccgtctccttgaggcattactcattctttgctccctttttgccatctggttgatggcggccttactcagctttaatccctcggatcctagctggtcgcaaacggcgtggcacgagcctattcataacataggcggtacgcccggagcatggctagccgatacgctatttttcatttttggcgtaatggcttacaccattccggtcattattatcggcggctgctggtttgcctggcgtcatcaggaaaacgacgagtacatcgattatttcgccgtctcgctgcgtttgatcggtgcgctggcgctgattctcacgtcctgtgggctggcggctatcaacgctgatgatatctggtactttgcctccggtggggtgatcggcagtctgctgagcaccaccctgcaacctctgctgcacagcagcggcggcacaatcgcgctgctctgcatctgggcggccggattgacgttgtttaccggctggtcctgggtcagcattgccgaaaaaatcggcggtgtgattctctctgttctcacgtttgccagcaaccgtacccgtcgtgacgacacctgggttgatgaaggggaatatgaagatgatgaagaagaatatgaagatgatgaacccgccaggccgcagggttctcgacgcgcgcggattctacgcagcgccttagcccgccgccagcgcctggccgaaaaatttgctaacccgatggggcgtaaaactgatgccgctctgttctccggtaagcggatggatgatgcggaagatgagattcagtatagcgccagcggtgcgcctgttgccgctgatgatgtgctcttttctggttccagcgcagcgcgtccggccaatgccgatgacgttctgttctccggagtcagcgcggcacgccctggcgattttgacccatacgatccgctgttgaacggccatagcattgccgatccggtagcagtggccgcgcaggataccgctgctccgcaggcatggtctgaaccgctgccagggtacgacgctcagccagtctatcagcccgaaccagtgacaccgccgcagcacgcgtaccagccgcagccgtctccggtgcagcagccagcttatcagccggaaccgttcttgcagccacagcacgtgtatcagccggagcaggctccggtgcagcagccagcttatcagccggaaccgatcgcgcagccgcagcatgcgtaccagccggaacaggctccggtgcagcagccagcttatcagccggaaccggcatggcagccgcagcacgcgtaccagccggagcaggctccggcgcagcagccagcttatcatccggaaccggcatggcagccgcagaacgcgtaccagccggagcaggctccagtgcagcagccagcttatcagccggaaccggcatggcagccgcagcatgcgtaccagccggagcaggctccagtgcagcagcccgatccctatgctgcccccgttgagcctgagcctccgcaagaggaggtgaagcctcagcgtccgccgatgtattactttgaagaagtagaagagaaacgcgcgcgtgaacgcgagcagcttgccgcctggtatcagccgattcctgaacccgtcagtccgttggcgacaaaacccatcacgcctccgtcttcaccggcgggagatgctgccgccgtgagcgcactggcggccggggtccatcaggcaacgggggcggctgcagctagcgccgccgcgacctcaaccgcttctgccgcatccggcgctgcgccgctatttagcccggcttcgggcggtcctcgcgcgcaggtaaaagaaggcattggcccgaaattgcctcgtccaaatcgcgtacgggttcccacccgccgggaacttgcctcctacgggatcaagctgccttcgcagcggttagccgaagagcgcgcgcgtcaggctgagcatcagcactatgatgattcgctgtctgacgaggaagttgcagagctcgagcagggagagctggcgcgtcagttcgccgccgcgcaaaatcagcgctatggtgatagctacgctgccgaagatgaaactgcagatgatgattccgctgctgaagccgagctggctcgtcagtttgccgcgtctcaacagcagcgctacgcaagcgagcagccgccgggatcgcatccgttctctgcggctgactatgaattctcgccaataaaaacgttagttgacgatgcgccgagcgagcctgtcttcacgccattgccggaagtgcagcagcctgctccgcagtatcagcagccggtccagcattcgcagcccgtgccgcagccgatgccgcatcagcacgcccctcagcaaccgcaaaatgtgcagcaccaggcttatcaatctgcgcagcatcagccggctcaacatccgcaaatgccgcagcgggctgctggcagctatccgcagcagcatgcttctcaggggcacgccccgcagcagccggctccacagccgcaggagagtctcattcatccgttgttgatgcgtaatggcgacagtcgcccgttgcagaagccgacgacgctgctgccgtctcttgacctgcttacgccgcccccggctgaagttgagccgattgatacctttgcgcttgagcagatggcgcgtctggttgaagctcgtctggccgatttccgcattaaagccgacgtggtgaactactcaccgggcccggtaatcactcgctttgagcttaacctggcgccgggtgtgaaagcagcgcgtatttccaacctgtcgcgagatttggcccgttccctgtccacagcggcggtgcgcgtagttgaagttattccgggtaagccttacgttggcctggagctgcctaataaaaaacggcaaaccgtttacctgcgcgaagtgctcgataacgcgaaattccgcgacaatccttcacctctcaccgtggtcctcggcaaagacatcgcgggcgaacccgtaaccgccgacctggcgaagatgccgcacctgctggtggctggtactaccggttccggtaagtctgttggggtcaacgccatgatcctgagcatgctttacaaagcgcagccggaagatgtgaaattcatcatgattgacccgaaaatgctcgagctgtcggtttatgaaggcataccgcatctgttgaccgaggtggtgacggatatgaaagacgccgccaacgctttgcgctggagcgttaacgagatggagcgtcggtataagctgatgtctgcgctgggcgtgcgtaatctggcgggttacaacgagaaaattgccgaagccgcgcgtatgggacggccaattccggatccgtactggaagcctggcgacagtatggatgcaacccatccggtactgaaaaaagagccttatatcgtggtgctggtcgatgaatttgccgacctgatgatgaccgttggtaagaaagtggaagagctgatcgcccgtctggcgcagaaagcgcgcgccgcgggtatccacctggtactggcaactcagcgcccttcggttgacgtgattaccggcctcatcaaagccaacatcccgacgcgtatcgcctttaccgtctcgagtaaaattgactcgcgtaccatcctcgatcagggcggtgcggaatctctgctggggatgggcgatatgctctactccgcgcctaactcgacgattccggtgcgcgtgcacggcgcttttgtgcgcgacgaggaagttcacgctgtcgttcaggactggaaagcgcgcggtcgtccgcagtatgtcgatggcatcacctccgacagcgaaagcgaaggcggcggcggtggctacgatggcggggaagagctcgatccgctattcgatcaggccgtgaattttgtgacggaaaaacgcaaagcctccatttctggggtacagcgtcagttccgcattggctataaccgcgccgcgcgtattattgagcaaatggaagcccagggtattgtgagcgagcagggtcataacggtaaccgtgaagtgctggctccgccgcccttcgagtaa

SEQ ID NO: 254584 - DNA, 612 bp, Klebsiella pneumoniae
atgaaaaaactcgcaatcacctgtgcattactgtccggtctggttgtcagccaggtatgggcggatgccgccagcgatttaaaaagccgccttgataaagtgagcagcttccactccagttttacgcagaaggtcaccgacggcagcggtaatgccgttcaggacgggcagggtgatctctgggtcaagcggccaaatctgttcaactggcacatgactcagccagatgaaagcgtgctggtttctgatggcaaaacgctatggttttacaatccgtttgttgagcaggcaaccgccacctggttaaaagacgcgaccagcaatacgccgtttatgctgattgcccgtaatcaggccagcgactggcaaaactataacattaagcagaacggtgacgattttgttctgactccgaaaaacggcagcggtaatcttaagcagttcaccatcaacgtgggtcgtgacggtacgattcatcaattcagcgccgtggaacaggacgatcaacgcagcagctatcagctgaaatcgcaacaaaatggtgccgtggatgcatctaagttcacctttacgccgccgcaaggggttacggtggacgatcaacgtaaatag

SEQ ID NO: 254585 - DNA, 1344 bp, Klebsiella pneumoniae
gtgagcaacttgtcgctcgatttttccgataacgcgtttcaacctctggccgcccgtatgcggccagaaaatttagcgcagtacattggccagcagcacctgctggcgccgggtaaacccttaccgagggcgattgaagccgggcacctgcactcgatgattctctgggggccgccgggaacgggaaaaaccaccctcgctgaggtcattgcgcgctacgccagcgccgacgttgaacgtatttcagcggttacctccggagtgaaagagatccgcgaggccattgaacgcgcgcgtcaaaaccgcaatgcgggtcgccgcacgatcctgtttgtcgatgaggtccatcggtttaataaaagccagcaggatgcctttttgccgcatatcgaagatggaactatcacctttatcggcgcgacgacggaaaacccttcctttgaactcaattctgcactgctatcccgcgcgcgcgtctatctgctgaagtcgctgaccagcgacgatatcgaacaggtgcttaatcaggccatgagcgacaaaacgcgcggctacggtgggcaaaatattgtactaccggacgagacgcgcaaggccatcgctgaccttgtcaacggtgatgcgcgccgggcgctgaatacgctggaaatgatggccgatatggctgaaaccgacgcctctggcaatcgcgtgttgcaggttgaactgctgaccgaaattgccggcgagcgcagcgcgcgtttcgacaacaaaggcgatcgcttttacgatttaatctccgcgctgcataaatcggtccgcggaagcgcgccggatgctgccctctactggtacgcgcggattattaccgccggcggcgatcccctctacgttgcccgccgctgcctggcgattgcctctgaagatgtaggcaatgccgatccgcgcgcgatgcaggttgcgatctccgcctgggactgctttacccgcgtcggaccggcggaaggtgaacgcgccattgctcaggccattgtttatcttgcctgtgcgcccaaaagcaacgctgtttacaccgcctttaaagcggcaatggccgacgcgcgcgaacgtcccgattacgacgtcccggtacatttgcgcaatgcccccacgaagctgatgaaagagatgggctacgggcaggcataccgctatgcacatgatgaacctaatgcttatgccgccggagagcagtacttcccggaggaaatggcgcaaacgcgctattatcagccgacaaaccgggggctggagggcaaaataggcgaaaagctcgcctggttaaccgaacaggatcaaaatagcccgataaaacgctaccgataa

SEQ ID NO: 254586 - DNA, 1293 bp, Klebsiella pneumoniae
atgctcgatcccaatctgctgcgtaccgagccagacgcagtcgcagaaaaactggcacgccggggctttaagctggatgtagataaacttcgcgctctggaagagcgtcgtaaagttctgcaggttcaaactgaaaacctgcaggcggagcgtaactcccgatcgaaatccattggccaggcgaaagcgcgcggggaagatattgagccattacgcctggaagtgaacaagctcggtgagcagcttgatgccgctaagaccgagctggacgcgctgctggcggaaatccgcgatattgcgctggctattccaaacatcccgcatgatgacgtaccggccggtcgcgatgaaaacgataacgttgaagtcagccgctgggggaccccgcgcgagttcgattttgacattcgcgatcacgtcacgctgggcgaaatgcacggagggctggattttgccgccgccgtgaagctgaccggttctcgttttgtggtcatgaagggccagctggcacgcctgcaccgcgcgctggcgcagtttatgctggatctgcatactgaacagcacggttacagcgaaaactatgttccgtatctggttaaccaggacacgctgtacggcactggtcagctaccaaaatttgccggcgacctgttccatacccgtccgctggaagaagaagccgacagcagcaactatgcgctgatcccgacggcagaagtcccgctgaccaacctggttcgcgatgaaatcattgatgaagacgatctgccgatcaaaatgaccgcccatacgccgtgcttccgctctgaggcgggctcttacggccgtgatacccgtggtctgatccgcatgcaccagttcgacaaagttgagatggtgcagattgtgcgtccggaagattccatggccgcgctggaagagatgaccggtcacgccgagaaagtgctgcagctgctgggtctgccgtatcgtaaagtggctctgtgcactggcgacatgggcttcagcgcgtgcaaaacctacgatctggaagtgtgggtaccggcgcagaatacctatcgtgaaatctcttcctgctccaacgtgtgggatttccaggcgcgtcgtatgcaggcgcgctgccgcagcaagtctgataagaaaactcgcctcgtacacacgctgaacggttctggcctggcggttgggcgtacgctggtcgcggtgatggaaaactatcagcaggcggatggccgcattgaaattccggaagtgctgcgtccgtatatgcgcggccttgaatttatcggctga

SEQ ID NO: 254587 - DNA, 2439 bp, Klebsiella pneumoniae
atgaaaaccaaaacccccgatgctttactggctgccgaggtgagccggcgtggtttaatgaaaaccacggcgattggcgggctggcaatggccagcagcgcttttaccttacccttcacgcgcattgcccacgctgcggatagcctgaatcccaccagcgaaaccgttacctggagcgcctgtacggttaactgcggtagccgctgtccactgcggatgcatgtggtcgatggtgagatcaaatatgtagaaacagacaataccggcgatgatagctatgacggcctgcatcaggttcgcgcctgtctgcgtggccgctcgatgcgtcgacgcgtctacaacccggaccgcctgaaatatccgatgaagcgcgtgggcaagcgcggcgagggcaaattcgagcgcatcagctgggaagaagcgtttgatactatcgccagcaatatgcagcgcctgataaaagagtacggtaatgagtctatctatctgaactatggaacgggtaccctgggcggaactttgactcgctcatggccaccgggaaaaaccctgattgcccgcctgatgaactgctgcggcggctatctcaaccattatggcgactactccaccgcgcaaattgccgctggcctgaactatacctacggtggctgggccgatggcaatagcccgtcggatatcgaaaacagtaagctggtcgtattgtttggcaacaaccccggggaaacccgaatgagcggcggcggggtaacctattacctggaacaggcgcgggagaaatccaacgccaggctgattattatcgatccacgctataccgacaccggtgccggacgcgaagacgagtggatcccgattcgcccgggaaccgacgccgcgctggtctccgcgctggcgtgggtgatgattactgaagacctcgttgatcaacctttcctcgataaatactgcgtaggctatgacgagaaaacgctgccggaaggagcgccagccaatggccactataaggcctatattctcggtcagggcaaagacggtatcgcgaagacccctgagtgggcggcgacgattaccggcattccccaggcgcgtatcatgcagctggcgcgcgaaatcgccagcgctaaacctgcctatatttctcagggctggggcccgcagcgtcatgccaacggtgagctggtatcccgtgcaatttcaatgctggcgatcttaaccggtaacgtcgggattaacggcggcaacaccggcgcgcgtgaaggttcttactccctgccttttgaacgcatgccgacgctggataatccggtggaaaccagtatttccatgtttatgtggaccgatgcgattgagcgcggtacggaaatgaccgcgctgcgcgacggcgtgcgcggcaaagataagcttgacgtccctatcaaaatggtctggaactatgctggtaactgtcttatcaaccagcactcagaaatcaaccgtacccatgacatcctgcaggatgacaagaagtgcgaaatgattgtggtcattgattgccatatgacctcctcagcaaaatatgccgatattctgctgccggactgtacggcctcggagcagatggattttgcgctggatgcttcctgcggcaacatgtcctacgtgatttttgccgaccaggccatcaagccgcgctttgagtgcaaaaccatttatgaaatgaccagcgaactggcgaagcgcatgggcgttgagcaacgcttcaccgaaggtcgcacgcaggaagagtggctgcgtcatctctatgagcaatcccgtaaagcgatcccggcactactgccgtttgatgaattccgcaagcagggaatcttcaagcagcgcgatccggaaggtcaccacgttgcctataaagccttccgtgaagatcccgccgctaatccgttaacgacgccgtcagggaaaattgaaatttactctgcgcagctggcggaaattgcggcgacctgggagcttaaagaacaggatgtcatcgacccgctaccgatctacagccctgggtttgaaaactatgacgatccgctggctgaaaagtatccgctgcagctcaccggttttcactataaagcccgtacgcactccacctacggcaacgttgacgtgctgaaagcggcttgccgtcaggagatgtggatcaacccgctggatgcgcagaagcgcggcatcgctaatggcgatcggatccgcatctttaacgatcgtggtgaagtccatatcgaagccaaagtgaccccgagaatgatacctggcgtggtcgcgctgggtgagggggcctggtataacccggacgcaggccgcgtggatcaggctggcagcatcaacgtgctgaccacccaacgcccgtcgccgctggcgaaaggcaatccatcgcataccaacctcgtccaggttgaaaagctgtaa

SEQ ID NO: 254588 - DNA, 618 bp, Klebsiella pneumoniae
atgacaactcaatatggattttttattgattccgcccgttgcaccggttgcaaaacctgcgaactggcttgtaaagactataaaaaccttacgccggaagtcagcttccgtcgtatctacgaatacgccggcggcgactggcaggaggataacggggtatggcagcaaaacgtctttgcctattacctctctatcgcctgcaaccattgtgaggatcctgcctgcactaaagtttgccctagcggagcgatgcacaagcgtgaagatggctttgtcgtcgtcgatgaagatgtctgtatcggctgtcgctactgtcatatggcctgcccgtacggcgcaccgcagtacaatgcgacaaaaggccatatgaccaaatgcgatggctgccacgagcgcgtagccgacggcaaaaaaccgatttgcgtggaatcttgcccgctgcgcgccttggatttcggcccgattgaagagctgcgtaaaaaacacggtcagctggctgccgtcgcgccgctgccttcggcgcatttcactaagccgagcattgtgattaaacctaatgccaacagccgaccgtgtggagataccaccggctacctggctaacccgaaggaggtgtga

SEQ ID NO: 254589 - DNA, 864 bp, Klebsiella pneumoniae
atggggagtggatggcatgaatggccgctgattattttcacggtcttgggtcagtgcgtcgtgggcggatttattgtactggctctggcgctaataaagggcgatttaacgcgtgaacagcagcagcgcgtggtgcgaagtatgtttggcctgtgggtgctgatgggcgtaggttttattgcctcgactctgcatcttgggtcgccgatgcgcgcttttaactcgcttaatcgcgtgggggcttcatcgctcagcaacgaaatcgccagcggtgcgctgttctttgccgtcggcggcattggctggctgctggcggtggtgaataagctacccgcgggactgcgtcacctctggctggttattaccatggtgctcgggataatctttgtctggatgatggtccgcgtctataacaccatcgatacggtgcccacctggtacacggtctggacgccactgagcttcttcctgacgatgtttatcggcgggccgctgctgggatatctgctgctgcgctttgcggacgttaacggctgggcgatgcgcctgctgccggcggtgactctgctggcgctggtggtgagcgtgaccgtggtgctgatgcagggtcaggagctgacaacaatccatagctctatccagcaggcctcggcgctggtgccgaactatggttcgctgatggcgtggcgcgtggtggctctggtgctggcgctggtatgctggatagctccgcagctcaaaggctatcagcccgcattgccgcttctggggctggcatttgcgctggtgctggttggcgaggcgatcggccgcggcgtcttctatggcctgcatatgaccgtcgggatggcaatcgccagctaa

SEQ ID NO: 254590 - DNA, 1149 bp, Klebsiella pneumoniae
atgaccatctacacccggccagtgcaaatgctgctctgtggcctgcttctgttgactctggcgatagcggttttaaatacgctcgtcccgctttggctcgcccatgaaaatatgccgacctggcaggttggaatggtggggtcgtcctattttaccggtaatctggtgggaacgttgctcgccggatgggtaattaagcgcctggggtttaaccgcagctattacctggcatcggttatttttgccgtgggctgcgtgggtcttggtatcactattggcttctggagctggttcagctggcgttttatcgccggcgtcggctgcgcgatgatttgggtggtggttgagagcgcgctggtctgtagcggcacttcgcggagccggggtcgactgctggcggcctatatgatgatttattatgtcggcacggtactgggccagctaatggtcagcaaactgccgacggatctgatgagcgttctgccgtgggtgacggcgctggctctggcggccatcctgccgctgctgtttgctcgcgtggcgactcaggccgatgaaccgcatgaaccggcgcgtatctggccaatgctacggctgcgtcaggcccgccatggggtcaacggctgcattatttccggcatcgttctcggttcgctgtatggcctgatgccgctatggcttaaccaccagggcgttagcgattccggcattggcttctggatggcggtaatggtgagcgcgggtatcgttgggcagtggccgattggccgtcttgccgatcgctacgggcgtctgctggtcctgcgcgttcaggtatttgtggtgatcctcggctgtctggcaatgttaagccaggccgcaatggcaccagcgctgttcgtgctgggggcatccggctttacgctctatccggtggctatggcctgggcttgtgaaaaagtggagcgtcatcagctggtggcgatgaaccaggcgctcttaatgagctataccgtgggtagcctgcttgggccgacccttaccgcgatgctgatgcagaatttctctgataatctgctgtttatcatgatcgccagcgtgtcattcatctatctgctgacgctgctgcgcaaagcgggccaccatcctacgccggtggcgcacgcctga

SEQ ID NO: 254591 - DNA, 471 bp, Klebsiella pneumoniae
atggcggtcggctcgcgcataaaaggaatgtgtatggaagagacgctgttttccgcctgtcagttcaccagccactgcctgaactggcgcagcgctgttcagctcgcctgccgtccgctagagcaacaagggaaaattaccgccgggtatgccggtgcgattatccacgccacagagcaggatggcccctggtatatactgagcccgggatttgcgctaccgcatgcgcgtccggaagcgggcgtgctgagcaaaaatagcgcgctttcgctgctttgctgtagcgaagccgttgattttccggatcatcccggaattcggctgatagtcatactggcggcggcagatagcgaacagcatattcagacgatccagcggttagtctgctggctggatgagggggatagacttcagcgattcagcacggtgcaaagccagaccgagtttgccgcgcttcttgcttcgcattaa

SEQ ID NO: 254592 - DNA, 912 bp, Klebsiella pneumoniae
atgaaagcaccccgtgatgagatcggtaatgccctgattgcgctaaaagaaaaaggctatcccgtcgttgttatcgacagtgatttagccagctcaacccgtactgaccagtttcaggccatctatcctgaggccttcttcgaaatgggcattgccgaaggctccgccatgagtttcgcggtcggccaggcgctggaaggctttatgcccttctatgttaactttgccatgttcgtcaccggcaccgcctggacccagctgcggcaggcctgctacgccaaagccaatattaaactcgtcggtagccatcccggtatggatgatggacctgacggcgcttcgcatcatgcgctggaggatttagcgctgacccgcgtccttccggggttaaccgtcctgacgccagcagatgcggaagaaatcgccgaggccttcgagcaggcggcaaaaataaaggggcccgtttatatccgcgttgcccgcgaaccgatgccggttcgcgacaaaagcgtcgtgccgcgggtgagcgatatcgccgccatcgccgacagcggcaatgattttgcgattctttttgaagggacggttctggagcaggccaccgagggttatgaaaagttggtcgccagcggcaaaaagggcaagctgattcacgtcgcaacccttaagccttttaatcagcaagaattttatcggctggttaatgattgcccacttatcgctacgcttgaaaatcataccgtcaacggcggcctcggtgggctgatcgcggaaaccctggcgcaaaaggcgcatccggcgcgccttacgcggctgggaacgcaggatacatttaccgaatcgggtaacagcagacagttaaaagccaaatacggcatttcgggagaagcgctgtttaatgctctacgctaa

SEQ ID NO: 254593 - DNA, 798 bp, Klebsiella pneumoniae
atgaacattgatgaactgaaatcccatgcgcttgccgctcgccgcgagatagtcaccatgatttacgaatccgggattggccatccgggcggggcattgtcaataatcgacattcttacctggctctattatcaggaagtcgatctgcaagcctccccgcgctcgcgcgtggtgatgagtaaaggccacgccgtcgccgcgcagtacgccatgctctatcaaaaaggaaagatcgatcgcagcgagttccatacgttccggcagatcaactcgcgcctgcagggacacccaagcattaaatcactaccggatgtcgatgccacgaccggtctgctgggtcaggggctgtcgattgcttttggtatggcggccgccaaaaagcggcgcaacgatccgcaccgggtctttgccatcgttggcgatggcgaaatgcatgaaggccaaatctgggaaaccttacagcaggctggtcacatgaaaatggataatctggtcgccatcttcgattacaacggcttctcttcccacgaccccgttaatgaagtcgttaatctcgagccgctggcggacaaaatccgcagctttggctggcatgtactggagctgcacgatggcaatgatatgcatcaggttgccgataccctgatgctatcccgccatctgaaaggcaagccggtcgccattgtggcgcacacgacgaaaggttccggcgtcagctatatggaaaacaacggcgactggcactcaaaaaccccgagcaaagaacaatttcagcaggcaatggaggagttacagtga

SEQ ID NO: 254594 - DNA, 1266 bp, Klebsiella pneumoniae
atggatttcctcagatttattgtattcgacattctgggcgtaaccccacttttagttggctttattgcattaatcggcctgttaatccaacgcaagccgattgaaaaagtgctttccggtacttttaaaaccatcgtcggctttctggtattcgccggcggcgctggtctggcggtgacttccctgggtaactttcagaccttattcagcgatggttttggcctgaagggcgtaatgccgctggctgaagcgctaaccggactggcgcaaaccaaattcgccatgtgcgtttcgctgattatggtgattggttttgcctggaacctgttctttgcccgcgtgacgccgtttaaatacatctttcttaccgggcaacataacctgtatctctccgcgctgcttaccgtgacgctaaaggcgctgggctacagcgacatgacgaccattattgtcggctcggtgctgctggggctcgccgcctgcctctatccggctattgcgcaaccgtggatgcgcaaaattaccggtaacgatgagatcgccatggggcactacgtcacgctggcctatgccgcctccggctggatcggttctaaagtcggcgatcctaaacaatctaccgaaaagctgaatctccccggttggctggggatcttcaaagattacatagtttcagtatcgatctcggtgagtattttctattacatcgccgcgctcgcggccggaaaagctgcggtcaccgcagcggccggcggcatgcactggctggtttacccgctctttcagtcgctgacctttaccgcttctctgtacatcatcatcaccggcgtgcgcctgctgctgtcagaaattgttccggcctttctcggcatctcggagaagtttattcctaatgccaaacccgcgctcgactgcccggtcgtctttccctacgctccaaccgccacggttctcggatttatctcgtcttttgtcggcgggctggtggtgatgggtttgctggcgatcctcggacaaaccgtcattatcccggtagctattccctacttcttcatcggcgccaccgctgcggtatttggtaatgcctccggcggctggaaaggcgcgattgccggaagcttcatcaccgggatcctgatcggtattggccctgcgctgatttacccgattatggagtccgtcggtctttcaggcaccagcttcccggaaactgacttcgttgccctgggtctggtcgtgtactacatcggtaaaatgctgccctaa

SEQ ID NO: 254595 - DNA, 276 bp, Klebsiella pneumoniae; identical to SEQ ID NO: 173898

SEQ ID NO: 254596 - DNA, 858 bp, Klebsiella pneumoniae
atgagccagatagacaataacttgttgataagcataagaaatggagcttcagggctaagcccgatactggagaaagttggccgttttattacggaaaatcctgactttgtgatgcgtcacacgatttcagaactggccgactccattgataccagtgaagggagtatcacccgtttttgtcgggcattcggatttaaaggtttctcggatttcagaactgcgctggcgatggagcagggcgccgcgcgttcggaagacaacggtatcaacgagaacgaagagattgcgccggtgctggcgagcattcgcgacagtaatgctatcgtggataaccaggagctgaaagccgcagctgactggcttaacgccctgaacagcattgctatctatgccgtgggcacggcagtgccggtcgcgttattcctgcaaatgaatttaatcaatatgggtaaggtggccagctttgtcgatcgctcttatccggcggcgatgccgttgctggctgataaccaaaaaaccggcattatcgtcgtgcatactgaacaggcctcggcggatatgatgcagtccctgtccctggcaaagcagcagggcgtgaaaatattgtcgctgacgcgggggacgttcgcgccgttagcccgcttatctgactggaatcttcaggcggcggtggctttacagggggagggggagtcaggatttgcggaaattgccggcgccatgatggtggccgaccggatcctcagcgcgctggaagagcaggatgaacgctatgcggaataccgtaaagcgcatcagaagcgcattttctctattgaaagcgtggcaaataagctgtcggaatactttatgtcctga

SEQ ID NO: 254597 - DNA, 741 bp, Klebsiella pneumoniae
atgtcaacaattggtcgcattcactcctttgaatcctgtggcaccgtcgatggcccggggatccgctttatcactttcttccagggctgcctgatgcgctgcctctattgccacaaccgcgatacctgggatactcacggcggtaaagagattaccgttgaagagctgatgaaagaggtggtgacctatcgccactttatgaacgcttccggcggcggcgtaacggcatccggcggcgaagccattctgcaggccgaatttgttcgcgactggttccgcgcctgtaagaaagaaggtattcatacctgtctcgacactaacggctttgtgcgccgttacgatccggttatcgatgaactgcttgaagtgaccgatctggtgatgctcgatctcaagcaaatgaatgatgaaattcaccagaacctggttggcgtctctaaccatcggacgctggagtttgcccgctatctgtcaaataaaaacatcaaagtctggatccgctacgtggtggtccctggctggtccgacgatgatgattccgcgcatcgcctgggtgagtttacccgcgatatgggcaacgtcgagaaaattgaactgctgccgtatcatgagctgggcaaacataaatgggtggccatgggcgaagagtacaagctggatggcgtccatccgcctaaaaaagagaccatggaacgcgtgaagggaattctggaacagtacggtcataaagtgatgtactaa

SEQ ID NO: 254598 - DNA, 2283 bp, Klebsiella pneumoniae
atgtccgagcttaatgaaaagttagccacagcctgggaaggttttgcgaaaggtgactggcagaacgaagtcaacgtccgcgacttcatccagaaaaactataccccgtacgaaggtgacgagtccttcctggctggcgcaactgaagcgaccaccaagctgtgggacaccgtaatggaaggcgttaaacaggaaaaccgcactcacgcgcctgttgattttgacacttcccttgcgtccaccatcacctctcatgacgctggctacatcgagaaaggtctcgagaaaatcgttggtctgcagactgaagcgccgctgaaacgtgcgattatcccgttcggtggtatcaaaatggtagaaggctcctgcaaagcgtacaatcgcgagctggacccaatgctgaagaaaatcttcactgaataccgtaaaacccacaaccagggcgtgtttgacgtttacaccaaagacatcctgaactgccgtaaatctggcgttctgaccggtctgccggatgcctatggtcgtggtcgtatcatcggtgactaccgtcgcgttgcgctgtacggtatcgacttcctgatgaaagacaaatacgctcagttcgtctctctgcaagacaaactggaaagcggtgaagatctggaagcaaccatccgtctgcgtgaagaaatctctgagcagcaccgtgcgctgggtcagatcaaagaaatggcggctaaatatggctgcgatatctctggtcctgctaccaccgctcaggaagctatccagtggacctactttggttacctggctgccgttaaatctcagaacggcgcggcaatgtccttcggtcgtacctccagcttcctggacatcttcatcgaacgtgacctgaaagccggtaaaatcaccgagcaagacgctcaggaaatgattgaccacctggtcatgaaactgcgtatggttcgtttcctgcgtactccagaatatgatgaactgttctccggtgacccgatttgggcaactgaatccatcggcggtatgggcgttgacggccgtactctggtaaccaaaaacagcttccgtttcctgaacaccctgtacaccatggggccgtctccggagccgaacatcaccattctgtggtctgaaaaactgccgctgagcttcaaaaaattcgctgcaaaagtgtccatcgatacctcttctctgcagtatgagaacgatgacctgatgcgcccagacttcaacaacgatgactacgctatcgcttgctgcgtaagcccgatggttgttggtaagcaaatgcagttcttcggtgctcgcgctaacctcgcgaaaaccatgctgtacgcaatcaacggcggcgttgatgaaaaactgaaaatgcaggttggtcctaaatctgaaccgatcaaaggcgacgttctgaacttcgatgaagtgatggaccgcatggatcacttcatggactggctggctaaacagtacgtcactgcgctgaacatcatccactacatgcacgacaagtacagctacgaagcctccttgatggcgctgcacgaccgtgatgttatccgcactatggcatgtggtatcgcaggtctgtccgttgctgctgactccctgtctgcaatcaaatatgcgaaagttaaaccgattcgtgatgaaaacggtctggctgtcgacttcgaaatcgaaggcgaatacccgcagtttggtaacaacgactctcgcgtcgatgatatggccgttgacctggttgaacgtttcatgaagaaaattcagaaactgcacacctaccgtaacgctatcccgactcagtccgttctgaccatcacctctaacgttgtgtatggtaagaaaactggtaacaccccagacggtcgtcgcgctggcgctccgttcggaccaggtgctaacccgatgcacggccgtgaccagaaaggtgcagttgcctctctgacctccgttgctaaactgccgtttgcttacgcgaaagatggtatctcttataccttctctatcgttccgaacgcactgggtaaagacgacgaagttcgtaaaactaacctcgcaggcctgatggatggttacttccaccacgaagcgtccatcgaaggcggtcagcacctgaacgtcaacgtcatgaaccgcgaaatgctgctcgacgcgatggaaaacccggaaaaatatccgcagctgaccatccgcgtatccggttatgcagtacgttttaactccctgactaaagaacagcagcaggacgttattactcgtaccttcactcagaccatgtaa

SEQ ID NO: 254599 - DNA, 816 bp, Klebsiella pneumoniae
atggcgaaagtcgccgaagaagcaggtgtctataaagcgacaaaacatccgataaagacgttttatctggctatcaccgcaggtgtcttcatctctatcgcttttgttttctatattaccgcgacaaccggcacggccgggatgccattcggggttgccaaactgattggaggcatctgcttctcactgggtttgattctctgcgttatatgcggtgccgacctgtttacttcaaccgttcttatcgttgtggcgaaagccagcggaagaataacatggggtcagctggctaaaaactggctaaacgtctatgttggtaacctggttggttgcttactctttgtattgctgatgtggctttcaggcgaatatatgactgccaacggtcaatggggacttaacgttctgcaaaccgccgaccacaaaatgcaccatacttttattgaagctgtgtgcctgggtatcctggcaaacctgatggtctgccttgcggtatggatgagctactccggccgtagcctgatggataaagccatgattatggttttaccggtggcaatgtttgttgccagcgggtttgagcacagtatcgcgaacatgtttatgatcccgctgggtatcgtcattcgcgactttgcgagcccggaattctggaccgcagttggttcaactccggaaagtttctctcacctgaccgtcatgaacttcatcactgataacctgattccggtaacaatcgggaacatcatcggcggtggtctgctggttgggttgacatactgggtcatttacctgcgtggcgacaaccatcactaa

SEQ ID NO: 254600 - DNA, 552 bp, Klebsiella pneumoniae
atggccgatgaactgggcggcaaaggcaacgtggcggtatttaacgcattctccagttccttgcgtatttgcgggattcgttacgaccagtggaaatatgtccttaaggattatccggatattcatattattcaaccggagctggccgaacagttcgccaactcaccggaagatgcgcggaagaaaaccctcgaactgctgagccagtatccgaaaggcaaactcgatgcgattcacgttgcctgctgggatcagccggctatcggtattgtccaggcgctggaagagaccggccgcgataaagacgtcaaggttaccgctattgatgctggcccggagacgctggagatcatggccgagccgggtagcccgcttgtcgccaacgtcgcccagcagccgcacctgatcggccagacttcagccgataacgtcgctcgctacttcgaaaaacagaagctgccgctgcaaacctttatcccggtggtcccggtgaaaggcccgcaggaggcgaaagcggtctacaaacagctgggatatggcgaactgcagtga

SEQ ID NO: 254601 - DNA, 1554 bp, Klebsiella pneumoniae
gtgatcactcaatcctccggcggggcgaatcccgccgctggtctggcgatgaaccagatcggcaaaagctttgccaacgtgactgcattaaatgcggtcacgctgcttctgaatcccggtgaaattcacggtctgattggcgaaaacggcgcgggaaaatcgacgctgataaaaatcctcgccggggtctaccaggccgatagcggcagcgccacccttgacggcgcgccgctgccgcttggcaatccagcggcgattgaagcgctgggtatccgcgtcattcaccaggagctcaatctgatcccccactttacggtggcggaatcggtgtttctcggccaggagtaccgcaccagctggggcgcgctggaccggcggcggatgaatgccgccgccgaagcgtttttccgcgacagctggcagctggacatcaatccccgccgcctgattcgcgacctcagcctcgccgaacgcaagctggtgcagatcgccagggcgctgattgacggcgcggcaaagctggtggtctttgatgaacccaccgcgccgctggaagcgcaggaggccagcctggtttcctcagcgattttgcgcctgcgggagcaggggatcggcattctctatatttcccactacctcaacgaaatcgccgccctctgcgatcgcggcacggtactgcgtaacggcgaggtcgttggctatcccgaccgggcgctgctgcaggacaccgacgcgctgattaaaatgatggtcggtcgcgacatcgaacagctctataccccacgccagagcagcgctcaacgagtagatgccgccgcgccggttctttcggttcgccatctcagcgacggcgtccatctgaatgatattacctttgatattcagccgggcgagatcgtcggcgtcgccggcctgctgggcgccgggcgcgacgtactggtcgatctgctttatgggctgcgccgcgcgcgcagcggcacaataagcatcgacggccagccgaagcggctgcgcacgccgtatcaggccacccgagcggggatggcgctggtgccgcgcgaccgccgccatcaggggctgattctccccttctccaccgccgacaatatcaatctggcctcgctagcggagaccgccactttcggctgggagcatcgcggccgggcgctggcaaaagcgcgcagctggattgagcagctctccatccgccctggccgtccggagctgccggtgcgctttatgagcggcggcaaccagcaaaaggcgatacttgcccgctggctcggcaccgatgcgcggctttttattcttgatgaacccactctcggggtggatatcggcgcgcgcagcgatatttatcagcgcacccgcgagctggcggatcgcggtcgcggcgtgctggtctcatccagcgatgcgccggagctgctcggcctttgcgaccgcatcctggtgatgtggcgcggcgagctggtggccaatctcccgacccgggggctgacgctggacgcgctgctggtgacgattaacggtggacaggaacaacaggtatga

SEQ ID NO: 254602 - DNA, 987 bp, Klebsiella pneumoniae
atgagtgcagatattcagcgccgcccccttccgggcatcacgacgcttatcgaaaaattccccctgattctcttttttgcgctgctggtctggctcagcctgcagtcgcctttctttttaagctggcagaatatcagcatgatgctggtacagagcgtgccgctggcgatcctctgtttcggcctggtctgcgtgattgccgtcggcggcgatgacgtggtttccggcggtatcgatctgtcgctgcccgccatcgcggtgctcggcgtcgcgttactcagcctcggtatggcggagtggaacaccccttacctggcgctgattctgctgctggtcgccgtgagcctggcctgcggcgcggtcaacgccgtgctggtgctggcggcaggcctgccgccgctgctggcgaccctgtcgacctcggtagccttcaccggcctgaccgacctgctgaccggccagcggcgcatcgcggtaagcgacccgctgatggtggcctttcgcgataacgctctctttggcattccctggccgcttctctatctgctggcggtcttcgcgctgtttcagcttttgctccaccactcccgcttcggccagcatttacaggcggtgggcggtaaccgcgatatggcgcagatgagcgggctcaacgttcgccgtttaacccttctcgtctggctgctggcgggcctcgccgccggtctggcgattttaccgctgctcagccagggctcaggcagctcgagcggcacggcgacgccgctactgctggaaaccgtccttgccacttttatcggcgcggcgttctcgcggcgtcgcgtggtcaccatctggggagcgctgctcggcgcgttgctggtcaacgcgctctctaacgggctcggcctgctgggagtgaatattttctggatgggcgcgatcaaaggcggcctgatcctcgtggtgctggcggcgtcagcggtcagacataaaggaggcaactga

SEQ ID NO: 254603 - DNA, 1002 bp, Klebsiella pneumoniae
atgagccagatgacgctcaagaccccctctacgggacaaaccggcagcagcccgctggcgtggctatcacgggcagggttcggcatcattaccctactggcgattgccctgttcggctgggcgaacccggtatttctgaccttcgacaactgggccaatttgctgcagggcagcgcgattctgctgatcgtggcgatggcgatgacccttatcgttagcgccggagcgattgacctctccgtcggtgtggcgctggatttcggcgccgcctttgcgctggtggcgctgaaaacctggcacctgccgtggcaggcggcggtgggctgcgcgctgctcggcggggtgattatcggcctgctgaacgccttcctgatccttgtctgccagattcgcccgttcctcgccaccctcggcacctggtttatcgccagcagcgccgagcgcatctataccgacggcggcggctctatctcctaccgccggatggcgccggagtatcacgatctggcggtcggcaccgtcgccggaattccgacgccggtggtgatagttctggcgctgtggttggcggcctggctgctgaccgaacgcacgctgttcggcaagtacgtgcgcgctatcggtcagaacggcgaagcggcgcgtatcgccgggatccgcgaccgccggaccatgctgtgggtgctggtagcggcctccgcgctgtgcgccgtcggcggcgtcattctctccgccaacctgcgccagtttacgccgctggccggccaggcctacctgatggatgccatcgctgcggtctttatcggcaccgcctttaaccggctgggccgggtcagcattgccggcaccctcggcggcgtgctgttcctcgccattattgataacggcctgaacctgatggggctgaactacctggtgaaagatgcgctggttggcgtaatcctggtagtggcgctggccctctccttctggcaggcgcgtttgcgccagacccaccgttaa

SEQ ID NO: 254604 - DNA, 945 bp, Klebsiella pneumoniae
atggcagcttttgacgccgtctttgtcggcctgactattctggatatcgccggtcgcccggtgatcgacatcccgccgcgtggcggggtggcctttatcgaacaaattcgtctgaaccccgccggaaccgccgccggagccaatattaatgccgctaagctgggcattcgtaccgccgcggtggcctgcctcggcaaagatgaaaaggccgattttatactcgccagctatgcacggctgggaatcgactgttcgctggtccagcgtaccgcgcagcaggaaacgtcggcgacgatcctccctatccgccccaacggcgagcgcccggcgctacactgccggggcgcttccgatacgctttttatccgcgaagaggagtttgctgccgtcctcgactgccgcttcctgcaccacggcggcaccggcctgctggcggcgatggatcgcgggcagagcgcccttctgctgcaagcggcgaaggctcgcggcgtcaccaccagcttcgatttgattgcccccaatgaacataccctggaactgctgcgcccgctgctgccgtcagtggactactttatgccctcccttgaagaagcggcgtatctctccggggagacccagccggaagcgatcgcccgcttcttttttgcccttggcgtcgggacctgcattttgaaggacggcgagaacggttcctggctgctgacccgcgacggcgccgttgaacatatcccggcgtaccgggtcgatgccgtggataccaccggctgcggcgacagctactgcggcggctttattgccgcgctggcccgcgggctaagcgtcagacaggcatgcgaggtggcttccgccgtcgccgcgctggtggcgaccggcatgggatcggatgccggcgtggtggactggccgcatacccggcagtttatggcggcaaaccggcgcggataa

SEQ ID NO: 254605 - DNA, 1029 bp, Klebsiella pneumoniae
atgaaaattgtttttaccgccgaacacgccggcgacctcagcgcttttcagcaactgggcgaactgcgggtggaaggctgggcgctgggcaagccaaagctgagcgcagaccaattgatcgagctggcccatgacgccgaggtgctggtgaccagctacgatgaggtgacggaagcggtgatcgccgcctgtccgcgtctgcaggtgatcgcctgcacgcgcgccaatccggtgaacatcgataccaaagccgccctggcgcgcggtatccgcgtgctctatacgccggggcgtaacgcggacgccgccgccgagctgacgctggggctgatgctgagcctggcgcggcatattccgcaatcgcacgcggcgctgaagcgcggcgaattcacccacgccgaaaacgcggcgcagaccacccagagcggactgcgccgcgatgtggtgtgggacgtcagtccgcaaagcccttacgaagtgtttaaaggcagcgagctgcgcaacaaaaccctggggctgattggctacggtaatattggccgccgcgtggcgcgcatcgctcgcgcctttggcatggcggtgctggtggtggacccgtttgtcgccgccgaagagattaacgagccggggctgcaaaaaacgacccttgagggactgttccgcgaggcggatatcgtaagtctgcatctgagcagcggcccgcacagcgatggcctggtgaacgcggcgttgttgaatagcatgaagccgggcgcgctgctgattaatacctcgcgcgcggcggtcgtggatgaagaggcgctgattcatgcgctgcgccacggcccgctgggcggcgcggcgctggatgtctaccatcgcgagccgctgtggcgcgatcatccgtttgtcaccgagttgaataacgtcattatcaccccgcatattgccggggcgacgcgggagagcatcgctaagcatacggcgatgattgccgccgaccttcagcgctatgtcgccggcgagccgctgctctatcagtggcgttaa

SEQ ID NO: 254606 - DNA, 1497 bp, Klebsiella pneumoniae
atggatttttatctcggaattgatatcggcacttcgcgcgtgaaggcggtgctgtttgatcaacattttcaggcgtgcgccagcgcggcgcagaacaccggcccgcgcctgtcggccaacggtgaagccgaacaggatatggcccagctgtggcagtcggtggtggcgattttgcgcgatattgcgcggcatccggcgctgcaaaacgggcgtttacgcgccattggcctcgccgggcagggggagggcgtctggctctgcgacgccgagggcgaaccggtcgggccgggtatcctgtggagcgacacccgcagccgggaactgatgaacgaactcctcagccgccccggttttgaccgccgtttctttgacgataccggtacccatcttcagccctgcaacaccagcatgcagctgtgctggctcaagcatcatcagccggagcggctggcggcggcccgctatctgtttttcgccaaggattggatccgctttcgcctcaccggcgtcgcggcgctggatctcaccgatgccagcacctctttgctgaatcagcagagcgggaagctatccgcggtggtgctcaacgagatggggctggcagatttacaacctctgtttccgccgctgctggcgccggacgcgcaggctggcgcgctgcgtgaagaggtcgcggcgctgaccgggcttcccgctgccacaccggtagcggccggcgcgctggatgtctgcagcgcggcgctgggctgcggcgcggtcaatgatggcgacatttatactattctcggcaccacctgctgcaccggcatcgtctgtcacggtcgccagacggtcaatgaggggacgcgctacgttacccacaccgaagcgggcagctttattaacctttttccgatgcaggccgggacgccgaacatcgactggctccagcagcagatttcgctggatccggatttacagcagctggaacaacatatcgccagcgtcgaaccgggcagcggcggcgtcttctggcagccctatctcaacggcgaacgcgcgccgttcttcagccccgaggcgcgggcaggctatttcggcattagccagcacactacccgcgcagagctgcagcgggcggtatttgaaggtctggcttacgctatcgtcgactcgcttcagggctacccgcagggcggcgaactgtacctgaccggcggcggcgcggcttcagcgacctggttgcaaattattgccgactgtaccggcagaacggtggtttccagtactttcaacgagcttagcgcgcgcggtgcggcgattctggcggcgcgcagcgttgatgccctcagccgctatccggcgctggagcagacccgctatcggcccaatccacaggcgcacagccgctacgtcgcgctctatccggtttatcgcctgctgcgcgagcagatgctgccggtgtggcacgcccgccgcgaggcgcttcaacgtatttctcaggaacaacgcatatga

SEQ ID NO: 254607 - DNA, 612 bp, Klebsiella pneumoniae
atgtggcaagaaagactcgcgcaactggtcaccacctgtcattggatcggtgcgaaaggttgggcgcccgctaccggcggcaatatgtcggtgcgtcaggatgagacctggtgctggctgagcgagtcggggcgtgataaaggtagcctgacgacggaggatttcctacaggtggagatcgccagcaataaagcgccttccgggcgtaaaccctcagctgaaaccggcctgcataccctagtgtatcgcctgttcccggaagcgaatgtcgtactgcatgtgcataccgtcaacgcgaccgtgctgtcgcggattgaaaaaagcgccaccctggcgctacagggttatgagatgcagaaaaccctggccggccagcacagccatcttgataccgtgccggtcgccatttttgataacgaccaggatatcgacgccctggcggcgcgcattgaagattatgcgcagacccacccgctgcgctacggcttcctgctgcgcggccacggcctgacctgctggggcaaagatattcccgaagcccgtcgccagctggaaggactggagtttcttttcgaatgcgagctgatgcgccgccgctacgagcgcgactaa

SEQ ID NO: 254608 - DNA, 1077 bp, Klebsiella pneumoniae
gtggtaccttcttactactttttccgtgccgacgatgggctcctgcgtcggcgcgggctcactgaggacaacccgtaccctgatactatgagcaaaaaaaaatggattaaggcagaggacgttgcccggctcgctggcgtctcccgttccgcagtttcccgcacctttacccccggcgcgtcggtggcggaaaaaacccgccagaaggttctcgccgcggcggaaacgctgggctatcaggtgaatatcatcgcccgcacgatgaacaccggcagcagcaactttatcggcatcgtcaccgccggatttgataacccgttccgcagtaagctgctgtcgccgctggtccaccagctggcgctcaacggttttatgccgctgctgatgaacgccgacgatccgcagcagctcgccccgtcgctcagacagttgctgagctatcacgtcgcaggcgtcattattacctccggggcgccgccgctgtcgctggcggaggagtatctggagcgaaaaatcccggtcacccttatcaaccgccacgccgacctggccggctgcgatcgcgtgtgcagcgacaacgcgcagggcgcgaagctggtcgccgacctgtgtactcagcgccagtggcgccaggccgggtttatcggcgaaagtctggataacttcagcacccgccagcgctacgaagcgtttgttgcccatagccagggcatggagatcgccgcgcacttctgcgacagcagcggctatcaggcgggatttgccgccgccagacagctgcttgccgcacatccgcagctgcaggcgctcttctgcgccaccgatatgctggcgctcggcgccctggacggtctgcgggcagacaaccccgccgcttcgctacccgctattatcggcttcgatgatatcccgcaggcggactggcagccctatcagctgactaccgtgcagcaaaatactgccctgctcgcccaccatgcggtggatctgctggtcacgcggatcgccaaattcagtctgccgtcacgccatcgtgaagtgccggtgaaactgatcgttcgtcaaagtacaaaatga

SEQ ID NO: 254609 - DNA, 810 bp, Klebsiella pneumoniae; identical to SEQ ID NO: 174867

SEQ ID NO: 254610 - DNA, 1362 bp, Klebsiella pneumoniae
atgtctggaagaattatcgcattttttcgcgcttcgccgcccaaagcgagcggagagttcgatgagcggcgctttcgcagcgtgcgctggcaaacctttattaccatgaccctggcgtacgtcacgttctacgtttgccggctatcgttcaccgtcgccaaaagcgcgctggtggaactcggcataaccccaacggagctgggcatgatcggctcaacgctatttttcagctacgccatcggcaagctggtcaacggctttattgccgatcatgccaacgtagtgcgctacatgagcctcgggctactgctaagcgccggaatgaacctgatgatggggatgaccagcaacgccatgctgctggcaatcttctgggggattaacggctgggcgcagtcgatgggcgttggcccgtgcgtggtatcgctggcgcgctggtacggctgtaaagaacgaggcactttttacgcgatctggtcgacggcgcataacatcggcgaagcgatgacctatatggtgatcgccgcggtgattgccggattcggctggcagatgggctacctgtcgaccgccgcgctcggcgccgccggggtggtgctgatgctgttgtttatgcgcgactcgccgcaaagctgcggcttcccgcccatcaacgtcattcgcgatgaaccgcaggaggagacggaagcccgcggctcggtatttaaaaaccagctgctggcgctgcgtaacccggccctgtggacgctggccctggcctcggcgtttatgtatatcgaccgttacgcagtgaactcgtgggggatcttctttctggaacaggataaagcctactctactctcgaagcgtccgggattatcggggtcaacgctatcgcgggtattgccggaaccattatcgccgggatgctctccgaccgctttttcccgcgtaaccgcagcgtgatggccgggtttatcagcctgctcaacaccgccggcttcgcgctgatgctctggtcgccgcacggctactacaccgatattctggcgatgattatcttcggcgccaccatcggagcgttgacctgcttccttggcggactgatcgcggtcgatatttcatcgcgtaaagccgcgggcgccgcgctcggcactatcggtatcgccagctacgcgggggcgggactcggcgagtttctcaccggcatcatcatcgataaaacctcgatgatcgaaaacggcaaaacgctatatgacttcagtacgctgtcgctgttttgggtaggcaccggcctcgtgtccgcgctattctgttttaccaccgctgcgattgtcgccaggcgacacgcgatagaacgtcagacctcattctcgtcataa

SEQ ID NO: 254611 - DNA, 1269 bp, Klebsiella pneumoniae
atgatgcctgtacgacatcaggttttgctacgcctgctgcttacctgcgctctgccgctgctggccgcaccgggccatgccgccacgcagtatgcgctggaaaaagtggttgaactcagccgccacggcattcgtccgccgacggagggcaaccgggaggccatcgaagccgcgacccagcgtccgtggacgcagtggaccacccacgacggcgagctgaccggccacggctatgccgccgtcgtcaataaggggcgcgatgagggcgcgcgctttcgccaactggggctattgacggcaggctgcccggcgagcggtgagatttatgttcgcgccagccccctgcagcgtacgcgggccaccgcccaggcgctggtggacggcgcctttcccggctgcggcgtaatgattcatcacgtcagcggcgacgcggatccgctgtttcagaccgacaaatttgccgccacgcaaaccgatcccgcccgccagctggcggaagtgaagaagaaggccggcgatctggcgcagcgtcggcaggcgctggctccggcaattcagcggctgaaaaacgcggtctgcgtacccgataagccctgcccggtgtttgatctaccgtggcaggtggagcagagcaaaagcggcaaaacctcgattagcgggctgagcgtgatggccaatatggttgagacgctgcgtctggggtggagcgagaacctgcctctcagccagctggcgtggggccatattacccgttccagccagataaccgccctgttgccgctgctgacggagaactacgatctcagcaacgatgtgttttataccgcgcaaaaacgcggctcgattctgctcaacgccatgcttgaaggggtaaaagagggcgccgcgccgaacgtgcgctggctgctgctggtagcgcacgatacgaatatcgccatggtgcggacgttaatggactttagctggcagctgccagggtacagccgcggcaatatcccgccgggcagcagcctggtgctggaacgctggcgcgatacccgcagcggtcaacgctacctgcgcgtctacttccaggcgcaaagtctggacgatttgcgccgcctgcaaacgccggatagccagcatccgctgctgcgccaggagtggcgtcaggcgggctgccagacgaccgatgtcgggacgctgtgcccttaccaggcggcgctgaccgcgctgggccgcaatatcgacccgcagtccgctccggcggtggagatggtgctgccataa

SEQ ID NO: 254612 - DNA, 1029 bp, Klebsiella pneumoniae
atgcagacactacagaccaccagcctgcgggtaagcgaaaatcagctctttattcttgaccagcaggccttaccgcaggaaaaacgctggctggcggcggataacgtcgaattgctggtggaccatattcacgccctgcgggtacgcggcgcgccgttgattggcctgtccgccagcctgctgctggcgctgctggcccggcgcggtctgacccgcgatgcgctatctgaggcgctggagacgctgcgcgccgcgcgtccaacggcggtgaacctgatgaataatctggatcgcatgaagctggcgctggcgaaggagcactatccgcaggcgctggaagcggaagcgctgcgcctggtcgccgaggataaacagctttgcgccagcatcgccgaggcgggcagcgcgctggtgacgccgggtagccgcctgttgacccactgcaataccggcggcctggcgacggcgggcgtcggcaccgcgctgggggtgattgcgctggcgtatcagcaggggaaagtggcaaatgtttgggtggatgaaacgcgccctctgttgcagggcggacgcctgaccgcctgggagctgggtgagctgggggtgccgtatcggctgattaccgattcgatggccgccagcctgatggcgcagggccaggtcgacgcggtttgggtgggtgctgaccgtattgccgccaacggcgacgtggcgaataaaatcggcacctattcgctggcggtgctggcaaaatatcaccagatcccgttttacgtagccgcgccgcaaactaccctggatcgccattgcccgaacggcgcggcgatcccgattgagcagcgagcagccgccgaagtcaccggcgtcgccggcagctttggcgcggtgcagtgggcgccgaaagaggctgcggtttacaatcccgcgttcgacgtcacgcccgcaacgttagtcagcggctgggtgctggatagcggcgtggtcaccccggagcaggtcgccgccggggccttcaaaccagaaaaagcctga

SEQ ID NO: 254613 - DNA, 1200 bp, Klebsiella pneumoniae
atgtcgcaataccatactttcacggccagcgatgcggtggcttacgcccaacaatttggcggtatcgataatccgacagaactggtgtccgcgcaggaagtgggcgatggcaacctcaacctggtgtttaaaatttttgataccgagggcgtgagccggattatcgttaagcaggcgctgccctacgtgcgctgcgtaggagagtcctggccgctgacccttgaccgcgcgcgccttgaggcgcaaaccctggtggctcaccatcagcactgcccgcagcacacggtgcggattgtgcatttcgatcccgagctggcggtgatggtgatggaagatctttccgatcaccgcatctggcgcggcgagctgattaacaacgtttactacccgcgcgccgccagccagctgggggaatacctggcccaggcgctgttccacaccagcgacttttatctgcatcctcacgagaaaaaggcccaggtggcgcaatttatcaaccccgagatgtgcgaaattaccgaggatctgttctttaacgatccgtatcaggttcatgagcgcaacagctatccatcagcgctggaaaccgacgtcgccgccctgcgagaagatgcccagctgaagctggcggtggccgcgctcaagcaccggttcttctcccatgccgaagcgttactgcatggcgatattcatagcggctcaattttcgtcgccgaaggcagctttaaggccatcgacgccgagttcggttttttcggcccgattggcttcgatatcggcaccgccatcggcaacctgctgctcaactactgcggcctgccggggcatctgggcattcgcgatgccgccgccgctcgcgaacagcgcctcaacgatatacagcagttctggaccacctttgccgagtgtttccaggcgctggcggcggagaaatcccgcgacgtggcgctggcctgccccggctatgcctcctcatttctgaagaaagtgtgggccgacgcggtgggcttctgcggcaccgagctgattcgccgcagcgtcgggctatcgcacgtggcggatatcgacgctatcccggacgaagccatgcgtcatgaatgcctgcgccacgccatcaccctgggtaaagcgctgattgtgattgccgatcgcatcgacagcgtggatgagctgattgcgcgaattcgccagtacggttga

SEQ ID NO: 254614 - DNA, 1242 bp, Klebsiella pneumoniae
gtggctgaattaccgcgcccggaatacagccgcaatatgcggctgattggacatagcgatcagggaggacgcccggacggcgtccaactgatggtacatcggggttatgcctatattggccatatggtatcgcagggcttttccgtagtggacgtacgtgacgcgaaaaatccgcgaacggtcaattacatcgccgcgccacccggtacctggaacgtccatttacaggcgcacgacgatctgctgctggtgatcaacgcccgggatctgttcgccgatgcccgcttcgccgacgagaaggtttattacacccgttcggtgggcgagacggtcagcgacgtacgggagaagggctggagcgccgggctgcggatttttgatatctccaccccggataaaccgcaagagatcgcctttctgtcgcttaacggcatcggtattcaccgaatctggtacgtcggcgggcgctgggcctacgtttccgcgctgattgacggctttagcgactatattttcctgactatcgacctggccgatccgcgtaagccggaagttgccgggcgctggtggctgccggggatgaaccaggcggcgggggagaccgcgcagtggccggaaggtaagcgctatgccctgcatcacgcgattatcgccggcgacaccgcctacggcagctggcgcgacggcggcctgaccctgctcgatgtgcaggatcgctctcagccgaagctaatcagccaccgtaactggagcccgccgtttggcggcggtacccacaccgcgctgccgctcccggaccgggatctgctggtggtgcttgatgaggcggtactggataaccagcaggatggggagaagctgatctggctgttcgacattcgcgagccgacgaatccggtgagtatcgccactttcccgcagccggatgaagctgattacgtggcgaaaggtgcgcacttcggtccacataacctgcatgagaatcgccccggcagctttgtcagctcaacgctgattttcgccacttatcagaacgcgggcgttcgcgcttacgatatttccaacccttatcggccggtggaaaccggggcgctggtgcccgccgcgccggcgaaaatgatggatacccgccccggtcgtccgcgggtgatccagtcctgcgatgtgttcgtcgacgctcagggaataatctacagcaccgactataacggcgggctgtcggtgattgagtatttggggtag

SEQ ID NO: 254615 - DNA, 999 bp, Klebsiella pneumoniae
gtgagtaaagccctggcagttaacgcggcggtttctggccgtcagcgatttttcgattttctctacaaatggggcatgttactgaccgtcgtcctgctgatcgccgtttttggtctggcatcggacaacttcctcgacccgtttaacatcatcaatatcctgcgatctatcgccatcgtgacggtgatcgctatcggcgtatcgatatccctgaccatcggcggcttcgatttgtccgtaggctccaccgcctcgctggccaatgcgctggtgatttcgctgtttgtctggcacggcttcggcaccaccgaggcaattcttgtcaccctcgcgctctgtaccttagtggggctgttcaacgcgtttctgatcgtgatcctgcgtatacccgacatgctggcgacgcttgccagcctgttcgtgattcagggtgtggcgatgacttacagctacggcgggtcgatcaccgaaaatatggtgctgccgagcggcgatatggcggaaggcgcgattccggcggcgtttggttcgctcggacaggtgccgacgatagtgatcattatgctggtggtgaccgttgtcgcccagctggcgctctccttgaccactcacggccggcggatgtacgccatcggcggcaatccggaagcggcgcgcctctcgggtctgcggatcacccggtacaaagtagccgcttacgtgatcgcctccctgctggcggggctcggcggcattctgctggcgtcgcgcatcggctcatcgcaggtgaacgccggcggcggctatctgatggatgcggtggcggcggcgtggattggcttctcgctggccggttccggtaagccgaacgcgctcggtacgctggtgggggcggtcattttaggcgtgctctccaacggcctggtgatgctctcggttccctattacgcgatggacattattaaagggctggtgctggctggcgcgctcgcactgacctattttcagcgccgtacctaa

SEQ ID NO: 254616 - DNA, 1503 bp, Klebsiella pneumoniae
atgaccggcaatcgccttgagatgcaaaatattagcctggccttttccggctttcgggcgctcagcaacgtcgcttttaccctgcaagggggctcggtgcatgcgctgaccggcgctaacggcgcaggcaagtccacgctaatggcggtgctgtgcggcacgcacgcccattacgaaggcgaggtggtgattaacaaccagccggtgagcattcgctcgccgcgcgatgctaaacagctggggattcatctggtgcagcaggaggtagacgtggcgctggttccgggcctgagcatcgcggaaaacatcatgctcgacaggctggcggaaccggggctcgccttccgctggggacggctgcgccagctggcgcgcgaggcgctggctcagcttgacgtcagcctcgacgtgcgccgctccatcgacagctgcacgctggcggaaaaacagcaaatcctgctggctcgcgccctgtcgcatcactgccgctttcttatccttgatgagccaaccgcgccgctggaccaaaacgaaagcgagcgcctgtttgcggtggttcgccgcctgcaacagcagggccttggcattgtgtttatctcgcaccgcattcatgaattaaaagccgtttgcgacaccctgacggtgctgcgcgacggccgactgattgagagcgggccgatggccgatctcagcggcgaacagatcgtcgagagaatgctcggtcatgagctgagcgatatcttcccgccgaagcggccgccccatagcgatgaggtactgctacaggtggaagggctgcacgacgaagggttattgcaggatatctccctgcgtttgcgcaagggagagattctggggatcgccggactggcgggcgccggcaaaaccgagctgtgcaaggcgctgtttggcgccagcaagagtcgtttgacgcgcggcgaactgaatagccagccgtggcgaccgcgcgacccggcggactcggtagcgcgcggcctggcgctggtgccggaagagcggcgcaaggagggcatttttatcgaggagccggtggcgatgaatctggcggtcagcgccgatagcagcttctctcgctggagcctgtttggccatcgtcaggcctggcgctgggcggaagaggtgattgcccgcgtaggcattcggacttcaggcccggcgcagagcctgcgccggctctccggcggtaatcagcaaaaggtagcgattggcaaatggctgcgcggcaacgccaacgtcctgattttcgatgagccgaccaaaggggtcgacgtcaaagccaaaacggatttattcaatgtgatcgacggcctggcgcgggaaggcaaaggggtgatttacgcctcgggcgaattcgccgagctggtcggcctgtgcgatcgcatctgcgtgctgtgggacggacgcatcgtggcggaaattgcgggcgcggaggcccgggaagaaaacattctttattactccaccggaggagcagcagcgtga

SEQ ID NO: 254617 - DNA, 1089 bp, Klebsiella pneumoniae
atgagtcatagcgatatccgcgtggtccccggccccgccaactactattcccatcccggcagccttgcgcggctgcaggatttttatagcgaagaacagctttcacgcgcggtgtgggtttacggcgagcgggctatcgcaggcgcccaggcttttctgccggcagcgtttaacgctcccggagccaaaaaaatcctctttaaaggccactgtagcgaaagcgatgtcagcgagctggcccgcgcgtccggcgacgatcggtcggtggtgattggcgtaggcggcggagcgctgctggataccgcgaaggcgctggcccgacgcctcggcctgccggtggtggctatccccaccatcgccgccacctgcgcggcctggacgccgctgtcggtgtggtataacgatgccggtcaggcgctgcagtttgaaatcttcgacgatgccaactttctggtactggtggagccgcgcattattcttaacgcgccggcggaatatctgctggcgggcatcggcgatacgctggcgaaatggtatgaagcggtagtgctggccccgcagccggagacgctgccgctcaccgtgcgtcttggcatcaacggcgcgctggccatccgcgatgtactgctggaaagcagcgaaaccgcgctggccgaccagcaacgtggcgagctaacccaggctttccgcgacgtcgtggatgcgatcatcgccggcggcggtatggtcggcgggctcggcgagcgctatacccgcgtcgccgccgcccatgcggtgcataacgggctgacggtgctgccgcagaccgagaagtatcttcacgggaccaaagtcgcctacggtattctggtccagagcgccctgctcggccaggacgacgtgctggcgcagctggtgcaggcgtatcagcgctttaatctgccaaccaccctggcggcgctggaggtggatatcaataaccgcgaacagctgaataaggtgattgcccataccctgcgcccggtggagtctatccattttctgccggttgaactgaacggagaaaccctgcgcgccgcgtttgagaaagtcgaacgtttcgccggttaa

SEQ ID NO: 254618 - DNA, 294 bp, Klebsiella pneumoniae
atgctcatctggtcaaaagtggcaaaaaaggaactggcaaatatcgattatcgctatcagcagagaatcaaaagcaggctagctgatttaggtgaccgtacggctcctcggcccgatgtcagaaagttatctaaaccagagaatcattaccgtcttcgggtaggggattatcggatcattttcacacgtcaggggctgacgctgaacgacctgtttatcgtgtccgttaagcgcagaacctcaacaacctatttgcatgaggagaatatgccatatggctgttcagataattaa

SEQ ID NO: 254619 - DNA, 198 bp, Klebsiella pneumoniae
atgtttgataccctttcgaaagcaggaaaatatctgggccaggcggcgaagatgatgatcggcgtcccggattacgacaactacgtggagcacatccgcgcgacccaccccgagcaaacgccgatgacctacgaagagttttttcgcgaacgtcaggacgcacgctacggcggtaaaggcggcgcgaagtgctgttaa

SEQ ID NO: 254620 - DNA, 894 bp, Klebsiella pneumoniae
gtgacagatgtggtggcgtcggcggcgcaggtggtgagtagctggggctttaccgtcaccccggatacgctcaatcagatcgccaacgaggtaggggaacagtcgattatttcacgcgcgggcggcgcgccgacgctggcggtgggcatggcctatatcctccacggttcgctgggcggcctgatggacgtctctttctggtaccacttcgcgattctgtttgaggcgctgtttatcctgaccgcggtggatgccggcacgcgggcggcgcgctttatgttgcaggatctgcttggggtgatcagcccggggctcaagcaaaccagctccctgccggcgaaccttcttgcgaccgcgctctgcgtgctggcctggggctacttcctgcatcagggcgtagttgacccgcttggcggcatcaacaccctctggccgctgtttggtattgccaaccagatgctggcagggatggcgctgatgctctgcgcggtggtactgtttaagatgaagcgccagcgttatgcctgggtcgcactgctgccaacctcctggctgctgatctgtaccctgaccgcgggctggcagaagtcgttcagcaccgataccaaagtgggcttcctggcgattgccaacaagttccaggcgatgattgacagcggcaatattccgccgcagtacaccgagtcgcagctggcgcaactggtgtttaacaaccgtctggatgccgggctgaccatcttcttcatggtggtggtggtggttctggcgctgttctcaattaagaccgcgctggcggcgttgaaagaggacaaaccgacggcgaaagagaccccttaccaggcgatgccagctgatgctgaaagcctggtcacccaggcgaaacgcgcccattaa

SEQ ID NO: 254621 - DNA, 444 bp, Klebsiella pneumoniae
atgttaagcggattaaaccatctgactctggcggtcagccagctggcgccgagcgtggcgttttatcagcagctgcccgggatgacgctgcgcgcgcgctgggataacggcgcttatttttcctgcggcgacctctggctgtgcctgtcgctggaccctcagcggcgcgttaccccgccggaggagagcgactacacccactatgctttcagcattgcggaggcggatttcgcgctttttgccggacggctgaatgcggctggcgttccggtttggaaaaccaataaaagcgaaggcgcgtcgcactattttctcgacccggacggccacaagctggagctgcatgttggcaacctcgcccagcgcctggcggcgtgccgggcgaaaccctataaaggtatggtgttttttggcgaggacgaacaggcggccgggaacccgtag

SEQ ID NO: 254622 - DNA, 909 bp, Klebsiella pneumoniae
atggttaatctccagcgtctggatctcaatctgctacgcacgcttcacgtcctgcttagcgaaaataacgtcacccgggcggcgcagcgcctcaacctgtcgcagccgtcggttagcgtccaactggcgagactgcgggaaattttcgccgacccgctgctgctgccggggccgcgcggaatgcagcccaccgcccgcgccgatgagctgcgcgggccgctgcgcgatgcgctgctggcgctggagctggcggtggcgccggttcagccttttgacccggccacggcggcgcagacctggcgggtggcggcgaccgactatatggcgtcggcgattttgctgccagcgctcaacgcgctgcgcatcgcctctccggccagccgtctggcgctgtttgagctgcagccctcgcggctggttcagcaggcggatcgcgacgaagtggatctgttttttcacacgcgcgatggtgcaccgcccgcgctgcatcagcgtttgttgttccacgaacgctacgtgcttgccgggcgggccgggcacccggcgctgcagtcggcgttaactctggcgcagttctgccagctggaacaggtgattgtctcgccggacggcggaggattcagcgccgcgaccgatagcgcgctggcgaatctcggtctggcgcggcgagttgtcctttccgtgccacatttcctgtttatgctggagacgctgtgcaatagcgagctggtggcggtgctgccggagcggctggtgagcggagctgcgggtctgacggtggtcgaaccgccgctggcggtcgccggatttgatatgttgatgctgtggcacgagcgctggcatcgcgacccggcgcatcggtggctgcgccagcaaatcgtaacgtcattagaggagaagctatgttaa

SEQ ID NO: 254623 - DNA, 783 bp, Klebsiella pneumoniae
atgaaaatattactggtttacgcccatcctgaaccgcgttcgcttaacggcgcgctgaaagattttaccgtgcaacatctacaaaacgccggtcacgacgtgcaggtgtccgatctctacgccatgcgctggaaggcgggatttgatgccgacgacagctgcgccccgccggtgggtgcaagctggcgggcgacgcgagattcgcaatatgccttcgctcacggcacgcagagcgcggatatcgtgggcgaacaggagaagctgctgtgggccgatacggtgattttccagttcccgctgtggtggttttcactgcccgccatcatgaaaggctggattgatcgggtttacgcttacggatttgcctacggcgtcggcgagcacagcgatacgcactggggcgatcgctacggcgaaggcacgttcgcgggtaaacgggcgatgctggtcgttaccgccggtggatgggcggagcactatgcgccgcgcggaattaacgggtctatcgacgacattctgttccccattcagcacgggatgttgttctatcccggatttgaggtgctgccgccggtggtgttctaccgcaccgacaaactcgatgaacagcgcttcgccatcctgcgcgaggagctggcccggcggctggataccctctctgaaacgccgcccattcctttccgccgtcagaatcacggcgactatttgatcccctctctgaacctgcgtccggagctggcgcctggagaaaatggcctcgctatccacgtgaagcctatgtga

SEQ ID NO: 254624 - DNA, 801 bp, Klebsiella pneumoniae
atgcgctataacatccatggccgtcttatttatgatgcaatggacggcacgctaacgttaccgggaagcgatgaggcggacagccagctgtccatcaccgccaacgcgctgctgtggttcttcctgcgccacaccgaggtggtcagccgcgacgaagtgcttaaaaaagtctgggatgacaatgggttaacctcatccaacagcaatctcaatcaatatctgagcatgctgcgcaaaacctttcgccactacgatatcgacaacattatcgtcaccgtatcgcgcggattgctgcagctcaatccggacctcgctatcgagatgctcgacgccagcccggagccggaaccggcgcctgcggcagaagctgagccagatctggccaccgccccggcagaacagaagaccgtttccagtcgccacgcgcgcggcacctgctggtatctggccggcggctgcctgctcaccatcgccctgctgctggtggtctgcagttttctcggcggcagcacagcgcaccccattaccctgacgcaaatacgccacagccagtgcgaactgctggccagcgatgagatgctgcgatccgttgccgaaagcgcctacggcaagaattttgatgctgtacgccagcgcctgaagctggagtgcaagcccggcgaacgcttcgtcttcttctatggcgaccggctggaaaccaacggtctgggccgggtgttcctcgcccactgcgcgatgcatgaagataacccgttcagctactgcgataactatttttattattcatggaagccgcaatga

SEQ ID NO: 254625 - DNA, 429 bp, Klebsiella pneumoniae
atgaaaagtttaggcgtaattgaaacgcgagggttagttgccgccgttcaggccgtagatgccgcctgtaaaagcgcaggagtgacctgctttggctaccgcaaagtcggatcggggctggttagcgtctgctttgagggggagatcagcgcgattcacaccgccatcgaacgcggcgtggccgtcgctgagcttatcgacccgcaggtgaaatccctgacgattgctcgtccggaacgcagcgtcgtggaagccctcagcaccctcaaaggccatccgccgcgtgcgaaagctgccgctgcagccccgcttgaggctgaaatcgtcgcacccgccgctgtggaaacaagggaacccactgagcccgccgccgcgcccgcggcgacggaagataaaaacgcggcgatgaggaaagggaagaaggcatga

SEQ ID NO: 254626 - DNA, 687 bp, Klebsiella pneumoniae
atgaccaaccaacagatggaagagctggttgaacgcattgtccagcgtctgcggccgccggtactggtaatggtgaccgccgcggcgggctaccggcacgctattcgccagcggctggccggctgcggcgagagcctgcacctggcgctggatagcggcattgacgacggcgagcagtggcagagtatcggtaaaacgctaccggcggctgactggcaatatgggctgccgtccgctgcgtataaagcgctgctgctgccatttctcgactactcgctggcggcggatctggtgaatggttctctgcacagtccccttgcccaccgcgtgcacgatgctctgctgagcggtctgccggtgctggcgctgcgctatcactgcgatcccgccagcgagcttaaccagctgcggggcgcgcagcctgataccgcttacgccgggcatatgcaggccacgctttcccgcctggccgaatgcggcgtcacgctgtgcaccatgaacgaattgctggagaagctggcgtcgggtcgcgaagtaacggtggcgccggcgagcggtccgcgccgttatctcactgtcacagacgtggtgaataatccggcgctggccggtgcgcctcaagcgcagttaaccgatgccgctatcgattttttaaaaaacagaaaaaaagaaccttaccttaaatag

SEQ ID NO: 254627 - DNA, 417 bp, Klebsiella pneumoniae
atgtcttcaaaaacaaagtgttggctatggatgctgctggttatcgtttccgaaacctcagccacctccaccctcaaaatgttcggcagcagtgaagggataaccaaaatgctgctgctcgggctgctggtgctgctgtactgcacctgctactactcgctgtcccgcgcggtgaaagatattcccgtcggtctggcctacgccacctggtccggtaccggcatcctcgtggtatcgacgctgggaatggcgttttacggccagcacccggataccgccgccattataggcatggcggttatcgccagcggtatcgtgatcatgaatctgttttccaaaatgggtagcgaagagagcgaggaagcgcccgcagaaccctcggctgcttcatcactggacaaaaaagtcgccaactaa

SEQ ID NO: 254628 - DNA, 1389 bp, Klebsiella pneumoniae
atgaaacgtatccctgagccgttccgcattaaaatggtcgaaaatattcgtatgaccacctttgacgatcgcgtcaaagcgctggaagaggcgggctataacccgtttttgctcaatagccaggacgtgtatatcgacctgctgaccgactccggcaccggtgcgatgagcgaccatcaatgggccgggctgatgatgggcgacgaagcctacgccgggtcgcgtaactatcagcatctgtgtgaaaaggtcaaagagattatcggctatccgtataccattcccacccaccaggggcgcggcgcggagcagattctgttcccaagcctgattgctcgccgcaagtcggcgcatccggtgtttatttccaacttccacttcgatactaccgccgctcacgtggagcttaacggcgcaaaagccattaacgtggtgacgccgaaagccttcgacacgacctcgtggtacgactggaaaggcaactttgatattgatttactgaaagcgaccatcgccgagcacggcgcggaaaacgtggcggcgattattactaccgtcacctgtaacagttccggcggccagccggtatcgctggcgaatatgcgcgaggtgtatcaaattgcgcgccagaacaatattccggtggtaatcgactccgcccgcttctgcgaaaacgcctggtttattaaacagcgcgaagagggctatgccgataaatcggtgaaagagattattctcgagatgtaccagtacggcgatatgctgaccatgtctgccaagaaagacccgatggtgaatattggcggactgtgctgcttccgcgatgacgaagagctcttcaacgaagtgcgcattcgctgcgtgccgatggaaggctttgtcacctacggcggcctggcggggcgcgatatggaggcgctggctatcggtctggaagaagggaccaacgaggattacctcgcttatcgcatcaatcaggtggagtacctcggtgaacgcctgcgcgaaggcggcattccgattcagtatccgaccggcggccatgcggtgttcgtcgatgctaagctgctgctgccgcatattccgccggagcagttcccggcgcacgcgctaaacaacgagctgtatctggaagcgggcattcgcagcgtggaaatcggctccctgctgctgggacgcgacccggaaaccggtaagcagaaggcgtcgccgatggagctgctgcgcctgaccattccgcgtcgggtttataccaacgatcatatggactatatcgctgatgcgctgatcgccgttaaggcgcgcgccgccacgattaagggcctgacctttacctatgaaccgccggtactgcgccacttcgtcgccagactgaaaccggtgaaataa

SEQ ID NO: 254629 - DNA, 1257 bp, Klebsiella pneumoniae
atggctacattatcagtctcaaaagcggtctcaactaatacaccatcgctgattggcggagcgatgattatcggcggcacgattattggcgcaggcatgttttctttaccggtggtgatgtccggcgcctggtttttctggtcgctgctggcgcttatctttacctggttttgcatgctgcattccgggctaatgatcctcgaagccaatctcaattatcatattggcgccagcttcgacacgattacgaaagatttactgggaaacggctggaatattatcaacggtctgaccgtcgcctttgtattatatatcctgacctacgcctatatttccgccagcggttcggttattcagcatacttttgcgcagatgaacctcgcggttcccgcacgcctgggcgggctggcgttcgcgctgatcgtcgcctttatcgtctggctgagtacgaaagcggtaagccggatgacgactatcgtgctgggcgccaaaattctcaccttctttatgacctttggcggtctgatgtggcacgtggagcccgcgattctgtttaaccgcgcggaggtcaatgcgtcctatctgccctacgttctgatgacgctgccgttctgcctggcctcctttggctatcacggcaacgtccccagcctgatgaagtactacggtaaagacccgcttatcattcgccgctgcctgctgctcggcacgctgatggcgctggtgctgtatatcatctggctggtcggcacaatgggcaatattccgcgcccggcgtttatcgctatcgccgaaaaaggcggcaacatcgacgtgctggtgcagaccttaagcggcctgctgaacagttcgactctcgatttattgctgaccgtcttttccaacttcgccgtcgccagctcattcctgggcgtaacactcggcctgttcgattacctggcggatctgtttaagtttgacgatagccggctggggcggtttaaaaccgcgctggtgacctttctgccgccgatcgccggcggtctgctgtggcctgacggttttatctacgccattggcttcgccggtctcgccgctaccgtctgggccgctatcgtccccgccctgctggcgcgcgcctcgcgcaggcgtttcggcagcccgaactatcgggtctggggcggcaatgccatgattatcctgattttatgcttcggcggcgccaacgcgataattcatgttttatccagttttaacctgctgccagtttatcgctaa

SEQ ID NO: 254630 - DNA, 1008 bp, Klebsiella pneumoniae
atgaacaccagccaaacgatcctgaccggcgaccgtcctaccggccagctgcacctcggccactacgttggttccctgcgccagcgcgtgctgctccagcacgatcatcagcagtttatcctcgtcgcggacctgcagggactgaccgacaacggcagtaacccacaaaaaatcagcagcaatatccttgaggtgatggccgattatctcgccgtcggtatcgatccgcagaagaccaccatttgcctgcaatccgctctgccggcgctggccgaactcagcacgctgtatatgaatatcgtcaccgtcgcccgggttgaacgcaatccgacggtgaaaaatgaaatcgcgcaaaagggattttcccgctcgctgccggtgggatttttagcctatcccataagccaggccgccgatatcaccgcctttaaggccgaactggtgccggttggcgacgatcagctaccgatgattgaacagaccaacgagatcgtgcacaaaatgaatagcctgacgacgacgccgatcttacagcactgcaaagcgctgctcagcgacgtcagccgcctgccgggcatcgatggcaacgccaaaatgtcgaaatcgctggggaacacgctccccctttcggccagcgaagaggagatccatcgtgcggtcagcgctatgtataccgatccgaatcacctgcgggtcgccgacccgggtcagacagaaggcaacgtggtctttacttatctcgatgcctttcatgctgataaggccttcgttgccgagatgaaagcccactatcggcgcggagggctgggagacaggcagtgcaaaaatgcgctggagacctgcttacaggagctgctggcgccgatacgcgagcgtcgggcgacttatattcaggataaaggcatgctgctggcgctgctgcgccggggaagcgaacgggcgcacgaactgacacaacggacgctgcatgaagtaaaacgcgggctggggctgccggtgctgttttga

SEQ ID NO: 254631 - DNA, 1068 bp, Klebsiella pneumoniae
atggacaaaatcaaacgacgttgggttggatacgttattggtttagcagtggtgattgccgctgcggcatggtggatgctgcgcccgccgggggttccggcaggatttgccagcagtaacggtagaatcgaagccacagaagtcgatattgccaccaaaaccgccggacgtatcgataccatcctggtcaaagaggggcagtttgttcgtcagggcgatgtgctggcgcgtatggacacccgagtgctcaacgaacagcggctggaggccgccgcgcaaatcaaggaagcagagagcgcgattgccgccgcgaaagccctgctcgaccagcgtcaaagcgaaatgcgcgccacggaagcggtggtgaagcagcggcaggcggagctgaactcctcggctaaacgccacgtccgctccagcacgctctcgcagcgcggtgcggtctccgcccagcagctggatgacgaccaggcggcggcagaaagcgccagggcggcgctggaatccgcgaaagctcaggtctctgccgccagggccgcgattgaggcggcgcgaaccagcatcattcaggcgcaaacccgggtcgaggccgcccaggcgaccgaacggcggattatcgccgacatcgacgatagcgagctgaaagcgccgcgcgatggccgtattcagtaccgcgttgccgaaccgggagaggtactggcggcgggaggccgggtgctgaatatggtcgacttgtccgacgtttatatgaccttcttcctgccgaccgagcaggcgggtctgctggcgctgggcagcgaagcgcgaattatccttgatgccgcgccgaatctggtgattcccgccaatatcagttttgtcgccagcgtggcgcagtttacgcccaaaacggtggaaaccagcgatgaacggctaaagctgatgttccgcgtgaaagcccgcattccgccagagctgctggcagagcatctggagtatgtgaagaccggcctgcccggtatggcatgggtccgtctggataaccagcaggcgtggcctgaagcgctgaaggtgaggttgccgcaatga

SEQ ID NO: 254632 - DNA, 2730 bp, Klebsiella pneumoniae
atgaaaaccgtcgcccgcctggaaaacgtcagccagcactttggcgcaaccgtcgcgctgaaggacattacgctgagcattcccgcccgctgtatggtgggcctgatcgggcctgacggcgtgggcaagtccagcctgctatcgttgatctccggcgcgcgagtgattgagcacggtaacgtcatggtgctcggcggcgatatgagcgatgcgcgccatcgccgggacgtctgcccgaaaatcgcctggatgccgcaggggctaggaaagaacctctaccataccctgtcggtctatgaaaatgtcgatttctttgcccgtctgttcggccatgataaagccgaacgcgacatccgcatcaatgagttgctccagagtaccggcctggcgccgtttcgcgaccgtccggcgggaaaactctccggcgggatgaagcaaaagctcggcctgtgctgcgcgcttattcacgacccgcagctgctgattcttgatgaacctaccaccggcgtcgatcccctctcgcgagcgcagttttgggatctgatcgacagcattcgccagcgtcagccggacatgagcgtgctggtcgccaccgcttacatggaggaggcggaacgttttgactggctggtagccatgaacgcgggggaagttctggcaaccggcagcgccgatgagcttaaagcgcatacggcaagtcagacgctggaacaggcgtttatcgctctgcttcccgaagcccagcgcctggcgcataaagaagtgatcatcccaccgcgcaatgccgatgaaagcgaaattgcgattgaagcgcgcgggctgacgatgcgcttcggtcaatttgtcgccgttgatcacgtcaactttcgcatcgcccgcggcgagattttcggcttcctcggatctaacggctgcggcaaatcaacaaccatgaaaatgctgaccggactgctaccggccagcgaaggcgaggcgtggctgtttggacaaccggtcgatcccagagatatcgaaacccgccgccgcgtcggctatatgtcgcaggccttctctctctatagcgaactgaccgtacggcaaaaccttgagctgcatgcccgcctgttccacattccggatgcggaaatccccgggcggatcgccgaaataagccagcgctttatgctggaagaggtagaagataccctgcccgcttcgctaccgttaggtattcgtcagcggctctcgctggcagtcgcggtgattcatcgcccggaaatgttaattcttgacgaacctacctccggcgtcgatccggtggccagggatatgttctggcagctaatggtcgatctggcccgtcaggatcgggtgaccatttttatctccacccactttatgaatgaagcggaacgctgcgatcgcatttcgctgatgcatgccggaaaagtcctggccagcgatacgcctcaggcactggtcgaacagcgcggttcggccacgcttgaagaggcatttatcgcctggctacaggaggcggcagaggcgacgcagccgccagatgcgcaggctacagcggttcccgcgatgaaacacaaaaccgaaagcagtgtgccgcgtcaggcgttcagcctgcagcgcctgtttagctacagtcgccgcgaggcgcttgagctgcgccgcgatccggttcgatcgactctggcgctgctcggcacggtgatcctgatgtttatcatgggttacgggatcagtatggacgtcgaagatctgcgatttgcagtgctcgaccgcgaccagaccgtcagcagccagggatggtcgcaaaatatcgccggctcgcgctacttcatcgaacaaccaccgctacaaagctatagtgaactggacagaagaatgcgcaacggcgagctggcggtggctatcgagatcccgcccaactttggccgcgatatcgcccgagggacgccggtgcaaattggcgtctgggtggacggcgcgatgccgaaccgcgcggagaccgtacgcggctacgtgcaggccatgcatctggcctggctgcaggagatggccggccgccaggctagccccaatcgcgatacttcactgatttccattgagacccgctaccgctataacccggatgtgaagagcctgccggcgattgttccggcggtgatcccgctactgttgatgatgatcccggcgatgctcagcgcgctcagcgtggtccgcgagaaagagcttggttcaatcatcaatttatacgtgacgccaaccacccgcagcgaatttctgctgggtaaacaggtgccgtatatcgtactggggatgtttaacttctttctgctctgcgcactgtcggtctttgtctttggcgtaccgcacaaagggagttttctgacgctcaccctggccgcgctgctctacgtcactatcgccaccggacttggcctgctgatttcaacctttatgaaaagtcagattgcggcgattttcggcaccgcgatcattacgcttatcccggcgacgcagttttccgggatgatcgaccccgtcgcctcgctggaagggcctgggcgctggattggccagatttatccaaccagccactttctgacgattgcgcgaggaacgttttccaaagcgctgaatctgaccgacctgtggggatcctttattccgctacttatcgcggttccgctggtgctgggcctgagcgtgtggctgttgaaaaaacaggagggataa

SEQ ID NO: 254633 - DNA, 1125 bp, Klebsiella pneumoniae
atgcgcggactacgcaatatttataatttgggaatgaaagagctccgtagcctgctgggcgataaagcgatgctgacgttaattgtcttcgcttttaccgtctcggtttactcctccgcaaccgtcatgccgggttcgctgcatctggcgcccatcgctattgccgacatggataagtcgcagctttcatcgcgtatcatcaatggtttttaccggccctggtttttgcctccggagctgattacagctgatgagatggacgccggactggatgcggggcggtatactttcgccatcaatattccgccggattttcagcgcgacgttctggccggacgccagcccgagctgcaggttaacgtggacgcgacgcgaatgagccaggcgtttaccggcaatagctatatccagaatattgtcaccggcgaggtgaacagctttgtcgcccgctaccgggacaacggcacgctgccggttgagctggccgtcagaatgcgttttaacccgaatctggaacaggagcgtttcggcgccgtcatggcaatcattaacaatatcaccatgctggcgatcgtgctgaccgggtcggcgctgatacgcgagcgggaacatggtaccgtggagcacctgctggttatgccggtcacgccgttcgaaatcatgatggcaaagatatggtcaatggggctggtggtgctggtggtttccggactctcgctgatgctgatggttcagggggttctgcaggtaccgatagagggctcaataccgctatttatgctgggggtagccctgagcctgtttgctaccacctcaatcggcatttttatggggacggtggcgcgttcaatgccgcagctggggctgctgatgattctggtgcttttgccactgcagatgctatccggcggctccacgcctcgcgaaagtatgccgcaggcagtacaggatattatgctcaccatgccgacaacccactttgttagtctggcgcaggctattctttatcgaggcgctgatttctctatcgtctggccgcagtttctgacgctgctggctatcggtggcgtgttttttactatcgcgctactgcgttttcgtaagacgatcggggaaatggcctga

SEQ ID NO: 254634 - DNA, 318 bp, Klebsiella pneumoniae
atgaaaattctgattaactggcctcctttgcgccaactgataaattatatccaggagcgttttacctttctggttttgctctgctggccggcgattatctggctggtttgttggctgctcgtatggctaacggagagtgtaatgacgatgctgggcaagtcggtagaccactcatttaccgtgaatttacagccttttatgacgctaagtacgctgctgcgaatctccgttagctgggtgctgctgctatttatcctgttcagcatggcgatgggattcacctggctcctgcggcgctttatgaaccgtaagaaatag

SEQ ID NO: 254635 - DNA, 591 bp, Klebsiella pneumoniae
atgcgcacgcagggcatcgtcgatgaacgtgtcctcgaggcgatcgcgctggtcccgcgcgaaaagtttgttgatgaagcctttgaacataaagcgtgggaaaacaccgcgctgccgattggccaggggcagaccatctcccagccgtatatggtggcgcggatgaccgagctgctgacgctgacgccggagtcgcgggtgctggagatcggcaccggttccggctaccagacggccatcctggcgcatctggtgcatcacgtatgctcggtagagcgaattaagagtttacagtggcaggcgcgtcgtcgcctgaaacaacttgatttacataatgtttcaacccgtcatggcgatgggtggcaaggttggcaggcgcgggcgccgtttgatgccattattgtgacggcggcgccgccggaaataccgaccgcgctgctggcgcagctggatgatgacggcgtgctggtgctgccggtcggcgaagagcatcagtttctcaaacggatccgtcgtcggggcaacgaatttatcattgataccgtcgaggccgttcgctttgttcccctggtgaagggggagctggcctga

SEQ ID NO: 254636 - DNA, 852 bp, Klebsiella pneumoniae
atgatgaacatcatcaacggcggtgagcacgctgacaacaacgtcgacatccaggaattcatgattcagccggttggcgcgccgaccctgaaagaagcagtacgcatgggttctgaagtgttccatcacctggcgaaagtgctgaagtccaaaggcatgaacactgccgttggtgacgaaggcggctacgcgccgaacctgggttccaacgccgaagcgctggctgttatcgctgaagcggttaaagctgcaggctacgagctgggcaaagacatcaccctggcgatggactgcgcggcgtctgaattctacaaagacggtaaatacgttctggctggcgaaggcaacaaagcgttcacctctgaagagttcactcacttcctggaagagctgaccaaacagtacccgatcgtctccatcgaagatggtctggacgaatctgactgggaaggtttcgcttaccagactaaagtactgggcgacaaaatccagctggttggtgacgacctgttcgtaaccaacaccaagatcctgaaagaaggcatcgaaaaaggcatcgctaactccatcctgatcaagttcaaccagatcggttctctgaccgaaactctggctgctatcaagatggcgaaagacgctggctacaccgctgttatctctcaccgttctggcgaaactgaagacgctaccattgccgacctggctgttggtaccgctgcaggccagatcaaaactggttctatgagccgttctgaccgcgttgctaaatacaaccagctgattcgtatcgaagaagcgctgggtgagcaagcgccgttcaacggtcgtaaagagatcaaaggccaggcttaa

SEQ ID NO: 254637 - DNA, 837 bp, Klebsiella pneumoniae
atgggttacgactggctgggccgcatggcttataaaggcagcgtagacaacggcgctttcaaagctcagggcgttcagctgactgctaaactgggttacccaatcactgacgatctggacatctatacccgtctgggcggcatggtttggcgcgctgactccaaaggtaactacgcttctaccggtgtttcccgtagcgaacacgacactggcgtatccccggtattcgcgggtggcttagagtgggctgttactcgtgacatcgcaacccgtctggaataccagtgggttaacaacatcggcgacgcaggcaccgttggtacccgtcctgataacggcatgctgagcctgggtgtttcctaccgtttcggtcaggaagatgttgctccggttgtagctccggctccggctccggctccggaagtgactaccaagcacttcaccctgaagtctgacgttctgttcaacttcaacaaatctactctgaaaccagaaggtcagcaggctctggatcagctgtacacccagctgagcaacatggatccgaaagacggttccgcagttgttctgggctacaccgaccgtatcggttccgatgcctacaaccagcagctgtctgagaaacgtgctcagtccgttgttgattacctggtatctaaaggtatcccggccagcaaaatctccgctcgcggtatgggtgaatccaacccggttactggcaacacctgtgacaacgtgaaagcacgcgcagctctgatcgactgcctggcgccggaccgtcgcgtagaaatcgaagttaaaggctacaaagacgttgtaactcagccgcaggcttaa

SEQ ID NO: 254638 - DNA, 453 bp, Klebsiella pneumoniae
atgaaatatcaacaactggaaaatctcgaaagcggctggaaatggacatatctggtaaaaaagcatcgggaaggtgagcttattacccgctacattgaagccagcgctgcgcaggccgcggtcgatctattattgacgcttgaaaatgaacccgtgctggtgaatacctggattgagcatcatatcaacccagagctggttaaccgcatgaagcagacgatccgcgcgcgacgcaaacgtcattttaacgcggagcatcagcatacgcgtaaaaagtctatcgatctggagtttatggtctggcaacgcctcgccggtctggctcaaagacggggtaaaacgctgtcggaaaccattgtgcagttgattgaggatgctgagcataaagagaagtatgccagcaagatgtcgagcctgaagcatgatttgcaggtgctgctaggtaaagagtag

SEQ ID NO: 254639 - DNA, 1758 bp, Klebsiella pneumoniae
ttgaccattacgaaacttacccgaaacgacctcgctcctgatacggaaagttatcaggcgctgtttgcacaagccgacttagctcacgcagaggcatccctctcaggcgaactgcaaccccgtttattctatgccctggagcagcttctggtcactccagccatttcgccatttatgctggttaaaattccggaagagccggagtacctgcaatggctcgctaacgaaactcgtactttacatcaaccgccggaatccctctgcggagtacgctatcagattgatggcggaaaaatctcgctctcgccggcgcaaaccgctgaagataatttcgcaagcgtcgcgccggtcgaagcggcagattgggtcgaagcggagcagctatttggctgcgtgcgccagtttaacggcgagatcgctttacaaccgggtcttgtccatcgggctaatggcggcgtactgatcctctccttgcgggccttactggctcagcctctgctatggatgcggctaaaaaatatggtggctcgccagcgttttgactggctgtcatttgatgagtctcgccctcttccggtgagcattccctctatgcctttgagcctgaaagtgatcctggtcggcgagcgggaatctcttgctgattttcaggagatggagcccgagctttctgctcaggctatctacagcgaatatgaagataacctgcaaatcgctgatgcagagacgcttaagcagtggtgtcaatgggtctggcaaaatgcccagcggctcgaacttccggggctgtccgctaccgcctggccgctgttgattcaggaaggagctcgctataccggtgaccaggaaaccttgcccctgtgcatactgtggatcgcccgccagcttcgcgaagccgccgccttctgtgaaggtgacgagattagcgccgaagagatgcaaaccatgcttgagcgtcgtctgtggcgcgaaggctatcttgccgaacgcatccaggatgaaatcctgcaggagcaaatcctgatcgagacggaaggcgaatgcgtagggcagatcaacgccctctcagtcatcgagtttccgggccatccgcgcgcgtttggcgagccttctcgtatcagctgcgtcgtgcatattggcgacggtgaatttattgatgttgagcgcaaggcggaactgggtggcaatattcatgcgaaaggcatgatgattatgcaggcattcctgatgtccgagctggagcttgaacaacagctccccttcaccgcatctttgaccttcgaacagtcgtacagtgaagtggatggcgacagtgcatccatggccgaactgtgcgcgctgatcagttctctggccaatgtgccgattaatcaaagtatcgccattaccggctcggtcgatcagtttggtcgcgtacagccggtaggcgggctcaatgagaaaattgaaggcttctttgctatttgtcagcagcgtgggctgaccggtaaacaaggcgtcattattccttccgccaacgttcgtcatctgagcctggcgcaggagctgcaacaggcggttgcggatgaacagttctttatctgggcggtcgatgacgtaaccgaagcgctgcccattctgacccagttactctgggacggcgaaggacaaactttacggcaaaccatacaggagcggattgcgcaggcgacacagcaagagagtcgtcatcgctttccgtggccgctacgctggttaggcggttcaggttcgaactga

SEQ ID NO: 254640 - DNA, 519 bp, Klebsiella pneumoniae; identical to SEQ ID NO: 173943

SEQ ID NO: 254641 - DNA, 564 bp, Klebsiella pneumoniae
atgaagaaatggctaatagcggcggcggtatgcgcgttgacggcatgcagcagcggcggtgagagtaaaacttactaccagcttcccgtggctcagggcggcgcgcaaagcgccgcacaccagagcaaaaatttgctttgggtcgagcaggtcagtattccggattatcttgccggtaacggggtggtctatcagaccaccgatgttcagtatgtgattgcaaataacaatctgtgggcgagtccgctcgatcagcagctaagaacgacgctggtggcgaaccttagcaatcagcttcccggctgggtcgtggcttctcaaccgctgggtagcgagcaggataccctaaacgtatccgtcagcggttttcacggtcgttacgatggtcgggttatcgttagcggtgagtggttactgaagcatcagggacagctgattaagcggccattccatatcgagctcaagcaacaagaagatggctacgatgcgatggtgaaaacgctagctcaggcctggactcaggaagcggcggcgattgccagcgagattaaccgcttgccataa

SEQ ID NO: 254642 - DNA, 1638 bp, Klebsiella pneumoniae
atggaaaataagagcggagaagcgaaggtgcaaaaggtgaagaactggtcaccggtgtggatcttcccgatagtgacggcgctaattggcgcctggattcttttttatcactatagccaccaggggccggaagtgaccctgatcacaaccaatgccgaaggcattgaagggggaaagacccgcattaaaagccgcagcgttgacgtcggcgtgattgaaagcgcaacgctgacggacgacctgactcacgtggaggttaaagcccgactgaattctggcatggaaaaactgcttcatcaggattcggttttttgggtggttaagccgcaggttggtcgtgaaggtatcagcggcctcggcacgctattgtccggcgcctatatcgaactgcagccggggaccaaaggctctgtccctgcgcagtatccgctgctggattcaccgccgctggcctcacccgatgcgaaaggcattcgtattctattggaaagtagcaaagcaggtcagctgtcacccggcgacccggtgcttttccgcggctatcgtgtaggttcggtggaaaccagcaccttcgatgcgcaaaaacgcaatatcacctatcagctgtttattagcgcgcctaacgatcggctggtcactaataacgtgcgtttctggaaggatagcggtattgcggtggatctgaccgcggccggcatgcgcgttgagatgggatcgctgtcgacgctgtttggcggcggcgtcagctttgatatccctgaaggactcccgctaggggaaccggtggcgaataaaaccgaatatcatctgtttgacgatcaacgcagcattcaggactcggtgttcactcaacacattgactacgtaatgttctttaaagattcgattcgcggtctgcagcccggcgcgccggttgaattccgcggtatccgtcttgggaccgtaggcaaggtaccgttctttattccaggcctgaagcagaacataaacgacgattaccgtatcccggtagaagtgcgaattgagccggaacgtctgatcaatcagttaggcgccgatcctgacattcgtaagcatatcgatgatctaatgaatcgcgggctgcgcggttcgcttaaaaccggcaatctggtgaccggcgcgctgtatatcgatctcgacttctatccgaaagctcctgcgcgcggcaagatccaggaatttggcggttatccgattattccgaccgtaagcggtggtctggcgcagatccagcagcgcctgatggatgcgctggataagattaataatctgccaattaatccactgctggagcaggcaaccagtacgctggcgcaaagtgaaaaaaccatgcagcacgtacaggcgacgctcgacagtctgaataagatcacctcaagtcagtctatgcagcagctgccgggtgatatgcagagtacgctacgtgaacttaatcgtagtatgcagggcttccagcctggctccgcggcttacaataagatggttgcggatatgcagcgtcttgaccaggtgctgcgcgaactgcagccggtactgaaaacgcttaatgataagagcaatgcgctggtatttgaggcgaaggataaaaaagatccgcagccgaagggagcgaaataa

SEQ ID NO: 254643 - DNA, 1269 bp, Klebsiella pneumoniae
atgtgcgatcatcatcatgctgcgcggcatattctgtgccgacaatgtgatctgctggtggctttgccgcagctggagcatcgccagaaagctgcatgtccgcgctgcggaacgacattgacaacgtcatgggacgcgccacggcagcgtcctaccgcgtatgcgctggtcgcgttgttcatgttgctgctggccaatttgtttcccttcatctatatgaaggtcggggggattagcagcgaaattgaattgctggaaatcccgaacgtcctcttcaccgaggactatgccagcctcggtacgttctttttgcttttcgtccagctggtgccggctttctgtctggtcactatactcctgctggtcaaccgggtgcgcatgccatccgggctgaaagcgtttctggcgcgtatcctgtttcatcttaaaacctggggaatggcggaaatctttctcgccggggtactggtcagcttcgttaagctgatggcctatggcgatattggcgttggcctgagctttgtcccgtggtgtatgttctgcgtattacagctgcggacgttccagtgcgtagatcgccgctggctgtgggatgatattgcgccaatgccggctatcaagcagccgctgaaagttggcgtgtccggactgcgtcaggggctgcgttcatgctcatgctgtacagcggtgttgccgattgatgaggccgtctgtccgcgctgtcatacaaaggggactgcccggcgtaaaaacagcctgcagtggacgctggcgctgttaatgacttcgctaatcctttatatgcccgccaatattctgccgatcatgattaccgatctgcttggcgataaaatgccttccaccattatggcgggggtgatcctgctgtggagcgaaggatcttatccagtggcgatggtgatattcatcgccagtattatggtgccaaccttaaaaatgatcgccattggctggctctgctggaacgccagcggcaggggagatcgcgactcagagcgcatgcatctgatttatgaagtcgtcgagtttgttggccgctggtcaatgattgatgtgtttgtcatcgcagtcctctccgctctggtgcgcataggtgggttaatgaatatctatccggcgataggggcggtgatgtttgcgctggtggtagtgatgacaatgttttcggccatgacctttgacccgcgtttgttgtgggatcgtgagccagattcaagccatgaggaaagactgcagcatggaaaataa

SEQ ID NO: 254644 - DNA, 1908 bp, Klebsiella pneumoniae
atgtctttaattagtatgcacggcgcctggctctctttcagcgatgcgccgctgctggataatgctgaactgcatatcgaagataacgaacgcgtctgcctggtggggcgcaacggcgcgggtaaatcgaccctgatgaagatcctcaaccgcgaacagggtcttgatgatgggcgcattatctatgagctggatctggttgtggcgcgtttgcagcaagatccgccgcgtgacgtcaccggaaccgtgtatgactttgtggcggaagggattgctgagcaagcagcatacctcaagagttatcacgatgtttcgcagctggtgatgaccgatccgagcgacaagaatctcaatgagctggcgcgtctgcaggaacagttggacaatttagggctgtggcagctcgacagtcgtattaatgaagtgctggaacagctgaatctggatcctaacgccgagctatcatcgctctccggcggctggctgcgtaaagcggccctcggtcgcgcgctggtcagcgggccgcgggtgctgctgctcgatgaaccgaccaaccacctcgatattgaaaccatcgactggctggaaggtttcctgaagatgtttaaaggcaccatcatctttatttcgcatgaccgttccttcattcgcaatatggcgacgcgtattgtcgatctcgatcgcggcaagctggtgacctatccgggtaactacgatcagtatctgctggataaagaagaagcgctgcgcgtggaagagctacagaacgcggagttcgatcgcaagctggcgcaggaagaagtgtggatccgacaggggatcaaagcgcgccgcacccgtaacgaagggcgcgtgcgggcgttaaaggccatgcgtcgcgaacgcggcgagcgtcgtgaagtgatgggcagcgcgaagatgcaggtggaagaggccgcgcgttcgggcaagattgtgttcgaaatggagaacgtcaactaccaggttgatggcaaggtgctggttaaagacttcaccgcccaaatccagcgcggcgacaaaattgcgctgattggcccgaacggctgcggcaaaactacgctgctgaagctgatgctcggtcagctgcaggcggatagcgggcgtattcatgtaggcaccaagctggaagtggcctacttcgaccagcaccgcgcggaacttgatccggataaaacggtgatggacaacctcgcggaaggtaaacaggaagtgatggtgaacggcaagccgcgccacgtcctgggctatctgcaggattttatgttccatccgaaacgcgcgatgacgccggtgcgtgcgctatcgggcggcgagcgcaaccgtctgctattggcgcgtctgttccttaagcccagtaacctgttgattctcgacgaaccgacaaacgatctggatgtcgaaaccctggagctgctggaagagcttgtcgacggctatcagggaaccgtgatgctggttagccacgaccgtcagtttgtcgataatacggtaacagagtgttggatctttgaaggcgcagggcaaattggccaatacgttggcggctatcatgacgcccgcggtcagcaagcgcagtacctcgcgcgtaagcagccggtttccaaaaagagtgttgaagttgctcaaccgaaagcagaaagtgtcaaacgtgctgccagcaaactaagctataacctgcagcgcgagctggaacagctgccgcagaagctggaagaactggaagcccagctgcagaatttgcaagagcaggttgccgacccttctttctttggtcagtcgcatgaccatacgcagcaggtactggcgcagctgagtgaagcggagcaggcgctggaagccgccttcgaacgctgggaatatcttgaagggctaaaaaacggcgcataa

SEQ ID NO: 254645 - DNA, 2106 bp, Klebsiella pneumoniae
atgaattctctgtttgccagtacggctcgtgggctggaagagctgttaaaaactgaactggaagggctgggcgcggtggactgccagttggtccagggcggggtccattttcagggagatacgcggctgctgtatcaaagcctgatgtggagccgactggcttcgcggattatgctgccgctggggcagtgcagcgtgtacagcgacctggatctgtatcttggcgtgcaggccattccatggacggagattttcagccaggatgccacttttgccgtgcattttagcgggctgaacgaagagatccgcaacagccagtatggggcgctgaaggttaaagatgccatcgtcgacagctttacgcgtaagaatttgccgcgtcccaacgtcgatcgcgaaaaccccgatctgcgcattaacgtctggttgaataaagagaccgcgcatatctctctggatctcagcggcgagggcctgcacctgcgcggctaccgcgacggtaccggtatggcgccaatcaaagaaaacctggccgcggcgatagtgatgcgttccggctgggctaccggtacgccgctgctcgatcccatgtgcggttccggtacgctgttgattgaagcggcgatgctggcgaccgatcgggcgccgggtttacaccgcggccattggggtttcggcggctgggcgcagcatgatgatgctatctggaaagaggtgaagtccgaagcgcaaacccgcgcccgtcagggactggcggcgtatgagtcgcgcttttacggttccgacgttgacgcccgggttatcgaacgcgcgcagcgtaacgcccgccgtgccggtattggcgagctggttaccttcgaagtgaaagatgtcgcccagctgagcaacccgttgccaaagggcccttacgggacagtgattagcaaccctccatacggcgagcgtctggagagcgagccggcgctgattgccctgcatagtctgctggggcggattatgaaaaaccagtttggcggctggaacctgtcgctgtttagcgcctcgccggatctgctgagctgcctgcagctgcgcgccgataagcagttcaaagcgaaaaacggcccgctcgactgtgtacagaagaattaccaccttgcggaaaacgaaggcggcaaaaccgcgatgctggcggaagatttcgccaaccgcctgcgtaaaaacctgaaaaaatatgagaagtgggcgcgccaggaaggtattgaatgctatcgcctgtatgatgccgacctcccggaatacaacgtcgctattgaccgttacgccgattgggttgtggtgcaggagtatgcgccgccgaaaaccgttgacgcgcataaagcccgtcagcgtctgttcgatattattgctgccaccattgtcgtgcttgggattgcgccgaataagctggtgttgaaaacccgcgagcggcagaaaggtaaaaatcagtaccagaaaatgggcgaaaaaggtgaattcattgaggtgcaagagtataacgcgcgtctgtgggttaatctgaccgactatctggataccgggctgttcctcgaccaccgtatcgctcgccgcatgctggggcagatgagtaaaggtaaagacttcctcaatctgttctcctataccggcagcgccagcgttcacgccggccttggcggcgcgcgatccacgaccacggttgatatgtcgcgtacctacctcgaatgggctgagcgtaacctgcgcctcaatggtttaaccggtcgcgcgcatcgcctgatgcaggccgatgtgctgggctggctgcgggagacgaccgaacagttcgacctgatctttatcgatccgcccaccttctccaactcgaagcgtatggatgacgcctttgacgttcagcgcgaccatttgcgtctgatgaccgatttaaaacgtctgctgcgtaaaggcggcacgattatgttctcaaacaacaaacgcggtttccgtatggatcatgacgggctggcgcagctgggcctgaaggcgcaggagattacgcaaaaaacgctgtctcaggactttgcccgcaaccgtcagattcacaactgctggctgattaccgcagcctga

SEQ ID NO: 254646 - DNA, 1110 bp, Klebsiella pneumoniae
atggtaaccctttcgcgactttttattcatcccgtcaaatcgatgcggggaattggcctgagccacgcttatgcagacatcagcgggctggccttcgatcgtatatttatggtgacggaaaccgatggcacctttatcaccgctcgtcagttcccgcaaatggtcaagtttactcccgcgccgctccatgatggtctgcatctgaccgctccggacggcagtagcgcgatcgtgcgcttcagcgatttctccgtgcagcaggagccgaccgaagtctggggcaaccattttaccgccctgattgccccggccggggtgaaccagtggctaagcggttttttcaaccgcagcgttcagctgcgctggctggggccagagcttagccgtcgggtaaaacgtcacgatgccgtccccctctcctttgccgacggctttccctatctgctggccaatgaggcctcgctgcgggacctgcaaaatcgctgtccggccagcgtaagcatagaacaatttcgcccgaatctgctggtgaccggcgcggccgcctgggaggaagatacctggaaagtggtgcgtattggcgaggtcgtttttgatgtcgcgaaaccctgcagccgctgcgtgttgacaaccgtcagcgcggaacgtgggcaaaagcaccctggcggtgagccattaaccaccctacagggattccgcacggcgctggataatggcgatgttgattttggccagaatttgatcgcgcgaaatagcggcacgatccgcgtcggcgatgagttagaagtgctggcccgcggcccggcgaaggcctacggcgccggggaaagcgacaattcgctggcgcctgagactcagcagaacgcaacggtggaaattgagtggcagggactgagctttaccggtaataatcagcagatcttgctggagcagctggaacagcagggaattcgcattccttactcctgtcgggcagggatttgcggcagctgtcgcatccgtctggaagaaggggaagtcagcgcgctgaagaaaaatgcggtcgccgccgatggcaccattttgtgctgcagctgcgtaccgaaaaccgcggtaaggctggcgccttaa

SEQ ID NO: 254647 - DNA, 543 bp, Klebsiella pneumoniae
atgcggattaaacctgacgataactggcgctggtattacgatgaagagcatgaccgcatgatgctcgatctggctaatggtatgttattccgatcccgttttccccgccggatgctgacgccagatgccttcgccccttccgaattttgcgttgatgacgccgcactctatttttcatttgaagaaaaatgccgcgaccttgaattatccaaagaacagcgcgctgaattagtgctcaatgcgctggtcgccattcgtttccttaagccgcagatgccgaaaagctggcatttcactactcatcaacagagctggcagcccggtaccggtgatgccgctagcgcatggctgagcgataccggtcagcaggttaatctgctggtggttgagcccggcgaaaacgccgcgctgtgcctgctagcgcagccgggactgacgcttgccgggcgagtgatgcagttgggggacgtgattaaaattatgaacgaccgactgcagccagcgaccgccgtcgccagctacagcctgggccaggcggtttaa

SEQ ID NO: 254648 - DNA, 1011 bp, Klebsiella pneumoniae
atgtactaccccttcgttcgtaaagccctttttcagctcgatcctgagcgcgctcatgaagtcacttttcaacaattacgccgtgtttcgggtaccccgctggaaatgttggttcgccagaaggtgccggctaagccggtgacctgcatgggactcacattcaagaacccgctgggcctggccgccgggctggacaaaaacggcgaatgcatcgatgcccttggcgcaatgggctttggttccattgaaattggtaccgtaacgcctcgtccgcagccgggcaacgataagccaaggatcttccgcctggttgatgccgaaggtttgatcaaccgcatgggctttaataaccatggcgtggataacctggtagagaacgtaaaaaaagcgcattttgacggcattctggggattaatatcggtaagaataaagataccccggtagagcaaggcaaagatgattacctgatttgtatggaaaaaatctacgcttacgccggatatatcgccattaatatctcctcgccgaataccccgggcttgcgtacgttacaatacggagaagctctcgacgatctgctctctggtattaaaaataagcagcgtgaactccaggaaaaacatcaaaaatatgttccgctggcagtaaagatcgctccggatctttccgtcgaggaattgatccaggttgcggacagtttagtccgacataatatcgatggggtcattgccaccaataccactttggatcgttcactggtgcagggaatgaaacattgcgatgaaaccggtgggcttagcgggcgtccgctgcagctgaaaagtaccgaaatcatccgtatgctatctgaggaattaaatggccgtctgccaattatcggcgtcggcggtattgactcagtgattgccgctcgtgaaaagatagccgccggtgcgactctggtgcagatttattccggatttatttttaaaggtccgccgctgattaaagaaattgttacccatatctaa

SEQ ID NO: 254649 - DNA, 576 bp, Klebsiella pneumoniae
atgcgagtcataacactggcgggtagcccgcgttacccttcccgctccagcgcgctcctggaatacgccagagagaccctctccgcggcggatatcgaggtttgccactggcacctgcagaattttgccccggaagacctgctctatgctcgcttcgataaccccgctcttcacgcgcttaatgaacagcttgccggcgcggacgggctgattattgccacgccggtctataaggcttctttttcaggcgcactcaagacgctgcttgatctgctgccggaacgcgcgctggaaggcaaaatcgttctgccgctggctaccggcgggaccatcgcgcatatgctggcggtggattacgccttaaaaccggtactcaatgcgctgaaagctcaggagatcctccacggcgtttttgctgacgatagccaggtcacggattatcagcataaaccgcagtttacgccgaatctgcagggtcgcctcgacctggcgctggaaactttctggcaggcgctgcatcgccccagcagccgcgcgccggcgctgaaaaccttacagcgggttgagcatgtttaa

SEQ ID NO: 254650 - DNA, 792 bp, Klebsiella pneumoniae
atggcgacgctttcgcaaaaatttctcatccgcatagctccctggcttttaccggtgggcagcgtgattatttggcaattcgcctcctccatcggctggctttccacccggattttaccgtcgccggaaggcgtgctcaaagccttctggacgctctccgccagcggcgaactatggcagcatctggccattagctcgtggcgggcacttattggtttcagtattggtggctccattggtctggttctcgggcttatcagcggcctctcgcgctggggagaacgcctgctggatacctctattcagatgctacgtaacgtgccgcacctcgccctgattccactggtcattttatggtttggcattgatgaaagcgccaaaattttcctcgtggcgctggggacgatgttcccgatttatatcaacacctggcacggcatccgcaacattgaccgaggactggtagagatggctcgcagctatggcttatcgggctttgcgctgttccgtcacgtgatcctgcccggcgccctgccctcaattatggtcggtatccgctttgcgctcggcctgatgtggttaacgctgattgttgcggaaaccatttctgctaacgccggtattggctatctggcaatgaacgctcgcgaatttctgcagaccgatgtcgtagtcgtcgccattattctttacgctattctcggcaaactggccgacttcagcgcacagctccttgaacgcgtctggctgcgctggaatccggcttatcaccttcaggaggccagcgcatga

SEQ ID NO: 254651 - DNA, 1080 bp, Klebsiella pneumoniae
atgatgaagcgcaaaattctggcagcggtaattcctgccctgctggtagccggtgcagctaacgctgcagaaatctataacaaaaacggcaataaactcgacttttacggaaaaatggttggcgagcacgtctggaccactaacggtgacaccagcagcgacgacaccacctacgcccgtatcggcctgaaaggcgaaacccagatcaacgatcagctgaccggttacggccagtgggaatacaacatggatgcgtccaacgttgaaggctcccagaccacgaaaacccgtctggctttcgctggcttaaaagccggtgaatacggttcattcgactacggtcgtaactacggcgccatctacgacgttgaagcggcaaccgatatgctggttgaatggggcggcgacggctggaccaacaccgacaacttcatgaccgcgcgtaccaacggcgttgcgacctaccgtaactctgatttcttcggtctggttgatggcctgagctttgcgctgcagtaccagggtaaaaacaaagaacgcgctgtgaagaaacaaaacggcgacggcttcagcaccgcggctacctacgcgtttgataacggtgtagcgctgtccgctggttatgctaactccagccgcagcggcgaccagaaagcagaccgtcagggcgaaaaagctgaagcatgggcaacctccgctaagtatgatgcgaacaacatctacgctgcagtcatgtactctcagacctacaacatgactccggaaaacgaaggcaactatttcgctaacaaaactcagaactttgaagccgttgttcagtatcagttcgacttcggcctgcgtccgtccatcggctacgtacagactaaaggtaaagacctgcgctcccgcgctggcttctccggcggcgatgctgacctggttaaatacgtcgaagtgggtacctggtactacttcaacaaaaacatgaacgtctacgctgcgtataaattcaaccagctggacgacaacgactacacccgtgctgcgaaagtcgcgaccgacgatcaggcagcggttggtatcgtttaccagttctaa

SEQ ID NO: 254652 - DNA, 1191 bp, Klebsiella pneumoniae
atgtttgagaacattaccgccgcccctgccgacccaattctgggcctggccgatctgtttcgtgccgatgaccgcccaacaaaaattaatcttggaattggtgtttataaagatgaaacgggtaaaacaccggtcctgactagcgtgaagaaagcagaacagtatctgctggaaaatgaaaccaccaaaaattacctgggtatcgatggtattccagagtttggtcgctgcacccaggagctgctgtttgggaaaggcagcgcgattatcaatgataaacgcgctcgtaccgcccagactcccggcggtacaggcggcctgcgcgtcgccgctgattttctggcgaagaataccgacgttaaacgtatttgggtgagcaacccaagctggccgaaccataaaagcgtattcaattcagccggactcgacgttcgcgaatatacctactacgatgccgcaaaccacaaactcgacttcgatggactgctggccagcctgaacgaagcgcaggccggtgacgtggttctgttccacggctgctgccacaacccaaccggtatcgatccaacgctggaacagtggcaacagctggcgcagctctccgtagagaaaggctggctgccgctgtttgactttgcctaccagggctttgcccggggcctggaagaggacgctgaaggcctgcgcgctttcgccgcgctgcataaagagctgctggtagccagttcctactcgaaaaacttcggcctgtataacgaacgcgtaggcgcctgcacgctggttgccgctgaccaggaaacggtagaccgcgccttcagccagatgaagtccgttatccgcgcaaactactctaacccgccggctcacggcgcctcggtagtggcgaccattctcagcaatgacgcgctgcgcgccatctgggaacaagagttaaccgacatgcgccaacgcatccagcgcatgcgtctgctgttcgttaataccctgcaggaaaaaggcgccagccgcgatttctctttcatcattcagcaaaacgggatgttctcgtttagcggcctgaccaaagagcaggtcctgcggttacgcgaagagtttgcgatttacgccgtggcatccgggcgtattaacgtcgcgggcatgacgccagacaatatggcgccgctgtgcgaagcgattgttgccgtactgtaa

SEQ ID NO: 254653 - DNA, 648 bp, Klebsiella pneumoniae
atgaactatcgtattattccggttaccgcgttcgcgcagaactgttctttaatctggtgcgaacaaaccaggctggcggcgctggtggatcccggcggtgatgctgagcgaatcaaacaggaagtcaccgcggcaggcgtcagcctgatgcaaattctgctgacgcatggccatctcgatcacgttggtgcggcggcggagctggcgcaacattatggcgtgccgattatcgggccggaaaaagaagatgagttctggctggaaggattaccggcgcagagccggatgtttggtctggaagattgccagccgcttcagccggatcgctggttgaacgaaggcgatgtagtcagcgtggggaacgtctctctgcaggtgttgcactgtcccggtcatactccagggcacgtggtcttcttcgatgccgcttcccaactgctgatttctggcgatgtcatattcaaaggtggggtggggcgtagcgatttccctcgtggcgaccatagccagctgatcgatgcgattaaacgcaaactcttgccgttgggcgatgacgtatcgtttattcctggccatggccctatgtcgacgcttgggtatgagcgtctgcataacccattcctgcaggatgagatgcctgtctggtaa

SEQ ID NO: 254654 - DNA, 552 bp, Klebsiella pneumoniae; identical to SEQ ID NO: 173924

SEQ ID NO: 254655 - DNA, 192 bp, Klebsiella pneumoniae
atggccatgttaaaagccagcaatctggaacaggcaaagcagctactgcagtccgatgataccgttaaaatagaactggatttcgagctcgactccgatgagttctttaattttgctattgagtactgtacacatggagcaaagcttacgcgagttggcgatcgcttcgtaatttcacggaaaataaagtag

SEQ ID NO: 254656 - DNA, 315 bp, Klebsiella pneumoniae; identical to SEQ ID NO: 172436

SEQ ID NO: 254657 - DNA, 576 bp, Klebsiella pneumoniae
atggtgattaatatggcgattaaagagttttttattcagacacaaccggaaaggcgccgttatggcgtagcgctatttgtcggggtggttgcagggattatgtctgcgttcgttaaatggggtgcggaagttcctttaccccctcgaaccttttccggtggcagggatgagtttaatccgccgtatcttttcttgcgcgactatctgggaattgaccccacgcatacggtatatactttttccgagcatatcattaatccggttatggtgacgcatattatattctctctggtgtttgcggtgggatattgcgttgttgctgaaatctttccgaaagtcaaattatggcagggggcgtgggcagggattgttgctaccattgccgttcactggatctcatttccgttactgggcctgacgccttccttattgaatattcctgcagatgagtatatttcggagttagtggggcatattttttggttctgggcgattgagatgattcgtcgcgaccttcgcaaccgcattactcaccagcctgacgccgaagtgcctctggatgcgcccttcagataa

SEQ ID NO: 254658 - DNA, 189 bp, Klebsiella pneumoniae; identical to SEQ ID NO: 172438

SEQ ID NO: 254659 - DNA, 906 bp, Klebsiella pneumoniae
atggataagctggaatcaatgcaggtctatgtttgcgtggtggattcacacgggttcgccagagcggctgaggtgctggggctgccgcgctcaacggtatcgcgggtgattaaagagcttgaagcatacctgggaattcagcttttacagcgtaccactcgtaagcttagcgtgacggtagacggccacagttattatacagagtgcaaaaggcttctggctgagatcgccaccctggagtcctctttccccggtagatttgcgcagcccagaggacgctttaaagtgggtatgccgcagtcccttgcccgacattgtattatcccagggctgccggaatttctgcagcagtatcccggtctggatatcacgatttgctcaagtgatgacgtagaagatattattcaggaagggtatgactgcgcgatacgaacgggcagaatcgacgattcgaccactttggttgcccgagagcttgcaagctttcgctgggcgattctcgcttctccagactatattgccgctcatggtcggccggaaactcttgaccaactggaacagcatcgcgccgttggctacctgaaccaccgtaccggtcggagtatcgagtggcatttttcgcttgctgagggggattatgcccttcgcatgaaagagacgctggtcgtcgacgatacggatgcctacattcaggccggaatacaagggcttgggctcattcgggttgccagctatctggctatgccgtacctgcgcagcggcgcgctggtctcctgtctggagaacttctcttccgctttgcccctttcgctggtttatccgcaaaacagataccttcctccttcggtacgggtcttctatgcgtggagcaaagcgctgttacagcaggcggtcactgacgaataa

SEQ ID NO: 254660 - DNA, 933 bp, Klebsiella pneumoniae
atgagagaatctcatattcatgcaggtgaaaaggtattagtgctgggagcgggacagttgggcgcagccgtactcagctcattaatcccggcggtcaggcggcaaaatggtaccgtcgcggttatcgtgtcgccaggatcgtggggcgatcggggggagttgctttctgctagccatcaacaactggcggcggcgggggcagaatttattgcctgcgacgtagccgctggtacggttgcatcgttgacgggccagtttgcagggtttgataccatcatcaactgcatgggctttattgctggcacaggaactcagataaagattacccgtgcggtactggaggccggagtgaagcgctattttccctggcagtttggcgtaaattacgatgtagtcggaaaaggcagcggtcaacccgtctgggacgaacagtatgatgtcagaacattattacgggaacaaatcgccacagaatgggtgattatttcgaccggtatgtttaccagttttcttttcgagcctgccttcgacgtggtgaatttatcgcaaaatacgattaatgccctcggcagctgggatacccaggttaccgtaacaacacctgtggatattggccgtctgaccaccgcgatttatttgcaacaaccgcgggtgagaaatgacgttatctttatcgccggagaaaccacttcctatagaaaactggcggacaccgttgagcgggtaactcaaaaatgcttttcaaaaaaggtactcacgttgcccactctactggaacaactacgttcaaacccggacgatggaatgcttcgctatcgcgcagcttttgccaggggagacggtatgtggtggccaatgaataaaacgtggaatgcacaaaataatatacctacccaggatattgcctcatggctcaaaagtagtatttattaa

SEQ ID NO: 254661 - DNA, 981 bp, Klebsiella pneumoniae
atgaaaactaaccgtatctgtcagatcctgcatattgaaaaaccggtgattcagggccctctctcctggttgaccgatgcccgtttagtcgccgcagtcagcaatgccgggggacttggcgtacttggccctaatgccggattaaccgccgcgactgcggtatcaacgcccgaagaaaccgctgaaaaaatgcgcgaagagattcgtaaaactaagcaactgaccgaaaagccttttggtgtgaacctgatcccctctccagacaatgacatctggaccccacccattctgcaggtaattaaagaagagggcgtcagcgctgtggtttataccggctacggtgaaggggcgatcataccgtcgttatttaatgaacttaaacaggcgggcattgctattatttatcgcgatatcaatccaacgcctgaaaatactcgtcttgctgaagaggccggcgctgatattattgtcgcgaccggttttgatgaagggggaaccttgccgggcaccgcgctgggtactttttcaatcgtgccgctgattgccgatgcggtgaaaaatattccgctaatggctgcgggtggtattactgataaccgcaccgccagagcggcgcacgccctaggcgcagaaggggtatttgccggttcggtgtttatcggaacggaagagagcagggtaccgctgtcgattaaaaacagaattattgccgccaacggtcttgatttgctgctgttccgcacgcagccgcactactatcgctccctgccgggcaggctcgctgaaactttggtcgcaatggataaggccggcgcaagtcatgaagagctcggcagagcaatggggggattgcgtggcttgcgtattggcatgctggaggggaatgctgatgaaggctatatctcactcggtacggggatcggcactatccgcagcatcaaaagcgccgccagtgttgtgaacgagttagccgtaggctga

SEQ ID NO: 254662 - DNA, 1023 bp, Klebsiella pneumoniae
gtggcgcttcggcgcgggtcgtttttgctggaaggagtgtatgacgttagattatttggaaaaatagctaaaaaagttcatcactattataaaatcgataacaatatcttctctggcatcaggcaaaagaacccagtaatgcaattaaatctctttgaatccataagaatttttattgaaattgtcgaatcaggcagctttactcaggcagcagaaaacctgcaagttcatcgccccgccgtgacgaaagccttacagctgcttgagcagcactgcggtacgcgtttgctgcagcgaaccacgcgtcgcattagcctgacgcctgacggggaaacgttttatcaccggagtaaacctttactctcccaggcggatgagctgctggagtcttttggcgccgatcgcgtactgcgcggccagctgcgggttgatatgcccatcgcttttgcgactttactggttgtccccaggcttcctgatttttatcgccaacatcctgacctcgaaatcatccttagtagctcagatcgccggagagatatgctgcgcgatggtcttgactgcctgctccgcgtcggggaactggatgacggagactatatcgcccgtaagctgggcaatattaaaatgacgacctgcgccagcccggcctatattgcccgctacggcgcgccgaacacgctggaggatttacagcagcatcaggcgatcaactggattaacagcaacagccgacaaagcatgccgtggacgtttaccacgccagaaggccccgttgaaatgacgcttcccgataagctggtcgtggataactcagaaacctatttatctgcggggctggcaggcctgggattagtccaggggatgaacgtgtttttacagccttatctcgaccgggggctgttagtggaagtcttacccgacaaccctacccccgatcgcaaactgtcacttttgtatccgcaccgccatctttcccgcaaagttcgggtgtttaccgaatggttagagagcttattgtga

SEQ ID NO: 254663 - DNA, 543 bp, Klebsiella pneumoniae
atgaagttattatctacggagcgcaccgatatctgtttactggcgcccgaccatgcacggcatttacaggattatttgctggaaaaccgttctcaccttgcgccattcgaacccttgcgaaatgacgactattttacgttagacactattgcgcaaagaatcagcagcgcgcgcagagagtatgacgaaaaacgtagcctgatgctggttttcaccctcaaaaatgaaccgcaaatcatcggcagtatcaacttcactaactttgtcttcggcgtttttcaggcatgctatctgggcttttccctcgatcgcgcctgccagggaaagggcctgatgcgcgaagcgttagagcaggcgattcggtacgtgcgtgagaattacgggatacacaggatcatggccaatcatctgcctgataacgtgcggagcagcaatacccttaaaagtctgggttttgtgcaagagggctatgcgcactcttatctgaaaattaatggtatctggcaggatcacgtcctgaacgcattaatctttccggaatga

SEQ ID NO: 254664 - DNA, 885 bp, Klebsiella pneumoniae
atggcgaggcgggaaaactataacgatctttacctgttcatgctggtggtgcgggaagggagctttaccgccgccgcgcagcggcttgggctggcgcaatccggcgtcagccgcgccgtacgcgaacttgaagaaaggctcggcgtacagcttctggtgcgcacgacccgtaaactttcacttacccaggccggcgagcagctctatcgaacggtagaagcgggctttgatgcattggattcggggctttccactctggcgtattatcgcaacacgccttccggcaccgtccgcattaacgccagccagcacgcgattgataaagtccttctgccgaagctggcggtgttcaagcagcgctatcctgatatccggctggaacttattagcgaaagtcggtttgtcgatattattgcagagcggtttgatgccggggtgcgtcttgggccggaggtcggcggcggcatggtcgcagtgcgcatttcgcccgatatggagatggccgttgtcggcacgcccgagcattttcgccgctacggtttcccgcaaacgccagctgatctggtcgtccatccctgtatcgcttaccagtttggcgacggtagcctttacgcctgggagctgaatgagcagggtaaaaaaattacccaccggcctcaggggcagtgggcttttgccgacagctatatggaagcgaaagccgcccgcctgggactgggcctggcctatgttccgcaggagctggtcgccgacgacctggagcggggcgcgcttatcagagtcctgcagcgttacagccagcggctggaaggctcttttctctattatcctcatcgcaacgtctcccccgcgctgcgggcggtgatagatacattgcgaacttga

SEQ ID NO: 254665 - DNA, 1059 bp, Klebsiella pneumoniae
atgagctatgccgatacaaccaatccgaacgcgcccgtttcgctgatcgaaacctgggacaaaacctttacgaaaagcgcgaaagtcgatcaccgcaaggtgaccttccagaaccgctacgggatcaccctggtcggcgatctctacatccctaaagatcgcggcgagcgcaagctggcggcgattgccgtaagcggccccttcggcgcggtgaaagagcagtccagcgggctgtatgcccagaccctggcagaacagggctttgtcaccctcgccttcgatccttcgtacacgggggaaagcggcggtcatccgcgtaacgtcgcctcgccggatatcaatactgaggatttcagcgcggcggtggattttttaggattgcaaaacgaagtggatcgcaaccgaatcggcctgctcggcatctgcggctggggcggcatggcgctgaacgatgccgcgatggatacccgcgtcaaagcggtggccaccagcgttatgtacgatatgagccgcgcgatgggccatggcgttggcgacggtaaagatcgttataccaccgccgatcgccgcgccgtactgcaatatctgaacgcgcagcgctggaaagatgcggaaaacggtaccttcgcaccgggcggacatgacatttatgtcgatgagaaaggcaacgccagcgcgggcgatcctatcctgccggaaaccctgccagccaacccgaacccggtattgaaagagttctttgattattaccgcatgccgcgcggtttccacgcccgctccgtcaactcaaccggcgcgtggaacgcgaccatgccgctgtcgtttatgaatatgccgctgctgagctatgccaatgaagtcaccatcccgacgctgatcgtaaccggtgaaaatgcccactcacgctattttgccgaagacgctttcaaggctatcggcagtaaagagaaagagctggtcattgtccccggcgcgaaccatgtcgatctgtatgataatgcggccggtaaaatcccgtttgccagatttgaacagttcttcaaaaccagcctgagataa

SEQ ID NO: 254666 - DNA, 1188 bp, Klebsiella pneumoniae
atgtccatattgagtcgtaatacaccacaccctcaaccccccgcccactggggcggcgtctttgccatgacgctgtgcgtttttgtccttatcgcttccgaatttctgccggtcagcctgctgacgccgattgccagagagttaaatatcaccgaggggctggcaggccagggcattgcgatttccggcgccctggcggtgctgaccagcctgaccatctctgaccttgccggcagtctgaatcgtaaatatctcctgctggggctgacggtgctgatggcggcgtcgggaatgattgttgccctcgcccacaactatgcggtttatatggcgggaagagccctgattggcgtcgttatcggtggcttctggtccatgtcggcggccaccgctatcagactggtgccggcgcaccaggttccccgtgcgctggcgattttcaacggcggtaacgcgctggcaaccgtcgtagcggcgccgcttggcagctacctgggagccaccgtcggctggcgcggcgcttttttctgcctcgtgccgctggcgatagctgcattcatctggcagtgcgtcagcctgccagcgatggaaagcgccacagcgagtcggccacgcggtgctttgcttcgtctgttcagccgccccatcgtcgccatcggcctgctggcctgcggacttttctttatgggccagtttgccttatttacctacgtgcggccatttttggaaacggtaacccatatcagcgcctcaggtctgtcactgattctgctcgctatcggcgtcgcgggttttatcggcactctgtgcgtttcgacgctcctcaacgcccggttttatcagaccttaatcaccctcccgttgctgatggcggcgattgccgcaacgctgcttctggtcggccaccacgtctggcccgttgccgtactgttaagcttatggggaatgctggcgacggcggcgccaaccggctggtggacctggatagcgcggaccctgcccaatgatgccgaggcgggtggcggcctgatggtcgccgtcattcagctgtcgatcgcgctgggttcaactgctggaggttgggcattcgaccgcctggggtggcaaagcgcgtttggcttaagcggcattttgctgcttgccgcggtgggtatgactttgctcaccagccgtcaaccggcgaaataa

SEQ ID NO: 254667 - DNA, 345 bp, Klebsiella pneumoniae
atgcatctcaaccggtgttgctggctgctactgatcttcgcagcgatcggtagcttttttacctcctggccctttgctgtctggctgctgctgattaacgtactgacgctggtgatttatggcgtggataaaatggcggcgcgcagggcctggcgtagagtgcccgaggccactttactgtcatttggcctgttgggcggctgggctggagccatagcgggccaaaggctgttccgccataaaacgcagaagcagccgttcaggacctggttcgtcatcagtacgatggtcagcatcgcagggatggcggcgatttatgggttgcatgctttttccgctcactga

SEQ ID NO: 254668 - DNA, 729 bp, Klebsiella pneumoniae; identical to SEQ ID NO: 172448

SEQ ID NO: 254669 - DNA, 435 bp, Klebsiella pneumoniae
atgcgtccctcgtcgtccgccatcagtcgttttagcgcgtactatgccacgctggatacccagccgccctcagcgctggccgagctgtaccatgcccatgccgtgctgatcgatccttttggccaacatcagggactggccgcaatccaggattacctttcacacctgctggctaacgtggatcactgccgtttcaccctcgatgccccgctctgcgccggtcaacgctttgccgtcgcctggaccatgcactggtcgcatccgcgacttgccggcggagcggcgctagagcttgcgggatgttcaacggtcaccatcgaggacgaacgcattattcatcagcgtgactactacgacgccggagagatgctgtatgaacatcttcccctgctgggatcggcggtgcgcggcgtcaagcggagggtgcggaaatga

SEQ ID NO: 254670 - DNA, 720 bp, Klebsiella pneumoniae
atgatgactgttctgatcaccggcgccagctccggcattggcgccgggctcgccagatcctttgctgcggatggtcatcttgtcattgcctgcggccgcgatccgtctcgtctggcggcgctacagcagcacagccccaacatccgcgttctctcattcgatatgacggacagggatgcctgtcgccagacgctcgccaactgccgcgccgattgggtcattctctgcgccgggacctgcgagtacctcgatcgcggcatggttgatgccgggctggttgaaagagtcatcaccaccaattttctcgggccggtgaactgcctggcagcgcttcagtcgcagctgtcagccgggaatcgcgtggtgctggtgagctcgatggcgcactggctgccctttccacgggccgaggcctatggcgcatcgaaagcggcgctaacctggtttgccaacagtctgcgcctggactgggagccacgagggatcgccgtcacggtcgtttcgcctgggtttgttgataccccactaacgcgtcagaacgatttttcaatgcctggacaggtgagcgtggagcaggcggtgaaagccattcgccgcggcctggcgaaaggtcacgatcgtattgccttcccgactggcttttgtttgcttctgcgcctgctggccgggcttcctgaaagtcttcaacgcaagctgttacgcaggatggtacggtcatga

SEQ ID NO: 254671 - DNA, 1260 bp, Klebsiella pneumoniae
atgaaaatcgcgattattggcagcgggattgccgggctgacctgcgcatggcgtcttgccgcgcaacaccaggtaaccctgttcgaagctgcatccacgccgggagggcacaccgcaacggtggatatcgccacgccgcagggtacgtgggccatcgataccggattcattgtgtataacgatcgcacctatccgcactttatcggcctgctgagcgagctggggatccgcggccaaaaaacgcaaatgagcttttcggtccataacccgcagagtggcctggagtataacggtcatagcctgagttcgcttttcgcccagcgacgcaatctgcttaagccggccttctggggtctgctgagagaaatcgtccgttttaatcggctggcgaagcaggctctgggaggcgcgttcgacccggccgccacgctacagaccttcctcgagcgccaccgctttagccctttttttgcgcgccactacattctgccgatgggggccgctatctggtcttcgtcgctacaggagatgcgtcgcttcccgctggcgctgttcttacgcttctttgataatcacggcctgctggatatccgccagcgtccgcagtggtacgtggtgcccggcggctcgcgcgaatacgtccgcgccctgcttgtccggtctggcgatcgcctgagcctccgcctcaatacgccggtgcaaaacgttatccgcggtcaggatggcgtgacgttgcaactggcaacgggagaggagcatttcgatcaggcgatcttcgcctgccattcggccgatgcgctggccatgctggcggaacccaccgtcgccgaacgcgagattctgggcgatatcggctggcagcgcaacgaggtggttctgcacagcgatccccgctggctgccggtgcgtaagcgcgcctgggccagctggaactatcgcctgagcgagcaggatcaggccagcgcctgcgtcacctacaacatgaatattcttcagggcctgcctgccgacgccccgctgttctgcgtcaccctcaatccgccgacgccggtggacccgcgcttcgtctggaaacgtatggtctatgaacatccgttgtttaatccacaaagcgggtcggctcagctgcggcgcgaggagatcaacggccgccagcggagctggttctgcggcgcgtactggtataacggcttccatgaagatggcgtgcgcagcgccctcgatgtggtcaacggcatcgccgcgacggagaatcgctga

SEQ ID NO: 254672 - DNA, 723 bp, Klebsiella pneumoniae
atgaacagctgcctgtatgaaggggtattacgccaccgccgtctccagccgaaagcgcaccattttcgctatcgcatcttcatggcctggctcgatctggatgaactggacctgctcagcgaagtgggtatccgccgcaatagttttgctgccgcctctttttacgatgcggattacccgctgggtacgccgctgaaagcgcaggttctgaatcggctggaaagcctgaccggcacgcgtccggatggccgcgttatgctgctgacccagctgcgctatctgggctttcattttaacccggtcaacttttactactgctatgacggcgcaggcgccctgcgctgggtactggcagaagtgcgcaacacgccgtggaatgaacggcattactacgccgtggacggccaacggacgcgtccgctggataaggcatttcacgtctcgccgtttaacccgatggacatggtctatcactggcgattcaaccggcccggtaaaacgctgcatatgcatattgagaaccatcagacggcaaaagtcttcgatgccacgctggccctgagccgtgaacccttaacccgggccaacctgcgagggctgctgctgcgcattccgctgatgacgctgaaaaccgttctcgcgatttactggcaggcgctacggctgtggctcaagcgcgtgccgctgtacaaccatcctgtcagcaggagtgaacgctcatga

SEQ ID NO: 254673 - DNA, 1224 bp, Klebsiella pneumoniae
atgaccgatcccgtttttgcgcttgagcccgatatcccgcgcaacgtacgtatcgcgcgctggttgctctttcgtctgttgagcggcattcgtgaaggctcgctcaccgttcgcgaaggggcgcagacctttcactttggcgaccccgccgcgacgttacgcgccgacgcgcaggtcctctccgcgggcgtctactggcgcttactcactggcggcagccttgccgcggcggaggcctggatggacggagaatgggagagccagcagttgacgcagttgctgcagatcctggcgcgcaacggccaggtgctggggcggctggagcgcggcttccggctactgggcaagcccgtagaacgactgcgccactggacgcgccgcaactcgcgcgcgcaggcgaaggagaatatcgccgcccattacgatctgggcaacgacttttacgcccgctttcttgacgacgagctcctctactccagcgcgctgtttaccgatgacggtcaggatctcacccaggcccagcgggctaaaatggcgcgcctgtgcgagcgtctggcgcttacgcccggcgatcatttgctggagatcggtaccggctggggggcaatggccgaattcgccgctcgccattacggctgtcgggtcaccaccaccaccctgtcacaggaacagtttcagtgggccaaagcgcggattgcccgcgccgggcttcaggatcgcgtcgacgtgctgctctgcgattaccgcgatctcaccggcgagtacgacaagctgctgtcggtggagatgattgaggccgtgggccaacgctatctgccggcttttttccgcacctgtcaggcgcgcttgcgtccgggcggcaggatggcgatccaggcaatcaccatccaggaccagcgctatcgcggctacagcaaaagcgtggattttattcagcgctatatctttccgggcggatttttgcccagcattacagtgatgaacgaactgatgacgcgccataccgattttgtgatgcgcgatctgttcgatatgggcccggactacgcccgtaccctggcccactggcggcagcgttttctccacgcctggcaggatatcgagaagctcggctttgatgaacgtttccgccgcatgtggctttattacttcggctactgtgaggccggatttaacgcccgcaccatcagcgtcgtgcagctcaccgcggagcgaacatcatga

SEQ ID NO: 254674 - DNA, 534 bp, Klebsiella pneumoniae
atgaaacgcattttgacccttggcctcgcgctgctgatgctggcgctggcgggctgcagcgccgaagtgaccgattatcgacagcagcagccggcgctggatatcttccactattttcagggtaaaaccgaagcatgggggatggtgcaggatcgccatggcaagcagctacgccgctttcatgttgagattgacggtgaggttgttggcgacacgctgacgctacatgaacgctttgtctacgatgatggcgaaaagcagcagcgggtatggcgcattcgccgcaccggcgacaaccgttatcaaggcaccgctggcgatattaccggcgtggcgcttggcaaggcatcgggaaacgcttttcactggagctacagcatgaacgtaaaagccgagggtagccgctggcgactcgatttcgacgactggatgttcctgcaggacggcgcgcatctgttcaacaaaactgagttgaagaaatttggcgttaccgtcgccaccgtcacccttttcttcacccggacagcacaataa

SEQ ID NO: 254675 - DNA, 960 bp, Klebsiella pneumoniae
atgagcacacaacctgtgattgggatcagcggatgtttgaccggtgcggccgtgcgattcgacggcgggcataagcgaatgggattcgtgatggatgagctggcgcaatgggtcgcgtttaagcccgtctgtccggagatggcgatcggcctgcccgttccccggcctgcgctgcggctggtccaaactcgcgaaggggatatccgcatgcgcttcacccatgctccgcacgacgacgtaacggagaaaatggccgattttgccagcgcccaccttacgacgctgggcgaactgtcgggatttatcgtctgcgccaaatcaccgagctgcggtatggagcgcgtgcggctgtatgatgataagggcaatcgcggacgtaaagaaggcacagggttatttaccgccgcgctgctggataaatatccctggctaccggtagaagaggacggtcgcctgcacgatccggcgctgcgtgagaattttgtcgaaagagtttttgccctgcacgagctcaactgcttgcacaaaagtggcctgacgcgccgtgggctgctggatttccatagccgctataagcttcagctgctggctcaccatcaggcgggttaccgggaaattggcccgttcgttgcctcgctgcatgaatgggaggatctggaggctttctttgtggcgtaccgcgacaaattgatggcgatcctgaaaaagcccgcctcgcgtaaaaatcacaccaacgtactgatgcatattcagggctacttccgtaaccagctgaacagccgccagcgcggcgagttacgcgacgtgatccttaactatcgctccggactgctgccgatcctcgcaccgctaacgctgcttaagcactatctggcggaatacccggatcgttacctgcagacgcagaactactttgatccctatccgcaggatctggccctgcgcctgacggtgaattag

SEQ ID NO: 254676 - DNA, 492 bp, Klebsiella pneumoniae
atgatggggggaacttctctgtatgaaatgctctacggcaattttgccggagggactgcactggaccaggtgagcgaagaaacccaggtgattctgtcggttctggataatatgcagcgcattgttaactgtcgcgccgggacgctggcgcatcttccggattacggcctgccggatatgactaaaattctgcagggtatgccagggacggcccatgaactgatgagcatcttgtcgaccgtgttgcttaaatatgagcccaggctaaagaaagtgaaggtggttctgctggcgcaggcgatggcgggcgagctgcgctatgggcttgatgctgagctgaggggtattggcctggtacgttatggtaccgtatttatgcccgagggaagggtgcttattcgtcatctgaagcagcagcattacctggaggcccgttccgcaatccaggctttgcaggctggtatcatcagttcgtccaacgctgaagcttga

SEQ ID NO: 254677 - DNA, 540 bp, Klebsiella pneumoniae
gtgttgcgtatcacttcgattaagcgatctaccttactacttataccgttaatgctgacggggtgtggcctgatgcagaaaattagcgacggcacctcatcggtagtgaaatcggtcttttataaaccggtaaaaaccctgcatctggacgtgactggccgggcggagctgaacaccgatgagcgggaaaatgcctcattctcccagccggtgatggtatgggtgtaccagctcagggaccgtaaggcgtttgatcaattgctctatcagcagctggcttcggaaggtgataatgcagccggaaacgaactgcttgccagccatagcctggtggtgaaacccggcgcagacgccagcctcgacatgccgatggatgaaagaacgcagtttatcgcggtggtggggctgtttcgggcgccggatatggtgaggaatgactggaagctggtactgagacgcgacgacctcgatccggacaaaccacgcgttattgaagccagccaacatcgtctgacgctgcaaccgaagaaggatgactga

SEQ ID NO: 254678 - DNA, 1086 bp, Klebsiella pneumoniae
atggcaggagaaccacaaccgccgtattcccggctgagtccccggctggagcgggaaatccatcgcattaacttctaccgcttctgccagttactggaaaagcgtcacccggaagcctccccgttgggcggtactctgaacccggccagcgatccggtacgttttcgcccgcatccgggaatgggcttcccggttagcgagctaaaagcggtggaatatgatgagtatcatcctgatgcgccgccgacggtgcgtacgacgtttatggggctctacggcgtcgactcacccctgcccaccgcatggctcgatgatatcgcccgacagcgggaagggcacgaagcgcaggaggcctttctcgatatctttaaccaccgcattctgacgcagttctatcgcatctggcgaaaatattcgtacccggcgacgtttgaagcgggcggcagggacagcacctcgcagagtctactgggacttatcggtctgggtataccgggtaccgcaaagcatatcgccactccgacgtcgcgttttctggcgctgctcggcatcatgcgcctgcctgcgcgtaccgaagagggcgtgcaggcgctggtacggctgctggctcccagcacgcaggcccgcgtcacgccgcactctccgcgcccgttttccatcagccatcctctggggttttacgacaatgacgattttctgcttgatggctataacgtgctgggcgatgaaacgacagaggtcagcagccagctgttgattgcgctatatacggatgatattgccgagacgcagggatggttaccggaagggcagctatatcaggactttgtggtcctgctgcgggtctatctcgggtggcgctataaggcgcggatacagctgaccgttcctgctcagctactggctgcgccggtgctgggcgactccccttttatgctcggcatgacgggggtactgggtgtggagggggaaacgatcccgcccgatatccccgccgcttttactattgagccaggcaactataacggaatgccgtctgcaactttacaacaaggaaaccaacgtgttgcgtatcacttcgattaa

SEQ ID NO: 254679 - DNA, 1761 bp, Klebsiella pneumoniae
atggatgacttaactctgcgttattttgacgccgaaatgcgttacctgcgtgaagcaggtgaagaattcgcccgcgcccatcctgaccgggcagcggccttaaatctcgacaaagcgggcgcgcgcgacccgtatgtggaacgcctgtttgaaggcttcgcctttctgatgggccgcctgcgggaaaagctcgacgacgatctgccggaactgaccggcggtctggtcagcctgatctggccacattacctgcgtaccattccttcgctctccattgtcgaattcaccgcggactggcatgaactgaaagaatctctacgaatagaaaagggctttggcatactttcgcagcctattggcgaaaagcgcacccgttgccattacaccactacgcaaccgttgaccctgctccccatgtcgcttgtccgggcggggatgtcgacggaagcggacgggcgctcgcttatccgcctgcgctttgagtgcagctcgctggcagactggagccgcatcgatgtaagccgcgtcccgctgtatctgaatgccgatgcgccgctggcctgcgctctgcatgaggcgctgacgctccgggtggcgaaaacgtatgttcgcctccccggcaatgccgaacgcaggacgctggacgcccgttttgccgtctgcggtttcagtcaggatgaggcgctactgccggagagcggcagcttcagcggttatcagctgctgctggagtatttttccttccgggaaaaatttatgtcggtgacgctgcgcggcctggaaaatgtgaatttccctgaggttctggcgtggtttgaaattgatatcgtgctggagaaacagtggccgcacgaatatgcgctgtcggagaaaaatctgcgcctgcactgcgcgccggtgattaatctgttccctctggagtccgatccgctgcacctggactcgttgcagaccgaatatctgctgcgcccgatgcgtatccaggatggtcataccgagatttattccgtggattcggtcacttcctcgcgccattccggccatcagacgtatgtgccctttaccagcttccgtcacaaagggggcatgctgcgccatgatgcgccggaatattactatcatacgcgggtgaagcccggtccttccgggctgcacgacacctggctgatgctcggcggcgaggcgtttgataaccacagcgtacctgagcatgaaaagctatcgctcagcctgaccggcactaatggtcaactgccgcgccgggcgctacagagcgcgctgctggatacggtggtgaaatccaccgccacgcctatccaggtgcgcaatctttgcgccccgacgctgccgtgctatccgccggatcgcgaccgatttcactggcgagtgctgagtcatctcggcagcagcttcctgtggatgatggataacgccgacgtgctgcgcggcgcgctggccctctatgactggaccgataacgagatgaatcgccgccgcctggaggcgattgttgatgtcaggcacagcgaggtggaacgttttgcgcagggccattttctgcgcggcgtacagattgaggtgaccctcgacagcagcggcttcgccgggcacggcgatatctgcctgtttggcgaaatgctgaaccgcttcttcgcgctctataccgatattcatctgttcaaccatctgattctgatactacaacctgggggagaacgtctcgaatggcaggagaaccacaaccgccgtattcccggctga

SEQ ID NO: 254680 - DNA, 183 bp, Klebsiella pneumoniae
atggcgaaagggagtgacttgattcgcgttgacagaactacctgcggcggatttatctgccggttcactattctgggcgtaccggttgcgcgtgaaatagaccgggtaacgggtggtcaacatccgggcatatacacgatcgctggctctattcctggagacagtcttgatggcctggggtag

SEQ ID NO: 254681 - DNA, 762 bp, Klebsiella pneumoniae
atgcctgatacgactgctgtaagcgtcaaaaacgtctcaaaacagtttgataatgttgaagttcttcgtgatatcaatctgacggtagagaaagggaccgtggtgagcatactcggctcgtcggggtcaggtaaatcaacgctgctgcgctgcatgaactggctggaacagccggatcgcggcgagatccgcatcagcggccagcggctggggattgatgagcaaaatggccgggcgatgtcccatcgtcagctgtcgaaaatccgcgagcgggtagggatggtgtttcagagctttaacctgtggccgcacctgacggtgcagcagaacgtcagcgaagcgctgctgcacgtcaaggggatgaagcgtgatgaagcgaaggctatcgccatgcagcagctggagaaagtggggatggcgcataaagccgacgtttacccgatcacgctctccggcggacagaagcagagggtggctattgcccgttcgctggcgatgtcgccggaggtgattctgtttgatgagccgacatcggcgctggaccccgagctggtcaacgaggtgctgggggtgatgaaggcactggccgccgagggctacacgatggtggtggtgacccacgagatggactttgcgcgccaggtatcggatgaggtggtgtttcttgagaagggattgttgattgagaaagctccgccggagaagtttttcagcaacccggactccgagcgcgtcaggcagtttctgcagagcagccggtaa

SEQ ID NO: 254682 - DNA, 666 bp, Klebsiella pneumoniae
atgaatcagtgggccgttatctggtcggtgcgcgacagctttattgccggtttactcgccacccttgagctttttattactgcggcaatagccggcttaattattggcgtggccctgtgctatttaaccgagtatcaaaagaaaactcttaaccggcttattattggctttgtcagcttaatgcgggcgattccctttttgatcctcgcctatttgctctattacggactgccgcaagtgggtattagtctggagccctggaccgccggattaatcgccctgattatctaccacggcgcctatttctttgagattttgcgcagccagcgtcgggtcttttccggaggctatatcgaggcggcggtagcgcaggggttctcgcgctacaaaatattccgccacattattctgcccaatattttgtcatcggcactaccgctgatgggcaatcagctgattatctgcctgaaagataccgctttcctcagcattatcaccgtccaggagataaccgccgcggctaacagcgtgcaggccacctattttatcccgtttaacgcctttattgtcgccattgggctctactgggcgatcagcatcctgctggagctgttgattaagcgtctgagcgcctggggagcgagaagaggaatgagtcatgcctga

SEQ ID NO: 254683 - DNA, 642 bp, Klebsiella pneumoniae
atggatgcaatttcctggcagttactgattgaaggcgcatggacgaccctctggatttcggccatcgccattgcctttggggtggtgattggtctgctgatcgcgctggtgcgcatgctgcgtatcccggttatcgatcagctgctggtggtctatatcagccttgcccgcgcgacgccgctggttacgctggtgctgttcctgtttctttctctgccgaccgtcgggattaatctcgataaaaacgtcgcggcgattgtggcgctgacgctcaacacctcggccttcaacgccgaaatctggcgcaatgcctttcgcactttcccccgcgaacagcgggaagcggcggagtcggtagggatgcgccgctgggcttacttccgctacatcatgctgccgcaaatgtggattgaaagcctgcccgcgctggttaatgagatgtcgttcctgattaagggtagtcccgccattgcggtgattggcgtggtggatttgacgcgcgtgaccaaccgaatttcttcggtcacctatgagccgctttcgccgattctggcggcgggtctgctgtacgtggtgattattggcctgctgctgaaactgcaggggatggccgagcgtaaagcgaagcgtctggcacgataa

SEQ ID NO: 254684 - DNA, 852 bp, Klebsiella pneumoniae
atgaacaaatcattaggttcaatttgtctgggcgccatcatggcgatggccttttcttatcacgcagccgccgcagatcttccggaaatagaaaaatccggcaccctgaaagtcgcgaccgaagatgattacgcgccttttaactttatgaataacggccaggcggatggcttcaacaaagatatgctcgatgaattacgtaaatacgcgaaattcaacgtcgaccagagcattctgccgtggaccggattattggcggcggtctccaccgggcaatacgacatggcgttaaccggcgcggtgattaccgatgaccgtctcaaggtctttgatttcacgccgccgtgggcgtcagcgcagcactattttgtcaaacgcgcgggcgataattccctgaataccattgccgaactgagcggaaaaaaagtgggcgttcaggcgggcagcgcgctgctggcaaggctgccagaactgaaagcgatgctggagaaaaccggcggtaagctggggccggtggtggagtatccctcctatcctgaagcctacgccgacctcgccaacaaacgcctggactacgtgattaacgtggttatctcggtcaacgacctggcgaaggctaagccgaaggtgtttgccaaaggtctggcggtatccggcccgggctatatggcgtggccgatcccgaaaaactcgccgcagctgctggcctatatgaccaaatttatgaaccacatgaaggagaccggcaagcttgcggaactccagaaaaagtggtttggcgaaacctatgacgacctgccgaccgaagcgattaccagcccggaacagttccataaattagccgggctgtaa

SEQ ID NO: 254685 - DNA, 1467 bp, Klebsiella pneumoniae
atgatccgacaccggttacacgttgatttcgacccgcgccgcggtttgcaggagcaggtgcgcgaaacgctgattaacgccattctgggcggcattttttccgccgacacgccgcttccctcctgccgccagctggccagccagctgcgggtatcgcgtaacaccacggcgctggtgtttgaggggctggttaacgagggatatctggtgagccgcccgcgcagcggttattacctgcatgcggattatcagcacgcagctccctccacggtaacggaagctgcaccgcaggacgcgggttctgcaccacgctggggcacgcggctgcaaattacccccagtcagcaggagtcgattctcaaaccggccggctggatgaactaccgctatccgtttatctacggtcagcccgatacccgccagttcccgctgacgacctggcgctcggcggcgaactggctgcacggcggcgtaagggacccggagtgggtggtggatcatatcgatcgggacgtgccgatgctgattgagcagatccgcacccgggtgctgcccaaacgcggaattgtcgcctcggcggacgagattctgattaccctcggttcgcaaaacgcgctctacctgctgacccgcctgctgatgtcccccggcacgcgcgttggcgtggagaatccctgttttcgcgaggctattaacacttttctgcttgccgataccgatatcgtgccgcatccggtggatgaacaggggatcgtccttaatgacgccccctgcgattactactatgtgactcccgggcatcaggtgccaaccggggtggcgatgagcaaagcgcgccgcagccagctgctggagcatgccgcccgccatgatgcggtgattattgaggatgattacgactctgaaagtaactttatgctcaacccgctgccggcgctgaaggccagcgatcgctgcggacgagtgatctacgtgagcagcctgtcaaaggcgctctcgccgggcctgcggctgggctttatggtcgctgatccggatctgattgacgaagcccgggcgctgcggcggctggtgtatcgtcatccgccaaccaacattcagtatcagatggcccattttctcgcccagggtcattatgaaacccacctgaggcgctaccattacgactctgcccagcgctgggagcgcctcaataacgcgctgcggcagcacctgccagaatgccaaatcatccccggcagcgaacacgccaatgccttctggctggccaccccggagcaaatcaacacccagcagctgacctggcgcgccgcccacgccggggtgctgatcgagcccggcgcccggcattttctcagcgacgcgccgccggataactttttccgaatgggctttcacgccattaaccctgacgccatcgaacaaggcgtggaggtgctgcgcggccagctggcgcagatgggctag

SEQ ID NO: 254686 - DNA, 537 bp, Klebsiella pneumoniae
gtgcgcaatccgccgccgccgctggtgagctatgcgccggaaagaacggtatatgtcaccggcttctcgaaaaacgtcgccaccggtctgcgcgtagggacggtcatctgcccacctcgctatcggactgagattgagcgcgccatacgagcgacgacgtggaatacgccgtcattgatgagctcgctgatctgcgcctggattgaagatggcacggttgcacgctttgaaaatgagaagcgccaggatgcgcggcagcggcagcggcttgcccgtgaggcgctcgacgggctgcccttcgtgagccatgcggattcgtattttctctggctacctctgggcgaagagagtcgggccgatcggctggcgaaaacgctgatggcgcgccatatttccgtgtcgaccgccgaacccttctgcgttgccgcaactgttccgcaggcgctgcgcatcgccctcggttctgttccgcttgataccctgcgcgcggcgctggtcgaggttcgccagaccgtggcatttgaacaataccgctag

SEQ ID NO: 254687 - DNA, 819 bp, Klebsiella pneumoniae
  misc_feature (697)..(706): n is a, c, g, or t
atgaaagcccgatacaaagcggttgtcgacagatacgcgcaggcgattcagagcggacagctgccggccggaacccgcctgccgacgcatcgtacgcttgccgccgacgaagggatctcgctggccacggccacgcgcgtttatcatgaactggaagcgatggggctggtcagcggcgaaaccggtcgcggcaccttcgtgcgggacatcgcgctaccgccgggacacggtgtcgatcagcaggcggtggcagccgatgttgtggatctcaacttcaactatccttcactgccgacgcagggggatgcgctgcgcgaggcgctcaggcagctggcgggggtaggggatatcgaggctcatctgcgctaccagccgcatgccggacggctcccggaacgtgaaattatcgctcgctatctgaccagcagccgctttgcccctgacgcggaaaatgtgctgatcgtcaacggcgcccagcacgggctggcggtgaccgtgatggggcttctgcgcccgggggacgtggtggcggtcgatgcgctcacctactcgggctttaaggttctggcggcgctgtatcatctggaactggcggcgatcccctgccgcgcggacggaccggatctgcatgcgctccaccgactatgccagcagcggcgcgtccgggcggtgtataccatgccgacgctgcacaatnnnnnnnnnncgggcggtgtataccatgccgacgctgcacaatccgctgggctgggtgctcagccctcgccaacggcagacgctggcggaactcgcccgccagcacgacctgctgatcgttga

SEQ ID NO: 254688 - DNA, 891 bp, Klebsiella pneumoniae
gtggtagattcagcggttcataaaacggttcccgggccgtggtccggatggcttaatggtttactgggcgtcattatttttagcggttcgctgcccgcaacgcgcctggcggtgctggatatgaacccgttcctgctaacctttctgcgcgcctccatcgccgggctcctcgctatcgcgctggtagtcggcttgcgccagaaacggccgcgcgcatcgcagcttgtccccctggccatcgtctcatcaggggtggtgatcggctttccgctgctcacggcgctggctttgcgccaagtcacttcagcgcattcgatcgttttcatcgggctattgccgttgatgacggccatttttggcgtactgcgcggcggagaacgtccgcgccgcgctttctggatcttttccgttattggcagcctgctggtggtgggtttcgccctgacgcaacaagctgcggcgtcgctgagcggcgatctgctgatgctggcggcggtggtcgcctgcggcctcggctatgcggagggtgctaagctgacccgggagcttggcggctggcaggtgattagctgggcgctgattatggcgctgccttttatgctgatcgcctcgttactcacccggccagcgtcatggagcgccatctcggtttccgcctggattgcgctcggctatgtgtcgctctttagcatgcttatcggttttattttctggtacaaagggctggccgctggcggtatcgccgccgtcggccagcttcagctattacagccgttcttcgggcttggcctgtcagccgcgctgctgcacgaaaccgtcagcccactgatgctgaccgtaaccctgggcgtgattctgtgcgttatcggttcgcgcaaatttggccgctag

SEQ ID NO: 254689 - DNA, 1269 bp, Klebsiella pneumoniae
atgagcagtgatgtcctttttaccccgataaccgaaaccaccgcctgccgggtcaatggcgcgcgcctgtgggattcgctgatgacgctggcggaaattggcgccacgccgaagggcggctgctgccgtctgacgctgaccgatcttgaccgccagggacgggatttggtgattagctgggcgcaggcggccgggatgagcgtcaccgtcgataaaatcggcaacgtatttatgcgccgggaagggcgtaatccggcgctgccgccgattgtctccggcagccatattgacacccagccgaccggcggcaaatttgacggtaactacggcgtgctggcggcgctggaggtggtacgtaccctgaacgatcgggagattgaaaccgaagcgccgattgaggtggtgttctggaccaatgaagaggggtcgcgctttgtaccggtgatgatgggctccggcgtgtttgccggggtattcccgctggagaccatctacgccgcgcaggatgcggacggtaaaaccgtcggcgcggagctggcgcgtatcggctatatcggcagccagacgccgggcgaccatccggttggcgcctactttgaagcgcatattgaacaggggccgatacttgaagatgaagagaaaattatcggcattgtgcagggcgtgctggggatccgctggtatgactgcgtggtgaccggccaggagtcccacgccgggccgacgccgatgcgcctgcgtcaggatgcgttacaggtagcgacccgcattatgcaggaagtggtggcgattgccgggcgcagcgaggaagggcgcggtacggttggaagagtgcaggtctatccgaacagccgtaacgtagtgccgggagaggtcactttttcgattgatatgcgcaatatcagcgatgcgctggtggatgagatggaccgccagctgcgggcgtttatcgccggggtcgagcgggagagcggcctgaaggtggcgttaaaagaggtgagccactatccggcggcgccgttccacccggagtgccaggcggcgatcgccgacgccgcgcagcggctggggtatcccgcgcgggagattgtctccggcgccggacacgacgcggtgtatatgagctatctggcgccgaccgggatgatttttatcccctgtaaggacgggatcagccacaacgaaattgaatatgcgtcgccggagcacgtggaagccggcgcgaacgtgctgctgcaggtgatgctgcagtacgcgcgggtagtgtaa

SEQ ID NO: 254690 - DNA, 1185 bp, Klebsiella pneumoniae
atgcaggatgatattcgcgcttttatgccctatccgccgcatccggtggcgcatgcgctaagcgggccgctgagcgggttaacttttgcggtcaaagatctgtttgacgtagcgggctaccccaccggcggcggcaatccgcatctgctggcgctgtccggggtgaaaacccgcaccgcgccggtggtgcaaaaattattagataacggcgcgcgctttatcggtaaaacccataccagcgagctggcgtattcgatgagcgggcacaacgtgcattacggcactccgcgcaacggcgccgcgccgaatcatatccccggcggatcgtcgtccggctcggcgtcggcggtatcgaacgaggcgtgcgactttgccctcggcagcgataccggcggctcggtacgcacgccggcaagctactgcggactgtttggcctgcgcccgacccatggccgactctccctcgacggctgccagccgctatgcgccaccatggatacctgtggcttctttgcccgctcgccggaggtcttttccaccgtcgccgcctgtctgttcgacgatgggcgagcggatatcaccggcgtgcggctggccagccatgaagggctgttttcccgcctgccgctgcgcagccagcaggcgctgctgccggtccgccaggagctggcgcgcttattcggcccggtaacgccgctcggcgcgccgctgccggacgtggatgatatctatctcgccttccgccagattcagggctacgaagcctggcaggcgcagggggaaaccattgagcgctacggcctgcagctggggccggacgtccgcgagcgttttttctggggcaaagcggtcacccgcgcgcagtttgacgccgcctgccagcagcgcgagcgttttaccgcctggtgggacgcgcagttgggcgatgcggtcctggtgatgccgaccgttcccgacggcgcgccgctgctgacggcgcaggccgaagagatagaggcggtccgccgcctgtctcacgatctgctgttaatttccgtcatgacccaacgtccgcaggtgacgctgccggttgcccggacgggcggcctgccgctgggaatttcatttttgggcccgcgcggcagcgatcgtctgctggttgagctggccgccgcgtttatgcaaggagaccgaaatgagcagtga

SEQ ID NO: 254691 - DNA, 1011 bp, Klebsiella pneumoniae
atgtcgcatgaagcttacgtccatatccgcgacctgcgggttgagtttcgccgcgacggtcagacggtcaacgcggtcaacggcgtctcctttgatgtacaaaaaggcgaggtgatggcgctgatcggcgaatctggctccggtaaaagcgtcaccctgcgcgccctgatgcgcctgcatccgccgaaaagcagcgtgctttccggcacgctgagggtcggggaagaggaggtgttgaagatgagcgccgggcaactgcggcgctaccgcggcgcgcgctgcgcgatgattttccaggagccgctgctggccttcgacccggtctataccgtgggccagcagattgtcgaagggctgcgtcgccatgaaggcctgtcgcgacaggcggcgcgggaaagggcgctggaggcgctgcgccaggtacgcattccgagccccgagcggcggctggatgcttacccgcacgagatgtccggcggaatgcgccagcgggcgatgatcgccctcgcgctctcctgcaacccgcagctgctgctggcggatgagccaaccaccgcgctcgatgccacggtgcaaatacagatcctgatcctgctgcgcgagcagcaaaagcagcgcgatctgtcgatcatttttgtgacccacgatatcggcgcggcggtggagatcgcagaccgggtggcggtaatgtacgccggacgcatcgtggaagaggcgtcgattgaggagattctgtatcgtccgcgccatccctatacccaggtgctgctgggcagccgaccgaaagaggggctgaaaaagggcgacgcgctgcactgtatccccggctcgccgccggatctctcgcgtctgccgcccggctgctcgttcgccgatcgctgtccgcacgcgcgccccgcctgtgcgcagagccagccggctaccgaaccggccgggccgcgtcacgtggtgagctgccatcgctggcgtgagctgagtgcgtccgttgaaaaccaggcgctgtacgcctga

SEQ ID NO: 254692 - DNA, 1044 bp, Klebsiella pneumoniae
atgcaaccctttacgaatatcgacctcggcgggccggcgcagccgctgctcaaggttaacaatctgctgaagcattttcccgccggcggcggcaaagtgcgcgaagtggtacaggcggtggatgacgtcagtttttcggtgatcaaaggcgaaaccctcggcgtcgtgggggagtcgggctgcggtaaatcgaccaccgcccggctgctgatgcagctgcttaagcaggacagcggggagctgatctttgatggcctggaagtaggctcatcgcgcctgccgatgaaagcgtatcgccgccaggtacagatggttttccaggatagctacgcctcgctcaacccgcgcatgaccatggaagagagcattgccttcggtcagcgggtacacggcgtcagcgccaaagaggccagcgagtatgcccgctatctgctggcgcacgttggccttgagccgggacgttttgcgcaccgctatccgcacgcgctctccggcggccagcgccagcgcgtgaatatcgcccgcgcgctggcgatgaagcccaggctggtgatcctcgacgaggcggtctcagcgctggataaatcggtagaagctcaggttctgcagctgttgcaggagctgaagcggacgctggcgctgacctatgtgtttatcagccacgatctgcacgtggtgcgctggctgtcggaccgcatcctggtcatgtatctcggcgaggtggtggagattggcccggcggagcagctgtttaccgcctcggcccacccctatacccgggcgctgttaagctcgatgccgtcgatggacccgcataatcgcaccttaacctcgccgctgagcggcgatccgcccagcccgatttctccgccctccggctgccgctttcatacccgctgcccgcatgccagagcggtgtgcgcggaggtgaaaccgacgctcgaaagcgtcggcgaggggcacctgagcgcctgcctgatggcgcagcccgcgtcgccctggcagcaaaaaatcgccattcaggaggtgagctatgtcgcatga

SEQ ID NO: 254693 - DNA, 894 bp, Klebsiella pneumoniae
atggtggataccgtgacgaccaaaggcattgccgtccctgccaggacggttgccaggcaaggctactggcgcggcgtgtttggccgcctgctgcgcgacccgggcggggtattcgtcggcgcgatcattctcgttctgctggcgctggcgctgttcggcccctggctgatcgttaaagatccgtatcaaacgtcgatgtttttacgcctcaagccgatcggcaccgacggctttccgctgggctccgatgagctcgggcgcgatatgctatcaaggctgattctcggcacaaggctatcgctgtttatggggattgtcccggtggtgttggccttttttatcggcggggccatcggcattatcgccggctatgcgggcggcaaaaccaacaccctgatcatgcgcaccgtggacgtattttatgctttcccctcggtgctgctggcgatcgcgctttccggcgcgctgggcgcgggtatcggtaacgcgctgctatcgctgaccctggtgttcgtgccgcaggtggcgcgtattgccgaaagcgtcaccgcgcaggtgcggcatatggactacgtcgacgccgcccgggccaccggggccagcgcgttcaccattattcgcgtccaggtgctgggcaacgtgttggggccgattttcgtcttctccaccggcctgatttcggtgtgcatgatcctcgcctccgggctctcatttctcggcctcggggttcgtccaccggagccggagtgggggttgatgctgaacaccctgcgcacggcgatttatacccagccgtgggtggcggcgctgcccggtctgatgatttttatcacctccatttcgttcaatatcctcgcggaccgcctgcgtgcggcaatggcgattaaggagtaa

SEQ ID NO: 254694 - DNA, 954 bp, Klebsiella pneumoniae
atgatcaataccctgctatatcgcatcctgctggccgtccccaccatgctcggggtcgcggtgatctgttttatgctggtgcagatagcaccgggcgacccgctggtgtcggtgatgccgccggacgcctcggaatcgctgcgtcagaccttaatgcaggcctacggctttgataaaccgctgccgctgcagtttgtgcactggctatggcgggcgctgcacggcgatttgggcatgtcggtcgccaccggccgtccggtcatcgacgaggtcatgacggcggtgacctactctctgcgtctggcgctgctggcgacggcgatcggatttgtgctgggtagcctgtttggttttgtcgccggctattttcgtaacagcattattgaccgcctggcctcggtgctgtcggtattcggcgtcagcgtgccgcactactggctggggatgctgctggttatcgtttttagcgttaaattcgcgctgctaccggcaaccggcggcgggccaatcggcgaggtgggctggcagtgggactgggaacacctgcagtttatgctgctgccggccttcacgctgtcggtgatcccgaccggcatcatcgcccgcaccgttcgttcgcaggtggcggacattctcagccaggagtttatcgtcggcctgcgcgcccgggggctcaacgaatcgcggatctttctgcacgtggtgaagaatgccgctccgaccgcgctggcggtgatggggctgcaggtcggctatctgatgggcggctcgattctggtggagacggttttctcctggcccggcaccggcctgctgctgaacaccgccattttccagcgcgacctgccgctattgcagggcaccatctgggtactggcgctgttctttgtcctgctcaatctgctggtggatatgctgcaaaccagtctcgacccgcgaattaagaggagctga

SEQ ID NO: 254695 - DNA, 1116 bp, Klebsiella pneumoniae
atgccgttacctgattttcaccgctccgagccgtttacccttggcatcgagctggagctccaggtcgtcaacccaccgggcttcgatctgagccaggactcttccgcgcttattgatgaggtccagggcacgctgaaagcgggcgaggccaaacatgacatcaccgaaagcatgctggaaatcgccaccggcgtctgtcgcgatatccatcaggccacggcgcaactgagcgcgatccaacaggcggtgctgcgtgccgccgcccgccatcatgtacaaatctgcggcggcggaacgcatccgtttcaaagctggcagcgccagcagatcagcgataacccgcgctacctgaaaaccgttgagcactttggttacctggcgaagcaggcgactattttcggccagcacgtgcacgtgggctgtcaaaacggcgatgatgcaatttatcttctgcacggcctgtcgcgcttcgtgccgcattttatcgcgctgaatgcggcctctccctggctcgacgggaccgatagcggctttgcctgctcgcggcttaatctttttgccgcttatcccgataacggcccgatgccgtgggtcaataactggcaggcgtttatcggcctgtttcgtcgtcttagctataccagcatgattgatagcatgaaggatctgcactgggatattcgccccagcccgcgctttggcaccgttgaggtacgagtgatggataccccgctgacgattacccaggcggtaaatatcgccgggtttatccagatcattgcctgctggctgctgacggaacggccgtttaaacatcagcccgaagattacctgttgtaccccttcaaccgctatcaggcctgtcgctatggcctggacgggatcaacaccgatgtaaacggcggcgaacagcgaacctttcgcgaagaaattctacggctggcggataaactggcgcccagcgcccataagctgaatgccggcagcgcgctggaggcgattgtgcgccaggcgaagcaggctcgcagcgagccgcagcagatgcgcgagttcgtcgccaacggcggttccttaatcggactggtgcaaaagcactgcgagatctggacggcgtag

SEQ ID NO: 254696 - DNA, 720 bp, Klebsiella pneumoniae
gtgcgctttttctctcttctgccgctgctactggtatctttgcccgccttcgccagcgggaaatgctcgctgaccgatccatcgctcacgctgcaaagctatcgcgtcgatccgcagcgcgagcgcattgtgatgtactggcaaaaagaggacggcaaagcctgggggtcgctgcgctcgctgctggcggatatcgaccgcaacgggcaggtgcagatggcgatgaacggcggaatttatgataaagcctacgcgccgctggggctgtatatcgagaaaggccggcatttgatcccgcttaaccgcgcctccggcggcggcaacttttttattcgtcccggcggggtgttttatctgcgagggcaaaacgcgggaattgtcagcattgataaattcaagccgtcgccagccattcaatacgccgcgcagtcggggccaatgctaattgaaaacggcaagatcaactggcggctgaagccgtccgccagctcgcgcaagctgcgtaacggtgtgggcatcaccggcgatggcaaagtggtatttatgctcagcgagcgcgaaaccaatttctacgatttcgcctgctacgcgcaatccaggctcaacgtgcgccagatgctctatctcgacggcaccatttcgaagatgtaccggaaaggcggcagcgtgccgtggcagtaccatccgttcgtcaccatgatcgcggtggagagcagatag

SEQ ID NO: 254697 - DNA, 3018 bp, Klebsiella pneumoniae
  misc_feature (1903)..(1910): n is a, c, g, or t
atgctgacattttttatccgacgcccgcgctttgcgatggtgattgccctgctgatgacctttgtcggcgcggtctcgctaaagctgatcccggtcgagcagtatccgcagattactccgccggtcatcaacgttagcgccagctggcctggcgccagcgcggcggacgtagcggaagctattgccgcgccgctggagacccagctcaacggcgtcgatcatatgctgtacatggagtccaccagttccgatgaggggacctacagcctgagcctgacctttgctgccggaaccgacgccgatttagccgcaatcgacgtgcagaaccgcgtgtcgcaggcggtggcgcagctgcctgccgacgtgcagcagaacggcgtacaggtgcgaaagcgggcgacaaacctgctgatgggggtgagtctctactctccgctcggcaccctgtcgccgctgtttgtcagcaactacgccagcacccaggtgcgcgaggcgctggcgcgtcttcccggcgtcggggaagtgcagatgttcggcgcgcgcgactacagcatgcgcatctggctgcgccccgaccgcatgaacgcgctgaatatcacgaccgacgatattgcccttgcgctgcgcgagcagaacgtgcagggcgcggcggggcaggtaggcacgccgccggtgtttaacggccagcagcaaacgctgaccatcaacggtattgggcgattaagcgatgccgccggtttcggacaaattgtggttcgcagcggcgaacgcggccagctggtacgcctgtccgacgtggcgactattgaactgggcgctcgcagctacagctccggcgcgcagctcaacggcaaagactccgcctatctcggcatctacccgacgcccaccgctaactcgctgcaggtcgctactgcggtacgcgccgagctgacccggctgcatgcgcgcttcccggcggatctcacctgggaggtgaagtttgatactacccgctttgttgcggcaacgatcaaagagatcggcgtgtcgctggcgctgaccctgctggcggtggtggtggtggtctccctgttcctgcagagctggcgggcgacgctgatagtcgcgctggccatcccggtgtcgcttatcggtaccttcgcggtgctctacgcgctgggctacagcgccaataccctgagtctgtttgcgattatcctcgccctgacgatggtggtagatgacgctatcgtggtggtggagaatgtggaaacaaaaatggcggaggggctggatcgcggcgccgcaaccgccgaagcgctgcggcaaatcgccgggccggtgatcgccacgaccctggttctgctggcggtgttcgtgccggtggcaatgctgccggggatcgttggcgagctgtatcgccagtttgcggtcaccttatcgacggcggtgacgctgtcgagcgtggtggcgctgaccctgacgcctgcgctgtgcgcgctgctgctgcgtccgcgtccggagcggcctgccgccatctggcgcggctttaaccgcggtctggatacggtgcgggacggctacgggcgtctggtcgggggcatgaatcgccgtccctggctggcgctggcggcgacggtagccgcggcagggctggtggtattgagctttaccacaatgccgaaaggctttctgccgcaggaagatcagggttatttctttgccagcgtgcagctgccagaagccgcctcgctggagcgtaccgaggcggtgatggcccaggcgcgggagctgctgttgaggaacccggcggttgaggatgtgattcaggtgtccggttttaatattctcaacggcaccagcgcctcgaacggcgggtttatctccgtgatgctgaaagagtggcatcagcggccgccgnnnnnnnngccggggctgggcaacgcctctggatttgatttacgcattctggcgcaggctggacaatcgccggcggagctggagcaggtcacccatcagatcctgcgaatggccaaccagcatcagcagcttagccgggtctttaccacctggagcagcaatgtgccgcagctgacgctcaccgtcgatcgcgaccaggcggcccggttgaacgtaccggtggcaagaattttcagcagcctgcagaccgcgtttggcggcacccgcgccggcgatttcagcatcaataatcgtgtctaccacgtggtgatgcaaaatgagatgcagtggcgcgagcgggccgagcagattagcgagctttacgtgcgtagcgacagcggcgagcgggtgcgtctgagtaatctggtgacgattacgccaacggttggcgcgccgtttattcagcaatataaccagttcccgtcggtatcgataagcggtacggcggctgaaggcgtcagcagtcgggcggcgatggcggtgatggagcagattttacaatcgaatctgccgcacggttatgactatgcctggagcggcatctcgtggcaggagcagcagaccggtaaccaggcggtatggatcgtgctggcggcggtggcgatggcgtggctgtttctcgtcgcccagtatgagagctggacgctgccggcgagcgtgatgctgtcggtgctgttcgctatcggcgggtccctgctgtggctatggtgggccggttatgccaacgatgtgtacgtgcagatagggctggtgctactgatcgcgctggcggcgaaaaacgcgattttgatcgtcgagtttgcccgggcgaagcgtgaagaggggatgtcgatcgtcgacgccgcccgcgaaggggctacccgtcgcttccgcgcggtgatgatgacggcggtctcctttatcatcgggattgtgccgatgatgctcgccaccggcgccggggcgcagagccggcggattatcggtaccacggtgttcagcggcatgctggtggcgacggcgatcggcattctgtttattccgtcgctgtacgtgctgttccagcgcctgcgcgagtgggcgcaccgccggatgtag

SEQ ID NO: 254698 - DNA, 1083 bp, Klebsiella pneumoniae; identical to SEQ ID NO: 173270

SEQ ID NO: 254699 - DNA, 2724 bp, Klebsiella pneumoniae
ttgaccaaaatgatcaaaactaataataccaccccctcaggggatgtcgcgccacgccgggcatatcagcagacggttgatgcggtgctggcgcagaaaaaaagccatgtcgacgggctcagcgccgctgaagccgccgagcgtttgcagaccttcggcccgaacgccttgccggagaaaaaaggcaagccagcctggctgcgcttccttgcccactttaacgacgtcctgattttcgtcctgctggccgccgccgcgctcaccgcggttatggggcactgggtcgatacccttgtcattcttggcgtcacggtgatcaacgccctgatcggccatatccaggagagcaatgccgaaaaatcgctacagggcatccgcaatatgctctccagcgacgcgcgcgtgcagcgcagcggtaaacacgaaaccatcccgacccgcgacctggtgccgggcgatattgtgattctgcgcgcgggcgaccgcgtgccggccgatatgcgcctgattgagagccataatctgcgggttgaagaagccattctgaccggcgagtcgacggtggtggataaaaccaccgacgcgctggaaggcgaactgccgctgggcgaccgtaccaatatgctcttctccggcacgaccatcagcgccggcggcggcgttggcgtggtgaccgcaaccggccaggataccgaactcggccacatcaaccagatgatggcgggcattgaaaagcaccgtacgccgctgctggtgcagatggataagctcggtaaagcgatcttcgttatcatcctggcgatgatggctgcgctgttcgtcttcagcctggcgctgcgcgatattcctctcggcgagctgctgctctccctgattagcctggcggtggccgccgtgccggaaggcttaccggcgattatctcgattattctctctctgggcgtacaggcaatggcgcgtcagcgggcgattatccgcaaactgccgacggtggaaaccctgggcgccatgaccgtggtgtgttcggataaaaccggcaccctgacgatgaacgagatgaccgttaaagcgatcatcaccgccgactgctgctaccgcgtcgaaggcgacagctacgagcctcagggtaacatctgcctggaaggcagcaacgagccggtgctgattaaaccgggcagcgtgctggaaacctatttgcgcaccatcgatctgtgtaacgacagccagatgattcaggacgagcgcggcctgtggggcattaccggcgggccaaccgaaggcgcgctgaaggtgctggcggcgaaagcgcggctggagcccgtcgatgcccgcctggtcgcgaaaatcccgttcgactcgcagtacaagtacatggcgacccaccagaaaatgggtgacgtcgagcaggtgctgattaccggcgcgccggacgtgatttttgccctgtgccgccagcagatgagcaagcagggggcggtgccgtttgagccgcagtactgggaagaggagatggcgcgctttgcccgccagggcctgcgtatggtcgccgccgcctacaaaccggctgacgtcggcagcactacgctgacccacgacgatctgcgcgaagggctggtgttcctcggcattgccggaatgatggacccgccgcgtccggaagcgatcgacgctatccacgcctgccagaacgcggggatccgcgtgaagatgattaccggcgaccacccgcagacggcgatgagcattggccagatgttggggatcaccaacagcagccaggcgatgaccggctaccagctggagcacatggatgacgccgagctggcgaaagccgccgtggagttcgatatctttgcccgcaccagcccggagcacaagctgcgcctggtgaaagcgctgcaggataacggtgaagtggttggcatgaccggcgatggcgtcaatgacgctccggcgctgcgtcaggccgacgtcgggatcgccatgggcattaagggcactgaggtgaccaaagaggccgccgatatggtcctgaccgatgacaactttgccactattgccagctcggtcaaagaggggcgccgggtctacgataacctgaaaaagaccattctgttcatcatgccgaccaacctggcgcaggggctgttgattatcatcgccctgctggcggggaacattatcccgctgacgccggtactgattttgtggatgaacatggccacctccgccacgctctcctttggcctcgcgtttgaagccgccgagcgcaacgccatgaaccgaccgccgcgtaaaactggccagcacgtcatggatgccttcgccgtctggcgcgtcgccttcgtcggcacgatgatcgccgtcgccgcctttattcttgaagcctggctggcgccgcgcggccacagcccggagtttatccgcaccgtcctgctgcagatgctggtcaccgcgcagtgggtctacatgattaactgccgcagcagcgacagcttctcgctgaatatggggcttctgcgtaacaaaggcatctggctggtgagcggcgtgctgctgctgatgcagctggtcatcatctacgtaccggtgatgcagacgatgtttggcaccgaagggctgccgctgcgctactggttcatcaccctggtcatcggtatcgcgatgttcctggtggtggaagttgagaagcgcctgactcgtcgtttccgcaaagccgcgtag

SEQ ID NO: 254700 - DNA, 249 bp, Klebsiella pneumoniae; identical to SEQ ID NO: 173268

SEQ ID NO: 254701 - DNA, 1623 bp, Klebsiella pneumoniae
atgaaaacggcgtggagcggtctgctgctggggttaagtgctttaccggcggcggcgatgaactgtgaatccccttcgttacagggagagctggaggggaagttcgacgccagcggtgaggtctgttttgacttgcccaggctaggagagaactacgtcgcggcgacgctctccggcgttaccgatgcccgactgctggatgaacataaccgccgtctgcgcacgctgctggcgggcggcccggcggacggcgagcaaaccctgctgttttctctgccggtaaaccgcgcctcctcgctggtgctccacggtgaagaaggagcccgctggcgctttcagtggcagatgcgggaaaccaccgcgctggccaaaatccagacgctggacccggtcagcccgcgcctgcagctgctgaagaaggaactggcggcgggaggctcaacggcgactttctggcgggagcgcgaactggagggaacgcccatggtggaatcggtggacgccagccataagcgggtgaccttcttgtggcgcggagcgagccgcaacgtgtttattctgggttcgccggcgggggatcacgatccgctgtttcgtctcggtgattctgacgtctggtttcgtagctacgtcgtacctgccgataccttaatgcagtataagctggccccggatgtgccgcaggtagccggcggcgcgcgcgagcagcggcgggctattctggtcagcgcccaggccgacccgctaaacccgaatagcgtcaatgccgcccacgaccgctggagtcgctactccctgctggctcttaaccccgcgcgtttttgctcggcgccgcggatggcgcagccgctacgctacgggacgctgacccgccatcagctgcgcagcgactttttgcaaaacgcgcgtgaagtcatgatttatcgcccacgtttgccgcagcccgcgcgctggaccctgctgctctttgacggtaaaacttaccaggacgaataccgcttcgccaacgtgctggacgcccttatcgccagccacaggctaccgccgattaacgtggtgtttatcgatagcctcgatcatccgcggcgggcaaaggagctgccgccaaatccgcactttgccgattttatggcccatgagctgctgccctggctgaaccgccaggggctcagcctgacccggcaaaaaaccgtggttgcaggatccagctacggcgggctggccgcgtcctgggtggcgctgcgctatccccggcagtttggcaacgtactgagcctgtccgggtcgtactggtgggcgccgaaaggggaagaggccagctggctgacccgacagtatcagcactcgccgcgctatccggtccgtttctggctacaggcgggaagatttgagacccgcgggccggacggcggtatttatgccaatacgcttgagttcgggcgggtactgagcgagaagggatataaggtgagctttcatccctcctcgagcggccacgattatgtcgcctggtgcgaaggcctgatcaacggtatgcgcgacctgagcggattagcgctcaagagagaaccagcgacgccagacccagcgcagcgccagatactcgatggcgcccagcgctaa

SEQ ID NO: 254702 - DNA, 183 bp, Klebsiella pneumoniae
gtggatgaaatctgggtgacccgcaaaccgacctctgacggccacgtcaccagcgtcgagctgttcgccaaagacggcacgcagatcgcacagctgttcggtcaacgcagcgaaggccatccggagcagacgcagtggcgtgcgcaggtcgatcgtttgactaccgaaggactcatcgcatga

SEQ ID NO: 254703 - DNA, 819 bp, Klebsiella pneumoniae; identical to SEQ ID NO: 173665

SEQ ID NO: 254704 - DNA, 996 bp, Klebsiella pneumoniae
atgcgcacccaccctgcccgtcatctgtggttaatgacgctgctgctgattgtcctgacgctgctcgccacgaccctgggcgcaatgcgcctgccattagccagcctgttgccctccggcgatgaaatcctgaggagtatctggctgaccattcgtttgccgcgagtgctgctggcgctgctggtcggcgccgcgctggcgctttccggctgcgtgatgcaggggctgtttcgcaaccctctcgccgaccccgggctgctaggcattagtagcggcgcggcgctggcggtcgcctgctggctggtactgcccctgtcggtgccggcgctcgtggcgctgtacgccccgatgctggcggcgtttatcggcagcatggcggtgatggtggtaatttttattctcagccgggcgggcgacgcctcgctttcgcgcctgctgctggtcggcatcgccattaatgccctgtgcggcgcgctggtcggggtactttcgtggatcagcaatgatacccagctgcgccagctttccctctgggggatgggcagcctcgggcaagcggaatggtcgacgctgctggtggccgccacgctgatgatcccggcctcgctggtggtgtgggcgatggcttcgcggctcaacctgctgcagctgggcgatgaagaggcgcactatctcggcgtcaacgttcgcgccctgcagctgctgctgctgctgtgcagcgcattgctggtggcgtcagcggtggccatcagcggcattatcgggtttatcggactggtcgtgccgcatttgatgcggatgtggctggggccggaccaccgcggcctggtccccggttcgctactgtgcggcgcaatgttgctgctgctggccgacacgctggcgcgcaccgttgccgctcccgccgagatgccggtcgggctgttgaccagcgtactcggcgcgccgtggtttctgtggctgatttttcgtcgggagaaaggggctcatggataa

SEQ ID NO: 254705 - DNA, 780 bp, Klebsiella pneumoniae
atggataaccgctatagcgcgcgttcgctttcgctgcgtctgggtaaccggcagattattcatgatgtttcgctccagctttgcggcggcgagatgacggcattgattggccccaacggcgccggtaaatcgaccctgctgcgcctgttgaccggttatttaacgcccgaagagggccaacgggtggtggaaggccgaccgctggagagctggtcggcagaaacgctttcgcgccgccgggcggtgatgctgcaacgcacccagttgcacgcagactggccgatagaaacgattatcgctatggggcgctcgccgtggggcggcgcgataaaccaggagatgatctgccaggtaatgaaagagaccgggtgcgatcatctggccggaagacgctaccctaccctctccggcggcgagcagcagcgggtgcagctggcccgctgcctggcgcagctttggcgcgacggcgcccccgagggctggctgttccttgatgaacccacttcggcgctggatctctattaccagcagcacctgctgcgcctgctcaaacgcctgacccgcagccgccgcctgcacgtctgcgtggtactgcacgatctgaacctcgcagcgctatgggccgatcggattctgctgctgcatcaggggaaactggtggctcagggcacgccgcaggaggtgatccagcagccgattatcagccgctggtacggcgcggaggtcagcacgggcaaacatcccgatgcggccgttccgcaggtgtatctggcgccgtga

SEQ ID NO: 254706 - DNA, 1152 bp, Klebsiella pneumoniae
atggcttacagaatgattttaaacgaaacctcttattttggcccaggttcgattcgttgtatcgtagatgaagttaaaaaacgcggcttcaaaaaagcgctggtggtcacggataaggatcttattcgttttgatgtagcaaccagggtgttcgctatcctcgacggcgccggattgccctacagcgtctttgatgaagtggtcccgaatcccacgattgaggttgtgcagcagggcgtagaggcgtttaaacagtcaggcgccgactacctgatcgcgatcggcggcggctcgccgcaggatacctgtaaggcaataggcattatcattaataaccccgaatttgccgacgttcgcagtctcgaaggcggggcggatacgaaaaacgccgccgtaccgatgattgccatcccaacgaccgccggtaccgcggcggaagtcaccatcaactacgtaataaccgacgtacagaatcgccgcaagtttgtttgctacgacccgcatgatatcccggtggtagcgatcatcgacgccgaaatgatgagcagcatgcctgccagcctgaaggcggccaccggcgttgatgccctgacccacgccattgaaggctatatcactaaaggcgcatgggaattaaccgacatgctgcatctgaaggccatcgaggtgattggccgctcgctgcgcgcttccgtacagggcgacgcgcagggcgcggaagggatggcgctggggcaatatattgccgggatgggtttttccaacgtcggtctggggctggttcatggtatggctcatccgctgggcgctttttacggcacgccgcacggtgtggctaatgcggtgctgctgccgcatattatggcttataacgccgaatttaccggcgagaagtatcgcgacatcgcggttgcgcttggtaacaagtcggcggcaaccctgccgattgccgaagcgcgtgccgcggcaattgaggcggtggcgcagctgaatcgcgacgtcaatattccggcgcgcctgcgcgacgtgggaatgaaagaagaagatattgatgctctggccgccgcggccctggcggacgtgtgtaccggcggcaacccgcgcgataccaatctggaagagattaaagcgctctatcggcagatcttctaa

SEQ ID NO: 254707 - DNA, 321 bp, Klebsiella pneumoniae; identical to SEQ ID NO: 173669

SEQ ID NO: 254708 - DNA, 741 bp, Klebsiella pneumoniae
atgcggttcgatatagagggatttattacatttgatactgaggaggcctctctggtcaatctcttgaccggcgattgtattgaactctccgccacttcgactcgccttcttactagtctgttgcaataccggggggatattatttcgcgggttgatattttccagacggtgtttgaaaaatatggcgcgaggccatctaatagtaatcttaatcagtacatctcaacgctgcgtcgcagccttgcggatctgggtattgaaaagaatgtgattattacggtaccgcgaattggctttaaaatttctgaggatgtcattatcactaccgacaatgattactcttcctctatcacactgccaaccctttctccacagctgcctgaacgtaatttgctgcaacaacattgcaaagcggcgatgttactgatcgcgttcgcagcggtcgcgatgctgctctcttatttttttatctataaaaaacaaacagctaagttcattttcactcaggataaatgcactatttatggttccgaagctatcccggtgacagaaatcctcaggaataaaaagctctttacctcggggctggactgttccacgccaaagaaaatctacttctttaaccgacaaatgaatcaggaacagggattaggtatttacatggatatcttcatgcttgagtgcgatattaaagaccagcaatgccatagttattactataaggaaataaaaaatgcgtaa

SEQ ID NO: 254709 - DNA, 489 bp, Klebsiella pneumoniae
atgcgtaaatatgccttgatattttccgcctgttctttcgcgctgatactattttcaaccctgtacctaaacttcagttctgaggactcattctcctgtgaatcacgctacgatttgacggagaatataaatgagaacattcttcgttcccaagggttgctatccgcagaaattttcaaaaaccatcttttaatcaatctggagggtttactcaccagcaatggcgataaatatattgtctcacgcaccatcgccatcactttaaaaagaaaaatcgatcccagccatcttttttatataaaagattcgcaagtcattcgccaccacgctgataatacgccagaagatattgcgcaaaaaaatctctttggaagccaaactaatgataaaatcatctatataaatcacgtcaatgatgatactattttgttaggcacccaaaagtttccacaatatggttgtcgccgtcagaaaaccatcattgattga

SEQ ID NO: 254710 - DNA, 1197 bp, Klebsiella pneumoniae
atgacgatacatttacttccgacattagccagcatcgccaatatcattgatatgattaacccccggctgaacctgcaccatgtcagaacggcgtttatcgcatcacatctggctaatttagtggagttctctccggcccagcggcgtaaaactattctggcggcgttaattcacgatgtcggtgggttaaatgaaaaatcacgtcttgagccgctaaattacatcgataacgagcataacaaccacgcgcttatcggcagcgaattgcttagccgcatcccgttgtttcgtcctcttaacaggattgttcgctaccatcacacccactggcgcaacggtcttgggcattatattgaaggagaactggtccccgaagagagtcacctgctgttcttcgccgaccggctggatgtactttattgccagcaccgtaccggccatatcgcatttttaagcaaaaagctggtcgacatcgtcaccgccggggcgaatattctctataaacaagagtacgtccaggcgttcagaacgctttccgccgatgaacatttctggtcagtcatggcctccaccgactatcgcgattacatcaaagcgattcctggcgtgcataacgataccatctctttacataacctccgcgatattgctgaactggtctcttttattgtcgatcagttcagccagcagacgccgtggcactccgcggccgtcggccatattgccggctatctggcgaccaccatggaaatgagcgcgacgcaaacgctaaaagttgagattggcggattgctgcataatatctcctgcctggatcatagcccgccgccagcgcgatccgcttcgccaggcagagcagaagcctctctctatagtattgaaggaattgatgatattactgaatggatagccatgcaaaatcgtaatgcgtcctctaaatggcgcgctgaatcgctacaaacggaagccctgctcattacggttagtcgactgctggtccatgccctgagcgggccgaagggagaagaaaaatcgctggcccagttaattaaaaataacccgggaaatgaaattccctcgtttatgctgtcgcctatcgcgcagcacgcttcacaaattattcagatctatcgcgcaactgcgggagaaataaaagagctggtgaatcgcgttgagcaactcaccagctccgcgtaa

SEQ ID NO: 254711 - DNA, 732 bp, Klebsiella pneumoniae
atggcgcaaaaatgggtgctgattaccggcggcagccgggggataggccgggcgctggtcgccggcctggcgcaaaacgggaacgtggtgtttaccgggcgcaatgaagcggcgattaacgccactctggcggagtgtgaaaattcatcgtatcaggtgcaaggatacgcctgcgacggcaacgacgagtcgcgggttgaagaacttgctcaggcgctgctggccgagcggggcgcaccggaggcaattattcacaatgccggaatggctcgcgatggcctgcatattcaccagaacgccgcgctatggcgcgaggtgctggacaccaatgttatctcaatgatgaactggaaccgggttctgctgccggcgatgttgatgcagcggcgcggctccatcgtgatgatgtcgtcggtcagcgccttcaagggtaacgtcgggcagacggcgtatgcggcgagtaaagcggcgatgagcggcattgcgcgttcgctggcgctggagatcgggcgcttcggcattcgggtaaactgcctggcgccgggcctgatccgcacggagatgctggaagagatacccgcgcaaaaattgaaagagatgcgccagtcgatacctctgcgcagattgggcgaaacggatgatgtactgaaggccgtggcgtttttaatcggcgaggggagtgaatatatgaccggacaaactctgattctggacggcggattaagcgcctga

SEQ ID NO: 254712 - DNA, 252 bp, Klebsiella pneumoniae
atgattccctatgatgaagttctgcaaaaagtgtgtgaaatgatttgtgacgccaaggacctggagccggatgaggtggatgagaatacgccgctggttcgcttaaagttagatagtctggactacgtcgagctgatggtgctggcaaaacgtgaattcaatattaccctggaagcggactggtttattcaaaatccggggatcacgctgggtgaactgtgtcagcatatcagcaaagagtcaggcagctga

SEQ ID NO: 254713 - DNA, 795 bp, Klebsiella pneumoniae
gtgacgctgctgcgctacacccttgccgatgcgcagcagtgggcggcgttttccggcgatgaaaaccccattcacttcgactacgcggcagcgcgcgcgatgggggcggggcagctgagcgtccacggaatgcgcgcgctgctggacgtgaagcgcgatgtccagtcgcggctgtgccgcccggagggatacgtaaaatgccaggtccgcctgcgcaggccgctatggtgcgataccgactggctgttaacgcccgggacggcgaaacagcggattctctccgccgcatcggttagccacccgcagaatggcgaaatctgtttgtcatgccagatgagcctggcggctgagccggagtcgctggagggtaagcagcccagcaaactggcgtccacgacgctgctcgcgctgcaatcccatttcaaccgcgcctggcccgacctggcgcagtggcagttccttgatgcgctgctgttccgtcagctgatttgcgatgaggcgctgctgcgccaggagaatattgccgccctgctcggaccgggggaaacctcgctgcagcaaattttttcccgctacccggtgctgcaaacccatcaggaagtggtttttgatgctcatctggcaggcaaagggacgccggtccaacccgactcgctgtcgctctggctgttgccttcattggtggtcggccaggctgagcagggcgcgctggtgcgtattgcagcggcggcgcagctggatgatcaggtcataacgaatgtgattacgctaaaagttggcccagttaccaattga

SEQ ID NO: 254714 - DNA, 1254 bp, Klebsiella pneumoniae
atgagtcacagtaaacccccttatcgcgtggtgataaccggctatggcgcggtgactccccttggcgatagcgctgccgaaagctggcaggcgatcatggattatcgacgcggttaccgctatgtggatctctccgctaacggcatccacacccattttatcggtcaggtagagaaggaacccagcctcaagggggttcccgccgctattcgtcggcgtctgccgcgtcacgctcgcctggcgctggccgccgcgcgggaggcggtggcgatggcctttgctggcgaaccccccactgatgcttatgacccgctgaggtgtggcgccattatcggctccggctgggcagggctggatgaaagctatctggcggtaccggagtttgagaaaacgggcgtctcttcgcccttcagctgcttcttttcgatgccgaacgtgaccaccgcggcctgtagtcagctgtggaatctgcgcggttatcaaaatactccggtcgccgcctgcgccaccggcactatcgccattggcgaggcctatgatgcgattcgctttggccgggccagcatgatgctcgccggggccggggagtcgttaaacagcgtttgcgctatctggaatatcgatgtgcttggcgcgttgagcagggaagcgtcatcgccggagcgggccagctgcccgttcagcctgcagcgcagcgggtttgtcctttctgaaggcggcgcggtgctgtgcctggaagagcgcgaaagcgccctggcgcggggcgcgacaatcctcgcggaggtcaccggttatgccaatttctccgatgcggtggattttacctcaccggccgaagactgcgtggcccgtgaacagactatccgctgggcgctgcgcgacgcgggcctgcagcctgccgatctcgattatatcaacgctcacggcacctccacgccgctcaacgatatgaatgaaacgcagtcactgaaaaaagcgctcggcgacgaggcgtaccggatcccggtctccagtaccaaagcctactccggacatctgatcgccgccgcggggagcttcgagaccattgtctgcctgcaggcgatggcggcggggatcatgccggcgacagcgcatctgacgcagcccgatccgcagtgcgatctcgactatatcgccgaagggcatcgtcagggagagatccgtcgggcgctgaatctgagctttggtttcggcggcgcgaacgccgcgctggtactggagaaacacgcgtga

SEQ ID NO: 254715 - DNA, 1398 bp, Klebsiella pneumoniae
atgagatcgctgactttattatcgttaattgtattgctgacgggctgtggaaatttgacccgcagcgattatcagcggccgctgctgtcggtgccggaggactggcagcgagcggaagggcaaagcgccgcgcttgcgtcggagaaagcgggtcgctggtgggaccgtttcggcgatgaacgtctgtcgcgggtgatggggcaggttctggaaagcaataacgatctggccgctgccgccttaacccttcgggaggcgcgcatttccgccgggctagcccgaaccaatatctcccccgacgcgacgcttaacggcgccggcagtaactcaaagccgctcaatagcggaggttcgcaggagagctatagcgcctcgttatccctgagctatgagctggatctgtggggcaagctggcgcgggttcgtgaacagagcgagtgggaggcgattgccagcgaacaggactatcgggcgacgatcctgtcgacgattgatactaccgcgcagctctactggaatatcgcgctgctgaatcaacaaatggcttatcaggccgccagcctggatatcgccaggcagacgctggcgcagattgagtcctggcagcgggcggggaaagtggggctgcttgacgttctgcagtcccggcagacggtcatcagtcgccagaatcagttgctaagcctgaaacagcagcgggcgatctcccgcaacgcgctggcgctgctgctcaacaggccccccgcgcagcatagcgatgaagcaccggcgcttgacgtccatcagcgtgtcgccattgccagcgccacgccgctggccgcgctcgccagccggcccgatctgcaggcggcggagtcgcggctgcgcgcggcgctggcgggttccgatgcggcgcggctgagcttttatcccacgctctcgctgcaggggacgctgagcgccggcagccagatctttcaccagtggtttaacgacccgctgcgtaccgtcggaagcagcgtcggcgcgccctttatccagtggaacacggtacagcttaccgtggagcaggccagcgtaaaggtgcagcaggaggcggtgaacttccgccgtacggcctacaccgcgctgtcggaggtggacgatgcgatggagaagcggcttaacgccgacgagcagcgcgagcgcctgctgcaatcgctgcagctgggccagcggcgcctgacgctcaccgaaagccgctatcgggcgggcgcggtggactaccagaccctgctgaacgcacaggacgcgctgctcgacgtacagaacagcctggcgcagaaccagtacgactatctttatgccactttgcagctttggctggcgcagggaggcaataacccgcaacagaggatttcccagaatgagtcacagtaa

SEQ ID NO: 254716 - DNA, 1944 bp, Klebsiella pneumoniae
atggctgagccgctgatcgtgctgaacaatgtcacgcgtcattttaccgccgggacgcagattattccggtactaaaatccgtctctctgaccattatgcccggcgaaatggtggcgattatgggcgcttccggctcgggtaaatcgacgttgatgaacattattggttgcctggataagcccagcagcggcgaggtttatatcaacgggatcgccactcaccgggcggatagcgcggcgctggccgagctgcgcagccgctggctggggtttatttttcagcgctaccacctgatgccttatctgacggcggaagagaatatcgccatccccgcgctctataccgcgatgcccgccgctgaacgccaggcgcgcattgcgctactggctgaaaagctgggcattgatgcgcggttacagcacaaacccgctcagctttccggcggccagcagcagcgggtcagcgtctgccgggcgttaatcaacggcgcgcagattattctcgccgatgagcccaccggggcgttggatagcgtcagcggtcgggcgctgatggatgttctgcaccagctgaacgccgacgggcacacggtcatcatcgtgactcacgatcgcgaggtggcgcggcaggcgcagcggatcgtcgagatcagcgacggacaggtggttgccgacagtacccacagcgctcgagataatcgcggcattcagcgccttcccgcagtacaggataatggtcgggcctcgctgtcgcgcagtatcggagagtcggtgcggatggcctggcgttccttactgggacatcggatgcgcgcctttctgtcgatgctggggataatcatcggcatttcgtccgtggtctcctccatggcggtgggggaaggcgcccggcagagcatcatgaacgagattggtaagctcggaaataccacgcttgaaatccgcccgggtaccggctggggcagcaagcgtccggatatggagcgggcgctgtcgctggatgatatcgccagcctcggcaggcagccctgggttctgggggtatcgccgattgtttccagcatgaccaccgcggtgcgtcagggctttgattcttcgataattctctccggcgtttccgcagactacttttcgctgcaggggattcgttttattcagggcaacggttttacccgccgcgatgtcgaggatcgcgaaccggtgctggtactggatgaaaccagcagggagacgctgtttcccggcaatgaagatccgctgggtaaaattgtgcagattgccggcgcgccgtggcgggtaatcggcattgccagcaagcccgggccaaaggtggtcagcgggtttatgtcggcgtggatcccctatagttcgctattgcagcggatttccggcgataagccgctggaagcgctgacgctgcgcttccaggaaacgctgtcgccgcaggaagcagcgcggcgcgcggaaaggcaccttatccgcgagcacggcaaaaaagatttctttgtccagaccgatgagcagctcgccaaagcgctgcaaaaaacctccgactccatgtcgctgctgatcaccgctattgccgccatctcgctgctggtcggcggcgtgggggtgatgaatatcatgctggtttccgttaccgaacgcactcatgagattggcattcggctatcggtcggcgcccgccctaccgacatcatgcatcagttcttaattgaggcggtgatgatctgcgcgctcggcggcttaacgggagtgctgggctcatgggccgccggtaacctgtttgccctgttgacgcaggagttttccatggtctttacctggctgccggtggcgatggcctgcggcttttccgccctgattggcctgacgttcggctatttcccggcgcgtcgtgcggcgcggctaaacccgacggaggcgctggcccgcgaatga

SEQ ID NO: 254717 - DNA, 1161 bp, Klebsiella pneumoniae
atgaggcgacaatttttacgccgccgtaaagcgtggctacttgcgctggtcgcgatcctggccattatcgccgccgttttttatcagcgctcgcttccggcccaggccgagtcgctctacaccgttgcgctcgatcgcggggatatcgaaaaagtagtgctggcgagcgggactattaaacctgccgtccaggtgagcgtcggcgcgcaggtcagcggccagctacgtaagctgtacgtgcgccagggcgagcgggtacgtaaggggcagctgttagccgaaattgacccgacgctgcagctttccgatttacgcaacgccaccgcgcagctggccagcgccagggcgcaaaagctggcttccgaggccacgctggtacagtaccgcaaagcgctggcgcgcgagcaggcgatgcagcgcgatggttcgggagtgagtagcgatcttgagcaggcgcaggcgcagtatagcgcgcaggtccagcagattgcggttaacgaagcgcagatcgtacaggcggaaatgagcgtgcagaccgccaacgccaacctcggctacacccgcatccttgctcctgtggatggtgaagtgctgggcatcgtcacccgtgaggggcaaaccatcgtctcctcacaaatcgcgccgacgattctggtgcttgccgacctcgataaaatgcaggtgcaaacgcgcatttccgaagccgatattcagaaaatccatcccggtcagccgctgtggttttacgtcatcgccgatccgcagacgcgctatgaaggggagctgggctacgtccagcccgcgccgcaggaggcgctggaggaacaaaacggcggagcttctgccggtaatcagcagagcagcgccatttactataacggtaccttcgaagtcgataaccaccagcgcttgctgaaaacctcaatgaccgcccaggtgtttatccgtatcgcgcaggtaaaagacgcgctgcgcgtgccggtcgccgcgctggggcgttcgctcggtgatgagcgttacattgtgatggtgcaaacggcgaacggtagcgaggagcgcaccgtccgtatcgggattaacgatcgtcagtacgcgcaggtgctggaaggattacggcccgatgagcgggtggtgatcccgcaggacgcggggtctgtgtga

SEQ ID NO: 254718 - DNA, 2112 bp, Klebsiella pneumoniae
atgaaaaagattatccctgatatggttttccaggaagagaccaatgaatgcggcctctcctgtattgcgatgctggcgcagacccagaatattccgtgttctctcccggcattgcgggaaattttccccgcatccgatcatgggacatcgttgagcgatctatccgttatcctgcaacaggtcggcattgccaccgcgccggtgttgtttgaccacgatgaacttcatgcgctgccgttcccgtccattctgcactatggcgccagccactatgtcctgctcgcctggcgcaaaggggattacgtttgcgtgatgaatccggcgattggccagcagtggctgcctttctcggcattaaaaaaagagattagcggctatgcgctgatcctcgaagaatctcccggcgcgatcgccagtccggatccggttattgccggggcgcagcaggagatgccgcgcgcgatgagcctgaaggagaccgcggcggtaccgggtatctataaactgatgctattaaccttcctggtatcgctaacgctgtttttaatgccgacgatggtcagtcgggcgataaaccaggccttctcagacgttcagaatacgcagtttccttatttatggttcatcctcgcttttgtcatatccacgctgttagcgctgggggtgagggtgattagcgagcgctttatccgccgctttgtcctcctcaagagcgatatcggtttttcccgcttgctgaataatccgctgcgtttttttgaaaaacgcgcgccgggggatgttttcagccgctttattgcctggcagggagggatgctgcaaaaaatcgagctggataacggactccgctcggactggataatctgcgttatcgctatcggcattatgttctggatctcaccggtgctggcgctcatttccgctgcgggcattgtcgtgatggggctgatcagcgtctgggcgatattccgcgaccgctggtatacgcagcagctgcagttgaaaagcgcgacgctgaatgactttttcatggaaacccttcagggggtgttaaccattaaaactgccggactggaaacgcagcgcaaagcgcagtttgcccgtttgtcacacgaccttttcacctgccttcagcggcagaaagtttaccagcaggtaaaagaaggtctgtatcagctcaccggcagcctcgagatggtggtctttatgctggtggtgctgccgctggtgagcgcaaagcttatctcgctgggcgacttttttgcctatagctttttacggcagatttttacctcttacgtcacgcggatattctatgccgtgatccgtaaatcgcagctgcacgtgattgatacccgcgcgcagggcctgtttacccgtgaggaacctgcaactcctcagttatctccgctgcgtggggaggcggttccacagctggcgtttgaggcagtgagctttcattacgctccgcaaagcccggtgctgaatgccgttgatctccggctggaacccggcgatcgggtggcgattgtcggcgattccggcgccggaaaaagtaccctgctacggctgatggccgggctttttaccgcacagcatgggcgcattctgctggacggtgaagaggcgaccgcccgccagctggcctcgcaggtatggctgcagagccaggaagatattttgtttaacgcctcggtgctgcaaaacatcaccctgtttgacccgtggtacagcgacagcgatcgcgggcgagtggaggcgctggtcgataaaatggcgctggggccggtcgttcaggcgctgccgggaggcatggaggcgctgatccgcgagagccattcggcgctctctttaggccagcgtcagcggctgatgctggcgcgggcgctctacagcgcccggcctattttgctctgcgatgaaccgaccgccaatcttgatgacgaaaccgcggaaacggtgatcgccgcgctgtgccagcactgtcgtgaacagggcaaaacgctgatcgtggtaacccacagtgcgcccattctgcatcacttcacgcgggtatatcgtctggatgaaggcgagctgcgcgatatcgcacagggagcaccgggccaatga

SEQ ID NO: 254719 - DNA, 951 bp, Klebsiella pneumoniae
gtgacgcgttttctcatcgtctggagcgttttcagcgtaagaaaatggttcgcgcagctgagctggcgctaccggccttttaccggctatggccaaaaggcggtgcgcaggatcatgcgtttcacccccatgccgctgctgttgatagcggttcgcgcgctatgtcggctacggttattgggccgacactaccgcggccgtaccgccgtggcgacgcaaaactaccgctgcctgacgggcgccgacgggcgaatcgatgccgcatggatagccatgcgccgtcagttgctggaaatgggtgcgacctggggacagcatccggctacgctggcccagatgcaggcgtgcacgcgagagcttgatgccgttgtcgcgcctctggtggcgcaaaagacgccggtcgtcctcgcgccgctgcactgcgtttccgatattttagcggcgatggtcggggccggcgtgacgccgggaaaagccagcgtggtggtctcctccagcgcggaaagctacaccgtcgccagccgaaaaatgggcggcgtcgcgctctcttactgctcaatccaccaggataatacgtcgctggccagcgagcttatggcgttaatgaccaatgtatcggaagggcgggaaaatatgattattttccccgacattcctgccgattacaccgtgcagacccatgaagcgcagtccgggaaaataagctgccgactctttggccgcccggcgaaattacatagcggcgtacagcgattttctcgcatcgtatcggcgcaggtggttttttatcacctctattatcagcaggggataaaaataaagatctattctccgctgagaccaaaagaggtcgcggcacagctaccgacgatgattgaaaacaccctgcgtgactatccgcaggactggcttttgtggcacagccattcgctctattttattaatcactga

SEQ ID NO: 254720 - DNA, 669 bp, Klebsiella pneumoniae
atgaagataaaacctattaccgctgttggctatacatttctggtggcgttaatttcgtcgctaattaccgtgctgtgctatcacatttttgttttcaacacgttttcgctggatagcagtcagccttcggccctgcgagaaattgatagcgccaccgttgtcagtagcccaatcaagaatgagaaaagcatcattgaagtgatgtcctacggctgtcactactgcgcgtcgaacgaagaagagatcgaaaaattcgccgccacgttaccggcggatagcgcctttgatgttatccatattacggccgaaagaaacggcctggccatttatgcgccggttttcgccacgctggaggtgatgggccttgagcgccagatgcgcgatcgggcttttaacgccgtgctgacccgcggtattaatttagcggatgatgacgcgcttaacggctggctgaaaaaaaatgatatcgatgtcgagaaataccatcagatacgccaaagtcaggccgttgccgagcgcctggaatatatggcgaaaattaccgaactctacgacattaacgcgacgccgttgtttattgttaataaaaaatacgtggttgcgaaggatcgccagttccctgaatttgccgactatatgcgccagctgttaacgcaggacaaggagtaa

SEQ ID NO: 254721 - DNA, 210 bp, Klebsiella pneumoniae
atgaaaaaattaagcatgattgaagcatcaacaattattggcgggacctgcaaagaaacttgcaccagctcttacgagacagtggttgttggcggtatctctacctgtaaacaagtgactacctgtacggataagcacggtaactcaaccgtgacctccaaagatgcgcctgacggtatgtgtgttgtaccgaatagcatccgtcagtaa

SEQ ID NO: 254722 - DNA, 672 bp, Klebsiella pneumoniae
atgagccgtcatttctttctctacgataaaaacatctttttcgcggaaggcgtgcgttcagtggtggccgatctggccgcgcatgaagacgactgcgctttctccaggcttgaccaattctcacaattgatcaacaccctgcgtcagccaaagcaaaaagatgaactgcgctggatcctctgcgatgtcgacagtttgccggatgagcgttttaatgcgctctacaccattaaagagtattactgccgggaaaatcagcagctggtaattttattgggagaaaataatatctctctgttttttgcgttgcattctttgctgccggaagcgagctggctattaaagaatgaatcgctggataatttttttaaatttatcgaaagcgctgatgccatggtggcgaagaaaattttcttcagtcgatccttaattaattatactcgacagaaatggctcgccagggattttaacaacagcatctccagcgatgactggtggttaatggaagaaatattcaaagggaaaacgctgtcgcaaatttcctctgagcaaaaaattgatgttcgtcggttgagccgctgtaaacgcgggttgatgaaaaaattaaacgtaaaaaataacgtggaattgtttaatattttcaaatgcatcgtggctaccccctgcgtttaa

SEQ ID NO: 254723 - DNA, 549 bp, Klebsiella pneumoniae
atgcgtcaatttatcgcatcaatggtactcataggttcgctatcggcggccaccccggcacaggctatcggggagctgatcggcggcgatttaaacttcaagggaaccgtcgttgcccatggttgcagtatcgttccctcgtcaaaaaatatcgccgtagattttggcgaaatttccactcgtacgctctatgcggagagaaaatcccaacctaaagcttttgtgattgagcttaaggattgcagtactgatgtgtttaattccgttaccgtaacctttagcggaacggaaaatgccaatatgagcgaccgtctggcgataacgccgatagcgcctaactccgccagcggtattggcattggttttgaagagaatgatggtacggcgatttcactaaatacgccaacgaccgcggttgccatttccagtgccaccatgcagttaaattttaaagcttttgtggaaggggaaccggatgccttgagtaacaaaactttgcaaaccggggccttccaggcaactgcgaattacaccataaattaccagtag

SEQ ID NO: 254724 - DNA, 1053 bp, Klebsiella pneumoniae
atggcgaagcgggttatcgggcggaaatcttgcgtcactattttactctgcggcggtttattttccctgaacgtcggtgcggcggttgaaggggaaattaccccggtcggcgggcctaaaatgtataatattgacgtggccaatcaggatattaccaataatagccccggagcaaccattccttatgtcttttccctgggtggacaatattctggggttgccagctgtacgattccgatggaagatcaggctatttattactcggctaccgcatcaatactgcagcagggaagctcacctgggtatttaaagcttaatgattatatggatgtaaaaatagagatttatattcgcggtcaacggatggattattttgccgttccttttaataatgaaacgaacggagcgtatcagaacaaatgcgttccgcccacgacccagtttaataactttgagtccggcgcccaggggcgggtaacgtttatgattaccaagccgattgtcaacggcgtgaacctgctgggtacagaaatcgctaagctttatgggcgtctggggaattacagcgcagggatgggcactacgccaatgtcgattatctcaattaattccggggtgattaccgtcccggataaatgtgttgtcaattcgggctcaccgatcaccgttgatttcaatactatccccagcgcgggttccctgcttaatggcaacaactacagccagtctgtgccaatccaggtgaaatgcgaagggggaagctttgcaaccggtaatctgaatattcgcctggggatccagcaggccaataccgccagctttaatagtgattatttaggcacgactggcaccgtcgatcgctcaaatcttggcattatcctcaaggattcgggcggcaatttagttgcggcgaataggttttatgacgtcccgggttttaccaataaccagggaacctggaatctgacggccgcgccgattgcgaatgccgggaccaacgttctcgaaggggatttccaggcatcggccaccgtggtcgctgagtttcagtaa

SEQ ID NO: 254725 - DNA, 630 bp, Klebsiella pneumoniae
atgaaaacgcgtttatcgcttttagcactgtttgtattcggtatcagtatgcccgcgttggccgaggctgatattccgctacagccgcagcactataaccgggatcatcagggggaagatggcggtaacgtcatattcaacggctccgtctatgcctcaccttgcgtgctggcgccgcagagccgtctgcagataattgagatgggtgaaattagcgcccgtcgttttcatcaggcaggcgaccgcagccagccggtgctggttcgcgtcgagctcagggattgtctgaagggcgcatcgcaggcgcgggacagcatcgcatcaagaacgacgggcaatagcaagcacctctacaccaccggcgagcaggcggtacagctgacctttatcggcgagtccgatgagcacaatcgccagctgctgcgcctgaccggcagtatttctggtgccggtattcgcctgctggatatcaaagagcgggcgctggatattaaccaaacgcagccgccgtttattgtgaaaaccggcgacagtagcctgacgtttattgccgtgctggagtcgaccgcgcgtaacgtgaccgcgggtaattttagcggactgctgcgtttaaaaatggagtatctctga

SEQ ID NO: 254726 - DNA, 744 bp, Klebsiella pneumoniae
atgagcataacaagcaacaaactctgctggatgggcgctctgatgctggcggcggtaagcggtaccgctcaggcaggcgtttcgctggaccgcactcgcctgattatcaccggtaaagacagctcggcgagcgccaatttaaccaacaccagtccggatattccgtttctggcgcaatcctgggtcgaggacagcaagggcaataagattacctctccgctggtggtgctaccgcctttacagcgtatcaacggcggacaaaaaggggtggcgcgggtcaccaaaacggatggcattaaccaattaccgcaggatcgcgaaagcctgttttatttaagcgtgcgcgaaattccgcccaagccggataaagctaatgtcctgcagttagccatgcagtcgcggattaaattatttttccgcccgaccgccattattcccaaaagcaaaagcgagatatggcaggaccaggtcgtcttccaaaagagcggaaataagatgaccgcgcaaaatccgacgccctattacatcaccatcattggcttatcccgcgtgaagggtgaaaaaatcaccaaattcccggggatcatggttgcgccgaagtccagcctggaattcagcgtcaccgatggcggcgtgcgagagtttgccatgatgtatgtgaatgactatggcggccatcccgagctgaaatatcgctgtgaaggaaatacctgtaaagctctgccgccatcgcagcaagggtaa

SEQ ID NO: 254727 - DNA, 2469 bp, Klebsiella pneumoniae
atgtcagcagaactaaaaataaaaataatcctctctcagatcctttttttctgctgtgcttctgtggcttgcgcctccactgatgtggaattcaacaccgacgtattggatgccgccgaccgcgacaatatcgatttaacgcgtttcgccaccgacaattatgtgccaccgggcgagtacttattagacattaaaataaatggtcaggctgtagggcagcaaaaggttcgctatctggcttccaaagacgagaagcatactcaggcctgcattaacggcgaaattcttgcaagattggcattaaaagaagaagcccagcagaaggtcgcgcagccgtttgccgattgttatgacctcctcagccttccgggcgccacgctcagtaactacgccggggtgctggatatcaccattccgcaagcgtggatgaaatataacgatccaaactggacgccgcctgagcgctgggaccaggggatcggcggatttttgctcgactatagcctcaccggccaatatacccgccagcttgatatgcacaaggattacagcaccctgagcggatatggccagacaggcttcaacctcggcggctggcgcgtacgcggcgaatatcagaccagctactacagcgcgacgcatcaatttgatttcgatatgaatcagttctacgcctatcgtccgctgccgatgatggcggcaaaactgacggcaggggagatctatcttgattcgcaggttttcgacaccgttcgttttaccgggctgaatctcgccagcgatgagcgtcaactgccgccaaacctgcagggctacgcgccggaaatccgcggtctggcaaagaccaacgctaaggtgacggtgaagcagagcggacgcatcatttatgaaacgacggtgcctgccgggccgtttaatattcaggatttacggagctcggtgcgcggtacgctggatgttcaggtggaagagcaggacggctccatctccacattccaggttaacactgccaatattccttatcttacgcgtccaggctacgtgcgctacaacgtcgctatcggtgcgccgtcccgctatagccataaaattcaggggccaggtttcgcttccggtgatttctcctgggggatcaccaatgcctggtcgctctacggcgggttgcagagcgcaggggccgaatataccgcggtttccgccggtatcggtcgcgatctcagcgtcttcggcgcgctctcgctggatgccacggaatcttacagtcagcagtcgaaccaaaagcgactgaaaggaacctcgtttaagctgagctatgcgaaaaccttcgacgaatataacagttcaattaccttcgccggatatcgcttctcgcaggaggacttccgttctttctcgcagtatctcaacgagcgttatgaggggtacgacagtcttggccgtgaaaaagaagtttataccatcaccggtaataaaactttctgggctgatgagccaggtaaggcgacaaccgtctttctgacctatacccaccagaattactggaacagaagcagccaggatcgctacggcatctcgttaggacgctcgtttaacgtcggtaatattcgcgggatcaccaccaatatttcggcctatcgttctgattatgaaggtcggaaggacgactctattgctctctcactttctattccggttggcgatagtaaatggagcggcctggacgtgcagaccaataacggtaaaaccagcccgatgctctcgtataccgatagcagcgactataacaacctgtggcggctgcgtgcgggagcgagccagagcggttatgccaacgtcgacggctattatcagcgccgctcgcagtatgccgaaatcaacagtaacgccagctatcagcaggataactatctctccctgagcagcacgctgcgcggcggattcaccgccacacggcacggcgcggcgctccacaacagcggtgcgacgctcaatacggcccgcgttatggtgaataccaacggtatcggcgacgttccgcttaatgacggtaaatcaagaaccaataatttcggcatcgccgttattccggacatcgtgagctacaacagctttgacacccgagtcgacgtggatgcgatgtcggaatccatcgaaccagcaaaagctatcagcaccgccacgctgaccgaaggcgccattggctatcagacctttggcatggcgaagggcgaaaaaatgatgggcattattcggctggctgatggcacctatccgccgttcggcgctgaggtgattaacgacgatggcgtaagcgtatccatgattatggaaggcgggcagggatggctggcaggggttaatcctcaggagctgctaagcgtcgtttggggcgggaagaagcagtgtcagatcgctatcccgcccaccatagagcgtcgtgcgacagccgcgctattgccgtgtaaatga

SEQ ID NO: 254728 - DNA, 555 bp, Klebsiella pneumoniae
atggttaaggatacagagaaaaagagactgatggcgttattcgtatcggtattactcttctccggacatgctttgagtactaattttacgcccggacagttggcgctttcgggggagctggttgctgccgcctgcgatatcgatcccaactcgcgcgaactgtgggtggatttcggtaatatctcggctcgcgatattaatatggaccaggaaggtaagctgatccgaccttttctggtgcgcttagtcggctgcgcctctttcggtagcgaaaatccatcaacgcccggtgcctatgccaccatcacctttaccggaaatgcttcgtcgcaagacccgacggtattaattccggatggcgagggaaaaggctttgggatacagattcgcgatcgccacggggagattttaacttttggagaaccctcttccgggtatcttctgagtgatgagaataatacgctgaaatttaccgcttcgttggttccggttcagcaacatattaaggctggagatttttacgccgtcactcgtttctttatggattacaactag

SEQ ID NO: 254729 - DNA, 543 bp, Klebsiella pneumoniae
atgaaactgaataaagttgctatggctgtggcattaactgctgctctcggctctatgtctgctctggctgctgatacaaccaacggggttatcgagcttcagggtgaactggtgaacactgcttgtggtttggccccgtcgtccagcccggtaaccgttgattttggtcaggttccagtttccctgctgcagggcggtggtcaggcaactgaagctaaaagcatcgaactgcagtactgcgacaccaccatcgctagcagcgccgttgtttcctacaccccgacttcggttaacccgaacgatcctactctggctgcattcacttctggtaccgcatccggtgcgggtatcggcctgaaagacagcgctagccagactgtgacctggggcgcgcagacgactccggtcactctggttgatggcaccaacaccattcctttcgtggccttcctgaaagcggaagctgctgcgagcggttctaccactaccgttaccgcgggtgcattccagtcaacgatcaacttcactatcgattatcaataa

SEQ ID NO: 254730 - DNA, 573 bp, Klebsiella pneumoniae
atggtgaacaacaagttcaaccatttcattatgagcaagctggcggaagcgggcatcccgacccagatggaagcgctgttgtccgataccgagtgtctggttaaaaagctggatatggtgccggtggagtgcgtggtgcgtaaccgcgctgccggttcgctggtgaaacgcttagggattgaagagggcatcgagctgaacccgccgctgttcgacctgttcctgaagaacgacgccatgcacgatccgatggtcaacgaatcctactgcgaaacctttggctgggtgagcaaagagaacctggcgcgtatgcaggagctgacctacaaagctaacgatgtgctgaaaaagctgtttgacgatgcgggcctgatcctggtggacttcaagctggaatttggtctgttcaaaggcgaagtggtgctgggggatgaattttctccggacggcagccgtctgtgggataaaaagaccatggataaaatggacaaagaccgtttccgccagagcctcggcggcctgattgaagcctacgaagaagtcgctcatcgcctgggcgtgaagctcgactaa

SEQ ID NO: 254731 - DNA, 870 bp, Klebsiella pneumoniae
atgcgctggcaaggacgtcgcgagagcgacaatgttgaagatcgtcgtagtcaatctggttcgccaatgggcggcgggggtggttttcgtctccccagcggcaaaggcggcattgtgctgctgattattgttctggtggcgggctattacggcgtcgatttaaccggcatgctgaccggcgagccggtatctccgcagcaaaccaccacccaacgctccatcagcccgcaggatgaagaagccgcaaaattcactaaggtgattctggcggacacggaagatacctggggagcaatatttaaagatatgggccgccagtatccgcagcccaaactggtgatgtaccgcggcgcgacgcggaccgcctgcggtaccggtcagtccgttatggggcctttttactgcccggcggacagcacggtgtatatcgacctgtcattctacgatgagatgagaagcaagcttggcgccggcggcgatttcgcacagggctacgttatcgcccacgaggttggccaccacgtacaaaagctgctgggtattgaatcgaaagtgcgtcagctacagcaaaacgcttcgcaggcggaagcgaatcgcctgtcggtgaaaatggaactacaggcggactgcttcgctggcgtctggggctacaacatgcagaagcaggactacatggagaccggcgacctccaggaagcgctgaatgccgcagaggcgattggcgacgatcgcctgcagcagcagagccaggggcgggtggtgccggacagctttacccatggaacgtcgcagcagcgctatacctggtttaaacgcggcttcgatagcggcgacccggcgcagtgcaacaccttcggcaatgcgctgtaa

SEQ ID NO: 254732 - DNA, 2004 bp, Klebsiella pneumoniae
atggatgaactgcgtcgtctgacggcgcagatggcgcgcgaaggcattcgtcgtctgctggttctcagcggcgacgatgcctggactcagcttcaggcgcaacaaatacgcacagcgctggccggagacggactgtgggttggcccacagccgatgcctgcgccgtacgtcccgcctgcagatctgagatcgctgttgggccgcgaataccagcacgcctttttcgatgcccgcgcgggctttgatgttgccgctttcgccgcgttagccggtacgctacgcgccggtagctggctggtattgctcacccccgacttcgcccaatggccggcccgtcctgatgcggattcccggcgctggagcgacgctcccgatcccatacccacgccgaactttgtttatcgtttttgccaacagattgttgcggataaagcgtccattctctggcggcagggccatgaacgggtcgtacccgtatttcccgagcgcccgcgatggcattttgccgatggtcatccgcaggtggagcaggccgccgttcttgccgaactggccgatttcccccccggtattgccgcgttgaccgccgaacgcgggcgagggaagtccgctctcgcgggaatgcttctccgccagctaaaaggtgacgccatcgttaccgcgccggcgcgcggagcgacggaggtgatggcggctttcgccggggagagcgttaactttatggcgcccgatgcattactggcgtccggacgtcaagcgggatggctgatagtcgacgaggctgccgccatccccgggccgctgctgcgccagcttgtttcccgtttcccgagaacgctgctgatcaccaccgttcagggatacgaagggaccggacgcggttttttacttaaattttgcgccagcttcgcgcacctaaggcagtttagcctcacgacgcccatccgctgggctagcggctgtccgctggaagcggcaattgcacagctgctgctgttcaatgatgagaccttccagcatgcgccaggcggcgatatcgcgctggagaacgtcagccagcagtgctggcggcggcagcctgcgttaccggaagcgatgtatcagctgctctccggggcccactatcgcacgtcgccgctggatctccggcgcatgctggatgcgccaggacagcattttacctgcgcccatagcggcgagcgcatcgccggggcgttgtggctggtggaggagggcggtcttgagccgtcgcttagccgggcggtatgggccggctatcggcgtccgcgcggaaatctggtggcgcagtcgctggcggcgcatggcggtagcccattggcggccacgttgacgggcctgcgcatcagccgtattgccgtgcatccggctcgccagcgcgaggggctggggcagcggctggtggcccgggcggcggctcaggctgcggaccgggattatctctcagtcagttttggctatactcccgaactttggcgtttctggcaaagctgcggttttacgctggtgcggctgggcacgcatcgggaagccagcagtggctgttacaccgcgatggcgctctatcctctcagcgaagcgggacattgcctggcaagcgaagaagcccaacggctgcagcgcgacgaattctggctacgcgagtggcgagatgaacctgtgccgctgacggcgctgaaagcgactattgttactgaagaagactggctggaggtagcgggttttgcttttgcccatcgtccgctgctgacctcggcgggtagcctcaatcgcctgcttatgctggtggcgctgccgcttccggcgctgcgggcccgcctgcagcagcaggatgagaccgcgctttgccgaacgttaggtttatccggacggaaagcgctgctggccaggctgcgcgaagaggcggcgcaggcgctgctcagcctggatgaaaaccgcgccaacgacctacgccggcaggttcagatgttgcaattttttaactaa

SEQ ID NO: 254733 - DNA, 699 bp, Klebsiella pneumoniae; identical to SEQ ID NO: 174647

SEQ ID NO: 254734 - DNA, 204 bp, Klebsiella pneumoniae; identical to SEQ ID NO: 174648

SEQ ID NO: 254735 - DNA, 1128 bp, Klebsiella pneumoniae
atgtcttgcccggtcattgagctggctcagcagcttattcgccgcccttccctcagccccgatgatgcgggatgccaggcgttaatgattgaacgtctgcgtgcgattggctttaccgttgaaccgatggatttcggggatacccaaaacttctgggcctggcgcgggcgcggggaaacgctggcgtttgccggccataccgatgtcgttccgtcaggcgacgccgatcgctggattaatcccccctttgaacccaccattcgcgacggcatgctgtttggccgcggcgccgcagatatgaaaggctcgctcgcggcgatggtggtcgcggcagaacgctttgtggctcagtatccgaatcataaaggtcgtctggccttcctgatcacttcagatgaagaggccagcgccaaaaacggtaccgtaaaggttgttgaagcgctgatggcgcgcaatgagcgcctggattattgcctggtcggcgaaccgtccagcaccgaagtcgtcggcgatgtcgtcaaaaacggccgtcgcggctcgctgacctgcaacctgaccattcacggcgtacaggggcacgtggcctatccgcatctcgccgataacccggttcaccgcgccgccccgatgctggcggagctggtgaacatcgaatgggataagggcaacgaattctttccgccgaccagtatgcaaatcgctaacgtgcagtccgggaccggcagcaacaacgtcattcccggcgacatgttcgtccagttcaacttccgctttagcaccgagctgaccgatgaaatgattaaagcgcgcgtcgtggcgctgctggagaaatacgcgctgcgctacagcgtggactggtggctctcggggcaaccgttcctgaccagccgcggtaagctggttgatgcggtggttaacgctattgagcactataatgaaataaaaccgcaactgctgactaacggcggcacgtccgacgggcgctttatcgcgcgtatgggcgcgcaggtggttgaactggggccagtgaatgccaccattcataaaataaacgagtgtgtgaatgccgccgacctccagctactggcgcggatgtatcaacgcattatggagcagctggtcgcctga

SEQ ID NO: 254736 - DNA, 354 bp, Klebsiella pneumoniae
atgctcaccatgtacgggataaaaaactgcgacaccattaaaaaggcccgccgctggctggaagcccatcagatagaatatcgctttcatgattatcgtgtcgatggcctggatcgcaatttattagacacctttattgccgagctcggctgggaagcgctgctcaatactcgcggtacgacctggcgcaagctggacgaaacggttcgcaccggtatcaataacgccgacgctgcggcgaaactgatgctggaaatgccggcaatcatcaaacgcccattgctctgcgcgcccggtcagcctatgctgctgggtttcagtgaatcaagttatcagcagtttaacgaggtgtag

SEQ ID NO: 254737 - DNA, 3114 bp, Klebsiella pneumoniae
atggcgaatttttttatcgatcgccccatttttgcgtgggttctggcaatcctgttatgcctgaccggtacgctcgcaattttgtcgcttcccgttgagcaatatcccgaacttgcccctcctaacgtcaggatcgcagcaaactatcccggggcctcggcacaaacgctggaaaataccgttacccaggttatcgagcagaatatgaccggcctcgacaacctgatgtacatgtcatcccagagcagcggcaccgggcaagccaccgtgacgctaagctttaccgccggtaccgatccggacgaagccgtccagcaggtgcagaaccagctgcagtcggcgatgcgtaaactcccgcaggccgtccagaaccagggcgtgacggtgcgtaaaaccggggacaccaacatcctgacgattgcgttcgtctctaccgatggcagcatggataaacaggatatcgccgactacgtcgccagtaacattcaggacccgctcagccgggtaaacggcgtcggcgacattgacgcctatggttcccagtattcgatgcgtatctggctcgatccggccaaactcaacagttttcagatgacggcaaaagacgtcaccgatgccatctcttcacagaacgcgcagattgccgtcggccagctgggcggtacgccttcggtagataaacaggcgctcaacgcgacaattaattcgcaatcgctgttacaaaccccggaacagttccgcaatatcacccttcgggttaatcaggacggctcggaagttacccttggcgacgtcgcgaccgtggaaatgggagcggagaaatacgattacctcagccgctacaaccgccaggcggcttccgggctgggggttaagctggcctctggcgcaaacgaaatggcgaccgccgaacgcgtcatcagccgtctgaacgagctgtcgcaatacttcccgcatggtctggaatataaagtcgcttacgaaaccacctcattcgttaaggcgtcgattaccgacgtggtgaaaacgctgctcgaagccatcgcgctggtgttcctcgtcatgtatctgttcttgcagaacttccgcgcgacattgatcccaaccatcgccgttccggtggtgctaatggggactttcgccgtcctctacgcctgcggctacagcatcaacaccttaaccatgtttgcggtggtgctggcgataggcctgctggtggacgacgccatcgtggtggtggaaaacgtcgagcgtatcatgagcgaggagggcctctcgccgcgtgaagcgacgcgaaaatcgatggggcaaattcagggtgcgctggtcggtatcgccatggtcctatcggcagtattcgtgccaatggccttcttcggcggcaccaccggcgcgatctatcgtcagttctcgatcaccatcgtctcggcaatggtgctgtcggttctggtggcgatgatccttaccccggcgctgtgcgccacgctgctcaaaccggtgcataaaggcgaaacccacgggcaacggggtttctttggctggtttaaccgcacgtttaaccgcaacgccagccgctacgaaaccgccgtcggcaaaattcttcaccgttcgctgcgctggataatgatctacgtcctgctgctgggggggatggtgtttctgttcctgcatctgccaacgtcattcctgccgctggaagaccgcggcatgtttaccacgtcggtgcaattgcccagcggttcgacccagcagcaaaccctgaaggtggtccagcaggcggaagactatttcctgaaaaacgaaaaacaaaacgtcgaatcggtgttcgccaccatcggctccggccccggcggcaacggacagaacgtagcgcgtatgttcgttcgcctgaaggactgggaccaacgcgatcctacaaccggttcctctttcgctatcatcgaacgcgcaaccaaagcgtttaacaaaataaaagaagctcgcgtctttgccagcagcccgccggccatcagcggcctgggcagttccgccggtttcgatatggaactggaagaccatgcgggcaatggacacgaagcgctgatggccgcccgcgataccctactggagctggccgctaaaaataaccagctgacccgcgttcgccacaacggccttgacgatagcccgcagctacaggtggatatcgatcagcgcaaagcccaggcgctgggcgtctccatcgatgatatcaacgacaccctccagaccgcgtgggggtcaagctacgtcaacgactttatggaccgcggccgcgtgaagaaggtctatgttcaggcggccgcgccgtatcgcatgctgccggacgacattaatctgtggtacgtacgcaacagcagcggcacgatggtgcccttctccgctttcgccacctcccgctgggagaccggttcgccgcgtctggagcgctacaacggctattcagcggtagaaatcgtcggtgaagccgcgccgggcgtcagtaccggtaccgcgatgacaattatggaagagctggcccgccagctgccaaacggctttggccttgaatggacggcgatgtcgtatcaggagcgcctctccggcgcgcaggctccggcgctgtacgccatttcgctgctggtcgtgttcctgtgcctggcggcgctgtacgaaagctggtcggtgccgttctcggtgatgctggtggtgccgctgggggtcatcggcgccctgctggcgacctggatgcgcggtctggaaaacgatgtctacttccaggtgggactgctgacggtgatcggtctgtcggcgaagaacgccattctcatcgtcgagtttgccaatgagctgaatcagaaaggcgaggacctgcttaccgccacgctctccgcctgtcgccagcgtctgcggccgatcctgatgacctcgctggcgtttatcttcggcgtgctgccgatggccaccagtaccggtgcgggttccggcagtcagcatgccgttggcaccggggtcatgggcgggatgatttcagccacggtgctggcaatcttcttcgtaccgctgtttttcgtgctggtgcgtcgtcgcttcccgctcaaggaacggccgcaataa

SEQ ID NO: 254738 - DNA, 630 bp, Klebsiella pneumoniae
  misc_feature (567)..(576): n is a, c, g, or t
atgaaccactttattttaagcgatagtcataagtgcatcggatgcaaggcttgtgaagttgcctgcgtcatggcgcataacgatgagcagcatgtattgaccccgcagcgttttttgccgcgcattacggttatcaaaaatgagcaaaagcgtaacgcagtaacctgtcaccactgtgaaggcgcgccgtgcgcccgcagttgtccaaatgacgccatcagccagcttaacggcagcgtccaggtgaatcaggaaaaatgcatcggctgtaaatcctgtatggttgcctgcccgtttggcgtgatgcaaatcgtcctgacgccggtacaggagggcagagtcaaagcgacggcgcataagtgcgatttgtgtaacggtcgcgaagaggggcctgcctgcgtgcaaaactgcccggccggggcgctggagctggcgacggacagcacgctgatgaatctggcgaaacagcggcgtcagcgcgcggcgcgtctgggtcaccccggtgccccgatggcatcttgctccgccgggaaagtcgcacagatggccgcgacgctgccgcgcggnnnnnnnnnntttatcttccgttcagcgccggacaggccaatcgcgaggcggaacgctgcctga

SEQ ID NO: 254739 - DNA, 1224 bp, Klebsiella pneumoniae
gtgaaagagggggatatcgccgccgccgttgagctttcacatcagaccaactgcctgccggaaataaccggtcgcgtctgcccgcaggaccgcctgtgcgaaggggcctgcacgctgcgcgatgagcacggttcggtgactatcggcaacattgaacgctatatctccgaccaggcgctggccaacggctggcggccggatctttcgcaggtcgtgaacagcggtaagcgggtggcgattatcggcgccggtccagccggtctcgcctgcgccgaccggctggtgcgcaacggcgtaagcccggtggtgtttgaccgccatccggaaatcggcggcctgctgacctttggcattccggccttcaagctggataaatccctgcttgtccggcggcgtgaaatcttcacccggatgggcgtacgctttgagctgaactgcgaaataggcaaggatattccgctgacgacgctgcttgatgaatatgatgcggtatttattggcgcaggtacctatcgctccatgaaagcggatctaccgaatgaagacgcgcccggcgtttacgatgcgctgccgtttctgatcgcgaatactaaacaggttatggggctgctggagctgccggaagagccttacgtcaataccgagggactgaacgttgtggtactcggcggcggcgatacggcgatggactgcgtgcgcaccgcgctgcgccacggcgcaaagcaggtcacctgcgcctatcgtcgcgatgaagccaacatgcccggttcgaagaaagaggtgaaaaacgcgcgcgaagagggggcattatttgaatttaacgtccagccggtcaccctggagctgaacgaagaggggcacgtcaacggcgtgcgcttcctgcgaacccagcttggcgcgccggatgcacagggacgccgcagcccttcgccaatccccggaagcgagttcgtgatgcccgccgatgcggtgattatggccttcggtttccatccgcacggtatgccgtggctggaatcggtgggcgtgaagctcgacagccgcggccgaattaaggccaatgtggaaagtcgctatcgttaccagaccactcatcgtaaggtgtttgccggcggcgatgcggtgcgcggcgccgatctggtggtaactgcaatggcggaaggccgccacgcggcgcaggggatcatggacttcctcgaggttaaaccgattccgcttcactaa

SEQ ID NO: 254740 - DNA, 585 bp, Klebsiella pneumoniae
atgtcactcaatatcaacattatcaaagataaaatcctctccgaaaactggttcgttttgcgcaacatgacctatgagctgacgcgcagcgacggcagcgtggttcgccataaacgcgaagtctacgatcgcggcaacggtgcgaccatcttgctgtataaccgccataagcagaccgtcgtgctggttcgccagttccgcatcgcgacctgggtaaacggcaacgaagacgggatgttgatcgaaacctgcgccgggctgctggacagcgacgagccggaggcgtgcgtgcgtaaagaagccattgaagagaccggcttcgaagtcggcgaagtgcgcaaactgtttgaactgtttatgtcgcccggcggcgtcaccgagcttatccatttctttattgccgaatataacgatacccagcgggccaacgacggtggcggcgttgatgatgaagagatcgaggtgctggagctcccttatcatcgggcgctggagatgatggccaacggggaaatccgcgacggcaaagcggtgatcctgctgcaatatttgcaaaactccgggctgatgaacggggatctctga

SEQ ID NO: 254741 - DNA, 1068 bp, Klebsiella pneumoniae
atgtggtatcgggttattttgtttctgctttgcggcttgctgccggcatcgctggtgcgggcggcgccggcgcaacagctcttcagcgactggcaggtgacctgcaacaatcagaacttctgcgtagcccgtaacgtcgggctacaccacggcctggtgatgacccttacccgcagcgccggagcggcaaccagcgccagcctgcgtattgagctgggaggcgtgggcaacccggtggcggcgctggcgccgatagcgccccggcttcagctcgatggcaaacccctggccttgagcgatacacactggcagattgccgacaaactgctgaaaactgacgataacgtcaccattgacgcattcctgcagcaagtgcaaaacgcgcagaccatcacgcttgaaaagggtctccagactatttctctgcaggggctcaaagccgccctgctgtttattgatagccggcaaaagcgggtggggagcgagaccgcatgggtcggcaagggggaagagccgccgctcagcgtaccgcctgcgccggcgctgcgatcggtggtgaaaatggagggggcgcagtcgcccctgagccgcgatgaacttaacgatctgatggattatggcaatgagcgcatgaacagcagcgcctgttcgctggatccgtttcgccgcgaggtacgggtgtccgcgctgaccgacgagaaggtcctgttgatgaccagctgcgaagcgggcgcctataataccatttggctggcctggctggtttcgcgccagcggccatatattgctcatccggtacgactcacgctgcccttccagccacccggcgatgcgccgcgtgacgtcgagctggtgaacgccagctacgacgatcggcaccaggaactggtgaccctcgataaagggcgcgcacccggcgattgcggtatccaaacgcgctggcgctatgacggccagcggtttagcctggtacgctacgcgcagcagccgcagtgcgataactggcaggggccagacgcctggcccacgctatgggttacccgttctgtagctcatccgctacgctga

SEQ ID NO: 254742 - DNA, 2280 bp, Klebsiella pneumoniae
atggatgagcagttaaaacaaagcgcccttgatttccacgaattcccggtccccggaaaaatccaggtctccccgacaaaaccgcttgctacccaacgcgatctggctctggcctactcgccgggtgtcgccgccccctgtctggaaatcgagaaggatccgctggcagcctataaatataccgcccgcggcaaccttgtggcggtggtgtccaacggcacggcggtgctgggactgggcaatatcggcgcgctggccggtaagccggtaatggaaggtaaaggcgttctgtttaaaaaattcgccggtatcgatgtattcgatattgaagttgatgagcttgacccggacaaatttatcaacgtcgttgcagcgctggagccgaccttcggcggtatcaacctcgaagatattaaagcgccggagtgcttctacattgagcagaagctgcgcgagcgcatgaatattccggtcttccatgacgatcagcacgggacggcgattatcagtaccgcggcgattctgaacggtctgcgggtggtggagaaaaatatctccgacgtgcggatggtcgtatcaggcgcgggcgcggcggcgattgcctgtatgaacctgctggtagcgctgggaatgcagaaacacaacattgtggtctgcgactcgaaaggggttatctataagggccgtgagccgaatatggcggagacgaaagcggcctatgcggtagaagacagcggcaaacgtacgctggatgatgtgattgacggggcggatattttcctcggctgctcgggcccgaaagtgctgacccaggaaatggttaaaaagatggcccgcgcgccgatgattctggcgctggctaaccctgagccggaaattctgccgccgctggcgaaagaggtgcgctccgatgctattatctgcaccggccgctccgactatccgaaccaggtgaacaacgtgctgtgcttcccgttcatcttccgcggcgcgctggacgtcggcgcaacggcgattaacgaagagatgaaactggcggcggtgcatgcgattgccgaactggctcacgcagaacagagcgaagtggtggcctccgcctacggcgatcaggacctgagcttcggcgcggaatatatcattccgaagccgttcgacccgcggctgatcgtcaagattgctccggcggtggcgaaagcggcgatggactccggcgtcgcaacgcgcccaatcgccgattttgatgcctacatcgagaagctcagcgagtttgtctacaaaacgaatctgttcatgaagccgattttctcgcaggcgcgcaaagagccgaagcgggtggtgctggcggaaggcgaagatacccgcgtgctgcacgcgactcaggaactggtctccctcgggctggcgaaaccgatccttatcggccggcctggcgtcattgagatgcgtattcagaagctggggctgcagatcaaagccggcgttgattttgagatcgtgaataacgaatccgatccgcgctttaaagagtactggaacgaatattacaacctgatgaagcgccgcgggatcacccaggagcaggcgcagcgggcggtgatcagcaataccacggtcatcggcgcgatcatggtgcagcgcggcgaagccgatgcgttgatctgcggcaccattggcgattatcacgaacactacagcgtaatacagccgctgtttggctaccgcgaaggggttcatgcggcaggggcgatgaacgcgctgctgctgccgagcggcaacacctttatcgctgacacctacgttaaccacgatccgtcgccggagcaaattgccgaaatcaccctgatggcggcagaaaccgttcgtcgattcgggattgagccgcgggtagcgctgctttcgcactcgaactttggttcttcggactgcccgtccgccagcaaaatgcgccaggcgctggagctggtgaagacgcaggcgccggatttgatgatcgatggcgaaatgcacggcgatgccgcgctggtggaaagcattcgcaatgagcggatgccggacagtccgctgaaaggttcagccaatatcctggtgatgccgaatatggaagcggcccgtattagttacaacttacttcgcgtttccagctcggaaggcgtgaccgtggggcctgtgctaatgggtgtcgcaaagccggtacatatcctgacgccaattgcgtcggtacggcgtatcgtgaatatggtcgcgctggcggttgttgaagcgcaaactcagccgctgtaa

SEQ ID NO: 254743 - DNA, 336 bp, Klebsiella pneumoniae; identical to SEQ ID NO: 174657

SEQ ID NO: 254744 - DNA, 480 bp, Klebsiella pneumoniae
atgaagcgtattgcatttgtcggtacggtgggcgcgggaaaaacaacgctatttaatgcgctgcacgggaattattccctcgcgagaaaaacgcaggccgtggaatttaatgaaaaaggcgatatcgacaccccaggagaatattttagtcatcctcgctggtatcacgcattaattaccacgctgcaggatgtcgatacgctgatttatgtccacgcggcaaatgataccgaaagtcgtctacccgccgggttactggatattggggcgaataaacgccatatcgccgcgattagcaaaacggacatgccggacgctaacgtcgccgcggtgcggcaactgctgtacgagatggggtttcaggagccaattttcgcgctcaacgctcacgacccgcaaagcgtagagcagctggtgaattacttgagtgagctcagccaaaaggaggaaggggcaggtgaagaaactaatcacagctaa

SEQ ID NO: 254745 - DNA, 693 bp, Klebsiella pneumoniae
gtgaagaaactaatcacagctaacgatattcgtgcggcccacgcgcgaggtgaagaggaaatatcggttgtgctgcgcgccagcatcatcaccccggaagctcgtgaagtcgcggagctgctgggcgtcgccatcaaagagtgcgatgagtccgcgccagaagcgacggtaccggtggaggagggcaaaaccgaaagccagcgcattcgcgaaaccattattgcccagctgccggaagggcagtttaccgaaagcctggtcgcgcagctgatggacaaggtgatgcaagaaaaacagtcgctggcgctgggcgatatgcagcccagctttaaggcggtcaccggtaaaggcggcgtcaaagtcattgacggcagcagcgtgaaatttggccgcttcgacggcgcggaaccgcactgcgtcggcttaacggatttagtcaccgagcaggacggtagcagtatggccgccggatttatgcagtgggaaaacgcctttttcccatggacgctgaactatgacgaagtcgacatggtgctggagggagaactccacgtacgccatgaaggtgaaaccatggtggccaaagccggcgatgtgatgtttatcccgaaaggctccagcattgaattcggcacgccatcgaccgtgcgcttcctgtatgtcgcctggcctgcgaactggcaatcgctatga

SEQ ID NO: 254746 - DNA, 804 bp, Klebsiella pneumoniae
atgaaagattttattaccgaagcctggctcagagcgaaccatacgctcagcgaaggggcagaaattcatctgcccgccgacgctcgtctgacgccttcggcccgggaactgctggagagccgccgtttgcgcattaagtttctcgatgagcagggaagcctgtttgtcgatgacgacgcgcagcagccgcagccggtacacggtttaaccagcagcgacacacatccgcaggcctgctgcgaactgtgccgccagccggtcgaaaaaaaaccggacaccctgacccatctaacggcggacaaaatggtcgctaaaagcgatccgcgcctgggctttcgcgccgcgctcgacgccaccatcgccctggcggtatggctgcaaattgaactggcggagccatggcagccctggctggcggatatccgctcgcgtctgggcaatattatgcgcgccgacgctatggatgaaccgctggcggcacagtccatcgtcggcctgaacgaggatgaactgcatcgcctttcccaccagccgctgcgctatctcggccacgatcatctggtgcctgaagccgctcacggccgcgatgccgccttgctcaatctgctgcgcacccgggttcgggagacggaaacgatcgccgcccaggtctttattacccgcagctttgaggtcttacgtccggacattctgcaggcgctcaaccgcctctccagcaccgtctacgtgatgatgattttatgcgtggcaaaccatccgctaaccgtcagccagatccaacaacgcctgggaggggagcaatga

SEQ ID NO: 254747 - DNA, 1017 bp, Klebsiella pneumoniae; identical to SEQ ID NO: 195419

SEQ ID NO: 254748 - DNA, 291 bp, Klebsiella pneumoniae
atggaagcattaggaatgattgaaacccggggcctggttgcgctgattgaggcctctgatgcgatggtaaaagccgcgcgcgtgaagctggttggcgtgaagcagattggcggcggactggtcaccgcgatggtgcgcggcgatgtggcggcgtgcaaggccgctaccgatgccggcgccgctgcggcgcagcgtatcggcgagctggtctcggtgcacgtgattccgcgtccgcacggcgatctggaggaggtgttccccatcagtttcaaaggcgacagcaacatctga

SEQ ID NO: 254749 - DNA, 288 bp, Klebsiella pneumoniae; identical to SEQ ID NO: 174663

SEQ ID NO: 254750 - DNA, 1404 bp, Klebsiella pneumoniae
atgaaccaacaggatattgaacaggtggtgaaagccgtactgctgaaaatgaaggacagcagccagccggacagcgccgttcatgagatgggcgtctttgcctcccttgatgacgccgtcgcggcggcaaaggtggctcagcaggggctgaaaagcgtggcgatgcgccagctggcgattcacgccattcgtgaggcaggcgaaaaacatgccagagaattagcggagcttgccgtcagcgaaaccggcatgggacgcgttgaagataaatttgccaaaaacgtggcccaggcgcgcggcacgccgggcgtcgaatgtctctccccgcaggtgctgaccggcgataacggcctgacattgatagaaaacgcgccgtggggcgtggtggcctcggtcaccccctccaccaacccggcggcaacggtgattaataacgctatcagcctgattgccgcgggcaacagcgtggtgttcgccccgcatccggcggcgaaaagagtctctcagcgggcgattatgctgctcaaccaggcggtaattgccgcgggcggtccggccaatctgctggtcaccgtggcaaacccggatatcgaaacggcccagcggctgtttaagtaccccggcattggtctgctggtggtcaccggcggcgaagcggtggtggagtccgcacgcaagcataccaataaacgtctgattgccgccggggccggtaacccgccggtagtggtcgacgaaacggccgatctggcgcgcgccgcgcagtccatcgtcaaaggcgcctcgtttgataacaacattatctgcgctgacgaaaaggtgttgattgtcgtcgatagcgtcgccgacgagctgatgcgcctgatggaaggccagcaggcggtgaagctcagcgcggcccaggccgagcagcttcagccggtgctgctgaagaatatcgatgagcgcggcaaaggtacggtcagccgtgactgggtgggacgtgacgcgagcaagattgccgccgctattggcctgagcgttccgccgcagacgcgcctgctgtttgttgaaacgccggccagccatccgtttgccgtgactgaactgatgatgccggtactccctgtcgtacgggtggccagcgtcgatgacgctattgcgctggcggtgcagctggaaggcggctgccaccatacggcggcgatgcactcgcgcaatatcgacaacatgaatcagatggccaatgccattgataccagcattttcgtcaaaaacgggccgtgcattgccgggctcggactggggggagagggctggaccaccatgaccatcaccacgccgaccggggagggggtgaccagcgcacgtacctttgtccgtctgcgtcgctgcgtgctggtggatgcgttccgcatcgtataa

SEQ ID NO: 254751 - DNA, 840 bp, Klebsiella pneumoniae
atggcgcacgacgaacaacgttggctcactcccaggctacaaaaagccgcggccctgtgtaaccagatgcctgcgaacagcggttcgccgctgtggctgggcgtggatttaggcacctgcgatgtcgtgtcgatggtggtcgatggcgatggccagccggttgcagtgtgcctggactgggctgacgtggtgcgcgacggcatcgtctgggattttttcggcgccgtcaccctcgtgcgccgccatctcgacgttcttgaacagcagctcggctgccgcttcacccacgcggcgacctcttttccaccgggtaccgacccgcgtatttcgatcaacgtactcgaatctgccggcctggaagttagccacgtgctggatgaaccgaccgcggtggcggatctgctgcagcttgataacgccggcgtggtggatattggcggcggtaccaccggcatcgccatcgttaagcagggtctggtgacctactccgccgatgaagcgaccggtggccaccatatctctctgaccctcgccggaaatcgtcgcatcccgctggaagaggcggagcagtacaagcgcagcaacgcgcaggagatctggcctgtggtgaagccggtgtacgaaaaaatggcggagatcgttgctcaccatattgaaggacatggcattgccgatttatggctggcgggcggctcctgtatgcaaccgggcgtggacgcgctgtttcgcaaacgcttcccggaattacgggtgcatttaccgcagcacagcctgtttatgaccccgctggcgatagccagcagcggaagagagaaagcggagggaatctatgcaagctga

SEQ ID NO: 254752 - DNA, 1188 bp, Klebsiella pneumoniae
atgcaagctgaactgcagacggcgctctttcaggcgttcgataccctgaatctacagcgggtgaaaaccttcagcgtgccgccggtaacgctgtgcggcctcggcgcgctgagcgcctgcggacaggaggcgcaagcgcggggcctaagccatctgctggtgatggtcgatagtttcctgcatcaggcgggaatgaccgccgggcttgctcgcagcctggcaatgaaaggggtgacgatgaccgtctggccctgtccgccgggagaaccgtgcattaccgacgtctgcgcggcggtggcgcagctgcgcgagtcgaagtgcgacggcgtggtggcctttggcggcggttcggtgctggacgcggcgaaagcggtcgcgctgttagtcaccaacccggagcagacattaagcgcgatgacggaaagcagcgtactgcgcccgcgtctgccgctgattgcggtgccgaccaccgccggaaccggctcggaaaccaccaacgtgacggtgattatcgatgcagtcagcgggcgtaagcaagtgctggcccatgcctcgctcatgccggacgtggcgattctcgacgccgccctgaccgaaggcgttccgccgccggtgacggcaatgaccgggattgacgcgctgacccacgccgttgaggcatacagcgcgctcaacgcgacgcccttcaccgacagcctggcgattggcgcgatagcgatgatcggccggtcgctgccgaaggccgttggctacggccaggatcttgccgcgcgcgaaagtatgctgctggcttcctgtatggcggggatggccttttccagcgcgggtctgggcttatgtcatgcgatggcgcatcagcctggcgcagcactgcatattccgcacggccaggccaacgccatgctgctgccgacggtgatggagtttaaccgcatggtgcgccgcgagcgtttcagccaaatcggccgggcgttaaccggcaagaaaaccgacgatcgagaggctatcgccgccgtacgcgagctgatcgctgaagtgggcctgagcaaacgactctcggatgccggcgcgatggctgaacatttcagcgcatgggcgcaggcggcgcaggaggacatttgtctgcgcactaatccacgcaccgccagccgggagcagattatcgatctgtacgcggcggcgcgctga

SEQ ID NO: 254753 - DNA, 219 bp, Klebsiella pneumoniae
atgggcgatgggggcttcaatcaggttttccagcaccgtcaggtgcgggaacaagttgaagttctgaaacacgtagccaacgttgatccgctggcgaaggatctccttctctttcagttcgtagagcttgtcgcctttacggcgataaccgatatagtcgccatcgatctgaataaagccttcatcaacgcgctccagatgattgatcgcccgcagtag

SEQ ID NO: 254754 - DNA, 510 bp, Klebsiella pneumoniae
atgagcaatctattccgcgatgtctctccggaagcgccggagctgcagccgattattgagggcctgttcggcgagtacgccgcgcgctacggcgactacttttcccgcgatgccgaagtcgagctgactgaatggtatctggcgccgcaggggctatttatcgtgctggagcgggagggggaaattatcgctaccggcgcgtataaaccgaaagatgcccatacggcagaaatcaaacggatctggacccatcgtcgtctgcgccagcaggggctggcggcgaaagtggtgcaggagctggaacgtcgggcgctgctggcaggctacagccatatctttttgacgaccggttttcgtcagccggaagcggtgcggctctatctgagccagggctacgaggcgcagtttgacctcaaccgcgatccggaagagtacagtttgccgccgttcgatggtcggctgcgctttacgaaagcgctggcggtcagcgcgctgagccagagcgcttaa

SEQ ID NO: 254755 - DNA, 567 bp, Klebsiella pneumoniae
  misc_feature (530)..(537): n is a, c, g, or t
gtgttttctgatgataacaaaaccctgctcggcagcgaggtggatatcgcccgcctggtggccgacagcctcgggctggagctgaacgtggtgcccacctcgtgggaagactggccgctcggcgtcgcctccggcaaatatgatgcggcggtcagcaatatcaccgtgaccaaagagcgcaaagagaagtttgatttcgccacctaccgcaaagattcgctgggtttttacgtcaagagcaccagtccgctgagcaaaattgaaaaagccgaagatattgccgggctgcggattatcgtcggctccggcaccaaccaggaagcgattttgttggcgtggaacgccgagaatctcaagaaggggctgaagccgtttacgccggtctacaccaaagacgacgccgctcagaccctggcgctgcagtccgggcgcgccgacgccttcttcggcccgaacgtaatcggcgcgtggaaagcggcgctgaccggcaaaaccaggctggtgggcagcgttgacggcggctggccgannnnnnnngacggtgaaaaaaggcagcggtctggttga

SEQ ID NO: 254756 - DNA, 222 bp, Klebsiella pneumoniae
  misc_feature (201)..(210): n is a, c, g, or t
atgcagaaaacgcagaaaaaatcgctattactggcgctggcgttggccgtgagcgcgtcatcctgggcgcagaacgtcacgatcaacggcaccggcgtaagcctcgaagctaacaaaacgccgattcacacggcaaaaaaccctcaggctatcgcccaactgccgaaaggtctccacctggcggtgccgggtaagctgacnnnnnnnnnncgccgccgctga

SEQ ID NO: 254757 - DNA, 1317 bp, Klebsiella pneumoniae
atgtctgaacaacgacagctgcgcattggcactatcttacatggcgcatcgggaaatatgtcggcctggcgccatccggccgcgctggccgacgccagtattaactttgagttcgtgaagcagacggcgttaaaagcggaagagggcaagctcgattttatttttgttgccgatggcttatatattaatgaaaaatcgatcccgcattttttaaaccgttttgaaccactcaccgtattatccacccttgcagcggtaacctcgcgtttaggcctcgtcggcaccttgtcgacctcctacagcgagccctttaccaccgctcgccagttcgccagcctcgatcatctgagcggaggacgcgctggctggaacgtggtgacatcgccgctcgaaggctcagcgaaaaacttctcacgggcgcagcatcccgatcatgcgctgcgctaccgcatcgccgatgaatatcttcaggtcgttaaagggctgtgggattcatgggaacaggacgcgtttattcgtaataaagagagcggccagttctttgataaaaataagctgcatacgcttaatcatcacggtgatttcttcaaagtggccggcccgctaaatattgcccgcacgccgcagggccgacccattatctttcaggcgggcgcttccgaagacggtaaaaaattagccgccagccatgccgacgctatttttacccatcaggactcgctggcggaagcgcaggccttttatcgcgacgtcaaaagccagctcgacgcgtacggccgccgggagagcgaactacacatattccagggcgtcagcgtgatcgttggcgatagcgccgacgatgtggaacagcaataccagaccaccgccgcgctggtatcgattgaggacgcgctgaattatctcggccgctattttgagcatcacgatttcgcccaatatccgctggatgaggcgttcccggatatcggcgacctcgggcagaacagctttcgcagcaccaccgatgagattaaacgcaacgcccgcgaacgcggcctgaccctgcgccaggtcgcgctggaggcagccagcccgcgaccgcgttttgccggaaccgccgcagaggtggcagatgggctacagcagtggtttgaacagcgcgcggcggatggttttattatccagggcggtacgccggataccttcccgcgctttgtggaccaggtggtaccgatcctgcagcagcgtggattattccgtgaagaatatcccggcaccacgctgcgcgaaagtttagggctggcagagcccgtcaatcaattccaaaaacaataa

SEQ ID NO: 254758 - DNA, 843 bp, Klebsiella pneumoniae
gtgattgccctgcgtgccgatattgatgcgctgcctatcgaagaggcggccagcgtgccgtttcgctcgctgaatgccggcgtgatgcacgcctgcgggcatgatattcataccagcgtgatccttggcgcggccttactgctgaaacaacgcgaagcgcagctggcgggacgcgtccgcattctgttccagccggcggaggagagcttcggcggcgcgaaaaccctgattcgcgccggcgtgctggagggcgtttccgccattttcggtatgcataatgaaccggggctgccggtgggggaattcgccacccgaggcggcgcgttttatgccaacgtcgatcgctttgtgtttaaggtgaccggcaaaggcgctcacgccgcccggcctcatgaagggaaggatgccattctgctggccagccagctggtgaccctgctgcaaagcgtcgccagccgcgaagtgaacaccctcgattccgtggtgctgagcgtcacgcggattcagggcggcaatacgtggaatgtcctgccggaaagcgtcgagctggaaggtacgctgcgcacccacagcagcgaagtccagcagcgggtgaaggcgcgggtgagcgagattgctgccggcttcgccagcgccttcggcgcgcaaatcgatgtcttctggtacgccgggccgaccgcgctggtcaatgataagcgctgggcggctttcgccagccacgtggccgatcgatccggctaccgcacgcaccatgcggatcgccgtttatcttcagcatattcccggcgcgttcgtcagcatcggcagcgccagcgagtttggtcttcaccatccggcgtttaa

SEQ ID NO: 254759 - DNA, 1002 bp, Klebsiella pneumoniae
atgtcttatcgaatcagtatcctggataaaagcccgctggcggccggagaaacggccgcccaggcgctggcgcgcacattaacgctcgcgcaacaggcggaagcctggggatatcaccgtttctggatcgccgaacaccacaacaccgaccagctcgccagcccgtcgccggaactggcgattgcctggatcctcggccagacccgcagcattcgcgttggctccggcggcgttatgctgcagcactacagcccatataaggtggcggagaacttcaatatgctggcttctcttgccccgggccgcgtggatctgggtgtgggcaaagcccccggcggactgccgctctccactcgcgcgttgcagcagggacttaatctccagcaaaaggggagttttgccgaccagctggcgcagctcgacaactggctgtcgctgaccgaaaccgatggtgaagagagcgtccgcgcaaccccaatcccgccgcgtcgcgccgacggttttctgctcggcgccagcctggagagcgcgcagctggcggcgcagctggactggaacttcgtcttcgccgcccatctcaacggcgataagcagctgctgcgggaggtgttaacccgctggcgcgaactgagccgtcgcgacgcgattatcgccgttcaggttattgtggccgaagaggccgcagcggccgcggcgctggcaaaatccgtcgaagcgtggggcgttgagctggaaaacggtcagcgggtgaccgtcggcagcgaagcgcaggcgaccgcctttgcccgtcaggcgggcagcaggccgacgcgcatcgtccggcgggaatcggccgtgctgttcggcacccccgagcaggtgaaagcgcagttggatgccttgcagtcggcgtggaacatcgacgaatttattatcgacacgcccattagcgacggcgcggcgcgccttaactccctgcgtctgttggcccgggcgcatctgagcgcggaggtccagccatga

SEQ ID NO: 254760 - DNA, 540 bp, Klebsiella pneumoniae
atgaaaatcaacgtagtagggaccagcggcgtcggcaaatctaccctcgcgcgtcggctggctcaggaactgtctctgccttatatcgaaatggatgtgctctactggctgcccgagtggcaagggacgccggacgatgagttctacgctaagctggccgccgcgctcgccgcgccaggctgggtgcttgacggcaactataaccgcagtcgtccggtaaaatggcgcgacgtggatctggtggtgtgggtggattacagcttctggcgcacgatgcgccaggctatctggcgcgcggcatcgcgtgccagccgacgccaggaactgtggcctggcaccggtaactgtgaaaccttccgccgctccttctttagccgggactccattattctctggacgctaaaaacctggcgcaataatcgccgccgctatctggcggatatgcaggatccgcagtatcgacatattcgctttgtgcgcttacgcaaccagcagcagaccgaggcgctggtgcgcgagcttcggcagaatagccgataa

SEQ ID NO: 254761 - DNA, 1545 bp, Klebsiella pneumoniae
atgctcgcttatctcattcatcagaatgatgggagagccagcagcacgaaccacttcatggacattgacaggaaaatagcgacatcaatgaatacaaaacactctagcgtggcggagcagcacgctgccaaacgccactggctaaactcgcaggagtccggctaccacaaggcgatgggcaaccgtcaggtgcagatgattgccatcggcggcgcgattggtaccggcctgttcctcggcgcgggcgcgcgcctgcaaatggcgggaccggcgctggcgctggtttatctggtctgcggcctcttctcgttctttattttacgcgcgcttggcgagctggtgcttcatcgcccttccagcggcagcttcgtctcctacgcccgcgagttcctcggcgaaaaagcggcttacgttgcgggctggatgtacttcatcaactgggcgatgaccgggattgtcgatatcaccgccgtcgcgctgtatatgcactactggggcgcgttcggcgacgttccgcagtgggtctttgccctcggcgcgctggcgatcgtcggcaccatgaatatgatcggcgtgaaatggttcgccgagatggagttctggttcgcgctggtcaaggtactggcaatcttggcgtttctggtggtcgggactatttttcttggcaccggcaagccgctggatggcaatgccaccggtttccatctgatcaccgataacggcggtctgttcccgcacggcctgctcccggcgctggtgctggttcagggcgtggttttcgccttcgcttctattgaactggtaggtaccgccgccggcgagtgtaaagatccgcagaccatggtgccgcgcgccatcaacagcgtcatctggcgtattggtctgttctacgttggctcggtgctgctgctggtgctgctgctaccgtggaatgcctatcaggccgggcagagtccgttcgtcaccttcttctcgaagctgggcgtgccgtatatcggcagcgtgatgaatattgtggtattaaccgccgcgctctccagcctcaactccggactgtactgcaccgggcgtattctgcgctccatgtcgatgggcggttcggcgcctaaatttatgtcgaaaatgagccgccatcacgtgccgtatgccggtattctggcgacgctgggcgtctatgtcgttggggtattcctcaactacctggtgccttcgcaggtgtttgagatagtcctcaacgtcgcttcgctgggcatcatcgcctcgtggggatttattgtggtgtgccagatgcgcctgcgcaaggcgatcaaagaaggcaaggccgcagacgtcagcttcaagatgccgggagcgccttttacttcctggctgaccctgctattcctgctgagcgtgctggtattaatggctttcgattacccgaatgggacttataccatcggttcgattccgctgattgccgttttgctggtcgccggctggtttggcgtacgcaagcgcgtgcatgatattcacagcactgcgccggatattgaaaaaccgtaa

SEQ ID NO: 254762 - DNA, 222 bp, Klebsiella pneumoniae; identical to SEQ ID NO: 172289

SEQ ID NO: 254763 - DNA, 1062 bp, Klebsiella pneumoniae
atgtcattacgtcatctgtccgcgccgcgtctgcgccgttcactgttgttaacttcattactgctggcggggagctttagcgcccatgcggcggaagaaatgctgcgcaaagccgtcggcaagggcgcatacgaaatggcctatagccagcaggagaacgcgctgtgggtggccacatcgcaaagccgttcgctggataaaggcggcatcgtttaccgtctcgatccgacgaccctcgaagtgacccagatcattcataacgacctgaaacccttcggcgcgacgatcaataacgccacccagaccctgtggtttggcaacactaccgacagcaccgtcactgccattgatgctaaaaccggtaaggtaaaaggacgtctggtgctcgacgctcgtcagcgcagcgagaccgtgcgcccgctggcgccgcgcgagctggcggtcaatgagaaaaccaataccgtctacatcaccggcctgggtaaagagagcgtgatttgggttgtggatggcgacaagctgacgctgaaagacactatcgctaataccggcgcaatggcgaccggcctggcggtggacgcagaagcgaaccgcatctataccaccaacgccgacggcgagctggtgactatcgacagtaccagcaataagatcctctcgcgcaagaagttgcaggatgatggcaaagagcacttctatctgaatctcagccttgataccgccggtcatcgcgcctttatcaccgacagtaaacagccggaagtgctggtggtcgatattcgcgatggcaaagtgctggagaaaatcgccgcgccggagtccctggccgttctgttcaacccgacgcgcaatgaagcctacgtgacgcaccgcaaagccggggaagtgagcgtgatcgatggtaagagctacaaggtggtcaaaactttcaaaaccccgacccacccgaacagcctgatgctttccgccgatggcaaaacgctgtacgttagcgtgaagcaggaatcgacgcgtcagaaagaggcgacccagccggatgacgttatccgcatctcgctgtga

SEQ ID NO: 254764 - DNA, 2112 bp, Klebsiella pneumoniae
atgaaaatcctttccgtgcgcgccgtcgcgctccccgctctgcttttaccgctggtatccgctgcgccaaccgctatcgccgctgaacagaccatggtagttaccgccgcgccgtcggcagtctctgaactcgatacccccgccgccgtcagcgtggttaacggcgatgagatgcgccaggctgcgccgcgggttaacctctccgagtcgctgggcgcggtaccgggactacaggtgcaaaaccgccagaactacgcgcaggatctgcagctttcaattcgcggctttggctctcgctccacctacggggtgcgcgggctgcgcatttacgtcgatggcatcccggccaccatgcccgacggccaagggcaaacctcgaatattgatattggcagcctggattcgcttgaagtgctgcgcggaccgttttccgctctgtacggtaactcctccggcggggtgatcaacgctaccagccagaccggcgcccagccgccaactctcgaagccagcagctattacggcagcttcggtacctggcattacggcatgaaagcaaccggcgcggtcggcgacggtacccatgcgggcgatgtcgactatgtggtctccaccaaccgcttcaccacccatggctcccgcgaccatagcggcgcgcgtaagaatctcgccaacgcgaagctcggcgttcgcatcaatgacgtcagtaagctgaccctgctgtttaacagcgtggatattaaagctaatgacgcgggcggcctgagctatgacgaatggcaaaacaatccgcgccagtcgccgagaggcgatgagtacaatacccgtaaaaccatcaaacagacccaggccggtttacgctacgagcgacagctgagcgagcaggacgatctgagcgtgatgatgtatgccggcgagcgtgagaccacgcaatatcagtcgatcccgcgtgcgccgcagctcaaacccacccatgcgggcggcgtgatcgacctgacgcgtcactatcagggcattgatacccgctggacgcaccgtggcgagcttctggtgccggtcacctttaccaccggtctcgactacgagaccatgagcgaacgtcgcaagggttacgaaaactttgtcatgaacaacggcgcgccgcagtacggggagaaaggcgacctgcgccgcaacgagcgcaacctgatgtggaaccttgacccttatctgcaaacccagtggcagctcaccgagaagctctctctggacgccggcgtgcgctatagctcagtctggttcgattccaacgattattacattacgccgggcaacggcgatgacagcggcgaagccagctatcataaatggctgccggcaggctcgctgaaatatgcggtaaccgacgcctggaatgtctacgtctccgccggtcgcggtttcgaaacgccgacgatcaatgagctttcctatcgctccggcgaccagggcgggctgaattttggcctgcagccgtcgaccaacgaaacggttgaaattggcagtaaggcgcgaatcggcaatggcctgttaactgccgcgctgttccagaccgacaccgacaatgagattgttgtcgatgccagcagcgggggccgtaccagctacaaaaacgccgggaaaacccgtcgccaggggatggaactggggctggatcagcagtttggcgagagctggcgtttaaaagcggcctggacctggctggatgcgacctatcgtaccaacgtctgcgacgatgccagctgtaaaggcaatcgtattccggggatcgcccgtaacatgggctacgcctccttcggctaccagcccgaaaaaggctggtacgcgggcagcgatattcgctatctgagcgatattatggctaacgatgagaacaccgccaaagcgccgtcctggacagtcgtcggcctgacgaccggctataaatggagctacggcaagatggatatggatctgtttggccgcgtcgataacctgtttgaccgccgctacgccggttcggttatcgttaacgaatccaatggacgctactacgaaccggcgccgggccgcaactacggcatcgggctcaatctggcatggcgatttgagtaa

SEQ ID NO: 254765 - DNA, 300 bp, Klebsiella pneumoniae
atgaaagatgttgtagataaatgcagtaccaaaggctgtgccattgatgtaggttcgattattgataatgaggactgcgtatggcgagttgagaaaaacttcgtcagccgtgaagaggctgagtccaccctggcggccgttcgccaacgtgccgaagccgccgcacccgccagcgagccgccgcaggttgactataccattgagaccgccggtgatgaggttaagcttgaggcttcaattgctttctcctgccaggcggagaagattatcttcgaattgtccttaagaaacgtgatttaa

SEQ ID NO: 254766 - DNA, 936 bp, Klebsiella pneumoniae
atggcactgccagtgattatcgattgcgatccgggtcacgacgacgcgatcgccctcgttcttgccctcgcctcacccgaactcgatgtgaaagccgtcacctcctccgccggaaaccagacaccggaaaaaacgctgcgcaacgtcttgaggatgctcaccctgcttaagcgcccggatattccggtcgccggcggcgcgcttaagccgctgatgcgggagctgattatcgccgataacgtgcatggcgagagtgggcttgacggcccggcgctgccggagccaggctttgccgcgcaggcctgcaccgccgtcgagctgatggcgaaaacgctgcgcgaaagcgccgggccggttacgatcgtcgctaccggtccgcaaaccaacgtcgccctgttgctcaacagccaccctgaactgcatagcaaaattgcccgcatcgtgatgatgggcggcgccatggtgctgggtaactggcagccggcggtcgagtttaatatctacgtcgacccggaagcggcagagatcgttttccagtccgggatcccggtggtgatggccgggctggatgtcacccacaaagcgcaaatccacgtcgaagatatcgagcgtttccgccgtatcggcaatccgatatccactatcgtcgccgaactactcgactttttccttgagtaccacaaggatgaaaaatggggttttgtcggcgctccgctgcacgatccttgcaccattgcctggctgctgaagccggagatgtttaccaccgttgaacgctgggtcggcgtggaaacgcaggggaaatatacgcagggaatgacggtggtcgatttctacaacctgaccggcaagacgccaaatacgacggtgatgctcgacatcgatcgccgggcctttgtcgatctgctggccgagcggctggcgttttacgcctga

SEQ ID NO: 254767 - DNA, 1038 bp, Klebsiella pneumoniae
atggcttttaatccgcaacgccaccgccgctggctgctggcatcccgtccgcacggcgagccgaccggggagaacttccgcctggaagagggtgaggtcgcttctcctgggccggggcagctgctgctgcgcaccgtctttctgtcattagatccctatatgcgcgggcggatgagcgacgcgccttcctactcgccgccggtcgccattggcgcggtgatggtgggcggcaccgtaagccgcgttgtaacgtcgaaccatgctgattatcagcccggcgattgggtgctgggctacggcggctggcaggattatgagatttccgatggcagcgggctggtgaagctgggcgataacccggaacacccctcctgggcgctgggtatcctcggtatgccgggctttaccgcctacatgggactgctcgatatcggccagccaaaagcgggcgagacgctggtggtggccgccgccaccgggccggtcggcgccacggtcggccagatagcgaagctgaaaggatgccgtacggtaggcattgcgggcggcagcgagaagtgccgctatgcggtagagacgctgggtttcgacgtctgtatcgatcaccgcgcgcccgattttgccgttaagctgttagaagcgtgcccgcagggcatcgatatctactatgagaacgtcggcggcaaagtattcgatgaagtgctgccgctgttgaacacatcggcccgcgtgccggtctgcggcctggtcagcggttacaacgctaccgcgctgcccgctggcccggatcgtttaccgctgctgatggcgacgatcctcaaaaaacgcattcggatgcagggctttatcatcggccaggattacggtcaccggattgcggagttccagcaggagatggggcgctgggtgcaggcagggaaaatcaaataccgcgagcaggtcgttgacggcctggagaacgcgccgcaggcgctcatcggcctgctgaagggtgagaacttcggtaaggtcgtggttcgcgtctctcctgacgagtaa

SEQ ID NO: 254768 - DNA, 576 bp, Klebsiella pneumoniae
atgaacactatagaagacaacctgaaccagcgcatcagcgcacgcatccgtattgagcgggaatctcgcggctggtcgctgagcgaactggcggatcgggcgggcgcgtcccgggcgatgatccacaagatcgagcgcggcgaaagcagcccgacggcctctatgcttgggcggctttccggcgcttttggcatcagtatgtcgacgctgatcgcccgcgccgagatgcaggaaggcaagctgctgcggttggctaatcagccggtgtggcacgacccgcagagccactatctgcgtcgtcacgtgtcgccgcgtagcgatttgcctatcgatctggtgcaggtagagctgcccgggggcagcgatattccgatgccggcggcttcttatgctctggcgcgacagcttatctggctgcagcagggcgagctggtgtttatcgaaggcactacgcgccacgaaatgcaggcgggggattgtctggagctcgggccgcctaacgactgccgcttcattaatgaaaccacgcagccctgcgtctatctggtcgtccggctcaatcaatctgcctcataa

SEQ ID NO: 254769 - DNA, 1278 bp, Klebsiella pneumoniae
atgaaagtagtagtgccttcgatactgacaattattatgggtaatgtattagtcaataccaccatggcggctgaaaccaatgtgctacaggcggcaccggcttataccgcaacgcagactaaaggggagacgctgtggagcaatgatgatacggcgatcggtattttaggatccgtacgtttaatggccaaaacggattctcatcatagccaggaacataatatacagaataatgactcgcggctgggggtagctttacggcataattttgatctgaacggcctgagtaattatgccgtaggttattatgagaccggcgttcatggtttagattccgcaacagatgaccagggcaacgatgtttatacccggcaggcttatgccggtattggtaacgatcgatatggtgtagtgaccttcggtaaacaatatgcgcctaccgactgggggttgggcattgacacaacctatgcctggggtggaaaggcgaaacatgataccgccggaatgtcgacggatattattaattccgcggcaatctactattttaatgataaaaatatgacccttggcgtcatggggcaaggtaatgacaacgtcgacagcatcggctttgcggcctatggcgatggcccgaacctgcatgacgcttaccgtgatggttcagccaccgttcacggcggcgccgcggccgccgcgcagtatcgctgggataacggcttctccgtctccagcgccgttgcctataatcattacacggtaaatagcggatcagccagcggctgccagagttttggcccgaatggtcactgctttcattacaccgataataacggtgatgcctatgacggcaatacgtattccatggggatgaacgcaaaatataccgccaatgtcggtgaccacgcctggtataacggcgcggaggtgacgtattacctgaataaagttaatgatgttaaagcggcgaccagcggtcattacgatcgtaatacccggcatggtgatgaccaggaaacggtgcttggcctggaatatgactcacagtttaaaatcacgccggcctggggagtgtacgttgattttaactggtcgcagggcggggatgccatggacgggcagcacttccagtcgacggtattaggcactgattactggctaggtaatagcgcggtgacctatcttgaatacggctacgaaaaagcctggggcaacgataacgaggcgtggaatattgacgatcatcttggcgcagtgggcctgcgcgtctttatttag

SEQ ID NO: 254770 - DNA, 519 bp, Klebsiella pneumoniae
atgatcatccgccatgccagcaaagacgattgcgcggcaatcgcagaaatctacaaccatgcggtcgtccataccgccgccatctggaacgataaaaccgtcgataccgacaatcgcatcgcgtggtatgaagcccgacagatcgccggttatccggtgctggtgagtgaagaaaacggcgtcattaccggttatgcttccttcggagattggcgcgcctttgatggctttcgccataccgtcgagcattccgtatatgtccatcctgagcatcagggcaaagggctgggccgcagcctgctggtggccctgatcgccgaagctaagcggttgaataagcacgtgatggttgccggtattgaagcgcaaaatgaggcttctttacatctgcaccacacgctgggctttaccaccaccggacagatgccgcaggtcggcacgaaatttggccgctggctggatttgacctttatgcagctacagcttgacgatcgccgcgatccggacggcggcgcatga

SEQ ID NO: 254771 - DNA, 450 bp, Klebsiella pneumoniae
atgaatcagacgctgaccctggcctgtttgattgccgccggcattgggctggtcgtgcaaaacaccctgatggtacgaattacccagtccgcatcgaccattctgatcgctatgctgctgaactcgctggtcggcatcgtgatttttgtcacgatactgctgctgaagcacggcgcggcagggattcaggagctggcggtcagcgtaaagtggtggacgctaattccgggcttgctgggttcgttctttgtgtttgccagcatcagcggctatcagaacgtcggggcggcgaccaccatcgcagtattgattgccagtcagttgatcggtggcctggtgatggatttacttcgcgcgcatggcgttccgcttcgcgcgctgattggcccattctgcggtgcggtaatgctggttatcggcgcctggctggtggccagacgccagttctag

SEQ ID NO: 254772 - DNA, 234 bp, Klebsiella pneumoniae
atgtcgcatctggatgaggtcgtcgcgcgcgtggacgcggcgattgccgaaagcgtcattacccatatgaacgaactgctgattacattaagcgacgacgccgggctggggcgagaagagcgctacgtgcagcagcagcgtttgcgtaacgctattgctcatcatggccgccagcagcatgaggaacaggaagcgcgccgggagcagttgacccgcggcggcgagatccactaa

SEQ ID NO: 254773 - DNA, 1599 bp, Klebsiella pneumoniae
atgtttacagggaaaacgtttattgcgctggcgttgagcgcacttctgccggcggcaagcgcgctggcggcgggcgatgatacgctagtctattgctccgaagcctctccggaatccttcaatccgcagattgccagttccgggccctcttttgtcgccagctctcaggtgctgtataaccggctgataaactttgatccggtcaaaaacacgcctgttccttccctcgcgacggaatggagcgtctctccggacggcaaaacctggacctttaccctgcgtaaaggcgtgcagttcaacagcaataaattctttaagccgacccgcgatttcaacgccgatgatgtgctgttctcggtgctgcgccagaaagatgcgaaccatccttatcacaatgtttcccacgggcaatacgaatactttcacgacgtcgggctggataagctgattaaagaggtcaaaaagatcgatgactaccacgttcagtttgtgctcaacgaacccaatgcggcattcctcgccgactgggggatggattttgcgtcaattctgtctgccgaatatgccgatgcaatgctgaaaaaaggcacgccggagtatatcgatacctggcctgtcggcaccggaccttacgccctccagcagtataaggtggattcgctgatccgctatgttgccaacccgcactactgggatggtgaagtgccgactaaacacctgatcttctcgatcaccccgaacgttgagacacggctggcgaagctacaaaccaatgaatgccagattattcccgcgccgtcgccggtacaattcccggtgattaaaggtaataaagatctggcgctgcattcggttgaggcgctcaacgtcggctatctggcgtttaataccgagaaaaagccgttcgataacctgctggtgcggcaggcgctcaattatgccaccgacaagcaggcgatcgtgaaagcggtgttcctggagtccggcagcgttgcgaaatcgccgatccctgccaatatgctgggctataagaaagatctgcccgattacgactacgatccgcaaaaagcgaaagatctccttaaacaggccgggctggaaaaaggggccgaagtcaccctctggtcgatgccggtgcagcgcccgtataatcctaattcgcgccgtatcgctgaaatgatccagagcgactggagcaaagttggcatcaaagccaaaatcgtcacctatgagtggggcgagtacctcgccggtatgcgcaaaggggagcatgacagcgcgctgtttggctggatgtcagataacggcgatccggataactttgccggtaccctgttaagctgcgataacattaaaaccggctccaacgttgcccgctggtgcgataagccctacgatgcgctggtgaaaaaggctatcctggtgagcgacccgcaggagcgcgctaaactctacgctcaggcgcaggagattttttatcagcaggccccatggatcaccctggcaaccggcaaaaccttctacgcgacgcgcagtaacgttagcggatacagcgtgagcctgatgggcagcgatttttccaaagttaaacttaattaa

SEQ ID NO: 254774 - DNA, 1434 bp, Klebsiella pneumoniae
  misc_feature (59)..(68): n is a, c, g, or t
atgacaataacctgcactctctacaccctgtctcttatacacatctccgagcccacgannnnnnnnnnccgccacaacccgctgacgcaagaaaacgcctccgttgccagcgccgccagcctggctgacgctcgccgctgcgccgataccgccggcgcggcgtatccgcaatggcgcgatacgatacccgcagaacggcgacgcctcctgctggacgctgccgaagagatgctgcgccgtgaggcgaagtttattgccgcgatggcggccgaaacgggagccaccgcgcactgggccggttttaacgtgcatctggccgccgatatcctgcgcgaagccgccgcattgaccacgcaaatcgaaggccaggtgatcccctctaacgtgccgggaaatctggcgttgggcatccgtcagggggcgggcgtcgtactcagcatggcgccgtggaacgcaccattgattctggcgactcgcgctatcgccacgccgctggcctgcggaaatacggttattctcaaaggcgcggagctctcgccggcgactcaggggctaattatcgatgccctggcggcggcgggcttccccgccggcgtggtgaattatctgacctgcactcccgccgacgctcctgcgctggtggagtctctaatagcgcaccccgccgtacgccgcatcaacttcaccggttcgacgccggtaggacggattatcgcccgcacctgcggggagcatctgaaaccggcggtgcttgaactgggcggcaaggcaccgctgctggtgctcgacgacgctgacctcgaacaggcggctgcgggcgccgtttttggcgcattcgccaacgccggacaaatctgcatgtcgaccgagcgcatcattgtggatgcggccgtcgcggaagagtttgtggcgctactggccaggcgcgcggcggccctgcccgccagcctgctcggcccggtggtagagatgaagaccgtcacccgctgcaatgtcttgatagaggatgcgctggcgaagggcgcgcgcctgctcacaggcggcacatccaattcgacgcaaatgcgcgccaccctgctcgatggcgtcacccgggaaatgcgcatctggcatgaggaatcgttcggcccggtgaaatcgattattcacgttcagaacgaagccgaagcgctggccgtcgcgaacgaaagcgaatatggcctctcgtcggcgatatacagtcgggacagcgcccgggcgtggaacctggcgcaaaatctgcaaaccggcatttgccacatcaacggccccaccgtgcacgatgaagcgcaaatgccgtttggcggctgtaaatcatcgggctatggccgctttggcggacgcgcggggattgccgagtttaccgagctgcgctggatcacgctgcaaacgctcccgcgcgagctgccgttttaa

SEQ ID NO: 254775 - DNA, 1257 bp, Klebsiella pneumoniae
atgcgaataatcaacatcctgggtatctcggctttactctgtacgcctctgcttctgcaagggtgcgtaacgcaacatccgcgcgggacggcttcccgcccgcagcttacggcggcggaagcggcaagcttcaccatggagcgctattttgcgcagggcggcgcgttgagtgccccggatgggccatggtcgccatcgccagttagccttccgcaaacggaaagcgcctggcgcgtggcgccagcgggagcgccgtactcccgcattcagcaggcggttaatgcggcaatagcccagcattcggcaaagaatgagcgtatctatatccgtatcgagccaggcatctatcgggaaacggtctatatccccgcaggggcgccgccgataaccctttatggcgccggagagcagcccgaagaggtcaggattgagctggcgctggattcacaattttctgcgcagcgctatcgcgagcaggtgaacggccagcatcagtatcgtgaaggcgaccccgcctggtaccagtatgcgctttgcgtcgggcgtaccagtaagacaataggcaccaactgcgcggcggtgatgtggtcgcaaagcgctgatttccagctggttaatcttagcgtagccaacagtctgctggataccgttgatggcggtacccaccagggggtggctctgcggacggatggcgatcgcgtgcagctggagaaagtccgtttgctgggacgccaggatacgctctatttgaataccagcaacctgcgtaatgaagcggtgacggatcgcattagccgcgtatacgtcaaagacagctacgtcgaaggggacgtggattatgtcttcggccgggcgaatgcggtctttgacaatgtgcatttccacaccgtctcgacgcgccgttctcccgaggcttacgtgctggcgccgaacacgttgccggataatccatacggttttctggtgaagaacagccgctttaccggcgacagcggctatcagggcagtttcaaggcaaagctgggccgcgcctgggatcagggggcaggcaagaccggctatttagcggggcagaccgccaacggacaggtgctgatcgccaacagcgctatcgatcaaagctacgatcggctttccccatggggcgctgcggccaccacctcccgaccgttccgcggcaatatttccgcagaacgacagctggatgacgtggcctttaatcgcctgtgggaattcaagaaccattggcggccgtga

SEQ ID NO: 254776 - DNA, 771 bp, Klebsiella pneumoniae
atgaacagtttctattcctctcaggccggcggcaacgtgcgctggctggacctgcccggccgcggtgaaccgattatctttatccacggcctgggctgcgcctcaacctatgactatcctcgcgtggccgccgatcctgcgctggccggacggcgaacgattctggtcgatttacccggatacggctacagcgacaagccgccatctttcggctatcgcatcggcgatcaggccggagtgatagttgagcttctggatagcttaggtctaacgcgctgctacttatatggtcacagcatgggcggcagcgtggcgattgaagccgcagaacggctcgccgaacgggtgctggggctgctggtggccgaacccaatctctatcccgggggcgggatgtacagcagacgcatcgcggaacaaaccgaagagcgctttattgcccggggctatgccgagatgctcagtgccgaaacctcgccctgggccggttgcctgcaaaacagcgctccgtgggcggtgtggcgcggagcgtccagcctggtaaagggcgctaatccgtcctggtttacccgctttatccatttatcctgtcctaaggccctgatttacggagagcattcgttaccggctcaagaagcgacggatactgtcgcggcggggatcccgctgttagcgatcccgctggccgggcattcaatggcgtgggaaaacccatcagcgctggcccgcacgctggacaatttttatgccagcattgaggcagaagtctga

SEQ ID NO: 254777 - DNA, 174 bp, Klebsiella pneumoniae; identical to SEQ ID NO: 172304

SEQ ID NO: 254778 - DNA, 2112 bp, Klebsiella pneumoniae
atggaaaaggatgacccactgctcaccgccatgtttgagatgtgcaaccgtaaaaatcccctcaatgacggacagcgcgagtggtctatcgcggatcttcccggcctgttgtgcgaaggatgttatgacgagctcgaggcgcgctatagccgggcgctggcggaaagcctgaccagccgcgaggcggaaaaacgttacttcctcgcctggacgcagatgtgcaaccatttttacgatatggatgcgctggtcgaggccgggcctgctgggttagcgccgatcaaaaactggcagcgcgcccgcccgcgctccagctatgcctggcttgctgaggcccagtactggaaccaccgcgcgtggctctatcgcagctacggctgggcgcaggataccacccgcgccatgtggatctgcgccagcgcctgcaatgagcagatggtcattgccgctctctacgccatcgacctcgaaccacgccagtggatggtggcgtccctgaccagcactaactctaaggtcttcggccagcccgactggctggctgagttccttgccggcgctgaggttgcgggacgaccgctgatgcaggaactggctgagtatcaccgccgctcaccgcaggaagtggaggcgctgatggcccattccggcctgtcgtttgccgacgcggtatgcccggatctgcctcgtccgcaggtactgcctgcgtgcaatggcgacgccgggcaacgctactggctcgccgtttgtctggcgattttcccgacggcattttacgcgctggatgagtatattccgtttcgtatgccgcgctggggaggatcgcatcaggagatccgcgaatttctggcatcaacggtatgcgatcatcttaccgccgccgagcgggagcatctggaacttttaatctggtgggatgaccatcgcgatctgcgcatcaatgaagtggattcaccgaccgagcgggagcgtattatcgccaaagcagaagagattgcccggcgggcgcacatggcgcagtctcgccactatgcgctggagtggctgctgctctgctatagcgatttagacgataaagacgcgctctggctcaccctgcagcgttcggtcatggaaaaagtgaagctcaacaattactacaccgcgtgggcgttaaagtttgcgctgcgcgatttcccggacagcgagtggatttacaatttcatcagccagaatgcgcaacaaaccgaatactgcgtgccgaaaatctatcgcggctacttccagtacgcggggttatttggctttgaaaaagatgaagcgcagggtgccgtctggctcgatagcgtcgccgacattgaatacgaccataactggcgggcggcgataaaagattttcgctggctcggttaccccgaatatctcctgcctctggcccaccttggcgcccggagaaacatccccagcgcgcttaatcagctcggggtggaatctaatgccagagataacggaggcttgttgccgtacgatcccgccatcgccttcgattactgccagcaagcggccgagattttacgccagcacgtcgcgcagcgcgacgcagataataaatatcgcttgatcgccaacggcggcgatgacggctatgaacaggacctgcaggagatccatttccgtatggccaactgctgcgaacgtctgatcaaccaggctccgccggcggaaaagcgcgctgcttacgaaaaaaaccttctcgataatctctatctggcctcccgctatggcgataagcgggcctgggaactctttctgcttaatatcgccggcgtaaaagatttagcgctggcgcactcacatttgcaacaggtgcaggaagcggcaaataaaggttcgccggaggccatggtggcgctgtcgcagctgtacggtaacaaacgggataaagcgctttataatatgaaacagagcgcgcgctgggcgcattttttcatcaccttgtaccctgaacatgaattattcatggatctggatgctctccatttcgattctttctggaaacgctggcgctttgcctggtacacctcacgtatcccggattccgagctgccggggcaggtcaactccatggtgtaa

SEQ ID NO: 254779 - DNA, 717 bp, Klebsiella pneumoniae
atgctgctgatagccttgtttaccaccgcttattacctgcgtttacgcgccaagaaaaagaataaacagctggttgccgcccgtatcgccgaggaaaaagaaaaggaccatcttaacgatctgcgccgcgatagccgaagacgccagtgggcgctagcgttagccgatctcctctcgcaccgcaatggcctgccgacaaaaggcgtacagctggcgttgaaacttgatgatgaccagcgccgacacctgacgcagcaggtaaaaaaagaactgggcttgcatcagcacctcgacggcgcggcgttacgccagcagatcgccgagatcctgcgctgctggccggcgggcatgggcaactcgccgcgcacgttttaccaccacctggcggcccagggccgggttcgcgacgcgctggcgttcgactgcatgcgcaccgcctttctgacgcgctgtatcgccgggctcggctggtgcgacgaaaatcaggcctggctggttctcctgttaaacgcccagcgggcgcaggattgttttgcttcgtgggaagattacgccaccgcctacgtccgcgcccgccgggtacggctggcgttaatggatacgccaacggcggttgccggacgcgatgtgcaggaggtggcctgttatctgaaagcctccttcagccgctggaaaacgctgccgtggaatgacttcaaaattttcgacccggtttaa

SEQ ID NO: 254780 - DNA, 1200 bp, Klebsiella pneumoniae
atgagtaatattcatagaaaatatagtccacgaaatataattaacgctcctgatgtaaaatcggccattatttctcgcagcgaacagcgcgacgacggtaatagtattcaacgctggctaagcaaccatttttttcgctgggctatcggtaatttcccccacgtttatcctgtacgctccgccgccgattatgcggtttactttggcgcggagaaggcgatccccgcttggttgatatccgggctgggcggcggcggcgccttttactatcttaatccacagcatccgcagctgctggcgacggaaagggagttactggagttcctgtcgcggctggaaggcacgcggctggaaagcaaacttcagcgcattaactgtttcaccgtcctggacatgcgcgaggccgagcaccagaaaatgcagcgcctgcgcgaacgaggctggtacccctccagcgacgacgccgttaagccgctgatgaaggtcactgctgggcagtgggtcgccttcgatgccgccagcccggccttgcgtagtgaaatggcctatgaatcctggcatatgcggcactgcgtcggccagttcgaggataaagggtcactctccggcggctacggcgagtactacgcccggcaaattgaacaaggcgcatttcgccttctgagcctgcgcgacgaaaataatattccccacgtcaccctgagcctgaggataaataatgacagcatgagtatcgatcaaattaaaggtaagcagaaccagcatcctgttaaaaaatatgccgccgacgttttggctttattacattatctgcaaccacgtcccgagcgccacgccgattgtgaaggtatggggatcgtctatgaagcgacgccgcaatttgctggctggaaatttatcaccgatgtggttgattttgattttttactcaacgttctgcataacaattttcatttaatggcgcacttccctcacccaccggtggcgctacagtggctgcttctgcacagcgctccggaggcgttgcgctatcttcagacgatcgatcccaacgtggcgaccgcggcggaaatgctgttcccacagcatgaatggcaccctacgcttgccgggaaaaacacctgcagtcagccttttgaaattgagagcctgacgctacaaaccacgcgctaccgaccacacaccggagagagtccttga

SEQ ID NO: 254781 - DNA, 1416 bp, Klebsiella pneumoniae
atgacagatcttccttccagcgtacgctggcagctgtggatagtggcctttggcttttttatgcaagcgctggataccaccatcgttaacaccgccctcccctcaatggcgcaaagtcttggggagagcccgctgcatatgcatatggttatcgtctcctacgtgctgacggtggcggtgatgctgcccgccagcggctggctggcggatcgtgtcggagtaagaaatatcttttttagcgccatcgtgctgttcaccgccggctccctgttctgcgcgcaggccgccacgctcgatcagctgattctggcccgggtgctgcagggcgtcggcggcgcaatgatggttcccgttggccgcctgacggtaatgaaaattgtcccgcgcagccaatatatggcggcgatgaccttcgtcaccctgcccggccaggtggggccgctgctcggcccggcgctcggcgggatgctggtggagtacgcctcctggcactggatctttctgatcaatattccggttggcatcgtcggcgccatcgccacgctgtggctgatgcccaactacactctgcaaacccggcgctttgatatcctcggctttattttgctggccgctggcatggcgacgctcaccctggcgctcgacggcaaaaaggggctcggaatctcccccctgtggctgacggcgctggtggccatcggcgcggcgtcaattctgtgctatctgtggcacgcgcgcggcaaccgcaacgcgctgttcagcctgaagctgttcaacaaccgcaccttttctctcggccttggcggcagcttcgccgggcgcatcggcagcggcatgctgccgttcatgaccccggtgtttttacagattggcctcggcttttcgccgttccacgccgggctaatgatgatcccgatggtgcttggcagcatgggaatgaagcgtattgtggttcaggtggtcaaccgcttcggctatcgccgggtgctggtgacttcaacgatcggcctcgcgctggtcagcctgctatttatggccgtcgcgctcgcgggctggtactggctgctgccggtggtcctgtttctgcagggaatgattaactccagccgcttctcctcaatgaataccctgaccctgaaggacctgcccgacgatctggccagcagcggcaacagcatgctatcgatggtcatgcagctgtcgatgagtatcggcgtcactatcgccgggatgctactcggtctctacggccagcagcatatcggcgtcgatgcggcgaccgctcatcaggtgtttctttatacctacttaagcatggcggtggttattgcgctgccggcactcattttttcccgcgtaccggacgacaccacgatgaataccgtgattcgtcgccgtaaaaggagtgagtcttga

SEQ ID NO: 254782 - DNA, 3021 bp, Klebsiella pneumoniae
gtgaagtttttcgcgctcttcatttaccgtccggtggcgacgattctgatttcgctcgccattactctctgcggcatcctcggttttcgcctgctgccggtagcgccgctgccgcaggtggacttcccggttatcatggtcagcgcctcgctgcccggcgcgtcgccggagactatggcctcttcggtggcgacgccgctggagcgctctttggggcggattgccggggtcaatgagatgacctcctccagctcgctcggcagtacgcgcatcattcttgagttcaactttgaccgcgatatcaacggcgcggcccgcgacgtgcaggcggcgattaacgccgcgcaaagcctgctgccgagcggtatgccgagccgtccgacctatcgcaaagccaacccgtcagacgcgccgatcatgatcctcaccctcacctcggatacatggtcccagggtgaactgtacgacttcgcctcaacccaactggcgcagaccattgcccagattgacggcgtacaggcgctgtttaaccagggcgtgtcgctcgacgcggtgcgcaccgccatcagcaacgccaacgtgcgtaaaccgcagggggcgctggaagatgccacccaccgctggcaggtggcgaccaacgacgagctgaaaaccgctgccgaataccagccgctgatcgtgcactacaacaacggcgcggcggtgcgcctcggcgacgtcgccaacgtcaccgattcggtgcaggacgtgcgcaacgccgggatgactaacgccaaaccggcgattttgctgatgatccgtaagctgccggaggccaatatcattgagacggtggacagcattcgcgcccgtctgccggaactacagcgcaccatcccggcctctgtcgatctgcaaatcgcccaggaccgttcaccgaccatccgcgcctcgctggaggaagtcgagcaaacactggtgatctcggtggcgctggtgatcctcgtggtcttcctcttcctccgctcggggcgcgcgacgctgatcccggcggtggcggttccggtttcgctgatcggcaccttcgccgccatgtacctgtgcggcttcagccttaacaacctgtcgctgatggcgctgaccatcgctaccggcttcgtggttgatgacgccatcgtggtgctggaaaacatttcccgccatctcgaagcgggcatgaagccgctgcaggcggcgctgcaggggagccgggaagtcggatttaccgttctgtcgatgagcctgtcgctggtggcggtattcctgccgctgctgctgatgggcggcctgccgggaaggctgctgcgcgaattcgccgttactctgtcggtggcgatcggcatctcgctggcggtctccctgaccctgacgccgatgatgtgcggctggctgctgaaaagcggcaagccgcacgagccgacgcgcaagcgcggtgttggccgcctgctggtggcgattcagggcggatacggtaagtcgctgaagtgggtactgaagcatagccgcttaaccggcctggtgctgcttggcaccatcgcgctgagcgtctggctctatatttcgattcctaaaaccttcttcccggagcaggacaccggggtgctgatgggcgggatccaggccgatcagagcatctcgttccaggcgatgcgcggcaagctggaggactttatgaagatcattcgtgaagatccggcggtggacaacgtcaccggttttaccggcggctcgcgggtcaacagcgggatgatgtttatcaccctgaagtcgcgcgatgagcgccatgaaacggcgcagcagattatcgatcggctgcggaagaagctggccaaagagccgggggccaacctgttcctgatggcggtacaggatatccgcgtcggcggccgtcaggccaacgccagctaccagtacacgctgctgtcggacgaccttgcggcgctgcgggagtgggaacccaaaatccgcaaaacgctggcggcgctgccggagctggcggatgtcaactccgacagccagaataacggcgccgagatggacctgatctacgaccgcgataccatgtcgcgactcggcatcagcgtgcaggacgccaataatctgctaaataacgccttcggtcagcggcagatctcaaccatctaccagccgctgaaccagtataaagtggtgatgcaggtcgacccggtctacacccaggacgtcagcgccctcgataaaatgtttgtgatcaacagcgaagacaagccgatcccgctatcctatttcgccaaatggcagccggccaacgccccgctgtcggtgaaccatcaggggctgtcggcggcatcgaccgtgtcgtttaacctgcctaccggcaaatcgctgtcagaagccagcgacgccattaaccgggcgatgacccagcttggcgtaccgtccagcgtccgcgggtcgttcgccgggaccgcgcaggtgttccaggagaccatgaactcgcaggtgatcctgattctggcggctatcgccacggtctatatcgtgctggggatcctctatgagagctacgttcatccgctaaccattctgtcgactattccgtccgcgggcgtcggcgcgctgctggcgctggagcttttcgatgccccgttcagcctaatcgcgcttatcgggattatgctattaattggcattgtgaagaaaaacgccatcatgatggtcgactttgccctggaagcgcagcgcaacggcaacctgccgccggaagaggcaatcttccaggcctgtctgctgcgtttccggccgataatgatgaccaccctggcagcgctgttcggcgcgctgccgctggttatctctggcggcgatggcgccgagctgcgccagcccttggggatcaccattgtcggcggtctggtaatgagtcagctgttgaccctgtataccacgccggtggtctatctgttcttcgaccgtctgcggctgcgtttttcgcgaaaagtccatcaaccggtaagcgaataa

SEQ ID NO: 254783 - DNA, 2679 bp, Klebsiella pneumoniae
atgaccctcgcggtcacctcttccgccgtgccgatgacccaggtcgaggatatggtcgagacccgcgtggcgcagaagatctcccaggtttccggcgtcgggctggtcaccctcgcgggcggccagcgcccggcggtacgcgtcaagctcaacgcccaggccatcgccgcgctcgggctgaccagcgaaacggtgcgcaccgcgataaccagcgccaacgtcaactcggcgaaagggagccttgacggcccggcgcgggcggtgaccctctccgccaacgatcagatgcagtcagcagaagattatcgccgcctgattatcgcctggcagaacggcgcaccgattcgcctcggcgacgtcgccaccgtggaacagggcgcggaaaacagctggcttggggcatgggcgaacaatcagcgggcgatcgtcatgaacgtccagcgccagccgggggccaatattatctctaccgccgacagcatccgccagatgctgccgcagctgaccgaaagcctgccgaaatcagtcaaagtacaggtgctttccgaccgcactaccaacatccgggcgtcggttagcgacacccagttcgagctgatgctggctatcgccctggtggtgatgattatttacgtctttctgcgcaacgtcccggcgacgattattcccggcatcgccgtgccgctatcgctggtcggcacctttgcggtaatggtgtttctcgatttctcgattaacaacctgacgctgatggccctgaccatcgccaccggctttgtggtcgatgacgccatcgtggtgatcgaaaacatctcgcgctatatcgagaaaggcgaaaagccgctggccgccgccctgaaaggggccggagagattggctttaccattatctcgttgaccttctcgctgattgcggtgctgatcccgctgctgtttatgggcgatatcgtgggccgcctgttccgcgagtttgccattaccctggcggtggcgatcctgatctccgcggtggtgtcgctgaccctgacgccgatgatgtgcgcccgcatgctgagccacgagtcgctgcgcaagcagaaccgcttctcgcgcgccagcgagcgtttctttgagcgggtgatcgccgtctatggccgctggctgagacgggtattgaatcatccctggctgacactgagcgtggccctcggtaccctggtgctgtcgattatgctatgggtgtttattccgaagggctttttcccgattcaggacaacggcatcattcagggtacgctgcaggcgccgcagtcggcgtcgttcgccaacatggccgagcgccagcagcaggtgtcggcggcgatactcaaagatccggcggtagaaagcctgacctcctacgtcggggttgacggcactaacccggcgctcaacagcgcccgcctgcaaatcaaccttaagccgctggacgagcgcgacgatcgcgtgcagacggtgatcggccgcctgcagaacgcggtgagcgggattcccggcattgagctttaccttcagcccacgcaggatctgaccattgacaccaccgtcagccgcactcagtaccagttcaccctgcaggcgaactcgctggatgcgctcagcaactgggtgccacagctgctgacccggctgcaggcgctgccgcagctctccgacgtcagcagcgactggcaggacaagggcctggcggcgtatatcaacgttgaccgcgatagcgccagccgcctcggcatcagcatggcggacgtcgataatgcgctgtataacgccttcggccagcgtttaatctccaccatctatacccaggcgaatcagtaccgcgtggtgctggagcatgatacccaggccacgccggggctggcggcgctggataatattcgcctgaccagcagcgacggcgggattgtgccgctgaaatccatcgccagcgtcgaggagcgttttgccccgctatctataaaccatctcgatcagttcccggtcaccaccatctcgtttaacgtgccggataactattcgctgggcgatgcggtcgatgccatccttggcgccgaacaggcgctggaattcccgagcgatatccgcacccagttccagggcagctctctggctttccagtcggcgctgggcagcaccgtctggctggtggtcgctgcggtagtggcgatgtatatcgtcctcggagtactgtatgaaagctttattcacccgataacgattctctccaccctgccgacagcgggcgtgggcgcgctgctggcgctgtggctggcggggagcgaactggacgttatcgcgattatcggcatcatactgctgatcggcatcgtcaagaaaaacgccatcatgatgatcgacttcgcgctggccgccgaacgcgaacagggcatgccgccgcgcgaggctatctaccaggcctgtctgctgcgctttcgtcccatcctgatgaccaccctcgccgccctgctcggcgcgctgccgctgatgctaagcaccggcgtcggcgcggagctgcgccgtccgctggggattggcatggtcggcggtctgatgctcagccaggtgctgaccctgttcactaccccggtgatctatctgctgttcgaccgactgtcgctgtatatgaagagccgattcccgcggcgtgaagaggaggcgtag

SEQ ID NO: 254784 - DNA, 513 bp, Klebsiella pneumoniae
atgcaattagatgaacaacgtctgcgttttcgcgatgccatggccagcctgtcggccgccgttaacgtcatcaccaccgaaggcgaggcgggccgctgcggtatcaccgccaccgcggtctgttcggtgaccgatacgccgccgtcggtgatggtctgcatcaacgctaacagcgcgatgaatccggtgtttcagggcaacggcaagctatgcatcaacgtgctgaaccacgagcaagaggagatggcgcgccacttcgccggcatgaccgggatgacgatggacgaccgtttcggcctcagctgctggcaaaaaggcgagctcggccagccggtgctaaaaggctcactggcgagtctcgaaggcgagattagccaggtacagaccatcggcagccacctggtctatctggtagaaatcaggaatataaccctgagccagcagggccacgggctgatctactttaagcgccgcttccatccggtgatgatggagatggaggtcgtggcgtag

SEQ ID NO: 254785 - DNA, 1362 bp, Klebsiella pneumoniae
atgttaaagaattatatcaaagaagcgcttgctatacagcaggaagaaggggatgcttcggatgaagcattgaagaaatatttggcagggataaattcatataatctaaatcaagatcaggaatacgactttctgtatgcaaattatcaggcgatgtggatttactctaatttaggtgagtcgggaaaagcgctgcctctggctaaacagtgtatggcgttgatggctgataccataagtgcgggtgcgatatttcattatactgatatggggcggttttatgaggaagtgatccgctatgcgacaaacaatatagcatggtatgcatacgaacactccgatagtaccgatgaactagaacgcgcgctggaaaccatatctcttggctgtaattatattgacagccctgattacttttacgctttcgatactaaagtccgtatcttacttaaattgggccgaaaagaagaagcttttaaaatcgtttttacttgtctgcagcaacttcccgacttctctgatttttctgatatcaagaaacaaaaggagtatcaggactggaaaaataacttcgatacaggaactattgaatattctgagcaggaaatggcgtttctacaaaaagcagccagaattaccactcattttaaatcactgacttcgaaagaaccgttaaagtcccccttgaaggaagagtcgatccccgacaagcaaatcgttcttatcaaggaggcaagaggtaaatacgcatttaccgaaaatttttacaacgatgatgattgctttttattgtacaagggtaacctgcatattaaacaaaacctcgatgaagaatggtatgaaaaacagcttgaagatatcacatggcaaaatgatctattcggcatcctgattgatggcaatctcactgtagaaggcgatatcgccctcgagcgatgtattctttcagtcgtcaacgatgtcacctgcgattgtctgtattccggtgatggccatacattaatacagggggatgcgtatattaaatacggaatttacggtgcgtataacgatggttcgctggaggtaaaggggatacttactacaccctatttactggcctacgatcactgcatgcccaggaagtctgacgttggagaatctatttatatagaagttggtgacttatctgaaactaagaatatacgtatcggtgaaagctatggtagcggatggggttggaactggaattattttgatgatgccgcccggttgcttaccaatgcggtatttatagagaacgatggcgataccgtgttttccgtaggaaaattttttgacatcgtaaaacgtggagaaaatccctttcgccaaatcaaataa

SEQ ID NO: 254786 - DNA, 2151 bp, Klebsiella pneumoniae
atggatactaaaaagttattcaagcacataccctgggtgattcttggaatcatcggggcattttgcctctcggtcgtcgctctgcgccgcggtgagcacgtcagtgcgctgtggatcgtggtggcgtcggtttccgtctacctcgtcgcctaccgttattacagcctgtacattgcgcaaaaggtgatgaagctcgatcctacgcgttcgacgccggcggtaattaacaacgatggcctgaactacgttccgaccaaccgctacgtgctgtttggccaccactttgccgcgattgccggcgccggtccgctggtgggcccggtgctcgccgcgcagatgggctacctgccgggtaccctgtggctgctggcgggcgtcgtgctggcaggagcggtacaggactttatggtgctgtttatctcctcgcgtcgtaacggcgcctcgctgggtgagatgatcaagcaggagatgggtccagtaccgggctccatcgcgctgttcggctgcttcctgataatgatcatcatcctcgcggtgctggcgttaatcgtggttaaagcgctggcggaaagcccatggggcgtgttcaccgtctgctcgaccgtgccaattgccctgtttatggggatctacatgcgcttcctgcgcccgggtcgggtaggcgaagtgtcggttatcggcatcgttctgctggtggcgtctatttacttcggcggcgtgattgcccacgacccttactggggcccggcgctgacctttaaagacaccactattacctttaccctgattggctacgcgtttatctcggctctgctgccggtatggttgattctggcgccgcgcgactacctggcgaccttcctgaaaatcggcgtaatcgttggcctggcgctgggtatcgtgatccttaacccggacctgaaaatgccggcggtgacccagtacattgacggtaccggtccgctgtggaaaggcgcgctgttcccgttcctgtttatcactattgcctgcggcgcggtctccggcttccacgccctgatcgcttccggcaccacgccgaagctgctggctaacgaaaccgacgcccgttttatcggctacggcgcgatgctgatggagtccttcgtggcggtaatggcgctggtggcggcatcaattatcgaaccgggtctctacttcgcgatgaacaccccgccggcgggtctgggcatcaccatgccgaacctgcacgaaatgggcggtgaaaacgccgcgctgattgccgcccaactgagggatgtcaccgctcacgcggcagcgaccgtcagctcctggggcttcgtgatctctcctgaacaaatcctgcaaaccgcgaaagatatcggcgaaccgtcggtcctgaaccgcgcaggcggcgcgccgacgctggccgtgggtatcgctcacgtgttccacaaaatcatcccgatggcggatatgggcttctggtaccacttcggtattctgtttgaagcgctgtttatcctcaccgcactggatgccggtacccgcgcaggccgctttatgctgcaggacctgctgggcaactttgtaccgttcctcaagaaaaccgactcgctggtagcaggcattatcggtactgcgggctgcgttggtctgtggggctacctgctgtatcagggcgtggtcgacccgctgggcggcgtgaagagcctgtggccgctgttcggcatctctaaccagatgctggccgccgtggcgctggtgctcggtaccgtggtgctggtcaaaatgcagcgcaccaaatatatctgggtcaccgtgatcccggctgcatggctgctgctgtgcaccacctgggcgttgggtctgaaactgtttagcaccaacccgcagatggaaggcttcttcttcatggctcagcagtacaaagagaagatcgcttccggcggcgaactgaccgcacagcagattgccaacatgaaccatatcgtggtgaataactacaccaacgccggtctgagcattctgttccttgtcgtggtctacagcatcattttctacggcatcaaaacctggctcaacgtacgcaacaataaagtgcgtaccgacaaagagacaccgtacgtaccggtaccggaaggcggcgtgaagacctcttcacatcactaa

SEQ ID NO: 254787 - DNA, 204 bp, Klebsiella pneumoniae; identical to SEQ ID NO: 176405

SEQ ID NO: 254788 - DNA, 957 bp, Klebsiella pneumoniae
atggcaccgattgcagttaccctattaaccggttttcttggcgccggtaaaaccaccctactgcgccatatcctgaacgaacggcacggctttaaaattgccgttatcgaaaacgaatttggcgaagtcgccgtcgatgaccagcttatcggcgaccgcgcgacgcagattaaaaccctgaccaacggctgtatctgctgtacccgctccaacgaactggaagacgctctgctcgatcttctcgacagccgcgatcgcggagaaattgattttgaccgactggtgattgagtgtaccggcatggccgatcccggcccgattattcagaccttcttctctcatgatgtactgtgcgaacgttacctgctggatggggtgattgcgctggttgatgcggcgcatgctgaccagcagatgaaccagttcaccattgcccagtcgcaggtggggtacgccgatcgtatcctgctcaccaaaaccgacgtggcgggcgacagcgacaagctccgcgagcggctgacgcgcatcaacgtccgcgcgcccatttaccgcgtcatccacggcgatatcgacctgaatctgctgtttaacaccagcggttttatgctggaggagaacgtggttagcagcaaaccgcgcttccactttatggccgacaagcagaacgacgtatcgtcaatcgtagtggagctggattatccggtagatatcagtgaagtctccagggtgatggaaaatctgctgctcacttttgccgaacagctgatgcgctataaagggatgctgtggatcgacggcgaaccgaatcgcctgctgtttcagggcgttcagcgcctctacagcgccgactgggaccgaccatggggcgatgagcggccgcacagtacccttgtctttatcggcatcaatctaccggaaaaagaaattcgcgcggcgtttgccagcttgcgcaaatag

SEQ ID NO: 254789 - DNA, 1371 bp, Klebsiella pneumoniae
atggcttatcagacggtgaatcctgccaataatcagcttatcaaagcgtatccggcacacagcgatgctgacgtggaagcggcgctgcaaaaggcggatgcgctttatcattcgcagtgggccaaggaaaatattgaccaacggctaccgatcctgcacaagctggcggacctgatcgacagccgggttgaagagctggccaaaatcgccagccaggagatgggtaagcttatcgagcaaagccgcggtgaggtcaaactgtgcgcgcaaattgcccgctactacgccgataacgcaaaacagtttctggcgccggtaaaatatccgtcagaactgggtgaagcctgggtcgaacaccatcccatcggcgtactgatggcggtagagccgtggaacttcccttattatcagctgatgcgcgtgctggcgccgaacctggcggcagggaacccggtgatcgccaaacatgccagcatcgtcccgcactgtgcggaaaccttcgctcagctggttcgtgaggccggcgcgccagagggcgcatggactaacctgttcatttctcaggatcaggtagcgaagattatcgccgacgatcgcgtacagggtgcggccctgaccggctcggaaaaagccggtggcgtggtagcggcgcaggcggctaaacacattaagaaagcgacgcttgaactgggcggcaacgatgtatttgtcgttctcgacgatgccgatctggagaaagcggtgaagaccggcgtgcaggcgcggctcaataatgccgggcaggtgtgcaccgcggcgaaacgttttatcctgcatgaaaaaattgccgacgctttcctcagccagtttacgcaagccttccgcgaggtgaaaattggcgatccgctggacgaaagtaccacgctgggcccgctctcctcaaaagacgcgctggaaacgttaaccaaacaggtggacgaggcggtgaaaaatggcgcgaaactgcatctgggcggcaaacctgcgcagcgagaaggcagctttttcgagcccaccatactgaccggcattacccgcgataatccggcttattttgaagagttcttcggtccggtcgcgcaaatctacgtggtgaaagatgacgatgaggcggtgaagctggccaacgattcgcattacggcctcggcggagccgtgttcagccaggatatcgacagggcgaaacgcatggcttcgcggattgaaaccgggatggtctatatcaactggttaaccgataccgcgccggagctgccgtttggcggcgttaagcgctccgggttcggccgcgagctttccgatcttgggattaaagagtttgtgaatcagaagctggtggtggttcgccgctaa

SEQ ID NO: 254790 - DNA, 939 bp, Klebsiella pneumoniae
atggaaaaggggactacgtccacgccgcacgatgcggtattcaaacagtttctacgtcatgctgacaccgcgcgggacttccttgatatccatctgccgccagcgctacgaaaaatgtgcgacctggatacgttaacgcttgcgtccggtagctttattgaagagaacctgcgggcatactactccgatgttctgtgggcgctgaaaactgccgcgggagaaggctatatctatgtggtcatcgaacatcaaagctccccggatgcgtttatggccttcagactcatgcgttatgctattgccgcgatgcagcgccatctggattacgggcataaaacgctgccgctggtgatcccgatactgttttatcatggcgtcgctacgccatacccctggtcgttatcctggctcgacatgttcgccgacccagccctggcgaaacagctttataccgggccatttccgctggtggatattaccgtcgtacctgatgacgaaattgtgcagcatcgaagagtcgccctgctggagctgatgcaaaaacatattcgtcagcgcgatctgctgggtattgtggagcatctgacggccattttgcttaatgggtacgctaatgacaggcagctgaaaacgctgtttaattatctgattcactcgggcaaagcgcttcggttaggtaagttcatccgcgaagtggcccagcgggtaccgcagcacaaggagaagctaatgactatcgccgaaaggttacgtgaagtggggcgcaggcaggggaagcgggaaggccttgagaaaggtcgtctggagggggttgaagaggggcagcgcgccgaagcgctgcgtatcgcccaaacgatgctcgacgaaggtatggcgttggagacggtgctaagaattaccggtttgccggaggcggcgcttgcggtcaggcatcattag

SEQ ID NO: 254791 - DNA, 816 bp, Klebsiella pneumoniae
gtgagccatacgcgcgacattcagcaaactttctggcgtgacgaacagcttccctggctggagctgcgcagcacatggcttagccgccaggcctataaacggcatcgtcatccgcagctctccattggggcgattatcgagggggaaacgcgctgtatctgcagcgggcaggagtatctgctgcgccctggcgacctgattgttatccccgcgcaggcaccccacagctgtaatccgcgcgacggccagccgcgcagctaccatatgctctatctcgagctaagctggtgctggcaacagctgacagacggtgtgcatcaggcaaggttgatcacatcatcgcccgtcattcgcgatgccgggctctttgcgcagtatctgcagatcgtggcgcagatgaggcagcagcagaccatgcagctccctgcaagcgtcgcccgtctggttcatgccttaccgctgcgtccgcatgcgcctcaggcgctaagcgagaccagcgcccgtcttttcagccgcctggcaaccgatctgcaggcgccgccgacgctggatagcctcgccgacgagtttgcgctgcgtaaagagacgctgatccgcaccttcaagcaggagaccggcctgacgcccgccagttttatcaatatcgcgcgtattgaattcgctaaaacgcgcctgcgcgcaggggataatattgccgatgtgggctaccaggccggatttgccgatcagagtcactttcataaaacctttgtcagctataccgccgccacgcctcgccagtatgcgcagtcccgatcaataacagacaataattag

SEQ ID NO: 254792 - DNA, 663 bp, Klebsiella pneumoniae
atggacatactcgctacgctctttccctccgccttccccgcgctggcgctttctcattttgtcgccctgctgagccccgggccggatttttttctgctggtgggctacgccatccgttatcgcctgcgcggcagcgtcggcctgtgtatcggcattgccgccggaaacggtctgtatattattctggcagtaatcggctgggggatcctgcgccacgcgccgctgctgtttacggtgattgagctgctgggcgcggcgtatttactgtggattggcagcctgctgctaagaagccgtccgaccacgctggcgctggatggcgcctcggtttcgcgcccgtcgctggtgaaacagctttttctcgggctgggttcttcgctgctcaatccgaaaaacgccctgttctacctcgcgctgatgacctccctgttgggaccgaacgtcacgctggtgcagcaggccgtcagcggggcatggatgaccagcgtggtgttgatatgggatctgttgctggtcacgctgattgcgctaccgtcggtgcagcgccgcctttccgccgtcgtctggcgagtcgagcgcacggccggcggcgtattgatggcttttggttgttggattgtgtggcagtttttgcacgagttcgccgtcaggctatatgcttag

SEQ ID NO: 254793 - DNA, 1290 bp, Klebsiella pneumoniae
atgcttagacctatggaaaaactcgctgaactgaaacgcgccaagctgctggcgctctcgctgctgctgattgcagtcgccatttttatcactaccctcgtgctgccgccgacgccatgggtcggtgcgctaaaggctatttccgaagcggcgatggtgggcgcgctggcggactggttcgcggtggtcgcgctgtttcgccgcattcccctgccgttcgtgtcgcgacatacggcaattatcccgcgtaataaagaccgaattgccgacaatctcggctatttcgtgcaggaaaaatttctcgatacgccctcgctggtcgcgctgatccgccgctacgaaccggcgctgatgctcggcaactggttcagccagccggaaaacgcgcgtcgggtcggccagcatctgctgcaggtgatgagcggctttctggagcttaccgacgacgcgcgcattcagcgcctgctgcgtcgggcggtgcataaagcgattgataaggtcgatttaacccaaaccagcgccatgatgctggaaggattgacgcgcgataaccgccatcagaaactgctggattcgctgattagccagctgatcgccctgctccagcgcgacagctcgcgggcgtttattgcccgcggtatcgtgcactggctggagaccgagcatccgcttaaagccaggctactgcctaccgaatggctgggcgagcacagcgctgaaatggttaccgatgcggttaacacgctgctcgacgaagtcagtcaggatcgcgctcatcagatccgccaggccttcgatcgcgcggcgctcaagctgatcgataacctgaagtccgatccgcagatggcggaaaaagcggacagtatcaaagcgtatctgaaaaacgatgagacgtttaaccgctatctgggcgaagtgtgggccgacctgcgcggttgggtcaaaaacgacgtcaatagcgaggattcacgcattaaacagcgcattgccgaagccgggcagtggtttggcgaaacgctgctccacgatgaggcgctgcgcgaatcgctgaacgaacatctcgagcaggcggcgcaccgggtggcaccggagtttgccaccttcctgacgcgccatatcagcgatacggtcaaaagctgggattcccgcgatatgtcgcggcaaatcgaactgaatatcgggaaggatctgcagtttatccgtattaacggcacgctggttggcggcaccatcggtctgctgctgtggctgttttcacaaattccgtcgctgctgcatttacatatttaa

SEQ ID NO: 254794 - DNA, 1245 bp, Klebsiella pneumoniae
atgttgcaatggatgacccgttttttcgcccgccattccgccacgctgttcttcccggcggcgctgatcctgtatgactttgccgcctatctgaccaccgaccttattcaaccggggattatccacgttgtgcgcgattttgacgccgacgtggcgctggctcccgcctcggtcagtctgtatatggctggcggcatggcgctacagtggctgctcgggccgctctccgatcgtatcggccgccgtccggtgctgctcaccggcgcgctgatctttaccctggcctgcgtagcgaccctgttcaccacctcaatggagcagttcctcgcggcgcgctttgttcagggcaccagcatctgctttatcgccacggtcggctacgtcaccgtgcaggaggcattcggccagacaaaagccattaaactgatggcgattattacctcgatcgtgctgatcgcgccaataattggcccgctctccggcgcggcgctgatgcacttcgtgcactggaaagtgctgttcgggattattgccgtcatggggtttatcgcctggctggggctgctgctgaacatgccggagaccgtccggcgcggcgacgtccccttcagcgccagcggcgtgctgcgcgatttccgcgatgttttccgcaaccgcgtttttctgttcggcgccgccacgctctcgctcagctatattccactgatgagctgggttgcggtctcgccggttatcctgattgacgacggcggactgaccaccgccgagtttgcctggacccaggtaccggtcttcagcgcagtgattattgccaacctgtcggtagcgcgctgggtcaaagaccctacccgcccgcgctttatctggcgcgcggtgcccatccagatgaccgggctggcgatcctgatcctcggcaacctgctgtggccgcacgtctggctgtggtcggtaatcggcacctgcttttacgctttcggcattggcctgatcttcccgacgctgttccgctttaccctgttttccaacaatctgccaaagggcaccgtttccgcgtcgctgaatatcgtgatcctcagcgtcagcgcactttctatcgaagcggcgcgctggctgtggtttagcggcggcaggctgccgttccatctgctgggggtaacggcagggatcgcggccgcgtgctgtctggcggggctgttaagccggatacgccagcgtcccgaagccatgctggcacagcaggagtag

SEQ ID NO: 254795 - DNA, 627 bp, Klebsiella pneumoniae
atgtcaccggatgtggctaagacagtgattgaatatctcgagtcgtttgacgatgttgacctgaaaatcaaagcgattaacgagctgaagagtctgatccaccagcacagcccgttctgccgcgagccggtggactgcgtgctgtgggttgaagccaaaacggttgaggcgaatgactacaatcctaacgtgatggcgacggtggaaaaaaagcttctggaacgatctatcgaactggatggttttacccaaccggtagtggtggctcgccagcagcgacggcacctggtggtggatggttttcatcgccacctgattgggaagagccgcccggagctgagccggcgtctgcatggttatctcccggtgacgcttatcaatgccgagcgcgaggggcagaaagagcgtatcgccgccactattcgccataatcgcgccaggggtaaacatcagatcgcggcgatgtccgatatcgtccgcgatttacatcgtcagggctgggacgatcggcgcatcggcgaagagctcggtatggatgctgatgaggtgctgcgtctgaaacagatcagcggcctgacggagctgtttgccgacgagagctttagcgaagcctggaccgtggagtag

SEQ ID NO: 254796 - DNA, 1212 bp, Klebsiella pneumoniae
atgaaacgcgtaaaactggatatgaatgtttttgacgctgctctgatgcgcctggattgggtatttgataccttcgagcaggtctgtttatctttttccggcggtaaagattcaacggtattatttcatctggcggcagccgttgcgcgtaaaaaagggaaaaaatttgcggtgctgttcgtggactgggaggcgcagtatttattaaccatccagcacgtgcaaaatatgaaagagcgctatcaggatgtggtgagccgcttctattgggtggcgctgccgatgacgacggtgagcggcgtatcgcagcatgagccggaatgggtcgcctggcgggccggggttgaatgggtcaggcagccgcccgaggatgccatcaccgatgccggtttttttcctttttatcagccggaaatgacctttgaagcgtttattccggccttttcccactggctggccgcggggagaagtcttgcttcgcttatcggcatccgcaccgacgagtcgctgcatcgctacctggcgcttacctcgcagaccaaactgcgctttgaggacgataagccgtggacgaccgcctcgccggagggattcagctatacctgctatcccctttatgactggcggacccgcgacatttggatctttaatcataagtcacgactcccctacaacccgctttatgacctgatgcatcgcgccggggtgccgctaaaaaatatgcgcgtctgcgaacccttcggccccgagcagcggcgtgggctgtggctgtatcacattcttgagccggagacctgggagcggatgtgccgacgcgtatgcggcgcgcacagcggtgcgatttatgccaacgccagcggcgactactttgcgctgaagaccaaaatccgcaaaccggcgcattttagctggcgcgagtacgcgctctttctgctcgacagcatgccggaaaaaaccgccgagcattaccgtaataaaatcgctatttatctgcactggtaccagacccgcgggtttcccgacgatatccccgatgagcaggaaaaagatctcggctatcgcgatatcccttcatggcgccgcatctgtaagacgctgctgaaaaacgatttctggtgccggatgctgtcgttcagcccgacgcagcctaagcactatgagcgctactgtcgactgatgagtaacaaacgtaaagagtggaggacgctctga

SEQ ID NO: 254797 - DNA, 240 bp, Klebsiella pneumoniae; identical to SEQ ID NO: 176416

SEQ ID NO: 254798 - DNA, 768 bp, Klebsiella pneumoniae
gtgacagttaccgtagggattgattccggatcgaccgccaccaaaggcatcctgctcgacgacggcgtgattcagcgccgctttctctgcccgacgccgtttcgccccgccgacgccatcgttgaggcgtgggaaacgctccgcgctgggctaagcgagcccccctttttaaccttaaccggctacggacgccagctggtggatttcgccgataagcaggtcaccgagatctcgtgccacggactcggcgcacgcctgctggccccgcagactcgcacggtcatcgacatcggcggccaggacagtaaggttatccagctggacgaggcgggtaatctgactgatttcctgatgaatgataaatgcgcggcgggcaccgggcgcttcctggaggtgatttcgcgtacgcttggggccagcgtcgagcagctcaacagcatcaccgatggtattgagccccatgcgattaccagcatgtgtacggtatttgccgaatcggaggtcattagcctgcgttcggccggggtgccgccggaggcgatcctcgccggggtgatcaacgccatggcccgacgcagcgccaattttatcggccgtctgtcggcgcagggcccgctgctgtttaccggcggcgtcagccactgcgcggccttcgcgcggaggctggaggggcacgtgggtatggaggtacagacgcatcccgacgcgcagtttgccggggcgatcggcgcggcgctgatcggtttacgtcagaggagccgccggtga

SEQ ID NO: 254799 - DNA, 249 bp, Klebsiella pneumoniae
gtgacggaatatctgtttttatttcactcaacggtgggagtggtgcgaatgcgcaaagccctgcaggcggcgggcatgaccttccgggtgaaggatattccgcgccagctgcgcggcggctgcgggctttgcatttatctgagctgtgagccgggcgaagagcagaggtggattctccccggccagacggaagctctgtttcgcgtggccggggatgattatcagctgctggctcagtttccgcagtag

SEQ ID NO: 254800 - DNA, 1104 bp, Klebsiella pneumoniae
gtgtcgcgaactttagagcatttcaattatctgcaccaaattcctgaactgggctttgaggagtacaaaacgtcggcatacatcggcgatgcattagaagccgcggggtttcaggtgcagcgcaacgtcggcggtaccaccggcattgttgcgctgctggatagcggtaagccggggccggtcgtggcgctgcgggcggatatggatgcgctgggccatatgattgatggccgcctggaggctcgccatacctgtggccatgacgggcactcttcggtggtgttgaccgccgcggaagagatcctcgccgaggggctggtaaaacgcgggaagctgaaaatactctttcagcctgccgaagagctgggtacaggggcgatcgcgctgacggaagcgggcgtgctggacgacgtggagatgctgttcggcttccacctcaggccgctggaggagtgtccgaagggcaaggcggcgccggcgatgtactactccgcctcggcgacggtgatggccgactttcacggcaaagccgcgcatgccgcccggcctcatctgggcgttaacgcgctggatgccgcgtcgcacgcggtgcaggcggtaaacggcattcatctggcgccttcgctgacctggagcgcaaaagcgactcgcttcctgtgcgatgcgggggtaaccaactcggtgccggcgaaagcgcacgtgtgctgggatctgcgtagcgcggaaaatgacggtatggcgatgctgaaagagcgggtggtacgggcgatagagagcagcgcagccgcttacggcgccaccgtcgatatccagatcgtcaaggagatgcctgccgcgattatcgatgaacaggccacggctatcgtcagccaggcgattcgggaaacgtttggcgaagccggcttaacggcagcgaagagtacgccgggcagcgaggactttttccactacctgcgcctgcgtccacaggtgaagggcgggttctgggggctgggctgcgacctgctgccggggctgcatcatccggagatgcacttcgatcgcgccgcgctggcggatggcgtgcgggtgtttaaatcctgcattcgccagctgctgggatga

SEQ ID NO: 254801 - DNA, 468 bp, Klebsiella pneumoniae
atgaataattcggcaaaagtctccagtaacccgttcgatattttcgttatcggcgcgcgtaaaggatttaatatcgccatcaacaatctgatgccgaatgtattaatggcttacgtgatcgccgagatgctgaatttgctcggcgtgatgcagataatcggccacgtctgcgcgccgctgatgggcctgttcggcctgccgggcgaagcgattaccgtgctgctgacctcctggctttccgcctcggcgggaaccggcgtggcggtgagcctgttgagcaaaggcaccctcaacgtggcggatatcacaattctgatcccggcgattttccttatggggtcgcagcttcagtacatggggcgcctgctcggcgtggcggatgtcccgaaaaaatattggccgctgctgatggcggtgagcattatcaatgccgtcatcgccatgctggtcatgcgcgtgattgcataa

SEQ ID NO: 254802 - DNA, 684 bp, Klebsiella pneumoniae
atgagtgaaaataaaacgttggaatgttcctccgacgaaacgacaaatgagtggaaagtcgggcccggggcctggatttcactggtcatcgtattattagttttctccgggctgctgtttaaagtggaggggatggcctggctgggggcatttgactttaccactctcggcggtgcgttcggcaccatgaaaacgccggaaaccaacacctttatcggcagcggcggcatcagcgccaaggccggttttctgtttgcgctatcgctggtgcccacggttatgctggcgctggggctgctggagatatttacccattacggcgcgattcgcgccgcgcacaaactgctgaccccactgctgcgcccgctgcttgggatcccgggttataccggactggcgctgattaccgatttacagagtaccgatgctggtgctgcgctaaccaaagagctgtatgacagcaagaaaataaatcgtaaggatctggtcattatgggggcctggcaatattccggcgccggcctgataaataactatttctcgattggttcagcgcttttcgcttcgttaaccattcctatcattattccgctgctattaatgtttgtgctgaaattcgtcggcgcggcaatcacccgtctggtactgaatactgcttataaaggcgattttgaaaatgaataa

SEQ ID NO: 254803 - DNA, 915 bp, Klebsiella pneumoniae
atgttgcatgagaggcctatgagctatctgtatgaagtcgggattcagggaggcattcgccgggccgccgatatgctgggcatcaacccgtcagtcatcagccgccagatagcgcagctggaacgggcgctggagctgccgctgctggaacgccagggacgaaacgtggtgctcaccgaagcagggcgtctgctggcggaggactactacgaaagccgccagcgccgggaaaagctggaaagtcacctgaaggatttacgccatatgcgcggcgggacaatttcagtgaggattggcggcgggctggtcacgacctttattgaatcagtgatgagcaccttttctcagtcctggcctaacgtgttcgtggatattattgtcggcagcatgcaggagatgctcaacgatatcgccagcggcgaagcggatatggcggtcgccttcggccctatcggcaaccctgagcttaaacgccacagctttcagtggggccccatctgcgcggtggtctctcctgagcatcccatcgctgccctgcccgccgtcactatcgatgagctcacgcactatcgcctgatcgcgctcaccgacagctttggcctgcagcgccatatgaacgccatgtttaaaactgcaggacggcagtttcacccggcctatcgctgcaacctcttttcgaccgccatgagcctgagccaggcgggattaggcgtctcttttatgaccgcatacgccgcccgggaggcgatcgcccacggtattctgcgggcggttcctatcgaccatcctattgccagcagcgcccagtgccatctgctacgcaactccgatcgccgcttttccccggcggcgcatcatatgtggcggctgttgcataacgcttttcgcgatgcgcagcgggcgctggcggcctga

SEQ ID NO: 254804 - DNA, 1065 bp, Klebsiella pneumoniae
atgtctattaataccctggcgcgggtcttcaccccgcacggcaacatcgtctacacggcgaacgattttcgccagaccttgcgtatcgccgtggccggcactatcgcgctgagcatttccactttctatgacgtgcagtacggcgtcttctttgtggtttatccgctgatgctgttgtcgctggtgccggtgtttaaccgccacgtggcgcggcagtttgtgttcagtgcggcggtgaactgcgtcgaaatggtgttaatcgtcggctatttgtcgcagtggccggtcatcatgacgctggtggtgtttggcctgtacgtgatgcgctttcgctttatgagccatgggccgctgtttctgctggggtcgatgggcgtggtgtgtcaaagcacgatgctcaactttatgagctatcccaccagcaactggcacacgctgatgttctccaatatggaggcctgcgtgatggcggtggcgctcagcgcgctgctgaactacttcatcccggacgttgaaccgcgcaagccgccgccgcgcattgaaaaagatgccgcgcgtatccgccatgaatcactgctttccggcagcgtggcgacgatgatctttgtgatttttcaggtctgcgatctgagcgactcgctgtcggcgctgatggcgggcatcttaattctgttcccgatgcactatcgcggcgcggtgatcagctcgatctggcgcgtggtgggggtggtgctggcctgcctttatatcctggtggtgcagctgattatctacgacttcagcaaccatatggtgctgatgatgccgttgattgggctggggctggcgtttagcgcccggctgcacgtgatggagaaggtgggggcaggcgttggcttcgccagcatcaccactatcggcatcatgttcggccagaacctgcatccggaccaggacctggtgttcagcgatctgtaccgcattacctcggtgaccgtggcgctgatcgttacgctgaccatggtctttcttatgcatcggctgctgaactgctttgcgccaacccggttcgtggtgaccgaataa

SEQ ID NO: 254805 - DNA, 465 bp, Klebsiella pneumoniae
atgaccgaagacgacctgtttgcccgccgcccgatgggcatgcgcatggcgatggtggtgcgccagtggcgcgcgattattgattctgccatcaccgacaccggcctgacccagtcaagctggacggtgctgatgcagctgcatcagctgggggataacgtctcggtcagcgagctggcggaggtgcagggcattgaactgccgccgctgatgcgcaccctcacgcagctggaaaagcagggctatctgctgcgttcaacatcgccttatgacaaacgcatacgcctgctgacgctgacggcggaaggccgcgctattctggagaagctgaaccgcgtgattgaggcctatcaacagcgcgtcaccgaaaccctccctgaagcgcagctcgccgcctttagcgccacgttaaatcaaatcgcctgcaatctgcggactatccgcgaagaagataacaagatctaa

SEQ ID NO: 254806 - DNA, 165 bp, Klebsiella pneumoniae
atggaatttcacgagaatcgggcaagacagccgtttatcggcttcgtgtttctggcgcggataatcaaaaaatggtggcttcgtgaacaaacgcgcagaacattgcagcgtatgagcgacgaacagctaaaagatgtcgggttgcgtcgggatcagatcaattaa

SEQ ID NO: 254807 - DNA, 330 bp, Klebsiella pneumoniae
  misc_feature (295)..(304): n is a, c, g, or t
atgacccgctatcaacatctggccagcctgctggcagaacgcatcgaacaagggctgtatcgtcccggcgaaaagctgccgtcggtacgcagcctgagccaggaacacggcgtcagcatcagcaccgttcagcaggcctaccagacgctggaacagcagcagctgatcgtgccgcagccgcgatccggctatttcgtggctccgcgtaaagcccagccgccggtaccgccgatgtcgcgtccggtccagcgccccgtcgagatcacccagtgggatcaggtgctgaccatgctcnnnnnnnnnngatcacccagtgggatcaggtgctga

SEQ ID NO: 254808 - DNA, 1137 bp, Klebsiella pneumoniae
atgctcgacgcccgccacgataaatcgattatccccttcggcggcggctcgccggacgtcactcagccgagcctgaagcctatctggcgcgagctgagccgggcaattcagcacaaccttagcgaagtgctgaactacgacgagctggccgggcgtcgcgaactgcgcgaacagatcgctcgcctgatgctcgacggcggatcggtggtcaccgccaacgacctggtgctcaccagcggctgccacagcgcgctgtcgctggcgctgctgtcggtgtgccagcccggcgatatcgtcgccgtcgaatccccttgctactacggcaccatgcagatgctgcgcggattagggttaaaaaccatcgagatccccaccgatccggaaaccgggatcagcattgaggcgttagagctggcgctcgatcaatggccgatcaaaggggtgatcctggtccccaactgcaataatccgctggggtttatcatgccggatgcccgcaagcgggcggcgctatgcctcgcccagcgccacgatatcgttatctttgaggatgatatctacggtgagctggcgaccgaatacccgcgcccgcgcaccatccattcctgggatatcgacggccgggtgatgctctgcagttcgtttactaaaaccatcgctcccggcctgcgcatcggctggattgcccccggccgttattacgatcgtctgctgcagatgaagtatgccgccagcggcaccaacgttccctccacccagctggcggcctgtaattttattcgcgaaggccactatcaccgccacgtgcggcggatgcggcagatctatcagcataatatggaaatttacacctgctggctgcgggagtttttcccgtgcgggatctgcgttacccgcccgaaaggcggctttatgctgtgggtcgagctgccggagcaggtggatatggtctgcgtcgcgaagcagctgtgccggcttaagatccaggtcgcgccgggatcgctgttttcagcatccgggaaataccgcaactgcttaaggatcaactgcgccctgccgccgatagagaagcataaagaggtgatggtgcagctgggcatggcggtcaaggtggcgatggagtgggcaccggagtga

SEQ ID NO: 254809 - DNA, 537 bp, Klebsiella pneumoniae
atgcgcctgctgcagacgctgctggaagaagagtggcccgatcgcgcgattattttcgccaataccaagcatcgctgtgaagatatctggggtcacctggcggcggacggccatcgcgttggcctgttaaccggcgacgtcgcgcagaaaaaacgtctgcgtattcttgacgaatttacccgcggcgatatcgatattctggtcgcaaccgacgtagctgctcgcggtctgcatattccagccgtgacgcacgtctttaactacgatctgccggacgattgcgaagactacgttcaccgtattggccgtaccggccgcgctggcgccagcggtcactccatcagcctggcctgtgaagagtacgcgctgaaccttccggcgattgaaacctatattggtcattcgattccggtgagcaaatacaattcggacgcgctcatgactgacctgcctaagccgctgcgcctcacgcgcccgcgtccgggcaacggcccgcgccgcaacggtccgccacgtaatcgtcgtcgttcaggttaa

SEQ ID NO: 254810 - DNA, 1509 bp, Klebsiella pneumoniae
atgaagtgtatgagttccacctcgctctatgccgctatcgatctgggatctaatagctttcatatgctggttgtacgcgaggtggccggaagcatccagaccctgagtcgcatcaaacgcaaagtacgtctggccgcaggcctgaacagcgacaacacgctttctgtggaagctatggaacgcggctggcaatgtttacgcctgtttgccgagcgtttgcaggatattcctccggcgcaaacccgcgtggtggctaccgcgacgctgcggctggcggtgaacgccggcgagtttctggagaaagcgcgggacattctcggctgcccggtgcaggttatcagcggtgaagaggaagcacgcctgatttatcagggtgtggcccatactaccggcggtgcagatcagcgtctggttgtggatattggcggcgccagtaccgaactggttaccggcaccggtgcgcaaacgacctcgcttttcagcctgtcgatgggctgtgtgacctggctggaacgctactttgccgatcgcagcctgaccaaagagaactttagccaggccgaaaccgctgcgcgtgaagtgctgcgccccgtcgccgatgttctgcgctaccacggttggaaagtgtgcgtcggcgcatccggcaccgtgcaggcgttacaggaaatcatgatggcgcaggggatggatgaacgcatcaccttagccaagctacagcagctcaaacagcgcgcgattcagtgcggacgtctggaagagctcgaaattgaaggcctgacgcttgaacgcgcgctcgtctttcctagcggcctggcgattctgattgccattttcagcgagctcaatattcagtgcatgactctcgcgggcggggcgctgcgcgaaggcctcgtttacggcatgctgcatctgtcggtcgatcaggatattcgcagccgtacgttacgcaatattcagcgccggtttttggtagataccgagcaggcacagcgcgttgctcagttagccgcccatttcgctcatcaggtagaaaagagctgggaaattgagccgttatgctttgatttgctgcaaagcgcctgccagttgcatgaaatcggtttgagcgtggagtacaaacaggcgccgctgcacgccgcctggctggtgcgcaacctggacctgcccggctttacccccgcgcaaaagaagctgctggcgacgttgctgttaaaccaaaccaacgccgtcgatctttcttccattcatcaacagaacgcggtgccgccgagagtcgctgagcatatgtgccgtctgctgcgcctggctattttatttgccaaccgccgacgcgacgatctgctgccaatgatgacgctggccgctgaagatgagcgcctgacgctgaccctgccgcagggatggctggaaaaccatcctctgggtcgggaaatggtcgagcaggagtgccagtggcagagctacgttcactggccgctgcagattatcgaggatagcgcagcaatatag

SEQ ID NO: 254811 - DNA, 921 bp, Klebsiella pneumoniae
atgcgagaagaactggacttcaaatcgctgcgttttttttccgccctcttccgtctgggcaatgtctctcccgccgccgaagcgcttaatatcagccagccgaccggcagcttattgttgaaaaaacttcgcgagcatttcgacgatcccctgtttgtgcgaatcggacagcgtatggtgcccacgccgcgcgcagatgatattgctcagaccgtttttactattcttcaactggtcgataaccagctccctggcaaccctgaatttaacccccaaaccagcacacgtaatttcactatcggcatgactgatatcagccagatgacgttgttgccgccgttgcaggcacagctacagcagcttaacgccgaaggcattactatttcggtgctgaatatcgacgatcaaacattgggcgcgcttgagtctgggaagtgcgatttagctataggctatcttaggcagctaccggataacatttaccagcagcgcctgtttgatcaatcctacgtatgcctgacagcagaaaaccatccgcggatccgagccgcgtttaccgccgagaactggcgacaggaaaagcatctggccgttcacgtcaacgggaccgggcatggcgatatcgatagattacttaacgagtacggtatgccgcgacgcatcgccctcactcttcccagctttttaggcgcaggcgagctggttgcgggcagtgaattgattgccgtcgtccccgagcagctggcaaatcatattattactcgctatccctgctgcagctggccgctgccattttcgctgccggaaattgctattcgccaggtctggcatcagcgtctgcaccgcgatcccgggcacatctggttgcggtcgctgatcgtaaacttacccacaaccggcagtagcaaaattccctattaa

SEQ ID NO: 254812 - DNA, 999 bp, Klebsiella pneumoniae
atgcgtggaaaaatcgcgttagaagaacacgtttcaacacctaaaaacaacagcctttgggactctgcgggtgaagcctcaagaaacggttcagaatatatgatggacgttgagcgccgcttattagatcgtagctatcaactggatgaaatggcccagagaaatatcgaccatgttattctttctctaacttcccctggcgcccaatctattttggataaagccacagccgtatcttttgcgcgcgaaaccaacgactacatcatcgagaattatgttaaacctaatccggataaatttagcgcattcgctactctggcactacaaaaccccgaagctgcggccgaagaactggagcgtgcggtaaaaaaattgggcatgaaaggcgcgctgattaacggttacaccaacttcaaggataacgagcacggtctgtacctggatgatgaatcaatgctggtattctgggataaagtcaacgaactgaacgttcccgtttatctgcatccgcgtgagcccttagaaggcccggcgcgcggcatctacaccggttatgaaagcctgatcggatccgcctggggctttgcccaggaaaccgcggttcatgcgattcgcctgatgatgagcgggttgttcgatcgctatcccaacctgaatctggtgttgggtcacttaggcgaaggcctggttcatatgctgccacgcacccaacaccgtctctatcgtcagcgtttcggctgcggcctgggcaaagcagaaaaaccgttaatgcactatttgcagaataactttatcgtcaccaccagcggccattttaatacctactctctgcaaaatgcgctagctattatgggtccggatcgcgtgatgttctccgtcgattatccgtatgaagatattcatcaggcctgtgattggttcgatcctctggaaatggatagtgaactgaagaataaaatcgcctggggtaatgccagccgcgtatttaacattaaataa

SEQ ID NO: 254813 - DNA, 789 bp, Klebsiella pneumoniae
atgatgtcgcaaccgttgcttgagtatataaaagggcgtctgaatgcagaggcccccgcgccgctttatattcaacttaaacaagccattgaagcggcaatgacggagcggctgctgacgcacggcagtattttgccctccgaacgtaaaatgtcgcagacgcttgagctctcgcgcgtgacggtggtgaaggcgctggatgccctgctggaagccgggctggtgattaagcgtcacggaaagggtaccgaggtcaatttgccggtaagctataaccttgccagcgggggattttctgcccagctgcaaaattcggggacggtatctaaccgatggctggtgagggaaaaactggcggcggatgattttttggctcgtgaactggagatcgccgtcggcgatcgggtggcgaaaataaaacgcgtgcgtttagtcgatgcgcttccggtctccatcgaaaccatgtttattcccgagcgttttttaccccgtccggatctgcttgaagggtcgctgtacgcgcactgggcggaaaataatatttttcccgatctccaggactactcactcacggtacatatcccttccggcgaagaactgaatttgctcgacctgccgcaaggcgtgccattgatgaaaattacgctgaaaagtcgtaatgctcagggagaggtgcttgagtacggtactgcattttgcctgagcaattactttaactttgatttccgggtgaaactccagtctgcgtctggcggtaaaccgggcagcgctcacaaaaaagacgcgtaa

SEQ ID NO: 254814 - DNA, 1017 bp, Klebsiella pneumoniae
atgtctgatattcgccctactaataccgccgaaagccgcatccttggctgtctttacgggcaagccatcggtgatgcgatgggcatgccttccgaactgtggcctaaacgccgcattatcaatcactttggttggattgaacgcttccttcctggaccgaaagagaatattgcggcctgcgaatttcacgccgcagagtttaccgatgacacccatcagtgcatcgcactaatggatgccctgaatgataccaacggtgtgaccgatccactggctattgccaggcatattctgctatgggccagacgctgccaggcttttgaaaaaaatattctcggcccaacctcgaaggcctccctgctggcgcttgaacaggggcaagcgctcgatgagatcgcggccaacggcgtgaccaacggtgcggcaatgcgcgtggcgcccatgggctgtctgctgccgacccggaataaggcatttttcattgagcaagttcgcctctcctgcctgccgacgcacaaatcagatatcgccatcgccggcgcggtagttatcgcctgggcgatcagtcgcgccattgaaggagccggatggctgttaattaaaacggagctggcatcgctcgccaatgaaacccagcgccagtatgagtccacttttagtccacttctcggtaaccgaattaatctcgcgctgaccacgatcgccagcgaaaccgaccatctgacaggaattgaacgtatttatgaggatatcggcgccggaatggatattatcgagtctgtccccgcggcgattgcgctggtcgagctggcaaaaacgcagcctatgaaatgcgctatgctggcggccaatttaggcggcgacaccgacacgataggcgcgatggcaaccgccatctgcggcgcgcttcatggcatagaggcgtttcctgaggaacatatccaacagattaatcgggccaatagcatagacttcgcgccttacgcacagcggcttgcaggataccgcttcgcttaa

SEQ ID NO: 254815 - DNA, 1416 bp, Klebsiella pneumoniae
atggacagcaaagcttcatacgatggaaatatccagacagcagatcccggaatggcggagttggggattgatctggtccccccggtccaccagacccaaaaaccgatccagctatttttcgtctggtgcgccgcaaacatcggcattcttggcgtcgtttacggcgcagtcattgtatcgttcggcctctccttctggcagtcgattcttgccgccgtggcgggcgtcgcctcctttgcgctggtcggcgtcaccagtatcgccggaaaaatcggccgcaccacgacgctgacactttcacgcgtcatttttggcaagcgcggcaacattgcacctaccagcttctgctgggtaaacctgatgggctgggagtcggtcaatatcattaccggtacgctcaccctcgttgcgctgtttgccgccatgggttttgaagagagcctgaccaccaccgcgctgtcgctttttctgtttggcggcctgaccgtgctggttagcgtgctcggccaaaatgccgtgctgatgatgcaaaagtggatcacccgtatctttggcgccatgacgctgctggtcgtcatttatctgctcttcaccgcggactggcaggccatcctcgcgctgccgtcaggtagctggctgacaggctttctaccggcggtctctattattgccgcgggcaccggcatcagctgggcgatcgccggcgccgactatagccgcgatcagcgccctgactccggcgaaaaggggattttcctcgccgttgtcagcggcgcagcccttcccctgctgctgctaatgctgaccggaatactgctcaccgcccaaatccccgatctggcctccagcgaaaaccccatttcagcgatcggtaaactgctgccttcatggatggcaatcccctatctggctgcagctaccgccggggttgtgactatcgccgtgctgagtctctattccgccagccttaacctgttaagcatgggaattaaactgcagcagcgttccgccgtagccattgatgccgtgctggttctggggatcgccctctacgtgctgtttgtctcgaaagattttctcgggccgttcatcgcgtttctgattttctgcggcgtatttcttgccgcctgggccgccatctttatggtcgatttttatcggatgcgccgccgtgtcggctattctgaagctgatttgttcagagaaagcggtgccaaccgtaccgcgctgggctgctggattgtcggcgcgctggcggggttgatggtctctaaaaccgggtttatcgacggacctttcgcggtcggcattttcgcggactccagcctcgggttattcgtctcttttattctgagcctggtgctctatcttgtcttcggaccaaaaaagggggacagccgtgacaatcagcgctga

SEQ ID NO: 254816 - DNA, 963 bp, Klebsiella pneumoniae
gtgacaatcagcgctgaccagctatcgccgcggcggccgatcgtggtgatcggcgccgcttttggcgacataattctccatctcgatgcgctgccgcaaagcggtagcgatgtccccgcgcgcgacggcggacggcagattggcggctgcgcgtttaacgtcgcccgtgcgctctcgcgcctcgagttgtttcccgttaacgccataccggtaggcaatggcgactgggggcaggccgttgcgcaaaaaatggcgctggaaaacttgcccgtcctcttgcgtcatcccacccacgataacggctggtgtctggctcttgttgaagccgacaaagagcggacgtttatcaccattgagggctgcgaacagcactggactgatgaactattagcgcaaataccgctgccgaatgacgcgattatttacgtctcgggctacgaactggccagcgaagcgctgcgccagtggctccttgcccaggcagaagataaaacgctgtttgtcgattttggcccacgcctgggcgatctggatattcgctttattcaggcgctgctgcgcaaacgccccgttctcacccttaatcgcgatgaacttagggtgctatgcgcgcgtttatacgatcgggatggcgccacgcttgacgacgccactcggctcgccagcgactggcagctacgagcaatttgtcggtttgataaggatggcgcgtgggtggttgaacctgacgcgcaaccgcagcatattccggcctaccgtgtacaggttcacgacacgattgccgcaggagacagccactgtgccggtactatcgccgggctggcctgcgggatggatctgcggcaggcaacgcggctgggcaatcaagtggcggccattgtcgtcagcaaacctggttcagacggcgctccgaatcgcgaagagctacgccagttccagcgtcgagagggcaacggccgctag

SEQ ID NO: 254817 - DNA, 2019 bp, Klebsiella pneumoniae
atgcgtttaaaccctggccaacaacaagccgtcgaattcgttaccggaccgtgcctggtgctggcgggtgccggttccggtaagacccgcgttattaccaataaaatcgcccacctgatccgcggctgcggctatcaggcgcgccatattgcggcagtcacctttaccaataaggcggcgcgcgaaatgaaagagcgcgtcgggcaaacgctggggcgcaaagaggcgcgcgggctgatgatttccaccttccacacgctggggctggacattatcaagcgcgaatacgccgcgttagggatgaaatcaaacttctcgctgttcgacgataccgaccaggtcgcgctgttaaaagagctcaccgaggggctgatcgaagacgataaagtggtgcttcagcagctgatctccacgatctccaactggaaaaacgatctgaaaacaccttctcaggccgccgccggcgcgaaaggggagcgggatcggatcttcgctcactgctacggcctgtacgatgcgcacatgaaagcctgcaacgtactcgatttcgacgatctgatcctcctgccaacgctgctgctgcagcgtaacgaagaggtgcgggaacgctggcagaataagatccgttatctgctggtggatgaataccaggacaccaataccagccagtacgagctggtaaaactgctggtgggacagcgggcgcgctttaccgtggtcggcgatgacgatcagtcgatctactcctggcgcggcgcgcggccgcagaatctggtactgctaagccaggatttcccggcgctgcaggtgatcaagctggagcaaaactatcgctcatcagggcgcatcctgaaggcggcgaacatcctgatcgccaataatccgcacgttttcgagaagcgcctgttttccgaactgggctatggcgtagagctgaaggtgctctccgccaataacgaagaccatgaggcggagcgcgttgccggtgaactcatcgctcatcactttattaataaaaccgcctataaggactacgcgatcttgtatcgcggcaaccatcagtcgcgggtttttgaaaagatgctgatgcagaaccgcatcccgtacaaaatttccggcggcacgtcgttcttttcccgcccggaaattaaagacctgctggcctatctgcgcgtgctgactaaccctgatgatgacagcgccttcatgcgcatcgtcaatacgccaaagcgcgagatcggttcggcgaccctgaaaaagttgggcgaatgggcgatgggacgcaataaaagcatgtttaccgccagcttcgatatggggttgacccagacgctgagcggacgcggctacgagtctttgacccgcttcacccactggctgcgtgagattcaacagctttccgagcgcgagccgattgcggctgtccgcgatctgatccgcggcgtggattatgaatcctggctttatgagacctcgcccagcccgaaagccgccgagatgcggatgaaaaacgtcaatacgctgttcacgtggatgaccgaaatgctcgaaggcagcgagatcgatgaaccgatgacgcttacccaggtcgttacccgctttaccctccgcgacatgatggagcgcggcgagtcggatgaggagacggatcaggtgcagctaatgacgcttcacgcgtcaaaggggctggagtttccctacgtctatctggttggtatggaagaggggctgctgccgcaccagagcagcattgatgaagacaacgtcgatgaagagcgtcgccttgcctacgttggtatcacccgcgcgcagaaagagctgacttttaccctgtgcaaagagcgccgtcagtacggcgaactcgtgcggccagagccgagccgttttctgctggaactgccgcaggatgatctgatttgggagcaggagcgcaaagttatttcgccggaagagcgcatgcataaagggcaagcgaacgtcgccaacatccgggcgatgctggcgaaagcgcgtaaatag

SEQ ID NO: 254818 - DNA, 729 bp, Klebsiella pneumoniae
atggacttttttagcattaacaatgtgatggtcaatattcctctcggcgaaggcggctatgcgctatcgtggattgaagccatcggtaccgtattcggcctgctgtgcatctggtgcgccagccgggaaaaaatcatcaattatctgtttggcctgattaacgtcacgctgtttgcggccattttcttccagattcagctctatgccagcctgctgctgcaggtatttttcttcgccgccaacatttacggctggtacgcatggagccggcaaaacgaggcgcaggaagctacgctcaaggttcgctggctttcccgtcagcaaacgctggcgctgggcgccgtttgcgcggtggcgatcgtgctgatgacgctgtttatcgatccggtgtttgcgatgctgacccgcatcatgattgccctgctgcaaacgttcggcatgcaggtggcgatgcccgacctccagcccgacgccttcccgttctgggattccaccatgctggtgttgtcaattgccgccatggtactgatgacgcgtaagtttgtcgaaaactggctgctgtgggtcgttatcgacgtgattagcgtggttatctacgcggtacagggcgtttacgcaatgtcgcttgagtatgttctgctgacggctatcgcggtcatgggctcatacagctggatcaagagcgcgcagcgtaatggctatgcgccgcttgccgccgccggatcctga

SEQ ID NO: 254819 - DNA, 750 bp, Klebsiella pneumoniae
atgtcgctgcaaccccatatccagttaaacaaagagatgaccggcgcgcggtacgcgctgctgccgggcgacccccagagggtcgaccgtatcgtcagttttcttgataatcccgagccgctcggtcagaaccgggagtttcgcgccgcacgcggctggtatcagggcgtggaaattttggtgctctccaccggaatcggcggcccctccactgcgatcgccattgaagagctgcgccagatcggcgttacgaccctgattcgtatcggcagctgcggcgccctgcaggataatcttgcgctcggcgacgtaattatcgcccacggcgcggttatggatgacggcacaagccgaacctatgcgccggcaggctatccggcctgcgccgatccgcagctgacctgggagctgatggcgcaggcgcggcaaatgaatatccccgccgcgtgcggactggtgcgcagccatgacagtttttataccgatcgcgaggcggagctggatgcacagtggtcggcgctcggcattctgggggcggatatggaaagcgccgccctgatgaccatcggcgcgctgcgcgggttacgtacagcctcattgctcaacgtagtggttgcccacaacggttgcctggatagcagcatcaatgattatgtccagcaggaggctctgtgccagcagggcgaagaacggcaaattaccctggcgctgcgcgccatttattccgctagccagcaaggaggtttatga

SEQ ID NO: 254820 - DNA, 705 bp, Klebsiella pneumoniae
atggatacaatgaaaaaaactgaattttcagttggctggctttcggggctgagtgagatcgtgagcgatccacagctctatgaattactaaaatattgtcccctcgagatcatgcagcgctggtgcttcgaagagatcccgcgcggcgattttatctgtcgacagggggaggtgtgtcagcgcttttcgctgattatcgccggtgaggtggatgttttctacgaggctgaagatgggcgccgctatcgccaggcccgctaccgaaaaggcgatatggtgggcgagctcgagatctttgagtcgcgtcagtacatctgctcggtggcggcggtgggacatgtgcagcttctcagcctgtcacaggaatatttctgccgctggctggcgttagataaccattttaaccagcggatgctgcgcttctttagccagcaatattaccagctgtcgaaaaaggccagcagcgacaatctttattcgttgcatcagcgggtgtgccaggccctatggctgcgttatcagcaggatggcgccaatgaaatcttgctggataagcagaatctcagccaggaatttgcggcgacgacccgcagtattaaccgtattttgcatgatctgaaagcgctacaaattattgataccgatggtgaacgcattgtgttgttagctcctgaaaaacttaaacaggaggctgatatcggataa

SEQ ID NO: 254821 - DNA, 282 bp, Klebsiella pneumoniae
atggcaaaaagcgcagcagccctgcacatcctggttaaagaagagaaactggcgcacgagatcctcgccaaactggaacgtggcgtcagcttcgatcacctggcaaagcgctattcgaaatgtccatcaggacgcaacggcggcgatcttggggagtttaatcaaggcgttatggtcgggccgtttgataaagcggtcttcagctgcccgctgctcaagccatatggaccggtcaaaaccaagttcggctaccacatcattaaggtgctctatcgccgctag

SEQ ID NO: 254822 - DNA, 282 bp, Klebsiella pneumoniae; identical to SEQ ID NO: 176537

SEQ ID NO: 254823 - DNA, 1476 bp, Klebsiella pneumoniae
atggctaactactttaatacactgaacctgcgccagcagctggcgcagctgggcaaatgtcgctttatgggtcgcgacgaattcgccgatggcgcaagctaccttcagggtaaaaaagtggtcatcgtcggctgtggcgctcagggtctgaaccagggcctgaacatgcgcgactccggtctcgatatctcctacgcgctgcgtaaagaagcgatcgccgagaaacgcgcatcgtggcgtaaagcgaccgaaaacggcttcaaagtgggtacctacgaagagctgatcccgcaggctgacctggtggttaacctgacgccggacaaacagcactctgacgttgtgcgttccgttcagccgctgatgaaagacggcgcggcgctgggctactctcacggtttcaacatcgtggaagtgggtgagcagatccgtaaggatatcaccgttgtgatggtagcgccgaagtgtccgggtaccgaagtgcgcgaagagtacaaacgtggttttggcgtaccgactctgatcgcggttcacccggaaaacgatccgaaaggcgaaggcatggccatcgctaaagcctgggctgcggccaccggcggtcaccgtgcgggcgttctggagtcttccttcgtggcggaagtgaaatccgacctgatgggcgagcagaccattctgtgcggtatgctgcaggctggctctctgctgtgcttcgacaagctggtggaagaaggtaccgacccggcatacgctgagaaactgattcagttcggctgggaaaccatcaccgaagcgctgaagcagggcggtatcaccctgatgatggatcgcctgtctaacccggctaagctgcgtgcttatgcgctgtccgaacagctgaaagagattatggcgccgctgttccagaaacatatggatgacatcatctccggtgaattctcctccggtatgatggctgactgggccaacgacgataaaaaactgctgacctggcgtgaagagaccggtaaaaccgcgttcgaaaccgcgccgcagtttgaaggtaaaatcggcgagcaggagtacttcgataaaggcgttctgatgatcgcgatggtgaaagcaggcgttgagctggcgttcgaaaccatggtcgattccggcatcatcgaagagtccgcttactatgaatcgctgcacgagctgccgctgatcgccaacaccatcgcccgtaagcgcctgtacgaaatgaacgtggttatctccgataccgcagaatacggtaactacctgttctcttacgcttgcgtaccgctgctgaaagagttcatgactaccctgcagaccggcgacctgggcaaagcgattgccgaaggcgcggtagataacgctcagctgcgcgacgtgaatgaagctattcgcagccacgctatcgagcaggttggtaagaaactgcgcggctatatgaccgatatgaaacgtattgcggtagcgggctaa

SEQ ID NO: 254824 - DNA, 891 bp, Klebsiella pneumoniae
gtggatttacgcgatctaaaaaccttcctgcatctggcggaaagccgccattttggccgcagcgcgcgggcaatgcacgtcagcccttccacgctgtcccggcaaattcagcgcctggaagaagacctcgggcagccgctgtttgtccgcgataaccgcacggtaacgcttaccgaagcgggagaagagctacgaacgtttgcccagcagacgctgctgcagtatcagcaactgcgccacactatcgatcagcaagggccgtcgctgtcgggggagctgcatatcttctgctcggtaaccgccgcctacagccacctgcctcccatactcgatcgctttcgcgccgagcacccttcggtggaaattaagctcaccaccggcgatgccgccgatgcgatggagaaagtggtgacgggtgaagccgatctggcaatagccggtaagccagaaacgcttcccggcgcggtggccttcgcaatgctggaaaatctggcggtggtgctaatcgccccggcgctgccttgtccggtccgcaaccaggtctcggtggagaagcctgactgggcaacggtaccctttatcatggccgaccagggccccgtgcgccgccgcattgagctgtggtttcgtcgccataaaatcagtaatccatcaatttacgcgacggtgggcggacatgaagccatggtatccatggtggcgctcggctgcggcgtcgcgctgctgccggaagtggtgctggaaaatagcccggagccggtgcgcaatcgcgtaatgattctggagcgtagcgacgaaaaaaccccttttgagctgggcgtctgcgcgcccaaaaagcgactgcatgaaccgctgattaatgcgttctgggaaatcgttcaaacaaaataa

SEQ ID NO: 254825 - DNA, 390 bp, Klebsiella pneumoniae; identical to SEQ ID NO: 176540

SEQ ID NO: 254826 - DNA, 930 bp, Klebsiella pneumoniae
atgacgacgaaaaaagctgattacatttggttcaatggcgagatggttccgtggggagaggcgaaagttcacgtgatgtcccatgcgctgcactacgggacttccgtatttgaaggcatccgttgctacgactctcacaaggggccggttgtgttccgtcaccgtgaacatatgcagcgtctgcatgactcagccaaaatttatcgtttcccggtttcgcaaagcgttgatgagctgatggaagcctgccgtgaagtcattcgtaaaaacaatctgaccagcgcctatattcgcccgttagtttttgtcggcgacgtgggcatgggcgtcaacccgcctccgggctataacactgacgtgatcatcgcggcgttcccgtggggcgcctacctgggtgccgaagctctggatcaggggatcgatgcgatggtttcttcctggaatcgcgcagcgccgaacaccattccgaccgcggccaaagccggcggtaactatctctcttcgctgctggtcggcagcgaagcgcgtcgtcatggctatcaggaaggtatcgcgctggacgtgaacggctatatctctgaaggcgccggtgaaaacctgtttgaagtgaaggatggcgtgctgtttaccccgccgttcacctcctccgcgctgccgggcatcacccgcgacgcgatcatcaaactggcgaaagagctgggtctggaagtgcgcgaacaggtattgtctcgcgagtcgctgtatctggccgatgaagtatttatgtccggcacggctgcagagattacgccggtgcgcagcgttgatggtattcaggtgggcgaaggacgctgcggcccggtcaccaaacgcattcagcaagcattctttggcctctttaccggtaaaaccgaggataaatggggctggttggatcaggttaataactaa

SEQ ID NO: 254827 - DNA, 258 bp, Klebsiella pneumoniae; identical to SEQ ID NO: 176544

SEQ ID NO: 254828 - DNA, 1647 bp, Klebsiella pneumoniae
atgaatggggcgcggtgggtggtacatgctttgcgagcacagggtgtcgatactgtttttggctatccgggtggcgcaattatgccggtttacgatgcattgtatgacggcggcgtggaacacttactgtgccggcatgaacaaggcgcagccatggcggctatcggctatgcccgggctactggcaaaaccggcgtatgtattgcgacgtcaggaccgggcgcaactaacctgatcaccggcctcgccgacgcgctgttggactccgttcccgtcgttgccatcaccggccaggttgccgctccgttcattggtactgatgcattccaggaagtggatgttctcggattatcgctggcatgcactaagcatagttttctggtgcagtcgctggaagagctgccgcgcgtcattgccgaagcattccatgtggcaaactcagggcgccccggcccggtactggtcgatatccccaaagacattcagctggctcagggcgatctcgatccgcatttctccatggtagccgatgacgttgacttcccatatgcggatatcgaatacgctttgcagatgttgactcaggcgcagaagccgatgctctacgttggcggtggcgtaggtatggcgcaggcggtaccggcgctgcgtgaatttcttgccgtcacgcagatgccggcaacgtctaccctgaaagggctgggcgtggtggcagctgattatccatactatctgggcatgctggggatgcatggaactaaagcggccaatctggcggtgcaggagtgcgatctgttgattgccgtaggcgctcgctttgacgatcgcgttaccggcaagctgaatacgttcgccccgcacgccaaagttatccatatggatatcgatccggcagaactgaacaagctccgtcaggcgcatattggcctgactggcgacttgaacgtgatgctgccggcgttgcaacagccgctgtccatcgatgcctggcgtcaacgtaatgctcagctgcgcgccgagcacgcatggcgctacgatcatccgggcgaggccatctatgctccattgctgctgaagcagctttccgagcgcaaaccagcagattgcgtcgtgaccaccgatgtgggccagcatcagatgtggtcagcgcagcatatgacctatacgcgtccggagaatttcatcacttccagtggattagggaccatgggctttggcctgccggcagcagtgggcgcgcaggtggcccgtcctgatgatacggtaatctgtatctccggtgacggctccttcatgatgaacgtgcaggagctgggcaccgtaaaacgcaagcagttgccgctgaagatagtgttactggataaccagcgtttaggaatggttcgacaatggcagcagctgtttttccaggaacgttatagcgaaaccacccttaccgataatcccgattttcttactctggccagcgccttcggcattcctggtcaacacatcacccgtaaagaccaggttgaagcggcactcgacaccatgctttcgagccaggggccttacctgcttcatgtctcaatcgacgaacttgagaacgtctggccgttggtgccgcccggtgccagtaatgcagaaatgctggagaaattatcatga

SEQ ID NO: 254829 - DNA, 1521 bp, Klebsiella pneumoniae
atgtcactcgccattgtttacacccgcgccgctcttgggatcggcgccccccttatcacagttgaagttcatatcagcaacggactccctggcctgacgatggtagggttgcctgaaacaacggtcagagaagcgcgtgaccgggtacgtagtgcgattatcaacagcggctacgcctggccggcgaaaaaaatcaccatcaatctggcgccagccgatttgccaaaagaagggggaagatatgatttacctatcgctctcgcgcttctggtggcctctgagcagctaaatgctcccaggctaaatcagtacgagtttgtcggcgagctggcgcttacaggcgctctacgtggcgttcctggggctatatccagcgcgatggaggcgataagagcgggcagaaagattattgtctctcatgagaattctcctgaggtgggtttaatcggcggcagtgactgtcttatcgccgcccatcttcaggaggtctgcgcctttctggagggaaaaaacccgctaaatcatcctattccggaagcggagacctcagatgagtcttcattagacttgcgcgaggttattggtcagcagcaaggaaagcgagcgctggaaattatcgctgcaggcggacataacctgctgatgataggcccacccggcacagggaaaacgatgcttgcgagtcggctgcctgggctactaccgccgctgagtaaccaggaagcgctggaaagcgcggcaatacttagcctggtcaattccagttatgcgatgaaaaactggcgccgcaggccatttcgagctccgcatcatagcgcgtccctggctgcgatggtgggtggcggctctattccaacaccgggagagatctctctcgctcataatggcgtgctgttcctggatgagctgcccgaatttgaacgcagggttctggatgcattaagagaaccgattgaatccggggtaatccatatctcccgcacgcgcgcgaaaatcgattatcccgcccgttttcagcttattgcagcaatgaatcccagccccacgggccattatcagggtcagcataatcgcgcatctccagaacagacgctacgctacctggcccgtttatctggcccatttcttgaccgtttcgatctctcactggaaattcctctgccgccgccgggggtgcttagccggggaacaaacgaagaagagagcagcgcctgcgtacgccaacgcgttttggctgcgcacgaaaggcaactgtcacgacagaaaaaactcaatgcaaatctggggaataatgagatgaaaatctggtgccagcttcatcaagatgacgcaatctggctggagcagacgcttacgcaactggggctctcaatccgggcctggcagcgcctgcttaaagtttcacgcacgattgccgatattgagaaggtcgatcgtattgaacgccgtcatttgcaggaggctcttggctatcgggcaatagacagaatgttgagccatctgcaaaaaatgatgacgtaa

SEQ ID NO: 254830 - DNA, 339 bp, Klebsiella pneumoniae
atggcggaaagctttacgacaactaatcgttttttcgacaataaaaattatccgcgcgggttttcccgtcatggagatttcaccatcaaagaggcgcaactgctggaacgtcatggttatgcctttaatgaactcgaactaggtaaacgcgagcctgtcaccgacgatgaaaaacagtttgtttcggtctgccgtggtgaacgtgagcccgcaacggaagcagaacgcgtctggatcaagtacatggcgcgcattaagcgtccgaagcgtttccatactctttccggcggcaagccgcaggtggaaggtacggaagattacacggaaagcgatgattaa

SEQ ID NO: 254831 - DNA, 297 bp, Klebsiella pneumoniae
atgaaaggcattaagaaatacttccagatcttcactgccagcgtgcaaaaatttggtcacatctttattcagcagcagttcacgcatcggttcccagtcggtgataaccagagggtcaatcagcgagacctggttgccgtcgaacagctggagcagaccgagctgcgggtagtaggtacgagtacggacaaattccgtatccagcgcgatggcagaaaccgcgcttgccgcttcacagacggcgcgaaggccatcgttggtggtgatcatctgatagttcaaatcatactctcttaa

SEQ ID NO: 254832 - DNA, 585 bp, Klebsiella pneumoniae; identical to SEQ ID NO: 175437

SEQ ID NO: 254833 - DNA, 696 bp, Klebsiella pneumoniae
atgcgaattttagctatcgataccgccacggaggcctgctccgcggcgctgtggaatgatggcaccctcagtgctcattttgaaatctgcccccgcgaacatacccaacgtatcctgcctctggtgcaggatgtcctcaatgaaagcggcacgctattaaccgagcttgacgcgctggcctttggccgtgggccgggcagcttcaccggcgtgcgcattggtatcgggattgcgcaggggctggcgctgggggccgagctgccgatgatcggcgtgtccacgctggcaaccatggcgcagggcgcatggcgaaaaaccggcgccacccgcgtgctggccgccatcgacgccagaatgggcgaagtttactgggcggaatatcagcgcgatgaacagggcgtctggcacggcgaagagagtgaagcggtgctgaagccggaagcggttcgcgagcgtctgcagcagctggagggcgagtgggctaccgtcggcaccggctggcaggcgtggccggatatggctaccggctgcggcttaacgcttgccgacggcgaaattgagcttcctgacgcgcaggatatgctgccgctggcttgccatctgtttacggtgggaaaaaccgtggccgttgaacacgctgaaccagtttatttacgcaatgaagtggcgtggaagaaacttcctggccgcgagtga

SEQ ID NO: 254834 - DNA, 1911 bp, Klebsiella pneumoniae
gtgatcgacgattttgcagcagacggccagctggccagcgcgattgccggatttaagccgcgcgagccgcagcgccagatggctttcgccgtcgccagtgcaattgaagaaactcgtccgctggtggtggaggcgggcaccgggaccgggaaaacctacgcctacctggcgcctgcgctacgcgccaacaagaaagtcattatttccaccggctcgaaagcgttacaggatcagctctacagtcgggatttacccactgtcgctaaagcgctgaacttcaccggtaaactggccctgctgaaagggcgttcgaactacctgtgcctggagcgtctggaacagcaggcgctcgccggtggcgacctgccggtgcaaaccctcagcgatgtcattctgctgcgctcgtggtctaaccagaccgtcgatggcgatatcagcacctgcgttagcgtggccgaagattcccaggcctggccgctggtcaccagtaccaacgataactgcctcggcagcgactgccccttatataaagactgttttgtggtgaaagcgcggaaaaaggcgatggatgctgacgtggtcgtcgtcaatcatcatctgttcctcgccgatatggtggtcaaagagagcggctttgccgaactgattccggaagcggaagtgatgatcttcgatgaagcgcatcagctgccggatattgccagccagtacttcggccagtcgctctccagccgccagctgatggacctggcgaaagatattactattgcttatcgcaccgaacttaaagacacccagcagctgcagaagtgcgccgaccgcctggcccagagcacgcaggattttcgtctgcagctgggggagcccggctatcgcggcaacctgcgcgagctgctggcggataacaatattcagcgcgcgctgctgctgcttgatgatgcgctcgaactctgttacgacgtggcaaagctgtcgctgggccgctcggcgctgctcgatgccgcttttgagcgggccaccgtataccgaggccgcctgaagcggttaaaagagaccaatcagcccggctttagctactggtatgagtgtacttcccgcaacttcaccctggcgctgaccccgctgacggtggcggataagtttaaagaggtgatggcgcaaaagtccgggagctggatcttcacctcggcgacgctatcggtcaatgacgatttgcaccactttaccgatcgtctgggcataggcgacgcgcaaacgctgctgctccctagccccttcgattatgcccaccaggcgctgctgtgcgtgccgcgcaatttgccgttaccgaaccagcccggcgccgcgcgacatctggcggcgatgctcaaaccgctgattgaagccaacgacgggcgctgctttatgctctgcacttcgcacgccatgatgcgcgacctggcggaacagtttcgcgccaccatgacgctgccggttctcctgcagggagaaaccagcaaaggccagcttttacagcaattcgtcagcgccggaaatgcgctgctggtggcgaccagtagcttctgggaaggggtggacgtgcgcggcgatgcgctttctctggtgattatcgacaagctgccgttcacctcgccggacgatccgctgctgaaagcgcggatggaggattgtcgcctgcgcggcggtgatccttttgatgaggtccagctaccggacgccgtcatcaccctcaaacagggcgtggggcgtctgattcgcgacatcgacgatcgcggggtcctggttatctgcgacaaccgtttggttatgcgcccctatggcgccgtcttcctcgcgagccttccgcctgcgccgcgcacgcgcgatatccgtcgggcggtgcgttttcttgcggtgccgtcggcgaggtaa

SEQ ID NO: 254835 - DNA, 345 bp, Klebsiella pneumoniae
atgaccattacgcgtattgatgccgaagcccgctggtctgatgtggtgattcataaccagacgctgtactacaccggcgtaccgtccaacctcgatgccgatgcctgcgcgcaaaccgctgatactctggcgcagatcgatgcggtgctggagaaacagggcagcagcaaatcacgtattcttgatgcgactattttcctcgccgacggtgcagactttgcggcgatgaatcaggcctgggatgcatgggtcgtcagcggtcatgcgccggtacgctgtaccgtacaggcgaaactgatgaatccgaagtataaagtcgagataaaaatcatcgccgcagtgtaa

SEQ ID NO: 254836 - DNA, 840 bp, Klebsiella pneumoniae
atgttaagtaaacgttgggatacagcagggcgctggtgcatttacgcgctgctgctgattgtcttcgtcgggccgttctggggcatcgtggccacggccttcagcggtgcgccggtgaagccgggcgagctgctggcctggccgaatcagttctcgctggaaaacttcatctttgcgtggatggatatcggcgtctggcagtacctgctgaactctatcctggtggtgttcttcggcaccgttctacaggtgtcggtcagcgcgttggcggcgtatgccctggcgcggaaaaagtttcgcggcgtggcgctggtgagcctggtgattttgtccaccatgatgctgccggaagaggtcatcgccattccgctgtacatgattattaactggcgactgccgctgatcgatgcctcgctctacaacagctacctcgggatgattttgccggtggttggctgggctttctccatctttgtcctgaccgaatttatgtcggcgataccgaaagagctggaagaggcggcgcggatagacggcgccaacgaatggcagattttcttccatgtgattctgccgctggtgaaaccggcgctcggtacggtagtgacgttcggcttcattatgatttgggaccagtacctgctgccgctgattgtggttaaccaggacagcctgaatactattccggtgatcctcggcacgctgcgtaccgatgagagcatcacgccgaacatttttatcgctattacgctgctggcgatgctccccagcatcatcgtctatctgggtctgcaaaaacatttcaaccgcgggattatgtccggcgcagtcaaaggataa

SEQ ID NO: 254837 - DNA, 2013 bp, Klebsiella pneumoniae
atgaaacaattttctggactctggcccgacattgccagacgtgcagccggcgatagcggtctgcttgaacggctggtgcaggaagcgcaaccgcagcttgacgcggcggcgctcattccacaaacggggatcgccagctggaacctctactatttttgcccccatcacggcgtgcggctgacgtggcgggcggatatgcctcatcgccactcctgcccggttgatggcgaaattttcagcggtgagccgtgggacggcgcatggtggcgagaaataaacggtcgtaacgccagcgcctgtcagcagcttggtctgatatggcggctgaccggcgaaacggcgtatcgcgataaagttcgcacgctgctgatgggttacgctgacgtctatcccggctatcaaattcacggtgatattcccaacaacggaccggggaagatgaacgcccagacgctgtgcgaagccaactgtattctggagatggcgctgggttatgactttattcgcgacggcttaacctccgccgaagagcggcatattcgcgacaacctgctgcgctgcgcggcaacgtttctatgcgagcaccgcactgcgcagattcataatcacgaagtcaaaattagcgcggcgcttggcgttctcggtttcgttctcgaagatgagagcctgctggaattcgccgttaaccagccttacggcctgcgctggcagctggaaaagggcctgctggcggaggggctatggtttgaaggttcgattcactaccactactacgcgctgcagggcttttttgcctttgaaaaactggcgcgcggcactcgctggagcctgctggatggcccctggtatcagccgatgctgaagttcccgctgtcgctgctgctgccggacggaaccttccctcgcctcaacgactgcctcgcaggacaagaaaagctgcgacaccgggatctgtacgaattcgcctggtttatctggcgtgacccgctctacgccgccgtgctgcagtttattgaaacggaacctgatgtccgcgagaccttgctgtggcgcaaccagccgctgcctgaaacgacgcaggcgctcattcctcagcaatcgctgtttgcgccaggggcggggctcactctctggcggcgaccgcagcaggcgctgctgataaagcacagtccctggggcggcgaacacgatcattacgacaggctggggctgatgctctggcatcacgacggctggctgctcccggatatgggcacaaccggctacggcgcgaaaatgcactacgactactacaaaaacagcgccacccataatacgctttccgtcaatcagaccaaccagcctccggccaatccgcaggtatcaggctggcatatggatagcgacgctctgtggctggacagcgaggttgactggggcaagccgccgccggagctagacagtcatagccgcgtcgagtgggacgcgacggcctggcgagatgtgcgctttcgccgtcgcctgctatggcttgaagaggtgctgatcgatctctctaccgtagagaacccacatcgccagcagctcgactggactttgcacctggcggcgcaggcgctggatcagaacggcacgccgcagcccttttcgctcagcggaccgctgcggcatatggccaatgcaaccatggcgccgctgaacggctgccagccgcgccactttgcgcgcgacggcgataccgttgcgctctggctttccggtgatggtgaactctggcagggagtggcgcccgataacccggcgactcacgatctcagctatctggtcatacgcagtcacctgccgcaggcgcgttttgtctgcctgtgggattttgccaacagcgcaccgctgacggaagtgcaagtgaatcatacgccagtcgggacgcaaattaccttctggcgcggcgagcgcgtgacgcacgtgacgctttacgacgcccccgggaaacgacccgatgcgatctttccgttcgcggaaagcggcacctga

SEQ ID NO: 254838 - DNA, 180 bp, Klebsiella pneumoniae; identical to SEQ ID NO: 175448

SEQ ID NO: 254839 - DNA, 1356 bp, Klebsiella pneumoniae
atgttgtcccccgctatgatttccctgccctggcgtccggatgccgctgaatactattttagctccttaagttcccggccctgggcgatgctgctgcattccggctttgccgaacatccgcataatcgttttgatattgttgtcgcccagccgcgcgccacgctggtaacgcgtggccaaacgaccgtcatcaacgagggggaaaccgtcatcacctctgacgccgatccgctcacgctcgtgcatcagcagctggcgcgcttcaacctgcatccgcagcctcatccgcatctgccgtttctcggcggcgcgctggggctgttcggctacgatctgggccgccgctttgaatctctgccgtcacgagcggatgcggatatcgcgctgccggatatggcggtggggatctacgactgggcattgatcgtcgatcaccagcgtcgggaggtgtcgttattcagctatgacgatccacaggcgcgcctggcgtggctggaagcacaggctgagcctgtcgccgaaacctttaccctgacctcagcgtggcgctcaaatatgagccgcgaagagtatggcgagaagtttcgccagatccaggcctggctgcacagcggtgactgctatcaggtcaacctggcgcagcggtttacggcaagctatcgtggggatgagtggcaggccttccgtcagcttaaccgcgccaatcgcgcgccgttcagcgcctttattcgcctggatgaaggggcagtattaagcctatcgcccgagcgctttattcagctccggcaaggcgaaattcaaaccaggccgattaaggggacgctcccccggctgaccgaccctgagcaggacgcgctgcaggcgcaaaagctggcgaactcgccaaaagaccgcgccgaaaacctgatgatcgtcgatttaatgcgcaacgatattggccgggttgccgctcccggtagcgtccgggtgcccgaactgtttgtggtggagcccttccctgccgtgcatcacctggtgagcaccgttaccgccagattgccttcccatctgcacgccgccgacctgctgcgcgcggcctttcccggtggctcaattaccggcgcgccgaaggtcagagcgatggagatcatcgatgagctggagccgcagcggcgcaatgcgtggtgcggcagcatcggatatctcagcttctgcggcaatatggataccagcattaccatccgtacgctgacggcctggcaggggcagctttactgctccgccggaggcgggattgtcgccgatagcgatgaagcagcggaatatcaggaaacttttgataaagttaatcgtatcctgcagcaactggagagctaa

SEQ ID NO: 254840 - DNA, 579 bp, Klebsiella pneumoniae
atggcggacagcgccctcgaacttgacgatttcctttcgcgttttcagcttctgcgcccgcagcccacgcgcagcgcgcttaaccagcgtcaggctgcggtactggtcccgattgtacgtcgcccgcagcctgggctgctgctaacccagcgttcgccgctgatgcgcaagcacgcgggtcaggtcgctttccccggcggcgcggtagataacagcgatgcgacgctgatcgccgccgcgctgcgcgaggcgcaggaagaggtcgcgatcccgccagagtcggttgaggtcatcggcgttctgccgccggtggatagcgtcaccggctttcaggtcaccccggtggtagggattattccacctgacctgcactatcatgccagccaggatgaagtcgctgcggtcttcgaaatgccgctggccgaagcgctgcggctgggacgctatcacccgctggatatccatcgccgcggcaattcgcatcgcgtctggctatcctggtaccagcattattttgtctggggaatgactgccggtattattcgcgagctggcgctgcagataggcgctcgtccttag

SEQ ID NO: 254841 - DNA, 1365 bp, Klebsiella pneumoniae
gtgattagtatattcgacatgttcaaggtggggatcggcccctcatcttcccacactgtagggccgatgaaggccggtaaacagttcgtcgatgacctggtcgaaaagggattgcttaatacagtgacgcgcgtggcggttgacgtctacggctcactgtcattaaccggcaaaggccaccatacggatatcgctattattatgggactggcgggcaatcagcccgatacggtcgatattgacgcgataccggcatttattcgcgacgttgaaacgcgcggacgcctgctgctggcgcaggggcagcatgaggtcgatttcccgcataatgacggcatgcgttttcgtagcgacaacctgccgctgcatgaaaacgggatgaccattcatgcctgggctggcgagaaagaaatctacagcaaaacctattactccatcggcggcggttttatcgtcgatgaagagcatttcggcaaagagagcgccagcgaactttccgtaccctatccgttcaaatccgcccaggagatgctgggctactgcaaagagaccggcatgtcgctgtccggcatggtgatgcagaacgagctggctctgcacagcaaaaaagagattgaagactattttgctaatatctggcagaccatgcgcgcctgcatcgaccgcggcatgaacaccgaaggcgtactgcctggcccgctgcgcgtgcctcgtcgcgcctcggcgctgcggcggatgctggttgccagcgataaactctccagcgacccgatgaacgtggtggactgggtcaatatgttcgcgctggcggtcaatgaagaaaacgccgccggtggccgcgtggtcacggcaccgactaacggcgcctgcggcatcgtgccggcggtactggcttactatgaccacttcatcgagtccgtcagcccggatatctatattcgttacttccttgcatctggcgctatcggtacgttgtataaaatgaacgcttccatttccggcgctgaggtcggctgccagggcgaagtcggcgtggcctgctcgatggccgctgcaggtctggcggaaatccttggcgccagccccgagcaggtctgcgtggcggcggaaatcggcatggaacacaaccttggtctcacctgcgatccggtggccggccaggtgcaggtaccgtgcattgaacgtaacgccatcgcttccgtcaaagccatcaacgccagtcggatggccatgcgccgcaccagcgaaccgcgcgtgtcgctggataaagtcattgaaacgatgtatgagaccggtaaggacatgaacgccaaataccgggaaacgtcgcgcggcggcctggcaatcaaagttcagtgcgactaa

SEQ ID NO: 254842 - DNA, 1563 bp, Klebsiella pneumoniae
atgcagactgcacaaaaagttatcacaacctatcgcaggaaacgcattctggtttgcttgctggtcgcgctacttacgctaacgacgacgttagtaatacgatttatttcgcagcgtagcctaaatcagcagcgcgtccagatcagcaccaataaaatggtgaccgccatggataatatcctgcggcctctggcggcacagcacgcccccctgctgcacctggtaaaccagccctgtcaggaaattcatctcacgttacgtaagctggcggcgtcgctacagacggtgcgatccatcgccctggtgcagtcgaaacagctgtactgctccagtatttttggccaacgaaatattccggtgcaccagttacagcccgccttgccgaccagtcacccgctgcttactttcagctacgactcctcgttgctcaagggaacgccggttctaatccagtggtatcccgcttcgcttagcggcgacgacggcgtgctgctggtgattaatatcgagctgctgggcgagttaattttcaatgcaaaatcggcgttaattaccggaattggcctcagcgtcggtgaaaaaagctttattagcggcaccgggctggtcgatcacgaaacgctgccaggcgagcaaatcatctatcgccagcattcgacggaatttcctttcacgattagcgtcagcgggccgggcgcctcagcggtcgccttcaatgagctaccgggcgaactgcccctggcgctgataatcagcctgttgatgaccggtattgcatggctggcgaccgcgggaagaatgagcttttcccgggaaattaaccttggtatcgccgcccatgagttcacgctttggtgccagcccctgcaggacttacgcacccgacaatgctgcggcgtggagattttgctgcgctggaataacccgcgcagaggcgctatttcgccggatgtctttatccccatcgccgaaggttataacctgatactgcccctgacccgctacgttatttcgcaaacggcccataaattagccctctttccgcaggataaacagtttcacatcagcattaacgtcgccgcccgccatttcgcgaatggcgaactgctgcgcgatctgcatcactactggtttagcgcccatccggtacagcagctggtggttgaactcaccgaacgcgacgtgctccaggatggcgatcaccatatggccgaacatctccattttaagggagtaaagctggccatcgacgatttcggcaccggcaacagctctctttcctggctggaaaaactgcgtcctgatgtgttgaagattgataagtctttcatcggcgcaattggtgtcgatagcgtcaacgcaacggtgaccgacatgatcatcgctctcgcccatcggctgaagatagtgatggtggcggaaggcgtcgagacccaggagcaggaagcctatctgcgcgacaacggcgtcgatttattgcagggatattattatgcccggcccatgccggtagaggactttccgcagtggctggcggcggaaaagcatcgggaaatgcggtaa

SEQ ID NO: 254843 - DNA, 795 bp, Klebsiella pneumoniae
atgggcggccgcaaacagagcgctgcggcacacgatagcgataacgcctcggtggtgccggtaccggaaggtgcgtttgcggaagaagaacgctatatgattaacggcgtgctgaccctggcccagcgttcgttgcgcagcattatgaccccgcgtggggaaataagctgggtgaacgccgagcaaagtgaagaagaaattcgccgtcagctgctctcttcgccgcacagcctgttcccggtatgtcgcggcgagttggatgaaatcattggtatcgtgcgcgcgaaagagatgctggtggcgctggaagccggtgaaaacgttgccgcactggcgtcggcttcgccggcgatcgtggtcccggaaaccctcgacccgattaacctgctgggcgtcctgcgccgggctcgcggtagctttgtcatcgtcaccaacgagtttggcgtggtgcagggtctggtgacgccgctggacgtactggaagcgattgccggtgagttcccggacgccgacgaaacgccggaaattatcattgatggcgacggctggctggtgaaaggttcaaccgatgtgcatgccttgcagcaggcggtaggcgtcgacgatctggtcgatgaggacgaagatattgcgacggttgccgggctggtcattgccgtcaacggccatattccgcgtcctggcgacgtactggaactgctgcccttgcagttcaccattgtggaagccaacgactatcgcgtcgatctggtacgcgtcgtcaagcagcgtcagtataacgacgaagaagagtaa

SEQ ID NO: 254844 - DNA, 777 bp, Klebsiella pneumoniae
  misc_feature (763)..(772): n is a, c, g, or t
atggaattcttaatggatccctctatttgggccggtttgctgacgcttgtcgtccttgaaatcgtattgggtatcgacaacctggtatttatcgccatccttgccgacaagctgccgccaaagcagcgggataaggcgcgcctgatcggcctttcgctggcgctgtttatgcgcctgggtctgctgtcggtcatttcgtggatggtgacgctcactaaaccgcttttcagcgttgccgatttctcgttttccggacgcgacctgatcatgctgctcggcgggatattcctgctgtttaaggcgaccactgaacttcatgaacggctggagaaccgccagcatgactccggtcatggtaaaggttatgccagcttctgggtggtcgtactgcaaatcgtggtactggacgccgtgttctcgctggatgccgtgattaccgcggtcgggatggttaaccatctgccggtgatgatggcggcggtggtgattgcgatggcggtgatgctgctggcctcgaaaccgttgactaatttcgtcaaccagcatccgacagtggtggtgctctgcctgagcttcctgctgatgatcggtctgagcctggtcgcggaaggttttggtttccatataccgaagggctacctgtacgccgcgattggcttctcgattaccatcgagttctttaaccagattgcgcgtcgtaactttattcgccaccagtcgacgctgcctctgcgcgcgcgtaccgccgatgcgattctgcgtnnnnnnnnnntctga

SEQ ID NO: 254845 - DNA, 969 bp, Klebsiella pneumoniae
gtgacgattgctattgtaataggcacacatggttgggctgcagaacagctgttaaaaacggcagaaatgctgctgggcgaacaggaaaacgttggttggatcgatttcgttcctggcgaaaacgcagaaacgttgatcgagaagtacaacgctcagttggcaaagctggatacagcaaaaggcgtgttatttctcgtcgatacatggggaggcagtccgtttaacgctgccagccgcattgtcgtcgataaagaacattatgaagtcatcgcgggcgttaatattccgatgctggtcgaaacgctgatggcgcgcgacgataacccgtcgttcgatgagctggttgccctggcggtggaaaccggtcgcgaaggcgtgaaggccctgaaagcgaagccggtggaaaaggccgcccctgctccggttcaggctgctgcaccgaaagcggctgcgccgctgaaaccaatgggtccaaacgactacatggttatcgggcttgcgcgtatcgatgaccgtttaatccacggtcaggtcgccacccgctggactaaagaaaccaacgtttcccgcattatcgtcgtcagcgacgaagttgcggcggatacggtacgtaaaacgctgctgactcaggttgctcctccgggcgttaccgcccacgttgtagacgtcgcgaaaatgatccgcgtctataacaaccccaaatacgcaggcgagcgcattatgctgctgttcactaacccaacggacgttgagcgcgtggttgaaggcggcgtgaaaatcaccagcgtcaacatcggcggtatggctttccgtcagggcaaaacgcaggtgaacaacgccatttcggtcgatgaaaaagatatcgaagcgttcaaaaagctgaacgcccgcggtatcgaactggaagcccgcaaagtttccaccgaccagaaactgaaaatgatggatctgatcgccaaggtgaaataa

SEQ ID NO: 254846 - DNA, 801 bp, Klebsiella pneumoniae
atggagattacctttcttcagattgtgctggtgttcatcgtcgcgtgtattgcgggtatggagtcggtacttgatgaatttcagttccaccgtcctctggtggcctgtacgctgattggcgccgttctcggggatatgaaaaccggtattattatcggcggtaccctggaaatgatcgccctgggctggatgaacatcggtgcggccgttgcgccggatgccgcccttgcatctattatctctaccgttctggttatcgccggccatcaaagcatcggtgccggtatcgcgctggccatcccgctggctgcggcaggccaggttctgaccattatcgttcgtaccatcaccgttgccttccagcacgcggcggataaggccgcggagaacggaaacctgacggccatatcctggctacacgtttcctctctgttcctgcaggccatgcgtatcgctattccggcggttatcgtggcgatttccgtgggcaccagcgaagtgcagggcatgctgaacgccattccagaagtggtcaccggcggtctgaacatcgcgggcggcatgatcgtggttgtcggttatgcgatggtcatcaacatgatgcgcgcaggctacctgatgccgttcttctatctgggctttgttaccgccgcgttcaccgatttcaacctggtcgctctgggtgtcattggtaccgtgatggcggtgctctacatccaactgagcccgaaatataaccgcgtagcgggtgcgcctgtgcaggctgctggtaataacgatctcgacaacgaactggactaa

SEQ ID NO: 254847 - DNA, 852 bp, Klebsiella pneumoniae
atggttgatatgactaaaaataccaccgagaaaaaactgactcagagtgatattcgtggcgtgttcattcgttctaacctgttccagggttcatggaacttcgaacgtatgcaggcgctgggcttctgcttctccatggtaccggctattcgtcgcctgtatccggagaacaacgatgcgcgtaaacaggcgattaaacgtcaccttgagttctttaacacccatccgtacgttgcagcgccggttctcggcgttacgctggcgatggaagagcagcgtgctaacggcgcagagattgacgatggtgctataaacggtatcaaagttggcctgatgggcccgctggctggcgtaggcgacccaatcttctggggtaccgttcgtccggtattcgccgcactcggcgccggtatcgcgatgagcggcagcctgctcgggcctctgctgttctttatcctgtttaacgcggtgcgtctgctgacccgttattacggcgtagcgtacggttaccgtaaaggtatcgacatcgttaaagatatgggcggcggcttcctgcagaaactgaccgagggggcgtctattctcggcctgtttgtcatgggggcgctggttaacaaatggacgcacgtcaacattccgctggtggtctccaccatcaccggtcaggatggccagacgcgcgtgaccaccgtgcaaactatccttgaccagctgatgccgggactggtgccgctgctgctgaccttcgcctgtatgtggctgctgcgtaagaaagttaacgccctgtggatcatcgttggcttcttcgtcatcggtattgcaggctacgcagtcggcctgctgggccagtaa

SEQ ID NO: 254848 - DNA, 459 bp, Klebsiella pneumoniae
atgacaatcacggacctggtgttaatcctgtttattcttgtactgttcgcgtttgcggtttacgaccagttcatcatgccgcgccgcaatggccccgttttgctggcaatccccctgctccgccgcaatcgcgtcgatggcattatcttcgtcggtcttattgccattctgatttataacaacatcgctaatcatggcgaacttatcaccacctggttattatctgccctggccttaatggggttatatcttttctggatccgttcgcccaaaatcatcttcaaaaagcagggcttttttttcgccaatatctggattgaatataagcgtattaaagagatgaatttatcagaagacggggtgctggtgatgcaattagaacaacgtcgcctgctgatccgcgtacgaaatatcgacgacctggaaaagatatacaaacttctcatttccactcaatga

SEQ ID NO: 254849 - DNA, 678 bp, Klebsiella pneumoniae
gtggtcctcgggccttccggctgcggtaaaaccacgctgctgaacctgattgccggattcgtgccttatcagcacggcagcatcactcttgaaggcaggcgggttgaagggccgggagccgatcgcggcgtggtctttcagaatgaagggctgctgccgtggcgcaacgtgcaggataacgtcgcgctcgggctacagctggcgggcgtcgacaaaacgcagcgccgggcaaccgccgcgcggatgctgaaaaaagtcggcctcgaaggggcggaaaagcgctttatctggcagctttccggcggccagcgtcagcgggtgggcattgcccgcgcgctggcggccaatccgcagctgctgcttctcgacgagccgtttggtgcgctggatgcctttacccgcgagcagatgcaaaccctgctgctcagcctgtggcatgagaccggcaagaaggtactgctgatcactcacgatatcgaagaggcggtgtttatggccaccgagctgatactgctttcgccggggccgggccgggtgctcgaacggctgccgctcgattttggccgccgctttgtggccggcgaatcctgccgcagcattaaatcggacccgcggtttatcgaacagcgcgagtacgtcctcagccgggtatttgaacaacgggaggctttctcatga

SEQ ID NO: 254850 - DNA, 828 bp, Klebsiella pneumoniae
atgagcgtggtcatcaatgataaaccgcgtcagcggaggctgaagtggcgctggccgttctcgcgtcagctcactctcagcgcggcgaccctggcggtactgctggctatctggtgggccgttgccgccctgcagctgattagcccgctgtttctgccgccgccggggcaggtattgcagaaacttatcactattgccggtccgcagggttttatggacgccaccctctggcagcacctggcggcgagcctgacgcgtatcgttatcgcgctgctggcggcggtactgctcggcgtgccggtcgggatcgccatggggctgagccccacggtacgcgggatcctcgacccgctgatcgagctttatcgcccggtgccgccgctggcctatttaccgctgatggtgatctggttcggcatcggcgagacctcgaagatcctgttgatctacctggcgatattcgcgccggtggcgatgtcggcgctggcgggcgtaaagagcgcccagcaggtgcgcattcgcgccgcgcaatctttaggggccagccaggcgcaggtgctgtggctggtgatcctgcccggcgcgctgccggagatcctcaccggcctgcgcattgggctcggcgtgggttggtcgacgctggtggccgcggagctgattgccgctacccgcgggttaggttttatggtgcagtccgccggtgagttcctcgccaccgacgtggtgctggccgggatcgcggtgattgccatcatcgcctttttactggaactggggctgcgcgcgctgcagcgtcgactgacgccctggcatggagaagtacaatga

SEQ ID NO: 254851 - DNA, 852 bp, Klebsiella pneumoniae
atgagcgaacgtttaagcattaccccgctggggccgtatattggcgcgcaggtatccggcgtcgatattacccgcccgctgagcgacaaccagtttgagcagctgtatcacgcggtgctgcgtcaccaggtggtgttcctgcgcgagcagaatatcactcccgaacagcagcgggatctcgccctgcgctttggcgacctgcatattcatccggtctatccgcacgcgcccggcgtcgatgagattatcgtgcttgatacccacgacgataacccgccggataacgataactggcacaccgatgtcaccttcattgagacgccgcccgccggggcgatcctcgcggcaaaagagctgccgtcaaccggcggcgacaccctgtggaccagcggcattgcggcctatgaggcgctctccgggcctttacgccagctgttaagcggcctgcacgcggagcatgattttcgcaaatcgtttcaggagtataaatatcgtaaaagcgaagaggagcatcagcgctggctggaggcggtcgcgaaaaatccgccgctgctacatccggtagtgcgtacccatccggtgaccggtaaacaggcgctgtttgtcaatgagggctttaccacccgcatcgttgacgtcacggagaaagagagcgaggcgctgctcggcttcctgtttgctcacgtcactaaaccggactttcaggtgcgctggcgctggcagccgaacgacgtggcgatttgggataaccgcgtcacccagcactacgccaacgccgattacctgccgcagcggcgcattatgcaccgggcgacgattctcggggacaagccgtattaccgggctggttaa

SEQ ID NO: 254852 - DNA, 1719 bp, Klebsiella pneumoniae
atgtttagtctcgacaatgtcatcgatgacctgtggcctcaggcaaagccagcgctctggcagaaaaaggtgctgaaaaagctcctgcatgaggaagagtttcagcagtttgccgcgcgtcatcatcacctgaaaggactggatacggtcgaacaggtgctcgaacatcttaatatccgctgcgctatcccggcgcacgatctcgaacaaatccccgaacatggtccgctggtcatcatcgccaaccaccccaccggtacacttgacggcctggccctgctctacgcggtgtcccgcgtgcgccgcgacgtcaaagtggtcaccaaccgcatgctgactcaccttgaaccgctgagctcgctgtttattccggtcgataatatcaatggccgcaccgccaaagcggcgttgcagcagatggaccagcagttgcaaaacggcggcgtgctgattttcttcccggccggcgaagtttcacgcctcacccggcgcggtattcgtgataaaaaatggcactccggatttattaagctggcggcgaaataccgcgccccgctgctgccagcgtggatccgcgcgcgcaacagcgcactgttttacgccagtaccctgatgtccgagaatctgccgttactgctgctgatgcagcaaatgttccgtcgccgcaacagcagcctgccggtgaatattggtcaacagataacctggtcaaactggttcaatccgcaaagctcttctcgggaactgaccgagcgctgctatcgccacctggagctactcggcaaagggctgccgggtatattcaaaaccgaaagcgctatcgcccgtcccgaagaccgcgccctgctcaagcgcgagctggggaaggctgaaacgctggggcgcacggcggatggtaaagtcatctatctctggcagcgccgcggccaggaagatgcgccgatactgcgcgagctgggccgtctgcgggaaatcgccttccgcgcggtgggggaaggcagcggcaaacgtcgcgacgttgacgtttatgacgacgactatctgcagctgattctgtgggatgaggaagatcttgagatcgtcggcgcttaccgttttatgccaaccgcaatacagctggaaaagcgcggcctgaacggcatctacagctacagcctgtttcattacgacgcgcgcatggacgatattctgcaacacggcattgaactgggtcgcagttttatccagccgcgttactggggccgccgcgggctggactacctgtggtccggcattggcgcgtatctggcgcgctatccgcactatcgctatctgttcggcccggtgtcgatttccggcgggttgccgccgtcggcgcgcgatctgctggtggctttttatcggctgtggttcccggcgacgcatccgctggcagagtcgcggcgtccttatccggcctcgctgcccgatgttctggcccagtttggcggagaagattacaacgacgacctggcgcagctaaagtccctgctcggcaacctcggttgcgcgatcccgccgctgtataagcagtactcggaagtctgcgagccgggcggcgtgcagtttatcgatttcggcagcgacccggatttcaacaactgcgtggatgggctggtgctggtggatttgacctatctgaaggccaaccgctatcagcgctatattggggtacatctggacgcgcaaaaatcggcataa

SEQ ID NO: 254853 - DNA, 492 bp, Klebsiella pneumoniae
atggtcgattatcgtcgttattacctcaagggtgggagctggtttttcaccgtcaatttacgcgacagagagagtcgatttctggttcagcatattgatgcgttacgacaggcggtggcaatagtccacaaacagaaaccttttcatattgatgcctgggtggtgctccccgaacaccttcattgcatctggaccttacctgacaacgacagcgattttccatcgcgctggagagcaattaaaaagcatttttcaggtttaacaggcgcgcataacgtgtggcaaccgagatattgggaacacgccattcgcaaccagaaggattaccgaagccatgttgattatatttatatcaatccgattaagcacgggtgggtaaggcaggtacgggattggccctattcaacctttcatcgcgatgtaagccgtagtttgtatcctgttgattggggtggggaggtgaaggaattattatgcggcgagcgttgttaa

SEQ ID NO: 254854 - DNA, 1170 bp, Klebsiella pneumoniae
atgctcccgttgaaacgtagtctgctcatttttgctgcgctgtgcgcggcgtcgttgacatcggtccaggccgcacagccgagcgtcgacccggaattcgccgctgatgtggtcgatcgttacgctaaccatatctactacggcagcggcgcagtcggtatggcgctggtggttatcgacggaaaccagcgcgtattccgcagcttcggcgagacgcgcccgggcaataatgagcacccgcagctcgattcggtgatccgcattgcctctatcagcaaattgatgaccagcgaaatgctggtcaaacttctcgatcagggcgtggttaagctcaacgatccgctaagcaaatatgctccgccgggtgcgcgggtgccgacttaccagggggcgcctatcacgctggtgaatctggcgacccataccagcgccctgccgcgcgagcagcccggcggcgcggcgcaccggccggtatttgtctggccaactcgccagcagcgctggaactggttatccaccgcaacgctgaaaaccgctcccggcacccaggccgcctactccaatctggcattcgatttactcgccgatgcgctctctaccgctgcgggcaagccttatccgcagctgtttgaagagcagatcacccgtccgctggggatgaaagacaccacctttacgccttcgcccgatcagtgccggcgcctgatgattccggagaaaggagccagcccgtgcaacaatacgctggcggctatcggcagcggcggcgtctattccacgccgggcgatatgatgcgctggatgcagcagttcctctcttccgatttcttcgcccgtgggcagcaggcggaccggatgcaaacgctgatttatcaacgcagccagctgacgaaggtgatcggtatggacgtgccgggtaaagccgatgcgctgggcctcggctgggtctacatgaagccgaaaaacggccagccgggcattattcagaagaccggcggcggcggcggctttattacttacatggcgatgaacccgcaggccaacgtcggcgccttcgtggtggtcacccgctcttcattgacgcgtttcaacaacatgagcgacgggatcaacgagctggtcagtgaattaagcggcgtccgcaccgggattgagaccgccagccagtaa

SEQ ID NO: 254855 - DNA, 573 bp, Klebsiella pneumoniae
atgatgatcgttttggctaaagaggggtggcaagagaagatggcggcgaaacgggtagtgatggtagtggatatgcaaaacggcgttttcgcgacgccgcgagttgagcgcgagcgctgcgcggcgcaaattaaccgcctgattaacgctgcggacaccgtaattttcattcagcactgcgaagcgggcggcctcgaagaggggagcgaaggttttgctttgctccccgagctgatccaacccgcaggctccctgtacgtgactaagaccgcctgcgacgccttttaccgtacccgtctggaagaggtgctgcgccaacatcacatcacgcagtttgtgatttgcggctgcgccaccgactactgcgtggataccaccatcaaaaacggcgccagccggggctacgcgattaccgtcgcggaagatgcccacactaccgccaaccgtccagcggcgccggccgtcacgctgatcgcccactacaacgatgtgtggcgttcactgaccgttcccggcaatcctttacaggtgaaaccgacagaaacaattcttagcggatggcaggcgaactaa

SEQ ID NO: 254856 - DNA, 1221 bp, Klebsiella pneumoniae
atgtttaaatcctttttccccaaaccggggccgttttttatttctgcctttatctggtcgctgctggcggtgatcttttggcaggcgggcggcggcgactggctgctgcgggtcaccggcgcatcgcaggatgtggcgattagcgcggcgcgcttctggtccctcaactacctggtgttctacgccttctacatattctgcgtgggcgttttcgcccttttctggtttatttacagcccgcaccgctggcagtactggtcgatcctcggtacctcgctgattattttcgttacctggtttctggtcgaggttggggtggccattaacgcctggtatgctccgttctacgatcttatccaggccgcgctggcaacgccgcataaggtcagcattaaccagttctatcatgaaattggcatcttcctcggcatcgcgctaatcgcagtggtgatcggcgtgatgaacaacttcttcgtcagccactacgtcttccgctggcgtaccgcgatgaacgaacattatatggcgcactggcagcatttgcgccatatcgaaggcgccgcgcagcgcgtgcaggaagataccatgcgctttgcttccacgctggagagcatgggcgtcagcttccttaacgcggtgatgacccttatcgccttcctgccggtgctggtaacgctctccgcgcacgtcccggatttaccgattgtcggtcatctgccttacggcctggtgattgccgccatcgtctggtcgttaatgggtaccggcctgctggcggtcgttgggatcaagctgcccggcctggagttcaaaaaccagcgcgttgaggccgcctatcgtaaagagctggtttacggcgaagatgacgctaaccgcgcgacgccgccgacggtgcgtgaactctttggcgccgtgcgccgcaactatttccgcctctatttccactatatgtatttcaatatcgcccgtattctttatctgcaggtggataacgttttcggtttgttcctgctgtttccgtcgattgttgccggtacgattacgctgggcctgatgactcagataaccaacgtctttggccaggttcgcggttcgttccagtacctgatcagctcatggactacactggttgagctgatgtctatctacaaacgtctgcgcagcttcgagcgcgagctggatggcaaagagctgcagaccgtgacgcaaacattaagttaa

SEQ ID NO: 254857 - DNA, 1107 bp, Klebsiella pneumoniae
atgccggtagcgcaatccagaatcacttctctcaccctgacgctactggcagggattgtcctcagcgcctgctccagcaaaccggagccggagctgaaaaagggcgaaaaggcgattgatgtcgccgcggtagtgcggcagaaaatgcccgccagcgtgaaggatcgcgaagcctgggcgcaggccatcgccaaaacctttgccagtcagaagctggcgccgacggaagagaacgtctgttcggtgctggcggtggcgcagcaggaatccaactatcaatctgacccggcggtgccggggctgaataaaatcgcctggcaggagatagaccgccgggcggaaaaaatgcacatcccggtttttctggtacataccgcgctgaaaatcaaatcacccaacggcaaaagctatagcgaacgtctggatagcgtgaaaaccgaaaagcagctgagcgcgattttcgatgattttatcggcatggtgccgatgggacagaagctgttcggctcgttgaacccggtacataccggcggcccgatgcaggtcagcattgctttcgccgagcagcacaccgacggctatccgtggaaaatcgacggtaccgtgcgccaggaggtgttcagcctgcgcggcggtctgtggtttggcacctatcatctgctgaactatccggcgaactacagcgtaccgctgtaccgttttgctgattttaacgccggatggtacgccagccgcaatgccgccttccagaatgccgtctctaaagcaacgggcgtgaagctggcgctggatggcgacttaattcgctacgacagcgacgaggcgggaaccaccgaactggcggtgcgccgcttatcctcccagctggcgatgagcgacgacgagatccatcgtcagttaaagaaaggcgacacgctggcgtttgaagagagcgatctttataaacaggtatttcgcatcgccgataagaaagccggtaaaacgcttccgcgggaagtcctgccgggtatacagcttgagagccccaaaatcacccgtaatctgaccaccgcctggtttgccaaacgcgttgacgaccgacgggccagctgtatggcgcgccgctaa

SEQ ID NO: 254858 - DNA, 303 bp, Klebsiella pneumoniae
atggctgagttcacctttgcaaagaccgtcaacggcggcaaaaagaggagcgctattaccagcagcaacatcgcctatgctctgtttgtgctgttttgcttctgggccggcgcgcaaatgctgagcatgctaatccacgcgccgggcgttcttgagcacttgattcagatgcaggacagtagccgcccccgggtcgaaattggcctgctggtcggcaccctgtttggcctgattcccttcgtggcggccagcctgttaattggcatatcagggctgatttttcgctggcgcagccgccgttag

SEQ ID NO: 254859 - DNA, 204 bp, Klebsiella pneumoniae
atgaaactcactgaaaaaatccgccgcgactggcactactatgcggttgccctggggttaatttttattatgaatggcgtagtcgggctgctggggtatgaaaccgaaggctggcgttcatacgtggttgggctggtgacgtgggtgattagcttctggatcgccggttttattattcgccgccgtccgccagaggaagcgtaa

SEQ ID NO: 254860 - DNA, 1098 bp, Klebsiella pneumoniae
atggctaagatgagggttgggatcgttttcggcggtaagtcggcagaacatgaagtgtcgcttcagtcagcgaaaaatatcgtggaagcgatcgataaaacgcgcttcgacgtagttttgctggggattgataagcaggggcaatggcatattaacgacgccagtaactatctgctcaatccgcaggatcctgcccatattgccctgcgcccgtccgatattacgctggcgcagattcccggacgcgaggcgcagcagctgattaacgccgatagcggccagccgctggcggccatcgacgtcatcttcccgatcgttcacggcactcttggcgaagatggttctctgcagggcatgctgcggatggccaacctgcccttcgtcggctccgacgtcctcggctccgccgcctgcatggacaaagacgtcaccaaacgtctgctgcgcgatgccgggctgtcgattgccccttttattaccctgacccgcgctaacaggaatcaggtaagctttgccgaggtgcaggcgaagctgggcctgccgctgtttgttaaaccggcgaaccagggctcctcggtgggcgtcagcaaggtcaacagcgaagagcagtatcagcaggccgtcgccctggccttcgaatttgaccataaagtggtggtcgaacaggggattaaagggcgtgagatcgagtgcgcggtgctcggcaacgataatccgcaggccagtacctgcggcgaaatcgttcttaatagcgaattctacgcctacgacaccaagtatattgacgatcaaggggcgaaggtggtggttccggcggccatcgatagcgatgtaaacgacaaaattcgcgagatcgccgttcgtgcctatcagaccctcggctgcagcggcatggcgcgcgtcgatgtgttcctgaccgctgataacgacgtggtgattaacgaaatcaatacgctgccgggtttcaccaacatcagcatgtatccgaagctatggcaggccagcggcctggattacaccagcctgattagccgcctgattgaactggcgctggagcgtcacgccgccgatcgggcgctgaaaacatcgatgaattaa

SEQ ID NO: 254861 - DNA, 684 bp, Klebsiella pneumoniae
gtgaaaggaaaaggtcttatcgttctgttggcgctgctggcggccggatattacggctatcgttatcttcccgcacagtacaatccattcgcgccgctgcgcctggaagaccctccgggactcctcagccactataaactgcggcgattaacgcccgccgagtgcgctggcctgcttgaggaggccaaccggcggaagctcatttccagccagccggtggccgatagcggaggagcgtgtcctctgcagaatgtggttcgggtgcgtgattttggcgcggtgaagctcagcagcagctttcttgccagttgtccgctggcgttgagcagcgcgctatatctgcaacagcaggcgaaaccgttgactcgccggatgctggggcaagagctccgccagattgaccattttggcagctatgcctgccgtaatatttaccatcgccagaacgcgcggcgcagtgagcacgctaccgcggaggcgctggatgtcagcggctttcgtctgtccgatggccgacgcgtcagcgtgctgaaagggtggcccgatgcgcagtatcacccctggctgcaggcgttactggccggcggttgccgctattacggcaacgctttagggccggactataacgcggcccatgccaaccattttcacttcgggatgcgcggccagggtttctgtttctaa

SEQ ID NO: 254862 - DNA, 1200 bp, Klebsiella pneumoniae
atggaatcctggaaggttaatcttatctccgtctggtttggctgtttttttaccggactggctatcagccaaattctcccctttttgccgctgtacgtttctcaactcggcgtaacctcgcacgaagcgttatccatgtggtctgggctgaccttcagcgtcacctttctggtgtcagcgatcgtctcgccgatgtggggcagcctggccgaccgcaaagggcgcaagctaatgctgctgcgcgcctcgctggggatggccatcgccattttactccaggcctttgccaccaacgtctggcaactgtttatcctgcgtgcggtgatggggctgacctccggctatattcctaacgctatggcgctggtggcgtctcaggttccgcgcgagcgtagcggctgggcgctgagtacactttcaacggcgcaaatcagcggcgtgatcggtgggccgctgctcggcggtttcctggctgaccatgtcggtttgcgcgcggtctttatcatcactgctgttttactgaccgtgagtttcctggtgacgctgtttctgatcaaagagggcgtccgcccgcagatgagtaaggcggagcggctgagcggtaaggcggtgtttgcctcgctgccttatccgggtctggtaatcagcctgtttttcaccaccctggtgatccaactgtgcaatggttcaattggcccgattctggcgctctttattaagtcgatggcgccggatagcaataacatcgcctttcttgccggcatgatcgccgccgtaccgggcgtgtcggcgctgatttcggctccccgtctggggaaactgggtgacaggatcggcacctcgcgaatcctgctggcgacgctatgctgcgcggtggtgatgttctttgccatgtcgttcgtcacaaccccattccagcttggtgtgctgcgttttctgctcggttttgccgatggggcaatgctgccggcggtgcaaacgcttctgctgaaatactgcagcgacagcgtgaccgggcggatttttggttataaccagtcgtttatgtatcttggcaacgtagccggtccgttaatcggcgcatcggtctcggccatggccggcttccgctgggtgtttatcgcgacggcggttattgtcctgatcaatatctggcagctggccatcatgctgcgtcgcagccgtcgtacaacggcttaa

SEQ ID NO: 254863 - DNA, 261 bp, Klebsiella pneumoniae; identical to SEQ ID NO: 172958

SEQ ID NO: 254864 - DNA, 204 bp, Klebsiella pneumoniae
  misc_feature (138)..(147): n is a, c, g, or t
gtgaaattaagcgccctgtttattgccctgctacctctgctgggctccccgattattcacgcagaaacaacaaccgcaccggttctggaaaatcgcgccgcccagggcgatatcaccacgccgggcggcgcgcgtcgnnnnnnnnnncgcgcgtcgtttaagcggcgatcggaccgaggcgctgcgcgcttcgttaatcaataa

SEQ ID NO: 254865 - DNA, 1194 bp, Klebsiella pneumoniae
atgggggattctgaaattaccgccgcgcgaaattatgcagaaggggcgggcggattttttaaagggattgacgcgctgccgctgactggccagtacacccactattcgctggataagaaaaccggcaagccgaattatgtgaccgactccgccgcttccgctaccgcatggaccaccggcgtaaaaagctataacggcgcgctgggcgtcgatatccatgaaaaagatcatcagactatccttgagctggcgaaagcggcgggtttagccaccggtaacgtctcaacggcggaactgcaggacgcgacgccggctgcgttggtggcgcacgtcacttcgcgtaaatgctacggcccgagcgtgaccagcgaaaaatgtgccagcaatgcgctggaaaagggcgggaaaggttccattaccgaacaactgctgaacgcgcgtcccgacgtgacgctgggcggcggagcgaaaaccttcgctgaaagcgcgacggccggcgaatggcagggcaaaacgctgcacgagcaggcggtggcccgcggctaccagatcgttaccgatgccagctcattggccgccattagccaggcaaatcaggataaaccgctgctcggtctcttcgcggaaggcaatatgccggtgcgttgggaaggcccaaaggcgtcttatcacggcaatatcgataaggcggcagtaacctgtactccgaacccgaaacgcgatgcatcggtgccgacgctggcgcagatgactgaaaaagccatcgatctgctgagcagcaatgagaaaggcttcttcctgcaggtggaaggcgcttccatcgataaacaggatcatgcggcgaatccgtgcggccagattggcgagaccgtcgatctggatgaagcggtacagaaggcgctggaatttgccaaaaaagagggcaacaccctggttatcgtcaccgccgaccacgctcacgccagccagattatccccgccgataccaaagcgccgggcctgacgcaggcgctgaacaccaaagatggctcggtgatggtgatgagctacggcaactctgaagaagagtcgatggagcataccggtactcagctgcgtatcgccgcctatggcccgcatgcggctaacgtggtgggcttaaccgatcagaccgacctgttttacaccatgaaagccgcacttaatctgaaataa

SEQ ID NO: 254866 - DNA, 321 bp, Klebsiella pneumoniae
atgaaaataacattacttgtgaccctactttttggcctggtatttatgacagcggtgagtgccgcggaaaaagagttgacccctcagcagcaaaagatgagcgtctgcaataaagaagcatcagcgaagtcgctaaaaggggatgagcgtaaaacgtttatgagcagctgcctgaagaaagagggcgcggcccaggacggtaaggggttaacgcctcagcagctaaaaatgcgcgagtgcaacggtcaggcgacccagcagtcgctgaaaggtgacgatcgcagcaaatttatgagcgcgtgcctgaaaaaacaggtgtag

SEQ ID NO: 254867 - DNA, 810 bp, Klebsiella pneumoniae
atggagaagaaaatcggctttatcggctgcggcaacatgggcaaggccattctcggcggcctgatcgccagcggacaggttcagccgggacaaatctgggtctacaccccgtcgccggataaagtggcggccctgcacgaccagtacggcataaatgcggcgcaaagcgcgcaggaagtggctcaggtagcggatattatctttggcgccgttaagccgggcgtgatggtgaaagttctcagcgacgttgcctccagcctgaataaagactctctggtggtttccattgccgctggcgtcaccctcgaccagctggcgcgcgctctgggccacgatcgtaaaatagtccgcgcgatgcccaatacgccttcgctggttaatgcgggcatgacgtcggttacgccaaacgcgctggttagcgccgaagagaccgcggatatcctgaccatcttccgttgctttggccaggcggaaattattgctgagccaatgatccacccggtggtaggcgtcagcggctccgcgccggcttacgtctttatgtttatcgaagcaatggctgatgccgccgtactcggcggaatgccgcgcgctcaggcatataaattcgcagcccaggcggtgatgggctcggccaaaatggtgctcgaaagcggggaacatccgggcgcgctgaaggatatggtgtgctcgccgggcggcacgacgatcgaggccgtgcgcgtgctggaagagaagggtttccgttccgccgttatcgaagccatggcgaaatgcatggaaaaatcagagcagctgagccgttcctga

SEQ ID NO: 254868 - DNA, 699 bp, Klebsiella pneumoniae
atgcaatctgaagagcaacgccttatcgatggactgttttcccggttaaaagaggccgagagccgcagcgcatcgcgcgattccagcgccgaggagcggattgccgggcacattaaagaacaaccgttcgccccttactatatggcgcaaacgattctgattcaggaagcggcaatcaagcagctcaacgagcggatcctggcgctggaaagtcaggtcagccagctgcaggccgcgaagccgagcagcggtggctttctctctggtctgtttggtggcggtcagtctcgcggttccgatcccattcctggggccgagcagtatggtcgccctcaggccagcgtccagcctcagtatgctccgcagacgcaacagcagagctatgcgcctcagggcgcccgcagcggcggcggttttatggccggtgcgctgcaaacggcggcgggcgttgcgggcggggtggtgctgggaaacatgctcaccaatatgtttagcggctcgcatccgcaggagatcgttaatatcatcgaagagaaaccgcagccggatctcagccaggcgcaggacaatagcgtcgctgacgataccttccgccaggatgacagtcagttccttgccgacaacaacgactatgatgccgacttcgacgccggttttggcaacgatgatttcggcagcgacgacgacagctgggtttaa

SEQ ID NO: 254869 - DNA, 528 bp, Klebsiella pneumoniae
atgacacagctaatttttcttgtcgggcctcgcggctgcggtaaaacgacgatcggtcatgcgctggcggaagctcgcggtttccagttcgccgatacggatcatgagcttcaggaacatgaacaacgcagcgtggcgactatcgttcagcaggaaggctgggaacgctttcgcgctctggaaacgcaggcgctggaacgcgtcgctcaacccgcaacgatcatcgctaccggcggcggcattattctcagcgaatacaatcgtcagtttatgcgggaaaatggcgtcgtgatctatcttgaggccacggtttctgccctgattggtcgtcttgaagcctatccgaaggcggaacagcgccctacgctgaccggaaagccgatccgcgatgaagtgggggaggtgctggcacagagggaagcgctgtatcgggccgccgcgcatcatattatcaacgcgaccgtcccgccggatgaagtcgttgaacagattatgacgaccgtctgcggtgagacctataccagttaa

SEQ ID NO: 254870 - DNA, 192 bp, Klebsiella pneumoniae
atgccgaccagacctccatatccaagggaagcgcgcgttgtcgccgttgagaaaggccccgaggggcaaacggtgacctggtatgaactgcgcgctgaccatccgacgcctaactcgcttatcagtgagcaccctacagaacaggaagcgctggacgctaaacggcgttacgaagatcctgataagtcataa

SEQ ID NO: 254871 - DNA, 666 bp, Klebsiella pneumoniae
atggcaattttgaccattggggtggtaccggtggcggagatgttgccgcttttaactgaacatatcagggaagatcagattaatcatattagcctgttaggcaaaatggcgcgcgaagaggttatgcgcgattactgcgtgggacccggcgatgaagcgctgttaaccttgctcaatgataatcaaatcgcgcaagtctcgcggcagaaagttgaacgtgatttacatagcgtcattgcgatgctcgataaacaaaattacgaccttattttactgatgagtacccatccttttagcggatttaaagcaaataatgcaatcctgctcgagccgcaaaggatcataccgccgctggtcgcgtcgattgttgacggccatcaggtgggagtaattgttccggtggaagagatgctgccgctgcagcgggataaatggcaggtgttaacgcatactcctttttatgctatctgcagtccggttaacggtagtaaagaacagctgctggccgcgggcagggagttgattgaacaaggcgctgacgtattaatgctggattgtctttgttaccaccagcagcatcgcgatatattacaaaaagcgctggatattccggttttattgtcaaatatactgatttcacggctggcggcagaactattagtttaa

SEQ ID NO: 254872 - DNA, 285 bp, Klebsiella pneumoniae
atgcttcaaagcaatgaatactttgacggaaaagtaaaatccattggcttcaccagcagcagcaccggtcgtgcgagcgtgggcgttatggcggaaggggaatacaccttcgggaccgcgcagccggaagagatgaccgtagtcagcggcgcgctgaacgttcttctgccgggtgaaaccgagtggaaagtctatgctgccggggaagtattcaacgttccggggaatagcgagtttaatttgcaggtggctgagccgacctcttatctgtgccgctatctgtaa

SEQ ID NO: 254873 - DNA, 1476 bp, Klebsiella pneumoniae
atgaaagatatcgccaattccgcctcacgcaacggtcattcaaccgcaccggttgatgaggttttacccgttacgcaaatgattctttatggactacagcacgtgctggtgatgtatgcgggcgccgtggcggttccgctcgttgtgggtaatgcggtagggctcccgccggagcacattattttactgattagcgccgacctgtttatctgcggcgcggccaccatcgtacagtcgctgggggtcggtaagtggctcggctgtcggctgccgctaatccagggttgtaccttcgccgcgctgatcccgatggtgttgatcggcaaggagtatgggatcggcggtatttccggggcggtgatcgtctccggtattttcatcctctgctgcgccccgtggattagcaagctcatccgcttctttcccaaggtggtcatgggcagcatcgtcacgcttatcggcatgtctattatgccggtcgctggcgggtggatcggcggcggcagcagcgagatgagcggctttggcgcccccttctcgctgctgatggcggcgattactctggtgattattcttaatatttacacttttgcctccggcgttgtgaaaaatacgtcggtactgatcggcctgattatcggcaccgtactctggagctgctttaagcctctcgactttagtctggtccacgccacaccctggctccatctaccgaccctgatgccgtttgccaaacctgaatttcatattatccccgtcgccctgctatcaatggtcatggtggtggtcatggtggaaaccatgtcctcaatgatggcgaccggggatatcgtcgggaaaaaagttgacgcgaaaatgctgcgcaacggccttaacacctgcggcatcgcgaccactatctgcggcttttttaatctgtttccctacgccgcgttcgcgcagaacgtcggcctgatcggtttaaccggggtacgcagccgctttgtggtgtcggtctccggtatcattctgattctgatgggcgtgttctcaaggatggcggcgctggtggtgctgataccaaagccgatcctcggcggcgcaggcatcgtcatgttcggtatggtggccgtctccggtattcgtaccctggggcaggtgaactatcgcaacaataataacggcatggtcgtggcgttgaccctcggcctcggcatgatgccggtgctggtgcccaatctgtttacccagtttccgccgatggttcagctgtttctgcacagcgggatcaccatcggtaccctgacggctatcgtcgccaacctcaccctcaacggcagcgtacctttccgcgttaaccacgaaacgccggtccccgatccggccccgccgagctcagcggcgcgcaatatggccgtcagaaccgtcagaatgtggctcctgctgcgcaaagttcagaaggagagacagcctgaagaagcccaggagggacagtaa

SEQ ID NO: 254874 - DNA, 1941 bp, Klebsiella pneumoniae
atgaataaatttattgttgccgattctgcaaactgtattggctgccacgcctgtgaagtggcctgcgtcacctctcatcgccaggacagctggccccagcagcgcagcgactttctgccgcgtattcgggtgttcttccaccgcaacgccagcagtgcgacaacctgccgccactgcaacgacgctccctgcgtcggcgcttgcccgacccaggcgctgatcgtagccaacgacagcgttcagtttacagaggcgctgtgcatcggctgtaaaaactgcgtcatcgcctgtccctttggggcgattgagatggtggccaacgatgacgacgcgccgcagctggcgcagaaatgcgatctttgccgtcagcatccttccggtcagcaggcatgcgtggccagctgtccaacccaggcgctgcgtctgatggatgaagccgcgattaaccagctgcgtaccgcgcggcagatccgctccgcgctggaaaccccgctggaagccgttcgcggcgtaagacgtcgggcgatactcaataaacctccgcgcgttggcgcgaaaaaagtgcccgccgatgaccgcatgcagcacttccgggaaatttatcagccgctgagcgagtgcgatgcggagtacgagagcgaacgctgtctctactgcgcgcagaaagcatggtgcaactggacctgtcctttacataatcatattcccgatttcattcgcctggtgaacgagggcaagattatcgaggcggcggagttatgccatcagagcagctccctgccggagatttgcggccgggtctgtccacaggacaggctgtgcgaaggggcctgcacgctcaagaacgaaggcggctcggtcgccattggcaaccttgagcgctatatcaccgataccgcgctggcgatgggctggcggccgacaatcggcaaagtggccccgcgaccggagcgggtggcggtgatcggcgccgggcctgccggtctgggctgcgccgatattctcgtgcgcgagggcgtgcacgttgacgtttttgaccgccatccggagatcggcggtctgctgaccttcggtatcccgccgttcaagctggataaaaaggtgcttgagatgcgccgcgacatttttagcgccatgggcgtcaattttcatctcaatcaggaggtgggtcgcgacgtggcttttgccgatctgctgaaaaactatgacgccgtcttcctcggcgtgggcacctacggtctgatggccgccggtctggagggagagaacgcccccggcgtgattcaggccctgccgttcctgattgccagcacccgcgaggtgatggggcttgaagagagcgccgagtatccgctgaccgacatcaaggggaaacgcgtggtggtgcttggcgggggagatacggcgatggactgtctgcgcaccgccgttcgccgcggcgcagcgagcgtgacctgcgcttaccgtcgcgatgaactgagtatgcccggatcgaaaaaagaggtggtgaacgcgcgggaagagggagtgaaatttgagtttaacgtgcagccgcagcgcattcagctcaaccgtaaggggcaggtctgcgcggtggagatgatccgcacgaagatgggcgagccgggtccagacggccgccgccggccgcagccgatcccggattccgggtttgaacttcaagccgatgtgctcattatggcgtttggctttcaggctcacgagatgccgtggctacgcggccacggcattaagctggaccgctgggggcagatagtcaccggtggaaaagggcgcggaacgacgcaaaccagccatgacaaaatctttgccggcggcgacgccgtgaccggggcggacctggtggttaccgccatggtcgccgggcggcaggcggccagcgagatgttgacgcaattcagggcccgggaggagatatga

SEQ ID NO: 254875 - DNA, 477 bp, Klebsiella pneumoniae; identical to SEQ ID NO: 175390

SEQ ID NO: 254876 - DNA, 1338 bp, Klebsiella pneumoniae
atgagtatcctgatcctgaaaaatgccaccgccgcgcagatctatccggcgaaagtgtgggagaacgtcgatattgccattgaggatgataaaattctcgccgtcggccccggcctgtgccagcgctatccgcaggcgcaggtgaaagagatgcgcgggcaactggtaatgcccggcatggtctgctctcacaatcacttttattccggcctgtcccgggggattcaggctaatatcgcccccagcccggactttatctccacgctgaaaaacctgtggtggcgccttgaccgggcgctggacgaagagtcgcttttctacagcggtctgatctgcgccatggaggccgtgcgtagcggctgcacggcggttatcgatcatcatgcgtcgccccactatatcgctggctccctgagccagctgcgcaacgcttttctcaaaatcgggctgcgcgggatgacctgcttcgaaacgaccgaccgcaactttggcagccgcgagctgcgcgacagcgttgaggagaatattcgctttgccagagagatcgacgccgcccgcgaaaaaggagagcaaccttatctggtggaggcccatatcggcgcccatgcgccgttcaccgtgcctgatgaaggcctggtgatgctgcgcgaagcgctaaaagccaccggccgcggcctgcatatccacgcggcggaagaccgctacgatgtttctcacagccatcacctttacggcaaggacctgctggtgcggctggcggagttcgaccttatcaacagtaagacgctgattgctcacggtctgtatatctccgatgccgacgtggagctgctcaatgcgcaggacggtttcctggtgcataacgcgcgctccaatatgaacaatcacgtcggctacaactaccgcctgccgcagatccgtaatctggcgctcggcaccgacggcattggttccgatatgttcgaggagctgaagtttgccttctttaaacaccgcgacgccggcgggccgctgtggccggacagcttcgcgaaggcgctgagtaacggtaatgaactgttgaatcgcaacttcaacgcccactttggccgccttgaggcgggctataaagcggacctcaccatttgcgactatatggcgccgacgccgctgatcgcggaaaatatcgccggacatatcgccttcggcctgggagcaaacagcgtgcgcagcgtgatggtgaacggcgtgatgatctacgaggatcgccagttcagcttcgactgcgagccgatattccgcgaagcgcagaaagtggcgaaaaaaatgtgggcgcgaatggatgcgctccccgcatag

SEQ ID NO: 254877 - DNA, 3120 bp, Klebsiella pneumoniae
  misc_feature (1122)..(1131): n is a, c, g, or t
atgggagatataatgcgtcccgtgccgtttgaggagcttttaacgcgcattttcgacgagtatcagagtcagcggactatttttggcattcccgagcaacagttttacacgccgcaggcgcagaggtcgatcggcgtattcggcgaaagctgtgcgacgccgctcggcccggcagcagggccgcatacccagctggcgcaaaacatcattaccgcatggctcaccggcgggcggtttatcgagctgaaaaccgtacagatccttgaccggctggagctggaaaaaccctgtatcgatgccgaagatgagtgctttaacaccgaatggtccaccgaatttaccctcaagaaagcctgggatgaatacctgaaagcctggttcacgctgcatctgctcgagcaggtctttccgctgggcacccataaagagagcaagtcgtttattttcaatatgagcgttggctacaaccttgacggtattaaacagccgccaatgcaggaatttatcgacaatatgatggacgcctccgcccatcctaaattcgcccagtaccgcgacaccctgaaccgctggctgcaaaatagaacctttatcgatcgcctgccaacatgcgcgcgcaaagacgggctcgataacattgcccagcgcgtgcccgccaggctggttgaaggggtgaccctctcgacgatgcacggctgtccgccggatgagatcgaagccatctgccgctatatgctgacggagaaaaacctcaacacctttgtgaagctcaatccgaccctgctcggctatccacgcgtacgccagatcctcgacgcctgcggcttcggctatatcggccttagcgaagagtcatttgaccacgaccttaagatcgaccgggcgctggagatgctgacgcgcctgatggcgctggcgaaagagcgcagcctcggctttggcgtcaagctgaccaacaccctcggcaccgtcaataacaagggggcgctgccgggagatgaaatgtatatgtccggccgcgccctgttcccgctatctatcaacgtggccgccctgctctcgcgggcgtttgacggcaagctgccgatctcctattccggcggcgccagccagctgaatatnnnnnnnnnnaatattcgcgaaattttcgaaaccggcattcgccctatcaccatggccaccgacctgctgaagccgggaggatatctgcgcctgagcgagtgcatgcgcgagctggaaaaagccgacggctggaacatgacgcagatcgacgtcgagcgcctcaacgcactggcggaaaaagcggtgagcatggactacacccagaaacagtggaagccggaagagcgcattgataccggcgagcccctgccgctgcttgactgctacgtcgccccctgcgtaacggcctgcgccattaagcaggatattccggaatatattcgcctgctgggcgagcatcgctacgccgacgcgctggagctaatctatcagcgtaacgcgttgccggccattaccggccatatctgcgaccaccagtgccagtacaactgtacgcgcctggattacgacagcgcgctcaacattcgtgagctgaaaaaagtggcgctggagaaaggctgggacgagtaccgcagccgctggcacaaacccgcgggctccggctccctgcacccggtagcggtgatcggcgcaggccctgcgggtctcgccgccggatactttctcgcccgcgccgggcatccggtcacggtttttgaacgcgaagccaacgccgggggcgtggtgcagaatatcattccgcagttccgcattcccggcgagcttatccagcacgatatcgattttgtcgtcgcccacggcgtcaaaattgagtacggctgcgacccgcatctgagcgtagaaaagctgcaggcggaaggttttcgttatgtgctggtcggcaccggtaccgataaaaacagcggcgtgaagctgcgcggcgacaaccagaacgtgcataagtcgctgcagttcctgcgccagttcaaccgcggcgaccgactggatctgggcaaacgcgtggccgtggtcggcgccggcaataccgcgatggactgcgcccgcgcggcgctacgcgtgccgggcgtgcagagcgcaaccatcgtctatcgccgttctcagcaagagatgcccgcctggcgcgaagagtacgatgaggcgctgctcgacggcgtcgacttcgagtggctatgcaacccggaacagtttaacgccgacggaacgctcgtcgtacgcgtgatgaagctgggcgagccggatgagaaaggccgccgccgtccggtagaaaccgatgaacttcgcacgctgaaagtcgactccctgattaccgccatcggcgagcagcaggacggcgaagcgctgtcggcaatggggatcccgctcgacccgcagggctggccggtggtcaacgccgatggcgagaccagcaagccgaacgtctttctgattggcgacgttcagcgcggcccctcttctatcgtctccgctatcggcaacgcgcggcgggccacggacgtggtcctggcgcgggagaatatcgccagcagctacgggaataaagtctggaacaatgtcgatccggcgaaggtgtatcagcgtaaaggcgctatcgccgtcacgctggtggataaaaaccagcgcgaggcttttgtcgagcaggaagccagccgctgcctggagtgcaactacgtgtgcagcaagtgcgtcgacgtctgtccaaaccgcgccaatatttccgtggccgtcccggggttccagaatcgtttccagaccctgcacctggacgcttattgcaacgaatgcggcaactgcgctcagttctgcccgtggcaggggaaaccgtataaagacaaaatcaccgtattcagcctcgagcaggattttgtcaacagcaccaatccgggcttcttcgtcaagggcgccagcgtcaaagtgcgtcagaacgaccagacgtggcagctggaaattaacgaccacggccagtttaacgaggtaccggcccagctagacgccatgtgccgcatcataagccatattcatcagcatcaaagctatctcctgggaggcgttgaagtatga

SEQ ID NO: 254878 - DNA, 834 bp, Klebsiella pneumoniae
atgaatatttttgcagaagctgcacgacttgaggagcagaaccgtccctttgccctggcgcagattgtcgaaagccggggctctaccccccgacactccgctcagatgctcatccgggaggacggctcgattgtgggcaccattggcggcgggatggtggagcgtaaagtcatcgatgaggcgctggaggcgctgagcgagcgggagtcgcgaatcttccacggccgcatggcgcgcaccggtagcgacgccgtgggctccgactgcggcggagcgatgtcggtttatatcagcgttcacggcctgcgcccgcgcctgctgttggtcggcgccgggcacgtcaatcgtgcggttgcccacgccgcggcgctggtggattttgacatctgcgtgggcgatatctatcccgccagcctttgcccggaggcttttccgctttcggcgaggctggtccatggctccagctttacggaagtggtcgaggcgatggcggtgcggccgcaggatttcgtactgatcgccaccaacaatcaggatcgcgaggcgctggacaggctgataacccagccggtagcctggcttgggctgctggccagccgacggaaagtgcaggcttttttacgccagatgcgggagaacggcgtgccggaggcggatatcagccgccttcgggcgccgattggttatgacatcggcgccgagacgccaaacgagattgctatcagcgtactggcggaaatcctgcaggtgaaaaacggcgcgcctggggggcttatggatcaggtgcggcaatcttgtcagccggattgtctggctgaggcggtggcaatctga

SEQ ID NO: 254879 - DNA, 933 bp, Klebsiella pneumoniae
atgagtaaaaaaattgttctcgctctcggcgggaatgcgctgggcgacgatctcgccggacagatgcgggccgtacagcacaccgcccggacgatcgtcgatcttatctcccttggccaccaggtggtggtcactcacggcaacggcccgcaggtgggcatgattaatcaggccttcgaggccgcggcaaaaaccgaggcccacacgccgatgctaccgatgtcggtctgcgtggctctcagccagggctacatcggctacgacctgcagaacgcgattcgtgaagaactgctcacgcgccagctggacattccggtggccaccctgataacccaggtggaagtggacgctaacgatgaggcttttcttaatccgaccaagcccatcggctcattcttcagcaaagaagaggctgaaaagctgagccaaaacggctatatcatgaaagaggatgccgggcgcggctaccgtcgcgtcgtcgcgtcgccaaagccggtcgatattatcgagaaacaaacggtaaaagcgctgatggatgactgccacgtggtgatcaccgtcggcggcggcggcattccggtcatacgcgaagggaatcatctgcgcggcgccagcgcggtcatcgacaaggactgggccagcgcgaagctggcggagatgatcgacgccgatctgctgatcatcctcaccgccgtggagaaggtggcgatcaacttcggtaaacctgacgagcagtggctggataacctctccctgcgcgatgccgaacgttttatcgaagaaggacactttgccaaaggctctatgctgccaaaagtggaagccgccgccgcctttgcccgctcaggcccggggcgcaaggcgctgatcacgatgctgagcaaagccaaagaggggattgaaggaaaaacgggcaccatcataagccaataa

SEQ ID NO: 254880 - DNA, 1407 bp, Klebsiella pneumoniae
atgcgcgtactgattaaaaatggcctcgtcgtcaacgccgacggacaggtaaagcaggacctgctcattgaagatggcctcgtcaagcgccttgccgattctattgaggcagaacaaccctgcgaagtgattgacgccgagggctgctacgtgatgcccggcggcgtcgacgttcatactcatttcaatattgacgtggggctcgcccgcagctgcgatgatttttttaccggaacccgggccgcggcctgcggcggcaccaccaccattgttgatcatatgggctttggccccgtcggctgtcacctgcgccaccagttcgaagtctatcgcggctacgccgcctataaagccgttatcgactacagttttcacggcgttatccagcacgttaaccacggcattctcgacgagatcccgatgatggtggatagcggcatcagcagctttaagctctatctgacctaccagtacaaacttaacgatgacgagttgctgcaggcaatgcgccacctgcagcgcgccggcgcgctgacgacggtccatccggaaaacgatgccgccatcgcccagcgccgggcggaatttatcaacgccggtaaaaccgcgccgcgctatcacgccctgagccgcccgctggagtgcgaggcggaagccatcgcccgaacgatcaacctcgccaggctggcgggaaacgcgccgctctatattgttcatctttccaacgccctgggcctggagtatctacgtcttgccagaagacgccaccagccggtgtgggtagagacctgcccgcagtatctgctgctcgacgagcgctgctacgagcgtgaagatgcgcttaactacctgctcagccctcccctgcgcaacgccagtaataacgatgcgctatggcgcggcatccatgatggggatattgacacggtcgccaccgaccactgcgctttctctgcccagcagcgcaggcagatctccggcggcgactttagccgctgtccgaacggtctgcccggagtagaaaaccgcctgttgctgctgttttcgcacggcgtgatgaccgggcgcatcacccccgagcgctttgtggcgctcaccagcgccaatccggcgaagctgtttggtctgtggccgcagaagggtctgctggcgcccggcgccgatggcgacgtggttatcatcgatccacagcgtacgaccaccatccgccatgccatgctgcacgacaacgcagactattcaccctatgaaggcttcatctgccagggcgcgattcgccagacgctctcccacggcagagtgatctttgataacggcacctttaccggcatcgccggacagggccgctttttacgccgacaacctttttccaccgctcaccaggccgtcagcggaacagaaacgtaa

SEQ ID NO: 254881 - DNA, 1212 bp, Klebsiella pneumoniae
atggctaagcaaattccgttcaacgcgatcctggaaaaatcaaaacagtatgaaaaagagatgacccgcttcctgcgcgatatgatcgccattcccagcgaaagcagtgatgagaagcgcgtggtgcaccgcatcaaagaggagatggagaaagtcgggttcgacaaagtggaaatcgatccgatgggtaacgtactgggctacatcggccacggcccgcgtctggtcgccatggacgcgcacattgacaccgtcggcattggtaacatcaaaaactggaacttcgacccgtacgaaggtatggagaccgatgagctgatcggcggacgcggcgcgtctgaccaggagggcggaatggcctccatggtttatgccggtaaaattattaaagatctgggtctggaagatgagtataccctgctggtgaccggtaccgttcaggaggaggattgcgacggcctgtgctggcagtacattattgaacaatccggcattcgtcctgaatttgtcgtcagcaccgaacccaccgactgccagatttaccgcggccagcgcgggcgtatggagatccgcgtggaagttcagggcgtcagctgccacggctccgctccggagcgcggcgataacgccattttcaaaatggcccccattctcaccgagctggaacaactttcgcagaagctgggctacgacgagttcctcggcaaaggcaccctgaccgtgtcagagattttcttcacctcgccgagccgctgcgcggtggcggatagctgcgccgtctccattgaccgccgtctgacctggggcgaaacctgggaaggcgcgctggaagagatccgcgcgctgccggcggtgaaaaaagccgccgcggtggtctcaatgtacaactacgaacgcccctcgtggaccgggctggtctacccgaccgaatgctacttcccgacctggaaagtggaagagaaccacttcaccgtccgcgccctgagtaacgcctacgaaggtctgttcggcaaagcgccggtggtggataaatggaccttctccaccaacggcgtgtcaattatgggccgccacggcattccggttatcggttttgggccagggaaagagccggaagcgcacgcgccaaatgagaaaacctggaaatcgcatctggtgacctgcgccgcaatgtatgccgccatcccgctgagctggctggctacggagtaa

SEQ ID NO: 254882 - DNA, 1200 bp, Klebsiella pneumoniae
atgtctgctttctcactgaaaatggatattgccgaaaaccgttttttcaacggggagacttcgccgctgttttcacgccagcaggcgcagcaggctcgccgctttcatcaaaaaattaccggctataagcctacgccgctggtggcgctgaacgagctttccgccctgtttggcgtgcaaaaaatcctcgtcaaagacgagtcacgacgctttggcctcaatgccttcaaaatgctcggtggctcttacgctattgccaggctgctctgtgaaaaataccatttagatatcaacgatctctccttcgagacgctcaaatccagcattaaagagaagatgacgttcgccaccaccaccgatggcaaccacggccgcggagtggcgtgggcggcccgccagttaggccagaacgccgttatctatatgcctaaaggttccgcacaggagcgggttgatgccattctgcgcctcggcgccgagtgtatcgtcaccgacatgaactacgacgacaccgtccgctttaccatgcagaccgcgcagaaaaacggctgggaggtggtgcaggacaccgcctgggaaggctacacaaaaattccgacctggattatgcagggctacgccaccctcgctgatgaagcggtagaacagctctcctcgatgggtatcgcccgtccgacgcacgtgctcctgcagggcggcgtgggggcgatggcgggcggcgtgctgggctacctggccgatgtctacggcgcgaagcatctccattccattatcgtcgaaccggagctggccgactgtctctaccgctctgccctgaagggccagatcgttaacgtcagcggcgatatggccaccattatggctggcctcgcctgcggtgagcctaacccgctgggctgggaagtgctgcgcaactgcgccacgcagtttgtctcctgtcaggacgccgtcgccgccctcggcatgcgggtgctgggaaacccgacgggccaggatcctcgcattatctccggcgaatccggcgccgtcggtctcggcctgctggcggcgattcatttccatccgcagcgcgaagcgctgatgcacaagctcaagctggatagcgattccgtggtgctggtgattagcaccgagggcgacaccgacgttaagcactatcgcgaagtcgtctgggaaggcaaacatccggccgcgcagtag

SEQ ID NO: 254883 - DNA, 1188 bp, Klebsiella pneumoniae
atgaaaactgttaacgaactgattaaggatatcaataaacttaactctcatctcagtgagaaagactttttgctgacctgggagcaatcgccggatgagctgaagcaggtgctggatgtcgccgccgcgctgaaaaccctgcgcgatgaaaatatcgccaccaaagtgtttaacagcggattaggtatttccgtattccgcgataactcaacccgcacccgcttctcctatgcctccgcgctcaacctgttaggtctggcccagcaggatctggatgagggaaaatcgcaaattgcccacggcgaaacggtccgtgaaaccgccaacatgatctccttctgcgccgatgccatcggcatccgcgatgacatgttccttggcgcgggcaatgcctacatgcgtgaggtaggcgaagcgctggatgacggccacaagcagggcgtcctgccgcagcgtccggcgctgatcaatctgcagtgcgatatcgaccacccgacgcaatccatggccgatctcgcctggctgcgcgagcacttcggttcgctggagaacctgaagggcaagaaaatcgctatgacctgggcctattcgccgagctatggcaaaccgctctcggtaccgcagggcattatcggcctgatgacccgcttcggaatggacgttaccctcgcccacccggaaggttacgacctgatcccggacgttattgaagtggcaaaaaacaacgccaaagcttccggcggcagcttccgccaggtaaacagcatggaagaagcatttaaagacgccgatgtcgtctacccgaaatcctgggcgccgtacaaggtgatggaaaaacgcaccgagctgctgcgcgcgaatgaccatgaaggcctgaaggcgctggaaaaagcctgccttgaacagaacgccggacataaagactggcactgtacggaagagatgatgaaacacacccgcaacggcgacgcgctgtacatgcactgcctgccggcggatatcaccggcgtctcctgcgacgcgggcgaagtcaccgagggcgtcttcgagaagtaccgtatcccgacctacaaagaggccagctggaagccgtatatcatcgccgcgatgatcgtgtgccgcaaatacgccaatccgggcaaggtgctggagcagctgctcaaggaagcgcagaaacgcatcaaataa

SEQ ID NO: 254884 - DNA, 1785 bp, Klebsiella pneumoniae
atgataccgtccaaagcaccttccattttaatgcagattcagcctacaattcagaagtttgcaaggatgttgtccagcgtactacagttggaggttgagattgtcgataacgaattataccgcgttgcgggaaccggggcttatagtaagcagattggctataaattaaattcaaattcacggcttcttcgttacattattgaaacacagagcgaaaaggtcgtcacccattcccgcttcgatcctctctgcaaagattgtaacaataaggacaagtgcgaagagaaagcgttcctcggcactccggtgatgtatcacgaccgctgcgttggcgttattagcctggtggcgctaacccgcgagcagcaggaacgtattaatgagaacattcaggaattttcagattatgttcgccacgtctccagcatattcgtttcccgctttttacaggaacgggcggttggcgataatatccacaaaatatttttaaccatgattgaaaatatggaccagggcgtgctggtggtaggcaacgatcaaaaagttaaatttgccaaccaggccgcgctgaaaataatgagcgtgacgcagggccacgttattggcaagtccatccagtttcagcctttgaccttcgaagataatttcaagcacggccatatgcagcacattatctcctttgacgatcgcaaggagctcattatcggccagctgcacgcggtgcaggatcaatggctgtttttaatggcctttcaccagtcgcactcttctggcgatttcagctgcgggcaggaagggccgcaaattgaagcgatggttggcgagtgtcggcctatgcggcagttgaaaaagctcatcagccgcgtggcgccaagcccgtccagcgtgatgatagccggcgagagcgggaccgggaaagaggttgttgcccgcgctatccacaagctcagcgaccgccacacgaagccctttatcgccattaactgcgccgccatacccgagcagctactggagagtgaactgttcggctacgtgaagggggcgtttaccggcgcatcggctaacggtaagaccggcctgattcaggcggccaacagcggaacgctattcctggatgaaattggcgatatgccgctcaccctgcaggccaagctgctgcgggccatcgaatcacgagagattcagccggtaggcgccagccatccggttcaggtcgatatccgcattatttccgcaaccaatcaaaaccttgaccagtacattgcggaagggaagttccgcgaagatctctactatcgcctgaacgtcatcccgctgcgtctgccgccgctacgcgaacgccaggacgacattgagctactgattcactattttctgcatttgcataccggtcggctcaacctggtttaccccggcgtcgcgcaggatgtgatcgatttcctcaaacgctaccgctggccgggcaatattcgcgaactcagcaatttgatggagtacctggtcaacgtggtgccctcgggcgagattatcgatatgtccctcctgccgcccaatctgttgagcagcggtgaactggcgagccagccgacagcgcctgtttcagcggcagcgaccatcgcccaggaggaaaacgtaacggcgctggaagagatggagcggcagatgatccgtgacgccctctctcgctacagtaataaaaagcaggcagcggacgagctgggtatcggcatcgccacgctatatcgcaaaataaagaaatattcgctggcggcgggtcagaactga

SEQ ID NO: 254885 - DNA, 1095 bp, Klebsiella pneumoniae
atgggattcaaatgcggtatcgtcggtttgcccaacgtcggcaaatccaccctgttcaatgcgctcaccaaagcgggtattgaagcggccaacttccccttctgtaccattgagccgaacaccggtgtcgtgccgatgcccgatccgcgtctggacaaactggctgaaatcgttaaaccgcagcgtattctgccgaccacgatggaattcgttgatatcgcgggcctggtcaaaggcgcctccaaaggcgaaggcctgggcaaccagtttctgaccaacatccgcgaaaccgaagctatcggtcacgtggtgcgctgtttcgaaaacgacaacattatccacgttaacaataaagtggacccggctgacgatattgaagtgatcaataccgaactggcgctctccgacctggatacctgcgaacgcgccatccatcgcgtgcagaagaaagccaaaggcggcgataaagacgcgaaagccgagctggcggcgctggaaaaatgcctgccgcaccttgagaatgccggtatgctgcgttcgttaaaaaccctgaccgacgaagacaaagcggcgattaaatacctgagcttcctgaccctgaagccgaccatgtatatcgccaacgtcaacgaagacggctttgagaacaacccttatctcgataaagtccgcgaaatcgctgctgccgaaggttcggtggtcgtcgccgtttgcgccgccgttgagtccgatatcgccgagctggacgatgccgaccgcgatgagtttatggccgaactgggtcttgaagagcctggcctgaaccgcgttatccgcgccggttacgaactgctgaacctgcagacctacttcaccgcaggcgtgaaggaagttcgcgcgtggactatcccggtcggcgcaacggctccgcaggccgcaggtaaaatccacaccgatttcgaaaagggctttatccgcgcgcagaccatcgcctatgaagactttattacctacaaaggcgaacagggtgccaaagaagccgggaaaatgcgcgctgaaggtaaagactacatcgtaaaagatggcgatgtgatgaacttcctgttcaacgtttaa

SEQ ID NO: 254886 - DNA, 276 bp, Klebsiella pneumoniae; identical to SEQ ID NO: 175378

SEQ ID NO: 254887 - DNA, 1047 bp, Klebsiella pneumoniae
atgttaattcaggtgggagaactggcgaagcgcgccggaatgaccgttcgcacgttacatcactatgaacaaacgggattgctgacgccttcggccagaagcgcggcgggttaccggttatataatctggcggccgtgcagcggctgcatatgattaaagcgctggcgcaggccgggctggaactcgccacaattaaggactatctcgaccgggacgccttctcgctgtccgatctgctggtcaagcagatcgccaccctcgaccgacagctgcaaactctctcaacgctgcgccagcgcctggcgctgctgcgcgaagagctggacagcggaggcgagcccgatcttgagtcctgggtacaaacgctggagctgatgaaaatgtacgatcgctggtttagtcaacaggaattacaggtgctgccgtttgcggagcaggatgagcagcgtaaccagacatggctggagttggtgggggaagcgcagcagctcatgggcgaacgctgcccggcagatgagccgcgggcgattgcgctggcaacccgctggatggagcagctggagcaggataccgccggcaggccggagtttctgactcgcctgaatgagatgcacgccgccgaaccgcagatgcgtgaacaaaccggggtgacgccggagatgattgatttcattacccgtgcttttgccgaaagcaagctggccatctgggcgcgctatctgaacgacgaagagctggcctttacccggcagcactatttcgatcgcctgatggagtggccggcgctggtggccgacctgcatcgggcctgtcgtgagaagcgagacccggcctccccggaaggtcagcagctggcgcagcgctggctggcgctgttccagtcttacgcgggtaaggatgcgcagacgcagcagaagtttcgctatgccatggagcaggagccgcatttgatgaagggaacgtggatgacttcggaggtgctcagctggcttcagcaggcgattggcgtgatgatgcggcaggcgcaggggcctgccgccgaataa

SEQ ID NO: 254888 - DNA, 615 bp, Klebsiella pneumoniae
gtggttgctgatttcctgtcaagcgtcggcgttgaccgcgttctgaccgttgacctgcacgcagaacaaattcagggcttctttgacgttccggtggataacgtattcggcagcccgatcctgctggaagatatgctgcagctgaacctggataaccctatcgtggtttctccggacatcggcggcgtggttcgcgctcgcgctatcgccaagctgctgaacgataccgatatggctatcatcgacaaacgccgtccgcgcgctaacgtttctcaggtgatgcacatcatcggtgacgtcgctggtcgtgactgcgtgatggttgacgatatgatcgataccggcggcaccctgtgtaaggccgcagaagcgctgaaagagcgcggtgctaaacgcgtattcgcctacgcaacgcacccgatcttctccggcaacgccatccagaacatcaaaaactctgtgattgacgaattcgtcgtctgcgataccattccgctgacgccggaaatcaaagcgctggaaaaggtacgtactctgacgctgtctggtatgctggccgaagcgattcgtcgtatcagcaacgaagaatctatctctgctatgttcgaacattaa

SEQ ID NO: 254889 - DNA, 369 bp, Klebsiella pneumoniae
gtggcgaacaacgccgttggcatcgatcaggaaggaaccgcgcagggcaacgccttcgtccgggtgctcgataccgtacgctttctggatttcgcgtttgatgtccgcaaccatcgcgtatttcaccgggccgatgccgccctggtccactggagtattacgccatgcgttatggacgaactcggagtcaaaagaaacgccaaccacttcgacgccgcgtttctggaattcttcgtagcgtttgtcaaaagcgatcagttcggacgggcaaacgaaggtgaagtccatcggccagaagaacagaacggtcgctttaccgctggtatgctgtttgaagttgaatttctcaacgatttcgccgttacctaa

SEQ ID NO: 254890 - DNA, 582 bp, Klebsiella pneumoniae
atgaattttctcgcgcacctgcatcttgctcatctcgccgatagctccctttccggcaatttgctggccgatttcgttcgcggcaaccccgctgatgagtggccggctgacgtcgtggagggcatctttatgcaccgccggatcgatgtgctgaccgataacctgccggaagtcaccgaagccaaagcgtggttccgcgccgaaacgcgccgggttgcccccattacgctggatgtgatgtgggaccattttttgtcacgccactgggcgcagctgtcgccggaactgccgctgccggagtttatccgctacgctcacgcccaggtcacgccgatcctcccagcctccccgccgcgctttatcaatctcaatgactatctgtggtcggagcgctggcttgaacgttaccgggatatggattttattcagcgcgtgctgaacgggatggccagccgccgcccgcgactcgatgccctgcgcgactcctggcaggatctggatacccactacgatcgccttgagcggcagttctggcgcttttatccgcagatgatgacgcaggcggaaaaacgcgaactataa

SEQ ID NO: 254891 - DNA, 1128 bp, Klebsiella pneumoniae
atgaaatttgagttagatactaccgatggtcgcgcgcgtcgcggccgtcttgtgtttgagcgcggcgtcgttgaaacgccagcctttatgccggttggcacctacggcaccgtaaaagggatgacgccggaggaagtcgaagcgaccggcgcgcaaatcatcctcggtaatactttccatctgtggctgcgtcctggtcaggagatcatgaagctgcacggcgatctgcacgactttatgcagtggaaagggccgatcctcaccgactccggcggcttccaggtcttcagccttggcgatattcgcaaaatcaccgagcagggcgtgcacttccgtaacccgatcaacggcgatccgattttcctcgatccggaaaaatcaatggagattcagtacgatctcggctccgacatcgtgatgatcttcgacgaatgtacgccatatccggcggactgggactacgctaagcgctcaatggaaatgtccctgcgctgggcgaagcgcagccgcgaccgttttgacggcctcggcaacaaaaacgcgctgtttggtatcattcagggcagcgtttacgaagatttacgtgatatctctgttaaaggtctggtagagattggctttgatggctacgctgtcggcggtttggctgtcggtgagccgaaggcagatatgcatcgtattctggagcacgtctgcccgcaaatcccggccgacaaaccgcgatacctgatgggcgtcggtaagccggaagatttggtcgaaggggtgcgccgcgggatcgatatgttcgactgcgtcatgccgacgcgcaacgcgcgtaacggccacctgttcgtcaccgacggcgtggtgaaaatccgcaacgcgaagcataagagcgatacttcgccgctggatgcggagtgcgattgctacacgtgtcgcaactattcacgcgcttacttgcatcatctcgaccgttgcaacgaaatattgggcgcgcgtctcaataccattcataacctgcgatactatcagcgcttaatggctggtttacgcaaggctatcgaagagggtaaattagagagcttcgtgaccgatttttaccaacgtcagggtcgaaccgttccacctttgaacgttgactaa

SEQ ID NO: 254892 - DNA, 1815 bp, Klebsiella pneumoniae
atgctggtcgtcgttattgtcgtcggcttagtgtatgcgcttcccaacctgtatggtgaggatccggccgttcaaatcactggcgcgcgcggcgtcgccgccagtgagcaaacgctgatccaggtccagaaaacactacaagaagaaaaaattaccgcgaagtctgtggcactggaagagggcgcaattcttgcgcgcttcgacaccactgatatccagctgcgcgcgcgcgaagcgctgatgggcgtgctgggtgacaaatacgtcgtggcgcttaaccttgctccggcaaccccgcgctggctggcggccctgtatgccgagccgatgaagctgggtcttgacctgcgcggcggcgtgcacttcctgatggaagtcgacatggataccgcgctgagcaagctgcaggaacaaaacatcgacagcctgcgcagcgaactgcgtgataaaggcattccttacgcgaccgtgcgtaaagaagacaactacggcttgagcatcgccttccgcgatagcgccgcgcgcgaccaggctatctcctaccttagccctcgtcatcgcgatctggttatttccgctcagggcagcactggcctgaaagccgtgatgaccgacgaccgtctgaaagaagcccgcgaatacgccgtacagcagaacatcaatatcctgcgtaaccgtgtaaaccagctgggcgttgccgaacctctggttcagcgtcagggcgccgaccgtattgtggttgaactgccgggtatccaggacacggcgcgagccaaagagattcttggcgcgaccgcgacgctggagttccgtctggttaacactaacgttgatagcgccgcagcggcttccggtcgcgttccgggcgattctgaagtgaaatatacccgcgaaggccagccggttgtgctgtacaagcgcgtgatcctcaccggtgaccacatcaccgactcgacatcgagcatggatgagtacaaccaggcgcaggttaacatctccctcgatagcgctggcggcaacatcatgtctaacttcaccaaggacaacatcggtaaaccgatggcgaccctgttcgtggagtacaaagacagcggtaagaaagatgccaacggtcgtgcgattctggcgaaagaggaagaggtgattaacatcgccaatatccagtctcgtctgggtaacagcttccgtattaccggcatcagcaatgcgaccgaagcgcgtcagctctctctgctgctgcgtgcaggtgcgctgattgcgccgattcagattgttgaagaacggactatcggcccaaccctggggatgcagaacatcaaacagggcctggaagcctgtctggccggtctggtggtctctatcctgttcatgatcttcttctacaagaagttcggcctgattgcgacctcggcgctgattgccaacctggtgctgattgtcggcattatgtccctgattccgggggcaacgctgactatgccggggattgcggggatcgtgttaacccttgcggtagcggtcgatgcgaacgttctgattaacgaacgtattaaagaagagctgagcaacgggcgttccgtgcagcaggcgattgacgaaggttatcgcggcgcgtttagctccatctttgatgccaacattacgacgcttatcaaagtcattatcctgtacgcggtcggtaccggtgccattaaagggtttgcgattaccaccggtatcggtattgcgacctcaatgtttaccgctatcgtcggcacccgtgccatcgtgaacctgctgtacggcggcaagcgcgttaaaaagctgtctatctga

SEQ ID NO: 254893 - DNA, 972 bp, Klebsiella pneumoniae
gtggcacaggaatatactgttgaacaattgaaccatggccgtaaagtctgggactttatgcgctgggactactgggccttcggcatttcaggttttttgctgattctgtccattattatcattggcgtgcgcgggtttaactggggtctggatttcaccggcggtacggtgattgagatcaccctcgaaaagcctgtcgatatggatcaggtgcgccagtcgctgcagaaggcgggcttcgaagagccgcagctgcaaaactttggcagcagccgcgacatcatggtgcgtatgccgccggtacatgacgccaacggcagccaggagctgggcagcaaggtcgttaacgtgattaacgaatcgaccagccagaatgcgacggtcaagcgtattgagtttgtggggccgagcgtcggcgcagacctggcgcagaccggtgcgctggcgctgatagccgcgctggtgtgtatcctgatctacgtagggttccgctttgagtggcgcctggcggcaggggttgttattgcgctggcgcacgacgtggtgatcaccatgggcgtgctgtcgctactgcatatcgagatcgacctgaccattgtggcctcgttgatgtcggttatcggctactcgctgaacgacagtatcgtggtatctgaccgtattcgtgaaaacttccgcaagattcgccgcggtacgccgtacgaaatctttaacgtgtcgttgacgcagaccctgcaccgtactttgatcacctccgggacgaccttgatggttatcctgatgctgtatctcttcggtggcccgattctggaaggcttctcgctgaccatgctgatcggtgtctccatcggtacggcttcttctatctacgttgcgtccgcgctggcgctcaagctgggcatgaagcgcgagcacatgctgcagcagaaagtcgagaaagaaggggcggatcagccgtcaattctgccgtaa

SEQ ID NO: 254894 - DNA, 1392 bp, Klebsiella pneumoniae
atggctgtcgtaactctttccaccgttcctcaacccccgctctggtacgatgtgccttccgtcacgcttaacgacgacacgctgcgccagcgcaaagcgaaggtgctggcgaatatgcggcagcaagggctggatacgcttatcatctatgccgataaagagcacggcggcaactttgagtatctcaccggttttattccccgtttcgaagaggcgctactggtagtgcatcgggacggtgaggcggtgctggtactgggtaacgagaacctgaagctggcaagctacgcgcggctggaaaatcgtgtgattcacgccccgtggttttcgctgcccaatcaaccgatggaatcccgcaaaacgctggctcagctgtttcaggaggcgggcgttgcggggggaaaaagaattggcctcgcgggctggaagctctttaccagcgcggttgatgaccgcgcgcggatgttcgatctgcccgcctttatcgttgacgctattcgcgaggcagccgggccgcaggcaagtataaccaacgccaccggcatttttatcgacccggcaagcggagcgcgaatcaccaataatgccaacgagctggcgcactatgagtacggtgctaatctcgcctcaaccgcgattctgaccgcgcttaacgccattgcgccgggaaaaacggaaaagcaaatcggcgcgctgctggcggcggaagggcaagcgaatagcgtggtgatgattgccgccaccggcgatcgctttgccggagcgaatctctaccccagcgataaagctatccagcgcggagataaattctcgctcaccaccagttttaaaggcggcctgagcagccgcgccgcctacgtggtggccgatgagagtgaactggcgcctgaggtggctgattatctggacgtagtggcgaagccctatttcaacgcggtggtgaactggctggaaaatctgcgcatcggcatgcgcggcggcgatatgtatgccctgatcgagcgagtattgccgaaggcggaatatcactggcacctgaatccggggcatctggtcgcggatgaagagtggctctgctcgcccattggcccccattcagccgcctgtctgcaaagcggaatgatattgcagatcgacattattccttcccgagcgggctacggcggcgcaagcattgaagataccgtggcgcttgccgacagcgcgctgcgtcgggagctggcgcaaagttaccccgagctctggcagcgcattgtcgccagacgatcgtatatcggcaatcggcttggcattgcgcttcctgaagaggtgctgcctttctccagtaccgtcggctacctgcgtccgtggctgcttagcccggagcgcgcgctggtctgcgcaccatgctga

SEQ ID NO: 254895 - DNA, 366 bp, Klebsiella pneumoniae
atgaacaacgtcattaactggtttgagatcccggttgccgatatggatcgtgccgtggcgttttacgagccggtgatgcaggtcacgctgaaacgggaaaatatggagtgtgccgaaatggccgtatttccttatcaggacccggctcccggcggcgcgctggcaaagtttgatagcgttaagccctccgatcagggatgcattatctatctgcataccgataatctgacggccacgctagaacgcgtcaactctgcgggcggaagctgcgtttttggcccctttgagctggcggacgatatcggcacgattgccctgtttatcgatagtgaggggaatcggattggtttgcatcaacccgcataa

SEQ ID NO: 254896 - DNA, 690 bp, Klebsiella pneumoniae
atgagccgacgcgccgaccgtctttttcaaatcgtgcagatcctgcgggggaggagattaaccaccgccggattgttggccgagcggcttggcgtgtcagagcgcactatttaccgcgacattcgcgatctctcgctttccggggttccggttgagggagaggccggaagcggctatcggctgctggcgggctatgatctaccgccgttaatgctgacaacccaggaatcggaagcgctgatagccgctattcggctactgcaaacctggggcggcgcgtcgctgtcccgggcgctggaatcggcgcaggaaaaggtgctggcgatattgcccgcggagagccgacgtaaggccgagcagtcgcggctgttcgcaccggactttggttcccagggctatagcaaagatcagtttgatttggtgcatcgggcggtctccgctcagcaggcgctcgcgctgcgctatcgtgatgaagcgggaaatcagtcgcagcgagaagtgctgccgctggggctttttttctggggcgagcgctggctgctggtgacctggtgcgagctacgtgaggattatcgctgtttccgtctcgaccgctgtctggagatttccgccaccgggcgtcatttcagcgaacgagccgatcgctcattgagtgatttcttgcgtaaggtaaggtgcgaagagcgttag

SEQ ID NO: 254897 - DNA, 885 bp, Klebsiella pneumoniae
atgaaaaaaacattactggcagctggcgcagctctggcgctctccgcatctttctctgccagcgcggcagaaaacgacaaaccgcaatatctgtctgattggtggcaccagagtgtgaacgtggtgggcagctaccacactcgttttgggccgcagattcgtaacgatacttatctggaatatgaagcgttcgctaagaaagactggtttgatttctatggctatatggatgcgccggtattcttcggcggcaacaccgacgcgaaaggtatctggaaccacggttctccgctgtttatggaaattgagccgcgcttctctatcgataaactgaccggtaccgacctcagcttcggcccgttcaaagagtggtatttcgccaacaactatatctacgacatgggccgcaacaaatccggtcgtcagagcacctggtatatgggtctgggtaccgatatcgataccggcctgccgatgagcctctccctgaacgtctatgcgaaatatcagtggcaaaactatggcgcatctaacgagaacgaatgggacggttaccgtttcaaagtgaaatactttgtgccgctgaccgatctgtggggcggttcactgagctatatcggcttcaccaactttgactggggctccgatctgggcgatgacaactcttatgatttgaacggtaagcattcacgcaccagcaactccatcgcttccagccatatcctggcgctgaactacgatcactggcactactccatcgtggcgcgttacttccacaacggcggccagtgggcggatgacgcgaaactgaacttcggcgacggcgactttaacgtccgctctaccggctggggtggttatttcgtggtcggttacaacttctaa

SEQ ID NO: 254898 - DNA, 543 bp, Klebsiella pneumoniae
atgacaagacgttatttaaagctggccattgtgggtagcattttcacccttagcgcctgcgcgcagcaaagcgaaattcgccagatgaaccagagcgtgagcactctgagcaaagagatgacccagctcaatcagcaaacggtaaaaattactcagcaaaacgttctgaacgcgaaatctaacagcggcgtatacctgctgccggaggcgaaaacgccagctcgcctgaaaagccagattggtaccctgcgcatgtcgctgctcaatatcgccccggatggcgacggtacccgcctcaccctgcgcattcagggggaatcaaacgatccgctgccggcctttagcgcgacggtcgcctccgggcagatcagcggcacaaccgatagctaccaggaggttaatgtacaaaatcagctcattagcgctccggcaagcgtcctggcgccgagcgatgtcgacattccgctgcgcctgaatggcgtgacgccagagcaggttggcttcgttcgcatccacgatattcagcccgccagtatgcagtaa

SEQ ID NO: 254899 - DNA, 450 bp, Klebsiella pneumoniae; identical to SEQ ID NO: 172999

SEQ ID NO: 254900 - DNA, 1104 bp, Klebsiella pneumoniae
atgcaggacgaaatatacatggcgcgagcgctgaagctggctgcgcgcggacgcttcacgactcacccaaatccgaatgtcggctgcgtgattgtcaaagatggcgagatcgtcggcgaaggttttcactatcgcgccggtgaaccgcacgcggaggtgcatgcgctgcgcatggcgggcgaaaaagcccagggcgcgacggcgtacgtgacgctggaaccctgtagccatcacgggcgtacgccgccgtgctgcgaagcgctaattgccgcaggggtaacccgcgtcgttgccgcaatgcaggaccccaatccccaggtcgcggggcgcggtctgtaccgcttgcagcaggatggcgttgacgtcagccacgggctgatgatgaatgaagccgaagcgctgaataaaggttttctcaagcgcatgcgcaccggctttccgtggatccagctaaaaatgggcgcatcgctggacggccgcacggcgatggccagcggagagagccagtggattacctcaccgcaggcgcggcgtgatgtccagcgcctgcgcgcgcaaagccacgctattctgaccagcagcgcgacggtgctggcggacgatccggcgctgaccgtacgctgggacgagctcaacgctgaaacccaggcgctgtacccgcaggaaaatctgcgccagcctttacgcatcgttattgatagccacaatcgcgtcacgccgcagcaccgtatcgtgcagcaggcgggcgaaacgctgtttgcccgcacccgtgaagatgaacggcagtggccggagagcgtacgtactctgctggtgccggagcataacggtcggctggatctggttttattgatgatgcagctgggcaaacagcaaattaactcgatctgggtagaggccgggccaacgcttgccggcgcgctgttgcaagccgggctggtggatgagcttatcgtctatattgcgcctaaactgttaggcagcgatgcacgcggattatgcgcgctgccggggcttgagaaactagcgcaagcaccccatttcaaattcaacgagatacgtcatgtaggcccggatatttgcctgcatttagtgaacgcttga

SEQ ID NO: 254901 - DNA, 471 bp, Klebsiella pneumoniae; identical to SEQ ID NO: 173001

SEQ ID NO: 254902 - DNA, 420 bp, Klebsiella pneumoniae
gtgaaacctgctgctcgtcgccgcgcccgtgagtgtgctgtccaggcgctctactcctggcagttgtccaaaaacgacattgctgatgtcgaataccagttcctggcggaacaggatgtaaaagatgtcgacgttctgtatttccgcgagctgctgtccggagtggcgactaacagcgcgtatctcgacggcctgatgaagccgtacctttctcgtctgctcgatgagctgggtcaggtggaaaaggcggtcctgcgtatcgcgctgtttgagctgtcaaagcgtagcgatgtaccgtacaaagttgcgattaacgaagccattgaactggcgaaaacctttggcgctgaagatagccacaagtttgtcaacggcgtgctggacaaagctgccccggtaattcgtcccaacaaaaagtaa

SEQ ID NO: 254903 - DNA, 975 bp, Klebsiella pneumoniae
atggcatgcggcgaattttccctgattgcccgttattttgatcgcgtaaaaagcgcacgtcttgatgttgaaaccggcattggcgacgactgcgcgctcctgaatatccccgagaaaaaaacgctggcaatcagcaccgacaccctggtggcgggaaaccattttttacccgacatcgaccctgccgacctcgcctataaagcgctggcggtaaatttaagcgatctggcggcgatgggcgccgaaccggcgtggttaacgctggctctgaccctgccggaagcggacgaagcctggcttgaagcctttagcgacagcttgttcgtacagcttaactattacgatatgcagctcattggcggcgatactactcgcggaccgctggcgatgacgctgggtattcacggctatgtgccaacgggacgcgcgctgaagcgttccggggcaaagcatggcgactggatttacgtcaccggcacgccgggagacagcgctgctggcctggcgattttgcaggatcggctgcaggtggaagatgccaccgacgcggattacctcctggcgcgtcatctgcgcccgctgccgcgggttctgcagggtcaggcgctgcgcgatctggcgaattcggccatcgatctttccgacggcctgatttccgacctggggcatattctcaacgccagcggctgcggcgcgcgcatcgaccttgatgcaatgccgttctcggatgcgatgctgcgccaggtggataaggagcaggcgctgcgctgggcgctcgccggcggtgaagattatgaactgtgctttaccgtacctgaactcaaccgcggggcgctggacgtggcgcttgccaatctcggcgcgcgttttacctgtattggacagatcgttcctgaatcagaaggcctgcaattcacccgtgagggcaagccggtaacgctggacgttaaggggtatgaccattttggcgcgtag

SEQ ID NO: 254904 - DNA, 516 bp, Klebsiella pneumoniae
atgaccattttggcgcgtagtagagatgtggcgaaaagccggctgaagatgagcaacccctggcatctgctggcaacgggatttggcagcggtcttagccccgtggtccccggcacgatggggtcgctggcgtcgattcccttctggtacttgctgacctttattccctggcagctctattcgttggtggtgatgatgagtatctgcatcggcgtctatatttgtcaccgtacggcgaaagatatggggacccacgatcacggcagtatcgtctgggacgagtttgtcgggatgtggattacgctgatggctttgccgacgatggactggcagtgggttgccgccgggttcgtgatttttcgcatctttgatatgtggaagccgtggcctatccgctggttcgaccgcaatatccacggcgggatggggatcatggtggacgatattgtcgctggggtgatttccgccggggtgctgtacgtcataggccaccactggccaattgggcttttctaa

SEQ ID NO: 254905 - DNA, 975 bp, Klebsiella pneumoniae
atgcactatatccctcttggcgataccgatctccgcgtttcccggctctgccttggctgtatgaccttcggcgaaccggaccgcggcaaccatgcatggaccttaccggaagagagcagccgcccactcattaaatacgccctcgaaggcgggattaactttttcgacacctccaataattactctgacggcagcagcgaagagatcctcggccgcgcgctacgcgaatatgcccgacgcgattccgtaatcgtcgcgaccaaggtttatcatcaggtgggcgatctgccgcagggactgtcgcgggcgcagatcctgcgatctattgacgacagcctgcgccgtctcggcatggagtatgtcgacctgctgcagatccatcgctgggattacaccacgcccattgaagaaaccctcgaggcgctcaacgacgtcgtcaaggcgggtaaagcccgctatatcggcgcatcgtcgatgcatgcgcgccagttcgcgcaggcgctggcattgcaggagcaaaataactgggctcgcttcgtcaccatgcaggatcattacaatttgatttaccgtgaagaagagaatgagatgctaccgctgtgcagccgcgcaggggtcgcggtaatgccctggagcccgcttgcgcgcggtcgtctgacgcgtccctggggagaaaccaccgcccgcctggtatcggatgaattcggtaagtcgctctataatgccatggatgagaatgacgagcagattgccgcaaaccttgctgaggtcgcggaagagcttgatgccgagcgcgctcaggtcgcgctggcctggctattgagcaagcccggcgtggccgcgccgattatcggcgcgtcaaggcaggaacagctggatgaactgctgcatgcggtcgatttaacgctgacgccagagcagattgagaagctggaagcaccgtataaaccgcacccgatcgtggggttcaagtaa

SEQ ID NO: 254906 - DNA, 1863 bp, Klebsiella pneumoniae
atgagttttgatattgccaaatacccgaccctggcgctggtggactccacccaggagttgcgtttgttgccgaaagatagcctgccgaaactgtgcgacgaactgcggcgctacctgctggacagcgtcagccgctccagcgggcactttgcctccggcctcggcacggtagagctaaccgtggcgctgcactacgtctataacacgcctttcgatcgccttatctgggacgtcggccaccaggcttacccgcataaaattctgaccggacgccgcgatcaaatcgggactatccgtcagaaaggcggactgcacccctttccctggcgcggggagagcgagtatgacgttcttagcgtcggccactcgtccacttctatctccgccggcatcggcatagccatcgccgcagccaaagaagataagcagcgtcgcgcggtctgcgtgatcggcgacggggcgatcaccgccgggatggcgtttgaagcgatgaaccacgctggtgatatcaaacccgacctgctggtagtgctcaacgataacgaaatgtcgatctctgagaacgtcggcgcgctaaacaatcatctggcgcagctgctttccggaaaactctactccacgctgcgcgaaggcggcaaaaaggtcttctctggcgtaccgccgattaaagagctgctcaaacgcaccgaggaacatatcaaagggatggtggttccggggacgctgtttgaagagctgggctttaactacattgggccggtggacggccacgatgttatcggtctggttaacacgttgaagaacatgcgcgacctgaaaggtccgcagttcctgcatatcatgaccaaaaaaggccgcggctatgagcccgccgaaaaagacccgattaccttccacgcggtgccgaagttcgatcacaccagcggcgtgctacctaaaagcagcggcggcctgccaacttactcgaaaatcttcggcgactggctgtgcgaaaccgccgcaaaggatgacaagctgatggccgttacccccgcgatgcgcgagggttcaggaatggtcgagttttcgaaaaagtatcccggccagtatttcgacgtggctatcgccgaacagcatgcggtcacctttgccgctggcctggcgattggcggctataagccggtggtggcgatttattcaaccttcctgcagcgcgcctacgaccaggtgatccacgatgtcgctatccagaagctgccggtgttgttcgctatcgaccgcgcaggaatcgttggcgctgacggtcagacccatcagggcgcatttgatatctccttcctgcgctgcatcccggatatggttatcatgacgccaagcgacgagaatgaatgtcgccagatgctctataccggctatcactacaacgacggcccgagcgcagtgcgctatccgcgtggctccggtaccggtgctgcctttgaaccgctggcatcgctgcctatcggtaaaggcgtggtgaaacgcgaaggcgagaagatcgccatccttaacttcggcacgctgctgccgcaggccgccaaagtcgcggagaagcttaacgccactctggtggatatgcgctttgccaaaccgctggatgaagcgctggtgctacagctggccgcagaacacgaggtgctggttacgctggaagagaatgccattatgggcggcgcgggcagcggcgtgaatgagctgctgatgtctcgccgtcgcgcggtgccggtgctgaatctcggcctgcctgatttcttcatcccgcagggaacccaggaagaagcgtatgccgatctcggcctcgacgccgcaggaattgaagccaaaatccacgcctggctagcataa

SEQ ID NO: 254907 - DNA, 900 bp, Klebsiella pneumoniae
atggattttccgcaacagctacagtcgtgcgttgagcaggctaacgaagcgctgcgtcgttttatcgctccgcagccctttcagaacactccgctggtcgaagccatgcagtacggcgcactattgggcggcaagcgcctgcgcccgtttctggtttacgcgaccggcgacatgtttggcgttagccgcgctacgctggacgctcccgccgccgccgtcgaatgcatccatgcctattcgctaatgcacgacgatcttccggcaatggacgatgatgatttgcgccgtggtcagccaacctgccatataaaattcggcgaggcgaacgcaattcttgctggagacgctctacaaacgctggcgttttctatactgagtgatgcgccgatgccggaagtaccggatcgcgatcgtctggcgatgatttctgaactggcgcaggccagcggcatcgccgggatgtgcggcggtcaggcgctggatctggaagcggaaggtcatcaggttgacctgccgtcgctggagcgtattcatcgccataagaccggtgcattgattcgcgcagcggtacgaatgggcgcactgagcgcaggtgaagccggacgcagagcgttgcccgctctcgatcgatacgcagaaaatatcggtctcgccttccaggtccaggatgacattctcgacgtggtaggggatactgccacccttggcaaacgtcagggagccgaccagcagttgggcaaaagtacctaccccgcccttctgggacttgagcaagcccggaaaaaggcccatgacctgattaccgacgcccgccggtcgttaaacgagctggccgcgcaatctctggataccacggcactggaagcgctcgcgaattacataattcagcgtgataaataa

SEQ ID NO: 254908 - DNA, 243 bp, Klebsiella pneumoniae
atgccaaagaaaaatgaggccccggccagcttcgagaccgccctgggcgagctggagcagattgttaatcgtctggaaagcggctcgctgccgctagaagaagcgctcggcgaattcgagcgcggcatacagcttgcgcgccaggggcaggcaaagctgcagcaggccgagcagcgcgtgcaaattttgctggcggatagcgaagatgcgccgctgacgccttttacgccggacgctgaataa

SEQ ID NO: 254909 - DNA, 1569 bp, Klebsiella pneumoniae
atgccaggtgaaaagcgtccaatagtggtatactccgcgccctggatgcagacgccgatcgcgcctgtacaactttttatgcttaaagccccgtcgggcttgccaacgaatattgtcgccatgaagtttatcattaaattgttcccggaaatcaccatcaaaagccaatctgtgcgattgcgcttcattaaaattttaaccgggaacattcgtaacgttctcaaaaactatgatgagacgcttgccgtcgttcgtcattgggatcatatcgaggttcgggcaaaggatgaaaaccagcgcctggctattcgcgatgccctgacccgtatccccggtattcaccatattcttgaagtcgaggacgttccttatacttccctgcacgatattttcgagcagacgctgccgctgtggcgtgaagcgctggaaggtaaaaccttctgcgtgcgcgttaagcgccgcggtaagcatgagtttacctcaatcgaagtcgagcgctacgttggcggcggtttgaaccaacatattgaaacggcgcgcgtgaagttaaccgaccccgatgtgacggtgaacctcgagattgaaaacgatcgcctgctgctggttaaagggcgctatgaaggtattggcggtttcccgataggcacccaggaagacgtgttgtcgcttatttccggcggtttcgactccggcgtctccagctatatgctgatgcgtcgcggctgtcgcgtgcactactgcttctttaatctcggcggcgctgcgcatgaaatcggcgtacgtcaggtggcgcactacctgtggaaccgtttcggcagttcccaccgggtacgtttcgtggcgattaacttcgaacccgtggttggcgagattctggaaaaagtcgatgatggccagatgggcgtggtgctcaagcgtatgatggttcgcgcggcgtcaaaagtcgccgagcgctacggcgtgcaggcgctggttaccggcgaagcgctgggacaggtctccagccagacgctgaccaacctgcgtctgatcgacaacgtctcggataccctgattcttcgtccgctgatttcacacgataaagagcacattattaatctggcgcgtgaaatcggtaccgaagattttgcccgtaccatgccggaatactgcggggttatctcgaagagcccgaccattaaagcggtaaaggcgaagatcgaggcggaagaagagcacttcgatttcgacatcctggaaagagtggtagcggaagcgacgaatatcgatatccgcgatattgctcagcagacagaacaggacgtggtggaagtggaaaccgtcagcggctttggcccgaacgacgtaatcctcgacattcgttctgtcgacgaacaggatgacaggccgttaaaggtggaaggcgtggatgtggtctctctgccgttctataagctcagcaccaaatttggcgatctcgaccagaataaaacctggctgctgtggtgtgaacgcggcgtgatgagccgcctgcaggcgctgtatctgcgcgagcagggcttccagaacgtgaaggtgtatcgcccataa

SEQ ID NO: 254910 - DNA, 633 bp, Klebsiella pneumoniae
atgattcctgaacaacccgcacgccaggatggcgtgccgttgacgttttatattccgggacagtgtttgtcgttttcccaataccagtggggagcgaggctggcccggctcgtattgccagaacgtcgccgccgtttagctcctgtacccgcatttcttattagcacacttattatgtggctgatttttgccttttttgcgtcattgagcgatggtcattatcagttcagattaagcgcctggtccattagcgatggggcgggcgagtatcttttcaggttacgcaattcaaaggtgatagccgtttttctgggatgctacattgtcggcgtgttgaccatccggcttctttatcgccgatttcagagatgttggtcccgtcgcttttatgacgccaatgaagctattcgcagcggatattgccttcagctgtgggaggagggcgtaagctggatggatcactctaatcaaaattaccgggcttttctggcgtggagacacgttaaggggatcgtaactcacggaaaaatggattatttagatttagggaccttaggatttttgtggatccccgttgatttagatgcgtatccgcgagcgcaggtattcaggtttattgaacgtcatatgtga

SEQ ID NO: 254911 - DNA, 594 bp, Klebsiella pneumoniae
atgagcgcgtcggcactgatttgcctcgcccctggtagcgaagagaccgaagcggtcaccaccatagatttactcgttcgcggcggcataaaggtcacaaccgccagcgtcgccagcgatggcgatctgacgattgtctgctcgcgcggcgtcaagctgctggccgatgcgccactggtggaagtggccgatagcgacttcgatatcatcattcttcctggcggcattaagggcgccgagtgcttccgcgacagccctctgctggttgagaccgtgcgtcagtttcacctttccgggcgtatcgtcgcagcgatctgcgccgcggcggccaccgtactggtgccgcataatctgttccccatcggcaatatgaccggatttcccgggttgaaagatcgcattcctgccgggcagtggcaggacaggcgcgtcgtctgggatgctcgcgttaagctacttaccagccaggcgcccgggacgtccattgatttcgctttaaagataattgatctgctggttgggcgtgaaaaagcccatgaagtcgcatcacagctggtcatggcggccggaatttataactactacgaagcgtga

SEQ ID NO: 254912 - DNA, 912 bp, Klebsiella pneumoniae
atgaaagtaaccgtactcggatgcggtgcactgggacagttatggctaactgcgctgtacaaacacgggcatgaagtccagggctggttacgcgtcccccagccattctgtagcgtcaatgtcattgataccgacggtagcgtgtttaatgaatcatttatcgctaacgatcctgattttctcgccagtagcgacctgttgctggtcacgctgaaagcctggcaggtctccaacgcggtgaaaaacctgagcgcaattttgccctcatcatcgcctgttttgctcatgcataacggtatgggaaccgtggatgagcttaaaagcatcagacagccgctgctgatggcttcgacaacccaggctgctcgccgcgacggcaacgtcattgtccacgttgccaatggcaccagccacattggtccggcgaaaaattatccgcaggactacagttatcttgccgatgtgctccagggcgtgctacctgacgttgcctggcataataatatctaccccgcaatctggagtaagctggcggttaactgcgtgatcaacccgctgacggcgttgaagaactgccagaacggcgccttacgcgaatatcctcaggaggtcgctgacatctgctatgaagttgcggcggttatggagcgcgaggggatgcatacctcgccggaaaacctgttattctatgttcatcaggttattgaaagtacggcagaaaatacttcttcaatgctgcaggatattctcgcccagcgccatacggaaatcgactatattaccggttttctgctaaagcgtgctcgagcccacggtatagccgtacctgaaaatacccgtctgtttgaactggttaagcgtaaggagaatgaatatgagcgcgtcggcactgatttgcctcgcccctggtag

SEQ ID NO: 254913 - DNA, 492 bp, Klebsiella pneumoniae
atgccatctttcgatattgtctctgaagttgatcttcaggaagttcgaaacgccgtagagaacgcgacccgtgaagttgaatcgcgttttgattttcgtaacgtcgaagcgagctttgaactgaacgaaaagaacgagtccatcaaggtcctcagtgagtctgatttccagattaatcaactgctggatattctgcgcgccaagctgcttaaacgcggaattgaaggcagttctattgaagttccggatgagttcgtgcacagcggtaagacctggtttgtcgatgcaaagctgaagcagggaattgagagcgcgacgcagaagaaaatcgttaagcttatcaaggacagtaagctgaaggtgcaggcgcagatccagggtgaagaaattcgcgttactggaaaatctcgtgacgatctgcaggcggttatggctctggtacgcggcggtgatttaggtcagccgttccagttcaaaaatttccgcgattag

SEQ ID NO: 254914 - DNA, 396 bp, Klebsiella pneumoniae
gtggttgaggcccgccccgacgataatcatcgaacgaccgtgagttttatcggcgttatcggcaaattcacgggcggtacggatgatatgcgcgcgggagacgccggtgatcttctccgcccacgccggggtgtaggctttcacttcatcgtagccggcggcgcagttgtcatcgttcagaccgcgctccaggccgtagttagccatggtcaggtcatacacggtggtgaccagggcggtagagccgtcggccagctgcaggcgtttggccggcagtttgtgcagcagaatgttttccagatcgactttgttgaagtgctcagacccttcgccgccgaagtacgggaagccgacgttcgccacttcatcatggctgcccagcaggctcagacgtag

SEQ ID NO: 254915 - DNA, 768 bp, Klebsiella pneumoniae
atggcccatcgccagcgccatcgcggcatcggtaccctgcttcggcgccagccacagatcgcagagtttggcgatttcggcgtagtccggagtgatggctacggttttggtccctttatagcggacttcggtaaagaagtgcgcatccggggtgcgggtctgcggcacgttggagccccaggcgatgatatagctggagttataccagtcggcggattccggcacatcggtctgctcgccccaggtcatcggcgaagccggcggcaggtcgcagtaccagtcgtagaagctcaggcaggtgccgccgatcagcgacagataacgggcgccggacgcgtaggagaccatcgacatcgccgggatcggcgagaagccagccacgcggtccggaccgtaggttttgacggtatagacgttggaggcggcaatcagctcattcacttcctgccaggaggaacgtacaaaaccgccgcgaccgcgggcctgtttgaagcttttggctttgtcggcgtcttcgataatcgacgcccatgcctcaaccggatcgctatgctgaactttcgcttcccgccacatcttcatcaggcgtttacgcatcagcgggtatttcaggcggttagcgctgtacaggtaccaggagtagctggcgccgcgcgggcaaccgcgtggttcgtggttcggcaggtccgggcgggtgcgcgggtagtcagtctgctgcgtttcccaggtcaccagaccgtttttgacataaatcttccagctgcatga

SEQ ID NO: 254916 - DNA, 636 bp, Klebsiella pneumoniae
gtgatcctgattggtatcctatggaccctggggctgcacggcgacaccattgtgctggtgtttattcgcccggtctggctgtcgaatatgtcggaaaacctggaagcgtttcagaatggactgccgatcccgcatatcattacccagcagttttatgatctgtggattgcgcccggcggtaccggtgcgctgctggggctggtgatttttatgctgctgcgcagccgtagccagcagatgaaacagctgggaaaaatcgccgcgccgggggcgctgtttaatatcagcgagccgatggtatttggcattccgctggtgatgaacccgtacttcttcttgccgtttattttgacgccggtcctgctggtgattgtctcgtataccgcgatggccaccgggctggtgatgaagccggcggggattgcgctgccgtttaccacgcctatttttatgagcggctatctggcgaccggagggcatatttccggcgcggtgctgcaggtggtgaacctggcgatctcgctggtgatctattatccgttcttccgggtatgggatcgcctgaaggcgaaagaagagcaggcgtccgcgcagccggaggccagcgcgacgctgtcggcggctgaccgtatttaa

SEQ ID NO: 254917 - DNA, 1656 bp, Klebsiella pneumoniae
atgaatacccttcccctctggtggcaaaacggcgttatttatcaaatctatccgaagagtttccaggatacgaccggcaccggtaccggcgatctgcgcggcgtcacctctcgcctcgactatctgcaaaagcttggcgttgacgctatctggctgacgccgttctatgtctcgccgcaggtggataacggctacgatgtggccaactataccgctatcgaccctgcctacggcacgctggacgatttcgatgagctggtggctcaggcgaaggcgcgaggaattcgtatcgtgctggatatggtgctgaaccacacttcgaccgagcatgcctggttccgggaagcgctcagcaaagagagtccgtatcgccagttctatatctggcgcgacggcgagccgaccaccccgccgaacaactggcaatctaagtttggcggcaacgcctggcagtggcacgccgaaagcgagcagtactatctgcatctgtacgccgttgagcaggcggatctgaactgggaaaaccctgccgtgcgcgcagaactgaaaaaagtctgcgaattttgggccgatcgcggcgtcgacggcctgcgcctcgacgtgatcaatgttatctccaaagaccagtccttcccgtccgataccgctggcgatggccgccgcttttataccgacggtccgcgagcgcacgaatttttgcaggagatgagccgcgatgtctttaccccgcgcaacctgatgacggtgggcgaaatgtcctctaccacccttgagcattgccagaagtacgcggcgctcgacggcagcgaaatatcgatgacctttaacttccaccacctgaaggtagactatcctggcggtaaaaagtgggagctggcgcgcccggatttcgtggcgttgaaatcactgttcaggcactggcagcagggaatgcacaatcgcgcctggaacgcgctgttctggtgtaatcacgatcagccgcgcatcgtctcccgtttcggtgatgaagggaaataccgcgtcccggcggcgaaaatgctggcgatggtgctgcacggcatgcagggcacgccctatatttatcagggcgaagagattggcatgactaatccgcactttacgcgcatcaccgattatcgcgacgttgagagccacaacatgtatatcgaacgcgcggctcagggccgggacgcggatgaactgttggcgattctggccagtaaatcgcgcgataacagccgcacgcccatgcagtggaaccgcggtgaaaacggcggattcaccgcaggcgagccgtggattgcgctgtgcgacaactatcgcgagattaacgccgaagcagcgctggcggacccggaatccgtgttttatgcctatcagcagctgattgcgctgcgcaagagcacgccggtgctgacctggggcgattaccaggacctgctgccggaacatccgtcgctgtggtgctaccgccgtcagtggcagggacaaacgctggtcgtcgtggcgaacctgagccgcgagttccagcgctggcagccggaagccatgagcggcgactggcggacgctcatgagcaactacgcggaagtggcgaaccgccctgccgatatgaccctgcgcccgtttgaagcggtatggtggctgcaggcgtaa

SEQ ID NO: 254918 - DNA, 729 bp, Klebsiella pneumoniae
gtgattccggccttgatggcggggctggcgctcggctttattgaaacgcggttgaaacgcatcgtgcctgactatctttacctggtgatcgtgccggtctgttcgctgatcctggcggtcttcctcgcgcacgcctttatcggaccggttggccgcatgattggcgacggcgtggcctgggccgtgcgtcatcttttaaccggcagctttgcgccgattggcgccgcgctgttcggcttcctgtacgccccgctggtgatcaccggagtccatcagaccacgctcgccatcgatatgcagatgattcaaagcatgggcggtacgccggtatggccgctgattgcgttgtccaacatcgctcaggcgtcggcagtggtggggataatcatcgccagccgtaaacagaacgaacgcgaaatctccgttccggccgccatttccgcctatctcggcgtgacggaacccgctatgtacggtatcaatctgaaatatcgcttcccgatgctttgcgcgatggtcggctccggtcttgccgggctgctgtgcggactgaacggtgtgatggccaacggcatcggcgtcggtggcctgccgggcattctctctattcaacccacctactggcaggtttacgcactggcgatggccattgccgtgattgtgccgattgtcctgacgacggtcgtttaccagcgcaaattccgccagggcaccttacagattgtctga

SEQ ID NO: 254919 - DNA, 777 bp, Klebsiella pneumoniae
  misc_feature (684)..(693): n is a, c, g, or t
atgagtaaagtaaatcagcaggacatcgataaacttatcgaactggtgggcggacgcgataatatcgccaccgtcagccactgtattacccgtctgcgctttgtgctgaataatccagccattgccaaaccaaaagaaattgaacaactacgcatggtgaagggctgctttaccaacgccggtcagttccaggtggtgatcggtaccgaggttggcgactactataaagcgctactggcgaccaccggccaggccagcgcggataaagagcaggccaaaaaagccgcacgccagaatatgaagtggcatgaacagctcatttcacatttcgcggagatcttcttcccgctgctacctgcgctgatcagcggcggcctgatcttaggcttccgcaacgtgatcggcgatctgccaatgagcaacggccagacgctggcgcagatgcatccgtcgctgaaaaccctttatgacttcctgtggctgattggcgaggcgatcttcttctacctgccggtgggtatctgctggtctgcggtaaagaaaataggcggcacgccgatcctcggcatcgtgctgggcgttacgttagtttctccgcagttgatgaacgcctacctgctgggtcagcaggtgccggaggtatggaacttcggcctgtttacgattgagaaagtcggctaccannnnnnnnnncctacctgctgggtcagcaggtgccggaggtatggaacttcggcctgtttacgattgagaaagtcggctaccaggcgcaggtga

SEQ ID NO: 254920 - DNA, 948 bp, Klebsiella pneumoniae
atgcaaaaccggctgaccatcaaagatatcgcgcgcttaagcggcgtcgggaaatcgacggtatcgcgcgtgcttaataacgaaagcggcgttagcgaacgcactcgccagcgagtcgaagcggtgatgcagcagcacggtttttcaccctctcgttctgccagggcgatgcgcggccagagcgacaaagtggtggcgattatcgtcacgcgtctggattcattgtcggaaaaccttgccgtccagaccatgctgcccgccttttacgagcagggctacgatccgattatgatggaaagccagttctccccggcgctggtagaggagcatctcggcatgctcgcccggcgcaatatcgacggcgtggtgctgtttggttttaccggcatccatgaagagatgctcaccccgtggcgggagacgctggtgctgctggcccgcgacgcgccgggcatcgcctccgtgtgctatgacgatgaagggtcgatcaggatgctgatgcagcgcctgtacgatcgcgggcatcgccacattagcttcctcggcgttccgcacagcgacgtcaccaccgggcagcgccgccaccaggcctacctcgatttctgccgtcaaaagcacctctcgccccttgccgctctgccgggcctgggcatgaagcagggctacgaaaacgtcgcctgcctgctgtcggctgaaaccagcgcgctggtctgcgccaccgacaccctcgcgctgggggccagcaaatatctccagcaacagggaatcgatcatctccagcttgccagcgtcggcagcacgccgctgatgaagtttctccacccggagatcctgaccgtcgatcccggctacgccgagtccggacgccaggcggctaagcagctgatcgagcagatcgccggcagtcgagagcctcgtcaaatcgtcattcccgccgtactgaattaa

SEQ ID NO: 254921 - DNA, 2709 bp, Klebsiella pneumoniae
atgttgaaaaattttacccgccagctgttcgcccagcttggccgccatttaccgcatcgtttagtccagcgcgatccgcttcctgatgcccgcaatatggcgagcgcgcccatccccgattctcttggcaagcagtgcctgaacgtcgcggcaatggatgagaacgaaatctggcgcgctttcgccagccatccggaagggctcaatgcaggcgaagtggcgcagaaaatcgcccggtatggcgaaaaccagatcccggcgcagaagccgtcaccctggtgggtgcatctgtggagctgctatcgcaaccccttcaacctgctgttgaccgtcctgggtatcgtctcctactcgacggaagatctgtttgccgcggcggtcatcgccctgatggtggggatctccacgctgctgaactttatccaggaagcccgctcgaccaaagcggcggacgccctgaaggcgatggtcagcaataccgcgacggtactgcgggtggtgaatgagcagggtgaaagccgctggtgcgagctgcccatcgaccagctggtgccgggggatatcgttaagctatcggcgggagacatgatccccgcagatctgcgcgttcttcaggcgcgcgatctgtttgtcgcccaggcgtcgttgaccggtgaatcgctgccggttgaaaaagtcgcccgtacccgcgacccgctgcagacgaacccgctggagtgcgacactctgtgctttatgggcaccaacgtggtgagcggttcggcgcaggcgattgttttcgccaccggcggcggtacctggtttggtcaactggctggccgcgttagcgagcaggaaagcgagccgaacgcctttcagaaagggatcagccgggtcagcatgctgctgatccgctttatgctggtgatgacgccggttgtgctgctgattaacggctataccaaaggcgactggtgggaggcggcgctgttcgcgctctccgtcgcggtgggcctgaccccggagatgctgccgatgatcgtcacctcgaccctggcgcgcggggcggtgaagctgtcaaaacagaaagtgatcgtcaagcacctcgacgcgatacagaactttggcgcgatggacattctgtgcaccgataaaaccggtaccctgacgcaggataaaatcgtgctggagaaccacaccgatgtctccggcaaggtgagcgaacgcgtgctgcatacggcctggctgaacagccactatcagaccggactgaagaatctgctcgataccgcagtgctggaaggcgttgaacaggagtcggcgcgcgggctggcggaacgctggcagaaagtggatgagatcccgttcgattttgagcgtcgccgcatgtcggtggtggtgcaggagcagagcaacgttcatcaactgatctgcaaaggggcgctgcaggagatcctcaacgtctcgacccaggtgcgctataacggcgacatcgtaccgctggacgacaccatgctgcggcgcatccgtcgggtgaccgacagcctcaatcgtcagggattgcgcgtggtggcggtggcgacgaagtatctgcccgcccgcgaaggcgactaccagcgcgcggatgaatccgacctgatccttgaaggctatatcgcctttctggatccgcctaaagagaccacagccccggcgctgaaagcgctgaaggccagcggtattacggtcaaaatcctgaccggagacagcgagctggtggcggccaaagtctgccacgaagtaggtctggatgcgggtgaagtggtcatcggcagccaggttgaagcgctgagcgatgatgaactggccgagctggcaaaacgtaccaccctgtttgcgcgcctggcgccgctgcacaaagagcgtatcgtgactctgctgaaacgcgaaggacacgtggtgggatttatgggcgacggcattaacgacgccccggcgctacgcgcggcggatattggtatttccgtcgacggcgccgtggacattgctcgtgaagcggcggatatcatcctgctggagaagagcctgatggtgctggaagagggagttattgaaggccgccggaccttcgctaatatgctcaaatacatcaaaatgaccgccagctccaacttcggcaacgtgttcagcgtgctggtggccagcgccttcctgccgttcctgccgatgctgccgctgcatctgctgatccagaatctgctgtacgatgtctcccaggtcgccattccgtttgataacgttgacgatgagcagatccgtaaaccgcagcgctggaacccggcggatctcgggcgctttatggtcttctttgggccgatcagttcgatattcgatattctgacgttctgcctgatgtggtgggtgttccacgccaatacgccggaacatcagaccctgttccagtccggctggtttgtggtgggcctgctgtcacagacgctgatcgtgcatatgatccgcacgcggcggatcccctttatccagagccgcgcggcctggctgctgatcgtgatgacgctgctggtcatggtggttggggtagcgctgccgttctcaccgctggcggggtatctacagcttcaggcgctgccgttaagctacttcccatggctgattgctatcctggcgggctatatgaccctgacccaaatggttaagggcttttacagccgtcgctacggctggcagtga

SEQ ID NO: 254922 - DNA, 1455 bp, Klebsiella pneumoniae
atgcaactgaagaaattatcgatatataccgccgcattattatttacctcctcggcgttggctcatggctacgtggcgtttccgcccagtcgggcctatcaatgtaatacaggcaaaaacagcgactgcggttcagtacagtgggagccgcaaagcgttgagcaagcgagcggttttcctgaaggcgcaatgccgccggacggtcagctggccagcgcgggtaaagccaacttctcgcagcttgatagccagagcccgactcgctgggctaaaagcgcaataaagagcggggaaaataacttcatctggcaccattctgccccccataaaactaccaactggcgttattacataaccaaacagaactgggaccaaaataagccgctgacgcgcagcgattttgaaagtaagcccttctgtcaaattgacggtaacggcatgacgccggctattgaggtcacccactcatgtaatgtgccagagcgtaccggttatcaggttatttatgcagtctgggaaatcgccgatacggcaaatagtttttatcaggccattgacgtcgattttggcggtaccggcgatgacgctgagaacagttccctctggacaacgcagcttaccggtcagctgagcggaaaagatcttcatgctggtgataaagtcattgcccatttctttaatgccagcggagaggttcattcgctgcaaacggaattgactattgccagcgaagcgcaagggaaatccagccaatggtcttacgatttggcggaagtcattaataccgcacaccatgatagcctgcgtgccggagtaaaagacggcagtggcaacattaatcccatctatggcgttaaccaggtgtatgcgccgcaaggcagcgcgttgcaaagcgtcacgctgagttatagcgaatcgcaagcggacgataccgcgaaagaatccctgagcctcagcaacgtcgccgtaacccacatcgaaaacggcaaagcaacggtgactttcaacgccgcggccaaaggcgaaatgcatctcaccgccgtcgtcagcgatcatgcgggtgcagagaaagggagtctccagcaaacgatagataatcgctctctgccgttatcgattccactgaccaacgttcaggcagtccatcatatgctgcgctactcagccagtaatgcgcagggcgccatcatcagccagggtgtgatcaacctgatgctggaagagaagagcgaaccaacgccagcgcctgcgggaaactacgattataccttcccggataacctgaaaagctatacggcgggaacgaaggtcatgcagcctaaaaatggcaaagtgtaccaatgtcgtccgttcccctacagcggctactgcgtgcagtggagccaacacgccagccagtacgagccgggggttggctctgactgggcgatggcctggaccgaagtcgcccaataa

SEQ ID NO: 254923 - DNA, 462 bp, Klebsiella pneumoniae
atgacacacgacaataaattacaggtagaagccatcaaacgtggcaccgttatcgaccatatcccggcgcaggtcggttttaagctgctgacgctgttcaaactaaccgaaacggatcagcgcatcaccatcggcctgaacctgccgtcaggcgaaatgggccgtaaggatttaatcaaaattgagaacaccttcctgaccgatgagcaggtcaaccagctctctctgtatgcgcctcaggccacggtgaaccgcattgatgagtatgaagtcgtgggtaaatcccgaccgaatctgccggaccgtatcaataacgtgctggtatgcccgaacagcaactgcatcagccacgccgagccggtgtcctccagctttgcagtgaagaaacgtgaaaacgatatcgcgctgaagtgcaaatactgtgaaaaagaattttcacatcatgtcgtgctggcaaactaa

SEQ ID NO: 254924 - DNA, 936 bp, Klebsiella pneumoniae; identical to SEQ ID NO: 176177

SEQ ID NO: 254925 - DNA, 453 bp, Klebsiella pneumoniae
atgatcgttggaaatattcaccatctgcaaagcgggttgccggagcctctgcgcaaagctattgaatacgtgaaagcccatgtcaccgacgcgacgccgctgggtaaacatgatattgacggtaacaatctgttttatctcatttctgaagatactaccgagccgatggccgaccgctgcgccgagtatcacgcccgctacctggacatccagattgtattgaaaggtcaggagggcatgacctttagcgttctccctgccggcgcgccggataccgactggctggcggataaagacatcgctttccaggctgaaggggcgcaggaaaaaaccgtgattctcagcgaaggcgactttgtcgtgttctatcccggcgaagtgcataagccgctatgcgcggttggcgcaccggcgaaggtgcgcaaagcggttgtgaagatgctgatggtttag

SEQ ID NO: 254926 - DNA, 759 bp, Klebsiella pneumoniae
atggattacccgcaaatactcgctccgattttaagctttctgcattgcccaacacctcaggcgtggattgatgaagcccgtaaaccggaaaacctcccgctgctgttgaccgaccatatggtgtgcgaactgaaagcggcgcaaaacgccatgctgctggtgcgtcgatacgtcgcggataaagcaggcgcggatgaactgctggcctgcctgaagccgtacgaggactttacctaccgctgggggccggaaccggatttcgtcgcgctgcataagcagataaataaaagcgctatgccgcagaccgacgatccctggggacgtcagctactcgacagcatgatcctgctaatcaaagaagagctgcatcacttctggcaggtgagggaaattatgctttcccgcgatatcccatacgtcaaaatcaccgccagtaactatgctcgcgggctgcgccgggaagtgcgttcgcatgaaccggtcatgttgatcgataaactcatctgcggagcctatattgaagcccgatcctgcgagcgttttgccgcgctggcgccatggctggatgacgatctgcaaaagttttatctgtcgctgctgcgctctgaagcgcgccactatcaggactatctggatttggcgcagaggattgccggggacgatatcagtgaatgcgtacgccagcttggcgaggcggaagcggcgctcattaacgcgcccgaggcggagtttcgctttcacagcggcgtgcccgcctga

SEQ ID NO: 254927 - DNA, 1023 bp, Klebsiella pneumoniae
atgaaaaaactctccctcctgctcaccggcagcatgatacttgccggcatggcttccagcgttaacgccggcgaactcgctggcaataccgaaggcgctcagatcatccgcgtggaaaaaacccggggccgtatcgatgcgctcaacgatatcgtatatagccaggtaaaaagcaccgtcgccgttcgtcaactgcatatgtctttgctggtgccgcgtaacggcgatctgaaaccggcaatcgtctatttccccggcggcggtttcaccagcgcggcctggaataagtttatcgagatgcgtatggcgctggcgtcggcgggattcgtcgtcgcggcggcggaataccgtacggttcccgataccttcccggccccgattatcgatggtaaagccgccgttcgctatctgcgcgaacatgcagcggaatacgatatagatccgtcgcgtattggcgtgctgggggattccgcaggcggctatatggcgcagatgctggcgcttaccaatggcgacaaaacgttcgatcgtggcgataacctggcgcagtcatcggacgtgcaggccgccgccacgctgtacggaatttcgaatctgttgaatatcggcgaaggttttccgcaggcgattcaaaaagtgcaccagtcacctgcagtcactgaagcgctgctggtccacggtagcgcctttcgtgactggccgggagcgacgattgccagtgacccgcaaaaagcgctggctgccagcccgatgggccatatccgcggtaaaaagccgccatttttaattatgcacggcagcgccgacactctggtttcaccggtacaaagtcaacagctctatcgcgcgctgaagaaagagggtaacccggccgattacgtgctgctggaaggcgcggagcacggcgatgacagctggtatcaaaagccggttattgaacgggtagtgaactggtttaaaaccaccctcggcgcgcccaaagccgccgcgacagcagaaaaagataaaaacgccaatctgtaa

SEQ ID NO: 254928 - DNA, 504 bp, Klebsiella pneumoniae
atgaatacgagcgcaaccctaccgctaaccctgcgccgcatcacggctaatgataatccggcgatagccgctgttatccgccaggtttccgctgaatatggcctgaccgccgataaaggctataccgtagccgatcctaatctggacgagcttttccagctatatagccagccgggcgccgcctattgggtagttgagcaaaacggtcaggttgttggcggcggcggggttgcgcctctgacctgtagcgagcccgatatctgcgaactccagaaaatgtattttatgacctccgcgcgcggccaggggctggcgaaaaagctggcgctgatggccctggatcacgcccgccagcagggattcaaacgctgttatctggaaaccaccgctttccttaaagaagcgatcggtttatatgaacaccttggcttcgagcatattgctgagccactgggctgcaccggccacgttgactgcgaagtcaggatgctgaaagtgctgtag

SEQ ID NO: 254929 - DNA, 2523 bp, Klebsiella pneumoniae
  misc_feature (2180)..(2189): n is a, c, g, or t
atgcgccgcctgggcaactccgtggactgggagcgcgagcgcttcaccatggacgaaggcctgtccaacgccgtaaaagaagtctttgtccgcctgtacaaagaagatctgatctatcgcggcaagcgtctggtcaactgggacccgaaactgcgtaccgccatctccgatctggaagtggaaaaccgcgagtctaaaggctcgatgtggcatatccgctatccgctggccgacggcgcgaaaaccgctgacggtaaagattatctggtcgtcgctaccacccgtccggaaaccgtgctgggcgataccggcgtggccgttaacccggaagatccgcgctataaagaccttatcggcaaattcgtcattctgccgctggttgaccgccgcattccgattgtgggcgatgaacacgccgatatggaaaagggcaccggctgcgtgaagatcaccccggcgcacgactttaacgactatgaagtgggcaagcgtcatgcgctgccgatgatcaacatcctgacctttgatggcgatatccgcgaaaccgcggaagtttacgacaccaaaggcaacgagtccgacgtctactcaaacgccatcccggcggagttccagaagctggagcgctttgccgcgcgtaaagcggtggttgccgccatcgacgcgctgggcctgctggacgagattaaaccgcacgatctgaccgtaccatacggcgaccgcggcggcgtcgttatcgaaccgatgctcaccgatcagtggtacgtgcgtgccgacgtgctggctaaaccggcggttgaagcggtcgagaacggcgacattcagttcgtgccgaagcagtacgaaaacatgtacttctcctggatgcgcgatattcaggactggtgtatctcccgtcagctgtggtggggtcaccgcatcccggcatggtacgacaacgacggcaacgtttacgttggccgcaccgaagaagaagtacgccaggaaaataacctcggcgccgacgtggcgctgcgccaggacgaagacgtgctggatacctggttctcctccgcgctgtggacgttctccactctcggctggccagaaaacactgatgccctgcgccagttccatccgaccagcgtgatggtttccggcttcgacatcatcttcttctggattgcccgcatgatcatgatgaccatgcacttcatcaaagatgaaaacggcaagccgcaggtgccgtttaaaactgtctatatgaccggtttgatccgcgatgacgaaggccagaagatgtccaaatcgaagggcaacgttatcgacccgctggatatggttgatggcatctccctgccggagctgctggagaaacgtaccggcaacatgatgcagccgcagctggcggaaaaaatcgccaaacgcaccgaaaaacagttcccgaacggcattgagccgcacggtaccgacgccctgcgctttactctggcggcgctggcctctaccggccgcgacattaactgggatatgaagcgtctggaaggttaccgtaacttctgtaataagctgtggaacgccagccgctttgtgctgatgaataccgaagatcaggattgcggctttaacggcggcgaaatgaccctgtcgctggcggaccgctggatccttgcggaattcaaccagaccatcaaagcctaccgcgaagcgctggacggcttccgcttcgatatcgccgcaggcattctgtacgagtttacctggaatcagttctgcgactggtatctggagctgaccaagccggtaatgaacggtggttccgagtctgagctgcgcggcacccgtcacacgctggtgaccgttctggaaggtctgctgcgcctggcgcacccgattattccgttcatcaccgagaccatctggcagcgcgtgaaggtcatttgcggtatcactgccgataccatcatgctgcagccgttcccgcagtacgatgcgtctcaggttgacgaagcggcgctggccgataccgaatggctgaagcaggcgatcgtcgccgtgcgtaacatccgtgcggaaatgaacatcgcccccggtaagccgcttgagctgctgctgcgcggctgcagcgacgccgcgattcgtcgcgtgaacgacaaccgcagcttcctgttgaacctggcgcgtctggaaagcatcaccgnnnnnnnnnncagcttcctgttgaacctggcgcgtctggaaagcatcaccgtgctgccggccgatgataaaggtccggtttccgtgaccaaaattatcgacggcgccgagctgctgatcccgatggctggcctcatcaataaagaagatgagctggcgcgcctggcgaaagaagtgagcaaaatcgaaggcgagattagccgtatcgaaagcaaactttccaacgaaggctttgtggcccgcgcgccggaagcggtgatcgccaaagagcgtgagaagctggaaggttatgcggaagcgaaagcgaagctgattgagcagcaggcggttatcgccgcgctgtaa

SEQ ID NO: 254930 - DNA, 366 bp, Klebsiella pneumoniae
atgaaaaagcaggccggcatgacgctaatagaagtgatggtcgcgctggtggtcttcgcccttgccgggctggcggtggtgcaggccacgctccagcaaacccgccagctggggcgaatggaggagaaaattctggccggctggctggcggataatcagctggtgcagctacggctggaaaatcactggcccgcgctgagctggtcggaaaccacggtgcagacggcgggcgtcagctggcacattcgctggcagggcgtggaaaccgacctcccgcagctgcgggcgctggacgtcgaggtccgccatgccaaaagcgaaaagatgcccgtctcttcgctgcgcacctacgtgacgccgccatga

SEQ ID NO: 254931 - DNA, 597 bp, Klebsiella pneumoniae
atgatccagcgagctcgcggatttaccctcgttgaaatgctgctggcgttgaccatcctcgccgcgctcagcgtcgctgcggtcacggtgctgcaaaatgtgatgcgcgccgatacgctcacccgcgataaaggcgagcgcatccagatgctgcagcaaacgttcagccagatggcggcggactttagccaaatcattccccgccgcagccgcgacagcgcgagcctgttttttgccggacgctttcagctcggcagcgacgactgggcgatcgcttttagccgcaacggttggcccaaccctctggggcttctgccgcgttcggaaattcagaacgtcagctaccgcctgcgcggcagccacctggagcgcctgagctacgaccagcaggacccgctgcccggtagtctgcccacggtgaccgttatgcagcgcaacgtgcaggcgtttcgtctgcgcttttacgccagcggccgctggctggatgaatggcagcagccgcagaggctgccccaggggctggaggtcaccctgacgctggagccatacggcgagatccgaaggctgtttctgcttacgccgggaggcagccaatga

SEQ ID NO: 254932 - DNA, 981 bp, Klebsiella pneumoniae
atgaatacccgccagcgcggcgtcgccctgcttatggtgctgctgatcctcgctctgatgatggtgctggcgagcgccatgaccgatcgcagcgtgcggatgtatcagcaaaccgcgacgaccctcgataacctgcaggccaaatggtacgcgctgggggcggaaaccctgacggcggcgttgctacaacgcgacgcgctcgactcgccgaaccaaacccatctggcgcagaactgggcccagcaggggcgacgttttacgctcaatgacggcgagatctacgccacgattaccgacgctcaggcctgcttcaacctcaacgccattaaccagctcagcggcgacgaaagcgttgaaatcccttatcccgcacaggtttttacccgactgctggagaacctcggcagcgagccgctgcgcgccttacagctgaccgccgccctgcgcgactgggtggacagcgatcgccagccgctgctgaacggcgcggaagatgaagtctatatggcgcaatcccccggctatctgagcggcaatcagccgctgcaggatgtcagcgaactgcgcctgctggccgggatggacgcgacgctctatcagcgtctgctgccctacgtctgcgcgcctccggacgatgcgctgcaggtgaacgtcaataccctgcagcccgctcaggccgcgctactgtcggcgctcttcccggctgaactcacccttgccgaagcccggctgctgctgcaggcgcgcgcggccaccggctggagcagcgtcgccgctttcctgtcgcagccgatactacaaaaaaccgataccgccgccgcgcgtccgtggctgacggtgcgcagcgagcgttttatcgccaccttcagcgtagtgatgggcagcgcccgctatcagcaacgtagcctcctgcaaaagcaggggcgaaccttcggcgtcgtccagcggcgctatggaatctattgggtagccgatgaataa

SEQ ID NO: 254933 - DNA, 1197 bp, Klebsiella pneumoniae
atgaataaccaccatacctcttccgccaccgtgctgattattcgcctcaatcctgatgccgcgacggcgatatggcggctggccgcgccgggcgacgaggcgcagagcggagaatggcatcctgacgctggcgatccgacgctcaacctgctggcgcagcgttatccggcctgggtgctggtgcccgccagcgactgcgcgtttcatcgcgttactctgcccgccggcgtgcgccgaaatgcgcagcaggccctggcgtttttactcgaagaacagctggcaacggaggtcgaggagagccattttgccctgctccaccgggataaaagcgattgtgccgtggcggtggtcgggcgggagaagatgcgcgcctggcaggcctggtgcgaacaactcggactcaacgtgctggcactgacgccggatgccctaaccctgccgcacaacccaaccggctggagcgccgtacgctgcggcgagcagtggctgtttcgccacgattcggagagcggtatggcggtggaaacctcatggctcggcgaactgctggttcactggcctgacctcgcgcccatcgcctgctactcgccgccgccggagattgccgcgccatggcagcctctgccgaggcaggatttgctggagctggcggcgagcaacccgcaggcgcgtaaaatctgcttatgccagggcaattttgcccctgaacgccgccggccgccgacgccccgacgctggcgcccggctctcgccgctgcgctggcgctactgctgctgtggagcgggaatcgcctccacgaccatctcgcgctggcgcgccaggccgacgccgcggtacaggccagccgtgacttttaccgccagtggttcaaaagcgaaaaaaacctcgtcaatccacgtctgcaaatgcagcagcatctgcgtcggctggcaagcgcaagcgcccggccggcgctcatctcgcggctcggcgctctgcagcaaatcattgctgaaacgccgggcatccgtctgcgaaccctgagctatgatgccgggcgcaacgcgctgcagctggagatatccgccgtctcatcgcaggctctggagcagttcagccagcgggcgcgggccggcttccgcgtgcagagcggggaaatgaaaccgcacgcagagggtattgaagggcgtctgacgctggaggataacgatgcataa

SEQ ID NO: 254934 - DNA, 486 bp, Klebsiella pneumoniae
atgcataacctgatgaccttatggcaacagcgtacgcgccgcgaacggcatctgctgctgggcatgggcgtgatgctgattatcggcctggtctattacgctttatggcagccctggcaaagtcgcgagacgcagtggcggcaaacgctgacccgggagcaggccagtctgcagtggatgcgccagcagactccccttctgcagcagcttcgccagcagaaatcgcctgccgcgccgcaagagccatcaacggtgattatgcgcgaagccgcccgccacgggatcgccatcgttcgcctgcagccgcagggagctcgcctgggccttagcgtgcagcccgccgattttcaggcgctgatggcatggctcgacgcgctggggcaggcggggatgaccaccgttacgctgacggtggccgccgtggcgcagcagcccggccgggtcaccgtcactacgctggtgctggagcgcagcgatgaaaaatag

SEQ ID NO: 254935 - DNA, 759 bp, Klebsiella pneumoniae
atgaaaaatagactcactatcggcctgctgctggcggcggtctatctcttctggctgctgcttagcgcgccggcgagactgctggccctggcgctgccggaaggcgcgcggctcggcgaaaccacgggcaccctgtggcaaggagaagcccgtcaggccagctggcgcggttttgacatcgcccatttacgctgggagtttggcttttcgtcgtggcttcccggctggcatatcgcgtttagcgcctcctccggcctgcgcggccaggcctggctgcacggcctgaacgagtttgtggtgcgcgagggccgactcgtgattccggcccggacgatcggccagcggctgacgctcgggataccgctggaagctcgtggccaggtgatgctgacgctaccggaagcccgttttaacgctggcggctgccgacagataagcgcgggcgccgtgcagtggcaggatgcggcgctcacctcccccgccggttcgctcgaactggcccaggttagcggcaaactaagctgcaccccggcgggcgcgctggctatcgccctgacccaggattcccatcagcttagcctcaccggacagggcgttctgacacccgacgggcgctatacgtttaacggcatgctgcaaatccgtcaggcggctccggcgctgctgacgctgctggttgcgcaaaccggccgtaaagataagcaggggcgcacgccgtggcagtggcagggacagtggctatccgaggagaaaaaatag

SEQ ID NO: 254936 - DNA, 798 bp, Klebsiella pneumoniae
gtggaaaacatcgcattgttacccgagttcgccgcacaattcccgttaatctggggcggttttttattcttgtccggactggcgttcggcagcttttttaacgtcgttatccatcgtttaccgctgatgatggagtacgcagagggagtgaatctctgcttccccgcatcgttctgtccgcagtgccgtcagcccatcgcctggcgggacaatatcccgctgctgagctttttatggctcaaggggcgttcgcgctgctgcgggcgaccgatttcacgtcgctatccgctgatggagctggcgaccggcgcgctgtttatgctggtcgggtacctgatccctgcgggcatgccgctgctgggcgggttaattttattgtcgctgctgctgatcctcgccgccatcgacgcgcaaacgcagctgctgcctgacaggctgactctgccgctgctgtgggccgggctgctgttcaatcttaccgatctcttcgcgccgctggcggaggcggtcgttggcgcgatggccgggtatctatcgctgtggtcagtgtactgggtgttccgtctgctgaccggtaaagaggcgctgggctacggtgatttcaagctgctggcggcgctcggcgcgtggctcggctggcaggcgctgccgcatacgctgctgctggcttccgccagcggcctgatctggacgctgctgcagcgcctggtaacccgtcgttcgctcgaacagcctctggccttcggcccctggctggcgctggcgggcggcggcatctttttgtggggccaggtataa

SEQ ID NO: 254937 - DNA, 2430 bp, Klebsiella pneumoniae
gtgtcctcattgccggttgccgccgtcctccctgaacttctctctgccctgcagcatgcgccgcaggttttgcttaacgcgccaaccggtgccgggaaatccacctggctgccgctgcaaattctcgccgaaggtaaaatcaacggacgcataatcctgctggagccgcggcggctggccgcgcgtaacgtggcgcagcggctggcggaactgctgggagaaaagcccggcgagacggtgggctatcgcatgcgcgcggagagctgcgtcgggccgaacacgcgcctcgaagtggtgaccgaaggtattttaacgcggatgatccagcgcgatcctgagctgagcggcgtggggctggcgatccttgatgaattccacgaacgcagcctgcaggcggatctggcgctggcgctgctgctcgacgtccagcatggactgcgcgacgatcttaagctgctgattatgtcggcgacgctggacaatgaacgcctgcagaagctgctgccggaggcgccggtgatcgtttccgaagggcgcgcgtttccggttgaacggcgttttttgccgttgccgactcatcagcgttttgacgaggctgtggcgatagccgccgcagagctgctgcgtagcgagaacggctcaatgctgctgtttctgcccggggtcggagaaattcagcgcgtgcaggagcggctggcggagcgggtggcgagcgatgttgtgctgtgcccgctgtacggcgcgttgccgttgagcgagcagcgtaaggcgatactgcctgcgccagcagggatgcgcaaagtggtgctggcaaccaacatcgccgaaaccagtctgaccatcgaggggattcggctggtggtggatagcgctcaggagcgagtcgcgcgctttgacgcccggaccgggctcactcgcctggtgacgcagcgcatcagccaggcctcaatgacccagcgcgccggtcgagccgggcgtctggagccgggtatctgcctgcatctgctggcaaaggagcaggccgagcgcgcggcggcgcagggcgacccggaaatcctgcaaagcgatttgtcgtcgctactgctggagctattgcagtggggatgtcaggacccggcccagctcagctggctggatctgccgcctgcgaccaacctggcggcggcccggcgtctgctcactgacctttctgcgctggaaggtgaccggctgtcggcgcacgggcgcaaaatggcggcgttaggtaacgatccgcgtctggcggcaatgctgacggccgcggaggatgccgatggcgccgccacggcggctaagctggcggcgatccttgaagagccgccgcgcggcggcaatagcgatctcagcgcggcgtttgcccgtcagcagggcaactggcagcagcgggcgcagcagctgatgaaaaggctggcggttcgcggcggtcagcccgacgccgacagcatcgcggcgctgctggcctccgcttttgccgaccgtatcgcccatcgtcgcggtcaggaggggcgctaccagctggctaacgggatgggggcgatgcttgacgccgatgatgccctgagccgccacgaatggctgattgcgccgctgctgctgcaggggagcgcatcgccagatgcgcggatcctgctggcgctgccggtcgatattcacgcgctgattgagcagtgtccggcgctggtccggcgttccgataccgtcgagtgggatgaggcgccaggcacgctgaaggcctggcggcgcacctgtatcggacgcctggtcatcaagacccagccgctggcgaagccggcggaagaggaactgcatcaggcgatgcttaatgggatccgagagaagggactgaacgtgctcaactggacgccggaggcggagcagctgcgtctgcggctgcactgcgcggcgcagtggctgccggaggaggcgtggccggccgttgatgaggcgtcgctgctggcctcgcttgaacagtggctgctgccgcagatggcgggcgtccattcgctgcgggctctgaaggcgctggacgtgcgtcaggcgctgcaaaactggctgccgtggccgctgcgccagaagctggacagcgagctgcccacgcattatacggtgccgaccggtagccgcattgcgattcgctatcacgatgaaaacccgccggcgctggcggtgcgaatgcaggagatgtttggcgaggcgaccactccgactatcgccaaggggcgggtgccgctggtactggagctgctttcgccggcgcagcgcccgctgcagatcacccgtgatttaggcgcgttctggcaggggagctaccgggaggtacaaaaagagatgaaagggcgctatccgaagcacgtctggcccgacgatccggccaataccgccccgacccgccgcaccaaaaagtattcgtag

SEQ ID NO: 254938 - DNA, 537 bp, Klebsiella pneumoniae
atgtccgagccgaaaaggctgtttttcgccattgaacttcctggagaagttcagcagcagatcgttcactggcgcgccgccagctttcccgaggatgcgggtcgaccggtggcggcggctaacctccatctgacgctggcctttcttggcgaagtgagcgcggacaagcagcgggcgctgtctgcaatggccggacggatccgccagccgggttttaccctgacgcttgacgatgccgggcagtggctacgttcgcgggtggtgtggctgggtactcgtcagccgccgcgcggggttttgcaattagcgaatatgctgcgcgcccaggccgcccgcagcggctgctatcaaagcccgcagccgtttcatccgcacatcaccctgctgcgcgacgcgcgccacgcggtgcctattccgccgcccggatttagctgggcgtttgcggtcaacgaatttgttctctaccaatccagctttagccgcggacgcacgcgctatcaggcgctggaacgttaccctttcgacaaggaaagctga

SEQ ID NO: 254939 - DNA, 717 bp, Klebsiella pneumoniae
atgctgttcactcctcccctgcagtccgccatcctgattaaacgttacaaacggtttctcgccgacgtcatgaccccggatggacgcgagctgaccctgcactgccccaataccggcgccatgaccggctgcgccgcgccgggcgacaccgtctggtattccacctcagataatcctaaacgcaaatatgctcacacatgggaattaactgaaaccgtcgagggcgcgacaatttgtgttaatactctacgtgctaatacgttggcgaaagaggcgattctggcaggtaaaattcccgagcttgtaggctacaacacgctgaaaagcgaagtgaagtatggtgatgaaagcagccgtattgatattctgttacaagcagatgaccgacaaaactgctatattgaagtgaaatcggttacgttggcggaaaaggaatacggttatttccccgatgcggtcaccgagcgcggccagaagcacctgcgggagctgatgagcgtggcggcggcgggcgatcgggcggtgatattgttcgcggtgcttcattccgcgatcgaccgtttctctcccgcgcatcatattgatgccagatacgcacagctattgattgaggcgcaaaacaagggggtggaaattctcgcgtacaaggcggaactttctaccgagatgatgactctgaataagccaattaccgtggtgttaacccccggtaaataa

SEQ ID NO: 254940 - DNA, 456 bp, Klebsiella pneumoniae; identical to SEQ ID NO: 172537

SEQ ID NO: 254941 - DNA, 882 bp, Klebsiella pneumoniae
atgaaagattcacactatatcgggcgctttgccccctcaccctccggtgaactccacttcggctcattaatcgccgcgcttggcagctatctgcaggctcgggcgcagaacggtatctggcgcgtgcgcattgaagatatcgatccgccgcgtgaagtccccggcgccgctgaaactatccttcgtcaattagaccactacggcctgcactgggacggagaggtactctggcagtcaaaacgtcacgaagcctatcgcgagcgcctggcctggctgcgcgagcagggcctctgctactactgcacctgcacccgcgcgcgtatccacggtatgggcggcatctacgacggtcactgccgggatttacgcctcggcgcggaaaacgccgctctgcgtctgcggcaaactcgtccagtccttgaattttatgaccagctgcgcggcaccatcgttgccgacgagccgctggcgcgcgaagattttattatccatcgccgcgatgggctgttcgcctataatctggcggtggtggtggacgatcattttcagggcgtcagcgaaatcgtccgcggcgccgatcttatcgaaccaacggtacggcagatttctctctatcagcattttggctggcaggcgccggattatatccatttaccgctggccctcaacgcgcagggcaataaactgtcgaagcaaaaccacgctccggcactgtctgagggcgacccgcggccagaaattgtgcgggcgctaacgtttcttaatcaggatgtcattcaggaatggcagacgctgagcattgaggatttactcaagtacgcgatagcgaactggcggccggagcaaatccagcattctcaaatgcgttccgctgagctatga

SEQ ID NO: 254942 - DNA, 540 bp, Klebsiella pneumoniae
gtgctaagccgtgaagagcgcgaggcagaagccgccgtcgaacaactacatatgacggttatcccgcgtgagcagcatgcaatttcccgcaaagatatcagtgaaaatgccctcaaggtcatgtacagactcaacaaggcgggctacgaatcatggctggtcggcggcggcgtacgcgacctgctgctgggcaaaaaacccaaagattttgacgtcaccaccaacgcgaccccggaacaggtgcgtaagctgttccgcaactgccgtctggtcggccgtcgcttccgcctggcgcacgtgatgttcgggccggaaattatcgaagtcgcgaccttccgcggccatcatgaaggccacaccaccgatcgcatcacctcccagcgcggccagaacggcatgctgctgcgcgacaacatcttcggttcgattgaagaagacgcccagcgtcgcgactttaccatcaacagcctctattacagcgtggcggattttaccgtccgcgacgctgctgcacgatgtgccgccggcgcgtctgtttga

SEQ ID NO: 254943 - DNA, 678 bp, Klebsiella pneumoniae
gtgccgccggcgcgtctgtttgaagaagtcctgaagctgctgcaggccggcgacggatatcaaacctatatcctgctgcgcgaatataatctgttccagccgctgttcccgaccattacccgctacttcaccgagcgcggcgatagtccaatggagcgtatcatcagccaggtgctgaagaataccgataaccgtattcgcaacgacatgcgcgttaatccggcgttcctgttcgcggtgatgttctggtacccgctgctggaaaccgcgcagaaaatcgctcaggagagcgggctggcctactacgatgccttcgcgctggcgatgaacgacgtgctggacgaagcctgccgtacgctggcgatcccgaaacgcatcaccactctggtgcgcgatatctggcagcttcagctgcggatgtcccgccgtcagggcaaacgcgcgtggaagctgatggagcatccaaaattccgcgccgcatacgatctgctggagctgcgcgccggcgccgagaacaatggcgaactgcagcgcctgaccaaatggtggggcgagttccaggtcgctgcgccgcctgctcagaaaaatatgctggatgatttgggtgacgatccggctccacgtcgtcgcaaccgccgtccgcgtaaacgcgcgccgcgtcgcgaaggtagcgaatga

SEQ ID NO: 254944 - DNA, 480 bp, Klebsiella pneumoniae
atgacgcttgcttatatcgctatcggcagcaatctggcctctccgctggagcaggttaacgctgccgtcaacgcgctggcggagattcctgacagccgggtgataagcgtttcctctttctaccgtacaccgccgctggggccgcaggatcagcctgactacctcaacgccgccgtggcgctggagacctctctcgccccagaggcgctgctcgaccacactcagcgcattgagctgcagcagggccgtacccgtaaagctgaacgctggggcccccgcacgctggatctcgatatcatgctgttcggcgaggaagtgttgaatactccgcgcctgaccgtgccgcactacgatatgaaaaaccgcggttttatgctgtggccgctgtttgaaattgcgcctgaactacgtttccccgacggtttggcattgcgcgatgttctggccactctcggcgcagaaaaacccgctagctggtaa

SEQ ID NO: 254945 - DNA, 792 bp, Klebsiella pneumoniae
atgaaaccgaccactatcgccctgctgcagaaatgcaaacaggagaagaaacgcttcgccactatcactgcctatgactacagctttgcaaagctgtttgccgatgagggtatcaacgtgatgctggtcggcgattcgctgggcatgacggtacagggccacgactccaccctgccggtgaccgtagaagatatcgcctaccatacccgcgcggtgcgccgcggagcgccaaactgcctgctgctcgccgatctgccgtttatggcttacgccacgccggaacagaccttcgagaacgccgccatcgtgatgcgcgcgggggccaatatggtcaaaatcgagggcggcgcatggctggcggatacggtgaaaatgctcgccgagcgcgcggtacccgtgtgcgggcacctcgggctgactccccagtcggtgaacgtcttcggcggttataaaattcaggggcgcggcgatgccgggcaagttctgctggatgatgcgctggcgttagaagcggcgggcgcacagctgctggtcctggagtgcgtgccggtcgagctggcgaaacgcgtcaccgaggcgctcaccatcccggtaatcggcatcggcgcgggcaacgtcaccgatggacagatcctcgtgatgcatgacgcctttggtatcaccggtggtcacattcccaaatttgccaaaaatttcctgagcacagcgggcgacatgcgcgccgcggtacggcaatatgttgccgaagtggagtccggtgaatatccgggcgaagaacacagtttccattaa

SEQ ID NO: 254946 - DNA, 855 bp, Klebsiella pneumoniae
gtgctgattattgaaaccctgccgctgctgcgccagcatattcgccgtttacgtcaggaaggcaaacgcattgcgctggttcccaccatgggcaacctgcacgatggtcatatgaagctggtcgatgcggcaaaagccagcgcggatgtggtggtagccagtattttcgtcaatccgatgcagtttgaccgcccggacgatctggcgcgctatccgcgaaccctgcaggacgattgtgagaagctgaacaaacgcaaagtcgatttagtttttgcccctgcggcggcggaaatttatccgcacggcatcgaaaatcagacttacgttgatgttccaggactgtcgacgatgctcgaaggcgccagccgtcctggtcacttccgcggcgtttcgaccatcgtcagcaagctgtttaacctggtacagccggatgtcgcctgcttcggcgaaaaagatttccagcagctggcgctcatccgcaagatggtggccgatatgggctatgacatcgagattatcggcgtgccgattatgcgcgctaaagatgggctggcgctgagctcgcgcaacggttatctcagcgctgagcagcgcaaaattgcgccgggactgcataaggtgatgaatagcgtggcggagaaactggcggccggcgaacgtaatcttgacgaggttatcgcgattgccgctcaggagctgaacgaaaaaggcttccgcgcagatgatattcagatccgcgatgccgatacgctgctcgacctgacggaaaccagtaagcgagcggtgatcctgatggcggcctggctcggcgaagcgcgtttgatcgacaatcagctcgtcgcactcgctggctag

SEQ ID NO: 254947 - DNA, 381 bp, Klebsiella pneumoniae
atgattcgtaatatgctgcagggcaaactccaccgcgttaaagtcacgcaggccgacctgcactatgaaggctcctgcgctattgatcaggatttcctcgatgcgtccggcatccttgaaaacgaggctattcatatctggaacgtgaccaacggtaatcgtttcaccacctacgccatcgccgcagagcgcgggtcgcgaattatctccgttaacggcgcggcggcacactgcgccaacgtcggcgatattttgattatcgccagtttcgtcaccatgcctgacgaagaagcccgcacctggcagccgaaagtcgcctatttcgagggtgaaaacgaaatgaagcgccaggcaaaagccattccggtacaggttgcctga

SEQ ID NO: 254948 - DNA, 1254 bp, Klebsiella pneumoniae
atgcgcatgcttgcccgaatgtttgttttactccttctgcttacggcgtgcagcgcttccgccagcctgttaagccagcagggcacccccgcgcgctatatgcaaacgaccgaagatgcggatatctgggcgcaggttggcaaccaggtagtgagcgtcggcaacgtacgggcagggcaaatactggcggtagtgccgaccgcagccgattactacgagtttaattttggctttgcgaccggctttatcgataaaggccaccttggcccagtgcagggcaagcagcgggttgaggatagcctcggcgacctgcataagcctctgagcaaccagaatctcattacctggaaagatacgcccgtctatgatggcccctccgctggcagcgcgccgttcggcaccctggcgaataatttgcgctatccgattatcagcaagctccgggatcggttgaatcaaacctggtttcagatacgcattggtaaccgcctggcgtgggtgagcagtctggatgcgcaggaagataacggcatccccatactcacttatcaccatattctgcgtgacgaagaaaacacccggtttcgtcatacctcgaccacgacttccgttcgcgccttcagcaaccagatgacctggctacgcgaccagggctatgccacgctgagcatgtatcaactggaaggttatctgcgtaataaagtgaatcttccggcgcgttcggtggtgatcacttttgacgatggtctgaaatcggtcaaccgctatgcgtacccgattcttaagcaatatggctttcacgctacggcttttattatttcatcgcgcatcaagcgccatccgcagaaatgggcgccgaactcgctgcagtttatgagcatttccgagttaaaacagattcaggatgtcttcgacgtgcagtcgcatacccatttcctgcatcgggttgatgcccggcgtcatccgattctgctcagccgcagctatcacaatattctgtttgattttgaacattcgcggcgggcgctggcgcagtttaatccccacgtgctctatctttcttatccgtttggcggctataacgctaaggcggttcaggcggcgaacgacgccggttttcatctggcggtgactaccgtgagaggtaaggtaaagccgggcgacaatccgttcttattgaaaaggctatatattctcagaacggattcgctggaaacgatgtcgcggctgataagcaatcagccgcaggggtag

SEQ ID NO: 254949 - DNA, 771 bp, Klebsiella pneumoniae
atgatgcagctttattgggtcgcgctgaaaagcatctggaccaaagagatccatcggtttatgcgtatctgggtccagacactggtgccgccggtgataaccatgaccctctactttgtcatttttggcaatctgatcggttcgcgcatcggtgagatgcacggttttacctatatgcagtttatcgtgccgggtctgatcatgatggcggtgatcaccaacgcctatgccaacgtggcgtcctctttcttcagcgccaaattccagcgcaatattgaagaactgctggtcgcaccggtccccacgcacgtggtgatcgccggctatgtgggcggcggggttgcccgcggtctgtgcgtcgggattctggtgacggcgatttcgctgtttttcgttccgttccaggtccactcgtgggtatttgtcgctctgaccctgatactgaccgccgtgctattctcgctggccggcctgctgaacgcggtgtttgctaaaacctttgacgacatcagccttattccgaccttcgtgctgacgcccttgacctacctcggcggggttttttattccctgaccctgctgccgcccttctggcaagggctgtcgcatctcaatccgatcgtctatatgatcagcggcttccgctacggtttcctcggaattaacgatgttccgctggcgacgaccttcggcgtgctggtcgtgtttatcgtcgcgttttatctcctgtgctggtatctgatccagcgcggacgcgggctgcgcagctaa

SEQ ID NO: 254950 - DNA, 927 bp, Klebsiella pneumoniae
atgaccattgctctggaactaaaacagctcaagaaaacctaccccggtggagttcaggcgctgcgcggaatcgatctgcaggtcgaagcgggcgatttttacgcgctcctggggcctaacggcgcggggaaatcgaccactatcggcattatcagttcgctggtaaataaaacctccggcgaggtgaatgtttttggctacgatctgcaaaaggatgtggtgaacgccaaacgccagctcggtctggtgccgcaggagttcaacttcaacccgtttgaaaccgtgcagcagattgtggtcaaccaggcgggctactacggcgttgagcgcaaagaagcgatcgtccgcagtgaaaagtacctcaaacagctcgacctatgggaaaagcgcaacgagcgcgcgcggatgctctccggcggcatgaagcgccgcctgatgatcgcccgcgcgttgatgcatgaaccgaagctgctgatcctcgatgagcccacggcgggagtggatattgagcttcgtcgctcaatgtggggattcctgaaagatctcaacgataaaggcacgacgattatcctgactacccactatctggaagaggccgaaatgctgtgccgcaatatcggcattattcagcgcggcgagctggtggaaaacacatcgatgaaagcgctgctggccaagctgaaatcagaaacttttattctcgacctggctcccaaaagcccgctgccggtgctggaaggctatcagtatcgtctggtcgatacgtcgactctggaggtagaagtgctgcgcgagcaggggattaacagcgtgttcactcagctgagcgcgcagggaatacaagtattaagtatgcgtaacaaagcaaaccggcttgaagaactgtttgtcacgctggtgcatgaccggaaaggagaatcagcatga

SEQ ID NO: 254951 - DNA, 663 bp, Klebsiella pneumoniae
atgaacgaaatagatacactcatcagcaacaatgcactatggtcaaaaatgctggtggaggaagaccccggtttctttgagaagctggcacaagcgcaaaaaccgcgctttctgtggattggatgttccgatagccgcgtccccgccgaacgtttgaccgggctggaacccggcgagctgtttgtacaccgtaacgttgcaaacctggtgattcataccgacctgaactgtctttccgtggtgcagtacgcggttgatgtactggaagtcgagcacatcatcatctgcggccactacggctgcggcggcgtgcaggcggcaattgaaaataccgagcttggcctgatcgacaactggctgctgcatatccgcgatatctggtttaagcacagctcattactgggtgagatgcccgaagagcgtcgccttgatacgctgtgtgaattgaatgtgatggagcaggtttacaacctgggtcactcaacgattatgcagtcggcgtggaagcgcggacagaaagtgaccatccacggctgggcctacggcattcacgacggcatgttacgcgatcttgacgtgaccgccgtcagccgcgaaacgctggaacagcgctatcgccagggtatttccaaccttaaaagcaagcacgtcaatcacaagtaa

SEQ ID NO: 254952 - DNA, 570 bp, Klebsiella pneumoniae
atgatttacattaagaatcaaatggttagttttatgaaacatactgtagaagtgatgatcccggaaactgagatcaaagcccgtattgctgagctcggtcgtcaaattaatgaacattaccaggatagcggcagcgaaatggtgctggtggggctattacgcggttcatttatgtttatggccgacctgtgccgtgaagttcaggtaccccatgaagtcgatttcatgaccgcatccagctacggcagcggcatgtccaccacccgcgacgtcaaaatcctcaaagatctggatgaagacatccgcggtaaagatgtgctgatcgtggaagacatcattgactccggcaacacgctgtcaaaagtgcgtgaaattcttagcctgcgtgaacctaaatccctggcgatttgtaccctgctcgataagccaagccgccgtgaagttaacgtgccggtagagttcgtcggttttgcgatcccggatgaattcgtcgtgggctacggcattgactatgctcagcgctaccgtcacctgccctatatcggcaaagtgaccctgctcgacgaataa

SEQ ID NO: 254953 - DNA, 2391 bp, Klebsiella pneumoniae
atggcagaaacaaaatctcaacaatcacggctactcgtgacgctgacggctctttttgcagcgttctgtggcctctatcttttagcgggcggagcctggctggtcgccctcggcggctcctggtactaccctatcgcaggtctggtgatgctgggcgtcaccgtcctcctgttccgcggtaagcgctctgcgctttggctctacgccgcgctgctgcttgccacgatgatttggggcgtctgggaggttggttttgacttctgggcgctgaccccacgcagcgacattctggtcttcttcggcatctggctgattcttccttttgtctggcgtcgcctgccgattccctccgctggcgccgttgccgggctggtcgtcgccctgctgattagcggcggcatcctcacctgggccggcttcaacgacccgcaggaagtcaacggtacgctgagagcagatgcaacgccagcagcgcctatttccgacgttgccgatggcgactggtcggcgtatggccgtaatcaggaaggacagcgttactcgccgctgaagcagatcaacgccgataacgtgaagaatctgaaagaagcctgggtcttccgtacgggcgatctcaagcagcctaacgatccgggcgaaattaccaacgaagttacgccgattaaagtgggcgacacgctctatctgtgtactgcccaccagcgcctgttcgcgcttgatgcggccaccggtaaagaaaaatggcatttcgatccgcagctcaacgccgatccctctttccagcacgtgacctgccgcggcgtttcatatcatgaagccagagcggacaatgcgccggcagatgtggttgccgactgcccgcgtcgtatcattctaccggtcaacgatggccgcctgttcgccatcaatgccgaaaccggtaagctgtgtgaatcctttgctaataaaggcattctcaatctgcaaaccaacatgcctgtcactacgccgggtatgtacgaaccgacttcaccgccgattattactgataaaacgatcgttatcgccggcgccgtgaccgataacttctcgacccgcgagccgtctggcgttatccgcggctttgatgtgaataccggtaagctgctgtgggcctttgatccgggtgcgaaagatcccaacgcgattccgagtgatgaacatcatttcacactgaattcacctaactcctgggcgccagccgcctatgatgcgaagctggatttggtctacctgcctatgggcgtgaccaccccggatatctggggcggcaaccgtacgccagaacaggaacgctatgccagctccatcgtggcgctaaacgccaccaccggtaaactggcgtggagctaccagaccgttcaccacgatctatgggatatggatatgccgtcgcagccgacgctggcggacatcgacgtcaacggtaaaaccgtaccggtaatttacgctccggcaaaaaccggtaatatttttgtcctcgatcgccgtaacggtgagctggttgtcccggcaccggaaaaaccggttccgcaaggggcggcgaaaggtgactacgtctcaaaaactcagccgttctccgatctgagcttccgcccgaaaaaagacctgagcggcgcggatatgtggggcgccaccatgtttgaccagctggtgtgccgggttatcttccatcagctgcgctatgaaggcatcttcaccccgccgtcagaacaaggaactctggtgttcccgggtaacctggggatgttcgaatggggcggtatctccgtcgatccgaaccgtcaggtggcgattgctaacccaatggcgctgccgtttgtgtcaaagctgatcccgcgcggccccggcaacccgatggagcagccgaaagacgccaaaggttccggtactgaagccggtattcagccacagtacggcgttccttacggcgttacgctaaacccgttcctgtcaccgtttggtctgccttgcaaacagccggcctggggctatatctccgcgctggatttaaaaaccaacgaagtggtgtggaaaaaacgtatcggtacgccgcaggatagcctgccgttcccgatgccgattaaacttccgttcaccatgggtatgccgatgctgggcggccctatttctacggcaggcaatgtgctatttatcggcgcgaccgcagataattacctgcgcgcgtacaatatgagcaacggtgaaaaattatggcaggcccgtctgccggcgggcggccaggcgacgccgatgacctatgaagtgaatggcaagcagtacgttgtcatctctgcgggcggtcacggttcgtttggcacgaagatgggcgactatatcgtcgcttacgctctgccggacgacgcgaagtaa

SEQ ID NO: 254954 - DNA, 525 bp, Klebsiella pneumoniae
atggatatttaccgcaaagtgattgccgcatcgctggcgctatttgttacgctttccgcacatgccgggatgacgatggaacgtaaggacatacccgatttaaagcttagtgttgaaatccccgaggggctgacgccaatgtctgaagagatggcaaagctcaaatacccttccgaaaaccgtccacaggtcatttatggcgatgagaaaggcaaagcatcgctgggggttaccgcagggcgcaatccgttaccagcggagaagctcgatgcatttaaagagatgatgcttaagatgctggagagtttaaaaccgcaggccgaggccgttaccgttgatggtcataaggggtggttactcaccttctattcgcaggctgcggatacggaaattctcaatatgatgttaatcacatcgcaggataataaggcggtgcagatgacgtttaatatgaccaaagatttagttgaacagtatcaggaagcggcaaaagcctctttgctttccctgcagttcgcgaagtaa

SEQ ID NO: 254955 - DNA, 1605 bp, Klebsiella pneumoniae
atgcaacgtcgtgaatttcttaaattaaccgctgcggtcagcgtagccagcgcattgccgctctggagccgcgcggttttggctgccggtcgtccctctttgcccgtgccggaactgctgatggctgacgcgcgcaatcgcatctccttaaccattcaggccggaaaaacgcagttcggctctcacctggcgacgacctggggctacaacggtagcctgctggggccggccctgcagcttaagcaaggcgaggcggcaaccatcgatattcataatcgtctggcggaggagactaccgtgcactggcacggtctggaggtttccggcgtcgttgacggtggccctcagggggtgattcccgcaggaggttcccgtaccgtgacgtttacgccaacgcagcgggcggcgacctgttggttccaccctcaccaacacggtaaaaccggcagacaggtggcgatggggctggccggtctggtgctcatttctgatgcagaaagtgaaaagctgctcttgccaaagcagtggggaatcgatgatgtgccggtgatcgtgcaggataagaaattcaccccggaaggccagattgactaccagctcgatatcatgagcgccgccgttggctggtttggcgatacgctgctgaccaacggcgcgctttatccggagcatgccgctcctcgcggctggctgcgtttgcgtctgcttaacggctgcaacgcgcgttctttaaatttctctaccagcgataagcggcccatgtacgtcgtggcaagcgatggcggtctgcttgctgagccggtaaaagttaacgagctgccggtgctgatgggggaacggtttgaagtgctggtggatacgacggacggtaaaccctttgatctgataacgctgccggtgagtcagatgggtatggctattacgccattcgataaaccgcagccagtattacgcgttcagccgctgacgattccggcttccggtaagctgccggatgtccttgccgccatgccagcgctaccttccttacaagggctaacccagcgtacgctgcagctctctatggatccgatgcttgatatgatgggcatgcaggcgctgatgcaaaaatacggcgatcaggcgatgtccggaatggaccacggcgcgatgatgaaccatggcgagatggggaatatgaacactatgaaccacggcgacatggaacatatgaatcatggcggcatgacgcagatgaagcacggtaataaggattttgatttccataacgctaaccgcatcaacgggaaagcatttgatatgaatgtccccatatttgcggcggcgaaagggcagtatgagcggtgggtgatttccggtaagggcgacatgatgctgcatccgtttcatatccacggtacccagttccgtattttatctgaaaacggcaaggcgcctgcagcgcatcgcagcggctggaaagacaccgttcgggtggaaggcgcagtgagtgaagtactggtgaaatttgaccatgatgccccgaaggagtttgcctatatggcgcactgccatctgctggaacatgaagatacgggaatgatgttggcctttacgactgcctga

SEQ ID NO: 254956 - DNA, 360 bp, Klebsiella pneumoniae
atggtagaaaaaatgaagacgcttttcagaacaatagtgcttggcagcctgcttactctctccgccaatagctatgcattaagcgagtccgaagcggaagatatggctgatttgacggcggtattcgtctttctgaagaacgattgcggttatcaaaatctgcctaacacgcagattcgtcgcgctctggtgttttttgctcagcagaaccagtgggatttaagcaactacgacagcttcaatatgaaagcgctgggcgaggatagctatcgggatctcagcggaatcaaaattcctaccaccaaaaaatgtaaagcgctggctcgcgactcgcttagcctgctcgcctacgtgaaataa

SEQ ID NO: 254957 - DNA, 1296 bp, Klebsiella pneumoniae
  misc_feature (1275)..(1284): n is a, c, g, or t
atggataagatcgaagttcggggcgcccgcacccataatctcaaaaatatcaacctcgtcatcccgcgcgacaaactcattgtcgtcaccgggctttcgggttcaggcaaatcctcactggctttcgacacgttgtatgccgaagggcagcgtcgctacgttgaatcgctctccgcctacgcgcggcagttcctgtcgctgatggagaagcccgacgtcgaccatattgaagggctgtcgccggcgatttccattgaacagaaatcaacgtcccacaacccccgctctacggtaggcaccattaccgaaattcacgactatctgcgcctgctgtacgcgcgcgtcggcgagccccgctgcccggatcacgatgtgccgctggcggcgcaaaccgtaagccagatggtggataatgttctctcccagcctgaaggtcagcgcctgatgctgctggcgccgatcattaaagagcgcaaaggcgaacataacaaaacgctggaaaacctcgccggacagggctatatccgcgcgaggatcgacggcgaagtctgcgatctctccgatccgccgaagctggagctgcaaaagaaacataccatcgaagtcgtgatcgaccgctttaaggtccgcgacgatctcagcacgcgtctggccgagtcctttgagaccgcgctggagctgtcgggcggcaccgccatcgtcgccaatatggacgatccgaaagccgaagagctgctgttttccgccaacttcgcctgcccgatttgcggctacagcatgcgcgaactggaaccgcgcctgttctccttcaacaacccggcaggcgcttgcccgacctgcgacggcctcggcgtccagcagtatttcgatccggagcgcgtgattcagaaccctgagctgtcgctggcgggcggagcgattcgcggctgggatcggcgcaatttctactacttccagatgctgaagtcgctggcggaacattatgaattcgatgttgaagcgccctggggcacgctcaataccagcgtacaaaaggtcgtgctgtacggttcaggcaaagagaatattgaattcaaatatatgaacgatcgcggcgatacctccgtacgccgccatccgtttgaaggcgtgctgcataatatggagcgccgttataaagagacggaatccagcgcagtacgcgaagagttagctaaattcattagcaatcgtccctgcgccagctgtgaagggacgcgccttaagcgcgaagcgcggcacgtgtttgtggaaaannnnnnnnnntctcagacatga

SEQ ID NO: 254958 - DNA, 1527 bp, Klebsiella pneumoniae
atgagcatcggccacgcgatggacttcttcaacaacctgaagctctccggccagcgcgcgcaaattgccgaaaaagtactgaaagagattggcgatcgtctgaaattcctcgtcaatgtcggcctgaactacctgacgctctcccgttcggcggagactctctccggcggcgaagcgcagcgtatccgcctcgccagccagatcggcgcaggcctggtcggcgtgatgtacgtactggatgagccctctatcggtctgcaccagcgcgataacgaacgcctgctgggaaccctaatccacctgcgtaatctcggcaacacggtgattgtcgttgagcacgatgaagatgctattcgcgccgctgaccacgttatcgatatcggccctggcgccggcgtgcacggcggtcaggtcgtggccgagggtaagctggaagatatcatggcggtgccggaatcgctgaccggccagttcatgagcggcaagcgtaaaattgaggtgccgaaacagcgcgtacccgcgaatccagagaaagtgctgaagctgtccggcgcgcgcggtaacaacctgaaagacgtaacgctgacgctgccggtggggctcttcacctgtattaccggcgtttcagggtcgggtaaatccacgctgatcaatgacacgctgttcccgattgcccagcgccagctcaacggtgccaccattgcggaaccggcgccgtaccgcgatgtacagggtctggaacatttcgataaagtgatcgacatcgaccagagtccaatcggtcgtacgccgcgctccaacccggccacctacaccggcgtctttactccggtccgtgaactgtttgccggcgtacctgaatcacgttcgcgtggctacacgccgggccgcttcagctttaacgtgcgcggcggccgctgtgaagcctgccagggcgacggcgtgatcaaagtcgagatgcacttcctgccggatatctacgtaccgtgcgaccagtgcaaaggcaaacgctataaccgcgaaacgctggagattaagtacaaaggcaaaacgattcatgaagtgctggatatgaccattgaagaagcccgtgagttcttcgatgcggttccggcgctggcgcgtaagctgcaaacgctgatggacgtcgggctgacctatattcgccttggccagtcggcgactacgctctccggcggcgaggcccagcgcgtcaagctggcgcgcgagctgtccaaacgcggtaccgggcagacgctgtatatccttgatgaaccgaccaccggtctgcactttgccgatattcagcagctgctggaagtactgcatcagctgcgcgatcagggtaataccatcgtggtgattgagcataacctggatgtcatcaaaacggctgactggatcgttgaccttgggccggaaggcggaagcggcggcggagagatcctcgtttccggaaccccggaaacggtcgccgaatgcgaggcttcatataccgctcgcttcctcaagcccatgctgaagtaa

SEQ ID NO: 254959 - DNA, 411 bp, Klebsiella pneumoniae
atgtctttcaaacacggattttatcaattcactcttatcgcggcgctattggtgacaaccgcctgcagctgggtagacggctacagcaatacggcccaccagcagctattgatgctggaacagcgtcatctgcagttcatcagcgatgcggcgacagcgccggtcgaccaacgcttactaagacaagaggatcgccagattcgtcagctatttagcctggcattaagcgacggtgatgcgctgcggcagaataatctgcgcgtgctggagaagaattatcagcggctttacacgcatgtttcccgccaggatgcagcgctgacgcccttcacggccggagctctggcgcaacaaacggaatatctttatcagcaggccatcagcggcgaacagctgcgttcagggagataa

SEQ ID NO: 254960 - DNA, 318 bp, Klebsiella pneumoniae
atgtccatcattaaagaagtcagcgcccaggtgaccggagcaggcgtgaatacggcagaatggcgacagcttatggaggcgatagtaaatgatgaagacagcggcattcgcgacgccggaatgctcacgcttcaggcattacaggagaaagcgcgcggctggttaagtcaggacgacctcattctgctcctcgaagggcagcgcgatattgccagcattcgcgccagcaatgaacagatcgccatgcagacgcacctgcactccacgctgcttcgcctgtttgatgtgaccctgctggcgctgctggggaggatttaa

SEQ ID NO: 254961 - DNA, 354 bp, Klebsiella pneumoniae
atgacaatttcggatttattgcagtactgcatggcaaagccgggcgctgaacaaagcgtacatagcgactggaaagcgacgcagatcaaagcggcggacgtcctgtttgcgatggtaaaagaggtggaggacaatcggcctgcggtatcgttaaaaaccagccccgagcttgcggaactgctaaggcagcagcatcgcgatgttcgccccagcaaacaccttaataaagcccactggagtacggtgtttctggatggctccctgcctgattcgcaaatttactacctggtggatgcttcataccagcaggcgctcgattcactttccgaggctaagcgtaaactattgccatag

SEQ ID NO: 254962 - DNA, 417 bp, Klebsiella pneumoniae; identical to SEQ ID NO: 175286

SEQ ID NO: 254963 - DNA, 1194 bp, Klebsiella pneumoniae
gtgtttcagaaagttgacgcctacgctggcgatcccattctctccctgatggagcgttttaaagacgatccacgtagtgacaaagtaaacctcagcatcggtctttattacaacgaagacggcattattccgcagctgcaggcggttgccgaagcggaggcgcgccttaatgctcagccgcacggcgcctcaatctatttgcctatggaaggactgaacgcctaccgtcacgctatcgcgccgctgttgttcggtgccgatcatccggtactggcgcaacatcgcgtggcctccattcagacgttgggcggctccggcgccctgaaagtcggcgctgatttcctgaaacgctacttctcgggctcgcaggtgtgggttagcgatccgacgtgggaaaaccatatcgcgatattcgaaggggctggattcgaagtaagtacttacccatggtttgatgataaaaccaatggcgtgcgttttgaggcgttcctggaaaaactcaaatcgctaccggagcgcgatattgtgctgctgcatccgtgctgccataacccaacgggagccgatctcagcaatgcgcagtgggacgacgtcgttgaggtgctgaaagcgcgtcatttaattcctttcctcgatattgcctatcagggctttggcgccggcatggaagaggatgcctacgctatccgcgccattgcgcgcgccgggatcccgctgctggtgagcaactccttctcgaaaatcttctccctgtatggtgaacgcgtgggcggactgtcgatcgtctgtgaagatgcagaaaccgcgggtcgtgtactggggcaattgaaagcgaccgtacggcgcaactactccagcccgccgaactttggcgcgcaggtcgtggcggcggtactgggcgacagcgagctgaaagcctcatggctggcggaagtggaagagatgcgtacccgtattctggccatgcgtcacgagctggtgaatgtgctgaaagagacggtgccgggcggtgattttgactacctgcttaagcagcgcggcatgtttagctataccggtttcagcccagcccaggttgaccgcctgcgcgataagttcggtgtctacctgatcgccagcggccgtatgtgcgtagccgggctgaattcaggcaacgtgcggcgcgtcgcgcaggcatttgctgctgtaatataa

SEQ ID NO: 254964 - DNA, 753 bp, Klebsiella pneumoniae
atgcgaaagaagatcgaggggatgttgaccttctttattccctatagcataaagcctcataaactggagcagcacgacgtaaaaaaggataaggaatttatggatagccccccgattgcggacgttgattttacaatgctctggaaggaaagcggttatacgataaaaaattacgttaaacccgcctctgataatcgatttataacgccgcagacaaggacaaacgccatgactcccgagatattactattgcgtgggaaaatcaatcaactttctgaaattagtgaatatattgagttagaactcacagataaccctcaatgggaagcgccgtctgataccagctatttaaatgaaaaagattgggctgatcccgatattgttgacaacgtcagggcgatgcaggccaccaataaacttatcagttggtttggtgaggataatgaggggtacgtgggactatggcgtggtccggataatattcctctggagcaggcacaggtggtacgtctggattcagaagggcaatatgaactggtagcagacaccatcgcaaactatctggcaatcagttgtgacgaagacgaattcccacatatccgccagttactcacaaccaccgggtttagcgtggcgaattctatcgatgagatttggcaacgcattgatgactcaattgttcaacctaatgattatcgtaaccggctttataacgacgcacgaatcctacgcggagaagacccaatagaatga

SEQ ID NO: 254965 - DNA, 1080 bp, Klebsiella pneumoniae
atgcaagcggcaactgtagtcattaaccgccgcgctctgcgacacaacctgcaacgattacgtgaactggcgcctgccagcaaactggttgcggtggtgaaagcgaacgcctacggacacggtcttcttgagaccgcgcgaacgctcccggacgccgatgcttttggcgtcgcccgtcttgaagaagccctgcgcctgcgcgcgggcggtatcgcccagccgattctgctgctggaggggttctttgaggccgctgacctggcgattatttccgcccagcgtctgcatactgcggtacacagcccggaacagctggcggcgctggaagatgccgacttacccgaaccgatcaccgtatggatgaagctggataccggaatgcaccgattaggcgttctgcccgaacaggccgaagccttctatcagcgcctgagccagtgtaaaaacgtccgtcagccggtaaatatcgtcagccattttgcccgtgcggatgagccagagtgcggcgcgaccgaacgtcagctggatatctttaccaccttcgcggaagggaaaccggggctgcgttctatcgccgcatccggcggtatattgctgtggccgcagtcgcacttcgactgggcgcgtccggggattattctctacggcgtgtcgccgctcgacggtggatccaccggcgcggattttggctgccagccggtgatgtccctgacctccagcctgattgcggtccgcgagcataaagccggcgagccggtgggttatggcggaacctggatcagcgagcgcgatacgcgtttaggcgttgtggcgatgggctatggcgatggctatccgcgcgccgcgccgtccggaacgccggtgctggttaacgggcgtgaggtgccgattgtcggacgcgtggcgatggatatgatttgcgtcgatcttgggcctgaagcgcaggataaggctggcgatgcggtcgtgctgtggggcgaaggtttacccgtcgaacgtattgccgaaatcacaaaagtaagtgcttacgaacttattacgcgcctgacttcacgggtgtcgatgaagtacgtggattaa

SEQ ID NO: 254966 - DNA, 1416 bp, Klebsiella pneumoniae
atggcaggaaataaacccttcaacaaaccacagactgaaccccgcgagcgagattatcagctcgatgggttaaaggtcccgccgcactcgattgaagcggaacagtcggtgttgggcggtttaatgctggataacgaacgctgggacgacgttgccgagcgcgttgtttcggaagatttctatactcgcccgcatcgccatattttcaccgaaatggcgcgcctgcaggagtcgggcagcccgatcgacctgattacgctcgccgaatcgctggagcgtcaggggcagctggacagcgtcggcggattcgcctacctggcggaattatcgaaaaatacgccaagcgcggcgaacatcagcgcttatgccgatatcgtccgcgagcgcgcggtggtacgcgagatgatctcggtggccaatgaaatcgccgaagccggtttcgatccccagggccgcaccagcgaagatctgctcgacctcgccgaatcccgggtctttaaaatcgccgaaagccgcgcgaataaagatgaagggccgaaaaatatcgccgacgtgctcgacgccaccgtggcgcgaattgagcagctcttccagcagccgcatgacggcgtcaccggggtcaataccggctatgacgatctcaataaaaagaccgccggtcttcagccgtcggatctgattattgttgccgcgcgtccatcgatgggtaaaacgacgtttgcgatgaacctcgtggaaaacgcggcgatgttgcaggataaaccggtgcttatcttcagtctggagatgccctcggagcagattatgatgcgttctctggcctcgctgtcgcgcgttgaccagacccgtattcgaaccggccaactggatgatgaagactgggcgcgcatttccggcaccatggggattctgctggaaaaacgcaacatctatatcgatgactcctccggcctgacgccgacggaagtgcgttcacgcgcgcggcgtatcgcccgcgagcacggcggcataggcctgattatgatcgactacctgcagctgatgcgcgtgccgtcgctctccgataaccgtacgctggaaatcgccgaaatttcccgctcgctcaaggcgctggcgaaggagctgcaggtgccggtggtggcgctgtcgcagcttaaccgctctctggaacagcgtgcggataagcgcccggtgaactccgacctgcgtgaatctggctccattgagcaggatgccgacttaatcatgtttatctaccgtgatgaggtttaccacgaaaacagtgacttaaaaggcatcgccgaaattattattggtaaacagcgtaacggtcccatcgggacggtgcgcctgacgtttaacggtcagtggtcgcgttttgataattatgctgggccacaatacgacgacgaataa

SEQ ID NO: 254967 - DNA, 984 bp, Klebsiella pneumoniae
atggcaacacgaattgaatttcaccagcacggagggcctgatgttctgcaagcgttggagttcacgccgaaagatcccgcagagcacgaaattcaggtagagaacaaggccatcggcatcaactacattgatacctatatccgcagcggcctctatccaccgccgtcattgccgagcagcctcggcaccgaagccgctggcgtcgtgagcaaagtcggtaacggcgtaaagcatattaaagccggcgaccgggtggtctacgcgcaatcggcgctgggggcctatagctccgtgcataatgtacctgccgataaggccgctattttaccggacgccatctctttcgagcaggcggcagcgtcgttcctgaaagggctcacggtttattacctgctgcgtaaaacctatgagatcaaagcaggcgagccgttcctgttccacgcggcggccggcggcgtcgggctcatcgcctgtcagtgggccaaagcgctgggcgctaagctgatcggtaccgtcggcagcgcgcaaaaagccgaacgcgctaaacaggccggcgcctggcagatcattaactatcgcgaagagaatatcgtcgaacgcctgaaagcgatcaccgacggtaagaaagttcaggtggtttatgattccgtcggtaaagatacctgggaagcgtctcttgattgcctgcagcgccgggggctgatggtgagcttcggcaactcttcgggcccggtgaccggcgtgaatctcggcattctcaaccagaaaggttcgctgtacgttacccgcccgtcgctgcagggctatatcactacgcgcgaagagctgacggaggccagcaacgagctgttctcgctgatcgccagcggggtgataaaagtggatgttgcggagagtcagaaatatgcattgagcgatgcccgccgcgcgcatgaggtgctggaaagccgggcgacgcagggctcgagtttgctgttgccatag

SEQ ID NO: 254968 - DNA, 243 bp, Klebsiella pneumoniae
atgctggaactcttatttgttattggcttttttgtcatgctgttggtcaccggcgtttcactgctgggaattattgccgcgattgtggtcgcgaccgcgctgatgtttgtcggtggtttgtttgcgttaatgattaagctgctgccctggctgctgctggccgtagtcgcggtgtgggtgattcgggcgataaaatcgccaaccgggaaccgttatcgcggtaataaccgctggcgttactaa

SEQ ID NO: 254969 - DNA, 942 bp, Klebsiella pneumoniae
atgctcgactggaccgacagacactgccgttattttctgcgtcagctgtcgcgccacacgctgctgtataccgaaatggtgaccactggtgcgattattcacggtaagggcgactatctggcctacagcgaggaagagcatccggtcgccctgcagctcggcggcagcgatccggctgcgctggcgcactgcgcaaagctggcgcaggcgcgcggctatgatgaaattaacctcaacgtcggctgtccgtccgatcgcgtacagaacggtatgtttggcgcctgcctgatggggaacgcgcagctggtggctgactgtattaaagcgatgcgcgacgtcgtgtcgatcccggttacggtaaaaacccgtatcggcattgacgaccaggacagctatgagtttctgtgcgattttatcgaaacggtatccgggaagggcgaatgcgagatgtttatcatccacgcgcgtaaagcctggctttcaggcctgagccccaaagagaaccgcgagatcccgccgctggactatccacgcgtttaccagcttaagcgcgatttcccgcatctgaccatggcgatcaacggcggtattaagtcgctggaagaggcaaaggagcatcttgagcatatggacggcgtgatggtaggccgtgaggcctatcagaatccgggtattctggcctcggtggatcgggaaattttcggcgtggaaggcgtcgatgctgacccggtttccgtggtccgggcgatgtatccctatatcgaacgcgaactgagtaacggaacctacctggggcacgtaacgcgtcatatgctggggctcttccagggcattcccggcgcgcgccagtggcgtcgctatctgagcgaaaatgcgcataaagccggggcggacatcaatgtactggaacaggcgctgaaactggttgccgacaagcgttag

SEQ ID NO: 254970 - DNA, 489 bp, Klebsiella pneumoniae; identical to SEQ ID NO: 175295

SEQ ID NO: 254971 - DNA, 516 bp, Klebsiella pneumoniae
atggataagaccacttcgcaacaaatgttagcgcatgctgaaaagctctgcgcgcagcgtggcgtgcgcctgaccccgcagcgcctcgaagtattgcgtttgatgagcctgcagcaaggggcaatcagcgcctacgacctgctcgatctgcttcgtgaaaaagagcctcaggctaaaccgccgaccgtctatcgggcgctggagtttttactggagcaggggttcgtgcataaggtggaatcgaccaatagctacgtgctgtgtcaccttttcgatcagccaacccacagctcagcgatgtttatttgcgaccgctgcggcggcgtgaaagaagagtgcgcggaaggcgtcgaagatataatgcatacgctggcggcaagaatgggattcgcgctgcgccacaacgtgattgaagctcacggcctctgcgctgcctgcgtcgaggtcgaatcctgcagtacgccgggccactgtcatcacgaccataccatccagattaaaaagaaagcccgctga

SEQ ID NO: 254972 - DNA, 213 bp, Klebsiella pneumoniae
atgatgaataaagacgaaatcggcggtaactggaaacagttcaaaggtaaagcgaaagagaaatggggcaagctgactgatgatgacatgaccgtcattgagggtaagcgtgaccagctggtcggtaaaatccaggaacgctatggatatgaaaaagaccaggcagacaaagaagtgaccgattgggaaaccaaaaacgactaccgctggtag

SEQ ID NO: 254973 - DNA, 1317 bp, Klebsiella pneumoniae
atgttttttaacgccgccgacaaagccctgtggcgcttagcgctgcccatgatcttctccaatatcaccgttccgctgctcgggctggtggacactgccgttattggtcatctcgatagcccggtttatctggggggcgtggcggttggcgcaacggcaaccagcttcctctttatgctgctgctgttcctgcgaatgagtaccactgggctgacggcccaggcgtacggcgctaaagatccgcagcgtctggcgcgtgcgctggtgcagccgctgtgcctggcgctggccgccggggcggccattgtgctcttgcggatgccgttgatcgacctggcgctgcacatcgtcggcggcagcgaagccgtgctcgaacaggccagacgcttccttgagatccgctggctaagcgcaccggcatcgctggcgaacctggtcctgctgggctggctgctgggcgtgcagtacgccagagcgccggtgatcctgctggtggtcggcaatgttcttaacattgtgctcgatgtatggctggtgatgggtctgcatatgaacgtgcagggggcggcgctggcaacggtcacggcagaatacgccactttctttatcggcctgctgatggcaaggcgcgtgctggcgctgcgcggcgtttccctgctaatgctaaaaaacgcctggcgcggcgatatacgtcgcctgctggcgctgaatcgcgacatcatgctgcgttcgctgctgctacagctttgcttcggtgcggtaacggtatttggcgctcgcctcggcgccgatgtcgtcgcggtcaatgcggttctcatgacgatgctgacctttaccgcctacgcgctggacggttttgcctacgccgttgaggcgcactccgggcaggcctacggcgcgcgcgacgatagccggctgctggctgtctggcatgcggcttgccgccagtcaggaatagtggcgctggcgtttgcgctgatttacggacttgctggcgaacagattattgcgttgctgacctcgctgccttccctgcagcagctggccgaccgctatctggtctggcagatgattctgccggtcattggcgtctggtgctacctgctggacggcatgtttatcggtgcgacgcgcggtgcggagatgcgtaacagcatggcggtggcggcggcggggtttgccctgacgctattgacggtacccacgctcggtaaccatggactgtggctggcgctgacggtatttctcgctctgcgcggcgtttccctggcagcgatctggcggcggcactggcggcgcggaacctggttttcgtaa

SEQ ID NO: 254974 - DNA, 627 bp, Klebsiella pneumoniae
  misc_feature (515)..(524): n is a, c, g, or t
atgaaagcgttaacgaccaggcagcaagaggtgtttgatctcattcgggatcatatcagccagacgggcatgccgccgacgcgtgcggagattgctcagcgcttggggttccgttccccaaacgcggcggaagagcacctgaaagcgctggcgcgtaaaggcgctatcgaaatcgtttccggcgcctcccgcggtattcgtctgctgacggaagaagaaacgggcctgccgcttattggccgcgtagcagcaggggaaccgctgctggcccagcagcatattgaaggccactatcaggtcgatccggccatgtttaaaccgaatgccgattttctgctgcgcgtcagcggtatgtcgatgaaagacatcggcattcttgatggcgacctgctggcagtccataaaactcaggatgtgcgtaacggccaggtagttgtggcgcgtattgacgaagaagtaaccgtaaagcgcctgaaaaagcagggtaacgtcgtcgaactgctgccggaaaacannnnnnnnnnggaaaacagcgaattttcgccaatcgtggtggatcttcgtcaacaaagtttcaccattgaaggcctggccgtcggcgttattcgcaacggcaactggcagtaa

SEQ ID NO: 254975 - DNA, 369 bp, Klebsiella pneumoniae
atggccaataataccactgggttaacccgaattattaaagcggcagggtattcctggaaaggattccgggcggcatgggtcaacgaggccgcatttcgtcaggaaggcatcgcggccatcattgccgtggtgattgcctgctggttagacgtcgatgccattacccgggtgctgttaattggctcggtcctgatagtgatgatagttgaaattatcaacagcgcgattgaagcggtcgtggaccgtatcggccctgagcatcatgagctttccgggcgcgcgaaagacatgggctctgcggcggttttgctggcgattgtcatcgcgctgatcacctggggaacccttttatgggcaaattaccgctaa

SEQ ID NO: 254976 - DNA, 2424 bp, Klebsiella pneumoniae
atgtctggctggcaacgaatttactataaattactgaatttaccattaagggcgctggtaaaaagcaagtcgattccggcacaacctgctcaggagttaggcctggatacctcgcggcccattatgtacgtcctgccctacaattcgaaggcggacctgctgacgctgcgcgcgcaatgtctggagcatgagttaccggacccgctggagccgctggagatcgacggcgccctgcttccgcgctacgtatttatccacggcggaccgcgcgtattcacctattacacgccgaaagaagagtctatcaagctctttcacgactatctggatttgcaccgtaatcatcccgatcttgatgtgcaaatggtgccagtctcggtgatgttcggtcgcgcgccggggcgtgaaaaaggcgaggttaacccgcctctgcgcatgctcaacggcattcagaaattcttcgccgtactgtggctgggccgcgacagctttgtgcgtttctcgccttcggtctcgctgcgtaaaatggcggacgaacacggcaccgataaaactatcgctcagaagctggcccgcgtggcgcgtatgcacttcgcccgtcagcgtctggcggcggtcggtccgcgcctgcctgcgcgccaggatctgttcaataaactgctggcgtcgaaagccattgcccgtgcggtagaagacgaagcgcgcagcaagaaaatttctcatgaaaaggcgcagcaaaacgctatcgccctgatggaagagatcgccgcgaacttctcctacgagatgattcgcctgacagaccgcgtgctgggctttacctggaaccgtctgtatcagggcattaacgtgcataacgccgagcgcgtgcgccagctggcgcacgaaggccacgagatcgtttatgtcccgtgccaccgcagccatatggattatctgctgctctcgtacgtgatttatcatcagggcctggttccgccgcatatcgccgccggtatcaacctgaacttctggcctgccgggccgattttccgtcgcggcggcgctttcttcattcgccgtacgttcaaaggcaataagctctattcgacggtattccgcgaatacctcggcgagctgttcagccgcggctactccgtcgaatacttcgttgagggcggccgctctcgtaccggacgcctgctggatccgaaaaccggtaccctgtcgatgaccattcaggcgatgctgcgcggcggtaatcgtcccatcaccctggtgccaatctacatcggctacgagcacgtgatggaggttggtacctacgctaaagagctgcgcggagcgacaaaagagaaagagaacctgccgcagatgctgcgcggcttaagcaagctgcgtaatctcggccagggctacgttaacttcggcgaaccgctgccgctgatggcctacctgaatcaacatgtgccggactggcgcgagtcgatcgatcctatcgaagccgttcgcccctcctggctgacgccgacggtaaataacatcgcctcagacctgatggtacgcattaacaatgccggtgcggccaacgctatgaacctgtgctgtacggcgctgctggcatcgcgtcagcgttccctgacccgcgagcagcttaccgaacagctggagtgctacctcgccctgctgcgcaacgtgccgtactctgcggacgcgaccacgcctgcggcgtctgccagcgagcttatcgaccacgcgctgcagatgaacaagttcgaagtcgagaaagacacgatcggcgatatcatcattctgccgcgcgagcaggccgtcctgatgacctattaccgcaacaacatcgcccatatgctggtgatgccgtcactgttagccgccatcgtcactcagcatcgtcgtattacccgcagcgaaatattgcgtcacgtcgagatgttctatccgttcctcaaggccgagctgttcctgcgctgggaaaaagcggagctggcgggcgtcgtcgatgcgctgattgccgagatgcagcgtcaggggcttatcgccgtgaatgacgatgaggtgagcgtcaatccgtctcatgcccgttccctgcagctgctggccgcaggcgcgcgcgaaacgctgcagcgctacgccatcaccttctggctgctgagcgctaacccgtcaatcaaccgcagttcgctggagaaagagagccgcaccgtggcgcagcgcctgtccgttctgcacggtatcaatgcgccggagttcttcgataaggcggtattcagcacgctggtgctgaccctgcgcgacgaaggctatatcagcgataccggagatgccgagccggaagagacgttgaagatctaccgtatgctggcggatctgattacttctgatgtgcgtttgacgattgaaagcgttacccaggatgaagcgtaa

SEQ ID NO: 254977 - DNA, 867 bp, Klebsiella pneumoniae
atggagtggagtctgacgcagaacaagctgttggcgtttcaccgcctgatgcgtactgacaaaccgatcggcgcgctgctgctgctgtggccgacgctgtgggcgctgtgggtggccacgccggggataccgccgctgtggatcctcgccgtgtttgttgccggcgtctggttaatgcgcgccgcaggctgcgtggtcaatgattatgccgatcgtaaatttgacggccacgttaaacggacggcccgccgtccgctgccgagcggcgacgtcagcgaaaaggaggcgcgaacgctgtttgtcgtgctggtgctgctttctttcctgctggtgctgaccctgaacaccatgaccattctgctgtcgatagcggcgctggcgctggcatgggtctatccatttatgaaacgctacacccacttgccgcaggtggtgctgggcgcggcatttggctggtcgatcccgatggccttttcggcggtaagcgaatcgctgccgctcagctgctggctgatgttcctcgccaacatcctgtgggcggtggcctacgatacccagtatgcgatggtcgatcgtgatgatgacgtcaaaatcggtatcaaatcgacggcgattctgtttggcgacaacgatcgcttaatcatcggtattttacaggtggcggtactgggtctgatggcggcagtaggctggctgagcgggctgggctgggaatattactggtcgttgtttatcgccgcggcgctgtttgtctggcagcaaaagctgatatttaaacgcgaacgcgatagctgctttaaggcgtttatgaataataactacgtggggctggtactgtttctcggcctggcgatgggttatatgtag

SEQ ID NO: 254978 - DNA, 498 bp, Klebsiella pneumoniae
atgccacatcctgcgcttacgcaactgcgtgcgctgcgttattttgccgcaatgccccagctggacgcgcatctgcgcgactggctattgctggaagactcaatgaccaaacgctttgagcaacaggggaagcgagtcagcgtcatcatggttaacgaaggttttgttggacgcgaagcgctggcagatgaagcgcctctgttacccgtcgaatcccgctactggctgcgggaaattatcctttgcgctaatggcgaaccctggcttgctggccgaactatcgtgccggagtcgacgctgagcggccccgaactggcgctgcaacagctgggacaaacgccgctgggccgctatctcttcacgtcatcgacgctaacccgcgattttattgaaattggtcgtcatgcagagctgtgggggcgtcgttcccgcctccggttgagcggcaaaccgctgctgctgacggagctgtttttgcctgcatcgccgttgtattaa

SEQ ID NO: 254979 - DNA, 933 bp, Klebsiella pneumoniae
atgaaaatgaagaaaagtctcgttgccctctgcctgtccgtcggcctgatggcctgcgtacccgcagtcagttttgctgatgttaatttcgtgccgcagaacacctctgccgcgccgtcgattccggcctccgcgttgcagcagctcacctggactccagtcgaccaatccaaaacgcaaaccacaaagctcgccgtggccgggcagacgctcaatgtccccggaatcagtggtccggtcgccgcatacagcgttccggcgaatattggcgagctcaatattacgttaaccagcgaagtggaaaaacaagctgcggtatatgcaccgaacgtgctgattcttgatcagaatatgacgccatctgcattcttccccagcagctactttacttatcttgaaccgggcgtgatgagctcagatcgtctggagggcgtaatgcgcctgactccggcgctgggacagcagaaaatttatgtgctggtctttaccacgccgcaggatttacagcagaccactaaattaatcgatccggcgaaggcatacgccaaaggcaccggcaatgcggtgccggatattccggatcccatcgcgaaacacgtcaccgacggtaccatcagcctgaaggtaaaaacctctaccggctccagcgtgctggttggcccgctgttcggttcgtctggtccggggcctgttaccgtcggtaataccgctgctcctgcctatagcgcgccggtcgccgccccggccccggctccagcggcgaaaaccgaaccgatgcttgatgataccgaaacttacttcaataacggcattaagcaggcggttgcgaaaggcgatatcgacaaggccctgaaattgatgaacgaagctgaacgtcttggctcgaaatctgctcgttccacctttatcagcagtgtaaaaggcaaggggtga

SEQ ID NO: 254980 - DNA, 1287 bp, Klebsiella pneumoniae
atgatgattactctgcgcaaacttccactggcggtcgccgttgcggcaggcgttatgtctgctcaggcgctggccgttgatttccacggctatgctcgttctggtatcggctggaccggcagcggcggtgagcaacagtgcttccaggcaaccggtgctcaaagcaaataccgtcttggtaacgaatgtgaaacctatgcggaactgaaactgggccaggaagtctggaaagaaggtgataagagcttctacttcgatactaacgtcgcctactctgtgtcgcagcagaacgactgggaatccaccagtccggcattccgtgaagctaacgtgcagggtaaaaacctgatcgaatggttgccaggttccaccatctgggccggtaagcgcttctaccagcgtcatgacgttcatatgatcgacttctactactgggatatttctggtcctggtgcgggtattgaaaacatcgatctgggcttcggtaaactctctctggcagcaacgcgttcttctgaatccggcggctccggtaccttcgccgatcgcgaccagttcggtaatcgcgtttacgacaatatcgtgccgaacgatgtattcgacgtgcgtttagccggtctggaaactaacccaggcggcacgctggagctgggcgttgactacggccacactaacatccctgatgattattctctgcagccgggcgcttccaaagacggctggatgcttaccgctgagcatactcagagcatgctgaaaggctttaacaaatttgttctgcagtatgcaactgactctatgacctccagcggtaaaggtgttccgcagggtggcagcattaataacgatggatctatgtggcgcgtgctggaccacggtgcgatctctctcggcgatagctgggatctgatgtacgtcggtatgtaccaggatatcgaccgcgacaacaacaatggtacccaatggtggaccgtcggcgttcgtccaatgtacaagtggacgcctatcatgagcaccctgatggaaatcggctacgacaacgtcaaatctcaacgcaccagcgatcgtaacagccagtataaagtgaccctggcccagcagtggcaggctggtgacagcatctggtcccgtccggcaatccgcgtattcgcaacgtacgccaaatgggatgagaaatggggctataacgatagcggcgtagcatataacgacaccagtgctaaaacctttagccgtggcgatagcgacgagtggaccttcggtgcccagatggaaatctggtggtaa

SEQ ID NO: 254981 - DNA, 411 bp, Klebsiella pneumoniae
gtgaaaaaattatccggtctggttctgttatctgctatgtctttcatccccgcagcgtttagtgctcccaccgggacgctcagcgtacatattctcaatcagcaaaccgggctgccttcctcgggcgtgacggtgaccctggaaaaacagcaggcgaataaatggaccgagcttgcaagcggcgtaaccgacaacgatggccgaattaaatcgctgtatccggcagaagaggatatgcagccggggatttacaaagtgaccttcaaaactggcgatgacttcaataagcagaaactggcctcatttttcccggagatcccggttctctttaccgtgacgcgcaccaatgaaaagctacatattcctttgctgctcagccagtatggctattccacctataaaggcagctga

SEQ ID NO: 254982 - DNA, 528 bp, Klebsiella pneumoniae
atgaagatatggcctgttctgactggcgttgctatcgcattaacccttgtcgcctgtaaatcccccacgccacccaaaggtgtcgagcccataagcgactttgacgcgagtcggtatctgggcaaatggtatgaagttgcccgccttgaaaatcgtttcgaacgcggcctggagcaggtcaccgcgacctacggtcaacgcagcgatggcggcattagcgtagttaaccgtggttacgatccgcagaaacaaaaatggaacgagagcgagggtaaagcttatttcaccggcgctcctgatactgcggcgctgaaagtctccttttttggcccgttttacggtggctataacgtgatcgcgctggatagccagtatcaatatgcactggtcagcggccccgatcgcggctatctgtggatcctgtcgcgcacgccgaccatccctgactccgtgaagcaggagtatgtgagcattgcgcggaagttgggcttcccggtcgataaactcgtctgggtgacccacaactaa

SEQ ID NO: 254983 - DNA, 495 bp, Klebsiella pneumoniae
atgaaactctggagtaaaacgctaatcgcttctgccgtatgcttatttcttgccggctgtgatgattcctcaaaagttgatgctaatctggataaagcaaaagataacgcccaacaaattaaagaggcggcgtccgataaagccgacgcaattaaggatgaagctgataaacacattgatgcaataaaaaaacaggcggcggacgaggccaacaatctcagcagccaggcctccagcatcaaggcggaggcggataaaaaagcggaagcaattgctcagcaggcccaggcccaggctgatgccgtcaagcaggatgcccggcagaaaagcgaccaaatcgtgcaggaagctggcaaaattaaagacagcgcgattgttgatgccaataacctggccaacgatgcggcgaataaaacaaaagaaattaaagagagtatcgctcccgctaaaaccgcagaagatgcggccaatgcgaaccagcagacatcacactga

SEQ ID NO: 254984 - DNA, 894 bp, Klebsiella pneumoniae
gtgctggcgaatcttgaagtaaaatggctttacgatgtgattgcccttgaggaagccagaagctttacgctcgcggccaaaagccgcaatatttcgcagtcctccttcagccgccgcattcaagcgctcgagtcttcgctgggcttcagcatcttcgaccgttcggcaaacccgctgcagctgaccaaccgagggaagattttcgttggctacgcacgaaatatgctcgacgatatggacttccagatcagccgaattaaagggctgaacaacaccacgcagaaaataagaatcgacgccgcgccgtcgctttccgttttattactgccagaaattatcgccggttataccgaccggaagaataaaacttttcatgttgaatcgattaatgtcaacgatgccgtatttaatcttaaagaaggcaaaagtgattttatcctgtcgttttataatgaagagctgatgaactatccgtttatcaatcataaaattttcgactcagcgctgcacctcgtttctccctgcgataagcacggcagaccgctttttaatttgcatcgcggggtgctgccgctgatgaaatacgccaacgacagctatatggggcgccaggtgaatcaggtgatcgaccgcaagccggaaattaccttctcgctgacctttgtctcctcaatgagcgagctgttaaaacgtatgatcctcaacggcgacggcgtgggctggctgccgcaatactctatcaagcgcgagctcgaggaaggccgcctgacgataatggatgagagcctgtccttgccgatcggcgcctatatttatcgctccggtgcgcggctcaaccagtccgccgaacgtttctggcagcatattaaggccatgagtaccgtcaccgcatag

SEQ ID NO: 254985 - DNA, 687 bp, Klebsiella pneumoniae
atgtctaccgttatcgatacctttatcgccccgccgtgccacgctgaaatcgatatcctctaccaggatgaccatctgctgctgatcgataaaccctcaggcctgctgagcctgtcggggaaaaatcccctgaatctcgactcggtacattatcgactggtacaacagtttcccggctgcacgctggcgcaccgtcttgatttcggcacctccgggctgatggtgattgcgcgcaacaaggccatcaacgccgcgctctgccagcagttcagccagcgtgcggtgagcaaagtctacagcgcgctgctgtgcgggcatctggcggatgatgaaggaaccgttgacgctccgatagccaaagatccggcgctgtttccgctgatgacgatttgcccgcgccacggcaaacctgctcgctccggctatcgggtcgtggagcgcctgcgctatcaaggtcaagtgccggtaacgcgagtccagctgacgccggaaaccggccgcacccatcagttgcgtattcactgccagcaccttggccatcctattctgggctgcgatctgtacggcggcatggcgcttccgggaacagaacaggcaccgcgcctgatgctgcacgccagcgaactgcatttcgtgcatccggttagcggagagaggatcgacgccgtcagcccgagcgcgttttaa

SEQ ID NO: 254986 - DNA, 810 bp, Klebsiella pneumoniae
atgaagagcatgagtgaaaggctggcgtttccgatgtacgcggtgaatgacgaggatactcaggcgctctggtgggcggtgcggcagctgctggcggctcgcggcgtggtggatgaggatgggctgtcatatacggtacctgaggatctgctggcgcactggcgccatccggcgctgctgttgagccagacctgcggttatccgctggtgacgctgttggcgaacgtgcaaacggtcggctgttttcactattcggcgcccggatgcgaagggcggaactaccgcagcctgctggtggcgcgtaaagcggacggtggtcaggtgctggcagattttcgcgggcgtcgggtcgcgtgcaattcgccggattcccagtccggctataacgtgctgttaaaaatgatcgcgccgctgtcgcgcgatgggcgtttcttctcaacggtcgcgtttagcggcagccatcgccagtcgctgcgtgaacttcagcaggggacggcggatattgccgccattgattgcgtgacctgggcgctgctgcagcgtcatcagccggaggcgctggcggggctgacggtgattgcccatagcccgctggccccggggctaccgctgattacgtcggcgacgacgcccgcggcgacgctggagttgctcagagaggcattgcagcagctggtgagcgatgaacgctatcagccgctttgcgaagcgctgtttatctgcggctacagcgatatgcggcgcgcggactatcagccgctgctggcgtggcgtgaagaggccgcggccagaggcgttgtgcggctatag

SEQ ID NO: 254987 - DNA, 984 bp, Klebsiella pneumoniae
atggcaaaaagcagatcggcctatttgcatccgcagcagcgcgagcggattcagcagttgtcccgcagctggctgtggcgcagcgaactgccgacctggctattgatttttgcgatctacggcggctggtttgcctcgctggcctggtggcgcgcgctggggctgttcccggccacgctgctgctggtctggttcaccgcctggtatatgtcactgcagcacgagttcattcacggccatcccacctcgcggccgtggtttaatcaactgctggggactctgccgctggcggtctggtacccctatggtctgtatcgcgactcgcacctggcgcaccataatcatcatctgctgacgcagccggttgacgatccggaatcctactattttacgccgcagagctggcagcattttgccccctggcagcgcagtcttattcatctgcgcaatacgtttatcggcaggctgctggtagcgccgctgctggatattgcccagacgctcagctgcgcgctgacggcgctgcgtcttcggcgggtgaagacgctagcgatgtggctggttcacggcctgctgctggcggcgctgttcgcgtggatgcatcaccttgacttttcgccgctctatttcgtgctggctgtcagctatcctgcgctggcgttaaccaaagtgcgctcttttcttgagcaccgcgccgcggacgatccgctggcccgttcggtgattaacgaggcggggctggtctggcgggtgctgttcctcaatctcaactaccattcagtgcatcacgatttgccgggcgtaccgtggtacgggctgcgaaaaatctatctgcataatcaggcggagtatcagcggcgcaacgccgggtttgtggtgcgcggctacggtgaatggctgcggcatttttttgccagaccggtgacggtgaatgcgcatcccgggttcaaccagcagggtaaggcggatgaagagcatgagtga

SEQ ID NO: 254988 - DNA, 1140 bp, Klebsiella pneumoniae
atgttgggacgtgccgcgctggtactggttaccgcgctactgatgtttccgcaaatagcggaaacgatttatagcccggcgctgaccgatatcagcgcccggttttccgtgagcgccgcgcaggcggcgcaaacgctctccgtatattttatcggttttgccgtcggcgttctgttgtggggcggattcagcgatcgctacggccggcgtccggccctgctggcggggttaggtgtctacgcgacggggtgcctgctggcgctgtgggccagcgatttttcgctgctgctggtggcgcggatcgtcacggccgctggcgcggcaaccggctcagtggtgacgcagacggttctgcgggactgctatagcgggcggcagctggcggggattttttcgtttatcggcctggcgctggcggtgagcccggccatcggggtctatatcggcggcgggttgaccgccatctggggtatgcgcggtgtgttcagcgcgctggcgatttttgccgccgcgctcctgctgggctgcctgtggttgatgccggaaacgcgcccgcataacctcaggggagggtcgtttcttgacgtgctgaggcggatggcgggcgacaggcgtatcgctctggcggcaattctggtggcggcatttaacatcagcctgttcagctactacagtctggctccctttctgttcgccagattcgatctcgatgccctggcctttggctacagcggcgtggcgcttgccgctggttcgctgttcggcgcgctgcttaaccgccgtctgctgcgtcagaatgtcccgctggggcaaatgctcgcgatcgcctgcatcctccacctggcgggcgctgccgccgtgtacgtgctgcgggaatcgctgtggtttgtggcgccggtcgcgctggtcaccctcgcgtatgcgatggcgatcccgttagtgctgggatcggcgctgagcgcctatggcgactgtcggggcaccgccggcgccattttcggcttgttttattatcttctgataggcgccggtctgctggcggtcggatgggggcaatcgctgggcgcatcgctgctgctgtgcgctggggtaagcctcatcgccgggtggcgctatatgcactcgctcaacgacgcataa

SEQ ID NO: 254989 - DNA, 768 bp, Klebsiella pneumoniae
atggcctggcttgacgctgatgcggcattcaatccggatgcgttaacaaaaagcctgattggcgtgcagtcggcgctgggtaaccatgactccggcagccaccagcataagatggcgcagatcctgtttacccgtcagggatgcgtacgtttgacgctcgacgatggcgcgctactgtgcctgcttccgccgggacgcgccgcctggatcccggccggtatcagccatcgcgcggagatgaaaaatattgtcgattatcgttcagtctggtttcagccgcagcgttaccctcaattgccaacgcaggcggcgatactcaacgtggtgccgctgctgcgcgaactcttagagcgtatctgcgccagcccctgggataccgactgggaagccgagccggcgcggcatctcgcggccctgtgccaggcggaaattcgcgccgccgcccaggagccgatgatgctggcgctgccgcaggataaacggctggcgcagctttccggcgatgcgctaccgccggcgcttgggacgctcgcagcccgctgcggcgccagcgaaaaaaccatcagccgcctgttccgccgcgataccggtatgtcctaccagcagtggcgtcagcagtggcgattaatgaaggcagttgagatgctggctaccgggcagcggattaccgataccgcgatggcgcttgatttcgccagcgatagcgcctttatctactttttccgcaccatgaccggcatgacgccgggacgctatttcgccccctga

SEQ ID NO: 254990 - DNA, 753 bp, Klebsiella pneumoniae
atgacctattgcgtggccatgtgtttgtcagatggactggtgtttgcctcagactcccgcaccaacgcgggagtggaccatattgcaacgtttaaaaaactgcacgttttccatcaggatggcgaacgcgtcatggtcctgcagtctgcgggtaacctggccacgactcagagcgtgattagcctgctcagcgcccgcattcgtacccagcaggaaccgaatctgatgcaggtgacttcgttatacgacgcggcgatgctgatcggcaaaacgttgcaggaggtgattcaacgcgacaccagcaatcagcagaactgcggcaataccaacttcaactgtaacctgttgctcggcgggcagattgccggggaaacgcaccggctgttccatatctatccggaaggcaactttattgaagccacgcgcgacacgccctatttccagattggcgagagtaaatacggcaaaccgatcatcgaccgggtcctgtgcatcgataccccccttgagcaggcgatgtgctgcgcgctgatctcgatcgactccaccttgcgcagcaatctttcggtgggactgccgctggacacgctgctctaccgcagcggtagcctgagcagcgccgggcagcatcggatcaccgaaagcgatccctatttcaataccattcgcaaagcgtggtccgaggggttacaaagcaccttcctgcagctgccgccgttcacgccgggcggccaggatcagggggcgaaatag

SEQ ID NO: 254991 - DNA, 816 bp, Klebsiella pneumoniae
atgaaactggtaatcgatcacctgacccgctacggctacgatgaagaagtgaagttttcaacccagtacctgcgcctgacgccgcgcagcagcggtcggcagaagatcaccgcctggacattaaccctgccggacggttccgccgtcgccaccaccgacgcgtggggcaacgtgctgcacgtgctgacgctggataatccgcataaagagattaccatccgcgccagcgggatcgtcgatatcgtggaagagggggaagagattggcgcggagccgcaggagctgctgtcgccactggttttcttgcgctgtaccccgcttacccgcgctgacggcccgatccgcgaatttgcccagcgctggtatcagccggaggctcaggaagcgagcctgaaccggttaatggccgagctgctgctgagaatgccctattcgccgggtgccacgcaggtacaggactcggccgccgacgcgttcgcgcgatcgaaaggggtttgccaggatcacacccatgtgtttctcgcctgctgccgggcgctggcgatcccggcgcgctacgtcagcggctatgtctacagcgataacgccgagcatgtcgctatgcacgcctgggctgaagtatggctgaacgatcgctggcagccgtttgatatcacgaacaatacccgccgtctgaatcagcatttgcggctggcgaccgggctggactatcttgatgcgtgtccggtgcgcggtacccgcctcggcggcggcggagaaattttgttaactaacgctgaggtgcgcgagcattcacaacaggcgcagcagcaataa

SEQ ID NO: 254992 - DNA, 930 bp, Klebsiella pneumoniae
atgttaagccgcacagcgagtgaactcttctggatggcgcgctatcttgagcgcgcggaaagctatgcccgggtgctggacgtgacctggaagctgtcgatgatcccccgccacagccagcagtcgcgggatttagccttgccgctaaatctatcgctgacccatgagctgtttcaggcccggcacgcgcgtttcaccatgagcaacctgcttaattttttcgccctcgacggcaacaacccgtacagcatttttagctgcgtcgagatggcgtggaacaacgcccacgcggtgcgcggcagcctgtcggcggaagtgtgggaaagcatcaacgccacgcgtattgagctgcgaaaactgcgccagcaggggatcggcgagctgggcaacgacgccttctttgagtgggtaaaagagcgggttcatctgtttcgcggggcgattctcggcacgctgctgcgtaacgacgctctgagctttatcggtatcgggacgctgatcgaacgggcatccgccaccgcccagctgctgctgattaaggatcagcagttaaacagcgatcccgatccggtccgcgagtattaccggctggatacgctgcttaacgcggtcagcgcacgcgaggcctataacagcatctaccgccagccggtcagccgcgaaacggtgatggagctgctgatcctgcgcaacgatgtgccgagatcgctgcgagcgagcatttccgacctcgtcgggcagctggagcagattgccaacgatcgttcgcacctgccgctgcgcctggcgcaccagcttaacgtcgacctgcgttttagcacccgcgacgatctggcgcaggctgatttgcaggtcacccttaatgcactgctggcgcggattaacgcgctttccgacagcatcagacaaacctatctggaggcgttatga

SEQ ID NO: 254993 - DNA, 1440 bp, Klebsiella pneumoniae
atgataaaaataacgcttcctgacgggcattattatgatgagatgcttaccgcacagggagagcagcgtcagcactataacgcctggtggcaatggtttcgcagtaccgatcaattctctatccggcagaaaaaagagcaggcggagctgctctttcaccgcatcggcatcacttttaacgtctacggcgaagacgaggggaccgaacgtctgatccctttcgacagcgtgccgcgcattatccccgccggcgagtggcagcgaatcgaccgcggcatccgccagcgggtgaaagcgctcaacgcctttctttacgatatttaccacgatcaaaatatcctgcgcgcgggactgatcccggccgaacaggtgctggcgaatgaacagtatcagccctgtatgcagggaataaatttacccaataacacctatgctcatatcaccggggttgatatggtgcgcaacagcgacggccagtattacgtgctggaggataatctccgcaccccctccggcgtctcctacatgctggaaaaccgcaaaatgatgatgcggctctaccccgaaatgttcgaacagcatcgtattgcgccggtagaacgctaccccagctatctgctgcaaacgctgcgcgaaagctcgcccgtggacgacccgtgcgtggtggtgatgaccccagggcggtttaacagcgcctattttgaacacagctttctggcccagcagatgggcgttgagctggtggagagcgcggatctgtttattaaaaccggggcggtgtatatgcgcaccaccgaggggccgcggcgcgtggacgttatataccggcggatcgacgatgcgtatctcgacccgctggcctttcacgccgactctatgctgggcgtgccggggctgctgtcggtgtaccgcgccggaggcgtggtgctggcgaatgccatcggcaccggcgtcgccgacgataaatcgatctaccccttcgtgccggagatgatccgtttctatctgggcgagcaaccgatcctcagcaatattcccacctggcaatgccgtaaagcggaagatctcagctacgtgctgagccatcttgagctgatggtcgtgaaggaggttcacggcgcgggcggctacggcatgctggtcggtccgcgctcgaccaaagaggagcgcgatgcgtttcgtcagcgtctgctggcaaacccggccaactatatcgcccaggacaccctggcgctgtcaacctgtccgacctttatagaagaggggctggcgccgcgccatatcgatctccggccctttgtcctttccggtcaggagatccgcctggttcccggcggcctgacgcgggtggcgctaaccgaaggctcgctggtggtgaactcgtcgcagggcggcggcaccaaggatacctgggtgatggaggaggacgaatcatgttaa

SEQ ID NO: 254994 - DNA, 2781 bp, Klebsiella pneumoniae
atgtatgacagtaaagcggggaccccgctggaagggtttgccgaatttgccgccgccgccgctgccgagggcgcggtgctgctgagaaacgatctcggcatgctgccgcttgacgttcagcagccggtttcgttatttggccgtacgcaaattgactactatcgtagcggtaccggctcgggcggggcggtaaacgtggtgagccgaaccaccttgttgcaggcaatgcgcgcgcgcagcggggggaagctcaatgcgcagctggccgcgctttacgagagctggacgcaacagcatccttttgacaacggcggcggaggctgggcggctgagccctggtatcagcaggagatgccgctgagcgatgagcagattcgtcaggcccgcgccgtctcgacccaggcggtgattgtccttggccgtaccgctggtgaagatcaggataacgcggatgttgaaggcggataccggctcacggccgacgaaatgatgctgctacatcaggtctgccgcgagtttgacgatgtggcggtcgtgctgaataccgccgggcttatcgatctcgcatgggccgacgatccgctgctgcgtactcgcattcgcgcgctgctgtacgtgtggcacggcggcgccgacggggcgcaggcggctgcttcgctgctctatggtgaggtaacgccatccggcaagctggtgggcagcatcgtcaaatcgctggatgaccatccggcatcgccctgctggggagcggaagcgcaaaacctctatcaggaggatatctacgtcggctatcgctactttgaaaccttttgtccccagcgtttgcagtttccttttgggtttggtctctcctatacccgcttcaccctgcaatcggcgcgagcggaagcctttgacgaccagatccagacgaccgtcaccgtaactaacgacggcgcgcgttttgcgggcaaagaagtcgtccagatttacctccaggcgccgcagggcgcgctcgggaaaccggccagggcgctggtggccttcgccaaaacccgcctgctgcagccgggtgaaagtgaaaccttaacgttatcgattccgctggagcgttttgcctccctcgacgatagcggggctaccgggcatccccattgctacgtgatggaacccggactgtatcgtttattgatcggtaacagcgtgcgcgatctgcaacctttgccggtagacggagaggcggggtacacgcagaagactctgcggatcctctcccgccatcagcaggtgctggcgccaacggtacctttcgtgcgcattaggcccgctggcgatggcggcgatgggcgctaccagatcgaatgggaagaagtgccgcgacggaagatcaacctgcgctcacgtattgaggagcgcctgccagagagcatcactctcaccggcaaccaggggcttaccctcagcgacgttgcggaagggcgcgcgacgatgaacgcttttgttgctcagctgtcggtggaggagctggcctgtctggtacgcggggagggcatgtgcagctacaaagtcacccccggcgtcgcgtcggcctttggcggagtggcggacagcctgctggaaaaaggcattccgctggcgtgtgccgccgacgggccttccggtattcgcatggataacggcgcaaaggccactctgctgcccagcggtacgctgctggcctccagctgggacccgatactcgtggagcgtttatacgtgatggagggcaaggagctgctgcgcaacggtatcgacctgctgctggggccggggatgaacatccagcgccatccgctcaacgggcgcaattttgaatatttttccgaagatccgcttatcaccgggatgatggcggcggcggtggtgcgcggcattcgcagcggcggcggcgtggcgacgcttaagcactttgcctgtaataatcaggagtttgccagagccacagcggactcggtagtgtcggagcgcgcgctgcgtgaaatctacctgaaaggctttgagtacgcggtgaaatccgccggcgccagcgcggtgatgaccgcctacaacccggtcaacggttaccaggcggcctccagctacgatctcaccaccaccgtactgcgcgaagagtggggctttcgcgggatcgtcatgaccgactggtgggcaacgatgaacgatcccatcgatggcggcgcggcgagcacccacaacaccgcggcgatgatccgcgcgcagaacgatctctatatggtggtcaataataacggcgcggaggttaacgctgccggtgataacaccctggcggcgctggcaaaaggggaactcacgctcggggagcttcagcgctgcgcgataaacatcctcgattttatgctgcagactcaggcctttaagcgtggggaggcgccccgggcgaatgtggttcacctggcggcagaaccggcctgcgccgccggctgcgagggggcaattaaaatcgccgagcagtcgcgtttgcgctatgacgaggacctggtgctgagcgttgaacaggcggcagtctacgatgtgctggtcagcgtgtacgccgacgccgcgccgctggcgcaaaccgccggcaatctgctgctcaatgaccagttcgtggcaacgatacacacccacggcacgctcggccgggaaatggtgcagaagctgtgtcgggttgcgctacagccggggaaataccgcgtggggtttgacgttatcaagccgggtctggtggtggagtggctggagctgaggcgcgttaacgactaa

SEQ ID NO: 254995 - DNA, 1392 bp, Klebsiella pneumoniae
atgaaaataaaatatatggcattggctattggcgccattatgtcctctaatgtgatagcagcaaaaaataatacctctgcagatattgaccagcgccttgcgcaactggagcaaagattaattaacgctgaacagcgcgccgcggacgcggaagcgcagatacaaacgcttaaacaacagcaaacagcggcagcaaaaaccgcgtcggcggtcaaagtcgatgccgctgagccggtcgctcccggcgcgactcccacgaagcttacgctctctggctatggcgacctgaagttttatggcgatgtggaattcaatatggacggtgccagcggtagcggtagcctgacgtcggtaaaaacctcttcgaataaaaactgggcgccgggtactaaagaacgttgggatattaacggccgtattctgctgggcttcgatggtatgcgcaaaatggataacggcaatttcgccggtttctccgcccagccgctggccgatatgaccggtaagatgaaccttgatgatgcggtattcttctttggccgggaagatgactggaaggtcaaagttggtcgtttcgaagcctacgatatgttcccgctgaatcaggatacgtttgtcgaatactccggcaacacagctaacgacctttatagcgatggctacggctatatttacatgatgaaagagggccgcggccgtagcagcagcggtggcaacttcctgctcagtaaaacgatagataactggtatttcgaacttaataatctggtggaaaatggcagcacgctgttccgggactccagctatcacggcaataacctggaaaatgagaaaaacgttgcctatttacgtccggtgattgcgtggaatagcggtcgcttctctaccgccgtcgcgatggaaaagaacgtcgtgaagaatgcttacggttattacgacaatcgcggcagttggatcgaccagtcggaccgcaccggctatggcttgacgatgtcatggaatggacaaaaaaccgatccggaagatggggtcaccactaacctgaacgtggcctatatggatgcctccgatgagaaggatttcaccgcagctattaactccctctggcatcgttttgaactgggttatatctacgcccacaacaaaatcgacaagttcaactcggctaattatgtctctacttgcgacgatggctgctggatctccaacgtgggtgactacgatatccacaccattcacgcgtcgtacctgttccccaatgtcatggatatgaagaacttcaatatctaccttggcgcttacgcctcgtggattgaagcgaaaccaacggatggcgacaaacatgaagactcccgctacggcggccgtcttcgcttcaaatatttcttctga

SEQ ID NO: 254996 - DNA, 1722 bp, Klebsiella pneumoniae
atgacgagtccggtttcccgtcgccccgcaacccttcgtctggcgctcgggggcgcatttgtcgctctggcgacgctgacggctcaggctgaagagacccgccctaccccgcaatcgcccgatatcctgctcggaccgctgtttaacgacgtgcaaagcgccaaacttttctctgaccagaaaacgttcgctgacgccatccctaacggcgacccgctgatgatccttgccgattatcggatgcagaaaaatcagaccagctttgatttgcggcactttgtcgagcttaactttaccctgcctcaggaaaacgaccagtacgttccgccaaaagggcaaaccctgcgccagcatatcaatggactctggccagtgctgacccgcagtaccgttgaagtagaaaaatgggattcgctgctgccgctgccaaaaccttacgtggtgcccggcggacgctttcgcgaagtctattactgggatagctacttcaccatgcttggcctggctgagagcggccactgggataaaatcgaagatatggtgaccaactttgccgccgagatcgacacctggggtcatattcccaacggcaaccgcacctactatctgagccgttcgcagccgccattcttcccgtttatggttgaactgctggccacccatgatggcgacgaggcactcaagaaatggctgccgcagatggagaaagagtaccagtactggatggatggcgctgaggcgcttcagcccggcagtgccagtaagcgcgtggtgcgcatggccgacggcgcgctgctcaaccgctactgggatgataacgacacgccgcgcccggaatcctggctggacgatgtgaccaccgccaaaaataaccccaatcgtccggcgactgaaatctaccgcgatctgcgctctgccgcggcatccggctgggactttagctcacgctggatggataacccgcagcagctcggcactatccgtaccacctctattgttccggtcgatttgaactcgctgatgttccatatggaaaaagccatcgctcgcgccagcaaagcggcgggagactcgaccaaagccgcgaagtatgacgcgttagccaatgcccgccagaaagcgctggaaaactacctgtggaatgataaagagggctggtacgccgattacgatcttaaaagtcatacggtgcgcaatcagctgaccgccgcggcgctgttcccgctgtacgttaacgccgcctccagcgaacgcgctgcgaaagtcgccgccgccaccgaaacgcggctacttaagcccggcggcctgaccaccaccacggtgaatagcggccagcagtgggacgcccccaacggctgggcgccgctgcagtgggtcgcggcggagggtttgcaaaaatatggccagcaaaaaatcgcgatggaggtaagctggcgtttcctgagcaacgtccagcacacttacgacagcaaacagaagctggtggaaaaatatgatgtcagttcgacgggaaccggcggcggaggcggcgagtatccgctacaggacggctttggctggaccaacggcgtcacgctgaagatgctggacctggtgtgcccgaaagagaagccgtgcgattccgtgcctaccgcgcgcccggcggcgaatgacgatatcggctcggcgcagcctgccgcgcatcagcctgctgcggttgaggagaaaaaagccgcgcagtga

SEQ ID NO: 254997 - DNA, 915 bp, Klebsiella pneumoniae
atgtctcagttttatctcatcgccccctccggctattgcatcaaccaggaagcggcgaatcgcggcgtgcaacgtctgcaggaggccgggcatcaggtggcgcaccaggaagtcattccccgccgggcgctgcgctttgccgggactgagaaccaacgccttgccgatattaaccagctcgccgccctcgacggcaaaaaccgtatcgtgctggcggtacgcggcggctacggcgcgactcgcctgctgccgcaaattgactggcaggggctcattgcccgtcagcagcaggatccgctgctcatttgcggccacagcgatttcaccgccatccagatgggcctgctggcaaagggtagcataatcacttttagcgggccgatgctggcgggaaactttggcgccgaagcgcttaatgaatttaccgaacaccatttctggcaggccctgcgcaacccggcgtttacgcttgaatggcacggcgaggggcccgactgtcgcgccagcggcacgctatggggcggcaacctggcgatgctgacctcgcttatcggtaccccgtggatgccgaagattagcgacggggttctggttgtggaagatattaacgagcatcccttccgcgttgagcgtatgctcttgcagctgcttaatagcggtattctggcgcgccagcgggcgattatcctcggcagctttaccggcgctgtcgccaacgactacgatgccggatacgatctgccgatggtatacgactaccttcgccagcagcttaacattccggtcatcagcggcctggattttggccacgagcagcgcacggtcaccctaccgcttggcgccagagcattgctggtcaacaacgcctctgccacgacgttgagcatcagcggccacccggtactgacagaataa

SEQ ID NO: 254998 - DNA, 147 bp, Klebsiella pneumoniae
atgagtccggtcagggccgaggtaattaacaccccgaccgtggcaagcgacagcgcgggccaaagcgctacgcgaaaggagctggcctgggtgcgcatcccgccgtcaagcagaatgaccgccagcgccaggttacttaccatgtag

SEQ ID NO: 254999 - DNA, 1122 bp, Klebsiella pneumoniae
atgattaaccccaatcagccccgggatataccgcaagttctgctgtcggtgctgtttttgtccctgattattatttcctgtctgtgggtcgttcagccatttattctgtcatttgcgtgggccggtacggtggtcatcgcgacctggccggtacttttgcgcctgcagagcctgcttttcggcaaacgctctctggccgtactggtaatgacgctgctgctttttttactcttcgttattcctattgcgctactggtcaatagtctggtggacaacagcgtgccattaataaaagtggtgaccagcggcaactttaccccgccggatctggcgtggctgaatacggttccgctgatcggcgataagctgtacaccggctggcataatttgctggagatggggggcacggcgattatgactaaaattcgcccttatctcggcaccaccaccacctggtttgttggtcaggcggcgcatatcggcaagctgctggtctactgcggtcttatgctactgtttagcgcgctgctgtactggcgtggtgaacaggtcgcctatggtttccgccacttcgctacccgtctggccgccaaacgcggcgacgcggcggtgatcctcgccggtcaggcaattcgcgccgtggcgctgggagtggtcgtgacggccctggcccaggcggtgctcggcggtattggtctcgcggtcagcggcgttccctacgcggcgctgctcaccgtggtgatgatttttacctgtcttgtccagttggggcctttgctggttctggtgccgtcaattatctggctctactggagcggcgataccacctggggtaccgtactgctggtgtggagctgcgtagtgggcaccatggacaattttatccgcccgctattgattcgtatgggcgccgacctgccgatgattctgatcctttccggcgttatcggcggtctggtggcgttcggcatgattggcctgtttatcgggccggttctgctggcggtctcctggcgactatacgacgcgtgggttaacgaagcgccgccgccgccgaaagatcccgatctggtgcttgaggagcttagcgagctcaatacccgagcctcgcaggataaataa

SEQ ID NO: 255000 - DNA, 3057 bp, Klebsiella pneumoniae
atgatcccacagatttctcaagcgccaggtgtcgttcaactggtgctgaattttttgcaggtactggagcaacagggttttaccggcgataccgccaccagctacgccgacaggctaacgatggcaactgataacagtgtatatcagctgttgccggatgcgattttattcccccgttccacggcagacgtggctctgctggcaagactggcggcggaagagcgttttaaaacgctgatctttaccccgcgcggaggcggcaccggcacgaatggccaggcgctgaacgccgggatcatcgtcgatatgtcccgctatatgaaccgcattattgaaatcaaccccgaagaagggtgggtgcgggtggaggcgggggtcattaaggaccagcttaatcagtttcttaaaccgtacggctacttttttgccccggaactgtcgaccagcaaccgcgccacgcttggcgggatgatcaacaccgacgcctccgggcaggggtcgctggtctacggtaaaacctccgatcacgtactcggggtgcgctcggtgctgatcggcggcgatattcttgacactcagtcaatcccggcggcgctggcggaaaccctgggcgcagaacagtcggcgatcgggcggatctatcgcacggtatatcaacgctgcaaagcgcagcggcagctggttatcgataaattcccgaaacttaaccgtttcctcacgggttacgatctgcgccacgtgttcaatgacgacatgagcgaatttgatctgacccgaatcctgaccggttccgaaggcacgctggcgtttattaccgaagcgcggctggatatcacccgtttgccgaaagtgcgccggctggtcaacgttaagtacgattcctttaactctgcgctgcgcaacgcgccgtttatggtggaagcgaaggcgctttcggtcgaaacggtcgactcgaaggtgctcaatctggcgcgggaggatattgtctggcattcggttagcgagctcattaccgacgttgcggataaggagatgctggggctgaatatcgtcgagttcgccggtgatgacgccgaactgattgacggccaggtgacgaccctgtgtcagcgcctggatgaactgatagcgcgcaacgaggcgggcgtaatcggctggcaggtttgtcacgagctggacggcgtcgagcgcatctacgcgatgcggaaaaaagcggttgggctgctggggaatgccaaaggggccgccaaaccgatacctttcgccgaagatacctgcgtgccgccggaacacctggccgattatattgctgaattccgtgagctgctcgacggccacgggctgagctacggtatgtttggtcatgtcgatgccggcgtgctgcacgtgcggccggcgctggatatgtgtgacccgcagcaagagatgctgatgaagcggatctccgatgacgtggtcgcgttaaccgctaagtacggcggtctgctgtggggggaacacggcaagggttttcgcgctgaatacagtccggcattcttcggcgaagagctgttcggcgaactgcgcaaaattaaagccgcgtttgacccggataaccgtctgaacccgggtaaaatctgtcctccggaaggcgttgatgcgccgatgatgaaggtggatgcggtcaagcgcgggacattcgatcggcagatccccatcgccgtgcgcagctcgtggcgcggcgcgatggagtgtaacggcaatggcctgtgcttcaactttgatgccaaaagcccgatgtgcccgtcgatgaaggtcagcaaccaccgtattcactcgccgaaagggcgggcaacgctggtgcgtgaatggctgcgcctgctggcggaccgcggcatcgaccccaatcagctggaaaaagatctgccggaaaaacgcgccagcctgcgtactctggtggagcgtacccgcaatagctggcacgcacgtaaaggcgagtacgatttctcccatgaggttaaagaggcgatgtccggctgtctggcctgtaaagcctgctcgacccagtgtccgattaaaatcgacgttccggagttccgttcgcgtttcctgcagctttaccatagccgctatttgcgcccggttcgcgaccatctggtggcgacggttgaatcctacgcgccgctgatggcgcatgcgccaaagaccttcaacttctttatcaatcagccatggatgcgcaagctatcggaaaagcatattggtatggttgatcttccgctgctttccgtcccatcgttgaagcagcagatggtcggccaccgttcggcgaataccaccctggaacagctggaagcgctgagccctgagcagagggcgaagagggtgctggtggttcaggatcccttcaccagctattacgatgcgcaggtggttgccgactttgttcgcctgatcgagaaagtgggataccagccggtgctgctgccgttctctcccaacggcaaggcgcagcatattaagggcttcctgacgcgattcgcgcgcaccgcgcagaaaactgccgacttccttaaccgcgtggcccagctcggcatgccgatggtgggtgtcgatccggcgctggtgctctgctatcgcgatgaatacaaccaggtgctgggcgacaagcgcggcgattttcgcgtgatgctggtgcatgaatggttgccgcaggcgttgacggaaaccgcagcgcaggatcaaggcggcgagtcgtggtatctgtttggtcactgtactgaggtaacggcgcttcccgcttctacccggcagtgggcggatatcttcgcacgctttggcgcgaagctggaaaacgttaacgtgggctgctgcggtatggccgggacctacggtcatgaagtgaagaatcacgccaattcgctggccatctacgcgctctcctggcagcaggcgatgcagcgcctgccgcgcaaccgctgtctggtcaccggctactcctgccgtagccaggtgaagcgtattgaaggcagcggcgtacgccatccgctgcaggcgctactggagattatgggatga

SEQ ID NO: 255001 - DNA, 411 bp, Klebsiella pneumoniae
atgatttggaaacgttacagcacgctggagcaactgaatgcgatgggcgacgggaacatggtcggcctgctggatatacgcttcgaggccatgaccgacgagaccatcgccgcgaccatgccggtagacagccgtacccatcagccgtttggcctgctgcacggcggcgcatcggtggtattagcggaaacgttaggttcggtggcgggctacctgtgcagcgaaggcgaacagaaggtggtcggtctggaggtcaatgccaaccatattcgttcggtgcgcagcgggagggttcgcggcgtgtgccgggcgctgcacgtcggctcccgtcaccaggtgtggcagatcgacattactgatgagcaggggcgtctttgctgttcgtcgcggttgaccacagccgtaatttaa

SEQ ID NO: 255002 - DNA, 249 bp, Klebsiella pneumoniae
atgggtatcatttcatggatcatttttgggcttattgccggtattttagccaagtggattatgccggggaaagacggcggcgggtttatcgttaccgtaattctcggtgtcatcggtgcagttgtcgggggttggattagtactttcttcggctttggccgggtcgacggttttaatttcggcagctttgtcgtcgcggtgattggtgcgctggtcgtactcttcgtctaccgtaagatcagaagctaa

SEQ ID NO: 255003 - DNA, 327 bp, Klebsiella pneumoniae; identical to SEQ ID NO: 176675

SEQ ID NO: 255004 - DNA, 342 bp, Klebsiella pneumoniae; identical to SEQ ID NO: 176677

SEQ ID NO: 255005 - DNA, 378 bp, Klebsiella pneumoniae
atggattcacatgcaggaacttttaatcccgaagatttcagctggcgcggcctggcgatgaccccagccgccgccgcccatattcgcgaactggtcagcaaacaacccgacaagcaggggctacgcctgggcgttaaaaccagcggctgcgccggctttggctacgttctcgaactcatcgctgaaccggcgcaggacgatctgctttttgagcgcgatggcgcgaaactgtgggcgccactgcaggccatgccgtttatcgatggcaccgagctcgactacgtccgcgaaggtttaaaccagatctttaaatttcataaccccaaagcgcagcacgaatgcggctgcggcgaaagttttggcgttcaggcggagtaa

SEQ ID NO: 255006 - DNA, 1488 bp, Klebsiella pneumoniae
atgtctcgtaatactgaagcaactgacgatgtcaaaacctggagcggcgggccactcaactataaagagggcttttttacccagctacagaccgatgagctggcgaaaggcataaatgaagaggtggttcgggcgatttctgcacgccgcaatgaaccagaatggatgctggagtttcgtctgaacgccttcaaggcctggcaggcaatggaagagccgcactggctgaaagcgcactacgacaagctgaattatcaggattacagctattactcagcgccctcctgcggcaactgcgatgacgcctgcgcttctgagccgggagctctacagcaaacggggtccagcgcatttctgaccagcgaagtcgaagaggcgtttaaccttctcggcgtaccggttcgcgaagggcgggaggtggccgtcgacgccatttttgactcggtttccgtggcgaccacctaccgcgaaaagctggcggagcaggggattattttctgctccttcggcgaagcgattcacgatcaccctgaactggtcaggaaatacctcggtaccgtagtaccgggcaacgacaacttctttgccgcccttaacgcggcggtagcctccgacggcacctttatctatgtgcccaaaggcgtgcgctgcccgatggagctgtcgacctatttccgcatcaacgccgagaaaaccggccagttcgaacgcaccatactggtcgccgacgaaggcagctacgtgagctatatcgaaggctgttcggcgccggtacgcgatagctaccagctgcacgcggcggtggtggaggtgatcattcataaagatgccgaggtgaagtactccacggtgcaaaactggttccccggcgacaataataccggcgggatccttaatttcgtgaccaagcgcgccctgtgcgaaggcgagaacagcaaaatgtcgtggacccagtcggaaaccggctcggcgatcacctggaaatatccgagctgtattctgcgcggcgataactccattggcgagttcttctcggtagcgctgaccagcggccaccagcaggcggacaccggcaccaagatgatccatatcggcaaaaacacccgttcgacgattatctcgaaggggatttcagccggccacagccagaacagctatcgcggcctggtcaaaatcatgcccaccgcgaccaacgcgcgcaacttcacccagtgcgactccatgctgattggcccggacagcggggcgcataccttcccgtatgtagaatgccgtaataacagcgcgcagcttgagcacgaagcgaccacctcccgtatcggcgaagatcagctgttctactgtctgcagcgcggaatcagcgaagatgatgccatctcgatgatcgttaacggtttctgtaaggatgtcttctcagagctgccgctggagtttgccgtagaagcgcaaaaattactggcgattagccttgaacacagcgtcggctga

SEQ ID NO: 255007 - DNA, 1275 bp, Klebsiella pneumoniae
atggctggcttaccgaacagcagtaacgcgctgcagcagtggcaccatctgtttgaagcgcaaagcgagcagcgcagcccgcaggcgcatcagcatttgcaacagcttctgcggctggggctgccgacgcgtaaacatgaaaactggaaatatacgccgctggatgcgttactgaaccatacttttgtcgctgcggaaccgcagacgctgacggcggcccaacgcgacgcgctggggctggcggtggacgcatggcgtctggtttttgtcgacggccagtttaacgaacgcctgagcgacgacctgaccgccagcggctttgaggtgcgggtagataacgaccgtcagccgctgcctgaagccgttcagcccgaagtttttctgcatttgaccgaaagcctggcgaccagcgtcacccatatccgggtcgggcgccaccagcgaccggaaaagccgctgctgatcgtgcacatgacgcgcgggctgccgggcgatgaaatgaacaccgcccactatcgccaccatctggagctggagagcggcgcgcaggcgactattatcgaacactatctgagcctcaacgacgccgcccattttaccggcgcaaggctgacgatgtccgtggcggataacgcccacctgcagcatatcaagctggcgtttgaaaatgcgcaaagctaccactttgcccataacgatctggccctcggacgcgacgcctccgccttcagcagcagttttctgctcggcgcctcggtactgcgccaccacaccagcacgcagttgaacggtgaaaacagcaacctgcggattaactcgctggcgatgccggttaacaacgaagtgtgcgacagccgcacctggctcgatcataaggtcggatactgtaacagccgtcagctgcacaaaaccatcgtcaacgataaagggcgcgcggtgtttaatggactgatcaacgtcgcccagcatgcgattaaaaccgatggccagatgaccaacaataatttgctgcttggccgcctgtccgaagtggataccaagccgcagctggaaatctacgctgatgacgtgaagtgcagccacggcgcgaccatcgggcgcattgatgatgaacagctgttttatctgcgttcgcgcggcattacgcagcaggcggcgcagcagatgattctttacgcctttgccgcggagctcacggaagcgatcgatgatgaggcgctcaggcagcagatactggcgcgtattggccagcgtttgccgggaggtaaagcatga

SEQ ID NO: 255008 - DNA, 417 bp, Klebsiella pneumoniae
atggcggcgttacctgataaagacaaactgctgcgcaactttagccgttgcgcgaactgggaagagaaatatctctatatcatcgaactggggcagcgccttgcgccgctgagcccggaagagcatagcgcgcagaacatcattcagggctgccagagccaggtatggatcgtgatgacgcaggagcagagcggcgcaattgcgcttcgcggcgatagcgatgccgctattgtgaaagggcttatcgcggtggtgtttattctttacgatcggatgacggcgaaggatatcctcgcttttgatgtgcgcccgtggtttgaaaaaatggccctcacgcagcacctgacgccttcacggtcgcaaggactggaagcgatgatccgcgcaatccgcgcgaaggcggcaaatcttagctag

SEQ ID NO: 255009 - DNA, 984 bp, Klebsiella pneumoniae
atgaaacgcgcttctctcatcaccatagccgttctgagcgccctcagcgcgtcacatgcagcctgggccgtcgattaccctcttccccctgccaacagtcgtttgattggtgagaaccagtcctggacggtacaggaggatgaccgcaacctgcaggcgattgcccgtcgtttcgataccgcagcgatgctgatcctcgaagcgaacgatacgattgcccctgtgcagcctaaaccgggtacccaggtgctgattccctcccggatgctgctgccggacgtgccgcgggaagggatcgtcgtcaacctggccgagctgcgcctgtactacttcccgccgggaatgaaccaggtgcaggtttatcccctcgggattggtcagcaggggctggagaccccggagatgaccacgcgaatagggcagaaaattccgaacccgacctggacgccgacggcaggcattcgcgctcgctcgctggaaaaaggaattaagctgccgccggtcgtgcccgcaggaccgaataacccgctggggcgttatgcgctgcgccttgcatacggcaacggggaatatcttattcatggcaccagtgcgccagatagcgtcggactacgcgtcagctccggctgtatgcgcatgaatgcggcggatattcaggcgttattcaatcaggtgaaaagcgggacgccggtgcggattatcaatcagccggtcaagttcgccgtggagccggacggtaagcgctatgttgaagttcatcgaccgttgacgccggatgagaccagcaacccgcagacgatggcctatacgcttcctgcggagttccatcaattctccggcgataaagcggtggatgaggccatgcttaaacgcgcgctgacccggcgagcaggatatccggttgtggtatccgcgggcagcagcccgacgtcgggcctgtccgtacagagtgcgccggtagacgaagcaaaaagggtgcagtag

SEQ ID NO: 255010 - DNA, 237 bp, Klebsiella pneumoniae; identical to SEQ ID NO: 176685

SEQ ID NO: 255011 - DNA, 213 bp, Klebsiella pneumoniae
atgggaaacacagccaaagatgaggcgctgtatcaggaaatgtgccgcgttgtcggtaaagtcgtgcttgagatgcgcgacctgggtcaggagccaaagcatatcgttatcgccggcgtgctgcgtaccgccctggcaaacccgaaggtcaagcgctcagcgctgacgcaggaagcgatggagaaggtggtccatgcgctttccggtagctag

SEQ ID NO: 255012 - DNA, 639 bp, Klebsiella pneumoniae
atgtctgccgttgctcatgatgaagcacaatcgcttaaggagcggatcttcgccgccgctattaccgttttcgccgagcacggattgtcgggcgcgcgaatggagcaaatcgccaccgaagcgcagaccactaaacgcatggtggtctactacttcaagaccaaagagcagctttatcaggccgtgctccagcacgtctacgcgaggatccgcgaaaccgagcagcagcttgggctggaaaacgtgccgccggttgaggcgctggtgcagctggtaaagtggagcgtgcgctatcacgccacgcacgccgactatatgcgggttatctgtatggaaaacatgcagcgcggcaagtggctgaaaagctccggacagctgaaaccgttaaaccgtaccgctctgtcgattctggaagatattctgcagcgcggccagcagcaaggcgtgtttcaggcgggtctggaggcgcgcgatgtgcatcgattgatcagcagctttagcttctatcaggtgtcgaacttttatacctttagcagcctctatctggacgacccgatgccggccattgatgatgaagcgatggtcgcccaccactgcgatattgccgtcaaagcggtgatacgctttgtgatttcatga

SEQ ID NO: 255013 - DNA, 1857 bp, Klebsiella pneumoniae
atgttgcgctccatcgccaccgtctcgatttccggtaccttacccgaaaagctccatgccatcgcagcggcgggctatcagggcgtcgaaatttttgaaaacgatctgctctattataccggtacgccggccgatatccgccacctggcggctgatttagggctaaaaatcacgctttttcaaccgtttcgtgattttgaaggcgccagccgcgcccagttcaccgctaatatggaacgcgccagacgcaaatttgcgctcatgcatgagctgggctgcgataccatgctgctgtgcagtaacgttcagccggactgttccgccgacgtcgaactgcaggtggccgatttacgcgctctggctgagctggcggagcaggaaggcatcactatcggctacgaggcgctggcctggggcacccacgttaaccgctggtatcaggcatgggcgcgggtcaaacgcgtcgatagcccggcgctgggtattgtgctcgacagtttccacgtgctggcgcgcggtgacacgctggcgcagctggcggacgtgccgctggagaaaatcacctttgtacagatggccgacgcgccattgatgaaaatggatatcctcgaatggagccgccacttccgctgcttccccggtcagggacagctgccgctggtcgattttgcctgcgagattatccgctgcggctatcgtggctcctggtcgctggagatttttaacgacagcttccgggcttctcccaacggtgcgacggcgaaagatggctatcgctcgctgctgtggctggaagagcaggtccgccaccggctgccggaaagccgcgcgccgctgtttgcaccggctgaactaccggtctatgccgggctcgagtttatcgagtttgccgccacgccatcgcaggcgggagtactcggagacaggctggcgcagctcggctttgccgaagaggggacgcatcgctcaaaacgcgtctccctctggcgcaacggtggggcgcgggtggtggttaacgcccaaccgcatagctgggccgaccattttcatcagcgtcacggagtttctctctgcgctatggcactacgcgtcagccagagtgcggcaatcgtcgagcgcgcccgtgccttgggctatgccacctggcagggcgatgccgggcccaacgaaagcccaatcccggcggtttgcgccccggacggtagcctgatttatctgattgaagtgggcgacgacatctacacgcgcgatttccatctgcgcacggacgtcacgccgcgcgacgattattgtggtatcgatcacctggcacttggcatggagtcggatagccgcgataactggatcatttttttccgcaccgtattcggttttatccttgagcatgaacaaacgctacccgatccgtacgggctggtgcgcagcctggcggtacgcagtccgcagggcgacatccgctttgcgctgaatatttcgcaaagccgcgccacgcaaattgcccgttcagtggcctgttatcagggagctggtttacagcacgcggcttttgcctgccgcgatttatcctccacgcttgcaagcgtgcccgaggttgccgtcaatgcgctgccaattccggcgaactactatgaagatttgctggcccgttatgggaaagatgttcctgttaacttgttgaagaatcatcaaattctttacgatcgcgatggcagcggcggcgaatttttccacctctacacccgaccgattgcggtgggacgctttttctttgaactgaccgagcgccgcaacggttacgcactttatggtgctgtaaatgcagctgtacgcttgtcagcaatgcagtacaccgagtaa

SEQ ID NO: 255014 - DNA, 1320 bp, Klebsiella pneumoniae
atgaactcttatagccacaatcacccgacggcggcggccgcgtccggcgtgaggccctcccggcggcgtatcggtattcttgcgctgctggccgtcggcaccatgatcaactatctcgaccgtacggtgctgggtatcgccgcgccgcagctgaccgctgagctgggtattgatgccgcaatgatgggcatcgtgttctccgcctttgcctggacctacgcgctggcgcagatccccggcggcatcttccttgaccgcttcggcaacaaagtgacctattttctggcgctgaccctgtggtcgctattcaccatgttccacggcctggcggttggcctgaaaagtctgctgttgtgccgctttggcctcggcgtcagcgaagcgccctgtttcccggtgaacagtcgggtggtgagcgcctggttcccgcagcaggagcgggcgaaggcgacggcggtctataccgtcggcgaatatctcgggctggcctgcttttcgccgctgctgttctggataatgggcagcttcggctggcgcgcgctgtttattagcgtcggcgcggtcggcgtgatgttcgcgctggtgtggtggcgctgctatcgcgagccgcatgaagataaacacctcaatcagcaggagcgcgagcacatcgtcaacggcggcggaatgtccaccggcgcagagcagcataccgcctttagctggccgttgattcgccagctgctggcgaaaagacagattctcggcgccagcatcgggcagtttgccggtaatacggtgctggtcttcttcctgacctggtttccaacttatctggctaccgaacgccatatgccgtggattaaggtcggcttctttgccatcatgccgttcctggcggcggcgggcggcgtgatgttcggcggctgggtctcggataagctgctgaaggccaccggttcggcgaatctcgggcgtaaactgccgatcattgccggtctgctgatggcgagcacgattatctccgccaactggctgaccagcgatctggcggtgattctggtgatgtcgttcgccttttttggccaggggatggtgggcctgggctggacgttaatttccgatatcgcgccgaaaggccttggcggtctgaccggcggcttgtttaacttctgcgctaatcttgccgggatcctgacgccgctgatcatcggtttcatcgtcgcggcctccggcaacttcttctacgcgcttgtttatatcggtggcgctgcgctgctgggcgtagcggcatatgtgtttattttgggtgacgtaaagcgtatcgaactttcgcagtaa

SEQ ID NO: 255015 - DNA, 837 bp, Klebsiella pneumoniae
atggtgattagtggaaatacgcggctgatagcgcatcttggctatccgaccgcgaagtttaaagcgccgatgatttataacccgtggtttgccgatcgacaggttgacgccaaagtagtgccgatgggcgtgaagcctgaggactacgccgcctttgtcccgatgctatttaaaatgaccaatattattggcgcgctggtcaccatgccgcacaaaatcgccacctgcgggctggtccagcatcttagcccgacggcggcaattgcgggcgcctgtaacgcgattcgccccgaagccgacggcacgctcagcggtgatatgtttgacggagaaggctttgttctcggtatccggcgcaaagggttcgcgacgcaaggggcgcgggcgctggtggtgggcagcggcggcgtcggctcggccattgccgcatcgttggcggcagcgggcgtcagcgccctgacgctgtacgacgtccgcccgcagacggcggaagcgctggccggacgtctgctcgagcactatcctcggctggatatcactctgatgcagcgcgacccgcaggggcacgatctggtggtcaacgctacgccgctggggatgaaagagggcgatccgctgccgctggacccgcagcgcctggcgccgggcacttttgttggcgaagtggttatggcccaggaatttactccgctactgcaggccgcgcgggcggcgggctgccccattcagcgcggcaccgacatgctgtttgaaatgatcccggcctatctgcgcttctttaacctgccggtggcaacgccggaacagctgcgcgaactggcggaaattggctactga

SEQ ID NO: 255016 - DNA, 1068 bp, Klebsiella pneumoniae
atgcttcagatgttaatgcagtggtaccgtcgacggttcagcgatccggaggcaatagcgctgctggtcattttgctggccgggttcggcattatgtttttcttcagcggcctgctggcgcctttgttagtgtcgattgttctggcctatttgctggagtggcctaccgtcagactggagcgtatcggtttttcacgtacctcggccacgtcggttgtgctgattctgttcgtcggtattctgctcctgatggcgttcgtggtgatgcctgttgcctggcagcagggtatttatctgattcgcgatatgccaggaatgctgaataagctttccgatttcgccgccacggtgccgcgccgttatccggccttaatggatgccgggattatcgacgcgatggcggagaacatgcgcagccggatgttaaccgtcggcgattcggtggtgaaatattcgctggcctccctggtcgggctgctgacgctggcggtctacctggtgttggttccgctgatggttttctttctgctgaaagataaagagcagatgcttaacgccgtgcgccgggtgctgccgcgcaaccgcggcctggccgggcaggtgtggaaagagatgaaccagcaaattaccaactatatccgcggtaaggtgctggagatgatcgtcgtcggcgtggcgacgtggattggctttatcctttttggccttaactattcgctgctgctggcggtactggtcggattctcggtattaattccctatatcggcgcctttgtggtcactattccggtggtgggcgtggcgttgttccagtttggcgcgggcaccgagttctggagcctgtttgcggtttacctgattattcaggggctggacggcaacctgctggtgccggtactgttctcggaagccgttaacctgcatccgctggtcattattctgtcggtggtgattttcggtggtctgtggggattctggggagtgttcttcgcgatcccgctggcgacgctcatcaaagcggtggtgcatgcctggccggatggcctgatagtggaagacgagcattag

SEQ ID NO: 255017 - DNA, 1464 bp, Klebsiella pneumoniae
atgttcaggcagttgaagaaaacgctggtggcgaccgtcatagcgtcgctgacgctgggttcaatattacctgcttttgccgacaccgcagacaccctgccggacatgggcacctccgcaggaagcacgctctccatcggccaggaaatgcagatgggagactactatgtacgccagctgcgcggcagcgcgccgttaattaatgacccgctgctggtgcagtatattaacggtttaggcatgcgcctggtctcgcacgccaattccgtgcgcaccccgttccacttttatttaatcaataacgatcagattaacgcctttgctttcttcggcggcaacgtggtgctgcactcggccctgttccgctactcggataacgaaagcgagctggcatcggtcatggcgcacgaaatttctcacgttacccagcgccaccttgcccgcgccatggaagaccaaaagcgtaacgccccgctcacctgggtcggtgcgctgggttcaattcttctggcgatggccagcccgcaggccggtatggccgccctgaccggcaccctggcgggtagccagcagggaatgatcagctttacccgtcaaaacgaagaagaggccgaccgcattggtattcaggtccttcagcgctctgggttcgacccgcaggcgatgccggcgtttatggggaagctgctcgacgaatcgcgctactccacccgtccgccggaaatgctgctgacgcacccgctgccggaaagccggcttgccgacgcccgcaaccgcgcgaatcaaatgcgcccggttgtcgtacagtcctcagctgacttctatctggcgaaagccagaacgctcggtatgtacacttccggcgataataagctgggcaatgacctgctgagcagctgggaaaaaggcaatattcgcgaacagcacgccgcccagtacggtcgcgctctgctggcaatgggcaacaacaactacgatctggcgcgcaaaacgctacagccgttgctgaccgcagaaccgcagaacgcctggtatctcgacctggccaccgatatcgacctcgggcaaaaaagagcgacagacgcgattaaccgcctgaaaagcgctcgtgaactgcgcaccaacccggtgctgcagctcaacctcgccaacgccctgctggaaggaggacaaccggcggaagccgcgaatatccttaaccgctacacatttaataatagagatgacatcaacggttgggagctgctggcgcaggcggaagccaaactgggcaatcgcgatcaggagctggctgccagagcagaagggatggcgctggtaggccgcctcgatcaggcgattaccctgctcagcagcgccagctcgcaggtgaaattaggcagcttacagcaggcccgctacgatgcgcgtatcgatcagctgcgccagctgcagcaacgctttaaaccgtaccagaaaatgtaa

SEQ ID NO: 255018 - DNA, 360 bp, Klebsiella pneumoniae; identical to SEQ ID NO: 174637

SEQ ID NO: 255019 - DNA, 594 bp, Klebsiella pneumoniae
gtgctgcggcaggagcatagcggatacatctatatctggtcacgcgaaggggcggggcgcagccatctactgcacgcagcatgcgcggaactttcccagcgcggtgatgcggtgggctatgtgccgctggataaacggacgtggtttgttcctgaagtgctggacgggatggagcagctatcgctggtttgcatcgacaatattgaatgcgtggcgggcgatgagctgtgggaaatggcgattttcgacctctacaaccgcatcctcgaatccggtaaaacccggctgctgatcaccggcgaccgaccgccgcgccagctcaagctgggcctgccggatcttgcctcgcgcctcgactggggacaaatctacaagctgcagccgctatcggatgaagataagctccaggcgcttcagctgcgggcgaggctgcgcggctttgaaatgccggaagacgtctgccggttcctcctcaagcgcctggatcgtgaaatgcgctcgctgtttatgacgctcgatcagctcgatcgcgcttctataaccgcccagcgcaagctgaccattcctttcgtcaaagagatcctcaagctgtag

SEQ ID NO: 255020 - DNA, 1290 bp, Klebsiella pneumoniae
atgacgcgccgtgctatcggggtgagtgaaagaccgccgcttttacagacaatcccgcttagtttgcaacatctgttcgccatgtttggcgcaacggtactggtgcccgttctgtttcacatcaatccggccacggtactgctgtttaacggcatcggaacgctgttataccttttcatctgcaaaggcaaaatcccggcttatctgggatcgagctttgcgtttatttctccggtactgcttctgctaccgttgggctacgaagtcgctctcggcggctttatcatgtgcggcgtgctgttttgcatcgtctcctttattgtcaaaaaagccggcaccggctggcttgatgtgatgttccccccggcggcgatgggcgcgattgttgcggttatcgggctggagctggcgggcgtcgcggcgaatatggccggtctgctgcccgcagagggacaatcgccggacagcaaaaccatcatcatttcgatggtgacgctggcggtgacggtcttcggttcggtgctgttccgcggtttcctggcgattatcccgattttaatcggcgtcctggttggctacgcgctctccttcgtaatgggcgttgtcgatacgacgcccatcgccgaggctcactggttcgcgctgccgaccttctacaccccgcgctttgaatggtttgcgattttcaccattcttccagccgcgctggtggtgatcgccgagcacgttgggcatctggtggtaacggccaatatcgtcaaaaaagatctgatccgcgatccgggcctgcatcgttcaatgtttgccaacggtctctccacggtgatctccggcttctttggctccacgccgaacaccacctacggcgagaacattggcgtgatggcgattacccgcgtttacagtacctgggttatcggcggcgcggcgatcatcgcgattctgctctcctgcgtcggcaagctggcggcggcgatccagattatcccgctgccggtaatgggcggtgtctctctgctgctgtacggagtgattggcgcatcgggtattcgcgtgctgatcgaatcaaaagtcgattacaacaaggcgcagaacctgattctgacctccgtcatcctgattatcggcgtgagcggtgcaaaagtgcatatcggcgccgccgaactgaaaggcatggcgctggcgacgattgttggcgtcggcctgagtctgatctttaaactgatcggcgtcttgcgtccggaagaggtcgttctcgacgctgccgatagcgaagaagcaaaacattga

SEQ ID NO: 255021 - DNA, 627 bp, Klebsiella pneumoniae
atgaagatcgtggaagtgaaacacccactcgtcaaacacaagctgggcctgatgcgtgagcacgacatcagcaccaaacgcttccgtgaactcgcctcagaagttggcagcttactgacttatgaagccaccgccgatctggcgactgaaaaagtgaccatcgaaggctggaacggcccggtagaagttgagcagatcaagggtaaaaaaattaccgttgtgccgattctgcgcgcgggtctggggatgatggaaggcgtgcttgagcacgtgccaagcgcgcgcatcagcgtggtaggcatctatcgtaacgaagagacccttgagccggttccttacttccagaagctggtatccaatatcgacgaacgcatggcgctggtggttgacccgatgctggcaaccggcggctcgatgatcgccaccatcgacctgctgaaaaaagccggctgctccagcattaaggtgctggttctggtggccgcgccggaaggtatcgccgcgctggagaaagcgcatccggacgttgagctgtataccgcgtccatcgaccagggcctgaacgagcacggatacattattccggggctcggcgatgccggcgataagatttttggtacgaaataa

SEQ ID NO: 255022 - DNA, 1431 bp, Klebsiella pneumoniae
atgtctggatttaaagaaggttttctgtggggcggtgcggtagcggcgcatcagctggaaggcggctggaaagagggcggtaaaggggtgagcgtcgccgatgtgatgaccgcaggcgcgcacggcgtaccgcgcgaaatcactgatggcgtcctgccagggaaaaactatcccaaccacgaggcgattgatttctaccatcgttataaagacgacgttcagctgtttgccgaaatgggcttcaagtgtttccgcacctccattgcctggacgaggatcttcccgcagggcgatgaacaagaacctaacgaagccggcctgcagttttacgatgacctgttcgacgagtgcctgaagcacggcattgagccggtgattacgctctcccacttcgaaatgccgtaccatctggtgacggagtacggcggctggcgtaaccgtaagctgattgatttcttcgtccgctttgcccgggtggtgtttacccgctaccagcataaagtgaagtactggatgacctttaatgagatcaataaccaggccaatttccacgaagattttgccccgtttactaactccggactgaagtatctgccgggtgaagaccgtgagccggtgatgtatcaggcagcgcactatgagctggtcgccagcgcgctggcggttaaggccgcccgcgaaattaacccgtcgttgcaggtgggctgcatgatcgccatgtgtcctatttacccgctgagctgcgcgcccaacgatatgatgatggcgatgaacgccatgcatcgccgttactggtttaccgacgttcacgtgcgcggcaaatatccgcagcacctgctgaactacttcgagcgccgcggttttaaactggatatcaccgaagaagaccgcgcggcgctgactcagggctgcgtcgattatattggctttagctactatatgtcgtttgccacgaaagcaacggatgacaatccgctgctggattatgacgaaaccaccagcctggtttccaatccgtacgtacagaagtcagactggggctggcagattgatccggtcgggctgcgctactccctgaactggttctgggaccattaccagttgccgctgtttattgtggagaacggctttggcgccatcgacgtgcgcgaagcggacggttcggtagatgaccagtaccgtatcgactatctctccgcccatatcgccgagatgaaaaaagcggttgttgaggatggcgttgacctgatgggctacaccccgtggggctgtatcgatctggtctccgcaggtaccggcgagatgaaaaaacgctacgggtttatctatgtagataaagacaatgaaggtaagggcaccctggcgcgtagccgcaagaaatcttttgcctggtatcagcaggttatcagcagcaacggcgaaaagctataa

SEQ ID NO: 255023 - DNA, 894 bp, Klebsiella pneumoniae
atgaaaattgccgcattcgatatcggtggcacggcgttaaaaatgggggtaatgacgcgcgaaggcgagctgctggataaaggaaagcagacccttatcgacagcgatggcgaccagatcctgcaggcgatgctggcgtggatcgccgctcacccggaatgtaaaggagtggcgatcagcgctcccggctacgttaatccgcacaccggctttatcgaaatgggcggcgccatccgtaagttcgataacttcgctatcaaggcctggcttgagcagcaggtgcgattgcccgtcgccattgaaaatgatgctaactgcgtgctgctggccgagcgctggcggggtaaagccgccgacatgagcaacttcctggtcctgaccatcggcaccggcatcggcggggcgattttctgtaataaccagttggtccacggcgcacgtttccgcgccggcgaattcggttatatgcaaaccgcgcgtccgggcacccgcgatgtgcggcgctattcgatgaacgaaaactgcacgctgcgcgtgctgcgccatcgctacgctgagcatctcggcaaagcgctggatgacgtcaccggcgaagagatttttgaccgctacgatgcgggcgacgcgacctgtcgacggctggtcgctgaattctttaacggcctgggtaccgggctttacaaccttgttaacttattcgatccgcaaacgattttgatcggcggtggaattgtggaacgaccgggatttctggcgctgctgcgcgagcatctggcctggtttggcattgcggagtatctcgacaccgtcagccacggcaacgatgccgggctggtaggcgcggtttaccatttcaatcagcaacaccggtcgcagagcggcgactgcgcatag

SEQ ID NO: 255024 - DNA, 1038 bp, Klebsiella pneumoniae
gtgaccgataaaacctctctcagctataaagatgccggcgtggatattgatgcaggcaacgctctcgtcgaccgtattaagggcgtggtgaagaaaactcgccgcccggaagtgatgggtggactgggcggattcggcgcgctgtgcgcgctgccgcagaagtatcgcgagccggttctggtctccggcaccgacggcgtcggcaccaagctgcgtctggcgatggacctgaagcgccacgacactatcggtatcgacctggtcgccatgtgcgtaaacgacctcgtggttcagggcgccgagccgctgttcttccttgattactacgcgaccggcaaactggatgttgatactgcggcgagcgtaatcagcggcattgccgaaggttgtctgcagtcaggctgcgcgctggtgggcggcgagacggcggaaatgccgggcatgtatcacggagaagattatgacgtggctggtttctgcgtcggcgtggtagaaaagtcagaaattatcgacggcagcaaagtagccgatggcgatgtgctggtggcgctggcctccagcggaccgcactcaaacggctactctctggtacgcaaaattatcgaagtcagcggcgttgacccgcaaaccaccgatctcaacggcaaaccgctggctgaccacctgctggccccgacccgcatttatgtgaagtccgtgctcgacctgattgccaacgtagacgtgcacgctatcgcccatctgaccggcggcggcttctgggaaaatatcccgcgcgtcctgccggacaacacccaggcggtcattgatgaatcttcctggcagtggccggaagtgtttaactggctgcaaaccgcgggtaacgtcagcagccacgaaatgtatcgcacctttaactgcggcgtcggcatgataatcgcgctgccggcagacgcggcggataaggcgattgccttcctgaacgacaaaggtgaaaacgcgtggaaaatagggtatatcaaagcctctgattccgaacagcgtgtggtcattgaatga

SEQ ID NO: 255025 - DNA, 642 bp, Klebsiella pneumoniae
atgaaaaacatcgtggtgctgatttccggcaacggtagcaacctgcaggcgattatcgacgcctgcgcccggaaaaaaatcaacggcaccctgcgtgcagtcttcagcaacaaggccgacgcgttcggccttgagcgcgcgcgcgcggcgaatattccggctcacgccctcgccgccagccagtttgccaaccgggaagccttcgatcgcgagctgatgcacgagatcgacgcctatgcgccggatctggtagtactggccggctatatgcgtattcttagtccggcttttgtcgcccactatcaggggcggatgctgaatatccacccttccctgctgccaaaatatccggggctgcatacccatcgccaggcgctggaaaatggcgatgaggagcacgggacgtcggtgcatttcgtgaccgatgagctggacggcggtccggtggtattgcaggcaaaggtgccggttttcgctgaagataccgaagacgacattaccgcccgcgtacaggcgcaggaacacgatatctatcccctggctattagctggtttgtcgacggccgcctgcgcgcggagggcaacgaagcctggcttgatgaagtgaagctaccgccgcaaggctacgctgccgaagagtaa

SEQ ID NO: 255026 - DNA, 2061 bp, Klebsiella pneumoniae
atgggccaggaaaagctatacatcgaaaaagaactcagctggttatccttcaacgagcgcgtacttcaggaagcggcggacaaaagcaatccgctgatcgagcgcatgcgttttttggggatttactccaacaacctcgatgaattttacaaggtgcgctttgccgaactgaagcgccgcatcatcattagcgaagaacaaggcagtaccgcacactctcgccatctgctgggaaaaatccaggctcgcgtgctcaaggccgatcaggagtttgacggtttatacaatgagctgctgctggagatggcgcgtaaccagattttcctgattaacgaacgccagctctccgtcaaccagcagtcctggctgcgcaactacttcaagctgtatcttcgtcagcacattacgccgatcctgattaaccgcgaaacggatctggtgcagtttctgaaggatgattacacctatctggccgtcgagattattcgcggggatagcatcaattacgcgcttctcgagattccatcagacaaggtgccgcgttttgtgaatctgccgccggaagcgccgcgccgtcgcaagccaatgattctgttagacaacattctgcgctattgtctggatgatatcttcaagggctttttcgattacgatgcgctgaatgcctactcgatgaaaatgacgcgtgatgccgaatacgatctggtgcatgagatggaatcgagcctgatggagctgatgtcctccagcctgaagcagcgtctgaccgccgagccggtgcgcttcgtctatcagcgcgatatgccggacgcgatggtcgaaatgctgcgcgacaagctctccatctctaactacgactctatgctgccgggcggtcgttaccacaattttaaagactttatcggcttccccaacgtcggcaaagccaatctggtgaataaaccgatgccgcgtctgcgccatctgtggttcgataaattccgtaacggctttgatgcaattcgcgaacgcgacgtgctgctttattatccgtaccacactttcgaacacgtgcttgagctgctgcgccaggcctctttcgacccgagcgtgctggccatcaaaatcaacatctaccgcgtagcgaaagattcacgaattatcgactcgatgattcacgccgcccacaacggtaagaaagtgaccgtggtcgtggagctgcaggcgcgtttcgatgaagaagccaatattcactgggctaaacgcctgaccgaagctggcgtgcacgttatcttctccgccccgggtctcaaaattcacgccaagctgttccttgtttcgcgtaaagagggtgatgaagtcgtgcgctatgcgcacataggtaccggcaacttcaacgaaaaaaccgcgcgtctgtacaccgactattcgctgctgaccgccgatgcgcgcatcaccaatgaagtccgccgggtatttaactttatcgaaaacccctatcgtccggtcagcttcgattacctgctggtatcgccgcaaaactcgcgccgactgctttatgagatgatcgatcgcgagatcgccaacgcgcaaaatagtcagccatcaggaatcaccctgaagctgaacaatctggtcgataaaggcctggtagaccgcctttacgccgcctccagctcaggcgttccggttaatttgcttattcgcggcatgtgctcgctgatccctggcctcgaaggaatcagcgaaaatattcgcgtcatcagcattgttgaccgtttccttgaacatgaccgcgtttattgctttgaaaacggcggcgataagcaggtttggctatcgtccgcggactggatgacgcgtaatattgactatcgtattgaagtggccgcgccgctgctggatccgcgtctgaaacagcgcgtactcgatattttcgatctcctcttcaacgatacggtcaaagcacgctatcttgataaagaactgagtaatcgctacgtgccgcgcggcaatcgccgcaaagtgcgcgcacagatggcgatatacgactacctcaaatcacttgaacagcccgattaa

SEQ ID NO: 255027 - DNA, 1542 bp, Klebsiella pneumoniae
atgccaataaacgaaaatgcccctcggccgcaggagttcgctgcggtcgacctcggttcgaacagttttcatatggtgatcgcccgtgtcgttgacggagcaatgcagatcatcggtcgtctgaaacagcgcgtacatctggccgacggcctggatgaaaactctgtactgagcgaagaggctattgcgcgcgggctgaactgcctgtcgctattcgccgagcgcctgcagggttttgacccatccagcgtctgcatcgtcggcacgcacacgctgcgccaggcgacaaacgccgcagaattcctcaagcgcgcggagcaggtcatcccctacccgattgaaatcatccccggcaatgaagaagcgcgtctgatttttatgggcgtagagcatacgcagccggaacgaggccgtaagctggtcatcgatatcggcggcggctctaccgagctggttatcggcgaggatttcgaacctcgcctggtggaaagccgccgtatgggctgcgtgagcttctctcaggcctattttgctggcggcgtcatcaataaagagaatttccagcgcgcgagactttcagccgtgcagaagctggaaacgctggcctggcagttccgcatccaggggtggaacgtggccctgggcgcgtccggcaccattaaagccgctcacgaagtgctggtggcgatgggcgagaaagacgggttcatcactcccgagcgcctcgagatgctggtcgaagagctgttgaagtataaaaacttcgactcgctgagcctgcccgggctgtctgaagatcgaaaagccgtttttgcgcccggtctggctatcctgtgcggggtatttgacgcgctggcgattaaagagctgcgcttgtccgacggcgcgctgcgcgagggcgtactgtacgagatggaaggacgtttccgtcatcaggatatccgtagccgcaccgcgcaaagcctggcgaaccagtacaacatcgaccgtgagcaggcgcgacgcgtgctggagaccaccacgcatatttatgagcaatggcaggagcagaatcccaagcttgccaatccgcatctggcggcgctgctgaaatgggcaaccatgctccatgaagttggcttaaacattaaccacagcggcatgcaccgtcattcggcttatattctgcaacatagcgatctgccgggctttaatcaggaacagcaaatgctgatggccaccctggttcgctatcaccgtaaagcgattaagctggatgatttgccgcgttttacgctgtttaagaaaaagcagtttctgccgttgattcagctgctgcgccttggcgtgctgttgaataaccagcgccaggcgacgaccacgccgccgaccctcacgctgaaaaccgaggccaaccactggacgctgaccttcccgcacgactggtttagccagaatgcgctggtactgctcgatctggaaaaagagcaggagtactgggaaggcgtacctgactggtggctaaaaatcagcgaggaagagaagcctgacgcggccagctag

SEQ ID NO: 255028 - DNA, 2220 bp, Klebsiella pneumoniae
atgaacttaattaaactttacaggcaatatcgggataaatggtgggcgctaccgcttatcttacctgtatgtttgcttcccgtgtcacgatgggctaataccgttgcgttgctggatggtaatgaagtctctctttactatttacccctggcgctagtactgagcctgatgctgtttttcggctgggccgcattaccggggatcgttctcgggttgttgctttccattacgcgcggcatgtcgctggaagatactatcggcgtcattttccattttcttattccgaccgttttatgctggggcggttatcgcgtttttgtcccgcgaaggcagcaaatctcgcatggcaacgtaagtctgatgcctcagcgattgttctggcagatgctgttgccgtccctgatctttcttatcctgtcgcagctggccgagtatctgggcattcatccacgcgctaccgggttgataggggtcaatcccttaagtttgcgttcgcttatcaccttccaggccctgatggcgggatgtttaaccggcgtgccgttgtgctacttcgttattcgaactatccgcaatccgctttatatccgcgggtttatatcgcaaattcgcttacagatcgacccaaaaataaagcgctttgaatttgttatatgggcagcggtgctgataattctattattccttctattgatgccgctgaatagtacgagcaccatattcagtacaaattatacgttatccttgctgatgccggtgatgttatggggggcgatgcgctttggctatcgctttatttcattagtctggtcacttgttttaattattattattcactttcactatcaatatctcccgcactccccgatttataacaatcagctggcgatcacctcctccagttatctggtgttttcatttattatcgcctatatggcaatgctggcgacgcagcagcgagttttttactcgcgcatgcgtcggatggccttcatcgatccggtcgttcgcttgcctaatatccgggcgctgagtcgggcgttaaataaatcctcctggtccgtgctgtgtttcctgcgcattcctgaactggaaatcttgggccgccactacggtgttctgttgcgtattcagtacaagcagctgctggccgagtcgctcggtgagttactgcgccctggggaggatatctaccagatggcagggcatgagctggtggttcatctgaacagtgaaggccatcagcagcgcattccccagctctatgagcacctcaaaaaatttcgttttgtctggaatggtatgccgctgcagccgcccgtgggattcagctattgcaacgttcgctcgccggtaatgcatctgcatttgctgcttggcgaactcaacagcgcggccgacctttctctggcgaccggaagccctgaaaacttacagcgccgcggcgccatcaatctgcagcaagagctgaaagacaaagtcgcgataatgaatcagctggtgaaggcgcttgatcaggatcggttcctcctgatggcgcagccgattgtcggcatccgcggggatagctaccacgaagtcctgctcaggatgttgaacgacaatgatgaaatcgtcatgccggatatctttttaccggtagcacacgagtttggcttctcggcgcgtattgatagctgggtactcgaacatacgcttatgtttatggacaagcagcgcaagaagctgccgggaatgcgtctggcgataaatatctcacctttttcagtgagcaacagccattttcatcaacaggtgcaagcgctgctggagcattacgacattgagccctggcagattatttttgagctgactgaaaaccattcactgacaaatccggaacaggcgcgtaaaaccctggcgcagcttcaggagctgggatgccgggtggcaattgatgattttggcaccggttatgccagctacgcgcggctgaaaacgatgaatgcggatttgctgaaaattgacggcagttttattcgtaatctggtctccagcagtctggactatcaggccgttgcttccatttgcctgctggcccggatgagaaacatgcaggtagtggccgaatatgtcgaaacgccggagattcgccaggcggtaatttcgctggggattgactatatgcagggctacgagattggcagaccagcgccgcttgaggcgctggttgaggcttga

SEQ ID NO: 255029 - DNA, 192 bp, Klebsiella pneumoniae
atgcgtaaacgacatcgatttaaccgtcgcatgacccgtatcgtactgcttatcagctttatcttcttctttggacgctttgtctactcctctatcggtgcctggtaccatcatcaggacaaaaagcaatcgcagcaatccactatcaccgttgagccttcggattcagcaaaagcgcctgagcaaaaataa

SEQ ID NO: 255030 - DNA, 897 bp, Klebsiella pneumoniae
atgaataaagcgtcatcttcacagctgatcggcgtgctattttccgtctgcgcggcttttggtttctcgtttaaggcaatattcgtcaagcttgcctacgagcaggcaacggtagatgccattactttactcatgctgcggatgaccctgtcgttacctttcgttatcctggttgctctacgggtgctgcgtagcggtgtaccactgcagcgtcgtgattatctgctgctactgctgctgggaatagtggggtattacggttcggcgatcctggattttatgggcctgcgctatattaccgccgggcttgagcggctgatcttatttacctacccggcgctcactattctgattggcgtcctgtttttgggtaagcgtttcgaaaaaaaggtactcctggccttagcgctctcctggtcgggaattctgctggcgtttgtccacgatctgcagattagcggtgatatgcacagcctggtgctcggtggtggtctgatcgccgctgcggccttactgtatgccatttataatgccgggtcagaggtggcaatccggcgtatggggtcgatgaagttctcggttcttgccttgctggtttcatctcttgccacgcaaacccatttttatcttgctcaaccgttatccgcgcttaacctgccgtggcaggtatatctatggtgtggcgcgatggcgctcttctcaaccgtattaccgatcttctggcagtcggcggccgtgcagcgcattggtgcggaacgcgccgtgctgatcggccttctgggaccaatgctaacagtattctttagctggtggttactgggagaacccatttcgctggcacaaatagcgggtacattgttagtgatggctggtgtgctggttgtgcttcggcattag

SEQ ID NO: 255031 - DNA, 813 bp, Klebsiella pneumoniae
atgaatatacagccggagttgacatggcagcgcttgccaatgacggtgcagggcatcgggcttgatatcgcgtccattagccgtgaaggaacgggggagccggtcgtctttcttcacggttttggctccagcaaagaggattacgctgatttcgtgcgccatcgagcctttgaggggcagccgtttattgcctgggatgcaccgggttgtggtgagagccaatgcgctgattacagcaagatggggttaccctttctgcttgagacggcgctgaaggtgatttcccacgcggggtttacgcgctttcacttggtcgggcattcaatgggaggattaacatcgcttctgctggcgcacgctttccccgagcgagtgctaagttttgtgaatattgagggcaatatcgcgccggaagactgctttttgagccggcaaattgtgcaatatgctgagccggacgcggaacgtttcttcgcgcgctttattgaacgcactcgccaatcgccagcctgggccagcgcgctctatgccagcagcctgccgcaaaaggttcgcgctcaagcggtgccggggattttctcttcgatggtggattattctgaccacggtgagctaatggcgaaattccttaatttaccgtgtccaaaaatgtttatgtacggcgaccagaatgccgggctaagctatttatcttctattgcccgccgtggtgtaaagttggcggaaattccgcattgcgggcatttccctatgtattcaaactcgccggagatgtggcgacagatagctttattgcagcaggcctcacgatga

SEQ ID NO: 255032 - DNA, 903 bp, Klebsiella pneumoniae
atgagcaatattgattttcgtcgtattaagcagctgtggatgtttctcgcagttgcggaagaggaacactttggccgcgcggcgctgcgcctcgggatgtcgcaaccgccgctaacggaacaaatcaagctcctggagcacgggctgaaactccagctgttcgagcgttcgcggcgcgggacccgcctgagtccggccggagccgcactcctgcccgcggtacgccagttcgccgaccagctcagccagttgggcagaaccgtcgatgaaatcgccgcaggccactcggcggtattgaatatcggggcgataacctcggccatgctggagaccttacccccactgcttgaggagcttaagcgcgctacgcccgggctaacaatatttatccgggaaatcgatagtgtcgatgcgatccccgccctggagaacggtgaactggatctggcttttgtacgcctggaaggtgagaccgaaggccacatcacgactttgccgctggaagagtcacgcctggctgtcgcgctaccggtcgatcatccgctggccttacagcatcgcgtcagcctgcgcgcgctggcaaaggagccgatggtaatgtctgctcgccaggtcagcccggcctggtttgatctcctcacctcgctgtgtcgcacccacggttttactccccgcattctgcatgaggtccgctcggtaagttcacaaattgcgttcgtcagctgcggccagggcatcgcgctggttcccgcctccacccgcaaactggcgccggctaatgtggtgataaaggccctggaagagaagcagatggttgttaccgcggcggcggcgtggaacagcgagcgtcaccacccgctggttgattcagccattgctttattgaaaacacgctacgcctga

SEQ ID NO: 255033 - DNA, 897 bp, Klebsiella pneumoniae
atgatgacgctcaatctgggaaatctggcgacgttccgcctggtcgtacagcgcgggagcttctccgctgcggcagacgtactgggattgtcgcagcctgcggtcagcctgcaggtacgtcagctggaacagtttctacaaaccaggctgcttgagcgcaccgggcggggaattaaagcgacggcggccggtatcgccctgctggcccacagcgatcggattgaactggcggtgggcgcggcggtgcaatcggtgagtgaattcaatcgtgaaatcagcggctcggtaacgctgggatccggagcaaccgcctgtattcatctgctacctccgttactgcagaagctacatcatgagcatcctttattgacggtgagggtcacggttggcaatacgcttgaggtggttcgggctattgaagagaatcggctcgaccttgggctttgtacgctaccggcgaatggacgcagtctggcggttatgccggtgttagaggaggagtttgtgtgtattttcagcgatgggcaggatgagttaccgtggtcgctgacgccagagattctgcaatcattaccgctaatcgcttttgaatcgggaagcggaacccgggatctgatcgatggctggtttcttgccgatgggcgggcgatagcgccagtcatgcagttaggcagcattgaggcgattaagcgcatggtacgtgcggggttggggttcagcattgtgccgagaatggcggtagagcatccgcaggatcgtattggcttaaatgttcaatcactgactccgctgctgcatcgtcagttaggcataatcatgcggcaggataaaattatcagcaaaggtattgctgagatcctgcgtttactgcagaagttggagaatggtcaggcgtag

SEQ ID NO: 255034 - DNA, 1185 bp, Klebsiella pneumoniae
atgaatacacctgcgaactcgcactccgcgccgggctttatcacgctggccgccgggtgcaatcagctgattaactggggaatctcgttttatatgcccggcacttttgccagggctatcgctcaggagaccggctggaccgccacggaaatctatttcggactgaccctcgccatgctcatgatggcgacgctttctccgtttatcgcccggcttcttgcccgctttggcggccagcgaatagttattaccggtacgctggcgatttcagcggggtgtctgctgatggcttacgtccatagcctgacgggctggttcgccgcctggcttctgaccggcatcggtatgcggctggcgctgtacgacgcgctgttcgcggcgctggtgaatctttacgggcagcgggccaggttgaccatatcgcgcgtgacgctggccggaggattagcctcggccctgttctggccgcttggcgcctggctgctgacgcggatggactggcggcacgcgctgctgatctacgccctgtttggcctgcttagcgctctgctgttgtggaaaatgccgaataccaaattaccgttgccggtaagggtgaaaaaaaaccagcagctgtcaaagcatgatagacgtccggccctgctgtacgcgtcgttgattgcgctggttacctttgtatccaacggcacgtcaacgcatcttcccgagttcatcgccagcgttgggcttcctgtcgcggtgggaatgctatggggaattggacaaaccggcgcgcgttttctcgaagtggtatccggctccgcgctcacgccgctgcggctaacgatattgacgacctcgctgatgccgctctgctttgcgcttggactgagcggcgcttttctgtcgtgggcggccggcggatttgtactgggttacggcgcgatcaacggcctgaccaccgtgtttaaggccactttaccgctgcagctctttgccgccgaggattatgcccggctaaccggcattctgttgattcccgcacaactgctggccgccatatcgccgtttacctacgcatggattaatcattatcttgggatgtcaggctgcttagcggtctctgccgctttgtccctggtggtagcagggttagcaataatgattgctatcaatcaatacagactaacagcgaccattcggtaa

SEQ ID NO: 255035 - DNA, 855 bp, Klebsiella pneumoniae
  misc_feature (763)..(772): n is a, c, g, or t
atgacaaaattaaacaaactaacaattgcttcattattagtgttcattgccctaaataaaacagcatcagctgaacaaagcgagtttcttaacgccataaaaaatataaacttacagagtattgatgcaaatgaaacggtagaaccatcggataacagatcgcagaatattaatagtgaagccagcatcaatgataagttagaacaaaaaaataaaaaactccagatgaagtatgaaaaactattgggatcgtacaatgaaataaaattgaacggtggctctggtaattcggaatcccaaaaagcaactatctccgttctcactagtgaaaaggataaacttaacgctgagaataccgcgctacgtaagcagctagctgatgccacttcaactctttccgccatgcgaaagcaagaagagctgtccttcgccagtcagaaaaaagaactgagctctctgggccaggaaaatgcccgcctgctcagcgaatctgaggctacacgtaaacagcttgccgaggctgcttcgcagctggcagcgttgcgtaagcaaaacgaactctccgccgccagtcagaaaaaagaactgagctctctgggccaggaaaacgcccgcctgctcagcgaatctgaggctacacgtaaacagcttgccgaggccgctaataagctggccagcctggaaaaaagttcgcagcagtcagctattttaaaaaccaatttattaaaaacccccgaaggcaaaaactcatattccttgggtnnnnnnnnnncttgggtgttttttattatgataaaattaacgctgaatttgaaaaaatcactaaaaacaacattaaactcgcgccttcattga

SEQ ID NO: 255036 - DNA, 456 bp, Klebsiella pneumoniae
atgattgacggtatgaatgatgctttcaataaatcactcaaaataaataaatcagagataatggaaaatgtggtcaaaattgatcgaatcgtgcaaagcattaatagcgactatgctaaaaagatccttaaattaattaacaagaagaaatatgaagtacttgcaaatggttcatttttagttaccgataaatcgacatcgaaaaaatacagtgagaatgagatagtaacattcgatatgctggagaaaaacctgaacggcaagcctatacttaacaccatgaatactaatgttaattttaatcaaatccgtgatccgttgcttagaaaagtcgtttcagagggtggtaaaggtggtgcaatgacgctgtatggcaaggcagatatcttatataaaaacgtacctgatggcgtgtcaccggaaagtctggtatcgataacctttatgttaaagtag

SEQ ID NO: 255037 - DNA, 291 bp, Klebsiella pneumoniae; identical to SEQ ID NO: 174039

SEQ ID NO: 255038 - DNA, 1689 bp, Klebsiella pneumoniae
atggcaagttcgggcacaacatcacaaaaaatgcgcttcactggcgcacagttagtcgttcatttactggagcgtcaggggatcactacggtcagcggcattccgggcggctccatccttccgatttacgatgcgttaagccaaagcactcagatccgccatattctggcgcgtcacgagcagggcgcgggatttatcgcccagggcatggcgcgcaccgagggcaaaccggcggtgtgtatggcctgtagcggcccgggagccactaacctgatcaccgctatcgccgatgcccgtctggattcgattccgctggtgtgcattaccggccaggttccggcttcaatgatcggcaccgatgccttccaggaagttgacacctacggtatctctatccccatcacgaaacataactatctggtacgcaacattgctgagctgccgcaggtgatgagcgaagcgtttcgcatcgcgcagtccgggcgaccagggccggtgtggatagatattcctaaggatgttcaggccgcgaccattgagctcgatgccctgccggaacccggcgcccgtacggcggctccgatgttcgatagtgccagcgtgcgtgaagcggcggcgatgattaacgccgcgcagcgtccggtgctctatctgggcggtggggtgatcaacgcgcctgagcacattcgccaactggcggaaaaagccaacctgccgaccacccagaccctgatggcgctggggatgctgccgaaagcgcatccgctgtcgctgggcatgctggggatgcacggcgcgcgcagcaccaattttattttgcaagaggctgatttattggttgttttaggggcgcgttttgatgaccgggcgattggtaaaaccgagcagttctgcccgaatgcgaaaattatccacgttgatatcgaccgctctgagctgggtaaaatcaaacagccgcacgtggcgattcagggcgatgttggcgaagtgctggcgcagctgatcccgcaggtcgaggcgcagccgcgcagcgaatggctgcagctggtggccgatctgcagcgggagttcccctgcaccattccgcaggagcaagacccgcttacccactatggcctgattaacgccgttgccgcctgcgttgacgatgaggcaatcgtgaccaccgacgtcggccagcaccagatgtgggtcgcgcaggcgtatccgctgaaccgtccgcgccagtggctgacctccggcggcctcggcaccatgggctttggtctgcctgcggcggtaggcgcggcgctggctaacccgcagcgcaaggtcatctgcttctccggagacggcagcctgatgatgaacattcaggaaatggctaccgcggcggaaaatcagctggacgtgaaaattatcctcatgaataacgaagcgctggggctggtttatcagcagcagagcctgttctataagcagggcgtattcgccgcaacctatcctggcatggtcaactttatgcagattgccgccggttttggtctgcaaacctgtgatttaaataacgaagccgacccgcaggcggcgctgcaggcgattatcgaccgcccgggtccggcgctgatccacgtgcgtatcgatgctgaagaaaaagtgtatccgatggtaccgccgggtgcggccaatactgaaatggtgggggaataa

SEQ ID NO: 255039 - DNA, 447 bp, Klebsiella pneumoniae
atggcccccttgttgattgccgccatcaccccggacgaacccggtttttcggcactacgcgccgaaagcctgacgcaaaacctgactatgctgggccgcctggcggagaactggcagagcgggattaaccgctttaacgcgccgggagaaaagctgctgggcgcttttgcatttgggcagctggttggggtttgcgggctcaatgtcgacccttttagccagcagccgcgagccggccgcatccgccatttatatatcggcgagcgccaccgtcggcaggggatcgggcatcagctgctggtctcggttattacccactccggcgccagctttgattttctcaacacccatgcgccgtcaacggcctggtcgttttatgaaaatctgggatttcgcccggtctatgatgaaccgcgggtcacccatcgcctgttttgttcgctctag

SEQ ID NO: 255040 - DNA, 834 bp, Klebsiella pneumoniae
atgaccattaccgtattctgtatattgctattcgccgccctgcttcacgcaagctggaacgctatcgttaaagccagcggcgataaaatgtacgcggcgattggcgttagcggctctgcctcgctcatcgccctggttttgctcccttttgccccccagccgacgctggccagcgtgccgtttcttgctgtctcctgcgcgctacaggtggtgtatacggtgctggtggcgaaaacctatcaggtctcggatatgagccagacctatccgctgatgcgcggaaccgcgccgctgctggtggcgataatcagcgttatcttccttggcgaccacctctctccgctggcgtggctgggcatcggcgtcatctgcctggcgatactggcgatggcgtttaacggccgatcccgttcaagcaccggtatcctattagcgctgatcaacgcctgctttattgccggttatacgctggtagacggaaccggggtgcggctttcagaaaccgcactgggctatacgctatggaccttttttatgaatggcttctgtctgctgggctgggcgatgattgcccgacgcccgcaggccagccgctatctgcgccagcactggaagaaaggcctggtcggcggcgttggcactatgggttcttatggcctggcgctgtgggcaatgacccaggcgccgctggcggtggtcgccgccctgcgcgaaacctcaattctttttggcgcggttatcgcgtttatcctgttgaaagaaaagatggttccattacgcatcgtggctgcctgcggtattgccgccggggcgattctgctgcggctgtcgtaa

SEQ ID NO: 255041 - DNA, 1185 bp, Klebsiella pneumoniae
atgaaacggcataagaacttcaatttgttgttgatgctggtactgctggtggccgtcggccagatggcgcagaccatttatatcccggcgattgccgatatggcggtatcgctaaacgtgcgtgaaggcgcggtacagagcgtgatggccgcttatctgctgacctacggcgtctcgcagcttttctacggcccgctctccgatcgcgttggccggcgtccggtgatcctcgttgggatgtctatttttatgctggcgacgctgattgccattaccacccatagtctgccggtgttgatcgccgccagcgcactgcagggaatgggtaccggcgtcggcggcgtgatggcgcgtaccctgccgcgtgacctgtatgaaggcgcgcagctcagacacgccaatagcctgctgaatatgggaattctggtaagcccgctgctggccccgttgattggcggtattcttgataccttgtggaactggcgggcctgcttcgtattcttgctgattctttgcgctggcgtcaccttcagcatggcgcgctggatgccggaaacccggcccaccggcgcaccgcgcacccgtctcatcaccaactataaaacgctgttcggaaccggcgcgttcaactgctatctgctgatgctgatcggcggcctcgcgggcattgccgtattcgaagcctgttccggggtgctgatgggggcggtgctgggactgagcagtatgtcggtcagcattctgtttattctgccgattccggcggcgttctttggcgcctggtttgccgggcggccaaacaaacgcttcccgacgctgatgtggcagtcggtgatttgctgcctgctggcgggcgtgctgatgtggataccgggcctgctgggcgtgatgaccgtctggaccctgctggttcctgctgcgctgttcttctttggcgcaggaatgctgtttccgctggcgaccagcggcgcgatggaacctttcccgttccttgccggcaccgccggggcgttagtgggcggattacaaaacatcggttccggcgtgctggcgtggctgtcggcgatgatgccgcaaaccggccagggcagcctcggcctgctgatgatgctgatgggattgctgattctgctgtgctggctgccgctggcatcgcggtttcatcaacatcagcagccggtttaa

SEQ ID NO: 255042 - DNA, 1329 bp, Klebsiella pneumoniae
atgaaaaacgctgacatgaccaatttactcgcgcagtttcctctgctggaggaactgatagccctgaaagaaaccacctggtttaacccgtcaacgacgtcgctggcggaagggttaccctacgttggcctgacgacagaagacgttcaggacgcccacgcccggctcgatcgttttgcgccatacctggcggaggcctttccggaaaccgcagccactggcggtattatcgaatcagaactggtagccatcccggcaatgaaggcccggctggaaaaaacctttcatcaaccgattggcggcgatctgctgctgaaaaaagacagtcacctgccgatttccggctcgattaaggcccgcggcggcatttatgaagtgctgacgcatgcggaaaaactggcgatcgacgcgggattattaaacacaaccgatgattatcgtaaactgctaacccccgagttcagggccttcttcagccagtacagcatcgccgttggctccaccggtaacctgggaatgtcgattggcattatgagcgcacgcatcggcttcaaggtgacggtacatatgtccgccgacgccagagcgtggaaaaaggccaaactgcgcagccacggcgtaacggtggtggagtacgaagaggattacggcgtggcggttgagcagggacggcaagccgccgagtccgacccgaactgcttctttatcgatgacgagaactcgcgcaccctgttcctcggctactccgtggccggcgagcggctaaaagcgcagtttgcgcgcgaagggcgcgtagtggacgccagtcatcctctgtttgtttacctgccgtgcggcgttggcggcggccccggcggcgtggcgtttggcctgaagctggcgtttggcgatagcgtacactgcttcttcgccgaaccgacccactccccgtgcatgttgctgggtgtctataccggtctgcatgaccagatttcggttcaggatctggggattgataatctgaccgccgcagacggcctggcggtaggccgcgcctccggtttcgtgggtcgggcaatggagcgcctgctggatgggttctactctctcgatgaccagaccatgtacgatatgctgggttggttagccgaagaagaaggtattcgcctggagccatccgctctggccggcatggccgggccgcagcgggtctgcgccagccaggcgtatcagcagatgcacggtttcaccgctgagcagatgcgcaatgcgacccatctggtgtgggcaaccggcggcggcatggtgccggaagaggagatggcgcattatctggcaaaaggacggtaa

SEQ ID NO: 255043 - DNA, 531 bp, Klebsiella pneumoniae
atgacaggatgtcaggctgactacggtgacgatcggcactgcggcaactgccagtctctggcgagcgatattcccgtgcatgaagtgatcattcatcgtcaggagtgtgaacgccccgagctcgtctaccatcagttgagcgcccagggggcagtggctatcaagtttattccccatctgcagcccgtcgacgcccgtctgtggggggattttctttgcgcggtattcgcgatttgggtcaaagaagatgctaatcgtatcgtcgtgccgctgtttgaggccacgctgcgcgcctggcgcggcgagtcggtgcagtatgctaataatccgccggggccggcctgcgctggctgcgcctggctaagattatgcggtgggggctgcccgcagctgcgtctggaggatggctccaatgccctttgtgagggataccggcagttttatagctggagcgctccctatatgcgcgttctgcgcgatctactcaatcagcaccgttcgccggttgagcttatgcatctgctgcgctaa

SEQ ID NO: 255044 - DNA, 363 bp, Klebsiella pneumoniae; identical to SEQ ID NO: 174030

SEQ ID NO: 255045 - DNA, 348 bp, Klebsiella pneumoniae
atgaaaatatcccgccttggcgaagcaccggattaccgcttctcgctggccaatgaacgtacctttctggcgtggatccgcacttctctcggctttctggccggtggcgttggtctcgaccagctggcgccggatttcgccacgccgctgattcgcgaaatcctcgctctgctgctgtgcctgtttgccggcggtctggcgatatacggctatttacgctggctgagcaacgaaaaagcgatgcgccttaagcaggatttgccctatacccgcacgttgctgctgatcagcattctgttgaccatcgttatcgtggtggtgatggcgctggtgctctatgccggataa

SEQ ID NO: 255046 - DNA, 1494 bp, Klebsiella pneumoniae
atgagtcgccccaatttcctgtttattatgaccgatacccaggctaccaatatggtgggttgttacagcggtaagccgctgaatacccaaaatattgattgtctggccgccgaaggcatccgcttcaattccgcctatacctgctcgccggtatgcaccccggcacgtgccggactgtttaccggaatttatgccaaccagtccggcccgtggaccaataacgtcgcgccggggaaaaacatctccaccatggggcgctactttaaggatgcgggttaccgtacctgctatatcggcaagtggcatctggatggtcacgactactttggtaccggcgagtgcccgcccgagtgggacgctgactactggtttgacggcgcgaattacctcgcagagctgactgaggaagagatcggcctgtggcgtaacggcctgaacagcgtagaagatttactgcagcatgggatagatgaaaccttcacctgggcgcaccgcatcagcaaccgggcggtcgacttcctgcgccagcccgcccgagctgacgagccgttcctgatggtggtttcctacgatgagccgcaccatccgtttacctgcccggtagagtatctgcgcaagtaccaggacttttattatgatcttgggccaaaggctcatgactcgctcgccgataaaccggaacaccatcgcctgtggtcgcaggcgatgccctccccggtaggtgaagatgggcgctatcatcatccgctctactttgcctgcaacgactttgtcgacgatcagattggtcgggtgattaacgccttaacgccacagcagcgggacaatacctgggttatttatacttccgatcacggcgagatgatgggcgcccataggctcattagcaaaggcgcggcgatgtatgacgatatcactcgtattccgctgatcatgcgcccgccgcagggcgtacccatgcagatcgacgcgccggtcagccatatcgacctgctaccgacgatgatggcgctggcgggtatccctaagcccgatattctgccgggggataatattcttaacgccgaaacctcgcgcggggtgatggtggaattcaatcgctatgagattgaacatgacagctttggcgggtttatcccggtgcgctgctgggtgacggatgagtacaaactggtgcttaacctgtttaccagcgatgaactgtacgacagaaaaaacgacccggatgagctgtataatcttattaatcgccccgatttcgccgacgttcgctgtcaaatgcacgatgcgctgcttaactatatggataaaatccgcgacccgttccgtacttatcaatggagcttgcgtccgtggcggccggatgccctgccgcgctggatgggcgctttccgcccgcgcccgcaggacggctactcgccggtcgtgcgcgactatgacactggactgccgacgcggggcgtgaaggtggaggagaaaaaacagaagttttga

SEQ ID NO: 255047 - DNA, 1716 bp, Klebsiella pneumoniae
atgaatgccatacaaattttgagctttgtcgggtttacattgctggtggctatcattacctggtttaaggtaagaaaagcggataccggctcgcagcagggctatttccttgccggccgttcgctgaaagcgccggtcatcgccgcctcgctgatgttaaccaacttatcgaccgaacagctggtgggattatcgggccaggcttacaaaagcggcatgtcggttatgggctgggaggtgacatcggcggtgacgctgattttcctggcgctgatctttcttccccgctatctgcagcgcggtatcgccaccatcccggactttctggaagagcggtacgataaaacgacccgcattattatcgacttctgctttcttatcgccaccggtatctgctttttacccatcgtgctttactccggcgcgctggcattgaatagcctttttcatattggtgaatcgctgggcctgacccagggcgccgccatctggttactggtgattttgctcggtctggccgggattttatacgcggtaatcggcggcatgcgcgcgatggcaatcgctgattccattaacggaatcggcctggtgattggcggcctgatggtaccgatttttggcctgatggcgatggggaaggggagttttttacagggtatcgagcagctgacgacggtacacgcggagaagctgaactctattggcggcagcagcgaccccctgccgattggcgcggcgtttaccggcctgattctggtgaacaccttctactggtgtactaatcaggggatagtgcagcgtaccctggcgtcaaaaagcctggcggaggggcagaaaggggcgctcctgacggcggttctcaagatgctcgatccgttgattctggtgcttcccggtttaattgcctttcatctctaccaggatctgccgagcgcggatatggcttatccgacgttggtcaacaaggtcatgccgcttccgctggtcggtttttttggcgccgttctgtttggcgccgttatcagtacctttaacggctttttaaacagcgccagtaccctgttcagcatgggaatttaccggcgcatcatcaatgaaaacgcccagccggagcagctggtgcgcattgggcggaaatttggcctttttattgcggtgatctcggtgattgtcgcgccgtggatcgctaatgcgccgcaggggctgtatagctggatgaagcagctcaacggtatttataacgtgccgctggtaaccatcatcattatgggcttcttctttccgcgtatcccggcgatcgccgccaaagtagcgatggggctggggattgttagctacatcacgattaattacctggtgaaatttgatttccatttcctctacgtgctcgcctgcacgttctgcatcaacgtggtggtgatgctggttatcggcttcattaagccgcgggcgacgccgtttacattccatgatgcgtttgccgttgatatgcagccgtaccggcacgtgaaaattgcctcggtgggcattctgttcgcgatgatcggcgtttacgcgggcctcgccgagtttggcggctacggcactcgctggctggcggcggtgagctacgccattaccgcagcggtcattatctatctgatttacagcagctggcgggaacgccgctccgctccagcttcctatgctatcgatgttaaggaaaaatcatga

SEQ ID NO: 255048 - DNA, 894 bp, Klebsiella pneumoniae
atgaatggaaaaatacagatttcgcatgtaaaaaacgaaactacgtataacattccgttagttctggaagaaaatgtgatctcaagcgggatttcactgctctcgctatggcataccctggccgatgaaagctaccgggtcagctggccgcgcgataaaaagaaaccgcttatcgccaactcgtgggtggcgatatatacgctgcagggatgtggtaaaatatatctcagagaccacactgaaataaccttaaacggtaactgcgtcatattcttaaaacccatcgagatcaaatcctatcactgcgccggattggtctgggaacaatactggatggaatttattcctactacgctgatgcctattccggtattacaaatcggcactatttatcacgccgatatttttaataaggaactcaatgaagtggccttattgattgctgaccgcgatccgctaaagaataatctggccgtcgcctacctcacgaaaatcatttatcaatggatttgcctgatcgccgaaaatggcaaaaaagatcgtcaactgcaaaagctggaaaaactgattgccgctctacacgctaatccgcaaaagcgctggagcgtagccgatatggctgatgctatgcagtgcagcgaaccctggctgcggcgcctctttttgcgtcataccggcaaaacgccaaaggagtattaccttaacgcccagcttgagctggcgcagtcgctattaaagcaggaggggaatacggtgggtaaggtggcggagatgctgaacttcttcgactcctttcattttagcaaggcctttaaacgccgcttcggctatgcgccctcagcggtactaaaaatgaatgaccggcaccctatggatgccggtcagcaggattaa

SEQ ID NO: 255049 - DNA, 1323 bp, Klebsiella pneumoniae
atgaaaaaattctcagttgttatcgcaggcggcggcagtaccttcaccccgggcatcgtgctgatgctgttagcgaaccaggatcgcttcccgctgcggtcgttgaaattttacgacaacgacggcgcgcgtcaggagaccatcgccgaggcgtgcaaagtcattctcaaagagcaggcgccggatatcgcgttcagctacaccactgacccgcaggcggcctttaccgacgttgatttcgtgatggcgcatatccgcgtgggcaaatatccgatgcgtgaaaaagatgaaaaaattccgctgcgtcacggtgtgctggggcaggaaacctgcggtcctggcggtatcgcctacggtatgcgctccatcggcggcgttctggaactggtggactatatggaaaaatattcgccaaacgcctggatgctgaactactccaacccggcggcaattgtggcggaagcgacccgtcgcttgcgtccgaacgctaaaattctcaacatctgcgatatgccgatcggtatcgaaggacggatggcgcaaatcgtcggccttaaggatcgcaaacagatgcgcgtgcgctactacggtctgaatcacttcggctggtggacctcgattgaagatttacagggcaacgatctgatgccgaaactgcgcgaacatgtggcgaaattcggctatgtgccgccgtcaaacgacccgcataccgaggccagctggaacgataccttcgccaaggcgaaggacgtgcaggcgctggatccggatacgatgcccaatacttacctcaagtattatttgttcccggactacgtcgtggcgcactctaacccggaacgtacccgcgccaacgaggtgatggatcatcgcgagaaaaacgtctttagcgcctgccgggccattattgaggccggtaactcatccgcgggggatctggaaattgacgaacatgcttcctatatcgtcgatctggcggcggcaattgcttttaatacccaggaacgcatgctgttgattgtgccgaacaacggcgcgattcataacttcgatgccgatgcgatggtggaaattccgtgcctggttggccacaacggaccggagcctctgacggttggcgatattccgcacttccagaaagggatgatgagccagcaggtcgcggtggaaaaactggtggtggatgcctgggaacagcgttcttaccataagctatggcaggcgattgcgctgtcgaaaaccgtgccgagcgcatcggtcgccaaagcgattcttgatgacctgatcgcggccaataaagagtactggccggaactgcattaa

SEQ ID NO: 255050 - DNA, 1623 bp, Klebsiella pneumoniae
atgctcagtcaaatacaacgctttggcggcgccatgtttaccccggttttactctttcctttcgccgggatcgtggtgggtatcgccattatgttgcgtaacccgatgttcgtcggcgaagcgctcacagcacccgatagtttatttgctcagatcgtttacatcattgaagagggcggctggaccgtctttcgtaatatgccgctgatttttgccgtcggtttgccgatcggcctggcgaaacaagctcagggccgggcttgtctggcggtactggtcagcttcatgacctggaattatttcatcaacgccatggggatgacctggggccacttcttcggcgtcgacttctccgttgaaccaacggcaggcagcggcctgacgatgatggccgggataaaaacgctcgataccagcattattggcgcgatcgttatctccgggctggtgaccgctctgcataaccgctacttcgataaaccgctgccggtgtttctggggattttccagggctcctcgtttgtggtgattgtcgccttcctggcgatgattccctgcgcctggctgacgctgttgggatggccaaaagtgcagatgggtatcgaatccctgcaggcctttttacgctcggccggggcgctgggcgtctgggtctatatcttccttgaacgtatcctgatcccgaccggtttacaccacttcgtctacggaccgtttattttcggcccggcggtagtggaaagcggtattcaggtttactgggcgcagcatttacatgaattcagccagagtaccgaggcgctgaaaaccctgttcccggaaggcggattcgcgttgcacggtaactcgaaggtctttggttccgtggggatcgcgctggcgctctactacaccgcagcaccggaaaaccgcgtgaaagtcgccggtctgctgattcctgccaccttgaccgccgtactggtgggaataaccgagccgttagagttcaccttcctgtttatctcgccgctgctgtttgccgtccatgcggtgctcgcggccactatggcgacggtgatgtatatctgcggcgtggtaggcaactttggcggcggcctgctcgaccagttcctgccgcaaaactggatcccgatgttccacaaccacgcgtcgatgatgtttatccagataggcgttggcgcatgcttcaccgcgatctacttcgttatcttccgcactctgattctgcgcctgaacctgaaaacgccgggccgtgaagagagtgaaattaagctctacagcaaagcggattaccaggccgcgcgcggcaaaaccagcgttgcgggggctacagataccaaactgggccaggccgccggcttcctgcaggcgctgggcggagcggacaacatcgagagcatcaataactgcgccacccggctgcgcattgcgctggtcgatatggcgaagacccaaagcgacgacgtctttaaagcgctgggcgcccacggtgtagtccgccgcggcaacgcaattcaggtcatcgtcggcctgcacgttcctcaggtccgcgaccagctggaaaccctgataaaagattctctacagaccgaacaaaccaccatgacggaggcagtatcatga

SEQ ID NO: 255051 - DNA, 747 bp, Klebsiella pneumoniae
gtgatctacaaatctatcgccgacagattacgtttacggcttaattcttccgatttcgatattggcagcccgctaccgagcgaaaaaaagctggcggaagagttcggcgttgcgcgcatgaccatccgcaaagccatcgatctgctggtcagctggggactggtggtgcgtcggcacggctccggtacctatgtcgcccgcaaagacctgcatcatgaaaccagcaatctaaccggactggccgaagtgctgcgcaagcacggcaaagaggtggtcagccgggtattggtttttgaggtgatgcccgcgcccccggctatcgccagcctgctgcggatacaaattgatgaacggatctacttctcgcgccgggtacgctatgtcgatggcaagccgctaatgctggaggacagctatatgccggtaaagttgtttcgcaatctgtcgctggtgcacctggagggatcgaagttcgattacattgagaaggagtgcggaataaccattagcggtaactatgaaacgctgtcgccagtgctggcggacaggcagctggcgcagtcgatgaacgtgccggaacagacgccgctgctgcgtataacctccctttcctacagcgacagcggcgaatttcttaactactcggtgatgttccgtaacgccagcgaatatcaggtggactaccatctgcggcgcgtccggacggagcacccgttaccctatcccccagaacagcaccgccagtag

SEQ ID NO: 255052 - DNA, 1662 bp, Klebsiella pneumoniae
atgagtgatatagcattgaccgttagcgtattggcgctggtggcggtagtcggattgtggatcggcaatgtaaaagtgcgcggtgtcggcttcggtatcggaggcgtgctgtttggcggtattatcgtcggccactttgtagaccaggcgggcattacgctcagtagccctatgctgcactttattcaggaattcggcctgatcctcttcgtgtacaccatcgggatccaggtggggccgggcttcttcgcttcgctgcgcgtctctggcctgcggcttaacctgttcgccattctgattgtgattctcggcggtctggttaccgcggtcctgcataaactgttcgatatccctctccccgtggtgctcgggatcttttccggtgcggtaaccaacacgcctgcgctgggggccgggcagcagatcctgcgcgaccttggcgtgccgcttgataccgtcgatcagatgggtatgagctacgccatggcctatccattcggtatttgcggcattttgctgaccatgtggctggtccggctgttcttccgcatcaacgttgagaaagaggctcagcaatttgatgaaaacagcggcaatggccatgcgcatctccagaccatcaacgtgcgggttgaaaaccccaacctgaacaatatggcgattcaggatgtgccgatgcttaacagcgacaagctgatctgctcgcgtctcaagcgcgaggagatgctgatggtgcccgcgccgaataccctgattcagcttggggacttgctgcacctggtcgggcgaccggaggatttgcacaacgctcagctggtgattggcaaggaagtttccacttcgctctccactcgcggtaccgatctgaaagtcgagcgcgtggtggtgaccaacgaaaaagtattgggtaaacgcattcgcgatctgcactttaagcagcgctatgatgtggtgatctcgcggctcaatcgcgccggggttgaactggtcgccagcagccatgccagcctgcagttcggcgatattcttaacctcgtcggccgcccggaggcgattgatgcggtagccgccgagctgggcaacgcccagcaaaaactgcagcaggtgcagatgctgccggtatttatcggcatcggcctgggcgtgctgctgggctccattccgctgtttattccgggattcccggcggcgctgaagctgggtctggcaggcgggccgctgattatggccctgatcctcggacgtatcggcagcatcggtaagctgtactggtttatgccgcccagcgccaaccttgcgctgcgcgaactgggcatcgtgctgttcctcgcggtggttggcctgaaatccggcggcgattttgtcgcgacgctgattgaaggcgacgggatgagctggattgtctacggcatctttatcaccgcgataccgctgctgacggtgggtattctggcgcgcatcctggcgaagatgaactacctgaccctgtgcgggatgctggccggctcaatgaccgaccctccggcgctggcgtttgccaataacctgcatgccaccagcggcgcggcggcgctctcctacgcgaccgtttatccgctggttatgttcttacgtattattaccccgcagctactggcggtgctgttctgggggatagggtaa

SEQ ID NO: 255053 - DNA, 429 bp, Klebsiella pneumoniae
atgcgtaactacgatttatccccgcttctgcgtcaatggatcggttttgacaaactggccaacgcgctgcaaaccgccggtgaaagccagagcttcccgccttataacattgaaaaaagtgacgataaccactatcgcattacccttgcgctggccggtttccgtcaggaagatttggatatccagcttgaaggcacgcgcctgacggtaaaaggcgcgccgcagcagccggaaaaagagaccaaatggctacaccaggggctggttaaccaggcatttagcctgagcttcacgctcgccgaaaatatggaagtctccggggcaacctttactaacggcctgctgcatatcgatttgacccgcaacgagccggaacagatcgccccgcagcgcatcgccatcagcgagcgccctgcgttacagagctaa

SEQ ID NO: 255054 - DNA, 414 bp, Klebsiella pneumoniae
atgcgtaatttcgatctctccccgctgtatcgttctgctattggtttcgaccgccttttcaatctgttagaaaataatcaaagccagagcaatggcggctaccctccgtacaacgttgagttagtagacgagaacaactaccgcatcgcgattgccgttgccggttttgccgagagcgaactggaaattaccgcccaggataatctgcttattgtaaaaggcgcccatgccggcgagcagaaagagcgtacctacctgtatcagggcatcgctgagcgcaactttgagcgtaaattccagctcgcagaaaatattcatattcgcggcgctaacctggtaaacggtctgctgtatatcgatcttgagcgcgttattcctgaagcgaataaaccgcgccgtatcgaaatcaactaa

SEQ ID NO: 255055 - DNA, 330 bp, Klebsiella pneumoniae
atgaaaaacggtcttttaaagctggtcctgttcggcgggataataagtttgggcggttgctccagcgtgatgtcacatactggcggcaaggaaggaacctatcctggaacgcgcgccagcgcgcagctgctcggggatagcgacgcaaactggggcacgaaatcgctggtggcgttggatatgccgctcacggcggtcatggacacgctgctgctgccgtgggatatgttccgtaccgacagttcggtgaaatcgcgcgtggaaaagagcgaggaagagacgctggcgaccaattccgtgatcccgccagcgcggatgccaaccccctga

SEQ ID NO: 255056 - DNA, 576 bp, Klebsiella pneumoniae
atgtgtataagagacagggcgataaatggcgacaaagtgccggagctgtttattgtcgaactgccggagagcgaacggggctggaagcaagcgggtgatgcgccgctggcaggaacgcaaaccacgatgccggcgcctcctgccagcgttgttcagcgtcgcttaacgtttacccaccaacgccgttatccagggctggtgactacgccccgccattgggtacgcgccaatccgtcggcaacggacatcgcttttctgatgcgcgatgaggctggcgtggtgcaaatgtggctcatttcggcgcggggggacgggctgcggcagttgacccacaaccgctccgatatccagtcggcgtttaactggcatccctcaggaaaatggctgggctttgtgctggaaaaccgcatcgcgatctgtgacgcgcagaacggggaaatcgactttttgaccgatgagcatgcccatccgccatcggccgatgcgatcgtcttttcgccagacggcaaacagcttgcctggatggaggaggtggacggttaccgccagctctgggtaaccgaaacggcgcgctaa

SEQ ID NO: 255057 - DNA, 219 bp, Klebsiella pneumoniae
atgggctttatcaacattgagcagaaccgcatcatcaagatcttctcggtcgtctccgtcgtcttcctgccgccgaccctggtggcttccagctatggcatgaactttgagtttatgcctgagctgcactggagctttggctatcccggcgcgattgtctttatgatgctcgctggcctggcgccctatctgtactttaagcgcaagaactggctgtaa

SEQ ID NO: 255058 - DNA, 894 bp, Klebsiella pneumoniae
atggacgctaaacaaacgcgggtgggggttctcctggccctggccgcctattttatctggggtatcgcgccagcgtacttcaagcttatctactatgttcccgccgatgaaattctgactcaccgcgtgatctggtccttcttctttatggtcgcgctaatcagcatcagtcgtcagtggccgcaggtcaaaaggctactgaaaacgccgaagaaggtgtttctgctggccctgtctgccgtgctggtgggcggtaactggctgctatttatttgggcggtcaataaccatcatatgctggaagccagcctgggctactttatcaacccgctggtgaatattctgctggggatgatcttcctcggggagcgttttcgtcggatgcagtggctggcggtgctgctggccgcctgcggcgttctggtgcagctctggacttttggctcgttgccgattatcgcgctgggcctggcgttcagcttcgctttttatggtctgctacgtaaaaagatcgccgtggatgcacaaaccggcatgctgtttgaaacgctctggctgctgccggtcgccgcgatttatctgtttggtatagccgatagcccgaccagccatatggggcagaacccgtggtcgctgaacctgctgctgatggcggcgggcgtggtcaccactattccgctgctgtgctttaccggcgcggcgacccgtctgcgcctttctacgctgggcttcttccagtatatcggcccaacgctgatgttcctgctggcggtgaccttctacggcgaggtgccgggcgcggataagatggtgacctttgcttttatctgggtggcgctggcgattttcgtaatggatgcggtttacacaatacgtcgtacgcgtagggcataa

SEQ ID NO: 255059 - DNA, 465 bp, Klebsiella pneumoniae
atgtctgaactgaccgccgccgccgccctgaagctggtgggagaaatcttcgtctaccacatgccctttaatcgcgccttagggctggagctggagcgctatgaaaaagagttcgcccagctgagtttcaacaaccaaccaatgatggtcggcaactgggcgcagagtattttacatggcggagtgattgcctcagcgctggacgtcgcggcggggctggtatgcgtcggcagcaccctgactcgccacgacaccatcaatgaagaagagctgcgccagcgcctgtcgcggatgggcaccatcgatctgcgcgtcgactacctgcgcccgggtcgtggggagcgttttaccgccaccagcagcctgctgcgcgccggtaacaaggtggcggtggcccgcgtcgaactgcataacgaagagcaggtgtatatcgccagcgctacggcgacgtatatggtgggttga

SEQ ID NO: 255060 - DNA, 873 bp, Klebsiella pneumoniae
atgcgtatctctttggcctgcctgctggcgcttgttgcgcttccggccggcgttctggcgcaggacgcgccggtgaataaacaggtccacgacactccggccgttcgcgggagtattatcgccaacctgttacaggaccatgataatcccttcctgctctatccctacgagagcaactatctgctctatacatggaccagcgatctcaataaagaagcgattcgcagctacgactgggctgaaaacgcgcgtaaagacgaagtgaagttccagcttagcctggcgtttccattatggcgcgggattttgggcgagaattcgctgctgggcgcttcttatacgcaaaaatcctggtggcagctctccaacagcaaagagtccgcgccgtttcgcgaaaccaactacgagccgcagctgttcctcgggtttgcgaccgattactcatttgccggctggacgttgcgcgacgttgaaatgggttataaccacgactctaacggccgttccgatcccacttcccgcagctggaatcgcctctatacccgactgatggcgcaaaatggcaactggctggtcgaggtgaagccctggtacgtgattggcagcaccgacgataacccggatatcaccaaatatatgggttattaccggctgaaagtgggctaccagctgggcgacgctattctcagcgctcaggggcaatataactggaataccggctacggcggcgccgagcttggggtaagctatccgatcaccaaacacgtgcgcgtctatactcaggtctatagcggttatggcgagtcgcttatcgattataactttaatcaaacccgcgtcggcgtcgggctgatgctcaacgatctgttttaa

SEQ ID NO: 255061 - DNA, 1827 bp, Klebsiella pneumoniae
gtggcgcaggcggaagtattgaatcaggaatcgctggctaagcaggttttacaagagaccttcggctaccagcagtttcgcccgggccaggaaaccattatcgatacggcactggccgggcgcgattgcctggtggtgatgccgaccggcggcggcaagtcgctgtgttatcaggtgccggcgctggtgctgggcggtctgaccgtcgtggtctcgccgctcatctccttgatgaaggatcaggtcgatcagctgctggctaacggcgtggcggcggcgtgcctgaattcaacccagagccgggagcagcagcaggaggtgatggccggctgccgcagcgggcagattcgcctgctgtatatcgccccggagcgcctgatgctggataacttcctcgagcatcttacgcactggaatctgtcgatggtggcggtggatgaggcgcactgtatttcccagtggggccatgattttcgtccggaatacgctgcgttagggcagctgcgccagcggataccgcaaatcccgtttatggcgctgaccgccaccgccgatgacaccacgcgtcgcgacattgttcgcctgctgggcctgagcgacccgcttatccaggtcagcagcttcgaccgacccaatatccggtacatgctgatggagaagtttaagccgctggatcagctgatgcgctacgtacaggatcagcgcggcaaatcaggcattatctactgcaatagccggtcgaaagtggaggataccgccgcacgcctgcaaagtcgcggcatcagcgcggcggcctatcacgccggcctggaaaatcatatccgcgccgacgtacaggagaaattccagcgcgacgacctgcaaatcgtggtggccacggtggccttcgggatggggatcaacaaaccgaacgtccgttttgtggtgcatttcgatatcccccgcaatattgaatcctattaccaggagaccggccgcgccgggcgcgatgggctgcctgccgaggcgatgctgttttacgatccggcggatatggcgtggctcaggcgctgccttgaggagaaacccgccgggcagctgcaggacattgaacgccataagctcaacgcgatgggggcttttgccgaagcgcaaacctgccgccgcctggtgttgctcaactactttggcgaggggcgccaggagccgtgcggcaactgcgatatctgcctcgacccgccgaaacagtacgacggtttaatggacgcgcggaaggcgctgtcgacgatttaccgcgtcaaccagcgctttggtatgggctacgtggtggaagtgctgcgcggcgccaataaccagcgtattcgcgatatggggcatgataagctgccggtatacggcattgggcgcgagcagagccatgagcattgggttagcgtgatccgccagcttatccatttaggcctggtcacgcagaatattgcccagcactctgcgctacagcttaccgaggccgcgcgtccggttctgcgcggcgacgtgacgctacagcttgccgtgccgcgtattgtggcgctgaagccaaaagcgatgcagaaatcctttggcggcaattacgatcgtaagctttttgccaagctgcgcaaactgcgtaaggcgattgccgacgaagagaatatcccaccctacgtcgtgtttaacgatgcaacactgattgaaatggctgagcaaacgccgctgacggccggtgagatgctcagcgtcaacggcgtcggcacgcgtaagctcgagcgttttggtaaagagtttatggccctgatccgcgcgcacgtggatggcgatgatgagtag

SEQ ID NO: 255062 - DNA, 624 bp, Klebsiella pneumoniae
atgttgacgcttttcttcaccgtcgcgctggtgcatatcattgcgctgatgagtcctggcccggactttttctttgtttcgcaaaccgccgttagccgctctcgtaaggaggcgatgatgggcgtgctggggatcacctgcggggtaatggtatgggcgggcgtagcgctgctcggcctgaacctgattatcgagaagatggcctggctgcataccattattatggtcggcggcggcctgtatctgtgctggatgggcttccagatgctgcgtggcgcgctgaaaaaaggcgaagcggcggcagcggtagagcctcaggttgagctggcgcgcagcggccggagctttctgaaagggctgctgactaatctggcgaacccaaaagcgattatctatttcggctccgtgttctcgctgttcgtcggcgatagcgtcagttctggcgcgcgctgggggatttttctgctgatcgtactggagacgctggcctggttcacggtggttgccagcctgttcgccctgccgggcatgcgccgtggctatcagcggatggcgaagtggatcgacggcatcgccggtacgctattcgccggcttcggtattcatctgattatttcacgctaa

SEQ ID NO: 255063 - DNA, 270 bp, Klebsiella pneumoniae
atggcccaggcgggagaagagcaggatgttcggccgctatcatatgagctggcacagcgggtgccgcaacatggaggtgtactgatgactctggcagaaaagtggcttgaggaaggtatgcaaaagggcattaaggaaggcataaaagagggcaaacgcgctgcgctacttaatgtcgcaaacgccatgctcgagcggggcattgatactactgcggtgatggaaatgaccggtctcacgtccgacgatttgcagcagctccatcattaa

SEQ ID NO: 255064 - DNA, 621 bp, Klebsiella pneumoniae
atgacgttcgagtggtggtttgcctatctgctaacatctattattctcagcctgtcgccgggctccggggcaataaataccatgaccacctctattaaccacggctatcgcggcgcggcggcctctattgccgggctacagaccgggctcggcattcacatcgtgctggtcggcgtcggcctggggacgctcttctctcgatcgctgttagcttttgaaatcctgaaatgggcgggcgccgcttatcttatctggctcggcattcagcagtggcgagccgcaggctctctcgatctgaatacccttgcgaaagcgcagacccgcggcaaactctttaagcgcgcggtattcgtgaatctgaccaatccgaaaagcatcgtatttctcgccgcgctcttcccgcagtttatcgtgccgcaccagcctcaggtaatgcagtatctggtacttggcgttaccactattgtggtcgatattatcgtcatgattggctacgccacgctggcccagcgtatcgctgcatggatcaaggggccaaaacagatgaaggcgctgaataaggtctttggttcgctgtttatgctggtcggcgccctgctggcctccgcccgccacgcgtga

SEQ ID NO: 255065 - DNA, 993 bp, Klebsiella pneumoniae
atgtttttgcagcaaaaggactgggaaacacgagaaaacgcgtttgcggcttttaccatggggccactaaccgatttctggcgtcagcgggaagaggctgaatttacgggcgtggatgacgttccggtgcgctttgtgcgcttctgcgccaaaagtcacgaccgggtcgtggtgatctgtccgggtcgtattgaaagctacgttaagtacgccgaactggcttacgatcttttccgcagcggctttgacgtgatgattatcgatcatcgcggccaggggcgttccgggcgcatgctttccgatacccaccgcgggcacgtcgtaaatttcagcgattacgttgacgatctcgccgctttctggcaacaacatgtcgtgccggggcactggcggaaacggtttattcttgcccattccatgggtggcgctattgcgacgctatttttgcagcgccaccaccagcattgcgacgcgatggcgctctgcgcgccgatgttcggcattgttatgcgcctgcctgactggatggtgcgccacattctcgattgggctgagggccatcagcgcattcgtgaagagtatgccctcggtaccggccgctggcgagcgctgccctttgcggtcaacgtactgacgcacagccgtcaacgctatcgtcgcaacttgcgtttttacgccgatgagccgcagctgcgggtcggcgggccaacgttccattgggtgcgcgaggggatccttgcgggcgaagaggtgctggctggcgcggaaaaagacgttacgccaacattattgctccaggcggaagaagagcgtgtagtcgataaccgtatgcacgatcgctactgtgaacttcgcgccgcaggcggccatccctgcgaagggaataagccgtttgtcatagaaggggcatatcatgagatcctttttgaaaaggacgccatgcgctcggtcgcgctaaacgctatcgtcgatttttttgctcgacatacttaa

SEQ ID NO: 255066 - DNA, 822 bp, Klebsiella pneumoniae
atgtaccaggttgttgcgtctgacttagatggcacgctgctttctcccgatcactgcttaaccccctacgccaaagagacgctgaaactgcttaccgcacgcggtatcaatttcgtgttcgcgaccggccgccactacatcgatgttgggcaaattcgcgataatctcggcattaaatcctatatgatcacctctaacggcgcccgcgtacatgatagcgacgggaagcagatcttcgctcataaccttgatcgcgatatcgccgctgacctgttcgagatgatgcgaaacgatccggcgatcgtaaccaacgtttatcgtgaagatgagtggtatatgaaccgccaccgtccggaagagatgcgcttcttcaaagaggcagtgtttaactacaagctgtacgagccgggcgagctggacccggaagggatcagcaaagtctttttcacctgcgataagcatgagcatctgctgccgctggagcaggcgatcaatgcccgctggggcgatcgggtgaacgtgagcttctctaccgtcacctgcctcgaagtgatggcgggcggcgtgtcgaaaggccatgcgctggaggccgtggcgaaaatgctcggctatagcctgaaagagtgtatcgccttcggcgacggtatgaacgatgcggaaatgctgtcaatggcgggcaagggctgcattatggccgacgcgcaccagcgcctgaaggacctgcatcctgagctggaagtgatcggcagcaacgctgatgatgccgtgccccactatctgcgtaaactctatctcgacgaaaaaagcttgacgactgagtaa

SEQ ID NO: 255067 - DNA, 900 bp, Klebsiella pneumoniae
gtggcgctactgataatcaccacgattctgtgggccttctcttttagcctctatggcgaataccttgcaggtcacgtcgacagttatttcgcggtgctggcgcgcgttggtctggcggcgctggtctttttacctttcctgcgcacccgcgggcaaagcctgtccaccatcggcctgtatatgctggtgggggcgatgcagctcggcattatgtatatgctgagtttccaggcctatctatacctgacggtatctgaactcctgctgtttaccgtcctgacgccgctctatatcacgctgatttatgatgtaatgagccgccgccgcctgcgctggggctacgcctgcagcgcgctgctggcggtgatcggcgcgggtattattcgctacgaccaggtgacaaatcatttctggaccggtttgatcctggtgcagctctccaatatcagcttcgcgattggcatggtgggctacaagcgcctgatggaaacgcgtccgatgccgcagcataacgccttcgcctggttctatgtcggggcgtttctggtggcggcggttgcctggtcgatactgggcaatgcgcagaaaatgccggaaacctctctacagtggggcattctggtgtttcttggcgtggcggcatcggggatcggctactttatgtggaactacggcgccacccaggtggatgccggtacgctcggcatcatgaacaatatgcatgtacctgccgggctgctggtgaatcttgctatctggcaggagcagccccgttggccaagttttattacgggagctctggtgatcctggcctcgctgtgggtccatcgacgctgggtcgctccgcactccgcacaaacggtaaatggtcgcaagcgtggttccgcgctgagcgaataa

SEQ ID NO: 255068 - DNA, 954 bp, Klebsiella pneumoniae
atgatcgaaattaaacacctgaaaacgctccaggcgttgcggaacagcggttcgctggcaggcgcggcagcggccctgcaccagactcaatccgccttgtcccaccagttcagcgatctggaacagcgccttggcttccgtctgtttgtgcgtaaaagtcagccgctgcgctttacgccgcagggtgaaatcctgctccagttggccaaccaggtgctgccgcaaatcagccgcgccctgcaggattgcaatgagccgcagcaaactcgtctgcgtatcgccatcgaatgccatagctgtattcaatggctcacgccggcgctggagagcttccgcgcccgctggccgcatgtggaagtggactttcagtccggcgtgatcttcgacccgcagccgggcctgcagcagggtgagctggatctggtcatgacctccgatatcctgccgcgcagcgatctgcactattcgccaatgtttgatttcgaagtgcgtctggtgatggcgccggatcatccgctggcgacaaaaacgcgcattgcgcctgaggatttagcaaccgagatgctgctgatttacccggtccagcgcgctcgtctggatatctggcgtcacttcctgcagcctgcggggatcagcccgcagctgaagagcgtcgacaatacgctgctgttaattcagatggtggcggcgcggatgggcatcgccgccctgccgcactgggttgtggagagctttgagcgccagggtctggtggtgaccaaaaccctgggcgagggactgtggagccggctatacgccgcggtacgcgacggcgaacagcgccagccggtgaccgaggcgtttattcgctcagcgcggaaccacgcttgcgaccatttaccgtttgtgcggagtgcggagcgacccagcgtcgatggacccacagcgaggccaggatcaccagagctcccgtaa

SEQ ID NO: 255069 - DNA, 2262 bp, Klebsiella pneumoniae
atgacaattattaaccacaccctcggtttccctcgcgttggcctgcgtcgcgagctgaagaaagcgcaagaaagctattgggcgggcaatatcagccgcgaagaactgctggccgttggccgggaactgcgcgctcgccactgggaacagcaaaagcaggcgggcgttgatctgctgccggttggcgatttcgcctggtacgaccatgttctgaccaccagcctgtggcttggcaacgtgccggctcgtcatcagaacaaagacggctccgttgatatcgatactctgtttcgcatgggtcgcggccgcgcgccgaccggcgaaccggccgcggcggcggaaatgaccaaatggtttaacaccaactaccactacatggtgccggaattcgtgaagggccagcagttcaaactgagctggaaccagctgttggatgaggtggacgaagcgctggcgctgggccacaaagtgaagcccgtcctgcttgggccagtcacctatctgtggcttgggaaggtgaaaggcgagtcgttcgatcgtctgaacctgctgcacgatattctgccggtttaccagcaggtgctggcggagctggcaaaacgcggcattgagtgggtgcagattgatgaaccggcgctggtgctcgagctgccgcagacgtggctggacgctttcaaaccggcttatgaggcgcttaatggccaggttaagctactgttgaccacctactttgaaggcattaccgataacctcgacaccattaccgcgctgccggtgcagggtttgcatgtggatctggtccatggccaggatgatgtcgccgaactgcataagcggctgcctgccgactggctgctctccgcgggcctgatcaacggtcgcaacgtctggcgcgccgatctgagcgaaaaatacgcgcaggttaaagggattgtcggcaaacgcgagctgtgggttgcctcttcctgctccctgctgcacagcccgatcgatttgagcgtggaaacgcggcttgatgccgaagtgaagagctggtttgccttcgccctgcaaaaatgccaggaactggcgctgctgcgcgatgcgctgaacagcggcgacaccgctgcgattgctgactggagcgcgccgatccgggcccgtcgctattcaacccgcgtgcataacgcggcggtagagaagcgtctggcagctataaccgctcaggacagtcagcgtcaaagcggctacgaagttcgcgccgaagcgcagcgcgcccgctttaagctgccggcctggccgaccaccaccatcggttctttcccgcagactcccgagatccgcggcctgcgtctggacttcaaaaaaggccatctcgacgctaaccgctaccgcaccggcatcgctgaacacatcaagcaggcgatcgtcgagcaggagcggctggggctggacgtgctggtacacggtgaggccgaacgtaacgacatggtggaatattttggcgaacatctggacggctttatcttcacccagaacggctgggtacagagctacggttcccgctgcgttaagccgccggtggtgattggcgacgtcagccgtccggaggcgatcaccgtcgagtgggcaaaatacgcacagtcgctgaccgacaaaccggtaaaaggcatgctgaccggtcctgtgaccattctttgctggtccttcccgcgcgaggacgtcagccgtgaaacgattgcgaaacagattgccctggcgctgcgcgacgaagtggcggatctggaagccgctggtatcggcatcatccagattgacgaaccggcgctgcgcgaagggctaccgctgaaacgtagcgactgggaggactatctggcgtggggtgtggaagcttttcgcatcaatgccgcggtggcgaaagatgacacccagatccatacccatatgtgctattgcgagttcaacgacatcatggactctatcgctgcgctggatgcggacgtgattaccatcgaaacctcgcgctctgatatggagctgctggagtcgtttgaagagttcgactatccgaatgagatcgggccgggggtgtacgatattcactcgccgaacgtcccaggcgtggagtggatcgaggcgctgctgaagaaagccgcgcagcgcatcccggcagagcgcctgtgggtaaacccggactgcggcctgaaaacccgcggctgggcggaaacccgtgctgcgctggccaacatggttaaagccgcgcagaacctgcgtcaggcatag

SEQ ID NO: 255070 - DNA, 1746 bp, Klebsiella pneumoniae
atgaaagcgataatgttgatgtttgattcgctgaataagcgcctgctgtcggcctacggcagcgacagggcgatcacgccgaatttccagcggctgagggagcgtacggttcgttttgacaactgctatgtcggcagcatgccctgcatgcccgcacgccgggagctgcataccggacgctataactttttacatcgcggctggtcgccaatcgagccgttcgatgattcggttcccgagctgctgaagaagaacggtattcacacccacctggtgacggatcacaaacactactggcgcgacggcggagcgacctatcactctcgctacagcacctacgagtttgtgcgcggccaggagggcgatgcatggaaaggagtggtggataagccgcaatatcgctacgaatccggcgagccggaggagatcaaacagcggcggatcgccagccggattcagcatcagatcaacgtgcagtttatgcagaacgaagaggatcatcatctggcaaagacgatcggcaaagggctggggtttatcgacgccaaccatgccagcgacaactggtttctgcagctggaatgtttcgacccgcatgagccgtttttcgtgccggaaaaatatctcaagatgtacggcattgacgatcctgcgcagttcgacggctggccgccttactacttcgtcaccgaaagcgacgaacgcaagagcatgatccagaaatactatatggcgctgctgacgatggtggatgcgtacgtcggtaaggtgctggactatatggatcgttacgatctctggcgcgacacgatgctgatcgtcaacaccgaccacggttttttgctcggcgagcacgagtggtgggggaaaaatattatgccgctgtataacgaagtggcaaatattccgctgtttatctggcatccgcagtatggcggcgcgggcgagtctcgtcaggcgctggcgcagaccatcgatatcgccgcgacgctgctggattgttttggcctgaataaaccggcggatatgcagggcgtgtcgctgctgcccgcgctgcgcgacgataccccggtccgcgactatgccctgtttggctaccacggctgccatattaatattaccgatggtcgctacgtctatatgcgctcgcccgttgagcaaggcgtcgatggcctgtttgaatacaccctgatgccgactcgtatcaatcgtcgcttcacgccacaggagctgcgcgaaacgacgctgcatccgccgtttcgctttaccaagggctgtccggtaatgaaaattcccgctgagtcggtgatgacccgcggcgccgatcgcttcggtcatcgactatatgatttacacaccgatccgacgcagcaaacccagtgccgggatgaacacgcggcgcggcggctgcgggagcagatgatctgcatgatgaaggagaacgatgcgcccgctgagctgtacgcgcgctatggcctggatgatgcgcaaagcccgctgctggggctggatccgcatctgctaccggagctggccgcctttacgccgcaggtgcgctacggcctgtttgcgctactgcagcatctggagggcagcgggcagcatgttctggctgacaaactgagggccgcctgtcagccggactgggcgcggcaaaatttgtgggctttcgtgcagaacgaggttccggaggagcagcatcagagcgtgtactataagatggcgttagaaatgcgacttgattaa

SEQ ID NO: 255071 - DNA, 723 bp, Klebsiella pneumoniae
atgaaagaagaactggactattctcgcggcgcgaaaccattgtacgcccagcttcacgatatcctgctggaaaagctgagaaccggggcctacaaaaagaatgatgtcctgccgaccgaagccgagtttgaagaactgttcggcgtcagccgcatcaccgcccggcgcgcgctggccgagctggccgcgaaagggctggtaaaacgccaggctggaatcggcactatggttatcagcacctcagagaaacagggcgtcaaaacccgtatccggctggttgatggccagcagcagcactctatttcgcgacataatctgacactcgagcagctgttgccgccggcggaagtggcgcaggccttcgctctcccggcggggcagaaaattcagcgtctcacccgcacgatctatcgacaaaacgaactgcccgcgcaggtaaactatatctggctgacgccgcgtctgggcgagctgactttagacgcgtttaaagaaggtttgtatagtgcgctggaacagcgcggcgagaatattgacagctataaagacaccattaccgccgagctgccgacggcccaggactgcgacattctgcaggttgccgcaggcgagccgctgctggtgaagactcgccagggatttaacgatcgcggcgagctggtggaatataccatcgcccgccatatcgccagctgctatcagtacattgtagagaacagttaa

SEQ ID NO: 255072 - DNA, 1293 bp, Klebsiella pneumoniae
atgattcatggctgccacgtgatggcaaagccgagcggctcggtgtgtaacatcgattgcacctactgcttttatctggaaaaagaagcgctttatccggaacggaataaaaactggcgcatgtccgatgagacgctggaaaactatattcgccagcatattgccgcccagtccggcgatgcggtgacctttgcctggcagggcggcgagccgaccatgatggggctgccgttctttcgccgggtcgttgagctgtgcggccagtacgccaacggtaagaagatagaacatgcgctgcaaactaacggcgtcctggtggacgaagagtgggcgcgtttttttgccgaacagggttttctggtgggtttgtcgatagacggcccggcgcatctgcataaccagtaccgcgttaaccgcgccggaaagggtacccacgaaaaggttgttgcggcgatggcgctgctgaaggcgcataacgtcgagttcaataccctgaccgtcgtcggcaagcataacgtcgatcatgcccgtgaagtgtatgatttcctgctggcggccggttcgcgctatatgcagtttatcccgctggtcgaacggatgagcagcgacgcctcggcgccgctccagctggtgctcccgggtgagagcgcagcgcggctggcgccctggacggtaccctcctggcagttcggcgagtttcttaaccaaattttcgatatctgggtgcgtcgcgacgtcgatcgcgtctacgtgcagatgtttgacgttgccctggctgcatggaccggtcagccgccggtactttgcgtacattcgccaacctgcgggcacgcttttgcgctggaatcgaacggcgatctgtataactgcgatcactttgtttatccggagcataagctgggtaatattcatcagcagagcatccgcgagctgaataatagcgagcaggccatcgcctttggtcaggcaaaacaagagacgctaacggcggattgccgcagctgcgagtttcgctttgcctgccacggcggttgtccgaaacatcgcttcgccgtttccccgagcggtcgccccggccatagctacctgtgcgcaggctaccagcactttttcaaacacgtgacgccgtatatgaacgtctggcggcagcttctggaaaacggttatccgctcccggccatgatgcagtggctggcgcaagaagagcagcagccgaaaacggcttcccgcaacgacccttgcccctgcggcagcgggcgtaaatataaaaaatgctgcggcgcgcagcattga

SEQ ID NO: 255073 - DNA, 690 bp, Klebsiella pneumoniae; identical to SEQ ID NO: 176478

SEQ ID NO: 255074 - DNA, 813 bp, Klebsiella pneumoniae
atgacgacaatcaagccaaccggctttgcacctgcagccacgccgcacgcctcaactgccgttcacacatcagatgagaacatcgtctccggggagacatccatcccttcgcagggagataacatgccggcattccatgcccgcccgcgcagcgtcgacggttcgctgccggtggttatcgtggttcaggaaattttcggcgtgcatgaacatatccgcgatatctgccgccgcctggcgaaggaggggtatctggctatcgcaccggagctgtatttccgccagggcgatcctaacgattacagcgacattccttctctgttccagggactggtcacaaaggtgccggattctcaggtgctggccgacctcgatcacgtggccagctgggcctaccgccacggcggcgacgcccaccgtctgctcattaccggtttctgctggggcgggcgcatcacctggctgtacgctgcgcataacccgcagctaaaagccgccgtcgcctggtacggcaagctggtcggcgaaaaaacgcttaattcgccgaagcatccggtcgatgtcgccgtcgatctgaatgcgccggttttagggctgtatggcgcaaaagatgacagcatcccacaggatacggtagaaaccatgcgccaggcgctacgggcggccaacgccacggcggaaattgtggtttatccgcaggccggccacgcttttaatgccgactatcgcgccagctatcatgaagagtcggcgaaagacggctggcagcgaatgctggcgtggtttgcgcagtacggcggtaagcgggggtaa

SEQ ID NO: 255075 - DNA, 762 bp, Klebsiella pneumoniae
atgtccaagtctgatgtttttcatctcggcctcaccaaaaacgatttacaaggggctacgctggctatcgtccctggcgatccggagcgtgtggaaaagatcgccgcgctgatggataagccggttaagctggcatctcaccgtgaattcaccacctggcgcgccgagctggatggtaaagcagtgattgtctgctctaccggtatcggcggcccatcgacctctatcgccgtggaagaactggcccagctcggcatccgtaccttcctgcgtattggtaccaccggcgccattcagccgcacattaacgtaggtgatgttctggtgaccaccgcttctgtccgcctggacggtgcaagcctgcactttgcgccgatggagttcccggcggtggctaattttgaatgtactaccgcgctggttgaagcggcgaagtctattggcgcaaccacccatatcggcgtgaccgcctcttccgacaccttctatccgggccaggaacgttacgataccttctccggccgcgtcgttagccgctttaaaggctcgatggaagagtggcaggcgatgggcgtaatgaactatgaaatggaatccgccactctgctgaccatgtgcgccagccagggcctgcgcgccggaatggttgccggggttatcgtcaaccgtacccagcaggagattccgaacgcggaaaccatgaagcaaaccgaaagccacgcggtgaaaattgtcgtggaagcggcgcgccgcctgctgtaa

SEQ ID NO: 255076 - DNA, 1449 bp, Klebsiella pneumoniae
gtggatatctcaattattattagtgccgtcgtggcgctggccgtggggctgattgtcggctggctggcgaccaaagcgcacgccgatcaaattcgcgccgatctcatcgaagagcggcgcgagctggatattgagctgagcgccacccgccaacggctggtacaggagtctcactggcgcgaagagtgtgaactgctgaataacgagctgcgcagcctgcgcgaaatcaacgcctcgctggaagctgacctccgcgaagtgaccactcgtcttgaatccactcagctgcatgcggaagacaaaatccgccagatggttaacagcgagcagcggcttagcgagcagtttgagaatctggcgaaccgtatttttgagcacagtaatcgccgggtagatgagcagaaccgccagagcctgcatggtctgctgacgccgctgcgcgaacagctggatggctttcgtcggcaggtgcaggatagctttggccaggaagcgcgggagcgtcacaccctggcccatgaaatccgcaatcttcagcagctaaatgcgcagatggcccaggaagcgctaaatctgacccgcgcgctaaaaggcgataacaaaacccagggcaactggggcgaggtggtgttgacccgcgtactggaagcatcggggctgcgggaaggccatgaatatcaaactcaggtgagcatcgaaacggaaaaccgcgcgcggatgcagcctgatgtgatcgtccgtttgccgcagggaaaggacgtggtcatcgatgccaaaatgaccctggtggcctatgagcgctacttcaacgctgacgatgattacacccgagaagcggcgctgcaggagcatattgcttccgtacgcaaccatatgcgcctgctgggacgcaaagattatcagcagctgcctgggctgcgctcgcttgactatgttctgatgtttatcccggtggaaccggccttcctgctggcaatcgatcgccagccggaactcattagcgaagcgctgaaaaacaacatcatgctggtgagcccgaccacgctgctggtggcgctacggaccatcgccaatctctggcgctatgaacatcagagccgtaacgcgcagaaaattgccgaaagagcggggcgtctgtatgacaagatgcgtctgtttgttgacgatatgtcggccattggccagagcctggataaagcccaggataactaccgtcaggcgatgaaaaagctcgcctccgggcgcggtaacctgctggtgcaggcggagtcatttcgcgggctgggggtggaggttaaacgtgggattaatcctgacttagtcgaacaggcagccgcgcaggatgaagaatacttccttacagatgacggtaacgcgcaggaagataaagacttttctgccgataaggccgttgccgctgcgtatgagaaccgtcctcagccgcgttga

SEQ ID NO: 255077 - DNA, 756 bp, Klebsiella pneumoniae; identical to SEQ ID NO: 176474

SEQ ID NO: 255078 - DNA, 927 bp, Klebsiella pneumoniae
gtgcagcatcgcgttgacgtagcagatacgctgcgccagcttcagccctttaccaaacaacgggttatcaaggcggaatatctgcaccatcccgcgcgcccagcggatgcgctggccgatatgcgccgacaggctctccgtcgccaggccggccgcctgcggaatacgcatataggccgaagtgtgcccgcgacgatgcaggcgcaaagaggtgtgggcgtcttcggtgaccgtttccacggcaatgccgccgatttcatccagcgggccgcggcggatcaccgcacaggagccgcagaagaaggtggcatcccacatgtcgttgccgtcctgcaccaggccataaaacagcgtgccttcgttcggcgttttgcgaaaacgccccaggttacgttcaaacgggtccggagagaagaagtggtgcggcgtctgcatcatcgccagatctttctccttcaggaaccagcccatggtcatctgcaggaacgagcgggtcggcacgtggtcgcagtcgaaaatcgacacaaactcgcctttggcgtacttcagcgcattgttgatattcccggctttcgcgtgttcgtgcgtggtgcgcgcgatgtaatgcacgccaacgtctttggcgaactggcggaactcttcgcgcccgccgtcatcgaggatccagatattaagcttgtccttcggccagtcgatcccctgcgaggcgtaaatggtgtttttcaccacgttgagatcttcgttataagtcggcacgaagatatcgaccgtcggccattgcgccatatcttccggcagcggaaccggctggcggttcagcggccagacgacctggaaatagcccagcaccagtaccacccaggcgtaggtttccgcgaacagcaggattatcccgcacaccaggcttacggggtcgtcccagtttag

SEQ ID NO: 255079 - DNA, 738 bp, Klebsiella pneumoniae
atggctattctgggattacaaggcgtgcgcggcggcaccggcaccacgtcgatcaccgctgcgctggcctgggcgctgcaattactcggggaaaccgtgctggtggtggacgccagcccggataacatgctgcgcttctttttcaacgtcgattaccgccacaacgcgggctgggcgcgcgccctcatcgacgggaacgactggcgagacgccgggctgcgctacacctcgcatatcgatctgctgccctttggccagctaacgccgggcgagcgcgagaatattgaccagcttcagacgacgctggccccgatggccgggatggtgcagaagctccatcagcagggcgatcaccgctggctgctgattgatctgccggacgggttctcaccgctgacccgctccctgattgacgtctgcgatcgcacgctggtcgtggtgcatccggacggcaacagccatattcgcctgcatcagcaggcgctgccggtcaatagcgacattttgattaacgatctgcgcgtcggcagccagctgcaggaggatctctatcagctgtggctggagagccagcgccgcattctgccggtgactattcatcgtgatgaagcgatggcggagtgtctggcggcaaagcaaccgctcggcgaataccgccaggactcgctggcggcggaagagatactgacgctggccaactggtgcctgctgcactacgccggaagggacgcggaatga

SEQ ID NO: 255080 - DNA, 189 bp, Klebsiella pneumoniae; identical to SEQ ID NO: 173442

SEQ ID NO: 255081 - DNA, 1557 bp, Klebsiella pneumoniae
gtggatatcgtatattctttgggtatttcatcattatgggacgaagtgtgccatatgcccgttggcggggtgtggtggctcaatgtcgaccgccatgcggacgcggtaagcttgctcaaccaaacgcttgcggcccaggataaacaggctcgcgttgcggcgatagccatgggtgataacccaaatgaaatcataaaattagaaaaagatcgcgggcctgaaaaaatcgcattatttaccatgccgaaccgctttgaagggctggaagaaatgcaccgcgatttagtctgttccctcgaacctggcaattatttgtttattctgctatgtgctgaaaatgcctggcagaatattaaaagcgaacaattatgcaattgggttgagaaatcatatcgatggactaattatcatcattgttcattattagtgcttaattccgggcacgatatcgataagcaactttcccctttattacgcgagtaccgctcgctttccggactggcaagtatacgttaccagggagataaccacctgttcgatattgcctggtggggcagcgaaaagggcatcagcgcccggcagcagctcattgttttacacgatgaaaacggctggcggctggcgcaggacgaggaaacggtggtacaaccgcgcagcgatgagaaaaccatcctcagcaacctgcgcgtactggagggggcgcccgcgctttccgaatactggacgctgttcgaaaccaatgacgccgttttcaacgccggcagaatggcgcaggcggcgacgctgattttctccattacccagaacgaacagattgaacagctgggacgctatatccacaccctgcgccgccagcgcggtagcgcgctgaaaattgtcgtgcgcgagcaaacgccaagcctgcgcgccaccgatgaacgcctgctgctgagcagcggcgccaatatggttattcccagcggcgcaccgctatcgcgctgcctcacgcttatagaaagcgttcaaaaacagcaatttactcgccatattccggaggattttaatactctgctgaactggagccagccgctgaagctgcgcggctaccagaagtgggatgccttctgcgaagcggtgcacaatattatggccaacaccatgctgcccgccgacggcaaaggggtgatggtggcgctgcgcccggcgcccggtctgcgcgtagagcaggcgctgacgctgtgtaagcctaatcgcatgggcgacatcatgaccatcggtaataatcgcctggtgctgtttctgtcattttgccgggtgaacgacctcgacaccgcgttaaaccatatcttccctttacctaccggcgatattttctctaatcgtatgatctggttcgaagataagcagatagcggctgaaatcctgcagatgcgcgggattatgccggagaactggaatacgccgctgcctgtttcgcttgccaaaaaaacgcctatcaacgcgacccacgacggacgtagctggcggcgaacccccgagccgcatcgtctgtccatcgacggggagccaaccttatga

SEQ ID NO: 255082 - DNA, 198 bp, Klebsiella pneumoniae; identical to SEQ ID NO: 173444

SEQ ID NO: 255083 - DNA, 1677 bp, Klebsiella pneumoniae
atgaccaaacctaaaaccccctcagcgtcgcttccgctctggcgctactggcgcggcctatctggctggaacttctactttctggtgaagtttgccttgctatgggcgggatacctcaattttcatcccatgctaaacctggtatttctggcctttctgctggtgccgattccgcagtataagctgcaccgtattcgccactggatagcgatcccgctgggctttatgctgttctggcacgacacctggctgcccggcccggaaagcatcgtcagccagggttcgcagattgccggcttcagcgccgactatatctgggatttggtaacccgctttattaactggaatatgattggcgcgttcttcgtgctgctggttctatggctgtttatcagccagtggctacgggtaacggtatttgtctcggcaattatgatctggctggtcgccagtccgctgctaccttcgtttaccctttggccgacaggtcagccgacgaccgcggcggcgaataacgcgccgaataccggtggcggggcaatcgtcgcgaccaacgccgccccggcgaataacgacatcccggcgcaaacggagccgccgacatcggccaatctgaccaactggctgaataccttttacgcctctgagcagaaacgcaaaaccacgtttcctgatgcgctcccggccgatgcccagccgtttgatgtcttgatcatcaacatctgctcgctctcatggtcggatatcgaagcagcgggattgatggaccatccgctgtggaagcattttgacctgctgttcaaaaactttaactcggcgacctcttacagcgggccggcagcggcgcgtctgctgcgcgccagctgcggccagctctctcacgccaacctttatcaaccctcaggcagcgaatgctatctgtttgaaaacctggcgaagctgggcttcacccagcagctgatgctcggtcacaacggtgtcttcggcgacttcctgaaagagcttcgttcgttgggcggtatccagagcccgttgatggatcaaagcggcctgccgatcattctgcagggctttgacggctcaccggtctatgatgaccaggcgacgctgaaccgctggctgcagtcgctggataagctgaatacgccgcgcacggcgaccttctacaacacgctgccgctgcacgacggcaaccactatccgggccagagcaaaaccgcggactataaagcccgtgcgcagaagttcttcgacgagctggacagtttctttactgagctggagaaatcgggacgcaaggtgatggtcatcgtcgtgcctgaacacggcgcggcattaaaaggcgataaaatgcaggtctccggtctgcgcgatattcccagcccatccattaccaacgtgccggcggcggtgaaattcttcggcattaaggcaagacatcccgatgcgccgattatcatcagccagccaagcagctacctggcggtttctgagctggtggttcgcgccctcgacggcaagatgtttgatgagaatgacatcaactggcagcagtacattgccaacctgccgcagagcgcggcggtgtcggaaaactccaacgccatcgtcattcagtatcagggtaaaccgtatgttcagctgaacggcggcagttgggtaccttatccgcaataa

SEQ ID NO: 255084 - DNA, 1011 bp, Klebsiella pneumoniae
atgggtgaatttatgtccttgcgtgctttagcgacagtcgtggtcacgacggtgatgatgcttccccacgcgtgggccgatacggcgtgggaaagttataaatcgcgttttatgatgccggacgggcgtattgttgataccggtaacggcaacgtctctcatactgaagggcagggttttgccatgctgttagcggtggccaacgacgatcgtcccgcctttgacaagctctggcagtggacagataaaaccctgcgcaacaaagataacgggctgttttactggcgctataacccggtggcgcccgatccagtggcggataaaaatgacgccaccgatggcgataccctgattgcctgggcgctgctgcgcgcgcagcagcagtggcatgaaaaaacctacggtaccgcttcggatgcgataaccgcttcgctgctgaagcatacggtggtgaccttcgccgaccgtcaggtgatgctcccgggcgcaaagggattttatctcaacgaccatctgaatctgaatccatcctactttatctttcccgcctggcaggccttcgcggcgcgtactcatttgaccgcctggcgaaagctgaagagtgatgctcaggcgctgctggggaaaatggcgtgggggaaatcgcagctacccagcgactgggtcgccttaagagcggacggcaagatggagccggcaaaagagtggccgacgcggatgagcttcgatgctatccgcattcctatgtatgtctactgggacgacccgcaaagcagcctgctgacgccgtggaaaaactggtttcagcgctatccgcgtctgcagacgccggcctggataaacgtcaataccaatgaggccgcgccgtggtttatgaccggcgggctattggcggtacgcgatttaacccttggtgaagagcaggccgagccgcagattaattcccaggacgactattactccgccagcctgaagctgctggtatggctggcaaagaaagaacggtcgtaa

SEQ ID NO: 255085 - DNA, 474 bp, Klebsiella pneumoniae
gtgacggacaataataacgcgcaggttatgacgtggtttcagcagcagcaaacgcctgccggatggttcgatctgctgctcattatggttgatggtatggtcaacaacgcgggtgagctggagagccagccctttctgcggcagatgggcgaggcgctggccgatgaacatccgctgccggagtctgagactctcggccagctggagaccaacatgaatgcgctgctaagccgctttcagtggggcttcgtcagcgtcgaggtgaacgatgaaggcctgcgattacgccatcaggctctgccggtcagccgcgatgaagtgcggcgcatccgctggtgtaatgcattttgtgccatactcgaggggctctattcccgctggttacagggacagggcggcgcggcgcacgtggttttacagcgtgagcggctgttttcagtctctgacgttcagtttctttacttccatccctaa

SEQ ID NO: 255086 - DNA, 2403 bp, Klebsiella pneumoniae
atgaaatccttaacgacgctcgcgctgctggttggagtgctctctgcgccagcgctgcacagcgaggagatgcccgcagattcattgccggagcttaactttccgcttccagatgcggctgcgaacagcgcatcggcgcccgctagcgaagcgaattcaccggcgacgacggaagccgcgtcggcaaacgccgctcagccggattcgctacccgcgctgccgccgataacgcctgttgtccctgatacggtaccgcttacgccgatcgttggcggcaatcttaacctgatgcagatgggcatgccggacggcattatcctcagcggtggacaaaatcagggcggcgccagctttacgctcccctccgatcaggtggtcacccacgcccagctgatgctggaggtcaaggtttcgccggagatggcgtcccgcaacgccacgctgcaattaatgctcaacggccagccgctcggcaccttgccgctgggggctgatggcgaggatatttcgcactaccagctggatatcccggcggcgctgatggtgtccagcaacaacctgagctttaagattaacgacggcgatgcgctgcagtgccggctcgatattcacgacacctcgcgggtaaccattctgcccggctcccactttagctgggagagccagcagctcaatatcagcaacgatttgggccacttcccgcgcccgtttttcgaccgtatgcagatgacgccagcggatatcgctatcgcgtatccggagaaaccaacggcggatattttcagcgcagcggcgctggtgtcgtcatggctgggtattcaggccgactatcgcggtatcgcttttgacgcgctgcgcgatcgcctgcccgagaaacacgggattatcatcggtcatcccggggatcgggtgggcggcctgacgctgccgcaaaccgacaaaccgctgctgcggatcgtggaaaatcccggtaatccggcttataagctgctgctgatcgtcggccagaatgacgccgcactgcgcatggccgcgtggcgcctgacccgcggcgatttcgccccgcagacggccagcatgaccgtggatccgcaggcgattcccgtcggcaagccctacgatgcgccgcgctggatcgccaccgatcgtccggtaaaaatcagcgagctgatccgtcaggatcaaagtatgaccgttagcggcgtgtggcatgaaccgctgcgcgtggcctttcgcgccgcgccggatctttatctgtgggatggagaaactatccccctgcaaattggctatcgtttcccgtcggagaactggattaacgaggataagtcgctgctgagcgtgacgctgaacaacaccttccttaataatctaccgatgaacaaacaggggccgctggagaagctctggcggcatctgggcggcgacgcgcgtcaggaacggtttactatcccgctggcgccgtatctgatttacggtgataaccagctgtcgctctatttcaacctggtgccgaaggataacgcgccctgttcgctcctgctgaacagcactatcaagagtcgaatcaccgacgattcgtggatcgatttgagcggtacgcggcacttctcgctgctgccgaatctttcctattttgtcggcgcttcgttcccgttctcccggttagcggattattcgcaaactacgctgctgctgccggaacagccttcggaaacccaggtggcgatgatgctgaatctggcagcccgttcgggtaattcaaccggcaaagcgttagccaacaaccgcgtaatattgggcgttcctgacggcggcgccaatgcgccgctgctgcgcgatcgcgacgtgctggcggttagttccctcgatcaacaagcgtttaaccagcgcctgctggcccattccccctacgccccggtcgataacctgctgagcgtacgtgaaccgacgctgtgggaaaagattcagcgcaggctgagcggcgactgggcttccgacggcgtcgatgccgatcgctatttctcctccagcagcgcctggcgcggttttatcagctatcgctcaccgtggaacccgcagcgggtggtggtggcgatggccagcagcgacgatcagctggcgaaactggaagacgatcttaattccccccgtatcaatgccggtattcgcggcgatacggcagtgatcaccagcgataacggcgtgcgtagcttccaggtcagcacgccgttccccagcggccagatgccgtggtacatgatggcggtatggtacgccaatcagcactccgggctgctggcggtgctggggttgattacgacatcgattctgggtctggcgctgaccgccatgtttaaacgtcatgctcgtaagcgcctggattcgggagagagccaatga

SEQ ID NO: 255087 - DNA, 2112 bp, Klebsiella pneumoniae
atgaaaaaaacgcttttctgggcgctggtactggtgcttgcgcccattgccgtgctggtggtgattacgccgatggacagccaaaagcagtctatttttggcctgctgagcatcggtattctctttgttatgggtttcagtaaaaaccgcagcgtttccgtcattatggtggtgacatcgctgttgatgtcgacccgttatatgtattttcgtctgacgcagaccctgcatttcaactccaccatcgaagcgattctgggaatggggttgtttctggcggaagtctatatctgggtgatgttgctgctgaactacctgcaaacggtctggccgctgaagcgtgaaatcgtcccgttgcccgatgatatgagccagtggccgacggtagatatctatattcccagctataacgaaccgcttgaagtggtgcgtgataccgtgctcgctgcgcaatgtattgattatccaaaagataaattaaaaatctatttgctggatgacggcaagcgtaacgaattcgcggtattcgccgccgacgttggggtagggtatatcacccgcaacgataacaaacacgccaaggcaggcaacctcaaccacgcgatgacgctaaccaacggcgagctgatctgcgtttttgactgcgaccacgtggcaacccgcgtcttcttgcaggcaacggtggggggattcctcaaagacccgatgctggcgctggtgcagacgccgcactatttttactcgccggatcccttcgagcgcaatctctccgtcggccgcaatattcccaacgaagggatgctgttttatggtccgattcagcagggaaacgacaactggaatgcgaccttcttctgcggttcctgcgcggttattcgccgcgctgcgctggagcagatcggtggctttgcggttgagaccgtcaccgaagacgcccataccgcgctgaagttccagcgtctgggctggaaatcggcgttcctggatattcctctggcggcaggtttggctaccgaacgcctggtggtgcacgtcattcagcgtacccgctgggcccgcgggatgacgcaaattttccgtctggataacccgctacttggccgtgggctaacgttccagcagcgcctgtgctacctcagcgccatgctctattatcagttcgctctgccgcgcgtggtctttgtcaccgcaccgctggcctatctgctgttcaacctgaatatcatctactcctcggcgagcctgattgtttcctacgcgctgccgcatctgttcctcgcgatctatgtcggatcgcgcatgaacggccgctatcgctacagtttctggggcgaaatctacgatatcgtgctggccttccacctggtgctgccaacgctggtcaccatgattttccccaaacgcggaaaattcaacgtgaccgataaaggcggcctgctggacgtgggctacttcgactttaccgtcgtcaggccacacctggtcgtcgcctgcctgctgggcctgggggtggtggttggtatcgtccgcgccatcggtcacgactattttggctcagacccgaacgttatcgcgctgaacgtcggttgggggatttacagcctgattttcctgctggccgccattgccgtggcgcgcgaaacccgtcaggtacgaaaaacgattcgtattgatgtcgatatcccggtgcttatccactacaccagcggcattgtctcccgcagccacaccgcagatctgtccatgggcggttgccgcgtaagcgcgccggataagcgtcacctggaggatgaaatcgaagagattgagctgattcttcagtccggagcgatttcgatcccggtacgccaggtcaccgctgacgatcggtttatccgcctgcaatttgatgaaaacattcagctttcccgtcgccgtgaactggtgcgggtggtgctggcccgcgccgatgcgtggattaacccgccgcgcccgcaggacaatccgttccgctctttcgccacgattttacgctgcgtatttgaactcttctggctgacgtggaagacgcgccgcagccagcgtcgtcagccctctgcggcaaaccccgcgcaggaggatggcagtctatga

SEQ ID NO: 255088 - DNA, 804 bp, Klebsiella pneumoniae; identical to SEQ ID NO: 173453

SEQ ID NO: 255089 - DNA, 588 bp, Klebsiella pneumoniae
atgaaccattatgatgatttgcagcgctttaaggaaaagacgcggacacacagtctcccattcaaggacctctcatcagaaaccggcgccggtgaaaaaggcgattgggttattctcaatcagcttattcctgccgagcaagcatcctctttggctatgggaggatcggtatctttacccctgccgcagctggtgccggccaatatgtttcatcaggtggagcggacagccattcagaccgcgccggcggcatcgtcggttgcgccgtcggtaatgattcccgaccctgtcgccccatccgcgccgcagcctgtgcccgcggtgagtcatattgctccggttgccgtagaaccgatagtgcaggcaggcgaggccgcgaccgggcaagcgttccggacagccgtatcgcaacctgttgcgccgctatctggccacgtgccagctccggctgtcagacctcgcccggcgatagcgccgacggtggacggttttgcccatctctttgcggcaaaaacggtggcgccagcggcgaaagataaagatcagcccctgaaatcactcttagaaaggattgcgacatgccgttga

SEQ ID NO: 255090 - DNA, 1014 bp, Klebsiella pneumoniae
atgagtacgcatgaggccatcacgcaacagcctctgttgctggccaccgatctgaaaaaatactacccggtgaagaaggggctgtttgcgccggaacgcctggtcaaagcgctggacggcgtttcgtttacccttgaacgcggtaaaacgctggcggtggtaggggagtctggctgcggcaagtcgacgctcggtcgtctgctgacgatgattgaaattcccaccggcggggagctttactaccagggacaggacctgttgaagcacgatccgcaggcgcagaagctgcgccggcagaaaatccagattgtgttccagaatccctacggttcgcttaacccgcgtaaaaaggtggggcagattctcgaggagccgctgcagatcaacaccagcttgagcaaagagcagcgccgggagaaggcgctggcgatgatggcgaaagtgggtctgaaaaccgaacattacgaccgttatccgcatatgttctccggcggccagcgtcagcgtatcgcgattgcccgcggtctgatgctggacccggacgtggtgattgccgatgaaccggtctccgcgctggacgtttcggtgcgcgcgcaggtgctgaacctgatgatggatttacagcaggatctggggctttcttacgtcttcatctctcacgatttgtcggtcgtggagcatatcgctgatgaagtcatggtgatgtatctgggccgctgcgtggagaaagggacgaaggatcaaatcttcaataacccgcagcatccgtacactcaggcgctgctgtcagccacgccgcgtctgaatccggatgaccgccgcgagcgtatcaagctcaccggcgagctgccgagcccgctgaatccgccgcctggatgcgcgtttaacgcccgctgtcgccgccgttttggcccatgtacccagcttcaaccgcagttgaaagactacagcggccagctggtggcctgctttgcggtcgaccaggatcaaaacggcgagaagccgctgagctga

SEQ ID NO: 255091 - DNA, 984 bp, Klebsiella pneumoniae
atggcgttattaaatgtagataaactctcggtgcacttcggcgacgaagggacgccgttccgcgccgtagatcgcgtgagctacagcgtaaatcagggcgaagtggttggtatcgtcggcgagtccggttcgggtaaatcggttagctctttggcgattatggggctgattgactatcccggccgggtgatggctgaaaagctggagtttaacggtcgcgacctgaagcgcatttccgaaaaagagcgccgccagctggtgggcgcggaagtggcgatgatcttccaggacccgatgaccagcctgaatccgtgctataccgtcggctaccagatcatggaagccattaaggtgcaccagggcggcaacaagaaaacccgcgtgcagcgggcgattgacctgctgacgctggtcggtatccccgacccggcttcgcgtcttgatgtctatccgcatcagctttccggcggtatgagccagcgcgtgatgattgcgatggccatcgcctgtcggccaaagctgctgattgccgatgaacccacgacggcgctggatgtgactatccaggcgcagatcattgagttgctgcttgagctgcagcaaaaagagaatatggcgctgatcctgatcacccacgatctggcgctggtggccgaagcggcgcacaaaatcatcgtcatgtacgcggggcaggtggtggaaaccggcgacgcgaaggatatcttccgcgcgcctcgtcacccctatacgcaggcgctgctgcgcgcgctgccggagttcgctcaggataaagcgcgccttgcctcgctgccgggcgtggtgccgggtaaatacgaccgtccgaacggctgtttgctcaatccgcgctgcccctatgcgacagacaaatgccgcagtgaagaacctgagctgaacctgcttaacggcggtcgccagtcgaaatgtcattacccacttgatgatgccgggaggcctgggctatga

SEQ ID NO: 255092 - DNA, 903 bp, Klebsiella pneumoniae
atgtcacaagttactgaaaataaagttgtcgccgcgccggtgccaatgaccccgttgcaggagttctggcactattttaaacgtaataaaggcgccgtcgtggggctggcctatgtcgcggtgatgatcatcatcgccgtcttcgccaacttcctcgcgccttacaatccggcggatcagttccgcgatgcgctgctggctccgccgttctggcaggagggcggcagcatgtcccacctgctcggcaccgatgacgttggccgcgatatcctgtcgcgcctgatgtacggcgcgcgcctgtcgctgctggtaggctgtctggtcgttgtgctatcgctgatcctcggtgtggtgctcggtcttgtcgcgggctattttggcggcgtgattgactcggtcattatgcgcgttgtcgacattatgctggccctgccaagtctgctgctggcgctggtgctggtggccatcttcggcccgtcgatcgtcaatgcctctatagcgctgacctttgtcgccctgccgcactacgtgcgtctgacccgcgcggcggtgctggtagaggtgaaccgcgattacgtcaccgcttcccgcgtggcgggggccggcgcgatgcgtcagatgttcatcaacattcttcctaactgccttgcgccgctgattgttcaggcgtctctgggcttctctaacgccattctcgatatggccgctcttggcttccttggcatgggtgcgcagccgccgacaccggagtggggcacgatgctctccgacgtgttgcagttcgcgcagagcgcctggtgggtcgtcacctttcccggtgtcgctatcctgctgacggtgctggcatttaacctgatgggtgacggtctgcgtgacgcgctcgatcccaaactgaagcagtaa

SEQ ID NO: 255093 - DNA, 963 bp, Klebsiella pneumoniae
atggcactatcatcgcgtatcacactcattgccgcgctggcgctggcggcattccaggcccaggcggtgaacgtcaccgtggcgtatcagacctccgccgaaccggcgaaagtcgcccaggcggacaacaccttcgccaaagcgagcggggcgaccgtcgactggcgcaagtttgacagcggcgcgagcatcgtgcgggcgctggcttccggcgacgtgcagatcggtaaccttggctccagcccgctggcggtcgccgccacacagcaggtgccgattgaagtctttctgctggcctcaaagctcggtaactccgaagcgctggtggtcaaaaagagcatcaccaaaccgcaagacctgatcggcaaacgcatcgccgtgccatttatctctacgactcactacagcctgctgtcggcgctgaagcactgggggattaaaccggggcaggtgcagatcctcaacctgcagccgccggcgattattgccgcctggcagcgcggcgacattgacggcgcctacgtctgggcgccggcggtcaacgcgctggaaaaagacggcacggttctcaccgactcgtcgcaggtgggggagtggggcgcgccgacgctggacgtgtgggtggtacgcaaagactttgccgaaaagcatcctgatattgtcaaagccttcgccaaaagcgccattgacgcgcagcagccctatatcgccaacccggatgagtggctgaagcagccggaaaacatcagcaagctggcgcgcctgagcggcgtaccggaagccgacgtgccggggctggtgaaaggcaatacctatctgaccgccgcccagcaggcgcaggagctgaacgggccggtgaataaagccatcatcgacaccgctaaattcctgaaagagcagggtaaagtccccgcagcgggaagcgactacagccagtacgttaccgaccgttttgtgaagtaa

SEQ ID NO: 255094 - DNA, 630 bp, Klebsiella pneumoniae
atgattcgagtggtgctggtcgatgaccatgtggtggtgcgttcaggctttgcgcagttactcagcctcgaagaggatctcgaggtggttggccagttcagcagcgcggcggaagcgtggccggcattattgcgcgacgacgtcaacgtggcggtcatggatatcgccatgccggatgagaacggcctgagcctgctaaagcgcctgcgcgcgcaaaagccgcagtttcgcgccattattctcagcatttacgacaccccggccttcgtgcagagcgcccttgatgccggcgccagcggctatctgaccaaacgctgcggcccggaagagctcgtgcaggcggtgcgttccgtcggtatgggtggacactacctgtgcgccgatgccctgcgggcgctacgcggcggagagcaaccggcgcaggtgctcgaggtgctcaccccgcgtgaacgcgaagtgtttgatttgctcgttaaaggcgacagcgtcaaggaaatcgccttcaagctcgatctcagccacaagacggtgcacgttcatcgcgccaacgtgctgggcaaactgcagtgccacagcaccattgatctggtccatttcgccctcgaccaccagctgctggcgggccattaa

SEQ ID NO: 255095 - DNA, 1542 bp, Klebsiella pneumoniae
atgtcgcgcagccttcgccacagcgtcatctcgctgttcatcgtgctggcctggggaagcggctggctgatgctgtggacgctcgggttttacctgacccataacggccagcaggcggcgctgttcctgccgcacggcgtctatctggcgctgctgatcctgctttcgcgccgctactggcccgcgctggtgctgcctcccgtgttgatgctgttctggctgcacggcgaacagctgctgaacggctatattctgctggccgcgccgttgatcggcctgcttcccgccggcatcgcccaacagttctggcaccgcttccccctttactggcagcggctgacgctgctgctggccacggtcaccgccagcgcattactcaacaccgccctgctctcgccgtttgtgaaaagtccggcgatgatgctcggtctggcctcgtttaccggcggggtgctgctgacgccgtttgtctatctgatttttgaattcctgcgccagcagcaccgctaccacctgctggggctggataccaataatccgccgctgcgcacctcattgatcatctggtgcagcctgttctttattatcggcatcggcacccaaatggttctgtcgccggaaatcgagcgtctgctgttaattgtggtgtttctgcccaacgtggtgatggcgtggaagtttggctggcagggcggcgttctctccggtctgctgggcagcatgatgatcaccatcgcccgccaggttggcgtcggattcagcaacctggtggagctggagatttttctggcgacccaggcgctcctcggtatcgggctggggattgccatcagtcgccagcagcacctggcgcaaaacctgcaccactatcgccagcggctggaggcggagctggcggcgcggcgggcgctaaccgaaaagctgatccataccgaagaggatacgcgcaaaagcctggcgcgcgagctgcacgacgaaatcggccagaatattaccgccattcagatccagtcgcagctggtgaagcgagcgcgcgatccggcgcaaacccaggccgccgccagccagattaacgatctcgcccggcgtattcaccactctacccgccagctgctgcgccagctacgccccccggcccttgatgaactgtcgtttaaagaggcgctgcaccatttgctcaatgagtttgcctttgccgagcgcggtatccgctgccgctttgactaccggctcaccgccacgccggagagcgaaacggtacgttttaccctctatcggctgctacaggagctgcttaacaacgtctgtaaacacgccgacgccagcgaggtcgccattgctctgtatcagcaggggacgctgctgcgcctggaggtcaaggacaacggtatcggtatcagccccgacaaaatggccggcttcggcattcagggtatgcgtgaacgggtcagcgccctgggcggagagctgaccctggagtcgcagcatgggacgcgggtaattgttaacttgcccacaaatttgcaacaaacagccggctaa

SEQ ID NO: 255096 - DNA, 1296 bp, Klebsiella pneumoniae
atgcgctcagcaaccgacattaatcaacattaccggacgctgcgtccgcagctgctgatgtacatggtcatcggatatgcggcgttttacctgacgcgcaaaagcgtcaactacgtattgccggcgctgcaaacggatctgggtctggataaaggcgatatcggcctgctgggatcgctgttttacctgacctacggtctgtcgaagtttaccgccggactgtggcacgacagccacgggcagcgctggtttatgggcgtgggcctgttcgccaccggtctgctgaacgtggtgttcgccttcggcgaatcgctgacgctgctgctggcggtctggacgctgaacggattttttcagggctggggctggcctccctgcgcccgcctgctgacccactggtactcgcgcaacgaacgcggcttctggtggggctgctggaatatgtcgatcaatatcggcggagcgattatcccgctgattagcgcctttgccgcccactggtggggctggcaggcggcgatgctggcaccggggacgatcagcatggcatcaggcatctggttaacgctgcacctgaaaggaacgccccgcgaagagggattgccgtcagtaggccgctggcgtaacgacccgctggagctgcgccaggagcagcaaagcccgccgatggggctatggcagatgctgcgcaccacgatgctgaagaatccgatgatctggctgctgggcgtctcttacgtgctggtctatctgatccgcatcgcgctcaacgactggggcaacatctggctgacggagagccacggcgtcaatctgctcagcgccaacgccacggtgatgctgtttgaagcgggcggtctgctcggggcgttgttcgccggatggggctcggatctgctgttcagcggccagcgggcgccgatgattttactgttcacgctggggttgatggtctccgtcgccgcgctttggctggcgccggtccatcactacgcgctgctggcggtgtgtttctttacggtgggcttcttcgtttttggcccacaaatgctgattggcctcgcggcggtggagtgcggacacaaagcggcggcgggttcaattaccggatttctcggcctgttcgcctatctgggggcagcgctggcgggctggcctctgtcgctggtcattgaacgctacggctggtcgggcatgttcagtttactctcggtcgccgcagttctgatgggtttattgctgatgccgctgctgatggcgagcattactacctctgctgctcaaaggataaaataa

SEQ ID NO: 255097 - DNA, 1032 bp, Klebsiella pneumoniae
atgaaaaaaacgctggtcactaccctgattgcttccggcattgcgctggcgacgttaagcggcgcggcgcacgccaaaggtcgtctggtggtctattgcagcgccaccaacgaaatgtgtgaggcggaaaccaaagccttcggcgaagaatatgacgtaaaaacctcatttattcgcaacggttccggcagcacgctggcgaaggtcgatgccgagaagaaaaacccgcaggcggatgtctggtacggcggcaccctcgacccgcagtcccaggccggtgaaatgggcctgctgcagccctataaatcgcccaatcttgcgcaggtgatggagcagttccgcgatccggcgaagctgaaaggcaactactcctcggcggtgtacgttggcatactcggcttcggcgtgaacacccagcgcctgaaagagaaaaatctgccggtgccgaaatgctggaaagatctgactaaaccggaatataaaggcgaaattcagattgccgacccgcagagttccggaaccgcctacaccgcgctggcgaccttcgcccagctgtggggggacgatcaagctttcgattatctcaaacagctcaacgctaacgtctcccagtacacgaagtccggtatcgccccggcgcgcaacgccgcccgcggtgaaacggccatcggcatcggcttcctgcacgactattcgctggaaaaagaacagggcgcgccgctggagctgatctcgccgtgcgaaggcaccggctatgaaattggcggcgtcagtatcctgaagggcgcgcgcaacctcgacaacgccaaactgtttgtcgactgggtgctgtcgaaagatgcccaggagctggcgtggaagaaaggcaagtcttatcagatcctgaccaacactaccgccgacacctcgccgaactcgctgaagctcgacgacctgaagctcatcaactatgacatggataaatacggctcaacggacgtgcgtaaagcgctaatcaataaatgggttagcgaagtgaagatgggtaaataa

SEQ ID NO: 255098 - DNA, 2079 bp, Klebsiella pneumoniae
atgtcacacacacttgcactccatcccgtgaaaaagcgggatgcgatattcctttgggttttattcggctggctggcgtttgccctgctgccgagctggagcctggattacggtctgctggagtccacgagcgatgaaattctcgcggcctacggctggtcacagttcaatatcagctggctgtggtatctcttaccgagcctgctgctgattcgtccctttcaggaagccaggcgggagcagcgcagccgccactatctcgatgctggctgggcgttctgctgtatggcgtttatcgtcgtcagcgccaccgtggaaggccgcgggttaggctacgccaccatcgtgctgtttgtcgcgctgggggccatcatgaccctggcgctcacccgcctggaatggctggggggcgaccgctttgtcattggttcgctggtcaccatcgtggcgttaatcggcgtctttatcgtctggccaagcatcgctatttttatcccgatgttcaccaacgacgccggcgagtttgccccgctggcgtttatggccgtgctgtcgcaggcgcatattgtccaggtgatcctcaactccatcgccctgtcgattgcggtaggcatcggctgcaccttctttggtctggtgctggcgatttacaccacccgtatcgcccagcgcagcgcgattattggccgaattttctcgattctgccgatcgtcaccccgccgtttgtcgtcggtctcggcgttaccctgatgatgggccgttccggctacgtcaccgaactgatggtcgactggtttggcttaaccaacaccaactggctgtacggatttaccggcatctggctggcgcaggtgctggcgttcaccccgatggcgtttatgatcctcgacggcgcgattaagaccattcatccgtcgctggaggaggcgtcgtacaccctgcgcgccagccgctggcagaccttcaacggcgtcttcgtcccgctgctgaaaccggcgctggcgaacgcgtttttaatcgtcatcgttcagtcgctggccgacttcagcaacccgctggtgctcggcggcaacttcgacgtactggcgacgcaaatctacttctatatcaccggttcgcagctcgattatcaggccgccagtactctcggcgcattcctgctgctgttctcgctgctggtgttctgcattcagtatatgtggatcggcaagcgctcttacgtcacggtttccggcaagtcctaccgtggcgacgtgcagccgctgccggtgaccctggtgtggagcgtgatcgccattctggcggtgtggatcgccttcaacgccctgctctacggcagtattttctacggcagctttaccgttaactggggcgtggactacaccctgacgctggataactttatcaagctgttcggccaggggatgagcgacggcgcctggccttcgctgctcgatactctgctttacgccgggatcgccgcgcccatcaccgccgccttcggcctgctgatcgcctggatcgtagtgcgacagcagtttaaaggcaaaaagaccatagagttcaccaccatgctgtgcttcgcggtgccgggcaccgtggcgggcgtctcctatattctcgcctttaacagcgcgccggtgtacctcaccggaacggcggcgattgtgattatctcgatggtcatgcgtaacgtgccggtgggcattcgggcaggtattgccggtttaggccagatcgacaaatcgctggacgaagcgtcgctcagcctgcgcgcgggttccctgcgcaccattacgcatatcctgctgccgctgctgcgcccggcgatcctctcggcgctgatctacagctttgtgcgcgccattaccaccgtcagcgccattgtgttcctcgtgacgccggacacccgcgtcgctaccgcctatatcctcaaccgggtggaagacggcgaatacggcgtggcgatcgcctacggatcgattctgatcgtcgtgatgctggcgattatttttatctttgactggctgatcggggaagcgcgtatctcccggtcaaaagccaaaaaccaggcgtaa

SEQ ID NO: 255099 - DNA, 1047 bp, Klebsiella pneumoniae
atgagtcagaaaaattttgttgagctgcgcaacgtcaccaagcgattcggcagcaacacggttatcgacaatatcaatctcaccatccctcagggacaaatggtgaccctgctcggcccttccggctgcggcaagaccaccattctgcgcctggtcgccgggctggaaaaaccgagcgaaggacagattttcatcgatggcgaagacgttactcatcgctccattcagcagcgcgacatctgtatggtatttcagtcttatgccctgtttccgcatatgtcgctgggggacaacgtcggctacggtctgaagatgctcggcgtgtcgcgcagcgacgtgaaagcgcgggtgaaggaggcgctggcgatggtggatctggaaggattcgaagatcgctatgtcgatcagatctccggcggtcagcagcagcgcgtggcgctggcgcgcgccctgatcctcaagccaaaggtgctgctgtttgatgagcccttaagcaacctcgatgccaacctgcggcgcagcatgcgcgataagatccgcgagttacagaagcagtttgatatcacctcgctgtacgtgacccacgatcagagcgaagcctttgcggtttccgataccgtgctggtgatgaataagggacatatcatgcagatcggctcgccgcaggatctttaccgccagcccgcgtcgcgctttatggcgagctttatgggagatgccaacctgttcccggccgcctttagcgaggattttgtcgatatttatggctatcggctgccgaggccgccgaattttgccgcccagggcgagggcagcgtcggcgtgcgcccggaggcaatcaccctgagcgatcgcggcgaggagagccagcgctgcacgattcgccacgtggcctatatgggaccgcagtacgaggtgacggtagagtggcacgggcaggaaattttgctgcaggtgaacgcgacgcggctgcagccggatgtcggcgagcactattatctcgaaatccacccgtacgggatgtttgtgttagcggatgccgggtga

SEQ ID NO: 255100 - DNA, 933 bp, Klebsiella pneumoniae
atgtcgcagaataatccgttaaccgccctccttgacgcaaagccctttatcctgctggacggcgcgatggcgacggagctggaagcgcgcggctgcaatcttgccgacagcctgtggtcggcgaaagtgttggtcgacaacccggagcttatccgcgaagttcacctcgactatttccgcgccggcgcgcaggtggcgatcaccgccagttatcaggccactccggcaggttttgctgccctcggccttgatgaagcgcagtcgaaagcgctgatcggcaaaagcgttgagctggcccgcaaggcgcgggaagcgtatctggcggaaaacccgcaggcgggcgcgttgctggttgccggttcggtcggaccgtacggcgccttcctggcggacggctcggagtatcgcggcgattatgtccgcagcgatgaggaatttcaggcatttcatcgtccgcgcgtggaagcgctgctcgacgccggggccgatctgctggcctgtgaaacgatgccgaatttcgccgagatgaaggcgctggcggagctgctgactgcctatccgcgcgcgcgggcatggttctcgtttaccctgcgcgatgcgcagcatctcagcgacggcacgccgctgcgggaagtggttgacgtgctggcaaactatccgcaggtggtggcgctgggcattaactgtatcgcgctggaaaacaccaccgccgcgctggcgcatctgcatagcctgacggcgctgccgctggtggtttatcctaactccggggagcactatgacgcggtatccaagacctggcatcgccacggcgaagcctatgcaacgctggcggaatatttaccccagtggctggcggcgggggcgaagctgattggcggctgctgccgcacgacgccgaaggatattgccgaactgaacgcgcggcgttga

SEQ ID NO: 255101 - DNA, 1434 bp, Klebsiella pneumoniae
atgtctatacgcccatggggtcaaatgcaaacaacacaacaacaacaaggtgggcagcttaagcgcaccatgaagactcgccacctgatcatgctgtcgctgggtggcgttattggcacagggctattttttaataccggctatatcatctccaccaccggagcggcgggcacgctgctggcctatctgattggcgcgctggtggtctggctggtgatgcagtgtctgggcgaactttcggtggcgatgccggaaaccggggcgtttcacgtctacgccgcgcgctatctcggcccggcgaccgggtataccgtcgcctggctctactggctgacctggaccgtcgcgcttggctcaagcttcaccgccgccggattctgcatgcagtactggttcccgcaggtgccggtatgggtctggtgcgtggtgttctgcgcggtgattttcgcgctcaacgttatctccacccgcttctttgccgaaggtgagttctggttctcgctggtgaaggtggtcaccattatcgcctttattattctcggcggggcggcgatctttggcatcattccgatgcaggatggctctccggcgccggggctgcgcaatatcaccgccgaaggctggttcccgcacggcggtctgccgatcctgatgaccatggtggcggttaacttcgctttctccggcaccgagcttatcggcatcgcggcgggggaaacggagaatccgcataaagtcattccggtggccattcgtaccaccatcgcccggctgattatctttttcatcggcaccgtcttcgtgctggcggcgctgatcccgatgcagcaggcgggagtcgagaaaagcccgtttgtgctggtgtttgaaaaggtcggtattccctacgcggcggatatctttaactttgtgatcctgacggcgattctgtcggcggccaactctggcctttacgcctccgggcggatgctgtggtcgctctccaatgaaaaaacgctgccgtcctgttttaccaaattgaccaggaacggggtaccgctgacggcgatttcggtcagcatgctcggcggcgtgctggcgcttttctccagcgtcgtggccccggatacggtgtttgtcgcgctgtcggcgatttccggttttgcggtggtggcggtatggctgagcatttgcgcctcgcactttatgttccgccgtcgccatctgcagcaggggaaggcgctaagcgaactgtactatcgcgcgccgtggtatccgctggtgccggcgctgggatttgtgctttgcctggtagcctgcgtgggtctggcgtttgacccgagtcagaggattgcgctgtggtgcgggatcccgttcgtggcactgtgttatggtgcgtattatctgactcgttcacggaaactcacccaggagcctcaacatgtcgcagaataa

SEQ ID NO: 255102 - DNA, 1383 bp, Klebsiella pneumoniae
atgataccccgcgctttgcctctgtgggccgccgctgccgccgtcggccttctaccgctgcacgccgctcaggccgcgagttccgtgaagtttcccgataaagtctgtgatatcacccactacggcgcagaaggccatcggctgcaaatcgcgctcaacaccgatgccattcaaaaagcgattgatgactgcgccgccgccggagggggaacggtgctggtgccgaaaggtaatttcctcaccaacccgctgtttctgaagaataatattcagcttaagctggagaaagacgccaccctggtggcctcaaccgaagtggctgcctatcgcggcgatgataaaacgcgatacgccgaagcggaaaacggctggctgccgtttattagcatcgccgacgcgcaaaacgtggccatcgtcggtgaaggcactatcgacggccagggcgcggtgtggtgggaacgctggcgggaaaatatccgcgccaccggcaagaaaggcggtaccgaccggccacggctgatttatatcacccgcgccagcaacgtgcttatcgacggcgtgaccctcacccattcacccagcttccacgtggtcacccgctacgcgcacgatgtcgatatcaacggcacgcgtattctttcgccgtggcatgcgccgaacaccgacgccatcgatcctatcgatagccagaatatccgtattaccaacaactatatcgactgtaacgacgaccatattgccatcaaggcggagaaagccgacccgcgcttcccggacggcgtggtggataacatctatatcgccaacaacactctgaagcaggggcgcgggatctccatcggcagcgagagcgcaggcggcgtgaataacgtgctggtggaaaacaataccttcgaaggttcgatgtacggcattcggattaaaagcccgcgcggcaaaggcggcgaggtaaaaaatatcgtctaccgcaataccagaatgcataacgttgaggtgccgctggtgttctccgcctattacaaagccgcgccgattgtgcaggccgaggtcgataagctgttgcaggcaggcggctttaccctcggcgagcagatctatccgccggacagcgacccgaaacagccgttcgataaatacaagactccgcacttcagtaacatcaccgttgagaatttaacctccaccggcgacagcaaagcggcggcctatattatcggtaccccggaagcgccgctcagcggtttccattttagcaacgtcaatattgaagccgaccgcggcctgcgcattcgcaatgccgagctggagagtaaaggacttaacctgcaggtgaaagcaggtccggtaattcaacaagacgctggcgccatcgtgcaccagtaa

SEQ ID NO: 255103 - DNA, 1380 bp, Klebsiella pneumoniae
atgacagagcaaaccacaacgcttaaaagaacgctcggcagtttccgcttatgggggatcgccgttgggctggttatttccggggagtattttggctggagctacggctggtcccaggccgggacgctgggctttctgatcgtcgcgctggccatcgccgcgatgtactgcgcctttatttttagcttcaccgagctgaccaccgccattccgcatgcgggcggaccttttgcttacgcctaccgcgcctttggccccaccggcgggtttatcgccggcttcgcgaccctgattgaattcgtcttcgccccgcccgccatcgctatggccatcggcgcctatctgaacgtgcagtttccggcgctcgaccccaaatgggtggcctgcggcgcctatattatctttatgacgctgaatattctcggcgtggggattgccgccacctttgagctggtggtgacgttattagcgatcttcgagctgctggtgtttatgggcgtggtcgcgcctggcttctcctggagccactttaccgctaacggctgggcgggcgcggaaagcttcagcggcctggcgctgccgggcatgtttgccgccatcccgttcgcgatctggttctttctggcgattgaaggcgcatcgatggccgccgaagaagctaaagatccgcagcgcactattccccgggcgctgggcggcggcattctgaccctgaccgtactggcgataggcgtgatggtctttgccggcggcgtcggcgactggcgaaccctggctaatatcaacgacccgctaccgcaggcgatgaaattggtggtcggcaacagcagcggctggctgcatatgctgatgtggctggggctgtttggcctggtggcctcgttccacgggattatcatgggctactcgcggcagatttactctctggcgcgcgcgggctatctccccgccgggctggcgacgctgaaccgccgcacccgcacgccgcatctggcgatcctcgccggtggcgtggtcggcatcgccgccattttctccgattcgctgatcaccattagcgggatgccgctgaccgcctgcatcgtcacgatgtcggtatttggcgctattgttatgtatatcacctcgatggcggcgctgtttaagctgcgccgcagcgagccaaagctgattcgaccgttccgcgcgccgctctatccgtgggcgccggccttcgcgctggccatggcggtgctctgcctggtggcgatggtctggtacaacacgctgctggcgctgattttcgccgccatgatgctcggcggctacctgtggtttcgcaagaccgcagcggcccgccagcgcgcggcggtggatccgcagctacgtacggtctcctga

SEQ ID NO: 255104 - DNA, 1389 bp, Klebsiella pneumoniae
atgtataaaaccacgctatcgggccaggtatggcgctttgagagcctgaaaaccctactggcgaaggcctcccctgcgcgttccggcgacgcgctggcgggcgttatcgccggctccgccgaagagcggatggcggcaaaaatggcgctggcggaggttccgctcaccgagattctcgataatccgctgattccctacgagcaggatgaggtgacccggctgatcctcgatacccacgacgcccggggcttcgcggcgattcgccatcttacggtcggcgattttcgcgactggctgctcgacgaggccaccgatgaagcggcgctgcgccaggtcgcccgcgcgataaccccggagatggccgccgcggtcagcaagctgatgcgcaatcaggatctgatcctcgccgccagcaaatgccgggtcgtcacccgttttcgcaacactatcggcctgccggggcgcctgagcgtgcgcctgcagcccaatcacccgaccgatgacctcaaaggcatcgccgccagcatgctcgacggcctgctgtacggcgcaggagacgcggtgatcggcatcaatccggccagcgacagcctgccggtgctggcgcagctaaaccatatgcttgacgatattattcagcgcttcgccatccccacccagtcgtgcattttgacccacgtcaccaacactctgcagctgattgagcgcggcgcgccggtggatctggtgttccagtcggtggccggtaccgaagccgccaacagcggtttcggcattaatctggcgctgctgcaggaagcgcgggaagcggcgcttagcctgaaccgcggcacgctgggcaacaacgtgatgtattttgaaaccggccagggcagctgtctttccgccaacgcccatcacggcgttgaccagcagacctgcgaagcccgggcctacgccgtcgcccgccattttgagccgctgctggtcaatacggtggtgggctttatcggcccggagtatctgtacgatggtaagcagattatccgcgccgggctggaagatcacttctgcggcaagctgatggggctgcccatcggctgcgacgtttgctacaccaatcacgccgaagcggatcaggacgatatggataccctgctgacgctgctttgcgcggccgggctgacctttttgatcggcgtaccgggggcagacgatatcatgctcaactatcaaagcacctcgttccacgatgccctttacgcccgccgactgctgggtttacagcatgcgcctgagttcgccgactggctgacgaagatgcagattattgaccgccacggcgcgctgcgtctgaccgatgcccgccatccgctgctttccgtcctgccgcaaggagaaccggtatga

SEQ ID NO: 255105 - DNA, 777 bp, Klebsiella pneumoniae
atgaatcctcccgacgcctggaacccgctgcgtgagtttaccgatgcgcggattgcgctggggcgcagcggcgccagcctgccgacccgcgaagtgctgaatttcggcctcgcccacgcccgggcgcgcgatgctatccaccaacctttcgccagcgaccagcttgttcagccgctggcggagctggggctgtcgacgctgaccgtccgcagcgccgccagcgatcgccatgtctatctgaatcgcccggatttggggcgacagctgaacgaagagagccgcgccgacctcaccgccagcggcgcgcgccccgccgacctgctgctggtgattggcgacgggctgtcgtcgtacgccgtgcagcgccaggcagtgccgctgattcgcgccctgctgccctatctgcaaaccctcggcctgagcctggccccggtggtgctggcgcaccagtcgcgggtcgcgctcggcgatgatataggcgaaacgctgaaggccagagcggtggcgatattgattggcgaacggcccgggctctcttcgccggacagcctcggagtgtatttaacctggcagccgcatcgtcagcggctggagtcggagcgcaactgtatttctaatatccgtccggaagggctgagctttgatgccgccgcttttaagctggcctggctactggagcaggcctttttgcggcggcttaccggagtgcgcctgaaagacgaaagcgataatcctgcgctgcatggaaaaataaaaccgttgagccagctaaaataa

SEQ ID NO: 255106 - DNA, 1137 bp, Klebsiella pneumoniae
atgaacaagttttccgggaaagcgtctttaatggccacgctggttgccgcgtgggtcggtgccagcagcgcgcaggcggctgaaattaaaattggcgtggtcttgccgctgagcggcgcgctgagcggctacggacaaccttcgcaaaaagggctggatatcatccagagcattacgccgacgttaaaaaatggcgacaccgtgaagcttatcgtgattgacgataaaagcgacaaggtcgaagccgctaacgccatgcagcgcctggtctccagcgataaagtcgacgcggtgatcggcgaagtcacctcctccaataccctggcgatgaccaaaatcgccgacgacagtaaaacgccgctggtctcctcaaccgccaccaacgaccgcgtcacccgcaaccacccttacgtcagtcgggtctgcttctccgacagcttccagggcgtggtcggcgctaacctcgcctcgcgcgatctgaaggctaaaaccgccgccatcgtcttcgacagcagcaacgactactccgttggcctggcgaaagccttccgcacgcagttcctgaaaaacggcggcaccattcctatcgaagttcaggctcccggcggcagcaaagactttaaggcccagctggccagcgtgaaggcgaagaacgtcgacatgatctatatgcctatctactacaccgaaggggcgctgatcgccgtacaggcgaagcagctggggctgagcaagccggtggtcggcggcgacgggctggcggcggatcaggtcttttttgacgtcggcaaagacgcggtcaacggctatatgaccaccgactactactcgccgaacgccaaagagcaaacgccggcgggcgaggtgtttatcaaagcctgggaagccaaataccagcagccgacccatacctggggcgcgatggcggcggacgcctataacgtcattatcaacgccatgaaccagtgcagcgacccgcgcgaccgggtttgcgttaacgaaaaaattcgcgctactaaggacttccagggcgtaaccggtacgctgacgttacaaaacggcgacgctatccgcagcgcggtcatcaacgaagtgaaggatggcaagctggcgtttcgtaccgtggttaatccttaa

SEQ ID NO: 255107 - DNA, 900 bp, Klebsiella pneumoniae
atggatggtgccatttttctccagcaagtggtcaatggaatgagccttgggggcatgtacgccctgattgccatcggttatacgatggtttatggggtgctgcgcctgatcaacttcgcccatgcggacgtgatgatggtcggggcgtttaccaccctgtttttgttttcttccattggactacccttcggggtagccgttttcctgaccctcgcgctgtgcggcctgttcggcatgctgatcgaccgggtggcctatcgcccgctgcgtcaggcatcaaaaatctcgatgctgatcaccgccatcggcgtcagcttcttccttgaaaacctgttcaacgtgctgtttggcggcagctcgcgcttcttttccgcaccggaatttttcaataacactcgcgccgttggtgacgtgattatcaccaacgtggcgtggattgtgccgctgatcaccgtcctgctgctgctggcgatcctctggctgctgtaccgcacccgctacgggatggcgatccgcgcggtggccttcgacgttaataccgtgcgcctgatgggcatcgacgccaaccgcattatctcgctggtgttcgccctcggcagcagcctcgcggcgctgggcggggtgttctactccatcagctacccgaccatcgacccgctgatgggcgtgctgataggcctgaaggccttcgccgccgcggtgctcggcggaatcggcagcgtcaccggcgcggtgctcggcggctttattctcggctttaccgaggtggtggcggtcgctctgtttcccgagctgggcggctacaaagacgcctttgcctttatgttcttgattctggtcctcttattccgcccggttggcattatgggcgatgaacgtctggaaaggagccgtttctga

SEQ ID NO: 255108 - DNA, 1050 bp, Klebsiella pneumoniae
atgctcaacgctacgactaccgccggggcgcagctgcgcaacctggtcattattgctctctgcgtcgcgctgctggccgggatcaacgtcatcttcaacgactacgttattcgcgtcatcagcaccattttcgtctttatgatcctcgcggtcagctataacctgatcaacggcgtgaccggccagctgtcgctggagcccaacggctttgtggcggtcggcgcttacgtcaccgccctgttgatcctccccagcgacagcaagctggatatgtttgagatggccgcgcccagcccgtggatcctcgtgctgcacgccgggttcctgcccgcactgctcattagcggcctgtgcgcggcggcgctggcggtttgccttgccctgccggtcttccgcgtgcgcggcgactacctggcgattgtgaccctcggcttcggctttatcattaaaatcctcgctatcaacaatccgcagatcaccaacggcgcgattggcctcaacgatattccgcagcagccgcatctgctgttctggtgcgggctttttgccctgctggcgaccgggatgattttgcagctggtgtggtcgaagtacgggcgaatgatgaaagcggtgcgcgacgacgaagacgccgctatcgccatgggcgtgaacacgtttcgcattaaaacctgcgccttcgccaccagcgccttcttcgaagggatcggcggcggcctgctggcctcgctgctgaccaccatctcgccgggcctgttcgactttatgcttaccttccagctactgattattatcgtgctcggcggcctgggcagcaccaccggcgcgctgctcggcaccgtactggtggtcggcagcggcgagtggctgcgctttctcgatcagccgctccagttcttcggtcacgatctcggcgcgtatccgggcctgcggatggtggtgttctcgctgctgctgctgatcatcatgctgttcgcccgcgaaggtctgttgggcaaaaaagagatttggcaggtgggcaaaaggagacgcggcaatggcgcaaaataa

SEQ ID NO: 255109 - DNA, 783 bp, Klebsiella pneumoniae
atggcgcaaaataaggtcattttacaggtgcaggacgtgaccatgcagttcggtggcctgcgggctatcgacagcgtcagtttccacgtcgacgaggcggaaatttttggcctgattggccccaacggcgcgggcaaaaccacgatgttcaacgtcatcaccgccaactataaaccgaccagcggcagcgtgaccctcgcgggaaagtcgctgaaggggctgaagccgaaccgggtggtcaacgccgggattgcccgcacctttcagaatatccgcctgttcaactcgatgacggtattagaaaacgtgatggtcggcctcgacagcgccagccgctattcgctgctggaagcggcgctgcatatcggccgctactaccccgccgagcgggcggcaaaggccaaagcgatggcgattctggacgatatcggtatcgtccatttcgccgacgtgcaggccaccaaccttagctacggcaaccagcgcaaggttgaaattgcccgcgcgctggcgacctcgccaaaattactgctgctcgacgaacccgccgccgggatgaacccgaaggaaacggaagatctggcagacctgatcttccgcatgcgtaacgactatcagctcagcgtactgctgatcgagcacgatatgccgttcgtcaacaagctgtgcgagcgggtgatggtgctggagtacggcaagccgctgtttagcggcctgatgtcggaagccattgaggatccgggcgtgatttccgcttacctgggggacgttcgttatgcttag

SEQ ID NO: 255110 - DNA, 696 bp, Klebsiella pneumoniae
atgcttagcgcgcgcgaattaaacgtgttttacggcgtgattcagggactaaaaggcgttgatatcgatatttacgaccgggagatcgttacccttatcggcagcaacggcgcggggaaaacctcaaccctcaacgggatcgtcaacctggtgcgctccacggggcgggtcaattttctcaacgaggatatctcccgcagccagacgcatcagattgtgcgtaaggggctggcgctggtacccgaaggacggcgcatcttcaccaacctgaccatcgaagaaaatctgcgcatgggggcctacaataatctcgccggctttacccgcctgcgcgatcgcatgtacagcctgtttccccgcctcaaggagcggcgtgctcagatggcgggcaccatgagcggcggcgagcagcagatgctggcgatcgccagagcgctgatgagcgaaccggtactgctgatgctcgatgagccaagtctcgggctggcgccgaaaattgtcggggagctgttcgccacgattaagcagctgcgggaggagaatattaccgtgctgctggtggagcaaaacgccacggcggcgttgaccatcgccgatcgcgcgtatgtgctggagaatgggaagattatgctctcgggtcctgcgcaggaggtgctggcgaatccggaaatcaagcggatgtatctggggggataa

SEQ ID NO: 255111 - DNA, 177 bp, Klebsiella pneumoniae
atgaaagtggcgctgtggcaacgcataacgggctggctggcttctttatctgacggtgaagccgggcagcaggatacccaacgcatcatggaggcaatattaccggtcgccagtctctacggaattgagctcggcaacgttgaaacaaggtggtttcgccatgataaaacatactga

SEQ ID NO: 255112 - DNA, 906 bp, Klebsiella pneumoniae
gtgcgcattgggattgatttaggcgggaccaaaacggaagtcatcgcgctgagcgaccagggagagcagctatttcgccaccgcctgcctacgccagggggtgattatcgccagacgatagagacgatagcctcgctggtcgagatggccgagcaggctaccgggcagagcggcacggtcggcgtcggcatccccggttcgatttcgccttataccggcgtagttaaaaatgccaactcaacgtggctcaacggccagccgtttgataaagacctttgccagcgtctgcaacgtgaagtgcgtctggccaacgatgccaactgcctcgcggtgtcggaagcggtcgacggcgcggcggccggggcgcaaacggtatttgcagtcatcattggcaccggctgcggttcaggcgtggcgcttaacggacgcgcccatattggcggcaacggcacggcgggcgagtggggacacaatccgctgccgtggatggatgaggatgaactgcgctatcgcgctgaagtaccgtgctactgcggtaaacagggctgtatcgaaacctttatctccggcaccggctttgcgaccgattaccagcgcctgagcggtcagcggctacagggcagcgagattatgcagcgcgtcggcgagcgggacccggtagcggaactggcgctgagccgctatgagatgcggctggcgaagtcgttggctcacgtggtcaacattctcgatccggacgtcattgtgcttggcggaggaatgagcaacgttgatcgtctctatcaaacggtgccgaatctgctaaaaccatgggtattcggcggtgaatgcgagacgccgattcgccgggcggtgcacggggactccagcggcgtgcgcggcgcagcctggctgtggccgctgtaa

SEQ ID NO: 255113 - DNA, 363 bp, Klebsiella pneumoniae
atgaaaaatttactaattttgattgccggcccggtacgcagcggcactcacaatcgcgcggaactaatcgacgctaacctgaacaatatggcccaggttgcgctacgcgtttatcagaaaggacatatccccgtggtcggcgaatggctggctctccccattgccaaagccgcgggctccacggaaattggcgatgcgattagcgaggaatatctctaccccgtcgctcaccgcttaattagccgctgtgacgctattttacgcctgccgggcgaatctcgcggcgcggatctggatattgaggaaggcaaaaaaatggggctgtcgatttattacagcctggaggagatcccggaccgataa

SEQ ID NO: 255114 - DNA, 3135 bp, Klebsiella pneumoniae
gtgaaaatactcagcttacgcctgaaaaacctcaattcactgaaaggtgaatggaaaattgatttcaccgctgagccgttcgccagcaacggtctgttcgcgattaccgggccgaccggcgccggaaaaaccacgctgctggatgctatctgcctcgcgctctatcacgaaaccccgcgcctgagcagcgtgtcgcaatcacaaaacgatctgatgactcgcgacaccgccgaatgtctggcggaagtggagttcgaagtcaaaggcatcgcctatcgcgccttctggagtcagaaccgggcgcgaaaccagccggacggcaacctgcaggtgccgcgcgtcgagctggcgcgctgcgaggatggcaaaatcctcgccgataagatcaaagacaagctggaaatgaccgcctcgctcaccggcctggactatggccgcttcacccgctcgatgctgctatcgcaggggcagttcgccgccttcctgaatgctaaaccgaaagagcgcgccgagctgctggaagagctgaccggtaccgaaatttacggccagatttccgcgcaggtctttgaaaagcataagcaggcccgcgtcgagctggagaaaatccaggctcaggcttccggcgtcctgctgctaagcgacgaccagcagctggcgctacagcaaagtttgcaagcgcttactgatgaagaaaaacagaaggttagcgaacaaagccgtctgcaaaatgcccgtcagtggctggtacgccgcgcagagctgacagcagaagatctgcaggcgcagagcgcgctacgcgaagcccaatctgcgctggagcaggcgcagccgcagctgaccgtgctgctgaatgcccagcctgcagagcacttacgtccacagtggacgcgtcagcaggaacaaaccaccgcgctggcgcaaacccgtcgcctgagagaagaagtaaatactcgcttacatgaaaggctgcgacggcgagcggggattcgcctcgccgcccgccagcagtatgaacgcctgcagagccaccagcaaacgctctccgcatggctaaaagagcatgaccgttttcagcggtggggcaatgcgctggcgggctggcgggcggctttccagcagcagactcgcgatacccagcagcaagccgccctgcagcaacgtctggcggaaacccgtcgcagactggcagacctgccgcccgccgggctgacgctggatgccgaacaggtcagcgccgggctggcgcagcacgccgctgctcgcgccctgcgccagcagctctcagcgctacatagtcaactgcagcctctgggccagcgcctgatgcagctcaacgccgccgggcaggccaccaggcaggagcaggaaaaactggaagcgatgctggttcagcgccgtcaggcttataaagagaagaatcagcagctgagcgatgtgaaagccctgtgcgaaatggaagcgcgcattgccggtcttgaggccgagcgtgctcgcctgcagcccggtaccccttgtccgctctgcggttccgcgcagcatccggccgtcgccgaatatcaggcgctggttcccggcgttaatcaggcgcggcgcgatgcgctggagcgcgaagttaaacagctggcggaggctggcgccctggtgcgcggcgagctggacgccctgattaagcatcagcaaaaagaggcggctgagaaagcatcgcttctgcagcaggagcaagcgcttacatcacgctggcaggagacgatcggcggattaaatatcgacctgacgccaaaggatgatattccgggctggataaatgcgcagcaggagcatgaacagcggctctatcagcatcagcagcgtctggcctggcaggctcagcagctggagtgccagcagcagcttcagcagctacagcaggaacaagagcagcgcagcgccgcgctggcggccgaactgagcgcctttagcctgagcctaccggctgcagagcagaccgcgagctggctggcgcagcgggaagaagagacccgcaactggcaggccaaacagaatgaactgctcgccctgcaggaacagctccagcagctgaccccgcttctggagaccttaccagaaacggacttagcagcagaacccgcaccgctcgacggctggcgtcaggtacacgatgactgcctcgcgctccagagccagtggcaaactctggggcagcaggagagccagcagcaggctcagctgaaagagagcgaagcgcagttcagcgcagcgctggccgccagccccttcgcggaccggcaggcatttctcgacgcgctgcttgatgaggaaacgcgccagcgtctcgaaaacctgaaacagacgctggagagcaggctacagcagaatcaggcgctggcgctgcgggctcgcgaagcgctcgataaccacagccggcagccgccggcggaaatggacttcagccagtctcttgagcaggtgcaggaacagcttcagcagctaacgacgctgctgcgggaaaacagcgcccgtcagggagagattcgccagcagctgaaacagaatgcagaaaaccagcagcgtcagcacgctttacgccagcagatggagcgcactgcgcaggaagtggaagactggggatggctgaactcgcttatcggctccagggagggcgataaattccgtaaatttgcccagggcctgacgctggataatctggtgtggctggccaaccaccagcttaatcgcctgcacggtcgctatctgctgcaacgtaaagccagcgatgccctggagcttgaagtggtcgacacctggcaagcggacgcggtgcgcgacacccggaccctctccggcggcgagagtttcctcgtaagcctcgcgctggcgctggcgctctccgacctggtgagccataagacgcggatagactcgttgtttcttgatgagggcttcggcacgctggatagcgaaaccctcgataccgcgctggatgcgctggacgcgctcaacgccagcggcaagattatcggcgtcatcagccacgtcgaggcgatgaaagagcgcattccggtgcaaattaaagttaaaaagatcaacgggctgggctatagccgcctggataaaaccttcgccgtcgagtaa

SEQ ID NO: 255115 - DNA, 1203 bp, Klebsiella pneumoniae
atgcgcatccttcatacctctgactggcatcttgggcaaaatttttacagcaaaagtcgcgccgccgaacatcaggcgtttctagactggctgctggccagcgcgcaggaacatgacgtcgatgccattattgtcgcgggcgatatttttgataccggctccccgccgagctacgcgcgcgagctgtataaccggtttgtcgttcagctgcagcaaaccggctgtcggctggtggtgctggcgggcaaccatgattcggtcgccaccctcaacgagtcgcgagacattcttgcgttcctgaaaaccacggtcgtggccaatgccggccacgccccctttattctgccgctgcgcgacggttcgccgggggcgattttttgcccggtgccgttcctgcgcccgcgtgaactggtaaccagccaggccgggcactccagcggcgaaaagcagcagcagctcctgagcgccatcagcgactattaccagcagcagtaccagcaggcctgcgaactgcgcggcgaccgggcgctaccgattatcgccagcggccatttaaccaccgtcggcgccagcaaaagcgacgcggtgcgcgaaatctatatcggtacgctggacgcctttccggcgagccgttttccgcctgccgactatattgcgctcggccatattcaccgtgcgcaggtggtgggcggctgcgagcatatccgctacagcggctcccccatcccgctgagctttgatgaaacagggaaaaataaaagcgtcaatctggtcacttttacccacgggcgtctggcggatgtcacgccgcttatcgttcccgtcacccagccgctggcggtgctaaagggcgatttcgccagcattagcgagcagctaaaccagtggcaggatagcgccctgcagcccgcagtgtggctggatatcgaaatcaccagcgacgaatatatgcatgatatccagcgtaaaattcaggcgcagaccgaaacgctgccggtggaagtcctgctggtgcgccgcagtcgcgcccagcgcaaccgcattctggccggcgctcagcgagagaccctcagcgaactgcaggtggaggatgtctttgcccgccgtctggcactggaaacgctggaaaccgcgcagcagcagcgcctggaacagctttttaatgaaacgctgcatagcctgaacggtgaggatcgcctgtga

SEQ ID NO: 255116 - DNA, 690 bp, Klebsiella pneumoniae; identical to SEQ ID NO: 172973

SEQ ID NO: 255117 - DNA, 1320 bp, Klebsiella pneumoniae
atgacccatcagttaaaatctcgcgacatcattgcgttgggctttatgaccttcgcgctgttcgtcggcgcaggcaatattatctttcctccgatggttggcttacaggccggcgaacacgtctggaccgcggctattggctttctgattaccgccgtgggtctgccggtgctaacggttgtggcgctggcgaaagtcggcggcggcgtagagagcctgagcacgccgattggtaaagttgccggtatcctgctggcggtggtttgctatcttgccgttgggccgctgtttgcgactccgcgtaccgccaccgtctcttttgaagtggggattgctccgctgaccggcgacggcccgctgccgctgctgatttacagcgttatctattttgccctggtgatcctcgtttcgctctatccgggcaagctgctggacaccgtcgggaatttcctcgcgccgttgaaaatcatcgctctgattattctcgccgttgcggcgatcgtctggccagccggtccgctgagccacgcgatggaagcctaccgtaccgcgccattctccaacggcttcgtcaacggctatctgaccatggacacccttggggcgatggtctttgggatcgtgattgtcaacgcggcgcgttctcgcggcgtgaccgaagcccgcctgctgacccgttacaccgtctgggctggcctgatggccggcgtgggcctgacgctgctgtatctggcgttgttccgtttaggttccgatagcggcacgctggtggagcagtccgctaacggcgcggcgattctgcacgcttatgtccagcacaccttcggcggtgcggggagcttcctgctggcagcgctgatcttcatcgcttgcctggtgacggcggtaggcctgacctgcgcctgtgcggagttttttgcccagtatctgccgttctcctatcgtacgctggtctttatccttggcctgttttcgatggcggtttccaaccttggcctgagccacctgatacagatttcaattccggtgctgacggctatctatccgccgtgtatcgcactcgtggtattaagctttacccgtagttggtggcataattcgtcccgcgttattgccccggcaatgtttatcagcctgatgtttggtatcattgacggcattaaagcgtcggcgtttgcagagattttgccatcctggaccgcgcgcctgccgctggcggagcaagggctggcgtggctgatgccaaccgccgtgatggtgattctggccgttatctgggatcgcgcagcagggcgtcaggtggcctccagcgcgcactaa

SEQ ID NO: 255118 - DNA, 1818 bp, Klebsiella pneumoniae
atgttgaaggcatggcacctcccggttgctccgtttattaaggagcagccggaacgactgattatcacgctatggttaagcggcgaggatctgccgccgcgggtcacgctacgcgcggaagaagataacgaggagctgtcgctgccgatgcgccgcctgcggcaggaaccgcatccgggcgtggtggcgtggcgcggggaaatcagcctcgtcaacgggctaccgcgtcgccgctacagtttcaagctgctgtgggccgaccgccagctgtggttcacaccgcaggggttcaatcgctttccgccggcgcggctggagcagtttgcggttgatatgccggacagcgggccgcagtgggtggccgatcaggtgttttaccaaatcttccctgaccgcttcgcccgcagccagtcacgcgacgccgggcaggataacgtttattaccaccatgccgccggtcacgatatcgtgcgcaaggcgtgggatgagccgctaaccggcgaggcgggcggctccaccttctacggcggcgatctcaatgggatcagcgaaaaactgccgtacctgaagcaacttggcgtcacggcgctttatctgaacccggtatttgtcgctcccagcgtacataaatacgataccgaggattaccgtcgcgttgacccgcagtttggcggcgatgcggcgctgctgcgcctgcgtcacaacacgcaaaaagaggggatgcgcctgatccttgacggcgtgttcaaccacagcggcgattcgcatgcctggttcgaccgccatcagcgcggtagcggcggcgcctgccacaacgccgattcgccgtggcgcgactggtataatttttctcccgagggcattgcccacgattggctgggatatgccagtctgcctaagctcgactaccggtcggcgacgctgatagatgagatctatggtggagaagatagcgtggtgcgccactggctgaaagcgccgtggagcatggacggctggcggctggatgtcgtgcatatgctcggtgaagacggcggggcgcgtaataacctgcgccatatcgccggcattacccaggcagcgaagcaggagcggccggaagccttcgtgttcggggagcatttcggcgacgcgcgccagtggctacaggccgacgtagaagactcggcgatgaactaccgcggctttaccttcccgctatggggctttctcgccaatactgatatctcctacgacccgcagaaaatcgatgcgcaaacctgcatggcgtggatggacaactatcgtgccggactgtcgcatcagcagcagctgcggatgttcaaccagcttgatagccacgataccgcgcgctttaagtctctgttgggtaaagatgttgcgcgtctgccgttggcggtggtgtggctgttcagctggcctggggtaccgtgcatctactacggcgatgaagtgggcgtggatggcaataacgatccgttctgccgtaaacccttcccgtgggatccggctttgcaggatggcgaactgctcgacctgtacaagcgcatgagcaaactgcgtaaggctaatcaggcgctacgctacggcggctgtcaggtgatctatgccgaagagaacgtggtggtgttcgtgcgagtctataagcaacagcgcgtgctggtggcgattaaccgcggcgcggcctgcgaggtggtggtagaagattcgccgctgcttgacgttcacggctggcagttgaaagagggcgccggtgatctgcacgagagcgtgctgacgctgccagcgatctccgccagcgtgtggtttagccgttag

SEQ ID NO: 255119 - DNA, 903 bp, Klebsiella pneumoniae
atgcgcctgaaccttgatgtcctgttaattctcgacgcgctggacaaacatggctcttttgccaccgccgccgaatcgctatttaagaccccagcggcgctgagctacatgatccaaaagctggaaaacgatctgaatatcacgctgctggatcgctccggccaccgggctaaatttaccgatacgggcagaatgatgctggagaaggggcgattgctgctgaatgccgctaaggatctggaaaagcaggcggtgcagctcagcgccggttgggagcgggatctggctatcgcgctggatgactctttcccgtttagcgcgctgctgccgctgatcgatgctttctacgcccagcacccgcaaacccggcttaactttacccaccataccctcgcgggctcgtgggaagagctcacccacaacggcgcggatattattcttggggcgatcaatgaaccgccaacctccgccgagtggtcgtggaaaatgctcggcgccatagacaatattttcgtcatcgcgccggggcacccgctggcgcaaacgacccaaccgctgaccaacaagcagctcagcctgcaccgcgcggtcgtgatcagcgacagcgcccgctactgtcatccgctcaacagcaacctgctcgacgaacagccgcaaatccgcgtggatgatttcgccagtaaagttgaacttttgcgcgccgggctgggctgcggctttttaccgcgccatattgcccggcggtggctggaaagcggcgagctggtcgaaaaggccgtcatctcgtgtcgcgagaaagatattacctatatggcctggcgcagcggtaatgacggactggcccagcgctggtggcgcgaggccattttgcagagcgagagcctgagccagctctatgactaa

SEQ ID NO: 255120 - DNA, 642 bp, Klebsiella pneumoniae
atgtctattcgtgaactgatcgatccctctaactcggcgcttatttttattgaccaccagccacaaatggcttttggcgtggcaaatattgaccgccagaccctgaaaaataatacggttgctttagccaaagcaggcaaaatttttaatgtcccggtaatttatacttccgtcgaaaccaaaagcttcagcggctatatctggccggaattgctggccgtccatcctgatgtgaaacccattgaacgtacctcgatgaactcctgggaagacgcggcttttgttgaagcggtaaaggagaccggacgcaagaaactgattatttctgctctgtggactgaagtctgcctgacgttcccggcgctgatggcgctggatgcgggctatgaagtttacgtggtgaccgatacctccggcggcacctcggttgatgcccacgaacgctccattgaccgtatggtgcaggccggtgcggtgccggtgacctggcagcaggtgctgcttgagtaccagcgcgactggtcgcgtaaagagacctatgacgcggtgatggatctggtgcgcgagcatagcggcgcttacggcatgggcgtggattacgcttatacgatggtgcatggcgcgccagagcgtaaagcttaa

SEQ ID NO: 255121 - DNA, 546 bp, Klebsiella pneumoniae
atggcgcagcagaaatcggtgaccctggttatcagtcatgtgctcgacccggagcatggccaacggtatgaagcgtggctgggcaaaattatgccgattgcggctgaatttcccggtcatcttggcgcaaacgtgattcgcccggctcccgggcagaatttatggagcattatcattcgcttcgacaccattgagcatctttacgcctggacccagtcggaaacccggcgcgaactggtggcggaaatcgcaccgctgctgagcgaaggcgatcgtaccgaagtccggactgaaccggccttctggtttacgccgcctgcggcgaatgtgcgccagccgcgacgctgcaagcaatttttaatcaccctgctggtgattttccccagtactaacctggtgccgtcgataaccggaatgctgttgccctcgctgaagggaagcctgctgctgcacctcatcaatgatgcctgtgtggtcgcgctggtggtctggttctggatgcccatcgtgacccgtctgtttgctggctggttaaagaaaaactga

SEQ ID NO: 255122 - DNA, 1869 bp, Klebsiella pneumoniae
atgtcgcaaactgccacactgatcctgactcacggtcgggttcatactctcgatcgtcaaaatcccctggccgatgcggtggcgatcgctgacggtaaaatcctcgccgccggtagtcacgatcggatcatgagttttgccgcggaagggacgcaaattatcgatcttaaaggtcatacggtgatccccggtcttaacgactcccacctgcacctgatccgcggcggtctgaactacaacctggagctacgctgggagggggttccctcgctggcggatgcgctgcggatgctgaaagatcaggccgatcgcacgccgtcgccgcagtgggtgcgggtggtcggcggctggagcgaatttcagttcgccgaacggcggatgccgacgcttgaggagcttaacgatgcggcgccggataccccggtatttgtcctgcacctgtacgatcgcgcgttgctgaaccgcgcggcgctgaaggcggtgggctataccaaagagacgccggatccggcgggcggcgagatcgttcgcgacggcaacggtaatcctaccggcatgttgattgccaaacccaacgcgatgatcctctactcaacgctggccaaagggccgaagctaccgctggaactgcaggtcaactcaacgcgccagtttatgcgcgagctgaatcgtctggggctaaccagcgctatcgatgctggaggcggtttccagaactacccggaagattatgaaattattgaacagctgcacgccaaagagcagatgaccgtgcggatcgcctataacctgtttacccagcgacctaagcaggagctggaagattttgagcgctggaccgatatgctcaagccgggacagggcaccgacttttaccgcgccaacggcgccggggagatgctggttttctcggcggcggattttgaagatttcctgcagccgcgtccggacctcccggagggaatggaagatgagctggagcgggtggtgcgccacctggtagagcaccgctggccgttccgcctgcacgccacctacgatcaatccatcagccggatgctcgacgtcttcgagaaggtaaatcgcgaaattccgttcaatggtctgcactggttcttcgatcatgcggaaaccatcaccgaacgcaatatcgaacgcgtcaaagcgctgggcggtggcatagcggttcagcaccgtatggctttccagggcgaatactttgtcgaccgctacggtaaagatgcggtcaaacatacgccgccggtggcgaaaatgctcgagctggacgttccggtgggactggggacggatgctacccgcgtggcgagctacaatccgtggaccgcgctctactggctggtttccggacgtaccgtcggcggaatggcgatgtacgacgacagcaaccgcctgccgcgcgacgtggcgctggagctgtggacggcgggaagcgcgtggttctcaagcgagcagggtaagaaagggcgcattgaacaaggccagcttgccgatctggtggtgctgtcgaaagactatttcagcgtcgcggaagaggaaattaaggggatcgagtcggtactgacggtcgttgacggcaaggtggtgtacgccgccggacacttttcgccgctggcgccgccgcccattccggtgctgccagagtggtcaccggtggtgaaggtgccgggtcattaccgttccgcgccgccgaccgccgcgaaaatcggcgcgatagttcagatgcaccaatgctgcggcagctgcggcgtacacgggcatcagcatgatattgcgcgccagtcggcgattccggttgccgatgagcaggcgttctggggcgtactcggctgctcctgctttgcgttttag

SEQ ID NO: 255123 - DNA, 861 bp, Klebsiella pneumoniae
atgttagtttctatgaaggacatgcttcagcatgccctacgggacggttatgccgtagggcaattcaatattaataatcttgagtgggtcggcgctgtattaagtaccggacaacagctgcgctcgccaattattttaggcgtttccggcggtacggtgaaacatatgctgggattaaaatgtattcatgacatcgtggtcaatgccatggattatttacatattgatattccggtggctttgcatctggaccacggtaccacccgcgaggcctgcgaggcggctatcgaggccggattcagctccattatgtttgacggctcgcatctgccgttcagcgaaaacctcgccatcactcgccatctggttgcgctggcgcacagcaaaggcatctccgtcgaggcggagctggggacgattgccggaagcgaagatggcatcgtcaattcggcggtcatctacgccgaccctgaggagtgctacaccctggtgaaagaaactcaggttgactgcctggcggcggcgctgggttcgacccatggactgtataaaggcaaagccaaactgggttttacggagatgaaagccatttctgagcgagtcaatgttccgctggtcctgcacggcggtaccggtattgccgatgacgacatgcgtaaagccatcgcctgcggtacggccaaaatcaacgtcaatactgaaaatatgtacgcctggtgtcaggaggtgaaagctctgtttgccgccgataccggtcatgacgtgaacgacccgcgcaaagtgattaatcagggactgaaaccggtacgcgaaatgattgcgcggcgcatcgcgctttttggttcacagaaccgctattaa

SEQ ID NO: 255124 - DNA, 963 bp, Klebsiella pneumoniae
atggctatcttgtccatcgggttttcatgttttgatcagtttttctttttaaatgaatggccgcaggagaataccaaaaatttctgtcacgactttattgaaagcggcggcgggccggcagcgaatgcggcatggctgttggggctatggggggaggatgtctattacatcggccatctgaatcaggatctttacggccagcgaattattgctgaatttgccgaagcgggcgttgataccagtcaggtggtcttttctgatgaaatgatcacccccctggcttcggtgctggtcaatcgcctgacgggttcgcggacgatcatcacccgtaaaatgcagacgccgccgtcgctaacctacgatcagaagctcaagctcgatgatttagccgaacggctcatcgccgctgaagaaccggtaacgctattagtggatggccatgaagccgagatcagcgagtatttaattaagaaactgccaaacgcccgggtagtcatggatggcggctcactacgcgccagtaatattaagctggcggcctggaccgattattttgtggtcagtgaacattttgcccgggactatatgggatatcgcgccctgagtactgaagcagaaattaaggcggcgctcattgagcttaataaaatttgccgcggtgaagcctttattacccttggtgaaaaaggctgcgcatttttaaagagcgggatgctgcaaatagttccctcctggctgtgcaatgctgttgataccaccggcgcgggagacgtattccatggcgcttttacctacggcgttcactactcctggcacattgacaatattattttattcgccagcctcaccgccgctatttctattgagaaaaaaggtgtacgtgaatcgatgccggatcttgccgtcgttcacaattctttaaatagctatgaaagaaacttaaagcaatattttgatgaatga

SEQ ID NO: 255125 - DNA, 1392 bp, Klebsiella pneumoniae
atgcaggctattcttagtttcttatcggaaatatttagtcaacccgcatttctgatggggattatcgcatttgtcggtttagtggcgctgcgctcccccggaaataaattactcaccggcaccttaaagcctatcctgggctatttaatgctaagcgccggcgcaggggttatcgttgctaacctcaatccgctgggtgggattatcgaagccgggtttaatatccgtggcgttattcctaacaacgaggccattgtctccgtcgcccagaaggtgctgggcgtagaaaccatgagtattctactgttaggttttatttttaacctgcttattgcccgctgcactaagtataaatatatcttccttaccggccatcactctttcttcctcgcctgtctgttctcagcggtgctacaggcggcggaattccgcggctggatgctggtgctcatcggcggattcctgctcggctcatggtcggcgatttctccggccattggccagcgctataccaagcaggtcaccgaagatggcggtattgcgatgggacattttggttctctgggctactacatttcagcgtggatcgccaccaaaaccggcaacccggcgaactcgttcgccgataccgaaatctcagagaaatggggctttctgcgcgataccacggtcaccaccgggatcgtcatgttcgtcatctactttgtatgcagcgccgtcgccggtagcgagtatctcagcaccattacggatcaaaatatgctgatcttctctgtcctgaccggcctgcagtttgcggttggcgtcgctatcgtctacaacggcgtgcggctgatcctcggcgatctggtaccggcgttccagggaattagccagaagctgatccccaactccatccccgccgttgactgcgcggtattcttcacctttagcccgaccgcggtcgtcgtcggctttatcagctcgttcattggcggactggtcggcatgctttttcttggcggattgggtatggcgctgattatcccgggcatggtgccgcacttcttctgcggcggcacctccggtgttttcgccgataagctgggcggtaaacgcggctgcatcatcgcctcatttatcggcggtatcttccatgctttccttccggcgatgctgctgccggctctgggtaatctgggctttgaaaatagcaccttcgccgacttcgacttcgcggtttggggcatcatcatcggcaacgctttcacccagtttggccagattactatctatttgatttgtctggcgctgatcgtcgcactgctggtgccattctgctttcgttcagttcgcgtggtcggtgacacgctcagctatgaggagctcactgcggataagaaaaatgaataa

SEQ ID NO: 255126 - DNA, 288 bp, Klebsiella pneumoniae; identical to SEQ ID NO: 172985

SEQ ID NO: 255127 - DNA, 444 bp, Klebsiella pneumoniae
atggatattatttttaacgctgaactggttgcgcttaagcaggatatttccaacgccgtacagggtatcgaattcgccggaaagctgctgactcaacaaaatatatgtcatccggaatatgtgaatgaaatggtcgaggtctatcaggattttggtcccgccattgttatcgactacggcctggcgatgcctcatgcccggccagaaaaaggcgccttgcgcacgggcttctctttagtcaccagcaggcagccaatcgtctttggccatgaggagtttgatccggttaacgtcatcatcgccatcgccggcgcggatgccgatagccacataaaaatgattcagctaatagcctcgctgattgagtccgacattgtgaccttccttcagcaggccaatgatatcgattcagtattacatttcatccaacaacaaatggagtag

SEQ ID NO: 255128 - DNA, 801 bp, Klebsiella pneumoniae
atgaaggcaaataatgagatggaacggctgctcggcattatgcagcggctacgcgatccggaaaacggctgtccgtgggacaaagagcagacgtttgccaccatcgctccctatacgcttgaagaaacctatgaagtgctcgacgccatctcccgcgaagattttgacgatttgcgcggcgagttgggcgatctgctgttccaggttgtcttctacgctcaaatggcgcaggaagaggggcgctttgatttcagcgatatctgcgccgctatcagcgacaagcttgagcgccgccacccgcatattttcggcgatgcctccgccggtagcagcagcgaagcgctggcccgctgggagcagatcaaaagcgctgagcgagcggaaaagtcccagcactccgcgctggacgatattccgcatagccttccggcgttgatgcgcgcgcataaaatccaaaaacgctgctcggcggtgggttttgactggacctctctcggaccggtgctggataaagttcatgaagaaatagatgaagtgatgcatgaagcgcagcaggccgtggtggatgaagctaaactggaggaggaagttggcgacctgctgtttgcaacggtcaatttatcccgccatttaggcgtcaaagccgaggttgcgttgcaaaaagccaatctcaaatttgaacgtcgcttccgtgaagttgagcggattgtcgccgcgcgcggcctggaaatgaccggcgtcgacctcgatactatggagcaggtgtggcaggaagtaaaacgccaggaaactgatctctaa

SEQ ID NO: 255129 - DNA, 333 bp, Klebsiella pneumoniae
atggatttgagcttaagtttctttattctttatctcctctcatccctcacgctgatcgctgtgcaaatctggctgttttttatcgtttattcgccagacggatccttgagttcactcctgatatgccgcgctgcaaatgcccttgccatgtttgtgcagctttgcgtgacggtgaaaggagagtttccttttaacatgctttcgtcgcaaatccgctatattgacgacccggtgcgcatgctggcgttggtatttatcgtgctgcacggcatagtttatgtttttgtaatacgcggcggcttgccaaaaccgaaacgcgaatggcgtgactga

SEQ ID NO: 255130 - DNA, 1344 bp, Klebsiella pneumoniae
atggcgcaattctactctgcaaaacggcgtgtgacgacgcgccagatcataaccgttacagtaaatgaccttgatccctttgggcagggcgttgcgcgtcaccagggtaaggcgctgtttgttagcggtttattaccgcaagagcaggccgaagtggtcctggtcgaggataaaaaacagtatgcccgcgcgcaggttaaacgccgtcttagcgacagcccgcagcggcaggcgccgcgctgtccgcattttggtatctgcggcggatgtcagcagcagcacgccagcgttgagctgcagcagcagagcaaacgcgccgccctcgcgcggttaatgaagcgcgaggttgatgacattatagccgcttcgccgtggggctatcgccgccgggcgcgtctgagcttgaattatcagccaaagacccaacaattacagataggcttccggaaggccaactccagcgaaattgttgatgtggtgcagtgccctgttttggtgcccactcttggtgcgctactgcccgcggtacgagaatgtctcagcggattgcaatcgctgcgtcagcttggccacgtggagctggtgcaggctgacaacggcccgctgatggttttacgccataccgcggcccttccggctgcagataaagaaaagctggaacgtttttcgcaatctcacggtctttcactgtatctcgccccgcaaagcgagatactggaacagattcgcggggaagcgccctggtatacgtccgacggtctacgcttagtgttcagtccgcgcgactttattcaggtcaacgacggcgtaaaccagctcatggtgcgtacggcactggaatggctggatatccagcctcaggatcgcgtgctggatctcttttgcggcatgggcaactttaccctgccgctggcaaagcgcgcggcgcaggtcgtgggggttgaaggtgttccggcgctggtggcgaaggggcaagaaaacgcggcgctgaacgcgttgcataatgtgacgttctttcatgaaaatcttgaagaggacgtcacccgccaggcgtgggcgaagcacggttttgataaagttctgctcgacccggcgcgcgccggtgcggcgggcgttatgttacatataattaaattagcgccgcgtcgggtggtgtatgtttcttgtaatccggcgactctggcgcgcgatagcgacgttttattgcaggcgggatataccattcaacgcctggcgatgctggatatgttcccgcataccggtcatctggaatcaatggtgttgtttgagcacaagaatcattcaaatcgcagtgcagcggcatccacaggcgcaggcgactga

SEQ ID NO: 255131 - DNA, 2754 bp, Klebsiella pneumoniae
atgaccaactacagccttcgtgcccgcatgatgattcttattctggcgccaaccgttttgatcggtctgctgctcagtatattcttcgtcgcacaccgctataacgacctacagcgccagctggaagatgccggagccagtatcatcgaaccgctggcggtctccagtgaatatggcatgaatttgcaaaaccgcgagtcaatcgggcagctgatcagcgtgctgcatcgccgccattccgatattgtgcgcgccatttccatctatgactcgcacaacaggctgtttgtcacctctaactttcagctcgatcccggcgaacttcagctaccaaaaggggcgccttttccccgccgtttaagcgtgattcgtcacggcgatttgatgattttgcgcaccccaattatttcagaaagctattcaccggatgaatcaccgggaagcgatgccaagatgccggacaatatgctgggctacgtggcgctggagctggatctcaaatcggtgcggctgcagcagtacaaagagatcttcatctccagcgtgatgatgctgttctgcatcggcatcgcgctgatcttcggctggcgactgatgcgcgacgtgaccgggccgattcgcaacatggtgaataccgttgaccgcatccgccggggccagcttgatagccgcgtggaaggttttatgctcggcgaactggatatgctgaaaaacgggatcaactccatggcgatgtcgttggcggcgtatcatgaagagatgcagcataacgtcgatcaggccacctccgacctgcgtgaaacgcttgaacagatggaaatccagaacgttgagctggacctggcgaaaaaacgcgcgcaggaagcggcgcgaatcaaatccgaattcctcgccaatatgtcccacgagctgcgcactccgcttaacggcgtcattggctttacccgcctgacgctgaaaaccgatttaaataccacccaacgcgatcatctgaccaccattgagcgttcagcgaacaatctgctggccatcattaatgatgttctggacttctctaagctcgaagccgggaagctcattctggagagcattccgttcctgctgcgaaattcgctcgacgaggtggtcacgctgttggcgcattcggcgcacgataaggggctggagctgaccctgaacatcaaaaacgatgtgccggataacgtgattggcgacccgctgcgcctgcagcaaattattactaacctgatgggcaacgccattaagttcaccgaacatggcaacattgacgtgctggtggaacagcgggctataagcaattcaagagtgcaaatcgaagttcagatccatgataccggcatcggtattcccgagcgcgaccagtcgcgtctgtttcaggctttccgccaggcagacgccagtatttcccgtcgccacggcggaaccgggctggggctggttatcacccagcggctggtaaaagagatgggcggcgatatttccttccatagccagcctaatcgcggctcgacgttctggttccatatcagcctcgatctcaaccctaacgcggtacccgacagcgtaccgacccaatgtctggcgggtaaaaagctggcctacattgaggctaacgcagcggcggcgcagtgcaccatggagctgctggcgacaacgccgctggaggtggtctacagtccgacgatgactgccctaccggatgcccattacgatatcctgctggcgggcattccggtgtcgatacgcgatctgaaccagcatcgcgataagctggccagagcccgtaagcttgccgatcatctgctgctggcgctaccgtgccacgcccaggtgagcgccgaaacgcttaaacacgacggtatcgcagcctgtctgcttaagcccctgacctcaacgcgcttgcttccggcgctgacggccacctgccagacccagccgacgctcctgctgccgcgctccggtagtacaaagctgcccatgacggtaatggccgtcgatgacaatccggcgaatcttaagctcatcggcgctctgcttgaagatttagtccagcatgtcatcctctgcgacagcggccagaacgccgttgaacgagccagagaaatgcagcaggatctgattctgatggatattcaaatgccggaaatggacggcatccgcgcctgcgaattgatccatcagctccctcatcaacagcaaacgccggtgatcgccgtgacggcccatgctctggaagggcagcgagagaaattgctcagcgcggggatgaacgattatctggcgaagcccattgaggaagataagctctacaatctgctgctgcgctaccagccgggacaggccgctgcgccgcaggccgcggcggagccggttgacctaccggttaaccatgacatcaccctcgactggcagctggcgctacgccaggcggcgatgaaaccggatctggcgcgggaaatgctgcagatgctgctcgcttttatgccggaagtgcgtaacaaggtggaagaacagctggtgggagagcagccggaaggcctgctggatctcattcataagctgcacggcagctgtagctatagcggcgtgccgcgcctgaagaaactctgccacactctcgagagccagctgcgcgcgggcaccgccgccgaggagctggagccggagcttctggaactgctggatgaaatggacaacgtcgcgcgggaagcctgtaagctgcagggaatctaa

SEQ ID NO: 255132 - DNA, 1140 bp, Klebsiella pneumoniae
atgaagatagtgatcgcaccggattcatacaaggagagcctgagtgcgctggatgttgcaaccgcgatagagcaaggttttcgggaagtttattccgatgcggagtatgtcaaactgccggtcgccgacggtggcgaaggaaccgttgaagccatggttgccgcgacccagggatgccggatagcggtcaccgtcaccggtccgctcggcgagcccgtagaggctttttttggtctttcgggcgataagcagtgcgcgtttattgaaatggcggcggcaagcggtctggagagcgtaccgccggcgcgacgtaaccctcttctgacgacttcatggggtaccggcgagctgattcgccatgcgctggacgcgggcgtcaggcaaattattattggtatcggcggcagcgcgactaacgatggcggcgccgggatggtgcaggcgctgggggcgaaactgctgacccgggataaccagcagattggcgccggcggacaagcgctggagagcctcgcgcgcatcgacgtgagtgagttagataagcgcctcgccggatgccgcattgacgtcgcttgcgatgtcaccaatccgctgacgggcccgcagggcgcgacggcagtatttggcccgcagaaaggggcgacggcggagatgatcgccagcctcgataaggcgctggcccattttgctgagattatccatcgcgacttagagcttgatgtgttgcatcttgaaggcggcggcgcggcgggcggcatgggcgcgggcctgtatgccttttgcggggctaagctgcggccgggcattgagatcgtgaccgacgctttgcatcttgccgatatcgtggcggatgcggatctggtgatcaccggcgaagggcgcatcgacagccagacgattcacggcaaagtgccggttggcgtggcgcgggtggcaaaacgctataatctgccggttatcgcgattgccgggagcctgacggcggacgtcggcgtagtccatgagcacgggctggatgcggtattcagcgttatttattccatttgcaccctggatgaggcgctggaaaatgccgccgaaaatgtgcgcatgacggcgagaaacgtcgccgctgtgctgaaaatgggccaggtattatag

SEQ ID NO: 255133 - DNA, 1341 bp, Klebsiella pneumoniae
atgacaacgcaatcgagccctattatcaccgacatgaaggttatcccggtggccgggcaggacagtatgctgcttaacatcggcggcgcgcacaatgcgtactttacccgcaatattgtggtgctgaccgataacgccggcaataccggggtcggcgaagcgccgggcggcgaagtgatttatcagacgctggtggatgccatcccgacggtattaggccaggaagtcgcccgcctgaacaaagtggttcagcaggtgcataaaggcaaccaggccgcggactttgatacttttggtaaaggcgcctggacattcgagctgcgggtgaacgcggtggcggcgctggaggctgcgctgctggatctgctgggcaaggcgctcaacgtgccggtttgcgagctgctggggccgggcaagcagcgcgatgaggtgaccgtgctgggctatctgttctacgtgggcgatcgcaccaaaaccgatctgccctatctggaaagcacgccgggcaaccatgagtggtatcgtctacgccatcaggaatcgctgaacagcgaggcggtggtgcgcctggcggaggcctcacaggaccgctacggctttaaagattttaaactgaaaggcggcgtgctgcccggcgagcaggagatcgaaaccgcccgcgcgttgaaaaagcgttttcccgatgcgcgcattacggttgatcccaacggcgcctggctgctggatgaagccatcgccctgtgtaaagggctgaacgaggtgctgacctacgcggaagacccctgcggcgccgaacagggcttttctggccgtgaagtgatggcggagtttcgccgcgccaccggtctgccggtggcaaccaatatgatcgccactaactggcgcgaaatgggccacgcggtgatgctgaatgccgtggatattccgctggccgatccgcacttctggaccctttccggcgcggtgcgcgtggcgcagctgtgcgatgactggggcctgacctggggctgccattccaataaccactttgatatttcactggccatgttcacccacgtcggcgcagcggcgccgggtaaccccacggccatcgatacccactggatttggcaggagggagattgccgcctgaccaaaaatccgctggagattaagcacggaaaaattgctgttccggacgcgcctggactcggcgtcgagctggactgggagcaggtgcagaaagcgcatgaggcgtataaaaagctgcccggcggcgcgcgtaatgacgcaggcccaatgcagtacctgatccccggatggacttttgaccgtaaacgccccgttttcggccgtcactga

SEQ ID NO: 255134 - DNA, 1359 bp, Klebsiella pneumoniae
atgagttcattaagtcaggcggcaggcggcgctgaaaagcgcaccaatgctcgctactggatagtggtgatgttgtttatcgtcacatccttcaactacggcgaccgcgccaccttatccattgccggttcggagatggccaaagatattggtcttgatgccgttggcatgggctacgtcttttccgcgttctcctgggcctacgtgatcggccagatcccgggcggctggctgcttgaccgcttcggttctaaacgcgtctacttctggtccatttttatctggtccatgtttaccctgctgcagggcttcgtcgatatctttagcggcttcggtattatcgtcgcgctgtttaccctgcgttttcttgtcggcctggccgaagcgccttccttccccggcaacagccggatcgtcgcggcgtggttcccggcgcaggagaggggcacggcggtggctatctttaactccgcgcaatattttgccaccgttatttttgcgccgatcatgggttggctgacgcatgaggtgggctggtcgcacgtgttcttctttatgggcggtctcggcattatcatcagctttgtctggctgaaggtgattcatgaacctaaccagcatccgggtgtaaaccaaaaagagctcgattacatcgccgcaggcggcgcgctgatcaatatggatcaggcggcggccaaagctaaggtgccgtttagcgtaaaatgggggcaaatcaagcagctgctgggttctcgcatgatgattggcgtctatatcggccagtactgcattaacgctttgacctatttctttatcacctggttcccggtttatctggtgcaggcgcgcggcatgtcgatcctgaaggccggttttgtcgcgtcggttccggcgatctgcggtttcgcgggcggggttctcggcgggattatttccgactggctgatgcgtcgtaccggctcgctgaacatcgcacgtaaaacgcctatcgtcatggggatgctgctgtcgatggtgatggtgttctgtaactacgtcaacgtggagtggatgattatcggcttcatggcgctggccttcttcggtaaaggcatcggtgcgctgggctgggcggtcatggcggatacggcgccgaaagagatcagcggcctgagcggcggtctgttcaacatgttcggcaatatctccggtatcgtgacacccattgctatcggctacatcgttggcaccaccggttcgtttaacggcgcgctgatttatgtgggcgttcatgcgctggtggcggtgctgagctatctggtactggtgggcgatattaaacgtatcgaactgaaacctgtcgcaggaaaatcatcatga

SEQ ID NO: 255135 - DNA, 444 bp, Klebsiella pneumoniae
atggcagaagtcggaatttttgtcggtacgatgtatggaaattcgctcctggtcgccgaagaggcgcaggctattttgagcggactggggcatcaggcgaaagtctttgaagatcccgaagtcaaagactgggagtcgtataccggaaaatatgcgctggtggtgacatcgaccaccgggcagggcgatttaccggacagcattgtgcctttatacgaaggcatcaaagatatgtatcagccgcatttgcgttatggaattattgccctgggcgatagcacctacgctaacttctgcggcggcggtttgaagtttgatgcgttattgcaggaacagggcggcacgcgcgttggcgatatgctgacgatcgatgccagcgaagatccggaacctgaaagcgttgctaacccatgggtagcgcagtgggcgtcgctgcttgattaa

SEQ ID NO: 255136 - DNA, 795 bp, Klebsiella pneumoniae
atgctggagattttatatcaggacccgtggctggtagcggtgaacaagccttcgggctggctggtgcatcgtagctggctggatcgtgatgaaaaagtagtggtgatgcagaccgtgcgcgaccagataggccagcacgtgttcaccgctcaccgcctcgacaggccgacttccggcgtgctgctaatgggactgtcgagcgaagcgggaagactgttgtcgcagcagttcgagcagcatcaaatgcagaaacgctatcatgcgatagcccgcggctggttgagcgaagaagcggagcttgattatcctctggttgaggagctggataaaattgccgataagttcgcccgcgaaaataaagatccgcagccggcggtcacccattatcgcggcctggtgacggtagaaatgccggtggcgaccggacgttatcctaccacccgctatagcctggtggagctggaaccgaaaaccggacgtaagcaccagctgcgccgtcatcttgcccatcttcgccatccgattatcggcgacagtaaacacggcgatctgcggcagaatcgcagcgcggccgaacactttggctgcgatcggctaatgcttcatgccagccagctatcgttaacgcatccttttaccggtgaaccgctggttattcgcgctggccttgacgacgtctggatgcgcgcgctgtcgcagtttggctggcgcggccttctcccgttaaatgaaagggttgagtttgccgacgactgcggtcaggatgaagagatacaggtcacttcagggagatag

SEQ ID NO: 255137 - DNA, 330 bp, Klebsiella pneumoniae
atgactcttgaccatcgcgtgcgcgagcgcctgctcgccattgaagcgctgctgcgcgaaacggaacactggcaggatagcgctcccgacagccgcgcgtttgccagcgaacagccgttttgcctcgacaccatggagccgcttgaatggctgcagtgggtattaataccgcgcatgcatcagcttctggaaagcggcatgccgctgccgcaaaatttcgccgttgccccctactatgagatggccctggataatgctcatcccgtgcgcgagcgggtgctggccgagctgcttctgctggatgcgctgtttgccggcggcgacgcctga

SEQ ID NO: 255138 - DNA, 579 bp, Klebsiella pneumoniae
  misc_feature (251)..(260): n is a, c, g, or t
gtggatcagcaaaccgcagaagcgctacaagcatttacccaacgttattgtgaggcgtggcagcagcagcgctccagcctgccgcgtagcgaagagctttatggcattccgtcgccgtgcatcagcgccacggatgatgatggcgttttctggcagccgcagccgttttctttagaacaaaacattaacgcggttgaacgggcgctggagattgtggtacaacaaccgcttcatgcttattataccactcnnnnnnnnnngcttcatgcttattataccactcagtttgccggcgatatgcaagcacgttttgccgatgagagcatgacgctgctgcaaacctggagtccggacgacttccagcgggtgcaggaaaatctgattggccatctgctggtgcaaaagcgtttgaagctgtctcccacgctgtttatcgccacgctggacagcgaactggacgtcatttcggtctgtaatatgaacggcgaagtgatcaaagaaacgctcgggacccgtaaacgtacgaccctttctccctcgcttgcgagtttccttaattcccttaagcccgttctgtaa

SEQ ID NO: 255139 - DNA, 846 bp, Klebsiella pneumoniae
atgtcttcttacgataaccaccaggcgctcgccggcctgacgctcggtaaatcaaccgattaccgcgatacttacgacgccagcctgcttcagggcgtaccgcgcagcctgaaccgcgatccgctgggcctgcacgccgatagcctgccgtttcacggcgccgatatctggacgctgtatgaactctcctggctgaatgcgaaaggcctgccgcaggttgccgtgggccacgttgagctcagcgacactaccgtgaatctggtggaatcaaaaagctttaagctctatctcaatagctttaaccagacgcgttttgccgactggcaggaggtcgaggtgacgctggcgcgcgatctcagcgcctgtgcgcaaggggaagtcaaggtgtcgctgtatcgcctcgatgaactcgaaggccagccggtggcgcatctgcacggcacctgtattgacgatcaggatattgaaattgataactatcagttcagcgctgattacctgcaggatgccgctggcggtaaagtggttgaagagacgctggtcagccatttactgaaatccaactgcctgattacccaccagcccgactggggttcggtacagatccgctatcgcggggtaaaaatcgatcgcgaaaagctgctgcgctatctggtttcgttccgccatcacaacgaattccacgaacagtgcgtagagcgcatcttcagcgatattcagcgtttctgccagccggaagccctttccgtttatgcgcgctatacgcgacgcggcggcctggacatcaacccgtggcgcagcaacaccgattttgttccggccatcggccgcctcgctcgccaatag

SEQ ID NO: 255140 - DNA, 1368 bp, Klebsiella pneumoniae
ttgattacacatgttagcccgcttggttcaatggatatgctgtcgcagctggaagtggatatgcttaaacgcaccgccagcagtgacctgtatcaactctttcgcaactgctcgcttgctgtgctcaactcggggagcctgaccgataacagcaaggagctcctgtctcgttttgaaaacttcgatattaacgtgctgcgtcgcgaacgcggcgtgaagctggaactgattaacccgccggaagatgctttcgttgacgggcgtattatccgttccctgcaggccaacctgtttgccgtactgcgcgatatcctgtttgtctacggccagatccataacaccgtccgcttcccgaatctcgatcttgaaagctcggtgcatatcaccaacctggtgttctctattttgcgcaacgcccgcgccctgcacgtcggcgaagcgccaaatatgattgtctgctggggcggccactcgattaacgaaaacgaatatctctacgctcgccgcgtcggcactcagctgggcctgcgtgagctgaatatctgtaccggctgcgggccgggcgccatggaagcgccgatgaaaggcgctgccgtcggccacgcgcagcagcgctacagagacagccgctttatcggcatgaccgagccgtccattatcgccgccgagccgcctaacccgctggtcaacgagctgatcatcatgccggatatcgagaaacgtctggaagccttcgtgcgcatcgctcacggcattatcatcttcccgggcggcgtaggtacagcggaagagctgctctatctgctgggcattttgatgcatccgtcgaacaagtcgcaggttctgccgctgattcttaccgggccaaaagagagcgccgattatttccgcgtgctggatgagtttatcgtccatacgctgggcgaatccgcccgtcgccactatcgcattatcgttgacgacgccgctgaagtagcccgccagatgaaaaaagcaatgccgatggtgaaagagaatcgtcgcgagaccggcgacgcttacagcttcaactggtcgatgcgcattgctccggatctgcagatgccgttcgatcctacccatgagaatatggccaatctcaaactctatccggaccagccggtagaagtgctggcagcggatctccgccgcgccttctccggtatcgtcgctggtaacgtcaaagaggtgggcatccaggctatcgaaaaattcggtccgtataaaattcacggcgacccggcaatgatgcgccgcatggacgatctgctgcagggcttcgtcgctcagcatcgtatgaagctgccgggcggcaccgcctatatcccctgctacgaaatctgttcctga

SEQ ID NO: 255141 - DNA, 1290 bp, Klebsiella pneumoniae
atggaaaccactcaaaccagcaccatcgttacggatgctacccgtagcggttggcgtaagacggacaccatgtggatgctgggcctgtacggcacggctatcggcgcgggcgtactgttcctgccgatcaacgccggcgtcggcggtatgatcccgctgatcatcatggcgattctggcctttccgatgaccttcttcgcccaccgcggaatgacccgtttcgtgctgtccggtaagaacccgggcgaagacatcaccgaagtcgtcgaggagcacttcggcgtcggcgcaggtaaactgattaccctgctttactttttcgccatctacccgattctgctggtatacagcgtggcgatcaccaataccgttgaaagctttatggcgcaccagttgcacataacgccgccgccgcgcgccattctttccctgatactgattgtcggcatgatgactatcgtgcgcttcggcgagcagatgatcgtcaaagcgatgagcgtgctggtattcccgttcgtggttgcgctgatgattctggctctgtacctgatcccgcagtggaacggcgcggcgctggaaaccctctccctgagtagcgctaccgcaaccggcaacggcctgtggatgaccctgtggctggcaataccggtgatggtattctcttttaaccactcgccgatcatctcctccttcgccgttgctaaacgcgaagagtacggcgaaggcgctgagaaaaaatgctccagcattctggcccgcgcgcacattatgatggtgctgaccgtcatgttcttcgtcttcagctgcgtactgagcctctccccggcggatctggcggcggcaaaagagcagaacatctcgattctgtcttacctggcgaaccactttaacgcgccaatcatcgcctggatggcgccgatcatcgcgatgatcgccatcactaaatccttcctcggccactatctgggcgctcgcgaaggctttaacggcatggtgattaaatccctgcgcggtaaaggcaagtccatcgaaatcaataaactgaacaaaatcactgccctgttcatgctggtcaccacctggattgtggcaacgctgaacccaagcatcctcgggatgatcgaaaccctgggcggcccgatcattgcgatgattttgttcctgatgccgatgtacgccattcagaaagtcccggctatgcgcaaatacagcggccacgtcagcaacgttttcgtggtgattatgggcctgattgctatctccgcgattttctactctctgtttagctaa

SEQ ID NO: 255142 - DNA, 972 bp, Klebsiella pneumoniae
  misc_feature (890)..(899): n is a, c, g, or t
atgatcagcgtattcgatatttttaaaatcggcattggcccttccagctcccacaccgttggaccgatgaaagcgggcaaacaattcacggacgatcttattgagcgcgggctgctctccgaggtgaccaaagtcatcgtcgatgtctacggctccctttccctgaccggtaaaggccaccataccgacatcgcgattattatgggactggcgggcaacctgccggataccgtcgacattgacgctatccccagttttatccaggacgtcaacacccatggccgcctgatgctggcaaacggccagcaggaagtggcgttcccggtcgatcagtgcatgaatttccatgccgacaatctgtcgctgcatgagaacggcatgcgaattaccgccctcgccggcgaccaggttctctacagccagacgtactactccatcggcggcgggtttatcgtcgacgaagcgcatttcggcgtcacccgcgaagcgccggtcgccgtaccttttccatataaaaacgccgccgacctccagcgccactgccgtgaaagcgggctgtcgctttccggtctgatgatgcaaaacgagctggcgctgcacagtaaagaagcgctggaacagcactttgccgccgtctgggaagtgatgagcagcggcattgagcgcggcatcaccaccgagggcgttctgccgggcaagctgcgggttccccgccgcgccgccgcgctgcgccggatgctggtaagccaggacaacaccagcagcgacccgatggcggttgttgactggattaatatgttcgccctggcggttaacgaagagaacgccgccggcggacgcgtcgtgaccgcaccaaccaacggcgcctgcggcatcgtgcccgcggtacnnnnnnnnnngcaccaaccaacggcgcctgcggcatcgtgcccgcggtactggcctactacgacaaatttatccgcaaagtga

SEQ ID NO: 255143 - DNA, 492 bp, Klebsiella pneumoniae
gtgcccgcggtactggcctactacgacaaatttatccgcaaagtgaacgccaactcgctggcacgctatatgctggtcgccagcgccattggctcactttataagatgaacgcctcgatttccggcgccgaagtgggctgccagggcgaagtcggcgttgcctgttcgatggcggcggccggactggcggaactgctgggcggcagcccgggccaggtgtgcatcgccgccgaaatcggtatggagcataacctcggtctgacctgcgacccggtcgccggtcaggtgcaggtgccgtgcatcgagcgtaacgctatcgctgcggttaaagcggtcaacgccgcgcgcatggcgctgcgccgcaccagcgagccgcgggtgtgcctcgataaagtcatcgagaccatgtacgaaacgggcaaagatatgaatgccaaatatcgtgaaacctcacgcggcggcctggccatgaagattgtcgcctgcgattaa

SEQ ID NO: 255144 - DNA, 1455 bp, Klebsiella pneumoniae
atgaaccagaaagccgccaggctgaccccagaagaagcgctcacgcaactcgaagcgctctatgaaaaatcggtcaatgcgctgcgtaaagctatcggcgaatatattcaccataatacgcttcccgataatagcgcccgtgcggaaggactgttcgtttacccggagctgtcggtatcgtgggacggctcggagcataaagccttaaaaacccgggcctggggccgttttacccataccggctgctataccaccaccattaccaaccctaaactgtttcgcgcctatttgctggaacagctcaccatgctgtatcaggattacgatgcctgcattaccgtcgggctatcgcagcatgagatcccctatccgtacgtgattgatggctccgagctcacgctcgaccgttcaatgagcgccggcttaacgcgttttttccccaccaccgagctgtcgcaaattggcgatgagactgccgatggcctgttccattccacggaatactatcccctatcgcacttcgacgcccgccgcgtcgatttctcgctggcgcgcctgcgtcattacaccggcacgccggttgagcatttccagccgtatatgctatttaccaactatacccgctacgtcgatgagttcgtacgctggggctgtagccaaattctcgatcccgatagcccctatatcgccctctcctgcgcgggcgggatctggataacggcggacacagaggccccggaagaggcaatttccgatctggcgtggaaaaagcatcagatgccggcctggcacctgatcactaaagagggtcaggggatcacgctgattaacattggcgtaggcccggctaacgctaaaaacatctgcgaccatctggcggtgctgcgcccggacgtctggctgatgattggccactgcggcggcctgcgcgaaagccagacgattggcgactacgtgctggctcacgcctatctgcgcgatgaccatgtgctggatgcggtgctaccgccggatatccctattccgagcatcgccgaagttcagcgcgcgctttacgacgccaccaagcaggttagcggaatgcccggcgaagaggttaagcagcggctgcgtaccggaacggtggttaccaccgacgatcgtaactgggaactgcgctactcggcctcggcgctgcgctttaacctcagccgcgcggtggctatcgatatggaaagcgcgaccattgccgcgcagggttatcgcttccgcgttccctacggtaccctgctgtgcgtctccgataagccgctgcacggtgagatcaagctgccgggacaggctaaccgcttctatgaaggggcgatttccgaacatttgcagattggtattcgggcgattgatctgctgcgcgccgaaggcgaccatatgcattcgcgcaagctgagaacctttaacgaaccgccgttccgttaa

SEQ ID NO: 255145 - DNA, 258 bp, Klebsiella pneumoniae
atggaatggtggattaaaaaactacgcgaggccacaacgtctacacatacctgggcggttctgcaaagcggccagttaacgattgtggcggaactgactccctgcgcccggcgtctacaggaaggcgataagctgacgccgttggcggacgcgctttactgcattaataacgataaaaccctcaccgtaaaggtgctcaacgccacccattttagcgccgatcgctgggccgctatcgtcaatgcccccaccggttaa

SEQ ID NO: 255146 - DNA, 1542 bp, Klebsiella pneumoniae
atggcaatgatgcgttttacccggctgctgaataagtcgggcttaagaatggtctcgatggcgaaaaaagccatcattggtctactggtggtggtggtggtcttttttattggccgcatttacgaatcgcagcgcggcccggcgctgcaccgctggcacacctggacggcgaatgaaatgaccgccagcgagattgaccacgccacttttgctgactaccagacgcgggaaacgacgattttccgcgatatgaaaagccacattaccgatgcgctgagcgacgatgaaaaaacggcgattaaccgtttttacgcacaaagcctggtctatccggataagtttcatcccgactggaatcgctcctttattttgctgccgcagggcaaaccgcgcggcgcggtggtgctgctgcacggcctgacggactctccctatagcgtgcattatctggcgcagcgctatcagcagcagggatttgtcgccgtcgccccgcggctgcccggacacggtacggctcctggcgcgctcaccgccgtggaccgcgaggcgtggatagcgacaacccgtcttgcggtgcgcgaagcgacgcgcctggccggggataacgtgccgctgcacgtggttggctactccaacggcggggcgctggcgctaaaatacgctctcgatagcctggaggataaagcgctgcgccggccgcagcagataatcctgttgtcgccgatgattggcgtcaccgcctttgcgcgttttgccggactggccggtttaccctcggtatttccggcttttgcccgcgcggcatggctgaatatcgtcccggaattcaatccctataaatacaattcgttcccggttaaggccgcaaggcagtcatggctgttgtcgcaggcgctgcagcagcaaatcgtgcaggaggcgcaaaatcatcggctttccgaactggcgccggtgttaacgtttcagtcggtgatggactccacggtgagcacccgggcggtggtagagtcgctgtatcgctatctgccggataacggaagcgagctggtgattttcgatattaaccaggcggcgaatctacgcgcgctattccgtccctcgctctattcggcggtgaatacgttattgccgccggcgccgcggccctatgccaccacggtgattactaacgctgcccccgacacctacgagacggtggcccgcaccacgcttgccggaacgcgaagcgaaaccgtgacgccgctgcatcttgcctggccgcaggatatgtattcgctgtcgcacgtggcggtgccgttcccgctgaccgattcgctctatggccgggaaccggcggagaaaaatcgctacgggatcagcatcggcacgatctctttgcgtggggaaacctcgacgctgagcgtcgggctggatacgctgatgcgcgtgacctccaacccgtttttcccctggatgatggtgagaattgaccatcatattgcctgcagcgagcaggctgatgtcgctgcctgcctccgtccggagccggtggcatcagaatag

SEQ ID NO: 255147 - DNA, 933 bp, Klebsiella pneumoniae
atggatttcatcagcattattatgtcggcgggaaaaacctccgtcgatgtggccctttatacgctgctgccaatcatggttgtcatgctcatcgtcatgaaatatctggaagtacgcggggtgctggatgtcatcgtgcgctggctcgcgccgctgcttaagccgttcggcttaaccggaatgagcgcatttgcgttgattcagatgaattttgtcagctttgccgccccgctggcgaccctcgccattatggataaacgcggcgcctcggaccggcaaatggccgctacgctggcaatgctgtttgccatggggcaaggcaacgtattctatccattaacgccctttggcctgcactggctggcctctatcgttatctccattgtcggcggactgtgcgccgccgcggtgacctggcatatcaccggccgcaggctatcgatggttgaaaacgcgcgggccgaagcgctgcccgaggcggaacagaacagccaggggattatcgccgtgattaacagcgccggctctgacgcgattcgcctggcgctcggcgcggtgcccatgctgatcctgtcgctggctatcgtcgggtttatgcaggcggcgggcctgattgagatgctccagcgtctgctcctgccgctgctgctgtggctgaacatcccggttaacttcgtgctcccggcgctggtcaaatgcgtggctggtgggacggcctatttcggcgtgatctctgaactcgtgcagcagggaaaagtgaccatcagccagatcaacgcctcggcaggtctgttagtacagacgtttgacctcccgggtatcggtatctttctgggcgtcagctcgcgcttcgtgcgcctgttccgcttcgccgccgccggcgctatcgccgggatcgccatccgcaccgtgatgcacctgacgctattctga

SEQ ID NO: 255148 - DNA, 432 bp, Klebsiella pneumoniae; identical to SEQ ID NO: 176579

SEQ ID NO: 255149 - DNA, 930 bp, Klebsiella pneumoniae
atgtcgcttcgcaactcttgtttcgcttattcgccgaaagggcggatttttatcgccgcgctggttaccaccttgtatgctcttaacgcttacgccaaacccgatatgagcccgctggggccgaatatcgccgaccgcggttccgcgtattatcatttcaacgtcacgaccttcgattcctccgatggtgaacgacattataaggtctggacggcgataccgaatacggcgccgcccgcgcaggggtatccggttctgtacgccctggacggcaacgcggtgatggaccggttgtccgacacgctgctcgaaaagctgacgcataaaacgccgcccgtcattgtggccattggctatcaaacgaatttgcccttcgatcaaactgcccgagcctatgactatcggccgaaagtcgaagaggatcccgccgataaccgctgggatcggcggaaaagcggcggtagcggggcgtttcgccgcctcttagaggataccattatggaaaaagttgagcgtgggatcgctatcaacccgcagcgacgggctatctgggggcactcctacggtggattatttgttattgatgcctggctgacgtcatcccgcttccagctctatttctctgccagtccttctctgggaagaggtcaagccgcgctgttagacagaatggccggggcaaaaggcgaggcgtttaatcggaacgccttattcctgatggagggcgcggttgcgacgcagcgcggttcttccgccggggcagtggatacgcgcagtaaagttcagcagacggtttcccggctcaggaaaaatggcgttgcggtcagctggtggccttatcccggcctgtcgcacggggcaatgttcagtgcctcgttgcaaagcgcgctgctgacgatgagcggttttccccggggctcgggcaattag

SEQ ID NO: 255150 - DNA, 408 bp, Klebsiella pneumoniae
atgaacgaacaatttgacggtaacggcatttttcccaaaggggagaaaaatgaggcctatgcgcagtattttcagggcaccagctacctgaatatgctctccacggaaggggtcaatatcggtaacgtggtctttgagcccggctgccgtaaccactggcatattcaccataaaggcgggcagatcctgttggtgacgggcggacgcggctggtatcaggagtggaatcaaccggcgcgagaactaaccgcgggcgatgttgtgaatattcccgcaggcgtcaagcactggcacggcgcggccgccgacagctggtttgcccatattgccgttgccgtccctgccgaaggtgcgtctaacgaatggctggagacggtcgccgacgacgcctatcgtcagctgccttaa

SEQ ID NO: 255151 - DNA, 918 bp, Klebsiella pneumoniae
atgatgagcaaagaaaaactcaacgatctgcaggcctttgtcaccgtagctcaggagcgaagttttacccgggcggctgcaatgctgggggtttcccggtcggcattgagccatacgctgctgggtctggaagagcgtctgggggtgcggttgttaatccgcaccacgcgtagcgtgtcgcccaccgatgccggaaatcgcctgctggtcgtactggcgccgcggctgaatgaaatagaaaatgaaccggcttcgctgcgcgcttcacgggataaacccgccggcacggtacgcatcaccgccaacgatcatgccattgtcaccgtgctgtggccccgcctgcatccattattaaatcgatatccggatatccatattgagttcagcgttggctatgagctgaccgatattgccgccgggcgcttcgatgccggcgtgcggatgggcgatcaggtggacaaagatatgattgcggtgcgcattacgcccgatgtgcagatggcggtggttgccgcgcccggctatctttccggcaaagcggcggtggcaaggcctgaagatctgatggcacacaattgcatcaatttgcgtttgcccacccacggcgcgctttacgcctgggagtttgcaaagggcagccaaaaaaccagcgttcgcgtcgaagggcaaaccgtttttaataatacctttttgatgattcaggccgctttggacggggcgggaattgcctatgttcctcacgacttagcggcgaaatatatcgctaaccgacaactggtgccgctgctggccgactggtgtccggttttcccggggtactatctttattatcctggccggaatcatcttccgacggcgtttacgctggtggttgacgccctgcgctggcaggcagtaaattgcgcagcaaaaaggtga

SEQ ID NO: 255152 - DNA, 798 bp, Klebsiella pneumoniae
atgtttaaatggccctggaaagtagatgaagagtccggcaacgcggaaatcccctgggaaaaggcgcttgccatccctgtgttagccaacctctccaaccatgagcagcagcagctggtgcaaatggcttcccgctttttgcagcaaaagcgtctggttgcattacaggggcttgagctcactcacctgcagagcgcgcgtattgcgctactgttttgcctgccggttctcgaactggggatcgagtggttagatggttttcacgaggtgctcatctaccctgctccgttcgttgtcgacgacgaatgggaagatgatatcggcctggtgcatagccagcgaatcgtacaatcagggcaaagctggcaacaagggccgatcgttctcaactggttggatattcaggactccttcgacgcttctggcttcaatctgattatccatgaagtggcgcataagctggatacccgcaatggcgatcgcgcaagcggcgtacccttcattccgctacgcgaagtcgctggctgggaacacgatctccatgcagcgatgaacaatattcaggatgagatcgatctggtcggcgaaagcgccgccagtattgacgcttacgcggccagcgaccctgccgaatgttttgcagtgctctctgaatactttttcagcgcccctgagctgtttgccccacgctttcccgcgctttggcagcgtttctgccatttttatcgccaggatccgctggagagattacgcgagaatagcccgcaggaggatggcgatagcccggcagtacactaa

SEQ ID NO: 255153 - DNA, 2748 bp, Klebsiella pneumoniae
atgtttaacccgggcgacaccatcaccagccatgaaggctggcaactccaggttgacgaagttaatgaagagaacggcctgctggcctacaccggcacccgactcgacacccaggaagccaacgttaccctgcgtgaagtgctgctcgacagcaagctggttttcagcaaaccgcaggaccgtctgttcgccggacagattgaccgtatggatcgttttgctctgcgctatcgcgcgcgcaaattccagagcgaacagtaccgcatgccgtggagcggcctgcgcggtcagcgcaccagcctgatcccgcatcagctgaatatcgctcatgacgttggccgccgccatgcgccgcgcgtcctgctggcggacgaagtgggtctgggtaaaaccatcgaagccgggatgatcctgcatcagcagctgctctccggcgccgccgaacgcgtactgattgtcgttccggaaaccctgcagcaccagtggctggtggaaatgctgcgccgctttaacctgcgcttctcgctgtttgacgatgagcgctatgccgaagcgcagcacgatgcaattaacccgtttgaaaccgaacagctggtgatctgttcgctggatttcgtacgccgcagcaagcagcgtctggaacacctgtgcgaagcggagtgggatctgatggtcgttgatgaagcgcaccacctggtctggagcgaagacgccccgagccgggaatatcaggcgattgaacagctggccgaatgcgtgccgggcattctgctgctcaccgcgacgccggagcagctgggaatggagagccatttcgcccgtctgcgcctgctcgaccccaaccgtttccacgacttcgcccagtttgttgaagagcagcagaactaccgtccggttgccgacgccgtcgccctgctgctggccggcaataagctgaacgacgccgagctgaacgcgctgagcgatctgatcggcgaacaggatatcgagccgttattgcaggccgccaacagcgatcgcgatgatgcccaggccgctcgtcaggagctggtgtcaatgctgatggaccgccacggtaccagccgcgtgctgttccgcaatacccgtaacggtgtcaaaggctttccgaaacgcgagctgcatacgattcgtctgccgctgccgacccagtaccagacggccatcaaggtttccggcattatgggtgcccgcaaaacggccgaagagcgcgcccgcgacatgctctatccggagcagatttatcaggaatttgaaggcgataccggtacctggtggaactttgacccgcgcgttgaatggctgatgggccatctcaccagccaccgctcgcagaaagtgctggtgatctgcgctaaagcggccaccgcgctgcagctggagcaggttctgcgcgagcgcgaaggcatccgtgccgcggtgttccacgaagggatgtcaattatcgaacgcgaccgcgccgccgcctggttcgccgaggaagataccggcgctcaggtgctgctgtgttctgaaatcggctccgaaggccgcaacttccagttcgccagcaacctggtgatgttcgacctgccgttcaacccggatctgctggagcagcgtatcggtcgtcttgaccgtatcggccaggcccacgatattcagatccacgttccgtatctggaaagaaccgcccagtcggtgctggtgcgctggtatcacgaaggtctggacgcgttcgagcacacctgcccgaccggccgtaccgtttacgacagcgtgcataatgaactgattaactatctcgccgcgccggaaaataccgacggcttcgacgacctgatcaaagcctgccgccagcagcatgaagcgctgaaagcgcagctggaacagggccgagatcgtctgctggagatccactccaacggcggagaaaaagcccagcagcttgcggaaagcattgaagaacaggatgacgacaccagcctgatcgctttctccatgaacctgttcgatattgtcggcatcaaccaggacgaccgtggtgaaaacctgattgtcctgaccccctccgaccatatgctggtaccggacttccctggcctgccggaagatggctgcaccattacctttgagcgtgacgtcgccctgtcccgcgaagacgcgcagttcatcacctgggagcatccgctgattatcaacggtctggatctgatcctctccggcgataccggcagcagcaccatctcgctgctgaagaacaaagcgctgccggtaggtaccctgctgctggagctgatttacgtcgttgaggcccaggcgccgaagcatctgcagctcaaccgcttcctgccgccgacgccggtgcgcatgctgctcgacaaaaacggcaacaaccttgccggtcaggtggagttcgaaagctttaaccgtcagctgagcgcggtaaaccgccacaccggcagcaagctggtcaacgccgtccagcaggacgtccacgccattttgcagcagggcgaaggccaggtggccagagcggcccaggccctgatcgacgccgcgcgtcaagaagccgacgataagctgtcggccgaactgtcgcgccttgaagcgctgcgcgccgttaacccgaacatccgcgatgatgaactggcggctatcgagagcaaccgtcagcaggtcatggacgcgctggcgcaggcgggctggcgcctggatgctctgcgcttaatcgtggtcacccaccagtaa

SEQ ID NO: 255154 - DNA, 660 bp, Klebsiella pneumoniae
atggcgatggaaaactacaatccgccgcaggatccctggctggttatcctctaccaggatgagcacattatggtggtcaacaagccaagcggcctgttgtccgtaccgggccggctggctgagcacaaggacagcgtgatgacgcgcattcagcgcgatttcccgcaggccgagtcggtgcaccggctggatatggcgaccagcggcgtgattgtggtagccctgaccaaagcggcagagcgcgagcttaagcggcagttccgcgaacgcgagccgaaaaagcagtacgtcgcccgcgtctgggggcatccggaaaaagccgagggtctggtggatttaccgctgatttgcgactggccgaaccggccaaagcagaaggtgtgttacgaaaccggcaaagcggcgcaaaccgagtatgaagtgctggagttcgcgacggacaacaccgcccgcgtgcgcctgaagccgattaccgggcgttcgcatcagctgcgcgtgcatatgctggcgctgggccatccgattcttggcgaccgcttttatgcgtcgccggaagcgctggccatggcgccgcgtctgctgctgcacgctgaaaccctgaccatcacccatccgtcattcggtaatacgatgacgttccgcgcgccgatcgacttctga

SEQ ID NO: 255155 - DNA, 540 bp, Klebsiella pneumoniae
atgtcagtggatactctcgcccgtgagggcgtaagcatggaagcgctgctggcggcgaaagagcagcgcgccgcgcgccaggccgactggttagcccattatcagcggccggtgatttcgctgaccctggtgaccccgggcgcggtgaaagacagcattcgctaccgtaatatgatgggcgtagcgctgcaggcctgcgatcagatgctgtggaaacaccgctggcagacgctggatcgccaggtgctgtggctgccgaccggtccggaagcgctgtggtgcgtcgatcacgccgccagtgaaatcaaagccttctgtaccgatcttgagcatacccatccgctgggccgcctgtgggatatcgacgttatttgcccgaaagatggcctggttggccgtcagtcaatgggggaaaaccagcgccgctgcctgctgtgcgatgaacctgcgcacgcctgcgcgcgcagccgccgtcatgacaccggggaggttgtcgcccgcgttgagcagatgattgatgcgtggtttgcccgcgactaa

SEQ ID NO: 255156 - DNA, 1356 bp, Klebsiella pneumoniae
atgagcaccacagacaatgcattctctgcaaccatcgaccctatcaataccccgaaagcgccgcttaagcagcgctggtggcatatcctcgataactggaaagtcggtattatcccgctgccgctctttctgctggccggcggcctgattgccctggactgtttaggcggcaagctgccgagcgatatcgtcgtgatggtggcgacgctggcctttttcggctttgcctgcggtgaattcggcaaacgcctgccggttctgggtaagcttggcgcagcggccatctgcgcgacttttattccttctgcgctggttcattacggcctgctgccggaggtggtggtggaatcgaccaccaaattctataagtcgaccaacattctttatctttatatctgctgcattatcgtcggcagcattatgagcatgaaccgcaccacgctgattcagggctttctgcggattttcttcccgatgctgtgcggagaaatcgtcggcatggtcgttggcgtcggcgtcggtaccgcgctggggctggagccgttccaggtattcttctttatcgtcctgccgatcatggccggcggcgtcggcgagggagcgatcccgctgtcgattggctacgccgcgctgatgcatatggatcagggcgtggcgcttgggcgcgtgctgccgatggtgatgctgggcagcctgacggcgattgttatctccggctgtttaaatcagctgggcaagcgttttccgcatttgaccggtgagggacagctgatgccgaaccgccgcaacgagacgcatcgcgaaacgcccgtcgagggcaaaatggacgtaacgacgctggcctccggcgcgctgctggcggtgctgctctatatgctgggcatgctggggcagaagaccatcggcctgcccgcgccggtgggcatgctgttcctcgcggtgctgctgaagctggtgaacggcgtctctccgcgcctgcaggagggatcgcagatggtgtataagtttttccgcacggcggtcacctatccgattctgtttgccgtcggcgtggcgatcaccccgtggcaggagctggtcaacgcgtttaccgtaaccaatttgctggtgattatcagcaccgtaacggcgctggtggcgaccggtttcctggtcggcaaaaagattggcatgtacccgattgacgtggcgattgtctcctgctgccagagcggtcagggcggtaccggcgacgtggcgatactgacctccggcaaccgcatgaacctgatgccgttcgcgcagatcgcaaccaggatcggcggcgcgattaatgtttcgctggggctgctgttcctcagtcactttctggcctga

SEQ ID NO: 255157 - DNA, 1626 bp, Klebsiella pneumoniae
atgaaggtttcatttcaatttaagctgttcatttcactggtcgcttttttctcagtgcttttcgcgctgctgggcgtgtattactattttgacgccagccgccagctttatcaggaaatgagcgcccgcgcgaaaatacaggcgcaagaaattgccctgatgccggatttacgccaacaggtcgcgcgtgaagacgcgctggcgataaaaccttttatgcaaaatatcgccgcccacagcgacgccagctttattgtcattggcgacaggcgaggcgtgcatctgtttcattcggtccacccggaatgggtcggcacgcggctggttggcggcgataaccagccggtgctggaggggaaaagcgccaccaccatccgcaaagggggactggggatttccctgcgcagcaaagcgccgattttcgacgatgcgggccgggtcatcggtattgtttccgtcggctacctcaccagctatctcgacagcatcacgctggaaaaagtcatcaatatctttgtcgccgcagtgctgctgttgattgcgctgtttatcttctcctggtacttcacccgcagcattaagaagcaaattttctcgctggagccgcgggaaatcggcctgctggtgcgccagcaaaaggcgatgatggagtcgatatacgaaggggtgatcgtaattgaccatcaccggcgtatcgaagtgataaatcatgccgcccgcagcctgctcggactgagccagccggcgcatcagctgcgcggtaagtctatcgatagcgtcattacgccgcagccgtttttcgccagcggggagatgctcgaaaacgatacccacgacgagctgtgccgctttaatcagctgaccgttctcgccagccgggtgcgtatcctgctggagagtgaactgcagggctgggtgatcactttccgcgaccgcgacgaaatcaactcgctgagcgcccagctcagccaggtgaagcgctacgttgataatctgcgcatcatgcgccatgaacagctgaaccgtatgaccaccctttccggcctgctgcatatgggccactatgatgaggcgattcgctacattcaggcgcagtcggagcatgcccaggagctgctggactttatctcatcgcactttaattcgccgacgctgtgcggtctgctgctgggcaaagccgcccgcgcgcgggaaaaaggggttgaactgagctttgacccggcctgccgcattgaccgtccgctgccgtcattgatggagtccgagcttatctctatcatcggtaatctgctggataacgctattgaggctacccagcgcgccgaactgccgcacgaaccggtcgagattctgattcagctcaacgcccgggaattaatgattgaagtcgccgaccgcggcgtcggtattcgtccggagatccgcgagcatatttttgagcgcggcgtcaccaccaaaacccgcggcgatcacggtattggcctgtatcttattgagcgctacgttacccaggccggcggcacaattgaagtggccgacaacgccccgcgcggcgcgatttttacgctgtttatccccgccagcgggccagcccatccgcaagaagagacgcactatgcatcatga

SEQ ID NO: 255158 - DNA, 699 bp, Klebsiella pneumoniae
atgcatcatgacctggtcgatgttctgatcatcgaagatgaaagcgaactggcgcggctgcacgccgagcttattcaaaaacacccgcgcatgcggctggcaggcacggcggcctccctcgcccaggcgcggcagagactcaacgccaggccgccccagctggtgctgctggataattatctgccggacggcaaaggggtcacgctgatgaacgacccgatcatggcccaggctaactgctcggtgatctttatcaccgccgccagcgatatggaaacttgtagtctggcaatccgcaacggcgccttcgactacattcttaagccggtgtcatggaagcgcctgagccagtcccttgaacggtttgtgcagttctacgatcagcagcgcgagtggaagattgtcgaccagcagaacgtggattcgctgtatcagctacaggccaaaaactatcgtgccgatagcggcagtaaagggattgaagaaaaaacgctggcgctggtgcaaaatctgtttaccggcgatcaagaacgctgcttttcggtcgatgacgtggtgagcgaggctggattgagcaaaaccactgctcgtcgctatctggagcactgcgtggaaatcggctttctggaggtggaaatgctgtacggcaagattggccatccgcggcgtatgtaccgccgcgccgccagcccatcgtga

SEQ ID NO: 255159 - DNA, 828 bp, Klebsiella pneumoniae
atgcagtatttgggtaaaataattggcgttgcggttgcgttgatgatgggcggcggcttttggggcgtggtactgggctttttaatcgggcatatgtttgaccgcgcgcgcagccgccggctgaacgtctttgccaaccagcaggagcgccagtcgctgttcttctcgacgacgtttgaagtgatggggcacctgactaaatctaaagggcgcgtcaccgaagccgatatccacgtcgccaatttgctgatggatcgcatgaatcttcatggcgaagcgcggacggcggcacagcacgcgtttcgggtagggaaatcagatgactatccgctgcgtgataaaatgcgccagctgcgcagcgtctgttttggccgctttgatttaattcggatgtttctggaaattcagctgcaggcggcttttgccgatggcgatctgcatcccaacgagcgtgaagtgctgtttgtgattgccgatgagctgggcatctcccgcgctcagtttgagcagttcctgcgcatgatgcagggcggggcgcagttcggcggcgggtcgcagcagcaatcttacggccagcgcggcggcaacgccggctggcagcaggcgcagcgcggacccactctggaagatgcctgcaatgtgctgggggtaaaaccgactgatgatgccgccaccgtcaagcgcgcctatcgtaagctgatgagcgagcaccatccggataagctggtggcgaaagggctaccgccggaaatgatggagatggctaagcagaaagcgcaggagatccagaaagcctgggagctgatcaaagaacagcgcggcttctga

SEQ ID NO: 255160 - DNA, 2367 bp, Klebsiella pneumoniae
atgacggaacaacaaatacaacgtatgaaaaaacgtattcccagccttctggccaccatgatcgccagcgccttgtatagccaacagggcctcgctgccgatctcgccacgcagtgtatgcttggcgtcccaagctacaatcgtcctttggtcgaagggaaacccaacgacctgccggtgacgatcgatgccgatcatgcgaaaggcaactaccctgataacgccgtatttaccggcaacgtcgatattaatcagggaaacagccggctgcaggccgatgaggtccagctccaccagcagcaggcggaaggccagccgcagccggtgcggacggttgatgccctcggcaacgtgcactatgacgataatcaggtgatcctcaaagggccgaaggcctggtcgaatctcaacaccaaagataccaacgtctggcagggcgattaccaaatggtaggccgtcaggggcgcggtaccgctgacctgatgaagcagcgcggcgaaaaccgctacaccattctggaaaacggcagctttacctcctgtctgccgggctctgacacctggagcgtggtcggcagcgaagttatccacgaccgcgaagagcaggtggctgagatctggaacgcgcgctttaagctcggttcggtgccgattttttatagtccctacctgcagctgccggtgggcgataagcgccgttcaggtttcctgatccccaacgctaaatacagcaccaaaaacggcgcggagttctatctcccttactactggaatatcgcgcctaactttgacgccaccctgaccccgcactatatgagcaagcgcggcggcgtgatgtgggaaaacgaattccgctatctgaccaaagcagggaccggtttatttgagttcgactacctgccgtcggataaaatttatcatgacgatcattcgaacgacagcaacagccgccgctggctgttctactggaaccattcaggcgtcgtagaccaggtgtggcgtttcaacgccgactacaccaaagttagcgacccggactactttaacgatttcagctccaaatacggttccagtaccgatggctatgccacgcagaaactcagcgccggctacgcgaatcagaacttcgatgccaccgtatcgaccaagcagttccaggtctttgaccgcgactcaagcaatgcctattccgccgagccgcagctggacgtgaactactaccagaacgacgtcggcccgtttgatacgcatctttatggccaggcggtgcattttgttaactcgaatagcaaaatgccggaagcaacgcgtcttcaccttgagccaaccatcaacctgccgctgtctaacggctggggaagcatcaatactgaggcaaaactgctggccacccattaccagcaaagcaaccttgatagctacaacgcggccaacggcactgactataaagactccgttaaccgcgtcatgccgcagtttaaagtcgacggcaaaatggttttcgagcgcgatatgcaagagaactatacccagacgcttgaaccgcgcatgcagtatctgtatatcccgtatcgtgaccagagcaagatcggcagctacgactcaacgctgttgcaatcagactacagcggcctgttccgcgaccgcacctacagcggtctggaccgtattgcgtccgccaaccaggtctccaccggcatcacatctcgcgtttatgatgccgccgcagttgaacgttttaatatttccgttggtcaaatctactatttcaccgaagcacgtaccggtgacgacaacatcaactgggagaacaacgacacgcgaggttcactggtatgggccggggatacctactggcgcattaccgacgactggggtttacgcgggggaattcagtacgatacgcgtctggataacgtcgcgaccagcagcggaaccgtggaataccgtcgcgacgaaaaccgtttagtacaacttaactatcgttatgcaagtccggaatacattcaggcgactctgccttcgtattccaccgctaagcagtataaagatggtatttcgcaggtgggaatgaccgccagctggccaatcgtcgatcgttgggcagtcgtcggcgcgtattactacgatacgaataccagaaagtcagcgaaccagatgttaggggtgcagtatagctcctgctgctacgctatccgcgttggctatgaacgtaagatcaacggctgggataacagcagcagcgaaagcaaatacgacaataccttcggctttaacattgagctgcgcggcctgagctccaattacggtctcggcacccagcagatgctgcgttcgaacattttaccgtaccagagctccctgtga

SEQ ID NO: 255161 - DNA, 1287 bp, Klebsiella pneumoniae
atgaagaactggaaaacgctgcttctcggtatcgccatgatcgcgaataccagtttcgctgccccacaggttgtcgataaagtagcggctgtcgtcaataatggcgttgttctggaaagcgacgtcgatggcttgatgcaatcggtaaaacttaacgccggccaggccgggcagcagctgccggatgacgccaccctgcgtcatcagatccttgagcgtctgatcatggaccagattgtcctgcagatgggtcagaaaatgggcgtgaagatcactgacgatcagctggaccaggctatcgccaacatcgccaaacagaacaacatgaccatggatcagatgcgcagccgtctggcctatgacggtattaactacaacacctatcgtaatcagatccgcaaagagatgctgatttcggaagtgcgtaacaacgaagtacgtcgccgtattaccgttctgccgcaggaagttgaaaccctggccaagcagattggcgatcagaacgacgccagcaccgaactcaacctcagccacattctgatcccgctgccggaaaaccccacttccgagcaggtggcagaagctcaggaccaggccaactcggtggttcagcaggcgcgcagcggcgcggatttcggcaaactggcgatcacctactcagccgaccagcaggcgctgaaaggcggccagatgggctggggtcgtattcaggaactgccgggcatcttcgcccaggcgctgagcacggctaagaaaggcgatatcgttggtccggtacgttccggcgttggcttccatatcctgaaaatcaacgatatgcgcggcggcagccagaatatctccgtgactgaagttcacgcccgccacatcctgctgaaaccgtcgccgatcatgaatgacaatcaggcccgggcaaagctggagcaaattgcggctgacattaagagcggcaaaaccacgtttgctaaagcggcaaaagagttctctgaagatccgggttcggcaaaccagggcggtgatttaggctgggcaacgccggatatcttcgatccggccttccgcgacgctattctgcgcctcaataaaggccagaccagcgcaccggttcactcatccttcggctggcacctgattgagctgctggatacccgcaacgtcgacagaaccgacgccgcgcagaaagatcgcgcttaccgcatgctgatgaaccgtaaattctctgaagaagcggctacctggatgcaggaacagcgcgccagcgcctacgttaaggtactgagcaactaa

SEQ ID NO: 255162 - DNA, 981 bp, Klebsiella pneumoniae
atgaatcgagttgttatcactcccggcgaacctgccgggattggccccgacctcgttgtgcagcttgcacagcgcgactggccggtcgagctggtgatttgcgccgatggcgctctgttatccgaccgggcaagcctgctcggtcttcctttatcgcttctgccttatgaccctaccgttcccgctacgccgcagcgcgcaggcaccctgacgcttcttcccgtcgctctcaatgcgccggttgagccaggcgtgctcaacgtcagcaacggcagctatgtggtggaaacgctggcccgcgcctgtgatggctgtctgaacggcgaattcgccgcgctgattaccgggccggtgcacaagggcattatcaacgatgcggggatcgccttcaccggtcataccgagttctttgaagagcgctcgcaggccagtaaagtggtgatgatgctggcgaccgaagcgctgcgcgtggcgctggtgaccactcacctgccgcttaaagcaataagcgatgcgattacccccgagctgctgcgggaaatcatcaccattctgcatcacgatctgcgcaccaaatttggcatcaataacccgcacgtgctggtttgcggcctgaacccgcacgcgggcgaaggcggccatatgggcacggaagagattgataccattattccggtgctggaagagatgcgcgcgaaggggatgaatctcagcggcccgctgccggcagataccctgtttcagccgaaatatctcgaccatgccgatgcggtactcgcgatgtatcacgatcagggcctgcccgtgctaaaataccagggctttggccgcggcgtgaatattacgctcggtttaccatttattcgcacttccgttgaccacggcaccgcgcttgaacttgcgggccaggggaaagcggaagtcggcagttttatcacggcgcttaatctcgccattaaaatgattgttaatactcaatga

SEQ ID NO: 255163 - DNA, 822 bp, Klebsiella pneumoniae
atgaataatcgagtccatcagggccacttagcccgtaaacgcttcgggcaaaactttctcaacgatcggtttgtgatcgacagcattgtctcggccatcaatccacagaaaggccaggcgattgttgaaatcggccccggcctcgccgcgctgaccgaaccggtcggtgaacgcctcgaccagctcaccgttatcgagctggaccgcgacctggccgctcgtctgcaaacgcatccgttcctcggaccaaagctgacgatttatcagcaggatgcgatgaccatgaacttcggcgagctgtcgcagaacatgggccaaccgctgcgcgtattcggcaacctgccgtacaacatctcgaccccgctgatgttccatctgttcagctatactgatgccattgccgatatgcactttatgctgcaaaaagaggtggtcaatcgtctggttgccgggccgaacagtaaggcgtatggtcgactaagcgtcatggcgcagtactactgccagattatcccggtgcttgaagttccgccgagcgcctttacgccgccgcctaaagttgattccgccgtggtgcgcctggtgccttaccgcacgctgccgcatcccgttaaagatgtgcgcgcgctgagccgcatcacgacagaagcatttaaccagcgtcggaaaacgatccgcaacagtctgggcaatctgttcagcgttgaagttctgaccgagctgggcatcgacccggcgaagcgcgcagagaatatttccgtggcgcagtactgtcagctagctaactggttatctgagaacgcgcccaacaaggagagctaa

SEQ ID NO: 255164 - DNA, 378 bp, Klebsiella pneumoniae
atgattaattcgccccgagtttgtgtgcaggtgcaaagcgtctatatcgaatcgcaatcttctccgcaagaagagcgctacgtcttcgcttataccgtcaccattcgcaatctggggcggactcaggttcagcttcttggccgctactggcttatcaccaatgggcacggtcgtgagaccgaagtccagggggaaggcgttgtcggcgagcagccgcatattccggccggcggtgaataccaatataccagcggcgcggtcattgagacgccgctgggcaccatgcagggacattatgagatgatcgatgtgaacggcgcgccgttcactattgaaatccctgttttccgtctcgcagtacccactctcatccattaa

SEQ ID NO: 255165 - DNA, 849 bp, Klebsiella pneumoniae
atgtctacataccttattggcgacgttcacggttgctacgatgaactgatcgcactattagagcaggtggagtttaaccctgagactgatacgctgtggctgacgggcgacctggtcgcgcgcggccccggttcgctcgaagtactgcgtttcgtgaaacagcttggcgacagcgtacgcatcgtgctgggcaatcatgacctgcacctgctggcggtctttgcgggcattagccgcaataaacccaaagatcggctgaaatcgctgcttgaggcgccggacgccgacgatctgctcaactggctgcgtcgtcagccgatgatgcaaatcgatgaagagaaaaagctggttatggcccacgccgggatcacgccgcagtgggatctggaaaccgctaaacagtgcgctcgcgacgtggaagccgtgcttgccagcgactcctatccgttcttcctcgatgcgatgtacggcgacatgccgaacaactggagcaacgaactgagcggactggcgcgcctgcgctttatctctaacgcttttacccgcatgcgctactgctttccgaacggccagctggatatgtatgccaaagaggcgccggaaaacgcgcccgcgccgctcaagccgtggtttgcgattcccgggccggtggccagcgagtacagtattgccttcggtcattgggcttcgctggaagggaaaggcacgccggaagggatttacgcgctggataccggctgctgctggggcggcgatctgacctgcctgcgctgggaagataagacgtacttcacgcagccgtcaaaccggcagccaaatcttgatgaaggcgaggcgatcgcctcctga

SEQ ID NO: 255166 - DNA, 480 bp, Klebsiella pneumoniae
atgatcagtctgattgcggcgttagcggtagatcgcgtcattggtatggaaaatgccatgccgtggaatctgcctgccgatcgcgcctggtttaagcgcaataccttaaacaaaccggtagtgatggggcgtctcacctgggaatctatcggtcgcccgttaccggggcgtaaaaatatcgttattagcagccagcccggcaccgacgatcgcgtgcagtgggtgaagtcggtcgatgaagccatcgccgcctgcggcgacgtagaagagatgatggtgatcggcggcggacgcgtttatgagcagttcctgccaaaagcgcaaaagctttatctgacccatattgatgcggaagtggaaggcgatactcatttcccggattacgatccggacgagtgggagtcggtattcagcgagttccacgatgctgatgcgcagaattcccatagttactgcttcgagattctggagcgccgctaa

SEQ ID NO: 255167 - DNA, 1866 bp, Klebsiella pneumoniae
atggatagccatacgctgatacaggcgctcatctatttaggctccgccgcgctgatcgtgccgattgccgtacgtctgggcttagggtcggtgctcggctacttaattgccggctgcattattggcccgtgggggctgcggctggtcaccgacgccgagtcgattctgcactttgcggaaatcggcgtggtgctgatgcttttcgttatcggtcttgagctcgatccccagcgcctgtggaaacttcgcgcttcggtgtttggcggcggggcgctgcagatggtcgtctgcggcgtgctgatcggcctgttctgcatgtcgcttggtctgcgctggcaggttgccgagctgattggcatgacgctggcgctctcttcaacggcgatcgctatgcaggcgatgaacgagcgtaacctgacggtcacccagctgggccggagcgcctttgcggtgctgctgttccaggatattgcggctattcctctggtggcgatgatcccgctgctggcggcgagcggcggctcgacgacgctgggcgcgtttgcactctcggccctgaaagtggcgggtgcgctggcgctggtggtggtgcttggccgctatctgacccggccgatgctgcgttttgttgcgcgctccggcctgcgtgaagtcttcagcgccgtggccctgttcctggtgtttggcttcgggctgctgctggaagaggttgggctgtcgatggcgatgggggcattcctggccggggtgctgctggcgagctcggagtaccgccacgctctcgaaagcgatattgaaccgtttaaggggctgctgctggggctgttttttatcggcgtcgggatgtctatcgacttcggtactctggtgactcatccgctgcggatcctgattttgctggtgggatttctggtgattaaatccctgatgctgtggttgatcgccaggccgttaggcgtacctcgcgcgcagcgccgctggtttgcggtgctgctggggcaggggagtgaattcgcctttgtggtcttcggcgcggcgcagatggccgatgtcctggacggcgaatgggcgaaggcgctgaccctggcggtggcgctatcgatggctgccacgccaatcctgctggtgttgctgacccgtctggagaaatccaccagcggccaggagcgcgaggcggatgaaattgacgaagagcagccgcgggtaattattgccggctttggccgctacgggcagattgccggccgcgtgctgctctccagcggcgtgaagatggtgattctcgatcacgatcctgaccacgtcgataccctgcgtaagtttgatatgaaggtgttctacggcgatgcgacgcgggttgacctgctggagtcggcgggggcggaaaaagcggaagtgctgattaacgccatcgacgatccgcagacaaacctgcagctggcggagctggcaaaagagcatttcccgcatctgcagatcatctcccgcgcccgcgatgtcgatcattacatcaagctgcgccaggccggcgttgaggcgccggagcgtgaaacctttgaagcggcgctgaagtccgggcgtatgacgcttgaggcgctgggcctgggagcctacgaggcccgcgagcgcgccgatctgttccgccgtttcaacctgcaaatggtcgaagagatggtggccatggcggaaaacgatgcggcctcccgggtggcggtattcaagcgcaccagcgatatgctgaccggaataatcaacgaagaccgcaaccatttatcgctggttcagcgtcatggctggcaaggaacggaagaggggaggcataccggtgatatcgctgatgagccggaaaataaacccccggcataa

SEQ ID NO: 255168 - DNA, 534 bp, Klebsiella pneumoniae
atgatcctcataatttatgcgcacccttatccgcagcactcgcatgcgaataagcggatgcttgagcaggcagggacgcttgacggcgtagagatacgctccctctatcagctttatcctgactttaatattgatatcgccgccgagcaggcggcgctggcccgtgccgatctggttatctggcagcatccgatgcagtggtacagcgtgccgccgctgctcaagctgtggatggataaagtgctggcgcacggttgggcatacggtcacaacggtatcgcgctgcgcggtaaatcgctgatgtgggcggttactaccggcggcggcgaaagccactttgatattggttcctttcccggtttcgacgtcctggcgcagccgctgcaggcgacagccctctactgcggcatgacatggctaccgccgtttgcaatgcattgcacttttatctgcgatgacgaaaccctacaggcgcaggcgcgccgctatcggcaacgcttaatcgaatggcaggaggcgcacaaccatggatag

SEQ ID NO: 255169 - DNA, 234 bp, Klebsiella pneumoniae; identical to SEQ ID NO: 172642

SEQ ID NO: 255170 - DNA, 885 bp, Klebsiella pneumoniae
atggcgatacttttgtttgattggggcggtacatcgattaaatatggcgtctggcagcagggggagctgaaggataccgcatcggttgagacgcctgatagctgggaagagatgaaaaatcggctattggaactttatcaacagtttcagtcgcgctacgccattgatgggatctcaattagtgctcctgggtgcgtggatccgcagagcggggtcattagcggcctgagcgccattccctatattcatcactttcccatcgtcgaagagctttccgggctgttttcactgccggtatgcattgagaacgacgccaactcggcgggtatcgccgaggcggcattgggcgcgggccgcgagtatgacagcgtactgtttgtgattgccggttcaggtatcggtggcgccattgtcgacaataaagtcctgcgccacggcagccatcgctacgccggggaatttggcatgatgaccctgcacgaggggcaaacctttagcgaactggcaaccgccgtcgctacggcgcgtcgttatgcccggcgcatgtcgctggcggctgactccgtctccggagaggatgtctttcgcctggccgaggagggcgacaatatcgcgcagcaggaagtggcgcagttttaccactggatggcgataggcttactgaatttgcaggtgtgctacgacccagactgcctgattatcggcggcggtatctccgccagcgataagatttttaacggcatcaagcagcgcctgaacgagctggtgaatgaaaaagatttagcagaatttttaccgcaggtggtgctctgccaataccgcaacgatgctaacctgatcggcgcggcggtgaacttcgaacaaaaacagagggatcggcgctaa

SEQ ID NO: 255171 - DNA, 1641 bp, Klebsiella pneumoniae
gtggatacctgcgcggcggaattcgctaccgacaccgcctatatgtactccacctatgaagatgagtgcgaagccaatccgtccgttgaccgcgataaaatcatggtgctcggcggcggcccgaaccgtatcggccagggcatcgagttcgattactgctgcgtccatgcctccctggcgctgcgcgaagacggctacgagaccattatggtcaactgtaacccggaaaccgtctctaccgattacgacacctctgaccgcctctactttgagccggtgacgctggaagacgtgctggaaatcgtgcgcattgagaagccgaaaggcgttatcgtgcagtacggcggccagacgccgctgaagctggcgcgcgcgctggaagccgcaggcgtgccggttatcggcaccagcccggatgcaatcgaccgtgcggaagaccgtgagcgcttccagcacgcggttgaccgcctgaagctgaagcagccggcgaacgccaccgtgaccgcgatcgaaatggcggtcgagaaggcgaaagagattggctacccgctggtggtgcgcccgtcctacgttctcggcggccgcgcgatggaaatcgtctacgacgaaatcgacctgcggcgctacttccagaccgccgtcagcgtctctaacgatgcgccggtgctgctggaccgcttccttgacgatgcggttgaagttgacgtcgatgccatctgcgacggcgaaatggtgctgattggcggcatcatggagcatatcgagcaggcgggcgtacactccggcgactccgcgtgttcgctgccggcctacaccctgagccaggaaattcaggatgtgatgcgcgagcaggtgcagaagctggcctttgagctgcaggtacgcggtctgatgaacgtgcagtttgcggtcaaaaacaatgaagtctacctgattgaagtcaacccgcgcgcggcgcgtaccgtcccgtttgtctcgaaagccaccggcgtaccgctggcgaaagtcgcggcgcgcgtgatggcgggcaaaacgctggctcagcagggcgtcactaaagagatcatcccgccgtactattcggtgaaagaggtggttctgccgtttaacaaattcccgggcgttgacccgctgttagggccagaaatgcgctctaccggtgaagtcatgggcgttggccgcaccttcgcggaagcgttcgccaaggcgcagttaggcagcaactcgacgatgaagaaacagggacgcgcgctgctctccgtacgtgaaggcgacaaagagcgcgtggtggatctggcggcaaaactgctgaagtttggttttgagctggatgcaacccacggtactgcgattgtgctgggcgaagccggcatcaacccgcgtctggtgaacaaggtgcatgaaggccgcccgcacattcaggaccgcatcaagaatggcgaatacacctacatcatcaacaccaccgcaggccgtcaggcgattgaagactccaagctgattcgccgcagcgccctgcagtacaaagtgcactacgacaccacgctgaacggcggtttcgctaccgcaatggccctcaatgccaacgcgatagagaaagtgacctcggtgcaggaaatgcacgcgcagattaaaaagtaa

SEQ ID NO: 255172 - DNA, 915 bp, Klebsiella pneumoniae
atgctacatctgggtttagacattggcggcaccaaaatggaagccgtcctgctcaacgcggcgggcgaatgcgtctatcgccagcgccgtccgacgcataaagagagctatcaggcgtttatgcagcaactgctcgggctgattgcgaccatcggcgactggagcgaacggccgtttactatcggcatcggcctgccgggggctatcgacccgcaaagcggcctgattaaaaactgtaactgtctggtgctcaacggccacgacctgcgtcatgacctgatgcgggaacttggtcaaccggtatggatggcgaacgatgccgactgcttcaccctctctgaagcggtggacggcgcgggcgcgggggcaacgaccgtattcggcgttattatcggtaccggctgcggcggcggcatcgcggtgaaccaacggctactcagcgggcctaacgccatcgttggcgaatgggggcacaatcctctgccgggctattgccccgagcgcgacggtccggcgcagccctgctactgtggcaaagagaactgcatcgaaagctttatctccggtaccggctttgcccgccgctacggcgaacaggcgcctgcggaagcgattatcgccgccgcgcaaaacggcgatccccaggcgcaggcccactggcggcattttattgacgccttcgcccgtagcctggcctcggtaatcaatatcctcgatccgcaggtgattgtgctgggcggcgggctctccaacgtcgggcaaatctacgagcagctgccgtcggccatcgtcccgtatctcttttccgacagctgccgaacgcagatcaaaaaggcgcgcttcggcgacgccagcggcgtgcgcggcgcggcctggctgccggttctggccgctgctgaaggcccccgccggtag

SEQ ID NO: 255173 - DNA, 315 bp, Klebsiella pneumoniae; identical to SEQ ID NO: 173654

SEQ ID NO: 255174 - DNA, 1323 bp, Klebsiella pneumoniae
atgagctctctgtacgcgaagctgatcgccgtgattgaacagaagatcacgcctatggcgggggcgatcggccagcaaaaatacgtcacctccatccgcgacggtttcattaccgccctgccctttatgatcgttggctcgtttttgctggtgtttatcttcccgccgttctccccggatacgacgtggggctttgcccgcgcctggctgcaattttcgctcgatcatcgcgatgcgctgatgctgccgtttaacttcagcatgggggtgatgacgctgtttatcgccgtcgggatcgccgccagcctggcgaagcaccataacctggactcgctgaccgccgggatgctgtcgctgatgtcgtttctgctggtggccgcgccgctgaaagatggccagatctctaccgcctacttctccggccaggggatctttaccgcaattctggtggcgatttactctaccgagctgtacgcctttctcaaacgccacaacattacgatccgtctaccgcctgaagttccggcgggcgtggcgcgctcgttcgagatcctgatcccggtgctggcgatcgtgctgacgctgcatccgctgaacctgtttatcgaagcgcagctgggcatgatcatcccggaagcgatcatgtcgctggtgaaaccgctggtggcggcttccgataccctaccggcgatcctgctgtcggtactggtgtgccaggtgctgtggtttgccggcattcacggggcgctgatcgtcaccgggattatgaatccgttctggatggcgaatctgtcgatcaaccaggcggcgatggccgcaggcaccgcgattccacatatcgatgtccagggcttctgggatcactatctgctgatcggcggcgtcggctccaccctgccgctggcgctgatgctgctgcgcagcaaggccgtgcatctgcggacgattggccggatgggcgtggtgccgggcgtatttaacatcaacgaaccgattctgttcggcgcgccgatcatcatgaacccgctgttcttcctgccgttcgtgctggtgccgatggtcaacgcgaccctggcctactttgcgctgaagctggacctggtcagccgcgtggtgtcgatgacgccgtggacgacgccggcccctatcggcgcctcctgggcggcaaactggagctttagcccggtgatcatgtgcctgatttgtatggcgacggcgatggtgatgtatctgccgttcctcaaagcctacgaaaaacagctgctggagcaggagcacgctaacgccgccgcccaggctgaaggcgcgccgcagtccgcataa

SEQ ID NO: 255175 - DNA, 315 bp, Klebsiella pneumoniae
atgaaaaagataatgttgtgctgttccgcgggcatgtccaccagcctgctggtgaaaaaaatgatcgccgaggccgagcagcgcgggttgccggtagagatcaacgcctttggcgtcgcggagttcgatcaacaggtcggccattaccaggtggtcctgctggggccgcaggtgaaatacatgcagaaagatctgcaaaaacaggctgataaatacgggatccgcgtggaacccatcaacatgatggattacggcatgcagaaaggcggcgccgtgctggatttcgcgctttcccttatcgataacaaaaactaa

SEQ ID NO: 255176 - DNA, 1338 bp, Klebsiella pneumoniae
atgatcaggctaaatcattcaatacctctgtctttacttgcccttgcggtgatgagcgactgcgccagcgccgatccgaagtacgattttatgctgcatggctatatccgttcagggatccttgccaacgccgacggcaatcgcgctgactccgttggcctgatgccggacggcaagtggcgtctgggcaacgaagaagataccaagatcgaactgatcccaacggtgacgttaacctcggacagcggcgtggtggcaaaagtccaggccaacatcacccatcagtccaaatgtacctctgactggaactgtcaggacgacgacgggcatgatgtgcagttccgcgaaggttttgccgaactgtccaacctcgacttcgccccagaaatgaccttctgggccggaaagcgctacagcagctccaacacctccagccatcagttcgactgggagtatattcagtacaacggcaccggcggcggcttcgacaatatggatcttggcttcgcgcgcttcgatgccggggtttacgccttctcgccgacggacgaaaccaaagcctacccggtcgacaaaggcgatcagggctatccggatgactactcgctcaacctgtggctgaaaaagctcggcggcaccggcttcgatcttgagctgattggccaccacatgaaccgcaacgagaagcacccgacctcggcggaaaaaggctacggcgtgaccggcgtttacaactttgacggcttttacggcctgaccggcggctactctcgcgtggtcttccagtacggacgcggcctggcggcgggagactcgctgggtaaaaacggctggggctgggcaaacctcgacgatacccaatcctggcgcgtggtgctggataacatggcctcgctcggcgactgggaaatctccacgtttgcctactatcagaaagacaaaaactaccgctggtggacggaagacgccgaaggctgggggcgcaccagctgggtggcggggatccgcccgtatcagcagatcaccaaaaacttcgccatgcagtacgagctgggctacgaatatctcgacgataaaaactacaaaggcgtggacggcaagggcaaaggcggcctgactaaagtgaccatcgcgccgaccctgacctttgattccggcttctggacgcgcccgcagctgcgcttcttcgtgacttacgcgaagtgggataagggggtgtccgacgcgctggacggcaactacgactggagcaccaataccctttccgccggtagctactcgcgcagcggcgataccgacacgctgaacttcggcgtgcaggccgaagtctggttctaa

SEQ ID NO: 255177 - DNA, 2196 bp, Klebsiella pneumoniae
atgattaagccggtgaaaaaactgatgctcgtcgcgctgctttcggcgctgggaagcgcaggcgcgatggccgcggagcagtcgcactttgaacactttattacccgcgacggcgcgacgttaaaagatggcgacaaggtgttccgctttgcgggcattcatgcgccggagctgcatcgtattgaagacgacgcgcgcggcacctgtaaagccgactcgcgcggctgggggcaatacttccgctggccgacggcggaggaacaggaaaactggattaaagcgctggtgcaaaccggcgccagggcgcagcgggtatacgtgctctcggtgcagcagacgtttgacgaggcctgcggtcgcgaaacccatattctggccccggaaaccgccgacggcatgccgcgcctgaacgaaaaggcgatgcgggtgtacgacaacatgatcgccgaggcggacaaacaggggctgcgactgattctaccgtttatcgatcactggtggtggtggggcggtcgcgagcagctggcggcgttctaccacgaaaagccggaggatttttaccgtaccgatagtaaaaccttcaaggcctatctggacgtgattcgtcaggttatcacccgtaccaacagcgtaaccgggcgcccttactatgacgaaaaagcgattatggcctgggagaccggcaacgagctggaggataccaatgcggcgttccttcagcagaccgccgcatggatcaaaaagtgggcgccgcatcagctggtggtggatggcacctataagaaaattaatgcgtttgcgcttaacgatccccatgtcgatatcgtcagcaaccactactacaccaatgccgataacaaccatcccgatcaggtgaaaaaagacctgacggcggccgcgggtaagaaagtttatatggtgggcgaatttggcctgctggatgcgcagcagcttaacgccattatgcagtcgatcgtccatagcgaagtcaacggcgcgcaggcggcgggcggtttaatctggggcttccgcggtcatcgtcacgatggcggtttctactggcataaagagtccaccggccactacagctaccatttgccgggctttccggtcgacggtaaagccaatcaggagatggaggtggtcgacctggtgcggaccgccgcggcgcagatgaacgggcaggagaaagcgccgccgctgccgaagccggatgcgccgacgctgcggccgacggactcaccgtttgcgatcaactggctgggggcggcggtagggcgcgcctatgatgttgagcgcgccgattcggcatccggaccgtggaagatcgtggggcgcgatatttcggacggcgtaaacgagtggaacccgcagacgatggatctgttccgcgatgactatcgcagtctgcaactggcgaatacgtactattaccgcgtcattgctaaaaacgagagcggcagttcatcgccttcgaacgtgattagcgtgaagcacacccaggcgaatcaggcgccggaagtcacgctggtggaaacgctcaccaccagccaggaccagggcgtgcagctcagcgcgagctggcgcgatgacgggctgccggatggcaacgttaaggtgagctggagcaacggcggcaacgcgcaggcccatatctgcgcgacggataaagccgaaacccgcgcctggtttagcgcccccggtgaatacgcgctgacctttagcgccgatgatggtctgctcaaaagcagtaaaaccgtaaaggtcacggtgacagaagccgtcgggaaagcgcccgctgattactgccgttttagcggcggggttgtgaacgtgaccgatggcaagatcgaggcggcgaaaagcgagaaagacgcgctgacgattgacgaagacggcttcctcgggccgttcgccaacgatggcgataaggtgagctggcaggttgccgcgccgtgggccggcaagtatcagctgcaggtgacgttcagcggcaaatggggcggcaagaaaaactcgtttatcgtcaacggcggcgcgccaatcgcggttgaattcccgcaaaccgatgaacagggccagcagctgcgggtgccggtggagctgaaggccggcgataaccgcatcgacttcggtaaattcgccggcgactggggctacatgtttatcaaatcgattgaagtggttgcagagtag

SEQ ID NO: 255178 - DNA, 1401 bp, Klebsiella pneumoniae
atgacccggtatcagtttccggaaggttttttttggggcgcggcggcatccggtccgcagacggaagggataagcaacaagccgcatcgttctatttgggatagctggtttgccgaacagccggaacgtttttatcagcagattgggccgcaaacggtttgcgacacttaccatcagtatccccaggacgtggcgttgatgaagcggaccgggttcaactcttttcgcacctcgattcagtggtcgcggctgattgacgacttcgaaaccggcgcgcccaatgcggacgcggtgcgtttttatcatgcctacctggatgagatgattgaaaacggcatcgagccgatgatcaacctctatcactttgacatgccggaagcgctgcaaaagcagtacggcggctttgagtcggcgcacgtgaccgatcttttcgcgcgttttgcccgtaccgcttttgagctgtttgggcacaaagtgaaatactggatcaccttcaacgagccgattgtgccggttgagggcggctatctgtatgacttccactatccctgcaagaaagacggcagtctggcggcgcaggtggcgtttaacattatgctggcccacgccaaagcggtgcgcgagtttcgcgcgctggcgctggaaagcgagattggcgtggtgctgaatctgacgccgtcctatacccgcaacgacagcgcggaagaccaaaaagcggcgtggtatgcggatctgttcttcaaccgcagcttcctcgacccgctggtgaaacatcagttcccgaaagcgctgtgcgaaattctggccgcgcacgactgtctgccggaggtgacaaaagccgacgttgagctgattaccggatcgcgcgtcgattttctcggcgttaactattacgttccgcggcgggtgaaagcgcgcgaaagcgactatacgctggactatttcaccccggagttctatttcgaaaactatgtgaatccgcaagggcgctttaatccttatcgcgataataatgagattctgccgcaggcgatttatgacattgccgccaatattcgcgataactacggcaatataaagtggttcctcgcggaaattggtatcgcgatggatatcgagtcggaaggcgagccgggcgaggacggggtgattgacgattcgttccgcatcggcctgatggaagagcatctggtgcagctgcatcgcgccattgccgacggcgcgaactgctttggcgtgcatcagtggacctttatcgataactggtcgtggattaactcgttcaagcgccgctacggcttctggcggctcgacctgcaaaccggagagcggctgataaagcgcaacgcgctgtggtttgccgaactggcgaccagcaacggcttcagttctgataaatag

SEQ ID NO: 255179 - DNA, 957 bp, Klebsiella pneumoniae
atgacgcgtttacctctggccgccgccatcgctttgcttttggcttctccggcggcattttcctctctccccaccttttctgtctggcccggcggtgaagcccccggcgcgaaaaacagcccggcgagcgaatcgctggtagagcgcagcaaagatccctcgctgcccgatcgcgcggtcaccgggattcgtgctccgacaattaccgtttacgcaccggagaagcccaacggtattgcgctgctggtgacgccgggcggctcttaccagcgagtggtattggataaagagggcagcgatctcgccccggtatttaacgcccgtggctataccctgtttgtcatgacctaccgaatgccggcggacggtcacgcggaaagcagcgaggcgccgttggccgatgcgcagcgcgcgctgcgtaccctgcgggcgcgggccgccgagtggcatatcgacccgcataaaatcggcattatgggcttttccgccggggggcacgtggcggccagcctggagacccggtatagcgaaccggcttacgccgccgtggacgcggttgatcggcagagcgcgcggccggacttcgcggtgctcggctatccggtgatttcgatggatccggcgattgcccatcccggatcgcgcaaggcattgattggcgaaacgccgacggcggagcggcagcatcgctattcaccggagcagcacgtcacgccgcagacgccgccaacctttattttccacgcggtagacgatccttccgtgccggtggataacgcgctggtgatgtttaacgccctgcgcgcgcagcaggtgccgaccgagctgcatctgttcgccgaggggaaacacggatttggtattcgcgggacccggggcctgcccgccgccgaatggccgcagctggcgatgaactggatagcttcgctggcggaaatgaacaaatcgcgccaataa

SEQ ID NO: 255180 - DNA, 1011 bp, Klebsiella pneumoniae
atgaaaagcgttcagttagcccatggtagcggcggtcaggcgatgcagcagctgatcggcgacctgtttatgcaggctttcgccaacccctggctggcggagcaggaagatcaggcgcgtctcgatctcgctcagcttagcgcgcagggcgacaggctcgccttctccaccgacagctacgttatcgatccgctgtttttccccggcggtaatatcggcaagctggcggtctgcggcacggcgaacgatgtggcggtgagcggcgcgctgccgcgctatctctcctgcgggtttattctcgaagaggggctggagatggccaccctcgaagcggtggtgagcagcatggcgcagaccgcgcgggaagccggtatcgccattgtgaccggcgataccaaagtggtgccgcgcggggcggcggataagctgtttatcaataccgccgggatcggcgtcatccccaccggtattcgctggggagcgcagcagattagcgcgggagacgtgctgctggtcagcggcacgcttggcgatcacggggcaacgatcctcaatcttcgcgaacagatggggctggacggcgcgctgtccagcgactgcgcggtgctgacgcccttgattcagacgctgcgcgacgtagctggcgtgaaagccctgcgcgatgccacccgcggcggcgttaacgcggtggcccatgaattcgccgcctccagcggctgcggaatagagctgcatgaacaaaagctgccggttaacgataccgtacgcggcgtgtgcgagctgctggggctggacgcgcttaatttcgccaacgagggtaagctgttgatcgccgttgcccgcgaggcggcggaaagcgtacttgcgcatttacggtctcatccattaggccgcgatgcggcgataatcggcgacgttgtgccgcgcgcgggcgtgcgctctgtcggtctgtacggcgtcaaacgcacgctggatcttcctcacgccgagccgctgccgagaatttgttaa

SEQ ID NO: 255181 - DNA, 1122 bp, Klebsiella pneumoniae
atgcgttttgttgatgaataccgcgctccggaacaggtgatgcagctggtggaacatctccggctgcgcgcgcgcctgctgccgcataccgccgaacgtccgctgcgcataatggaagtgtgcggcggccatacccacgctatttttaaatttggcctcgatcagctgctgccggaaaatattgaatttatccacggccccggctgcccggtgtgcgtgctgccgatggggcgtatcgacgcctgtatcgatatcgccagccgtccgggagtgattttctgcacctttggcgacgccatgcgcgtaccgggaaaaaacggctcgctgctgcaggcaaaatcgcgcggcgccgacgtccgcatcgtctattcgccgatggacgccctgaagctggcgcagcagcaccccgagcgagaagtggtattcttcggtctcggctttgaaacgacgatgcccgccaccgccctgaccctgcgtcaggcccgggagcgcggcgtcgggaacttttactttttctgccagcacatcaccctgctgccgaccctgcgcagcctgctcgaccagccggataacggtatcgacgcttttctcgcccccggtcacgtcagcatggtgattggcaccgatgcttacgggtttatcgccagcgactatcaccgtccattagtggtggccggattcgaaccgcttgatctactgcaaggcgcgatgatgctggttgagcagacaatagcgcagcacagcgaagtggagaaccagtatcgccgggtggtgcccgatgagggcaacccgctggcgcagtcggccatcgccgacgtgttttgcctcagcggcgatagcgagtggcgcggtctgggggtgattaacgactccggcgtgcacctgacggccgcgtatcagcgtttcgacgcagaagcgcatttccgcccggcgccgcagcgggtctgcgacgacccgcgcgcccgctgcggcgaggtgctgaccggccgctgtaaaccgcaccagtgcccgctattcggcaatacctgcaacccgcagagcgcattcggcgcgctgatggtctcatcggaaggcgcctgcgccgcctggtatcaatatcgcagtcaggaaatcgaagcatga

SEQ ID NO: 255182 - DNA, 273 bp, Klebsiella pneumoniae
atgtgcataggcatacccggacaaatctgcgctattgacggcaatctggcgaaggtcgaagtgtgcggcattcaacgcgaagtcgacctgaccctggtgggcgcggttgacgatcgcggtcagccgcgtctcggccagtgggtgctggtccacgtgggttttgccatgagcgtgattaacgaagccgaagcccgcgacaccctcgaggcgctgcaaaatatgtttgaagtcgagccggacgtcggcgcgctgctgtacggcgaggagcggtaa

SEQ ID NO: 255183 - DNA, 873 bp, Klebsiella pneumoniae
atgtgtacaacctgcggctgcggtgaaggcaacctttatatagaaggcgacgagcataacccgcattcggcgtttcgcagcgcccccttcgcgcccgccccgcggcagatgatgaccattaccggcgtgaaaaccgataacttttcccccacccgctcggagactggcgacctgcactacggtcatggcgaagcgggtacccatgcgccgggccagagccagcggcggatgctggaagtggaaatcgacgtcctggataaaaacaaccgtctggccgcccgcaaccgcgcgcgcttcgccgccaggagccagctggtgctgaacctggtctccagccccggctccggcaaaaccaccctgctgacggaaaccctgctgcggctgaaagagaaaaccgcctgcgcggtcattgaaggcgatcagcaaacggtgaacgacgccgcgcgcatccgcgccaccggcaccccggcgattcaggtcaacaccggcaaaggctgccatctcgacgcgcagatgatcgccgacgccgcgccgcgcctgccgctggcggaccacggcattctgtttatcgaaaacgtcggcaacctggtgtgtccggcaagtttcgacctcggcgaacgtcataaagtggcggtgctgtcggtaaccgaaggcgaagacaaaccgctgaagtatccgcatatgttcgccgccgccagcctgatgctgcttaacaaggtcgacctgctgccgcatctcaactttgacgtagagaagtgtctggcctgcgcccgcgaggtgaacccggatattgacattattctgctttccgccaccagcggcgaaggtatggaccagtggcttcgctggctggaggcgcagcaatgtgcatag

SEQ ID NO: 255184 - DNA, 345 bp, Klebsiella pneumoniae
atgcacgaaatcacccttagccagcgggcgctggaaattatcgaacagcaggcgctgcaggccggcgcgcgtcgggtcaccggcgtgtggctgaaagtgggggcattttcctgcgtggaagccagcgcgctgaccttctgctttgagctggtgtgccgcggcacgctggcggaaggctgtgagctgcatatcgccgaacaacaggctgaatgctggtgtgaatcctgccagcagtacgtgcatctcatctcacagcacgtgcgccgctgcccgcagtgtcagagcgaccggctgcaaattgtggcggatgacggcttacagattcagcgactagaagtggagtaa

SEQ ID NO: 255185 - DNA, 450 bp, Klebsiella pneumoniae
atgactatttgggaattaagtgaaaaggcggactacatcgccgatcgtcaccgccagcatcaggagcagtggcatacctactgcaactcgctggtacaggggataaccctgtcgaaagcgcgtttgcatcatgcgatgagctgcgcgccggataaagagctgtgcttcgtattgtttggccattttcaggtttacgtggcgctggcggagggctttaacagccacaccatcgagtattacgtagagagtaaagacggcggcgacagacggctgattgcccaggccacgctgggctcagacggcaccattgatggccggatcagcaaccgcgatcgcgagcaggttctggagcactatctggcgactatcgccagcgtttatgaccgtctctacgaggctatcgaacaagaccagccggtggatttaaaccacctgacgctggcccgttaa

SEQ ID NO: 255186 - DNA, 609 bp, Klebsiella pneumoniae
gtgaaccgttttgtaattgctgactccaccgtctgtatcggctgtcgcacctgcgaagccgcctgcgctgagactcaccgccagcagggcctgcaagccatgccccggctacggctgatgcgcaatgaaaaagaatccgcgccgcagatgtgccaccactgtgaagatgcgccctgcgccgccgtctgcccggttaacgccattaatcgcgtcgatggcgcggtgcagctcaatgagagcctgtgcgtaagctgcaagctgtgcggcatcgcctgtccgttcggcgccattgagttttccggcagccgcccgctggatattccggctaacgccaatacgccgctggctcccgccgcgccgccggccccggcgcgcgtcagctcgctgctcgactgggtgccgggcgtacgcgctatcgccgtcaaatgcgacctgtgccacttcgatgaggaaggcccggcgtgcgtgcgcacctgcccgaccaaagcgctgctgctggtggatatccgcgatatcgcccaggccagcaagcgtaagcggcagctgacttttaataccgacctcggcgatctgtcgctgttccaggcgcaacaaggggacgtgaaatga

SEQ ID NO: 255187 - DNA, 1851 bp, Klebsiella pneumoniae
  misc_feature (339)..(348): n is a, c, g, or t
atgagtgtgatttccttagtgaatcaggcggtggcctggtacgccgccagcgcggtgctggcgtttttgttcgctctgcgcaaaccgctgagcggggcgatcgccgggattggcggcgcggtcgccagcgcgatgctggtgctggcgggcggaacggcgctgctgatgccggatcgcgtcagcgccggcatgctgcaaatgctgcacctgcccctgcgcgttggcggcgtcaatgcgctgtggctgctggcaatcggcctgtcggcgctgccgatttcgctcttcaatatcgcctggcatcgtcatccgcaggttaaagccaacggtctgctgatgaannnnnnnnnnggtgtgctggtgaatctcctgctggccgccgccgtctgcgccgtggtggtgacgaacttcggcgcgctggtggtgatggcggaaattatggccctttgcgccgcgtttcttaccggctgcgcgcagtccggcaagctgtggtttgcgctgggacgcctcggtacgctgctgatggcgtggagctgctggctggtctggtcgacctacggcactcttgagctggggcagattacccggctggcggtggcggcgccgcaaaacgcgctactgtggctgccgggcctgatcggctttgcgctgctggccggggtcattccgctgcacggctgggcgccgcaggcccacgctggcgccagcgctccggctgccgcgctgttttctacggtagtgatgaaggtcggtctgtacggcatcctgacggtctcgctggccggcagcgttccgccgctgtggtggggcgtgatgctgctggtgctggggatgatcaccgccttcgtcggcgggctgtacgccctgatggagcacaatattcagcgcctgctggcgtaccacaccctggaaaacatcggcattatcctgctcggcctcggggcattcgtcaccggcgtggcgacccataacccaaccctgatggtgctgggctttatcggcggcatgtatcacctgatcaaccatagcctgtttaaaactaccctgttcctcggcgcgggagcggtgtggttccgcaccggccatcgcgatatcgaaaagcttggcgggatcggcaagaaaatgccgctgatttccctttcgatgctggtgggtctgatggcgatggccgcgctgccgccgctgaacggcttcgccggagagtgggttatctatcagtccttctttaagttgagcaccggcgacgcgtttgttggccgcctgcttgggccgctgctggcggtgggcctggcgatcaccggcgcgctggcggtgatgtgtatggcgaaagtctacggcgtcaccttcctcggcgcgccgcgaagcaaagaggcggaaaacgccacctgcgcgccggggctgatgacctttagcgtggtgctggccgccgcctgctgcgtgattggcggggttgccgcgccgtggctgctgccgctggtgagcggggcgtttccggtgcaggcggaggtctccagcgtggtgtctcagccgctgatcgccattctgctgattgcctgcccgctgctgccgctgctgctgatgatcttctttaagggcgatcgcctgccggcgcgctcgcgcggcgcggcctgggtctgcggctatgaccatgaaaaatccatggtggtgaccgcccacggtttcgccatgccggtgaaagaggcttttgcgccaattctcaagctgcgccactggctgaacccggtgcgcctggtgcccggctggcagaacgcttctgcgcccgcgctgtttcgcggcgtggcgctggtggagctggcggtactggtggtgattgtgatttcccgaggagcctga

SEQ ID NO: 255188 - DNA, 888 bp, Klebsiella pneumoniae
atgagcgtattaattgcattgttgcaggcgctggtgctgttcgccgtcgcgccgctgttgtccggggtgacccgcgtcgcccgcgcgcgtctgcataatcgccgcggtccgggcgtactgcaggagtaccgggatatcctgaaactgctggggcgccagagcgttggcccggatgcctccggctgggtcttccgcctgacgccgtacgtgatggtcggcgtgatgctgactatcgctactgcgctgccggtggtgaccgttgattcgccgatggcggggctgggcgacctgattaccctgatctacctgttcgccatcgcccgtttcttcttcgctatctccgggagccgcgaagcgatgctcggcgtgctggtggagcctatcctgctgctcggcctgtgggtcgcggctcaggtcgccgggtccactcatatcagcagtatcaccgacaccatttatcactggcctgtcgcccgcactcttccgctgattctggcgctgtgcgcctgcgccttcgccacctttatcgaaatgggcaagctgccgttcgacctggcggaagcggagcaggagcttcaggaaggcccgctctcggaatacagcggtagcggcttcggcgtgctgaagtggggcatcagcctcaagcagctggtggtcctgcaaatgttcgtcggcgtatttatcccgtggggacagatgaccagctttagcgtcggcggtctgctgctggcgctggtggttgccgtcgccaagctggtgcttggcgtgctggtgattgcgctgttcgaaaacagcatggcgcgtctgcgcttttgcgccacctcccgcgtcacctgggccgggtttggttttgcctttttagccttcgtctccttgctggtggcgtga

SEQ ID NO: 255189 - DNA, 585 bp, Klebsiella pneumoniae; identical to SEQ ID NO: 175806

SEQ ID NO: 255190 - DNA, 792 bp, Klebsiella pneumoniae
  misc_feature (725)..(734): n is a, c, g, or t
atgactcagcaggaatttctctctcgtcgccaggctctactggcgcagatgcagccaggcagcgccgcgttaatttttgccgcgccggaagcggtacgcagcgcagattcggaatatccctaccgccagagcagcgatttttggtacttcaccggctttaatgagcctgaagcgctgctggtattgattaaaagcgatgagacgcataaccacagcgtgttgtttaaccgcgtgcgcgatctgactgctgaaatctggtttggccgacgccttgggcaggatgccgcgcctgagaagctgggcgtcgatcgcgcgctggcatttagtgaaatcaatcagcagctgttccagctccttaacggcctcgatgctatctattttgcgcagggcgaatatgcctacgccgacgaaatcgtgttcaacgcgctggaaaaactgcgcaaaggcgtgcggcagaatctgcaggcgccaaactcggtcattgactggcggccgatggtgcatgagatgcgcctgtttaagtcggcggaagagctggaggtgatgcgccgcgcaggcgagatctccgcccttgcgcatacccgcgccatggaaaaatgtcgtccggggatgtttgaatatcatctggaaggcgagatcctccacgagttcaaccgtcacggcgcgcgctatccctcttacaacaccatcgtgggcagcggcgaaaatggctgcatcctgcactnnnnnnnnnngcagaaaatggttcacccaacccgccagcgcatcggcgcgatggcgatctggtgctga

SEQ ID NO: 255191 - DNA, 555 bp, Klebsiella pneumoniae
gtgctgattgacgcaggctgcgaataccgcggctatgcgggcgatatcacccgaaccttcccggtaaacggcaagtttagcccggcgcagcgcgagatttacgatatcgttcttgagtctctggaaacctcgctgaagctttatcgccccggcacctccattaacgaggttaatcagcaggtagtgcggatcatgattaccggcctggtgcgtttggggatcctgaaaggtgaaattgatgagctaattgctaataacgctcatcgtcctttctttatgcatggcctgagccactggctggggctcgacgtacatgatgtcggcaactatgacgtcgaccgctcgcgtattctcgaaccgggaatggtgctgaccgtggaaccggggctgtatatcgcgatggatgccgacgtcccggcccagtaccgcggcatcggcattcgtattgaagacgacatcgtcattactgaagacggtaatgaaaacctcaccgctggcgtagtgaaaaaagcggatgatatcgaggcgctgatggcggcggcgcgccagctatga

SEQ ID NO: 255192 - DNA, 1179 bp, Klebsiella pneumoniae
atgagcgtactgatcgttggcggcggaatgaccggcgcgacgctggcgctcgcaatatctcgtctgaccggcggtaagctgccggtgcacctgattgaagcaacagtgccggaatctgcccggcatccgggctttgacgcccgggcaatcgcacttgctgccggcacctgtcagcagctggctcgcgttgatatctggcaggaaattgctgaccgcgccacggctattcagcgcgttcacgtcagcgatcgcggtcacgcggggtttgtgacgctcgaggctaaggactatgggctggcggcgctgggtcaggtggttgagctgcacgacgtcggccaacgcttgtttgcccagctgcgtaaagcgccgggcgtgacgctacactgtccggcaaaagtggaaaatgttagccgcagcgaagagagcgtaagcctggttctggacaacggcgaaacgctcagcggtaaactgctggtcgcggccgatggctcgcgctcaacgctgggggcccgctgcggtatcagctggcagcaagagccctatgaacagctggcgattattgccaacgtcagtaccgctgtgccgcacaacgggcgtgccttcgaacgttttacccaacacggtccgctggcgatgctgcccatgtcgcagggccgctgctccctggtgtggtgtcatccgcagtcgcggcaagaagaggtcctgagctggtcggacgaacgcttctgtcatgaacttcagcaggcattcggctggcgtcttggccggatcgtccaggcaggcaagcgcagcgcgtatccgctctcgctcacccgagctacccgcaccattgcccatcgtctggcgctggtcggcaatgcggcgcaaacgctgcatcctattgccggacagggttttaaccttggcctgcgcgacgtgatgagcctggcggaaatgctggcgcagacgcatgccgaaggagaggatccgggtggctattcgctactgagtcgctatcaggcccgccgcgccgcagataaagccgccaccgtcggtgtgaccgatgggctggtgcatctgttcgctaatcgctgggcgccgctggtggcggggcgcaacgcaggcctgatggcgatggaattatttaccccggcgcgcgatgcgctggcgcagcgtaccctcggttgggtcccccgttaa

SEQ ID NO: 255193 - DNA, 1203 bp, Klebsiella pneumoniae
gtgcaaagtgttgatgtcgctattgttggcggtggaatggtggggctggcggttgcctgtggtttgcagggcagtggactgcgcgtcgccgtgctggagcaggccgcgccgcagccgttaagcgcggatgcgccgccggcgctgcgggtgtcggcaattaatgccgccagcgagaagctgctgaacaaactgggcgtctgggaggacatagtcgcccggcgcgccagctgctaccacggtatggaagtgtgggacaaagacagttttggccgtatcagctttgatgaccagagcatgggctttagccaccttgggcatattattgaaaacgccgtggtgcatcatgctctgtggcaaaaagcgcagcgctgtgctgacgtcacgctactggccccggcgcagctgcagcaggtcgcgtggggcgagaatgaggcctttcttagcctgcaggacggcagcatgttaaccgcccggctggtggttggcgccgatggcgccaattcgtggttgcgtaataaagccgatatcccgctgaccttttgggattatcaacatcatgcgctggttgccactattcgcaccgaagagccgcacgaagcggtggcgcgtcaggtatttcacggcgatggtattctggcgttcctgccgttaagcgatcctcatctctgttcgattgtctggtcgttgtctcctgaagaggcggaacgaatgcggcaggcagacgaggccgcttttaatcaggcgttgaatattgccttcgataaccgtctgggtttgtgttccgtagagagcgaacgtcaggtttttccgctcaccggccgctacgcgcggcagtttgccgcccaccgtctggcgctggttggcgatgccgcccataccattcatccgctggcggggcagggcgttaatcttggctttatggatgccgccgaactgattgatgagttgaagcgcctgcatgcgcagggcaaggacatcggccagcatctctatctgcgtcgctatgagcgcagccgcaagcacagcgctgcggtgatgctcgcggggatgcagggcttccgcgacatgttctccggcaaccatccggcgaaaaagctgctgcgcgatattggactcaagctggcggatactctccctggcgtgaagccgcagcttattcgacaagcaatggggctaaacgatctcccggcctggttacgttaa

SEQ ID NO: 255194 - DNA, 699 bp, Klebsiella pneumoniae
  misc_feature (641)..(650): n is a, c, g, or t
atggctcaacagactccgttgtttgaacaacacacgctatgcggcgcgcgcatggtggatttccatggctggatgatgccgctgcattacggatcccagatcgatgagcaccatgcggtgcgcggtgatgccggaatgttcgatgtgtcgcacatgaccatcgttgattttcacggcagccgaattcgcgagttcctgcgctatttgctggctaacgacgtggcgaagctcacggtcccgggcaaagcgctctatagcggcatgctgaccgcctctggcggcgtcattgacgacctgattgtttatttcctttctgaagattatttccgcctcgttgttaactccgccacccgtgaaaaagacctcgcctggatcacccagcagtctgaatcctatggtcttgaaatgaccgtgcgtgacgatctttccctgatcgctgtacaaggtccaaaggcaaaagagaaagcggcgacgctgtttaccgacgcgcagcgccaggctgtagaaggcatgaagcctttctttggcgtgcaggcgggcgatctgtttattgcaaccaccggctataccggcgaagcgggatatgaaatcgcgctgccgaacgagcaggcggtggatttctggcgcggcctgctggacgnnnnnnnnnnacgagcagggggtggatttctggggcggcctgctggacgcgggcgttaa

SEQ ID NO: 255195 - DNA, 483 bp, Klebsiella pneumoniae
gtggatttctggggcggcctgctggacgcgggcgttaagccgtgcggccttggcgcgcgcgatacgctgcgtctggaagcgggaatgaatctttatggccaggagatggacgaaggcgtctctccgctggcggctaacatgggctggaccattgcctgggagcctgctgaccgtgactttatcgggcgtgaggcgctggaactccagcgtgaaaaaggcaccgaacagctggtcggtctggtgatgaccgagaaaggcgttctgcgcggcggcctgccggtacgcttcagcgatgccgagggcaatcagaaagaaggcattatcaccagcgggaccttctccccgacgctgggctacagtattgccctggcgcgcgtaccggaaggcatcggtgaaaccgccgtggtgcagattcgcaaccgcgaaatgccggtcaaagtgacgaaacccgtttttgtacgcaacggcaaagccgtggtgtga

SEQ ID NO: 255196 - DNA, 2874 bp, Klebsiella pneumoniae
atgacccagactttaggccagcttgaaaaccgtgacgcctttattgaacgtcacatcggcccggacgcccgacagcagcaggagatgctgaataccgttggcgccgattcgcttaacgacctgattggccagattgtgccgcaggatattcagctggcgacgccgccgcaggtgggcgaagcaaccacggaattcgccgcgctggcggagctgaaggcgattgccggtcgtaacaagcgcttcaagtcatacattggcatgggttacaccgccgtgcagctgcctccggttattcagcgcaatatgctggagaacccgggctggtataccgcctacacgccttatcagccggaggtttcccagggtcgcctggaatcactgctgaactttcagcaggtgacgctcgacctgaccggtctggatattgcttcggcctcgctgctggacgaagccactgccgccgcggaagcgatggcaatggccaaacgcgtgagcaaactgaaaaacgctaaccgtttctttgttgccgccgatgttcatccgcagactctggacgtggtacgtacccgcgcagaaactttcggtttcgatgtgattgtcgatgatgccgagaaagccctcgaccatcaggacgtcttcggcgtgctgctgcagcaggtagggacgaccggcgaggttcatgattacagcaaactgattgctgatctgaaagcgcgcaaagtgattgtcagcgtcgcagccgattttatggcgctggttctgctgacggctccgggcaagcagggcgcggacattgtgtttggctccgcccagcgcttcggcgtacctatgggctacggcggcccgcacgcggcgttttttgccgcaaaagatgaattcaaacgttccatgccgggccgtattatcggcgtatcgaaagatgcggcgggcaataccgcgctccgcatggcgatgcagacccgcgagcagcatatccgccgcgagaaagcgaactccaatatctgtacctcccaggtactgctggccaatattgccagcctgtacgccgtgttccacggcccggccggcctgaagcgtatcgccagccgcattcatcgcctgaccgatattctggccgcaggtctgcagaaaaaaggcctcaagctccgccatgcgcactactttgacaccctgtgcgtggaagtggctgataaagcggctgtgctggcgcgggcggaagcgctgcagatcaacctgcgtagcgatattcatcacgccgtcgggatcacgctcgacgaagccaccactcgtgaagacgttctgaacctgttccgcgctatcgttggcgacgatcgtggcctggatatcgacgctttggataaagatgtggccctggacagccgttcaatcccggccagcatgctgcgcgacgatgcgatcctcactcatccggtgttcaaccgctatcacagcgaaaccgagatgatgcgctatatgcacgcgctggagcgtaaggatctggcgctgaaccaggcgatgatcccgctgggctcctgcacgatgaagctgaatgccgccgccgagatgatccccatcacctggccggaatttgccgaactgcatccgttctgcccggtcgatcaggccgaaggctatcaccagatgatcgctcagctctccgactggctggttaagctgaccggctatgatgcggtatgcatgcagccgaactccggcgcgcagggtgaatacgcgggcctgctggcgattcgccattatcacgagagccgtaacgaagggcatcgcgatatttgcctgatcccaagctccgcacatggtaccaacccggcttccgcgcagatggcggggatgcaggtggtggtggtcgcctgcgataaaaacggcaatatcgacctggcggatctgcgggccaaagccgagcagtatgcggcgaacctctcgtgcattatggtcacctatccttccacccacggcgtctacgaagagactattcgcgaagtgtgcgaagtggtgcatcagtttggcggccaggtttaccttgacggcgcgaacatgaacgcccaggtcggtattacctctccaggctttatcggcgcggacgtctcgcaccttaacctgcataaaaccttctgcattccgcacggcggcggcggtcccgggatgggacctatcggcgtcaaatcgcacctggcgccgtttgtaccgggccacagcgtggtgcaaattgaaggcatgctgacccgtcagggcgcagtttccgccgcgccgttcggcagcgcctccattctgccgatcagctggatgtatatccggatgatgggcgcagaagggctaaaacaggcaagccagatggcgattctgaacgccaactacattgctacccgtctgaaaaacgcgttcccggtgctgtataccggccgtgacggtcgcgtggcgcacgaatgcattctggatattcgtccgctgaaagaagagaccggcatcagcgagctggatatcgctaagcgactgatcgattatggtttccacgcccctaccatgtccttcccggtcgccggcacgctgatggtggaaccgaccgaatcggaaagcaaagtggagctggaccgctttatcgatgcgatgctggcgattcgcggcgagatcgaccgcgtgaaagccggcgagtggccgctggaggataacccgctggtgaatgcgccgcatactcagggtgaactggtgagcgagtggaaccatccgtacgctcgtgaactggcggtgttcccggccgggctgaacaataaatactggccgatcgttaagcgtctggacgatgtttacggcgaccgcaatctgttctgctcctgcgtaccgatgagcgaatatcagtaa

SEQ ID NO: 255197 - DNA, 744 bp, Klebsiella pneumoniae
atgacgatagcattggtgacgggcggtagccgcggaataggtaaagcgacggcgctgctgctggcgcaggaaggctataccgtagtagtgaattaccatcagaatagcgctgccgcgaccgacgtggtgaatgagattcgcgcctgcggcggcaaagccgttgcgctccgggcggacgtcagcgatgaagcgcaggtgatggagatgttcgccgctatcgaccgcctcggtgaaccgctttccgcgctggtcaataacgccgggattttatttacccaagggacgattgaaagcctttgcgccgagcgaattaaccgggtgctggccaccaatgttaccggctacttcctttgctgccgggaggcggtaaagcggatgtcgcacaagcatggcggtaaaggtggggcgattgtgaatgtttcatccgcagcatcgcgcctcggggcgccgggagagtacgtggattatgccgcttcaaaaggcgcggttgattccctgaccaccggattgtcgctggaggtcgcggcgcagggcattcgggttaacggcgtgcgccccggattaatttataccgacatgcacgccagcggcggcgagccgggacgcgtggatcgcgtcaagtcgatgctgcccatgcagcgcggcgggcagccggaagaggtggcgcaggcgatcgtctggctactgagtgataaggcctcctacgtgaccggcagcttcctcgagctggcgggcgggagatag

SEQ ID NO: 255198 - DNA, 492 bp, Klebsiella pneumoniae
atgatgcttaaagtcttcagacagctcctgacatggatcctgattgttgccgccgtcagtctgacggtggattatctacgcaggcccgcgctgccgcagaatttctccagcatgccgctgcaaacgcttgatggtcgaacggtcgatctggcggcaatgagccaggagcgtcccttattgctgtacgtctgggcaacctggtgcagcgtatgccgctataccaccccgtcggtggctgctttagccgacgatggcggtaatgttatgacggtagcgttacgttcgggcgataacgccaccctggcgcgctggctggcgcataaaaaaatggcactgccgacgatcaatgaccccagcggtcagctatcccaacggtgggaggtacaggtcacgccgactcttatcgttatctcgcgcggcgaggtgaagtcagtcaccaccggctggaccagcaactggggaatgcgcctgcggctatggctggcatcatag

SEQ ID NO: 255199 - DNA, 756 bp, Klebsiella pneumoniae
atgaattgtgagtttgccactgtgagtatcttctcccacgccgctatcgccagtctcaataatcttgagatgatggtctatcactacgtcattaaaaatcgcgacaaagtgatgtacatgaccatccgcgagctggcggaagcggccggagtctccacgactaccgttctgcgcttctgccgcaagctgcagtgcgaaggctactcggagtttcgcgtacgctttaaattatatctggagcagaatgagcctcaacaggcaaatatcggcgccagcgaaataatgagcttttttaaaagcatcaataacgatgaatttgaccaactgctcgagcaggcggttgatattatactcgcttcggaaagaattattttcgtcggcgccggcacctccggcgcgctggcaaaatatggcgcacgtttcttttctaacgtcggaaaattcagcaatcatatcgacgatccttattttccggtgaccaatgatatggcgcgcaatgctctggctattgtgctgtcggtctccggtgaaaccgaagaaatcctgcgctttgccagccagttcagcctgcatcgctgtaaagtgatgtccatcaccagccacgagcactcgcggctggcaaagctcgccgacttcaatctctcctggcacgttccgcaaacgcgcatcggcggcgtctacgatattaccacgcagatcccggttatttatattctggaaacgctgggccgtaaattagcgcgcaaactcgtctga

SEQ ID NO: 255200 - DNA, 312 bp, Klebsiella pneumoniae
atgcagcctaatgacataaccttttttcagcgttttcaggacgacattctcgccggacgcaaaacgattaccatccgtgatgctgctgaatcgcactttaaaacgggcgatgtgctgcgcgttggccgctatgaagatgacggctatttttgcactattcgcgtggtggccacctcaacggtaacgctggatacgctgaccgaactgcatgcgcagcaggaaaacatgacgctggcgcagctgcgtgaggtgattgcggagatctatcctgaagaaaagcagttttatgttattgaattcgaaaagctttaa

SEQ ID NO: 255201 - DNA, 660 bp, Klebsiella pneumoniae
atggttcgcaaatcgttaatcacacagggatattctctggcagaggaagttgccaacagcatcagtcacgggatcgggctggtgttcggtatcgttggtctggtgctgttgttggtgcaggcggtagatagcaacgccggcgcaacggctatcaccagctacagtctgtacggcggcagcatgattttgctgttcctcgcctcgaccctctatcacgcgattccgcatcagcgggctaagctgtggctaaaaaaattcgaccactgcgccatctacctgctgattgccggaacctacacgccgtttctgctggtggggctaaattcgccgctctcgcgcgggctgatgatcgtcatctggagcctggcgctgctggggatcctgtttaagctgacgattgcgcatcgttttaagatcctctctttagtgacctatctgactatgggctggctgtcgctgatcgtcgtttatcagctggcgattaagctggcgattggcggcgtgacgctgcttgcggcgggcggggtcgtctattcgctgggggttattttctacgtctgtaagcgtattccgtacaaccacgctatctggcacggctttgtgctgggcggcagcgtgtgccacttcctggcgatttatttgtacgtcgggcaggcttaa

SEQ ID NO: 255202 - DNA, 984 bp, Klebsiella pneumoniae
atggcttttacaccttttcctccgcgtcagccctcctcttccgctcgtctgccgttaacgctgatgacgctggatgactgggcgctggcgacgattaccgggccggatggcgagaaatatctgcaggggcagatcaccgctgacgtcagccacctgaccgacgagcagcatctgcttgccgcgcattgtgacgccaagggcaagatgtggagcaatctgcgcgttttccgtcgcaacgagggttttgcgtggattgagcgccgcagcctgcgcgatgcgcagctgactgaactgaaaaagtatgcggtgttctctaaagtgaccatcgccgccgacgatgaatccgtgctgctgggcgttgccgggttccaggcacgcgctgcgctgacgccgctgtttaacgagctgccaaatgccgataaacaggttgtcagcgaaggtgccaccagcgtgctgtggtttgagcatcccgccgaacgcttcctgctggtgaccgatgtggcaaccgccacccgcatcaccgacgcgctgcgcggcgaagcacagctaaacaatagccagcagtggctggcgctgaatattgaagcaggccagccggtcatcgacagcgccaacagcgcgcagtttattccgcaggccaccaacctgcaggcgctgggcggcatcagcttcaaaaaaggctgctataccggtcaggagatggttgcccgcgctaaattccgcggtgccaacaagcgcgccctatggtatctggccgggaccgccagccgcgtgcctgaagccggggaagacctggaaatgaagatgggtgacaactggcgtcgtaccggtaccgttttagcggccgtgcagctggatgatggtcgcctgctggtgcaggtagtgatgaataacgatatggagccgggcagcgtattccgcgtgcgcgatgatgccggcagcctgagcattgagccgctgccgtattcgctggaagagagttaa

SEQ ID NO: 255203 - DNA, 138 bp, Klebsiella pneumoniae; identical to SEQ ID NO: 175828

SEQ ID NO: 255204 - DNA, 267 bp, Klebsiella pneumoniae; identical to SEQ ID NO: 175829

SEQ ID NO: 255205 - DNA, 411 bp, Klebsiella pneumoniae
gtggtcctgtggcaatctgatttacgcatctcgtggcgagcgcaatggttctcactgttgatgcacggcgtggtggcggcgctggtgctggtgttgccttggccgctgagctataccccgctgtggctgatactgctgtcgctggtggtgttcgactgcgtgcgcagccagcggcggatccatgccagacagggggaaataaagctgctgattgactctcgcctgcgctggcaaaaagcggagtgggatatcgtcggcaccccgtgggtaatcaatagcggaatgctgctgcgcctgagaaatacggaaaaccaacgcactcagcatctatgggtggcggcggatagcatggacgcgggcgagtggcgcgatctgcgtcggctggtgttacagaaaccgacgcaagattaa

SEQ ID NO: 255206 - DNA, 897 bp, Klebsiella pneumoniae
gtggaacaggatctcgcacaaatcgagcagtttcttgatgccttgtggctggagcggaatctggcggaaaacacgctgagcgcctaccgccgggatctgacgatggtcgtggaatggctgcatcatcgtggcctgtcgcttgccagcgtcagcggcgaagatctgcagtcgctgctggcggagcggcaaaccggcggttataaagccaccagcaccgcgcgcctgctaagcgccgtgcgtcgcttcttccagcatctgtaccgggaaaaaattcgccccgatgaccccagcgcgctgctcgcatcgccaaagctgccgcagcggctgccgaaggatctgagcgaggcgcaggttgagcgcctgcttcaggcccctttggttgaacaaccgctggaactgcgtgataaagcgatgctggaagtgctgtacgccaccggtctgcgcgtttctgaactggtgggcctgaccatgagcgatatcagcctgcgtcagggcgtgctgcgcgtgatcggtaaaggaaataaagaacgtctggtgccgttaggcgaagaggcggtactgtgggttgagaattacctggagtacgggcgtccctggctgctgaacggcgtggcctccgatgtgctttttcccagccagcgcgcgcagcagatgacgcgccagacgttctggcatcgaattaagcactatgccgtactggcgggaattgatagcgaaaagctctctccgcacgtgctgcgccatgcgttcgctacccatttacttaatcacggcgccgacttacgcgtggtgcagatgctgttaggacacagcgatctctccacgacgcagatctatacccacgtggcgaccgagcgtctgcgacaactccatcaacagcatcacccgcgtgcgtga

SEQ ID NO: 255207 - DNA, 714 bp, Klebsiella pneumoniae
atgaaaaaaggtttactgatgttcactctgctggcgaccaccttatccggtgcggcgcatgccgatagcgcggcgatcaagcaactgctggcgaagcttggcgtgcagagctcggacgtgcagccttcgccggtcaaaggcatcagcaccgtgttgacggacagcggcgtgctgtacgtcaccgatgatggtaaacacattatccaggggccgatgtacgatgtcagcggcgcgcagccggtaaacgttaccaatgcgctgctgggggggaagctaaacgccctggaaaaagagatgatcgtctacaaagcgccgcaggaaaaacatgtcatcaccgtcttcaccgatattacctgcggttactgccacaagctgcatgagcagatgagcgactataacgcgctggggattaccgtgcgctatctggccttcccgcgccaggggctgcaaagcgaagccgagcagaatatgaaggctatctggtgcgccaaagatcgcaacaaagcgctggataacgcgatgagcggcaaaggcgtgcagccagcgagctgcgatgttgatatcgctaaacactacacgctcggcgtgcagcttggcgttaacggcacgccggcgatggtgctgagcgacggtacgctgatgcctggctatcgcgatcctaaagacctgaaagcgctccttgatgagcatcaaaaacagataagcggtaactga

SEQ ID NO: 255208 - DNA, 1734 bp, Klebsiella pneumoniae
gtgaaacaacagatacaactacgccgccgcgaggcggctgacggcgtcgatttacctgccgatctccctccgctgctgcagcggctgtacgccagccgcggcgtgcgtagcgcgcaggagctggaacgcggtgtaaaaggtatgctgccatggtcgcagctgaccggcgtcgaaaaagcggtagagatgctctacggcgcatttaagcaggagctgcacattgtggtggtcggcgattttgacgccgacggcgctaccagcactgcgcttagcgttctggccctgcgggggctgggctacggcaacgtctcgtacctggtgccaaaccgttttgaggatggctatggcctgagtccggaagtggtcgatcaggctcacgcccgcggcgcgcagatgataatgaccgtggataacggcatttcctcccacgccggcgtcgagcgcgcccatgcgctgggtattccggtgctggtgaccgatcaccatctgccgggggatacgctgcctgccgccgaagcgattattaacccgaacctgcgggactgcgagttcccgtcaaaatcgctggccggggttggcgtggccttttatctgatgctggcgctgcgcacttttctgcgtgataaaggttggtttgatgagcgcggcattgcgccgccgaatctggcggatttactcgatctggtggcgcttggcaccgtggcggacgtcgtaccgctggatgccaacaaccgtattctgacctggcaggggctgagccgcattcgggcaggtaaatgccgtccgggcatcaaggctctgctggaaatcgccaaccgcgatccgcaaaagctggcggcaagcgatctcggcttcgcgcttggcccgcgccttaatgcggcagggcggctggacgacatgtccgtcggcgtggcgctgctgctgtgcgacaacaccggcgaagcgcgggtgctggccaatgagctggacgcgttaaaccagacgcgtaaagagatagaacaggggatgcaggcggaagcgctgaccctgtgtgaaaagctggaacgcagcagcgagacgctgcccggcggcctggcgatgtaccacccgcagtggcatcagggcgtcgtcggcattctggcctcgcgtattaaagagcgcttccatcgcccggttatcgcctttgcgcccaccggtgacggtacgctcaaaggctcaggtcggtcgattcaggggctgcatatgcgcgatgcgctggagcgtctggataccctctatcccgggctgattctgaagttcggcggtcatgccatggcggcgggtttgtcgttagaagaggcgcgttttgaggagtttcagcagcgtttcggcgaactggtgaccgagtggctcgatcctgcgctactgcagggcgaagtggtctccgacggcccgctggcggcggcagagatgagcatggaggtcgcacaaatgctgcgcgacgccgggccatgggggcagatgttccctgagccgctgttcgatggccgttttcgtctgctacaacagcgtctggtcggcgagcgtcacctgaaggtgatggttgagccggtcggcggcggcccgctgctggacggtattgcgttcaatgtggatacttccatttggccggataacggcgttcgcgaagttcagcttgcctataagctggatatcaatgagttccgcggcaaccgcagcctgcagctgatcattgaccacctctggccaaattga

SEQ ID NO: 255209 - DNA, 882 bp, Klebsiella pneumoniae
atgtctcaggggctggaggatgtttccggtctgctggagctggccgttgaagccgacgacgaagagacctttaacgaagccgttgctgagcttgatgtgctggaagagaagctggcgcagcttgagttccgccgcatgttctccggcgaatacgacagcgccgattgctacctcgacatccaggccggttccggcggtacggaagcgcaggactgggcgagcatgctgatgcgcatgtatctgcgctgggccgaagcgcgcggcttcaagaccgagatcatcgaagagtctgaaggcgaagtggcgggcattaagtccgtgaccatcaagattattggcgactacgcttacggctggctgcgtaccgaaaccggcgttcatcgtctggtacgtaagagcccgttcgattccggcggccgccgccatacctctttcagctccgcattcgtttatccggaagtggatgacgatattgatatcgaaatcaacccggcggatctgcgcattgacgtttatcgcgcatccggcgcgggcggtcagcacgttaaccgtacggaatccgcggtgcgtatcacccatattccgaccggcttagtgacccagtgccagaacgaccgttcgcagcacaagaacaaagaccaggccatgaagcagatgaaagcgaagctttatgagctggaaatgcagaagaaaaatgccgagaagcaggcgatggaagataccaaatccgacatcggctggggcagccagatccgttcttacgtgctggatgactcccgcattaaagatctgcgtaccggggtggaaacccgcaacactcaggcggtgctggacggcagcctggatcaatttatcgaagcaagtttgaaagcagggttatga

SEQ ID NO: 255210 - DNA, 489 bp, Klebsiella pneumoniae
gtggaatttgtccggcagcgggcgcagagctttagtcaacagacgcagctcggtgcagtggatagagagctcaccggttttggtcttgaacaacttaccgcgggcggcgatgatgtcgccgaggtcccactttttgaactggtcgttataaacgccttccgccaggtcatcacgcgccacgtacagctggatgcggccgcctacgtcctgcagggtcacgaaggacgctttacccatgatacgacgggtcatcatgcggccagcaacggccacttcaacgttcagcgcttccagctcttcgttttctttggcatcgaattcagcgtgcagttggtcagaggtgtggtcacgacggaaatcattcgggaacgggataccctgctcacgcagcgcagccagcttctcacgacgggctttcagttcattattaaggtcaattgccgcgtcagcgccctgtgcttgttgttcagacatgttggttcctcataa

SEQ ID NO: 255211 - DNA, 750 bp, Klebsiella pneumoniae
atgattatcctggttaccggagcaaccgcgggttttggtgaaagcattactcgccgttttatcgctaacggtcacaaagtgattgccaccgggcgtcgcgaagaacgcctgaaaactcttaaggatgagctgggcgagaatctttataccgcccagctggacgtacgcaatcgcgcagccatcgaagagatgattgccgggctgccggctgactggcaggcgattgatgttctcgtcaataatgccgggcttgcgctgggtcttgaacccgcgcataaagccagcattgaagactgggaagacatgattgacaccaataacaaagggctggtttatatgacccgcgccgttctgcctggaatggttgaacgtaatcgcggccatatcattaacatcggctcggtcgccggcgcgtggccatatgcaggcggtaacgtctacggcgcgaccaaggcgtttgtgcgccagttcagcctgaacctgcgtacagacctgcacggtacggccctgcgcgtgaccgatattgaaccgggcctggttggcggaaccgaattctctaacgtgcgctttaaaggtgacgacgcgaaggcgggtaaagcctacgagaataccgaagccctgacgccggaagacgtcaccgaagcggtctggtgggtcgcgaacctgccaaaacacgtcaacatcaacaccctggaaatgatgccggtcagccaaagttttgccggactgaacgttcaccgtcagggctaa

SEQ ID NO: 255212 - DNA, 687 bp, Klebsiella pneumoniae
atggccgcagaagctcaactgaatccgacacagcccgtaaatcagcaaatttatcgtatccttcgtcgggatatcgtccattgtctgattccgcccgggaccccgctttcggagaaagaagtctccgtgcgctttgacgtttctcgccagccggtgcgcgaagcctttataaaactggctgaaaatggcctgatccagatccgtccgcagcgcggcagctacgtaaataagatctctctctcgcaggtacgcaacggttgttttgtccgccaggctatcgaatgcgccgtggtgcgacgcgctgccggaatggtgaatgatgagcagctctaccagcttgagcaaaatcttaatcagcagcgcacggcggttgagcgccagcagttaaccgattttttccagctggatgatgagtttcatcagaagctttcgcaaattgccgactgtcagctcgcctgggataccgttgaaaacattaaagccaccattgaccgggtgcgctacatgagcctcgatcacgtcactcctcccgatatgatgctgcgccagcattatgatattttccagccgctggtggcccgcaacccggatgcggttgaaaaggcgatgagcctgcatctgcaagaaattagcgaatccgtgctgctggtacgtcaggaaaatagcgactggtttagcgaagagtaa

SEQ ID NO: 255213 - DNA, 432 bp, Klebsiella pneumoniae; identical to SEQ ID NO: 171949

SEQ ID NO: 255214 - DNA, 1464 bp, Klebsiella pneumoniae
atggaaaatatgcttttaacagcgcatgccacgctgccatcctacgatcgtaaccgtctcgttccgcgcattgtccatctgggctttggcgcatttcatcgcgcgcatcaggccgtatatgcagatattctggcgacggagcacgacagcgactggggttatattgaggtaaacctgatcggcggcgaacagcagattgccgacctgcagcagcaggatttactttttaccgtcgcggaaatgtcggccgatgcctggaccgctcgcgttgttggcgtggttaagcaggcgatacatgcccaggtggatggcctggaaagcgtactggcgaaaatgtgcgagcccgaggtcgcgattgtgtcactgaccattactgaaaagggctactgccactctccggccagcggccagctgcagctggaccatccgttaattgctgccgatttacaacatcctcatcaaccgaaatccgcgctgggcgtggtggttgaagcgctggcgcggcgcaaagcagcaggactgccgccgttcagcgtcatgtcctgcgataatatgccggaaaacggtcacgtaatgcgtaatgtcgtctgcgcctatgctaacgctgtcgatgctgagttagccgagtggattgcgcgtaatgtcacttttccctccactatggtggaccgcatcgttccggcggtaacggccgatacattagagaaaattgagcagcttaccggcgttcgtgacccggcgggcgtcgcctgtgagccgtttcgccagtgggtcatcgaagataactttgtcgccggtcgtccagaatgggagaaagccggcgccgaactggtctctgacgtgctgccgtttgaagagatgaagctgcgtatgctaaacggcagccactctttccttgcctggctgggctatctggccggctaccagcatattaatgactgcatgctggacgacaactatcgccgcgccgcgcatgcgctgatgatgactgagcaggcgccgacgctaagcgtgcagggcgttgatctggcacgctatgccggcctgttgatcgatcgctatagcaacccggcgctgcagcaccgtacctggcagatagccatggacggcagtcagaagctaccgcagcggatgctggattcgattcgctggcacctggttcatggcagcgactttacgctgctggcgatgggcgttgccggctggatgcgctacgtcagcgggttggacgaccgggggcaggaaattgaaatttccgatccgctattgccgatcatccagcagactgtccaaaatagcgcggacggagaagagcgggttaaagcgctgatgggcattgaggctattttcggccaggacctgagccaggagccccggtttgttaatgaggttacgcgcgcttatctgtcgctgaaaaaacacggagccaaagcgaccgttgccgcctgggctcaggagaactaa

SEQ ID NO: 255215 - DNA, 1377 bp, Klebsiella pneumoniae
atgactaccgttaaaaatgagagaaccacttccgatctcattcgtgcagccgtatctggttggttaggtactgcgctggagtttatggatttccagctctattccctgggcgcagcgctggttttccacgagatatttttcccggagcaatctgccgctatggcgcttattctggcgatgggcacgtacggcgcaggctatattgcgcgcatcgtcggcgcctttattttcggtaaaatgggcgaccgtattgggcgtaagaaagtcctgtttattaccatcacgatgatgggtatttgcactacgctcattggcgtgctgccaacctatgcgcaggtggggattttagcgccggtattgctggtcacattacgcattattcagggactgggcgcgggcgctgaaatatccggtgcgggcaccatgctggcggaatatgcgccgaaaggtaagcgcggaattatctcttcgctggtagcgatgggaaccaactgcggtaccttaagcgctacggctatctgggcggtgatgttcttcgtgctggatcgcgaacagctcgtcgcgtggggatggcgtgtgccgttcctcgcaagcgtagtggtgatgatctttgccatctggctgcgcctcaatctgaaagaaagcccggtatttgaaaaggtgagcgaagaaggcagtctgcaaaatggagtggccgctcaggaaggctccttcagcgcaatgctgaaaagtaagtctttctggctggccacggggctgcgctttgggcaggccggaaattcagggctgttgcaaacgttcctggcgggctatctggttcaaaccttaatgtttgataaaggtatccccaccgatgcgctaatgatcagctccgtgattggttttatcaccattccattcctgggctggctgtcagataaagtagggcgccgcatcccttatattatcatcaatatttcagccattattctggcctggccgatgctgtcgattattgttgataaaagctacagcgcgagcaccattatggcgtcattaatcgtcattcataacgtcgctgtattaggcctgtttgcgctggaaaatattacgatggctgaaatattcggctcacgtaaccgctttacccgcatggcaatctctaaagaggcgggtggtttagtcgcggttggctttggccctgttctggccggtatcttctgtaatatgaccggttcatggatgcccattgttgttatgctggtgtgctactcaatcatcggcttaatttctgccatcctgatgcctgaagttcgcgatcgcgatctgagcttgctgaatgatgcagcggattgcgcaccgcagaataaagcggtgggcaacggacaatatatttaa

SEQ ID NO: 255216 - DNA, 1053 bp, Klebsiella pneumoniae
  misc_feature (349)..(358): n is a, c, g, or t
atgaaaagtatcgtaattcgtcagccgaatgaactggtgattgaagagcgtccgctcccgcaacctgccgcaggagaagtacgggttaaggtgaaactggcgggaatatgcggttccgatagccatatttaccgtggacataatccgtttgccaaatacccgcgggtgataggccatgaattttttggcgttatcgacgccattggcgagggcgttaccgacaaagccatcggccagcgcgtgagcgttgatccggtcattagctgcggtcattgctacccctgttccgtgggcaagccgaacgtctgcacttcgttagtggtgcttggcgtgcatcgggacggggggnnnnnnnnnnttggcgtggatcgggagggggggtttagcgaatacgcgatggtgccggcgaaaaatgcctggcgggtgcctgacaacgtttccgacaaggatgcggtgatgattgagcctttcactattgcggccaacgttaccgggcacgtttcgccgaccgaccaggatattgcgctggtatacggcgcgggtcctatgggcctgacgaccatacaggtgctgaagcgggtgtaccgcgttaagcaggttatcgttgtcgaccgcatcgatgaacgcctgcagatggccgagcgtaacggagcggattgggtaattaacaacagcaatgagcctctggctgacacgctgaaggcgcaggggatccttccgacgctgatcattgatgcggcctgccatccctctattttacaagaggcggttaccctggcctcgccggcggcgagaattgtcttgatgggcttctcgactgagccttcgcaggtggcgcagcaaggaattacggggaaagaactgtcgattttctcatcgcggcttaacgccaataaattccccgtggtcattgattggttagaacaagggttaattgatccgcaggagttgattacccacgaatttgcgtatcaacacgttgttgacgctcttgagctttttgaaaatgacagaaaacgttgctgcaaggttttattaaccttcgggcaataa

SEQ ID NO: 255217 - DNA, 1215 bp, Klebsiella pneumoniae
atgaagatcgttgccgctgaagttttcgtcacctgcccgggacgcaacttcgtcacccttaagatcaccactgatgacggtatcgtcggtttaggtgacgcgacgctaaacggccgcgagctgtccgttgcatcgtatctgcgggatcacctctgcccgcagctgattggccgcgatgcgcaccgcatagaagatatctggcagtttttctacaagggcgcctactggcgtcgcggcccggtcacgatgtcggcgatttccgctatcgatatggcgctgtgggatatcaaagcgaaggctgcgggtatgccgctgtatcagctgctgggcggggcttcgcgggaaggggtcatggtttattgccataccaccggccactctattgacgaagtgctggacgactacgcgcgccataaagagatggggtttaaagcgattcgcgtgcagtgcggcgtgccgggaatgaaaaccacttacggtatggcgaaaggtaaaggccaggcctacgaaccggcaacgaaaggccagtggccggaagaacagctatggtccaccgaaaagtatctcgatttcactccgcgcctgtttgccgccgtgcgcgaaaagtttggttttgacgagcatctgctgcacgacatgcaccatcgcctgacgccgatcgaagcggcgcgttttggcaaaagcattgaagagtaccgcctgttctggatggaagacccgaccccggcagaaaaccaggagtgcttccgtttaattcgtcagcataccgtcacgccgattgccgttggagaagtgttcaacagcatctgggactgtaaacagctgattgaagagcagctgattgactatatccgtaccaccatcactcacgcaggcgggattacaggaatgcgccggattgccgatttcgcctcgctttatcaggtgcgcaccggctcgcacgggccgtccgatctctctccggtctgcatggccgccgcgctgcatttcgacctgtgggtaccgaatttcggcgtacaggaatatatgggctactccgagcagatgctggaagttttcccgcatagctggacatttgataacggctatatgcacccgggggaaaaaccaggactcggtatcgaatttgatgaaaaactggccgcgaaatacccctatgaaccggcttatctgcctgtcgcacgtctggaagacggcacgttgtggaactggtaa

SEQ ID NO: 255218 - DNA, 327 bp, Klebsiella pneumoniae
atggtaaaaaccacgctgcttttctttgccaccgcgctgtgcgaaatcattggctgctatttaccgtggctatggttaaaacgtggggcgacgccctggctactgattccgaccggcctggcgttggcgctttttgtctggctgttgacgctgcacccggaggcgagtggacgggtgtacgccgcttatggcggagtatatgtttgcaccgctctgctatggttgcgtttcgtcgatggcgtcaaactgagccattatgattgggccggggcgctggttgcgctgtgcggcatgctgattattgtggccggctggggacgcgcttag

SEQ ID NO: 255219 - DNA, 342 bp, Klebsiella pneumoniae
atgaacacaacactgaacaaacgctggtgtctgaccgccctgctggcgctgagcgcgatggtctttaccgcatcgtcgttcgccaaaacggacaagctggtcattgagtccggcgacagcgcccagagccgccagcaggccgcgatggaaaaagagcagtggaacgacacccgctctttacgccagaaggtcaacaagcgcgccgaaaaagagtgggataaagccgacgtggcttttgatgcccaggacaattgccagaagagcgcgaacgtcaacgcgtactgggaacctaacaccctgcgctgccttgaccgccgcactggccgcactattactccgtaa

SEQ ID NO: 255220 - DNA, 561 bp, Klebsiella pneumoniae
atgactgacgcttatcacgtcaaactccgcccgcttgagcgcgaagacctccgctttgtccaccagctcgacaacaacgccagcgttatgcgctactggtttgaagagccctatgaagcctttgttgaactttccgacctgtacgacaagcacattcacgatcagagcgaacgccgctttgttattgaatgcgacggcgaaaaggccggactggttgagctggttgaaatcaaccacgtgcaccgtcgcgctgagtttcagatcatcatctcccctgattatcagggcaaaggactggccacccgcgccgctaagctcgccatggattacggctttatggtgctcaacttatataagctctaccttatcgtcgataaagaaaatgaaaaagcgatccacatctaccgcaagctcggatttatggtggaaggtgaactgatccacgaattctttattaacggtgaataccgcaataccatccgtatgtgcctgttccaacaccagtatctggccgagcataaaccacagggccagacgctgctgaaaccgacggctcagtaa

SEQ ID NO: 255221 - DNA, 711 bp, Klebsiella pneumoniae
gtgaaaaaacggtttttgctgttactggctgtcggagcgcttagcgcctgcgatgaaaaggaagcacctcaggccttcactcccgaaatggccagtttttctaacgaatttgagttcgatccgctgcgtgggccggtgaaagagtttagccagacgctgtatgacgaacatgatgaagtggtgaagtgggttaaagggcgtttatccagcgaagggtgctttgacctgctggcctttgaagacctggagaacaaaaccggcgcggcgctggtgctggacgcgaactactatctggatgcgcaaagccaggaaaaacgcctgcgtttgcaaggaaaatgccagctggcggaaatgccttcggcgggcgtgtcgtgggaaaccgatgataacggatttgttgtgaccgctcgcggcaaggagagcaccgcgacctaccgctatgatagcgaaggctatccgctgggtaaaacgaccaccgctaaaggcgagcgttttacggtaagctcaacgccgtcgtccgatccgcgcaaaaagatggactacaccgcagtgagcatctttaatgaccgcacgctgggcaacgtaagtcagacctgcgattacgacgaccacgacaacccggtaagctgtgagcttaaggttgtcgacgacagcgtacagcctgcgctaatccgccactacaccatcaaaagcaccattgactattactga

SEQ ID NO: 255222 - DNA, 252 bp, Klebsiella pneumoniae
atgaaactatccccctggctctgtgcggccctgcttctgggttcgacagctgctttcgcggcgccggattcctgcgagcgggtaaaaagcgatattcagcagaaaatcatcaacaacggcgtcccggaatcgggctttagcctggcgatcgtcccgaacgaccagcccgatcggcccggcgagcaggtggtcggccactgcgccaacgatacctttaaaatcatctacacccgcgacagcggcgcgcagtaa

SEQ ID NO: 255223 - DNA, 2436 bp, Klebsiella pneumoniae
atgtctaaccaggaacataccgacggccttacccgccgaacgctaatcaaatcgaccgcccttggttcgctggccctcgccgccggcggtttatcgctgcctttcagcctccgcaatgccgccgccgcggtgcaagacgctacgcgcggtgaagaacggattgtctggggggcctgctcggtcaactgcggcagccgctgcgcgctgcgttcacacgtgcgtgacgatgaagtcgtctgggtcgaaaccgacaataccggcgcggatatttatggcgatcaccaggtgcgcgcgtgcctgcgcggccgttccattcgccggcgcattaatcatcccgatcgccttaattatcccatgaagcgcgtcggtaaacgcggcgaaggcaagtttgtccgcattagctgggaagaggcgctggatacgattgccggcaatctcaaacgcatcgtcaaagattatggcaacgaagccgtttatattaactactcttcggggattgtcggcggcaacatgacgcgttcgtcgcccaccgcctcaccggtaatgcgcctgatgaactgctacggcggctcattgaatcagtacgggacctacagtacagcgcaaattgcctgcgccatgccctacacctacggcagcaatgatggcaacagcacctccgatattgaaaacagcaagctggtggtgatgttcggtaataacccggcagaaacccgcatgagcggtggcggcatcacttattatttagaacaggcgcgcgagcgctctaacgcgcgaatgatcgttatcgacccgcgctataccgataccgccgccgggcgggaagatgagtggatcccgattcgccccggcaccgacgccgcgctggtggccggcatcgcctgggtgctgattaatgaaaatctggtcgatcagccattcctcgataaatactgcgtcggttacgatgagaaaacgctgccggcagatgccccggcgaacgggcattacaaagcgtatattctcggcgagggtgacgacggcacggcgaaaaccccacaatgggcatcgcggatcaccggcattcccgtcgaccgcatcatcaagctggcacgggaaatcggcagcacgaaaccggcttatatttgccagggatggggaccgcagcgccaggctaacggtgaactgtcggcccgagcgatcgccatgctgccgatactgaccggcaacgtcggcattaacggcggcaacagcggcgcccgcgaatccacctataccatcactattgaacgcctgccggtgctgaacaatccggttaaaaccgccatctcctgctttagctggaccgacgccatcgctcgcggcccggaaatgaccgccacccgcgacggcatacgcggcaaagagaagctggatgtgccaattaaattcctctggaactatgccggcaacaccatcatcaaccagcactcggatatcaataaaacccacgagatcctgcaggatgaaagcaaatgcgagatgatcgtggttatcgaaaactttatgacttcatcggccaaatatgccgatattctgctgccggacctgatgaccgtcgagcaggaagatattattcccaacgattacgccggcaatatgggttatctcattttcattcagccggtcacctccgccaaatttgagcgcaaacctatctactggatccttagcgaagtggcaaaacggcttggcgaggatgtccaccagaagtttaccgaaggccgtacccaggagcagtggctgcagcatttatacgcgaaaatgctggcgaaagacccggcgctcccgagctatgacgaactgaaaaagatggggatttataaacgtaaagaccccaacggccactttgtcgcctatcgcgacttccgtaaagacccggccgccaatccgttaaaaaccccgtcgggtaaaatcgagatttactccagccgtctggcggagatcgccgcaaactggcagctcgaaaaggacgaaaccattagcccgctgccgatctacgcctcaacctttgaaggctgggatgatcctttacgcgagaagttcccgctgcaaatgttcggcttccactacaaggcgcgcacccactcaagctacggcaatgtggatatactgcaggcagcctgccgtcaggaggtgtggctaaatcctctggacgccgaaaaacgcgggatcaagaacggcgatatggtgcgcgtattcaacgcccgcggcgaactgcggatcccggccaaggtgaccccgcgcatcatgcccggcgtgtcggcgatgggccagggggcctggcatgatgccaatatgaatggcgatcgtatcgatcgcggctcctgtatcaatacgctgacgacgcaccgcccttcgccgctggctaagggcaacccgcagcacaccaatctggtcgaaatcgagaaggtttaa

SEQ ID NO: 255224 - DNA, 858 bp, Klebsiella pneumoniae
atgggaaacggatggcatgaatggccgctggtgctgtttacggtgctggggcaaagcgtcgcaggggcgattatcgtcagcgggctgggctggctttcgctgaataacaactccgaagcccggcagcgcctggttcggggcatgttttttatctggctgataatggggattggctttctcgcgtcaatcatccacctcggctcgccgctgcgggcatttaacgcccttaaccgggtgggatcatcggcgttaagcaatgaaattgccagcggcgcgctatttttcgccgtcgggggtttctggtggctggtgacgattctcgggaaaatgccgcgggttctggcgaaagcctggctcctgctgactatgctgctcggctgcctgttcgtccttgagatgaccatggtgtaccagattgataccgtgccgacctggtataatgcctacaccaccgccgcatttttcctgacaatggtgctgtgcgggccgcttttcgccgccctgctgctgcgcgtagccaacgtgccgtttaacggcagagttttcgcttcaatgagcgtgctcgcgctgctggcaagcctggcggtcgtcatattgcagaacagcgagctggcggagatccacagctccgtacagcaggccagcgcactgctgccttattatggctggctgcaaatcctgcggttagttcttttggcgctgggtctcggctgctggatctgcccgctggcaagacgccagaatccgcgcatcgccagcttgctgctcggactggcactggtgatgctcggcgagtttatcggccgcggcctgttttatggtctccatatgaccgtgggtacggcgattgccggttaa

SEQ ID NO: 255225 - DNA, 609 bp, Klebsiella pneumoniae
atgatgcaatcgcaagaccgcgacgctgtcgcactcagcgcccgcacgctgggcgctctgttctcttttgcgccggacagcgagcaggctgctccgctggttgcggccctgcgcgacggcagctggcgaagtcagtggccctacgcggtgacggacggcctggcggcgctgttcgctcgcgaggacgatgaaccgctaccggaagcctggcagcggctgtttatcggtccgtgggcgctgcctgcgccgccgtggggctccgtctggctggataaagaaagcgtgttgtttggcgactcaacgctggcgcttcgtgaatggatgcgggcaaccggcatcgcgctgtccgaacaacgttcggagccggaagaccactttggcaccctgctactgctggcagcctggctgtgcgaatctgctcaggatgaggcctttaaccagcttctggcctggcatctcctcccgtggtccggccgctttctgagcgtatttgtggctgaggcgaatcagcctttttatcaggctcttggccagctggcgcaagagacgctggcgcaatggcaggtgcggctgccctgtgcggtggccgagaaaccgctctaccgttaa

SEQ ID NO: 255226 - DNA, 1260 bp, Klebsiella pneumoniae
atgtttcgccgtctggtcattgccatgctggtcggcgtcttcgccgccctcgcggttgccctgttccgccatgcaatggcgggactggaaagcctgtttctgagcaatgacagcggaagtctggtgaacgccgctgagtctatgcccggatggcgtcggctgttaacgccaatgctgggcggccttgccgcaggcgccctgctatggttctggcagcgccgcagtgttgaacgtccgcacgcgccaaccgactacatggaagctctcgagaccggcgacggcgggtttgataccccggccagcctggtaaaatcgctggcctctctgctggtggtcaccaccggcagcgctattggccgggaaggggcgatgatcctgctggccgcgctggccgcctcgctgttcgcccgccggtttacgccaaaagatgagtggaagctgtgggtcgcctgcggcgccgccgccgggatggccagcgcataccatgcgccgcttgccggcagcctgtttatcgccgagatcttattcggcactctgatgctggcgtcgcttggtccggtcgtcattgctgcggtaaccgccctgctgctcaccaatctgctgaacggaagttcggcgccgctctaccacgttgagtttcacgccaccctgcgcgcgacccactatgggttaatgctggcaacgggtttgctggccgggctttgcgggccgctgtttatctggctgatgagctatagccatcactgctttgtccggctgcgtctgtcgcccccctggcagctggcgctgggcgggcttattgtcggcctgctctcgcttctcgcgccggccgtctggggaaatggctacagtgtcgtacaaagctatctgctttcgccgccgctcttcagcgctatcattcttgtctttgtctgcaagctgctcgccgtgctggccagcagcggttccggcgcgccgggcggggtgtttacgccaacgctgtttgttggcctggggatcggcatgctgttcgccagcctgacgggactgtggctacctgattaccaggagatcgcgataatgataggcttaaccggcatggcggcgtttctggcggcgacaacccatgcgccgattatgtccacgctgatgatttgtgaaatgaccggacagtacgttttactgcccggtttattgattgccagcgtactggcatcggtgctgtcgcggacgttacgccgggattctatctaccgccatcatctcgccgagcatcgataa

SEQ ID NO: 255227 - DNA, 696 bp, Klebsiella pneumoniae; identical to SEQ ID NO: 171934

SEQ ID NO: 255228 - DNA, 1221 bp, Klebsiella pneumoniae
gtggtagcggacagtcagccaggccatatcgatcaaataaagcagaccaacgcgggcgcagtttatcgcctgattgatcagcttggcccggtgtcgcgcatcgacctctcgcgcttcgcgcagctcgcgcctgccagtatcactaaaatcgtccgcgaaatgctggaagcgcatctggttcaggaaacggaaatccaggagccgggaagccgtggaaggcccgccgtagggttgatggtggaaaccgaagcctggcactacctctcaatccgcatcagccgcggcgaaatccacctcgcgcttcgcgatctgagcagcgcgctggtggtggaagagcagctggagctggcattacaacacgtccagccctttgcgacgcggctcctcgatcacgtagaccagttctttattcgtcaccaaaagaagctggagcgtttaaccgccattgccgtcactatgccgggaattatcgacaccgagcacggtattattcaccggatgccattttatgaagacgttaaggatatgccgctgggcgagattttagccaatcataccggcgtatcggtctatattcagcacgacatcagcgcctggaccatggccgaatcgctgtttggcgcctccaggggggcgcgcgatgtgattcaggtggttatcgaccacaacgtgggggcgggggtgatcaccgacggtcgtctgctgcacgcgggcagcagcagtctggttgaaatcggccacactcaggtcgacccgtatggtaaacgctgctattgcggcaaccatggctgtctggaaaccattgccagcgtcgagagcgtgctggaactggcgcagatccgcatggccaagtcgatgagctcaatgctgcatcagcagccgctcagcgtcgagtggctatgtgaggccgcgctgcagggggatttacttgcccgcgacattatcagcggcgtcgggaaccacgttgggcggattctggcgattatggttaacctctttaacccgcagaaaatccttatcggttcacctttcaacctcgccgctgatattttatttccggcaatatctgattgcattcgacaacaatcgttaccggcctacagccgacatattgccgttgaaagcacgcagttttctaaccggggaacgatggctggtgcggctctggtaaaggatgccctctataacggatcgttgctcatacgactgttacagggttaa

SEQ ID NO: 255229 - DNA, 894 bp, Klebsiella pneumoniae
atgaatattgagctgcgtcatctgcgctactttattgcggtggcggaagaactccattttggtcatgcggcggcgcggttgaacatatctcagccgccgcttagccagcagattcaaatccttgagcagcaaattggcgcacgtctgtttgctcgtaccaaccgcagcgttagcctgacggatgccggcaagcagtttctcgccgatagtcggcagatcctctcgcaggtggaagatgccgccgcgcgggccgctcgtcttcaccacggcgagaccggcgaactacgcattggctttacttcgtcagctccctttattaaggcggtatcggacacgttgtcgaccttccgccatcgctatccggatgtgcatattcagacgcgggaaaccaacactcgcgagcagattgtgccgctaaacgaaggggcgctggacctggggctgatgcgtaacacccaactgccggaaacgctggtctgggaaagagtgctgcgtgaaccgctgctggcgatggtgccccgcgaccatccgctggcgagccagcctggcgttagcctgcgggagctggcgcgggagccgttcgtcttttttgatcctcatgttggtaccggactgtatgacgatattctggggttaatgcgccgctacgacctgacgccggtcatcacccaggaggtgggggaagccatgaccattatcggcctggttgccgccgggcttggcgtgtcgattttaccggcctcattccggcgggttcagctgtcggaaatgtgctggttgcccatcgaagagcaggatgcggtctcggaaatgtggctggtatggtctaagcatcgtgagcagggtcaggcggcgcgccgttttcgcgaatcgctgctggccagcgccaggtga

SEQ ID NO: 255230 - DNA, 525 bp, Klebsiella pneumoniae
atgctgaaagacatcggcgctgaatacatcatcatcggccactccgagcgtcgtacctaccacaaagagtccgacgagtttatcgctaagaaattcgcggtactgaaagagcagggcctgatcccggtactgtgcatcggtgaaaccgaagcggaaaacgaagcgggcaaaaccgaagaagtgtgcgcacgtcagatcgacgccgttctgaaaacccagggcgcggcggcgttcgaaggcgcggttatcgcttacgaaccggtatgggcgatcggtaccggcaaatccgctaccccggctcaggctcaggcagtacacaaattcatccgcgatcacatcgcgaaagccgatgcgaaagtggctgaacaagtcattatccagtacggcggttccgttaacgcgggcaacgcagcagaactgttcacccagccggacatcgacggcgcgctggttggcggcgcatccctgaaagcggacgctttcgcggtaatcgttaaagcagcagaagccgcgaaaaaagcgtaa

SEQ ID NO: 255231 - DNA, 1305 bp, Klebsiella pneumoniae
atgtcgctctggttgtcccatcctctgttccttccttcaattatcgttggcctcactatcctgctttgggcgacatcgctcctgccggagtttatgaccgcgctgctgttttttgccgcagcgatgatcgctaaaatcgcgccgccggaggtgattttcggcggcttcgcgtcgtcggcattctggctggtgttcagcggctttgtgctggggatcgctatccgcaaaaccgggctggcggacagggcggcacgggcgctttcgtcgcgtctgacggattcctggccgctgatggtcggcagcgtggtgctgctcagctatgcgctggcgtttgtgatgccgtccaatatggggcgcatcgcgctgctgatgccgattgtggcggcaatggccaggcgtgccggtattgaagagggaacgcgcccctggtttggcctggcgctggcggtggggttcggtaccttccagctgtctgccactattttaccggcgaacgtcccgaatctggtgatgagcggcgcggcggagggatcgtacggtatccatctgaattatctgccctatttactgctgcatacgccggtgctcggctggctcaagggggcggcgctgatcgtgctgatatgctggctgttcccggggaaaccgcatccgccgcgcgatctgtcgccgctgccgccgatgagccgcgatgagaagcgccttgcctggctgctggtcgtggtgctgacgctctgggtgacggagagctggcacggcatagggccagcctggacggggctggcggcggcggtgataacgctgctgccgcgagtcggttttatcagcggcgaggagttttccagcggcgtgaacatccgcacctgtatttacgtcgccggaattttggggctggctatcaccgtgacccagaccgggatcggcggtgtggtggggaatgccctgctgcagattatgccgctggataaagagagcccgtttaccagctttctcgcgctgaccggtattaccagcgcgctaaactttattatgaccgcgaacggcgtaccggcgctgtataccactttcgcacagagcttctccgatgcgaccggcttcccgctgctgagcgtgattatgattcaggtgctgggatactccacgccgctgttgccgtatcaggcgtcaccgattgtagtggcgatggggctagggaaagtacctgcacgggcgggaatgctgctgtgtattgcgctggcggcggtgagctatttaattctgctgccgctggactatctgtggtatcaggcgttgggcaaactgtag

SEQ ID NO: 255232 - DNA, 723 bp, Klebsiella pneumoniae
ttgcaggttgataaaacgagctttactccgctttataagcaactattttttatcatctgtcagcagattcagaatgggtccttgccgttaggcagccagctgccgacgcaaaaagaggttgccagagcctataacgtctcgctcatcgtggttaaacaggcctggagcgaattaatcaatgcgggcattatttcgtcccagcgcggaagcggatcggtagtgtgctctgtgccggagggagtaagctacggccacacgtttcgcggcattaccagcgatcttcaggatgccagcgtcgagatagagaaccgtattcttgagatcgcgccgcgtcgcgcgcgtgacgctcaggcagatggtttgagcctgcccgcccatcatcattatctctatatctcgcgtattcgttgcctgaacaatcgcccgtttaaccatgaaaagatctatctcgatcttagcttctttcccaatctgcagctcacgccagaggcgctggaacatacgtcgctttattcgctattaaacgtcaccagtgactcggcgactgaaaaggtggaggcgatcttaccttccgccgacctgtgcgaaaagctgcagattgcggcgaataaaccactattatccgtcgccagacagacgtttcaggccgggcataacagccctttcgaatattgccgctattacgtgctgtcggaatactttggcgaaattcattatcactaa

SEQ ID NO: 255233 - DNA, 1041 bp, Klebsiella pneumoniae
atgcacgttgatcaaaacaaaatactgggatgcctggtgggtgccgccgccgcggacgcgatgggcgcggcgacggaagtacggactcagcagcaaattaaggactatttcggcggctgggtgacgacctttcaaaaaccgccagcggatacgtttggtcgctgtaacgaagcgggtatgtgcacggatgattttattcaggcgaaatacattatggacgcgctgctgcgccaccagcgccaggtcagcgatgaggcgatgcgcgaggccttccagcagtggctggattacccttactacgccaactttaccggcccgacaacgcgtgcggcaatgaaagcgatattcaatgaccatcgcgcctccttgcagggtgatcttgaaggcgaaaagcagtcggtacagattattaataagggaaacgcggaagccaccaacggcgccgccatgaagatttggcctgcggcggtactgcatccgggagatattgatgcggcgattcactgcgcgctgcagatttgccgctttacgcataataacgtgctggcgatgtccggcgcagcggcgatggcggcggcaaccagcgaagcgttacgatcgcagaccaatgcgaacaccattattgccgccggtatttatggcgcgcaaagaggctatctgctggcgcaggatcaaggggcgatgatggtggcaggcccatccgttgcccgacgcatcgaactggccgtggctatcggtcaacggcatcgtcattgggaaacggcggtggtggaacttgccgatattattggttccgggctgcacgtcagtgaagccgtaccggcggcctttggcctgttcgcgtgttgtccgaattctgccgtagatgctattatctccggcgttaatatcggcaatgatactgatactgtcgctaccatggttggagcgatttccggcgcattccatggcgtggaggcttttcccgccgattatttaacgaccgtggatcgtatgaatcatttcgatttggcacaactggccaggcaaatcgcagggtag

SEQ ID NO: 255234 - DNA, 960 bp, Klebsiella pneumoniae
atgaatgccatgaataaggtttgggcgatcggcgacgcctccgtagacctcgtaccggaaaaacagaacagctacctgaaatgtcccggaggcgcttcggcgaacgtgggggtctgcgttgccaggctgggcggaacgtgcggttttatcggctgccttggcgacgatgatgccgggcgtttcctgcgccaggtttttcaggataacggcgtcgatgtctcttcgctgcggctggatgcgagcctgaccagcgcggtactgatcgtcaatctgacggctgacggcgagcgcagctttacctatctggtacatccgggggctgataccttcgtttcacctcaggatctgccgacgtttagaaaatacgaatggttttactttagctccattggtctcaccgacagccccgctcgcgaggcatgccttgagggcgcgcgaagaatgcgggaggccggcggctacgttctgtttgatgtcaacttgcgcagcaagatgtggcgcaatgccgctgagatccctgacctgatcgcccgctccgctgcgctggcgtctatctgcaaagtctcggcagatgagctgtgtcagctgagcggcgccagccactggcaggatgcgcggtattacatgcgcgatctgggctgcgagaccaccatcatttcgttgggggccgaaggggcgttgctcatcaccgccgagggagagttcctttttcctgccccgcgtgtggaggtcgtcgataccaccggagccggcgatgcctttgttggcggcctgctgttcacgctttcccgcgaaaaccactggaatcatgccctgctggcggaggcgatcagcaatgccaacgcctgcggagcgatggcggtgacggcaaaaggggcaatgactgctctgccgtttcccgaccagctcaatacttttctgtccagccgttcgctggcacaagccatgaccgtgaaataa

SEQ ID NO: 255235 - DNA, 1335 bp, Klebsiella pneumoniae
atgaaactttctatcgtggaaaaaatcggcttcggcgcaggagatatggcgataaacgttgtgatcatcgccatgcagctgcttctcgcctatttttataccgatatctacggcctgagcgccgctgatgttggcgtacttttcgtggttgtgcggatgatcgatgccattatcgatccggccatgggcgtccttaccgataagctgaatacgcgctggggacgctatcgcccgtggctgctgtggtttgccatcccttttggcttcgccgtttatttaatgtttatcacgcctgatatggtttatatggctaagctggcgtgggcctatggcacctatattctgatgaccctggtctataccgctatcactattccctatatctcgatgattggcgtgattaccagcgatcccgtggaacggctaagcgcaaacggctatcgctttgtgatgaccaaaattgccgcttttctggtgactattgtcgtcccgatgcttgccgtctggcttgggcagggcaacaaggccctgggttaccagttttctatggggctaatgggcgcgatgggggccctgctgtttatcttctgttttctcaccactcgtgaacgtagcgagccggaaattacttcgctatcggtagggaagcagtttaagtatctgttacgtaacgatcagtggattattcttggggttgttattttactgctgatgtgcggttacgttattcgcggttccgtcgcggcctattatgccaaatattatcttaatggcggcgatagcctgatttcaccttttctgactaccggtgttgtcgcctctattctggcgatgatcgccaccacctggataactaaattctgggataagattaagatgttccgctacacccagattattacctttgtactaagcgcgctgatgtatttcttcgtcgggcgtgaaaatcttatcctggcatttacgttctattttcttattaatttcttctgcgatatgcaaatgccggtgttctggtcctctatcgccgaagcggtggattatggcgaaaagaaaaccgggctgcgggtatccggcctcgcgtttggcggcatcctcttcttccagaagtttggtatggggatcgcggggggcgtactgggatttctgctgagccactttggctatcaggccgacgttgaacagagcgcgcgttcgctcaccggtattgcgctgatgatgacgctcattccggcccttttccatcttgcggttgggctgcttatgaaaaagtatctgattaataacgaatattatcgtgatattcagctagcccttgcgcaaaaacaggcataa

SEQ ID NO: 255236 - DNA, 762 bp, Klebsiella pneumoniae
atgcgaagagtacgacacctttttttagcgctggtggtagtggttgtggcggcgatggctggcggctactactggcttcattccggcaaccgtgacgcgttgcgtcacattgttctgcaacagtgcgtccctcatcaacagcagaatcacaatcccgcgccctgcgcggaagtgaacctgaagggcggctatgtcctgtttaaggaccgcaatggcccgctgcagtatttgctgatgccaacctaccgtatcaacggcactgaaagcccgctgctgcttgaaccgctgacgccgaacttcttctggcaggcctggcagggacgcgaaatcatgagccagcaccgtggttctgccgtaccggatgaggcggtctcgctggccatcaactcgcgcagcggacgcacgcaaaatcatttccatattcatatctcctgcctgcgacctgatgtgcgccatcagctggatagccaggctgccgctatcagcagccgctggttaccgctgcccggtgggctcatgggccatgaatatctggcgcgccgcgtaaccgaaaccgaactggcgcagcgcagtccgttcctgatgctggctgaagaggtgccggaagcgcgagaccatatgggccgtttcgcgctggcgatggcgaagcagagcgacggctcgctgctgctgctggcaaccgagcgtaacctgctgacgctgaatcgcgcatcggcagaagaggttcaggaccatagctgcgccattctgacatcccgttaa

SEQ ID NO: 255237 - DNA, 990 bp, Klebsiella pneumoniae
atgaataagtggggcgtggggttaactctgttgctggcatccgccagcgttctggcaaaagacattcagctattaaacgtttcttacgatccgacgcgcgagctgtacgaacagtacaacaaagccttcagcgcgcactggaagcaagaaaccggcgacaacgtggtgattcgtcagtcacacggcggctccggcaaacaggcgacctcggtgatcaacggcattgaagccgatgtggtgacccttgcgctggcctatgacgtcgatgcgatcgccgagcgtggacgaatcgacaaaaactggctgaagcgtctgccggataactccgcgccgtatacctcaaccatcgtgttcctcgtacgtaaaggtaacccgaagcagattcatgactggaacgacctgatcaaaccgggcgtgtcggtgattaccccgaacccgaaaagctccggcggcgcgcgctggaactatctggcggcctggggctatgccctgcaccagaataacggtgaccaggctaaggcgcaggagttcgtaaaagcgctgtttaagaacgtcgaagtactggattccggcgcccgcggttcgaccaacacctttgtggaacgcgggatcggcgatgtgctgattgcctgggaaaacgaagccctgctggcgaccaacgaactgggtaaagacaaattcgagatcgtcaccccgagcgaatcgattctggccgagccgaccgtttccgtggtggataaagtggtcgacaaaaagggcactcgccaggtggcggaagcatatctgaagtatctctactcgccggaaggccaggagattgcggcgaagaacttctatcgtccgcgtgaccctgaaatcgcgaaaaaatacgcggatgagttcccgaaactgaagctgttcaccatcgatgacgtgtttggcggctggactaaagcgcagaaagagcacttctccaacggcggcacctttgaccagatcaaccagcgttaa

SEQ ID NO: 255238 - DNA, 240 bp, Klebsiella pneumoniae
atgtcattagaagtgtttgagaaattagaatctaaagttcagcaggcgattgataccatcactctgttacagatggaaatcgaagagctgaaagaaaagaacaatacgctggcgcaggaagtacaaagcgcccagcatagccgtgaagagcttgagcgtgaaaacggtcagcttaaagaacagcagcagggctggcaggatcgtctgcaggcgctgctgggccgtatggaagaagtctga

SEQ ID NO: 255239 - DNA, 852 bp, Klebsiella pneumoniae
atgagccaaacatcaacactaaaaggccagtgcatcgcagagttcctcggtaccgggttgttgatctttttcggcgttgggtgcgtcgctgcgcttaaggtcgcgggagccagcttcggtcagtgggaaatcagcatcatctggggtctgggcgtcgccatggcgatttacctgaccgcaggggtttccggtgcgcaccttaacccggcggtgaccatcgcgctgtggctgttcgcctgctttgacggtcgtaaagttgttccttttatcattgcgcaattcgctggcgccttttgcgctgcggctttagtttacgggctttattacaatcttttcttcgatttcgaacatacccacaatatggtgcgcggtagcgtcgaaagtcttgagctggcaggtattttctctacctatccaaacccgcatatcaattttgtgcaggccttcgcggtagaaatggtgattaccgctatcctgatgggcgtcattctggcgctgaccgatgatggcaacggcgtgccgcgcggcccgctggcgccgctgctgattggtctgctgatcgccgtcattggcgcatccatgggcccgctgaccggcttcgccatgaacccggcgcgtgatatcggaccgaaagccttcgcctggctggcaggctggggcaacgtcgccttcaccggcggcaaagatattccttatttcctggtgccgctgtgtgcgccaatcgtcggtgctgcgctgggcgcattctgctaccgcaagctgattggccgccacctgccttgcgacacctgcgtcgttgaagagaaagaagccgcatctccctctacgacacaacacaaagcttcgctgtaa

SEQ ID NO: 255240 - DNA, 1512 bp, Klebsiella pneumoniae
atgaccgacaaaaaatatatcgtagcgctcgaccagggcaccaccagctcccgcgccgtggtaatggatcacgatgctaatatcgtcagcgtctctcagcgagaattcgaacaaatttatccgcgtccaggctgggttgagcacgacccgatggaaatctgggcatcgcaaagctctacgctggttgaagtgctggcaaaggccgatatcagttccgatgaaatcgccgcgatcggcattaccaaccagcgtgaaaccgccatcgtgtgggagcgcgaaaccggtaagccgatttataacgccatcgtctggcagtgccgccgtaccgccgagatctgcgaacagctcaagcgcgacggcatggaagagtacatccgtaaggcaactggcctggtggttgacccctacttctccggaaccaaagtgaagtggatccttgaccacgtcgaaggtgcgcgcgagcgcgcaaaacgcggcgagctgctgttcggcaccgtagacacctggcttatctggaaaatgacccagggacgcgttcacgttaccgactacaccaacgcctcgcgtaccatgctgttcaatatccacgaactggactgggacgacaaaatgctcgacgcgctggatattccgcgcgccatgctgccggaagtgcgcaaatcttccgaagtgtacggccagaccaacatcggcggtaagggcggcacgcgtattccgatcgccggcatcgcgggcgaccagcaggcggcgctattcggccagctgtgcgttaaagaggggatggcgaaaaacacctacggcaccggctgctttatgctgatgaataccggcgagaaagcggtggcatcaacgcacggcctgctgacgactatcgcctgcggcccgcgcggtgaagtgaactatgcgctggaaggcgcggtatttatggcgggcgcctccattcagtggctgcgcgatgagatgaagctgattagcgacgcgttcgattccgaatatttcgccaccaaagtgaaggataccaacggcgtgtacgtggttccggcgtttaccgggctcggcgcgccttactgggacccgtatgcccgcggggcgatcttcggcctgacccgcggcgtcaattccaaccatattattcgcgccacgctggaatcgatcgcctatcagacccgcgacgtgctggaagcgatgcaggctgactccgggatccgtctgcacgccctgcgcgttgacggcggcgcggtcgccaacaacttcctgatgcagttccagtccgatattctcggcacccgcgtagaacgcccggaagtccgcgaagtcacggcgctgggcgcagcctatctggccggtctggcggtgggcttctggcagaatctggatgagctgcaggagaaagccgtgatcgagcgcgagttccgtccgggaattgaaaccaccgagcgtaactatcgctacagcggctggaagaaggcggtaaaacgcgcgctggcgtgggaagagcacgacgaagcgtaa

SEQ ID NO: 255241 - DNA, 1203 bp, Klebsiella pneumoniae
atgtttcatctcgataccttatcgacgctcgttgccgcaacattagtgttgctactaggtagaaaactcgttcaaaccgtccctttcctgaagaaatacactattcctgagcccgtggcgggcggtctgctggtcgctctggcgctgctggtattaaagaaaagcatggatatcgaaattgatttcgatatgagcctgaaagacccgctgatgctggctttcttcgccactatcggcctgaatgccaacctcgccagcctgcgctctggcggcaaagtggtggggacattcctgatcgtggtggtggggctgctgctgctgcaaaacgccctcggtatcggcatggcgaagctgctgggcctcgacccgctgatggggctgctggccggttcgattaccctttccggcggccacggtaccggcgcggcgtggagtaaactgtttattgagcgctatggctttgtcaacgccaccgaagtggctatggcttgcgcaaccttcggtctcgttcttggcggcctgatcggcgggccggtggcgcgctatctggtcaaacactcttcatcaccggacggcacgccggacgatcagctcgcgccgaccgcgtttgaaaagccggatatggggcgcatgatcacgtcgctggtgctgattgagagcatcgcactgatcgccatctgtttgacggtagggaagatcgttgcgcaactgttggcggggaccgtattcgaactgcctaccttcgtttgcgtgctgtttatcggcgttatcctcagcaatagcctgtcagcacttggcctgtaccgcgtattcgaccgcgcggtgtcggtgctgggtaacgtcagcttgtcgctattcctggcgatggctctgatgagcctgaagctgtgggagctggcgtcgctggcgctgccgatgattgccattctggcggtgcagacgatagcaatggcgctgtatgcggtgtttgtgacctatcgaatgatgggtaaaaactacgatgccgcggtgctggccgccggccactgtggtttcggcctcggcgcgacgccgacggcgattgccaatatgcaggcgattaccgatcgtttcggtccgtcgcatatggcgtttctggtggtgccgatggtgggggcgttctttatcgatatcgttaacgcgctggtgattaagctctatctgctgctgccggtatttggctga

SEQ ID NO: 255242 - DNA, 1392 bp, Klebsiella pneumoniae
atgtccgttaacaccgcagaatcagaaaatgcgcaaccggttgcgcataagcaaaccagcgaattaatctaccgccttgaagaccgcccgccgctaccgcaaacgctgttcgccgcgttccagcacctgctggcgatgtttgtcgcggttatcactccggcgctgttaatttgtcaggctctgggcctcccggctcaggatacacaacacatcatcagcatgtccctgttcgcctccggcgtggcatccatcattcaaattaaagcctggggcccggtgggttctggtctgctttcgattcagggcaccagctttaacttcgtcgctccgctgattatgggcggaaccgcgctgaaaaccggcggcgccgatgttccgaccatgatggccgcgttgttcggcaccctgatgctggccagctgcacggagatggttctctcgcgcgttctgcatctcgcccgccgcataatcactccgctggtctccggcgtagtggtaatgattatcggcctgtcgctgattcaggttggcctgacctccatcggcgggggctatgccgccatggccgaccacaccttcggcgcgccaaaaaacctgctgctggcggggatcgtgctggcgctgattattatccttaaccgccagcgcaacccgtatctgcgcatcgcttcgctggttatcgcgatggcggccggatacctggcggcatggctactcgatatgctgccgaccaataccgcaccgacggaaagcagcctgattatggttcccacgccgctgtactacggactgggcatcgactggaatctgctgctgccgctgatgctggtgtttatgattacctcgctggaaaccatcggcgatatcaccgccacctctgacgtttccgagcagccggtttccggcccgctatatatgaagcgtctgaagggcggcgtgctggccaacggtctgaactcgtttgtttcggcggtattcaacaccttcccgaactcctgctttggccagaacaacggcgtgattcagttgaccggcgtcgccagccgctatgttggttttgtggtcgcgctgatgctgatcgtgctcggcctgttcccggcggtgagcggcttcgtgcagcatattcctgagccggtgctcggcggcgcaacgctggtgatgttcggcaccattgccgcctccggcgtgcgtatcgtttcccgcgagccgctgaaccgccgcgcgatcctgattatcgccctgtcgctggccgtcggccttggcgtttcccagcagccgctgatcctgcagttcgcccctgactggctgaagaatctgctctcctccggtatcgccgccggcggtatcacggcgattgttctgaatctgattttcccgccagagaaaaactga

SEQ ID NO: 255243 - DNA, 1716 bp, Klebsiella pneumoniae
atgaaatttctcagaaagctgattctctggctgctgattgctctgctggtggtgattattgccgcttatttcctgctgcaaacccagtggggagggcgtcaggccagcgcctggctaagcgacggtaccggctggaaggtctctttcaacaaaatggaccataatttctcttcgccactgcacctgcagctgcaaaacgtcaccctcggtcgcgacggcaaacccgccacgctggtggcgcaaaccgtggatatcggatttagcagccgccagtttagcgacccgctgcatgctgacgaaatcattctcagcgacggtacgctaaacttctccccttcttccgcagcgctgccgttcgccgccgatcgtctccggttgcgcaatatggcgttcaacagcccggagagcgactgggatctgagcgcgcagcgcgtcaccggcggcgtcagcccgtgggcgccggaagcgggtaatgtgctgggcaagaaaacgcaaattcagatgagcgccgggtcgatgacgctcaacggtattgaagccagcaacgtgctgattcaggggaatatcgataacggcgaagtgacgctctcgaccctcggggcggacgtcgctcgcggaacgctcaccggcacggcgaaacgcagcgccgacggcggctggcaggtcgataatttgcgcctcaacgagatccgtctgcaaagcgataaatcactcgccgactttttcacgccgctgaccaccctgccctcgctgcagattggccgccttgacgtgaccgacgccagcctgcaggggcctgactgggcgatcgctggcctcgaccttaatctgcgcaacctgaccctgagccgcggcgactggcaaagccaggatggcacgctgtcgatgaacgctaacgagtttatttacggttcgctgcacttcctcgacccaatccttaacgccggattctccccgcagggtatcgcgctgcgccagttcacctcacgctgggagggcgggatggtgcgcacgtccggcaactggctgcgcgccggccatgccctcgtgctggacgacaccgcgttcgccggactggaatatacgctgccgaccaactggaagcagctatggatggcgccgcttcccgagtggctgcaaagcctaacgctgagaaagttcagcgccagccgcaacctcattatcgatgttgaaccggcgttcccgtggcaaatcaccgcgctcgacggctacggcggcgagctgcagctggtgaaaaaccgcagctggggcgtgtggaacggtagcgcgacgctgaacgccgccgccgcgacctttaatcgtattgatgtccgccgcccgtcgctgaagctgagcgccaatgcctcaacggtgaacgttaacgagctcagcgcctttaccgagcgtgggatcctgcaagccaccgcggcggtgtcgcagcttccgcagcgtcaggtcaacctgagcctgagcggtcgcggcgtgccgctaaatattttgcaggcctggggctggccagcgctgccgatatccggcgatggtaatctccagctaacggcgaccggcagcgtgctgccagatgcgccgctgaagccaaccgttaacggtcagctcagcgcagtcaatatggagaaacagcaggtagcgcaggtcatgcgcaacggtgaagttaccagcgctcaggctccttctgctccgataatttctaccccctag

SEQ ID NO: 255244 - DNA, 1560 bp, Klebsiella pneumoniae
atgtccgtaatacgtcaacgtattctggagaatatgcaaaaattctccagagcaatgattggtgcagtattgttcttgccggtcatcggcttaattttggcactcagctcagtcttaaccaacccaacattaatttcggagaccagctttttacaccagcttggacagctactcggcgataccttctggcctttattcggcaatctgggattactcttttgcgtcggcatcagctatggcctggcaaaagataaaaaaaccgaagtcgcgctggtttcagtgatgtgttttattatgtttcttggcgccaaccactcctggctggagcatactcacggcctggcggaaaaaattaacggcgaatattacggcaccgggcaaacccaactgctgggctttgtggtggtcgatatgggagttttcctcggcattattctcggctgcaccatcgcctgggtgcataacaaagtatcgactattgagctacccggcgcgctctccatgtacggcggggccaagctgacgctggtggcgatgacgccggtcatcattttctacgccatcgcttttacctggatctggccgtttatgacccacggcattgcggcgctgaccggctttatgaaaaacgccggcgtggcgggggtcttcgtttacggcttctttgaaaaattcctcatccccaccggtctgcaccacttcgtctggtcgccgttccagctcacgcaaatcggcggcacgctgaacgtcgacgggcagatagtctccggaacccaggcgattttcctcgcctatatgcgtcacccggatctgacgccggtgatgaacgaggcgctgcgtttctcacagcaggggatgaccaccattttcggcctggccggcgcctcgctggcgttctaccatacggcgaaaccggagaaaaaaatgatggctaaagcgattctgctaccggccattatcacttccatgctcaccggtatcaccgagccgattgagtttacctttctgttcgtttccccgctgctgtgggtgatccatgctaccttaaccgcagcttcgcaggcgatttgcgacatctttaccgtccgtccgtggggcgcctcggggctgattgagtttctgatttacaacctgccgctgccggtcgccctgacccgctggcccggctacgtgctcatcgggatcggccagttcgccgtctactacgttatcttccgcacgctggtcgttaagttgaatctcaaaacgccgggccgtgaagacgatgaaaacgtgaagttatatagcaaagctgattatcgtaaaaaaatgggcgaaccgcagtcggtgaccaacgagattattaatggcttaggcggcaaagcgaatattatttccgtcgacaactgttttacccgcctgcgcgtcgctattcacaatatggatttagttgatgatgcaatattaaaaagcaccggtgcaaacggcgtagtacgaaatcgaaatgaagttcaggttatttacggcgtcaaagtggggcaggtccgttcccgggttgatagctggctagcagaaaattaa

SEQ ID NO: 255245 - DNA, 1380 bp, Klebsiella pneumoniae
atgaaattaaccgtgttaggcgggggcggcgttcgctctgcattcctggcaaaatctctggcatataacgcgcaccgcattggtttaacggaagttgtatttctcgacagctccgctgagaatctggcaatttttggcgaaatcgcccgctatgtgtttaatacgattcgcccggatattcacttcagcgtaaccagcgacccggtgccggcactcaaaaatagccactatgtcatcaccaccctgcgggtaggcggcgatgagagtcgcattcgcgacgagcgtatcgccctgcagcacaacaccctgggccaggagaccaccggcgctggcggtttcgccatggcgatgcgttccattccggcgattcttcactactgccgcctgattgaagagcacgccgccgaagacgctattctttttaacttcactaacccgtcagggctggtcaccgaggcgattatcaaatccggctttaagcgccgggtgtacggcatctgcgacgcgccgtcggagctgattcgcgagctgccggcaatcctcggctgcgacgagcgcgatctcggcgttgagtgctacgggttgaaccacttctcctggtttacccacttcaccgtaagcggcgaggatgtcaccgagcgcctgattaccagtcctgagctgtatcgtaagacggcgatgcagtatttttcgccggagctggttcagctatgcgataagcaactgcttaatgaatatctttactactactactatcgagaagtagctttaaaagcgattcagaacgcagcggaaacccgcggcgagcagattgcccgtatcaatcacgatatgcgcgaagagctgcggaccgtggatgtgaaagccaacccggaagcggcgtttaccatctggatgaagcactatctgcgccgggaaaatagctatatgcagaacgagtcgcagcaggaaaaattccatacccgcgagccgttaaccttaaagcagtttatcgaggagccggataccggcggctacgcaggggtggcgctggatattctggaggcggtcaacagcaccaccaccaagcgtattgtggtgtcgatgcccaacaacggcacgctggacttcctgcgcccggacgacgtgattgagatcagctgcgacctcagtaaagagggcctgaagccggtgacgccgaagcatgtgccgacagcgcagaaaaacatgatcgccagcgtaaaggagtatgagcggctggcggtggcggcgattctgcagcgggataagtcactggcggtacgggcgctgatggcgcatccgctggtcggctcttattcgctggcaaaagcgcttgttgaagcttatctcgatgataagcagttcaccgactggcaataa

SEQ ID NO: 255246 - DNA, 732 bp, Klebsiella pneumoniae
atggatttagaaaacatttttcgtgacgttaagctaagcaaaaccgaaatgaccgtgctgcgttttattcagaatgaccctgagcaatgtgtgcgcgaggggatccgcgccgtcgcggaacactgttatagcaacccttcctcgctagtgcggttggcgaagaaactgaaattcagcggctggctggagctggtctattttattaaattcaatatcaccatgccgaaacttgatgtcaccaacgatatcgactacatgagcattcagccgatagagcggataactcctctactggaaagcctgcaacatcatcgcattttgattcacggcagcggcttttcgcagctgatcgcccagtatatttacaataaatttttggtgaccggggtaaacgccagcctggcgctgtggccggattacgaaattcttgagcagaagaacgccgccaaatttgattcgatctggattatttccaaatccgggcgcagcagttcggcgctgaactgggtgaaggcgctggaagggaagaagattaatctggtctgcttcaccggcgattatcaaagcccgctggcgcaggcggcggatacggcgtttattattcacgacccgcagaaattcgatgatgatatttactggagcaacccgttttttggctactgcatactcgggtttgagcggctgctgaagatgtggtttacacacacggggagccccggaggcggcgcctga

SEQ ID NO: 255247 - DNA, 648 bp, Klebsiella pneumoniae
gtggtgcgccacttcacgcagctgaaatgccgcatgatgccgtatctgtaccgtcaggcggcgctggccaacgagttcggtacgccgatgctgcgttcgatgatgctggagttcccgcacgacccggcctgcgactatctggaccggcagtacatgctgggggattcggtgctggtggcgccggtgtttagcgaagcgggcgacgtccagttttggctgccggaaggccgctggacccatctgtggcacaacgatgaagcgcagggcagccgctggcataagcagaatcatgatgtgctgagcctaccggtgtacgtgcgtgacaacaccctgctggcgttgggcaacaatgaccagaaaccggactacgcgtggaatgaaggcaccgccttccagctgtttaatctcgaagatgggcgcgaagcggtcagccaggtgccggcagcggacgggtcggtggtctttaccctgaaggcgaaacgccagggcaatgtcattaccgtcagcggtgacggcgaggccagcggctggacgctgtgcctgcgcaatatccagcaggtagctagcgtgcagggcggtgctcaggcaggcagtgagctgggcgtggtggtgaccgcgcagggcaatgcgttgaccatcacgctgtaa

SEQ ID NO: 255248 - DNA, 1353 bp, Klebsiella pneumoniae
atgtttattaatctcaaacgcttgcctgacaggctatttctttacgctgtcgtatgcggtttttctattgctacgattaatttcgttaccggctcattaattcatcgtatctctacaacttcatcaatgctgtttcctgtattgactatttcactgatgggtttccatattatgattgcctgttttatgggcatgaaatatctgtgcgataaaaagcagctgtacctggcgccaatagccttcgcttttgcctgttcagccctgttgatgctcgggaccataggcagctacccggactggctggtatgtgcccagggtcgcgtcatcaaccagaatgacgcgctaattttttattttttccgcaacgtcatgatggccgttttatttataacttcgatcgttttatatcggcttcgccaccgtaccactcattcaggaaaaattcacggtctggtactgctgggttgttttattttgatcgccgcaacgctcatattgtcgtggattcattccagcaactcaccattactgagcattgaattcattgataatctgacctatacctttacgccgctatggcataaccgggttggctgggtattaattggtacatggtcatttacgctgattttacttattagcctgacccggctacgcaatatattctggtacagcggcgcctttttttgtaccgcctatatatttacgctgctggttctgctctccacggtcaacggtaacgctcattcctggaaccaggcgcggctctttgaaacgctgagcactctgtttttgattttagttctgcttgtggatgtttttatcctctaccgggagtcaaacgaaaggtacgttcgctcgtaccagaattctattcgcgatcccctgacccggctgtataaccgcagctatttctacgatacgctgaatcaacgattaacaaaagtctctgcatcacagccgctatcggtcattgtctgcgatcttgaccgctttaagcgcatcaacgacacgtacggccacgtgcagggagataaggtcattcagtttgctgccagcgtgctgcagaataacgtgcgccaggaggacattgccgcgcgtatcggcggggaagagtttgccctgctgctggtcaatatcggcgccaacgaagcgctggccattgccgaacgcatccgcctgtccgtcagtgaacagcatgaagggttaccggaaagaatgaccatcagtatgggcgttttcaccactcaggatgcgcatgttgcggcggaggagtgcgtcaagcgcgctgataccgccatgtacgaagcgaaaaacaccgggcgtaatcgcgtagtcgtctggcaggcgtaa

SEQ ID NO: 255249 - DNA, 435 bp, Klebsiella pneumoniae
ttggaaccgccacttggttctgatctggcacgtttggtacgcgtctggcgcgcgctaatcgaccatcgcctgaaacctctggagttaacgcagacgcactgggtcacgctgcataacattcaccagctgccgcctgaacagtcgcagattcagctggcgaaagccattggtattgagcagccttcgctggttcgcacgctcgaccagctggaggaaaaggggcttatttctcgccagacctgtgcaaacgatcggcgggcaaaacgtatcaagcttaccgaaaaagccgaacccctgatcaacgaaatggaagaggttatcggcaaaacgcgtgatgagattctggccggcgtttctaaagaagaggtggaaacgctgctcaatttgattcgtaaacttgaacacaacatcctcgatctccaggcaaaagattga

SEQ ID NO: 255250 - DNA, 237 bp, Klebsiella pneumoniae; identical to SEQ ID NO: 174427

SEQ ID NO: 255251 - DNA, 897 bp, Klebsiella pneumoniae
atgaagaaactaaaatatttatccacgctgctggtcgccgcgctggccattattgccgcctggctggtctggaattactacacgcagtccccgtggacccgcgacgggaaagtccgggccgagcaggtaggcgtcacgccgcaggtgtccgggagcatcctgcagctcaacgtacgcgataaccagctggttaaggccggtgaagtgctgttcagaattgatgatacgccttataaaattgcgctgctcaacgcccaggcccagatcgacaaggctcgagctgaagttgcccgcgcgcaggctgaacagaaaaaggccgccagcgatgccgctcgccgacgccatctctccgagaatttcatctccgcagaagatttagaaaacgccaatactgcgcttaataccgctaataccaacctggcagcggctaaggccgttgtgggagccgccctggccaccctcgatcatgcccaatggcagctcgcgcagaccgaaattaaggccccggttgacggctgggtaacgaacctttcgacccgcattggcgactacgccaccgtaggccatccgctttttgccctcgtcgacagccactccttttacgtgatcggttattttgaagaaacgaaactgcgtaatatccgtcccggcgatagcgcgcagatcgtcctctatagcagcaaacaaaagttacagggtcacgtaggcagtatcggacgcgctattgtcgatcagagcgtagagagcggaagtggtctggtagcgaatattaaaccgaatattccctgggtacgccttgcccagcgcgtgccggtgcgcattgagtttgaccatctgccgccggatatcacgttggtctccggtaccacctgcaccgttgccattggcgcgcagtaa

SEQ ID NO: 255252 - DNA, 2025 bp, Klebsiella pneumoniae
atgaagctacaggccctgacgtggcgctctcttccctggattaaggccagccgtccgcagtggcgctatgccctgcgtaacgggattgccatgtgcctggcgctgagcgtcgcctactggctgaatcttgacgaaccctactgggcgatgacttccgccgcggtagtcagctttcccaccgtcggcggcgtgatcagcaaaagctttggccgtattgccggcagcctgctcggcgcctgcgcggcgctgctgctggccggccatacgctcaacgatccgtggctatttctttttagtatatcggcgtggatagctctctgtacctgggcctgcgcgatgttcaccaataacgtcgcctatgcattccagcttgcgggctacacctgcgcgattatcgctttcccggttatcaatattaccgatgctaacgaactgtggactatcgcccagtcgcgcgtctgcgaggttatcgtcggtatattgtgcggcgggctaatgatgatgattttaccgagtacctccgacggcaccacgctactgagcgcgctaaaaaatatgcatgcccgcctgctggaacacgccagtctgctgtgggtcccggaaacaaccgatgctatccgggccgcgcacgagagcgtgattgggcaaatcctgaccatgaatctgctgcgcattcaggccttctggagccactatcgctttcgccggcaaaatccgctgctcaactacctgctacatcagcagctacgaatgaccagcgtcatttcgagcctgcggcggatgctgcttaactggcccgccgcgcccgctcgtactcgcgagattctggagtctttgctcagcgagttagcgctttcaaacgccgatgcttacagcgttgcccgcattatcgcgccgcttgcgccgcccgccgatgccgactaccgacacatcgccttctggaagcgcctgcgctatttttgtcgcctgtatctggagagcagccgctggctcaggcgcatcgaaaacgccactgcgatcaccgaattcaatgtaccttccgcaccagcgctggcccgccataccgatcaggccgaagctctctggaacggagttcgcgctttttgcgcgctggtgatggtcggcgcatggggtataagcacccagtggcaggcctgcgctgcagcgcttaccctggcggctatctgctgcgtgctctattcggtttcaccctcaccgtttaaatcattaacgcttttaatgcgtaccctgatcctgctttcgctctttagctttgtcgtgaaatttggcctgatggtacagataaccgatttatggcagtttttgctatttctgtttcccttgctcaccaccatgcagttgctcaaacaacagatgccaaagctcgccggactgtggggtcagttgatcgtatttatgggctcatttatttcggtcaccaacccgccggtatacgactacgcttcgtttcttaatgataatctgggaaaaatcattggggtaggacttgcctggctggctttcgccattatcagtccaggttcagacgcgcgtaaaagccgtcggcacatccgtgcgttacggcgtcactttgtcgaccaattgagccgtcgtccgcagcatagtgaacatgaatttgagtcgctggtttatcatcacatcagccagcttagcaacagtcaggatgcgctggcgcgccgctggctgctgcgctggggcgtcgtgttactcaattgttctcacgtggtgtggcaactacgcgactgggaaacgcgctccgacccgctctcgcaggtgcgcgatctgtgcattagcctgctgcgtgacgtgatgagcgagcgcggcgttcagcagcgccctctcgcttcaacgctgcaggaactgcagcgcatctgcgacgcgcttaatcgccaccaccagcccgccgccagagagctggcggcggttatctggcgactatggtgcgccctgtctcagctggaacaggcgccgatcgcaggaacgttgacggaaaggactacttga

SEQ ID NO: 255253 - DNA, 522 bp, Klebsiella pneumoniae
atgcaacgatgtattctcgccatacttaccctggccgcctgtgcgggcgcgcaggcggccagcgaaagcgtcgatatcaatcttgtgaccagccagagcgttggtcaggccatcggtagcgtgaaaattagtgaaaccgcgaaaggtctcgagtttactccggacctgaaagcgctgcctcccggcgagcacggcttccatattcacgccaacggtagctgccagccagccatcaaagaaggtaaagccgtcgccgctggcgcagccggcggacattacgatccgcaaaacaccggaaagcatgaaggtcctgacggcgccggtcatctcggcgatctgccgttcctggtggttaataacgacggaaaagccacccagccggtggtcgcgccgcgtttaaaaaccctcgatgaagtgaaaggcaaggcgctgatgattcacgtggggggcgataatatgtccgacagcccgcagcctctcggcggtggcggcgagcgcttcgcctgcggcgtcatcaagtag

SEQ ID NO: 255254 - DNA, 897 bp, Klebsiella pneumoniae
atggttcagcgtattgctatggctccccaggggccggaattctctcgtttcgtgatgggctactggcgtctgatggactggaagatgtccgctcaggcgctggtgggctttgtggagcaacacctggatctgggcatcaccaccatcgatcatgccgatatttacggcgactatcgctgtgaggcggcgtttggcgaagcgttaaagctggcgccccatctgcgcaaccggatggagatcgtcaccaaatgcggaattgccacgaaagcgcgggcagaaaataccatcggccactatattaccgaccgcgaccatattgtgctgagcgcggagcagtcgctgcgtaatctggcgaccgaccatctggacctgctgctgattcatcgcccggacccgctgatggatgctgacgaagtggctgaggccttcctggctttacatcatagcggcaaggttcgccacttcggcgtgtcgaactttacccccgcccagtttaccctgctgcagtcgcgcctgccgtttaccctggcgactaatcaggtggaaatttccccggttcaccagccgctgctgcttgacggtacgctcgatcagcttcagcagctgcgcatccgaccgatggcctggtcctgcctcggcggcggtcgtttgtttaacgacgaaagcttccagccgctgcgcgatgagctggcccgcgtcgctcaggagctcaatgcggaaagcattgagcaggtggtgtatgcctggatcctgcgtctgccgtcgcagccgctgccaattatcggttcaggaaaaattgagcgcgtgcgctcggcggttgtcgctgaaaagctaaatatgagccgtcagcagtggttccgcattcgcaaagcggccttaggctacgacgttccgtaa

SEQ ID NO: 255255 - DNA, 240 bp, Klebsiella pneumoniae
gtggctgaacaactggagttcttcccggtacagagtccctgccgggggatttgtcagtctgatgaacgcggctactgccgggggtgcatgcgtagccgcgatgagcgtttcaactggcagaaaatgagcgatgcgcaaaagcaggatgttctgcgtctgtgtcgccagcggctgctgcgtaaattacgcgcagctaagcaggatagtgcggaagaaccgcagcaaccctcactgttttaa

SEQ ID NO: 255256 - DNA, 600 bp, Klebsiella pneumoniae
atgaacaaacacagtgaatgcaatacccgcgaacatatcctggccaccggcgagcagctttgtatgcatcggggttttaccggtatggggctgagtgaactgctaaaaacagcggaagtgccgaaaggttctttctatcactattttcgctctaaagaagcctttggcgtagcgctgctcgaccatcactacgccggatatcttcagcgcctggttgagcattttgcccacggcgagggaaactatcgcgaccgccttttggcctactatcagcatacgctgacccagttttgccagcagggcatcattagtggctgcctgacggtgaagttgtcggcagaggtctgcgatctgtcggaagatatgcgcaccgcgatggataaaggggccagtcagatcattaccctgctggccgatgcgctggagcaaggtcgtcaggaaggtagcctgacgtttgacggtgacgcattaacgctctcgcaggtgctttactctctgtggctgggggcgaatctgcaggccaagattacgcacagcgcaacgccgctggaaagcgccctggcccacgctaaaaaaattattgctgcgcctgccctataa

SEQ ID NO: 255257 - DNA, 1098 bp, Klebsiella pneumoniae
atgtcagaatcaaagttgtttaccccgttgaaagtaggtgcggtaaccgtgccgaatcgcgtgtttatggctccgctaacgcgtctgcgcagcattgagccaggggatattcccaccccgctgatgggcgaatactaccgccagcgcgccagctccggcctgattatttccgaagcgacccagatttccgctcaggctaaaggctacgcgggtgcgccagggctgcacagtccggaacagattgccgcatggaaaaagatcaccgccggcgtccacgctgaaaacgggcgtattgccgtccagctgtggcataccgggcgtatttcgcacagcagcatccagcccggcggcgccgccccggttgcgccatcggccatcagcgcgggcacccggacttcgctgcgcgacgaaaacggccatgccattcgcgttgacacctcaatgccgcgcgcgctcgaaacccacgagatcccagggatcgttgatgatttccgtcaggcggtaggtaacgcccgcgatgccggattcgatcttgtcgaactgcactccgcccacggttacctgctgcaccagttcctttccccttctgccaaccatcgtactgaccagtacggcggcagcgtggaaaatcgcgctcgcctggtgctggaagtggttgatgcggtgagtaaagagtggagcgccgaccgtatcggtattcgcgtctcgcccatcggcagtttccagaacgtcgataatggcccgaatgaagaagccgatgcgctctatctgatcgaagagctggcgaaacgcggtattgcctacctgcacatgtccgaaccggactgggctggcggccaaccgtacagcgatgagttccgccagaaagtgcgcgaccgtttcccgggcgctattatcggcgcgggcgcctacacggttgaaaaggccaacgatctgatcggtaaagggctgatcgatgccgtggcctttggtcgcgactacattgctaacccggacctggtggcgcgcctgcagaaaaaggccgctctgaacccacagcgtccggaaagcttctacggcggcggcgcggaaggttataccgattaccctaccctgtaa

SEQ ID NO: 255258 - DNA, 408 bp, Klebsiella pneumoniae
atgcgcttacttcacaccatgctgcgcgttggcgacctgcaacgttctattgagttttacaccaacgtgctgggcatgaaactgctgcgcaccagcgaaaacactgaatataaatactcgctggcattcgtgggttacggcgaagaaagcgataccgccgtgattgagctgacctacaactggggcgtggataagtacgatctcggtaacgcgtatggtcatattgcgctgagcgttgaaaacgcggcggaagcctgcgaacgtattcgtcagaacggcggcaatgtgacccgtgaggccggcccggttaaaggcggtacgacggtcatcgccttcgtcgaagatccggatggttataaaatcgagctgattgaagagaaagacgccggaaaaggcctcggcaactaa

SEQ ID NO: 255259 - DNA, 645 bp, Klebsiella pneumoniae
atgtccgagaacgctcaactgaatggtctgtgcgaccgttttcgcggtttttatccagtggtaattgatgttgagaccgccggatttaatgccaaaaccgacgccctgctggagatcgccgctattacgctgaaaatggacgaagaaggctggctcatgccggacgaaacgctgcattttcatgttgaaccttttgagggcgcaaacctgcagcccgaagctctggcttttaacggtattaaccccaacgatcccgagcgcggcgcggtgagcgaatacgatgcgctgcacgcgatttttaaaatgatccgcaagggcatgaaagagagcgactgcagccgcgctattatggtcgcgcataacgccacattcgaccatagctttaccatggcggcggcagaacgtgcggggctgaaacgtaatccattccatccgttcgtcaccttcgataccgcggccctgagcggtcttgcgcttggccaaacggtattgtcgaaagcctgtatcgccgccggaatggcatttgacgggactcaggcccactctgcgctttacgataccgaacaaacggcgcagctattctgcgaaatcgtcaaccgctggaagcgtcttggcggctggcccttacccgtggccgaagaataa

SEQ ID NO: 255260 - DNA, 348 bp, Klebsiella pneumoniae
atgagcacgactttagaaaaaatccaacgtcaaatcgctgaaaacccgatcctgctgtatatgaaagggtctccgaagctgccaagctgtggtttctccgctcaggccgttcaggcgctctctgcctgtggcgaacgttttgcctacgtcgatatcctgcaaaacccggacatccgcgcggagctgcctaaatacgctaactggccaaccttcccgcagctgtgggtagacggtgagctggtcggcggctgtgacatcgtgattgaaatgtatcagcgcggcgaactgcagcagctgatcaaagaaacggccgctaagtacaaaactgacgagccgaaagcagagtaa

SEQ ID NO: 255261 - DNA, 855 bp, Klebsiella pneumoniae
gtggcgcgtcttaacaaaatcgcgatttcgctctgtgcattacttttcacatctatttcacttacgccgctggcgcatgcttccgggcatacgcacgcttcggccacgcccaaagcgcatccggctaaaggcactaccgcagagcgtaagaaaaaagcagccagttccaaaagcaaaaccaccgccaaaacctccagcaaaaaaacaccgaccgccagccgcagcaaaacaaccgcttcacgccagaccgccagcgccaccaaaaaatgcgtcctgcgcaagggctacaaaaagctgtgcgccagctcgacaaggtcgattgcggaaagcaagctggccgcggcgagcctgcagaaaaagtgcgtggtgcgtaaaggctataaaacccgctgcaaacccattgccgacgagccgcagctgactatcgccgatgcgcataaagcgcgggtacaaaaagcgcaaagcaccgcgatgtcaaagttgatggatcagattggcaaaccttatcgctggggcgggacctctccgcgcaccggatttgattgcagtggtctggtctattacgcctataaagacctggttaaaattcatattccgcgcactgccaatgagatgtatcacctgcgcgacgctcgtccagtggatcgcggcgagctgcaaagcggggatctcgtcttcttccgcacccgcgggcgcgggacggcagatcacgtcggggtatacgtcggcaacggcaagtttatccagtctccgcgcaccggtcgcgatatacagattacctctttaagcgatgattactgggtacgccactacgtcggcgcgcgtcgcgttatgacgccgaaaaccattcgctaa

SEQ ID NO: 255262 - DNA, 582 bp, Klebsiella pneumoniae
atgtcgttcgaattacctgcattaccatatgcaaaagacgccctggcgccgcacatttcagcggaaaccctggaataccactacggtaagcaccaccaggcctatgtgactaaccttaacaacctgatcaaaggcaccgcgtttgaaggcaaaaccctggaagagatcgtgcgttcttccgatggcggcgtctttaacaacgccgcgcaggtctggaaccacaccttctactggaactgcctggcgccaaacgccggtggcgaaccggaaggcgaactggcggcggctatcgctaaatctttcggcagcttcgcggatttcaaggccaaattcaccgacgcggcggcaaaaaatttcggcgcaggctggacctggctggtgaaaaatgccgacggtagcctggccatcgtctctaccagcaacgccggtacgccgctgaccagcgacgccaccccgctgctgaccgtggatgtctgggaacatgcgtattacatcgactaccgtaacgcccgtccgaactatctggaacacttctgggcgctggtaaactggaagtttgttgccgctaatctggcagcataa

SEQ ID NO: 255263 - DNA, 1167 bp, Klebsiella pneumoniae
atgaaaatcaactttcccctgctcgcgctggcgatcggcgcctttggtatcggcacgaccgagttctccccgatgggactattaccggttattgctaaaggcgtggatgtgtctattccggcggcgggaatgctcattagcgcttatgccatcggcgtgatggtcggtgcgccgttaatgactctgctgctctcccaccgcgcgcgcagaaatgcgctaatctttctgatggccatttttaccctcggtaatgtgctctcttcaattgccccggattacactacgctgctgctgtcgcgcattattaccagcctcaaccacggcgccttcttcggtctcggctcggtggtggcggcgagcgtggtgcctaaacataagcaggccagcgcggtagcaacgatgtttatggggctgacgatcgccaatatcggcggcgttcctgcggcaacctggctgggcgaaactatcggctggcgaatgtcgttcctggcaacggcggggctgggcgttgttgcgatgatcggcctgtggctgtcgctaccgaagggcagcgccggcgaacgtccggacgtgaagcaggaactttcggtgctgatgcgtccgcaggtgctgtcggcgctattgaccaccgtgttgggcgccggggcgatgttcacgctttatacctatatctccccggttctgcataccatcacccacgcttcaccgctgtttgtgaccgccatgctggtgctgattggcgtcggtttctcgctgggtaactatctcggcggtaagtttgccgaccgttccgttaccgcaacgctgaagggctttcttctgctgctgatggtcattatgctggcgatcccgctgctggctcagtcgcaggtgggagcggcgataagtatggttgtctggggggcggcgacgtttgcggtggtaccgcctttgcagatgcgcgtgatgcgcgtcgctcatgaggcgccggggctgtcttcatcggttaatatcggggccttcaatcttggtaacgcgctgggcgcggcggcgggcggcgcggttatatccggcggcctgggatatgcgttcgtaccggtgatgggagcgattatcgcgggcgtagcgctactgctggtgctgttcagcgggagggcgcaaccggaagaggcgtttgctaaccattaa

SEQ ID NO: 255264 - DNA, 1026 bp, Klebsiella pneumoniae
atggcaactattaaagatgtagcgaaacgcgcaaacgtttccactacaacagtatcacatgtaattaacaaaacccgattcgtagcggaagagacgcgcaatgcggtatgggcggccattaaggagctgcattactcccccagcgccgttgctcgcagcctgaaggtcaatcacaccaagtctattggtctgctggcgaccagcagcgaagcggcttatttcgccgagattatcgaagcggtcgagaaaagctgcttccagaagggctatacccttatcctcggcaacgcctggaacgacccggagaaacagcgcgcctatctgtcaatgatggcgcagaagcgcgttgatggcctgctggtgatgtgctccgagtatccggaatcagttttaagcatgctggaagagtatcgccatatcccgatggtggtcatggactggggcgaggcaaaagccgactttactgattcggtcgtcgataacgccttcgaaggcggctatattgccggacgctacctggttgaacgcggccaccgcgatatcggcgtgatcccaggcccactggagcgtaacaccggtgcgggccggctggcaggctttatgaaagccatggaagaagcgcagatcggcgttccggaaaactggattgtccagggcgattttgaaccggagtccggctatcgcgccatgcagcaaattctcaaccagcatccccgcccgacggctattttctgcggcggcgatattatggccatgggcgccatttgcgcggcggatgaaatggggctgcgcgtgccgcaggatatttcgctgatcggttatgataacgtgcgcaacgcccgctacttcagcccggcgctgaccaccatccatcagcctaaagactctctgggcgaagcggcctttaatatgctgctggatcgcatcgtcaataagcgcgaagtctcgcagtcgattgaagtccatccgcgtctggtcgagcgccgctctgtggccgacggcccgtttgtcgattaccgccgttaa

SEQ ID NO: 255265 - DNA, 912 bp, Klebsiella pneumoniae
atgtggtctgaatactcgcttgaagttgtcgatgctgtcgcccgcaacggcagctttagcgccgctgcgcaggaattgcaccgcgtcccttctgccgtcagctataccgtgcgtcagctggaagagtggctggcggtgccgctatttgaacgccgccatcgggatgtcgagctaacccctgccggcgtttggtttttgcaggaagggcgatctgttatcaaaaaaatgcagatcacccgccagcagtgtcagcagatagccaacggctggcgcggacagctctctatcgcggtggataatatcgttaagccaacgcgtatgcggcagatgatcgttgatttctatcgtcactttgatgacgttgagctgattgtttttcaggaggtgttcaacggcgtctgggatgcgctggccgacggtcgcgtggagctggcgatcggcgcaacgcgctcaattccggtcgggggccgctacgcctttcgggatatgggaatgctgagctgggactgcgtcgtcgcaagccaccatccgctggccaaaatgacgggacctttaagcgatgacgtcctgcgcaactggccatcgctggtcagagaggatacctcacgctcgctgccgaagcggaccacctggctgctcgataaccagaagagggtggttgtgccggactgggatgcctctgaaacctgtctctccgcggggctgtgcgtcgggatggtgcccgggcatttagcaaagccgtggctcgatagcggtgaatggacggcgctggagctggagaacccattcccggatgctgcctgctgtctgacgtggcagcaaagcgatgcctctccggccctgttatggctgctggattatcttggcgatagcgaaacgctgaatcgggagtggctgcgggcgccggaataa

SEQ ID NO: 255266 - DNA, 1185 bp, Klebsiella pneumoniae
atgcaacaacctgggaaaggatttttagtctggctggccggactcagcgttctgggctttctggccaccgatatgtacctgccggcttttgcggccatgcagcaagatctgcatacctcagcggcgtcgatcagcgccagcctgagtctgtttctcgcgggctttgcgctgggccagcttttctgggggcccatctccgatcgttacggccgtaaaccggtgctgttgagtggactggccatctttgccatcagctgtctgggcatgctttgggtccgcgatgctacgctgatgctggcgctgcgttttatccaggctctgggggtttgcgccgccgcggtgacctggcaggctatggtgaccgattattatcctgctcaaaaaaccaaccgtattttcgccgccattatgcccctggtgggattatcgcctgcgctggcgccgctgctcggcagctggttactggttcattttgaatggcaggctatttttgccgttctgttcgccattaccctgctgttaatgctgccagccctgcgcctgaaggcggcgaaaaaaggggtcgtcagcgcccagcagaagcttacgttcctcgccctgctgcgttcgcgggaatatagcggcaacgtgctgatctacgccgcctgttccgccagcttctttgcctggctgacggggtcgccgtttatccttcacgagatgggctacggcccgaccgttatcggcctgagctatgttccgcaaaccatcgcgtttctggtaggcggctacggctgccgggcggcgctgcaaaaatggcagggccagcaaattctgccgtggctgctggcgatcttcgccgtcagcgtggccgccacctggctggttggcctgcgggaaaatgcaaccctggtgggattaatgattccgttctgcgccatggcagtggtgaatggcggtatctatcctatcgtcgtcgcccaggcattgaagcccttccctgaggcgacaggccgcgccgcggcgttgcaaaacaccctgcagcttggcctctgttttttgaccagcctgctggtctccacgctgatcgccactccgctgctaacgaccaccagcgtgatgctggtctccatcgtgctggccggaatcggctatcgcatgcagcataaggccgcgcatctggaaacagaatcgtcacatgcttaa

SEQ ID NO: 255267 - DNA, 1149 bp, Klebsiella pneumoniae
atgagttcatcgtgtatagaagaagtaagtgtaccaaatgatgactggtaccgaatcgcagctgaattattaagccgtgcgggcattgaaattaatggtcctgcgccctccgatttgcggattaaaaaccctcatttttttaaacgcgttttgcaggaagggtcgctgggtttaggcgagagctatatggacggctggtgggattgcgagcggctggatatatttttccataaagtattacgcgccggtctggaaaatcagcttccccatcatttcaaagataccctgcgtatcgccactgcacgcttattcaatctgcaaagtaaaaaacggtcctggattgtcgggaaagagcattacgatttaggcaacgatctgttcagccgcatgctcgatccctatatgcagtattcctgcgcttactggaaggatgcgcagaatctggaagacgcacagcaggcaaaattagatctcatctgccgtaaacttcagcttgagccggggatgcgggtgctggatatcggctgtggctggggtggactggcctactatatggccaaaaattaccaggtcagcgttgtcggcgtcacgatttcagctgagcagcaaaaaatggcccagcagcgctgcgcaggtcttgacgttactatcctgctgcaggattaccgcgacctgcaagagagctttgaccgtatcgtctcagtcggcatgtttgaacatgtcgggccgaaaaattacgccacctacttcgacgtggtcgaccggaatttgaaacccgaaggccgcttcctgctgcatactatcggctcgaaaaaaaccgaccataacgtcgacccgtggatcgataaatatatcttccctaacggctgtttgccctcagtacgccagattgccgaagccagcgagccgcattttgttatggaagactggcataatttcggtgccgactacgacaccacgctaatggcctggtatgagcgctttctgaatagctggccggaaattgccgacaattattcggagcgcttcaaacgcatgtttagctattacctgaatgcctgcgccggcgctttccgcgcgcgcgatattcagctctggcaggtggttttttctcgcggtgccgaacacggcctgcgcgtagcccgctaa

SEQ ID NO: 255268 - DNA, 642 bp, Klebsiella pneumoniae
atgtttaccggtattgtgcaggggaccgccagagtggtggccattgatgaaaaacccaactttcgcacccacgtcgtggagctgcctgagcatatgcttgcggggctcgaaaccggggcttcggtagctcataacggctgctgtttaaccgtcaccgatatcgatggcgcgcgagtgagttttgacctgatgaaagagaccttgcgcatcaccaatctgggcgcgctgcgcgagggcgacagcgttaacgtcgagcgggcggcaaaattcagcgatgaaattggcggccacctgatgtcaggccatattatgaccaccgcggaagtggttaaaattctgacgtcggaaaataatcgccaaatctggtttaaggttcaggacccgacgctgatgaaatatatcctttataaaggctatatcggcgtcgatggtattagcctcacggtaggggaagtgacgcccacccggttttgcgtgcatttgatcccggaaacgctgcagcgcaccacccttggcgtgaaaaaactgggggaccgggtaaatattgagatcgatccgcagactcaggccgttatcgataccgttgagcgcgttctggcggcaaaagaagcagcagcggccctgaaaaacgcggccgaataa

SEQ ID NO: 255269 - DNA, 1101 bp, Klebsiella pneumoniae
  misc_feature (1052)..(1061): n is a, c, g, or t
gtgcagaagtattttattgaagcgcgtcagttattagcactggctatacccgttatactcgcccaggtcgcccaaaccgccatgggcttcgtcgataccgtgatggcgggcggctatagcgccaccgatatggcggccgtcgccatcggtacctctcaactgaatggttccggccgtcgcgaccgcatcgcccaccaggtacgccaggggttctggctggcgggcttcgtctcgatcctggtcatggtggtactgtggaacgccggctacatcatcagctccatgcataacatcgacccggcgatggcggagaaggcggtcggctacctgcgggctctgctgtggggcgcgcccggctatctgttcttccaggtagcgcgtaaccagtgtgaaggcctggcaaaaaccaagccgggcatggtaatggggtttatcggtctgctggtcaacattccggtgaactacatctttatctacggtcactttggcatgcctgagctcggcgggatcggctgcggcgtggcgacggcttcggtgtactgggtgatgtttttctgcatgctctcctgggttcgccgcgcgcgttcgatgcgcgatattcataacgctgagcgcttcagcaaaccggatttcgccgttatccagcgtctggtgcagctgggcctgccgattgcgctggcgctgtttttcgaagtgaccctgtttgccgtagtcgcgctgctggtctcaccgctgggcattgtcgacgtggccgggcaccagattgccctaaacttcagctcgctgatgttcgtattaccgctctccctggcggcggcggtgaccattcgcgtcggtttccgtctcgggcaaggctcgacgctggaggcgcaaacgtcggccagaaccggcgtcggggttggagtgtgtatggccgtgattacggcggttttcaccattctgatgcgtgagcaaatcgcgctgttgtataacgataatcctgaggttgtcgcgctggcgtcccagctgatgctgctcgcggcgatctaccagatctctgactccatacaggnnnnnnnnnnccatacaggtgatcggcagtggcatcctgcgcggttataa

SEQ ID NO: 255270 - DNA, 261 bp, Klebsiella pneumoniae
gtgatcggcagtggcatcctgcgcggttataaagatacgcgttccatcttctttattacctttaccgcctactgggttctggggctgccgagcggctatctgctggctctgaccgatatcgtggtgccgcgcatgggtcccgctggcttctggtgcgggtttatcattggcctcacctccgctgccgtaatgatgatgttgcgcatgcgtttcctgcagcgtcagccttccagcgtcatattgcagcgcgccgcgcgctaa

SEQ ID NO: 255271 - DNA, 825 bp, Klebsiella pneumoniae
atgaagatccattttctgggaacggcagcgtctgaagggatacctaacccgttttgccgctgcgagcattgtcagcaagcccgtatacgtaagggaaaagacattcgtacacactcttccgcgattattgatgatcaactgttgattgacgtcgcgccggaatttagccagcagctgctgcgcgacgacatggacgcaactgaaatcaggtcgcttctgtttacccatactcatcccgatcatttcaacgtcggcgatcttttcagccgaatggagggttacggatttgagattacccatccgctgaatatctttggtaacgatcgtgcgattaacggtgcggcagaggttttgccgggctttagcgcagagcgctttgcctttcattgcctggtgcccttcgtcaccgtagaaacccgtggttatcggataactccgctgctggctaaccatgctaaatgggagctttgttatacctggtttatcgaaaaagagggccagtcaatattttacggtcatgactctggctggtttcctgagctcacctggcagtggctggaagggaaaaaaatcgatctggccgttctggagtgtacttacggctttaatggagaaaatcgtaccaataaccatatgagtctggaaacggtgttcgctgccagagacagactggcggaactgggctgcctgaagaaaacaagtcaacttatcgtctcgcatatttcacacagcggcggtctcctgcacgatgagctagtggcagcatgcgataaagagaacattcttgtcgcctgggacgggcttaacctgagcattaaccaataa

SEQ ID NO: 255272 - DNA, 1236 bp, Klebsiella pneumoniae
atggaccttaataaaacaccacgcctgttaattatgatgttcatacagtactttatgcagggcgcctggaatatgaccatggggctggtattaagtacctatggaatggcgaccataatcggctcatcctatgccttgctcggattagcgacaattatttcaccgttatttattggtatggtggccgatcgcttctttgcatcacaaaaggtcatggcgatcctgcacttagtcaatgctggcgtgctgctgtttgttccgcaatttattgaagcgcaaaataccggcatgacgctgaccatgattttcctggtcggtctgctgttttatccgacaacggcgctggctaacagtatcagtttcagccatatcaatggggttaaatatttcccattcatccgcgtttttggcaccttcggctttatggcaatcggctttatcattggtgaaatgggctattccggcaacaccgttacctggtatattgcggcagcttccggcgtcgtcctgggcttatattgcttcacattgccgaatacgccgccaaaagcaaaaggaaacgcttttgcgctgcgcgatctgttatgtctcgatgctctggcactcttcaaagatcgtagcttcagcgtgctgatgctgagtatctttgtcttaatgatccccaaaaccgcatattccgcctatattcctgtctttttgaaagcgctggggttcgataatgccgcatcaatgatgcagatcgggattgcctgcgaagtgattttcatgttcctgctgtcgttcttcttactaaaagccggctttaaaatcacgctgatgctgggggccgtttgctggatcatccgcacgctgttgtttgctcatgcctcgctggatgccaacatgatgtttgtgctgattggcctgatgttacagggattctgctgggactttttctttaccgtcggcgatatttatgttgaccgcaaagccgcgccagagatcaaagcgcaggcgcaaagcttgaggtttatcgtctccaacggcgtcgggctgctgtttgcttctaccgtttgcgggcagatttttaacagtaccgtgacagagcaagggccggaagcgttaccgcaatgggaaacattctggttagtttcagccggtgtcgccgcggtagtgagcgtcttcttcctgattttcttccgcgacgatctgtcaaaacgcaaaacggatctcgcattgaagaaagcgaactcctga

SEQ ID NO: 255273 - DNA, 714 bp, Klebsiella pneumoniae
atgaataatctggccgccacgatcgtcgatcacggatggtttccgttattgaccatcgtcaaaatcagcattgcgtttattctgggaggcatcattggcctggaaagagaatcgaaagggaaacctgtcggattcaaaacctgcgtcattttgtctgtcgccagctgtgtattaaccatcgtttcaatacagtcggcggaatactatgctgaaatttcgatgaacattcgtagcgatccgatgcgcctggcggcccagattatcagcggcgtcggttttctgggggcgggagtgattctgcatcgacacgacgatgctatttcaggcctgacgacggcggccattgtctgggcatcagccggggttggaattacctgcggcgccggtttttattttcatgcttttttcgccacgggtttgttcttattggcgataaaattaagcccgttcattatattcctgcaaactaaaaatcagttccccggaaaagtgaaagtacgggtggttcttgatgaacgaggggcccttgaaaagctgataagccgtatccatcagcaaaaaaatattatcgaaaatattacgattagagaccttaaaaagggaaagattgaggttaatttgaaaatggttattcgccagaaaatgaccttacctgacttataccacgatctgtctcatgttgagcatgtctgcgcgcttgcccttgaacactaa

SEQ ID NO: 255274 - DNA, 1977 bp, Klebsiella pneumoniae
atgcgcaataccttccgaccttcacgccctatgctggcgctgactatcgccctggccggactcgcaggcggctgtaatgacagcggcgtaaaccgcgataacccggcggaagcgcccgcctccgcgccgcagaacgtcatggttcccgtcctgtctgctgatgaaaatagcctggtgctggtttgggaaaagccggaatcagagacgcagcaggtggtggactacgcgatttaccgccagggcgagcggctgggtctggcgcgcgaaaatcaaaaccatttttcaccggccaaaccctatattgataacttctatcagcggattgccagcgatggctggcagcagccaatcgatttgcgtacctttacggtcactcacctgcagccggatacggaatatgcctttacggtgcgcgcggtctacgccgatggtcaggaatctccggacagcgcggtggttaaagcgcaaacccgcaaaacgccgcacgtcatcgaagccagaacctttggtgcaaagggtgatggcactacgctgaatacccaggcgctgcagcaggcgatcgataactgtacggtctcgcactatcctcagggctgcaaggtgctgatttccggcggcatattcaagagcggcgcgctgttcctgcacagcgatatgaccctggagattgcggctgacgccaccctgctgggttcagacgatccggcccagtatccgctggaaaaaggctattacctctatccctacagcgatcatccgcagccccgtcgcccgccatcattaattaacgtgctggaagcggacgataagggcgagtctccggccgggacgtttcgcaatattcgcatcgtcggtcaaggtacgattgacggcaacggctggacccggggcgtcaaaagcggcggcgaggccacaattatcgatgaaatgggcaatgaactgccgcagtaccgggccagtaatgccaataaagttggcgcagacggtattctggcaaagcatcagaccgaaacggctattgcggaaggcatcgaaagcaatagcgcctataaaaatcgccgctccagcctgatgactctgcgcggcgtgcagaacctctatcttgccgggctgacaatccgcaaccccgcgttccacggggtaatggcgctggagtcaaaaaatatcacgctcaatggcctggttcaccagacctttgacggcaataacgccgacggcgtggagttcggcaatagccagaatgcgctggttttcaacaacttctttgataccggggatgattgcgtcaatttcgccgccgggtttggtaaaggcgcggaaacttttcatcaacagccgcaaagcggggcgtggatctttaataactatttccgtaaaggccacggcgccgtggtgaccggtagccataccggagcatggatcgaaaaagttcgcgccgaggataacgtcatgtatatgaccgatgtcggcctgcgcatgaaaagccgcccttactacggcggtggcgtaagggatgtgctgttccgccataatgcgatgaaagatatcgccaaagagccgttcgtttttactatcaaatacagcgccgacgtgaatgatacgacccctgccgacgagcccgctcagttccgcgacgttcaggtgcaggacgtcaccgtcgatggtacttcggctaagtacagcatcctgattgacggcatgacggtagccgaaatggcagaatcatttgggctgacctattctcgcgatgcctatcaccagaatctgcgtttttccaacgtcagtttccgtaacaccaaagcgaccagtatctccttcctgcgcgacagccagtttgatgaggtaacgttcgctaatacaccgcaggcctgggcgtttttcgccgtcaatgacgtgacgctcgctgacagcctgcatcagcagagcatcacccggggagaaaaggacaaacttatccttgagggggcaataaagtaa

SEQ ID NO: 255275 - DNA, 828 bp, Klebsiella pneumoniae
atgcgcaatcccgcttttatctcccgccagattggcgactttcaggtgatggcccttagcgacggcagtatggccgccagcctgacgctgctgtccggtatcaatagcgatgatgctctggaaatccagcgccatgccggcatcattgcgccggatgatatcgacattaatgcctatcttattcgcggccagggaaggacgattctggtcgatgcaggtacaggaggcggcacgcttgccgcgagtttgcaagcggcgggggttggagcagaagagatcgataccgtactactgacccacggccacccggatcacattggcggcctgttggatgctcacggcgcgccatgctttcccaacgcccgtcttcatctgcatcctctggaagcggagtactggcaggatgacggtatgttgaatcgggcaaatgagcggggacagcgcaacttcgccctcgcccgccgaaccctgggcgcgtgggcccgccgccttagctttctcgatgagagagaggtcgtcccgggtatccgcccgctttggctacccggacacacgccgggccattgcgggtttcgcatcgactccgctccgcaaagcctgctgatttggggggatattgtccattttccgcatgttcagaccgcccggcccgccgctgccatcgcttttgatagcgaccccgcgcaggccagagcgacgcgggaatcgctcctcgcccgagccgcaagcgaaaacctgctcgtcgccggtatgcatcttggcggctcgggatttgcacatgtgctaccgacctcctgcggctatcgtctcgattatgccgcgcagtaa

SEQ ID NO: 255276 - DNA, 543 bp, Klebsiella pneumoniae
atgctatatatcgttgagtgcagttacgccgatccggaaagcgaagccagctggaatacgttttacagccagcacaagctgccggcgctggtttccgtcggcggtttccgcgcctcgcagcgctttcgcgccctttcctcccgcagcccgctctatctggcgattcataccattaccgatgcagccgttatcgccagcgaagagtattggcttaaaggcggcggcaacttttcgcgttggcaggcgcatatttgcgactggcgccgcaacctgtatcggtacgacgatgtatttccgcaggtctcacaggatgaggttctgttactcagcccggcgccgctggacttcattgacgcagaactggggtatccgccgaccatactgcacgctgccgggctggataacaatccgccgcagcgcgtggcctacattctgccgcgccgggaggccaggctgcttgcgggacaggaaaaataccgcctctacgagaccatgggcgctcagctgctcagctctcttgatattcaacctgatgcacgctaa

SEQ ID NO: 255277 - DNA, 876 bp, Klebsiella pneumoniae
atgcgaaaaaaactccccagcagcgcctctctgcaggcctttgaggccgccgccaggcacggtaattttgcccgcgcggcggaagaactgtcgcttaccgaaggggcgataagtcggcaaatcgcccgcctggaatcgctgctgaactgcaaactgtttgaacggacgggaagccgggtgcggctgaatcctaacggcgcgcgctatgcgcaccatgtgcgcgagacgctggagcggctggaacgcgacgctcagtatctgatgggcgtcgcggacggcagccgaagcctggaaatcgcctcccccccgacctttgccagccgttggttgattccccgtctgggggattttcatcgccgctacccggacatcatgctgaacatcgcggtcagaaccgagccgtttattcttaccggcagtggttttgatgcggcggtgcactttgagcatcccgcatgggccggaatgcgccggcaatttctgtttgaggagcggctggtgccggtatgccattctgcgttgttcacgggaggcgaagccttgagccagttgaacctgttaccgcgcattcaccgacggcaaaaccccgacgcctggccgcgctatgctgaagagtgtgggatcgcgctggatcatccggcgcggggcgtgcgctacgatctgcatgagatggcgatagccgccgcgctggccgggcagggcgttgcgctggtaccgcacgtgtacgttgaaaaagagcttgaaaacgggacgctggttgcgccctggcctttggctcgcagcctgagcaagcgcttttgtctggttaaaccgctggagcccgggatcaatgaatcggcgctacaggcgtttgaacagtggctactggcgcaataa

SEQ ID NO: 255278 - DNA, 867 bp, Klebsiella pneumoniae
atgacctggaaaataaacaagcaaattgtgcacaatgacgttttaagaaatagcttcattgatcttgcgattaaaaccttcgatctctcctttaaagagtggtaccgcaaaggatactggaccgacgcctatattccctacgccctcgtcagcaacaataaagtgattgctaacgcctccgccaatattatcgatctggtctggcaggatgaaccccgccgctatattcaaatcggtaccgtgatgaccgatgtcgatcatcgtaataagggcctcgccggtcagctcgtgaatgccattctggcggactggcaggataaagccgatgctttctttctgttcgctaacccaaacaccgttgatttttatccaaaattcggcttcgagcgcaccgaggagcatcaggctatcctgccggtaatgccggcggcgggcgacttccgcaagctcgatatggatcggccggaggatgtcgcgctattacagcggtattatgaaaaatcgaatcccttttcgcagctgcgcgtacagaataacttcggtttattgatgttttactgttccgcgtttatgaagcacttcgtcttttattccgagaaaaatcaggctatcgccatcgcgatgcaaaacggaccggcgctgatctgttttgatattttttgcgacagcggccgttctttgtcggccattattaatgagctcgccgatgaaaatacctatcaggccgtgctgggctttactcccaaagagaaccgggttggtgagtatgaaaaaattgaaggcgaagatcttctgtttatctacggacaaaaagaaaatatcttcaaagcgcataagctgatgttcccgcttttatcccacgcctga

SEQ ID NO: 255279 - DNA, 981 bp, Klebsiella pneumoniae
atgtcagaactaaagtttgccacccgactcaactcttttgcatcaggagcttacctgtattggtcggatttaaaaggaaagccaaccgtactgcagatgattgagcgggcagggaaagtgaaaggacttacccatctcgatctgaattatccccagcatatgagtgacaatgtcagtacgatgcgccgggctattgaagacgccggccttgcggttaacggtatgcagatgcgttgggatgccccacagtttcgtattggcgcgtttactcacccggacccaaaaattcgccgcgaggctatcgatttaaccaagcggggtatcgataccgggcgcgagtttggctccagactgatgacgctgtggatggggcaggacgggtttgattactgttttcaggctgattacaaaaaaatctgggaggatgcggtcagcgcggtgcgtgagatcgcggaatatgcgccagacgttgatatcagtatcgaatataaaccgaatgaaccacgcgcgttcagtattttccctaacgtaaccacctgcttgctggcggtggaagaggccggcgcgccaaacctcgggattaccctcgattttgcgcacgtcctttacgccaatgaaattccggcctatgcggcggcgatggtcgcgcgtcgttcccgcctgttaggactggatctgaatgacggttggggaaaacgagatgatgggctgatggcgggctcggttaatccgcgcgcgacgctggagtttttgtggcaaatgcgtcgcgatggctatcagggcgcctattattttgacaccttcccggatgccagcggtctcgatcccgttcgtgaggcgcagaccaatattgcgaccgtcacgcgactgctgaagctgtgcgaaaagctggaaaacaaccaacctctgctggatgcgattagccgccaggacgccgttgcctctcaacaaattgttaatgacatcatgctggccaggtag

SEQ ID NO: 255280 - DNA, 1041 bp, Klebsiella pneumoniae; identical to SEQ ID NO: 173185

SEQ ID NO: 255281 - DNA, 1500 bp, Klebsiella pneumoniae; identical to SEQ ID NO: 173186

SEQ ID NO: 255282 - DNA, 969 bp, Klebsiella pneumoniae
atgatgacacatgcaggtaaaaatagagttttaccgtcctcgctggttaaattcaacgtgcgcgatgccggaaccctaattgggttgctaatcattattgtcacgttttctcttttatctccggtatttctcacactgccgaatttacttaacatacttcagcaatcgtcaattaatgcgttaatcgctttaggaatgactctggtcattatttctggcggcattgatttatcggttggtccgacggcggcaatgtccgccgtgttcggcgcatcactaatggtcgccggtattccgctgccgcttgccgttgtgttgaccctcggcgtcggcgccgcgtgcggacttttcagcgggacgctgattgcgtgggccggtctccagccgtttatcgtgactctgggggggttatcgctattccgcgctattgcgctgatctttaccggcggtaatccggtattcggtatcccatcctccttccgcgatatgattaatagctcgctgtttggtataccgactccgattgttatcgtggcaattattgcgctcatactgtggacggtaatgaacaaaaccccgctgggagaatatattctggcgattggtggcaatgaagaggccgcccgcgtggcgggggttccggttagacaaactaaaattacggtttacgttatctccggtattcttgcctcgttggcatcgctgattctgattggccgcctgggcgcagcggaacccactatcggcacattatgggagctggacgctattgccgccgcagcgattggcggcgcctcattgatgggcggcaaaggcagcatattcggcaccctgattggggtcattattttgggggcgttacgaaacgggctgacgttgcttaatattcaggcattttatcaattgcttgcaacaggtcttattattatcatagcgatgttaattgacagagcaacccgaggcaagtaa

SEQ ID NO: 255283 - DNA, 858 bp, Klebsiella pneumoniae
atgaagcaggatccacgagccattggcgctcagatacgtatgcgtttgccccagctgacaccgcttgaacggcgtgttattgaggcaataatttcccgaaccgatctgacagagcaaacttctttaaaagaaatcgctcaagaaaataatgtttcggaagccatgatcgttaaaataactaaaaagcttaacttcacggggttcaggcatttcagaagcagcctgatttattataacgaatcagaagtggcgggattgcatgcggaaatcgagcctggtgatacctctgagcagcttctggctaaggtatttcgcacctcaattcaggctatcgaagagaccatgtctattcttgatatttctgaatttaatcgtgcggcggatcttatatttaaagcgcgccatattgatctgtatgctgtggggggatccgcgaccgtggctcgcgatctcgcacacaaattgctaaaaataggcataaagtcatctgtttatgatgacgcgcatattatgttgatgtctgccgccgttttatctgacgatgacgtggtgattgctataagccattccggagcaacccgtgcggtgaatgctccggtaaaacttgccgcccgtaatggcgctaaagttattgtcgtcactaattatgcagagtcgcccattgcgcataacgcgcatgtagtactcaattcaacatctcaagggtcgcatttacttggcgaaaatgccgcatcgcgtattgctcaactcaatatactggatgcgctgtttgtggctatcgctaaaaaggatctcagtcaggcagagaaaaacctgatgaaaacccagcgtgcggttcaggatcttcgggagttctag

SEQ ID NO: 255284 - DNA, 867 bp, Klebsiella pneumoniae
atgaacaaaattgcagttgcaggcagtctccattacgacatcatgattgatgcgcatcatcggcctgagaaaggtgaaacggtaatggggaccgcctgtcgctataagtttggcggtaaaggggggaaccaggctatctcggcggccaaacatggctcagaggtccgattcgctggcgccgttggcgcagatgaacagggacgttttctggttgaaacattacgtcaggcgggcgttgacgcgagcgccgttgcggtggtggcagacgcgccttcgggaatgagcgtggccatttccgatcgtgaaggcgattacggggctgttgtggtatccaatgctaatcagaaaatccccgccagcgtattccagaacgcgcgcttctgggatagcgtcagcatgctggtgttgcagaatgaagttccggaggcgattaatattgaagccgccagcgcggcaaagcagcgccgtattccggtatgtattaacgctgcgccggcacgcccgcttagcgaacccttcgcggcgctgatcgatattctgatcgtcaatgccattgaggcacgcgatatgtgcggcatcgaggttgaagatttggcttcggcacagcatgccgcgacgctgctggcggagcgctttgctaaggtggttgttaccgctggcgagcacggtgttgcctggtgcgaagcgggtaaagccgcgcaagctttgcccgcccggaagattaagctggtcagcactcatggggcaggggactgctttgttggggcgctgtgcgcatctttcacggcaggccattcgttagcggaagcggtggcaagcgccaacgctgccgcagcccgccacgtctctcagccagcgacgccttaa

SEQ ID NO: 255285 - DNA, 1578 bp, Klebsiella pneumoniae
gtgttatcatcccgcctttcccttttcgtcctggggctcttttttatgcaacaacgtgttgttcgcgttggagaatggctggttactccctctgttaaccaaattagccgcaaggggcgtcagctaactctcgaaccgcgcttaatcgatcttctggttttctttgcccgccatcctgatgaagtactgagtcgggatgagcttatcgacaacgtctggacccgcaacgttgtgaccagtcacgtcgtcacgcaaagcgtttctgagctacgtaagtcgctgaaagatggcgacgatagcagcatggaatatatcgctaccgttcctaaacgcggctataagctaacggtgccggtgatttggtgtacggaagagggggaggaactgacgccggttattcctgcagaaacgccgacggtcgccgtggacgcgccatcggtttccccgcagcctgaggcggctgcgccagagatggcgccggtggcgaagccggaaaaacgtaagcggctgagtacctttatcgtctggggcctgtttttgctggcgctggcaagctgcgtggcgctggtggcattatccaccctggagtcgcgcccgccggtcacaaaaacccgcatactgctcaacccgcgggatgttgatatccacctgctcagcggcaatacctgtaacaactggtcatcgcagcactcctatgccatcggcctggggagcctgattaccacctcgctgaacacgttctccacctttatggtgcatgataaaaccaactacaacatcaatgagccgagcagttccggaaaaaccctgaccatcgagttcgtcaaccagcggcactatcgcgcgcagcagtgctttatgtcggtcaaagtggtggataacgccgacggatcgacgatgatggacaagcgttacttcgtgaccagcgacaaccagctgtcgattcaaaacgacctgctgagtagcctgtcggacgcgcttaagcagccatggccggcgcgaatgcaggagatgcttaagcagtatcagccgtcgcaaagtatcgcgctcacgcatttctatcaggcacatcagttattaatgaacggagacgtcgattcgctgggcaaagccagtagcctgcttgcggatgtgaataagcagtcgccggactttacctacgcctgggcggaaaaggcgctggtggacgtattacgccattcccaacagccgttagatgataaacaactggccgatctttacagcgaaataacccgggtgggtaatatgccggggattaaagatatggcaatattttatcaaattaaaacggtagacatgctgggtaaaggcaaagtcgatgaagcctacagcgcgattaattccgggattgatctggaaatgtcgtggatgaactatgtgctgctgggcaaagtgtacgaaatgaaaggacagaaccgggaagctgccgatgcctatctgacggcgtttaatttacggccgggagagaatacgttttactggattgaaaacgcggtattccagacctccgtaacccgagtggtaccgtatctcgataatttcctcgcttcagaataa

SEQ ID NO: 255286 - DNA, 210 bp, Klebsiella pneumoniae
atgtttctcatgagccgccagattgttatatcttataaccagtccggtcccgcatgtaacaccttttcaacacgatttagagttcataacttattgaaaaataacttcatttatcttttcctgatatcaacatgtcatcctgatatgttgcacgaaaaaggtcaaaatatcatttgtctgatgtttgcagttatttcactttatctttag

SEQ ID NO: 255287 - DNA, 1389 bp, Klebsiella pneumoniae
  misc_feature (374)..(383): n is a, c, g, or t
atgagttctgccaagaagatcgggctatttgcctgtaccggcgtcgtcgccggtaatatgatggggagcggtattgcattattacctgcaaacctcgctagcatcggtggtattgccatctggggttgggtgatttctattattggcgcgatgtctctggcttatgtttatgcccgactggcgaccaagaacccgcagcagggcggccctattgcctacgccggtgaaatatctccggcgttcggtttccagaccggtgtgctttattatcacgccaactggatcggtaatctggcaatcggtattaccgccgtctcttatttatcaacgttcttcccaattttaaataacccggtgccggcaggtattgcctnnnnnnnnnncttcccaattttaaataacccggtgccggcaggtattgcctgtattgccatcgtatggatattcaccttcgtgaatatgctcggcgggacctgggttagccgcttgacaaccattggcctggtgctggtacttattccggtagttatgaccgccgtggtcggatggcactggtttgatgccgcaacctatcaggcaaactggaacacctccagcactactgacagtcatgcggtaatcaaaagtattctgctctgcctgtgggcctttgtcggggtggaatccgccgccgtcagtaccggaatggtgaaaaacccgaaacgcaccgtgccgctggctaccatgctgggcactgcgatggccggtatcgtttacatcgctgcgactcaggttattgcgggtatgtatcctgcttctcagatggccgcatccggtgcgccgtttgcagtgagcgcctccactattctcggcggttgggctgcgccgatggtttccgccttcaccgcctttgcgtgcctgacttcgctcggttcgtggatgatgctggtgggtcaggccggcgtacgtgccgccaatgacggtaacttcccgaaagtgtatggcgaagtcgacagcaacgggatcccgaaaaaaggcctgctgctggccgcggtgaaaatgaccgcgctgatggtactgattaccctgatgaactctaccggcggcaaagcttctgacctgttcggcgagttgaccggtatcgcggtactgctgactatgctgccttacttctactcctgcgttgacctgattcgcttcgaaggcatcaatgtacgcaacttcgtcagcctgatttgctccgtactcggctgcgcgttctgcttcattgccctgatgggggcaagctccttcgaactggccggtacctttatcgtcagcctgattatcctgatgttctacggtcgcaaaatgcaccagcgccagaacaacgacaactcagcagatagcaacaccgccagcgcgcattaa

SEQ ID NO: 255288 - DNA, 366 bp, Klebsiella pneumoniae
gtgctgaacgttaacggtggtaaacacatcgatgccggcttccagcagctcttcgacgtcctgccagcgtttaggatgacgcgatccgggcgcgttgctgtgcgccagctcatcgaccaggatcagcgccgggcggcgggccagggcgccgtcaaggtcaaactccttcacgtagcgcccgcggtgggaaaggcggcgctggggcagggtactcagcccctcaagcatcgccgccgtctctttacgcccgtgggtttccgccacgccaatcaggatatccagcccctgggcgcgcagccgctgcgcttccgccagcatcgcccaggttttaccgaccccggcgcaggcgccgaaaaatatctttag

SEQ ID NO: 255289 - DNA, 576 bp, Klebsiella pneumoniae
atgtcattcattcgtcctgctcttgtactgtttattctgttaacgctgctcaccggcggcgtctacccgctgttgaccaccgcgctgggacagtggtggttcccacagcaggccaacggctcgctggtgcggattgacggcgaagtgcgcggttcccgtctcatcgggcagaactttaccgcgccgggctatttccagggccgcccttccgccacggcggagatgccggataacccgctggcctccggcggcagcaacctcgccgccagcaatccggcgctggacaacgccatcagcgaacgggtgcaggccctgcgcgccgccaatccggacgccagcgccacggttccggtggagctggtcaccgcctcggcgagcggactggattacagcctgacgcctgccgccgccctgtggcaggcgccgcgcgtcgccaaagcgcgccagctcagcgtggagcaggtcacgcaactggtgaacgaggcaacgcaaaaaccgttgctcagttttctcggccaacctgtggtaaatatactgcagctgaatatgtcgctggatgccctgaaggataagtaa

SEQ ID NO: 255290 - DNA, 2049 bp, Klebsiella pneumoniae
atgagtcgcaaatcattagccctgctggagccgacgctggtgcgtcaggccctgctcaacgccgtgaaaaaactgagccctgccgtacagtggcgtaacccggtgatgtttatcgtctggatcggcagcctgctcaccaccctgctggccattgccatggcgagcgggcaaatcgccggcagcgccggatttaccgccgctattagtctctggctgtggttcaccgtcctgttcgccaacttcgccgaagcgatggcggaaggccgcagtaaagcgcaggccaacagcctcaaaggtgtcaaaaagaccgcctttgcccgtaagctgcgcgcgccgcagcacgatgcgcaaattgaccacgtccccgccgaagagctgcgtaaaggtgacgtggtgctggtggaagcgggagatattatcccctgcgatggcgaagttatcgaaggcggcgcgtcggtagatgagagcgccattaccggtgagtccgcgccggttatccgcgaatccggcggcgacttcgcctcggtgaccggcgggacgcgtattctctccgactggctggtgatccgctgtagcgttaacccgggcgaaaccttccttgaccggatgatcgccatggttgaaggcgctcagcgccgcaagacgccgaacgaaattgcgctaaccatcctgcttattgccctgacgctggtattcctgctggccaccgccactatctggcccttctccgcctggagcggtaatgcggtcagcgtaacggtactggtggcgctgctggtatgcctgatccccaccactattgggggcctgctgtcggccatcggcgttgccgggatgagccgcatgctcggcgcgaacgtcatcgccaccagcggccgcgcggttgaggcggcgggcgatgtcgatgtcctgctgctggataaaaccggcaccattaccctcggtaaccgccaggcttcggcattcctgcctgcgcagggcgtggaagagaaaacccttgccgatgccgcccagctgtcatcgctggccgatgaaacgccggaaggccgcagcatcgtcgtcctggccaaacagcgctttaacctgcgcgagcgcgatctccagtcgctgcatgccacctttgtgccgtttaccgcccagacccggatgagcggcatcaacatcgaccagcggatgatccgcaaaggttccgtagatgccatccgccgccacgttgaggccaacggcggccactttccggccgatgtcgataagcaggttgaagaagtggcgcgtcttggcgcgacgccgctggtggtcgccgaaggcgagcgggtgctggggattatctcgctgaaagatatcgttaaaggcggcatcaaagagcgttttgcccaactgcgtaaaatggggattaaaacggtgatgatcaccggcgataaccgactgaccgccgccgctatcgccgcggaagccggagtggacgactttctcgccgaagcgacgccggaggccaagctggcgttgatccgccagtatcaagcggaaggtcggctggtggcgatgaccggcgacggtaccaacgacgccccggcgctggcgcaggccgacgtggcggtcgcgatgaactccggtacccaggcggcgaaagaggcgggcaatatggtggatctcgactctaaccccaccaaactgatcgaggtcgtacatatcggtaaacagatgctgatgacccgcggatccctgaccaccttcagcatcgccaacgacgtggcgaagtatttcgccatcattccggccgcctttgccgccgtctatccgccgctggcgatgctcaacgtgatgcatctgcactcgccctcttcggcgatcctgagcgcggtgatttttaatgcgctgattatcatcttcctgatcccgctggcgctgaagggcgtgagctataagccgctgacggcctcggcgatgctgcgccgcaacctgtgggtctacggcctgggcggactgctggttccctttatcggtatcaaagcgatcgacctgttattgaccctgaccgggctgctgtga

SEQ ID NO: 255291 - DNA, 1680 bp, Klebsiella pneumoniae
atggccgctcaaggttttttactcatcgcgacttttattctgctgctaatgatcctcgctcgtccgctgggtacggcgctggcgacgatgatcaatgatatgccgctaccgggtctggcccggattgaacgcggtttatggcaggcagcggggattcgttcgcaggagatgaactggctccagtatttagtggcgattctgctgtttaacgcgctgggtctggcggcgctgttcgctctgctgatatttcagggctctctgccgctcaacccgcagcatctgcccggtctgtcatgggatctggcgctgaatacggcggtgagctttgtcagcaacaccaactggcaggcctatgccggtgaagccaccatgagtagccttagccagatggccgggctggcggtgcaaaacttcctctccgccgctaccggcatcgcggtgatctttgccctcacccgcgcatacgcccggcagaaagtcaccactctgggcaacgcctgggtcgatctgacccgcattactctctgggtgctgctgccgatttcgctgctgattgcgctgttctttatccagcagggcgtgccgcaaagtttatcgccgaatcacgaatttacctcgcttgaaggggtacgccagatgctgccgttggggccggtggcttcgcaggaagcgataaaaatgctgggtaccaacggcggcggcttctttaacgccaactcggcgcatccctttgaaaaccccaccgcgctgaccaacctggtgcagatgctggcgatctttctcattccggcggcgctgtgcttcgctttcggtgaggcggtgggcgatcgccgtcagggtcgggcgattctgtgggcgatgacgctcatcttcatcgtctgcgtggcggtagtgatgtgggcagaaacccgcggcaaccttcacttgctgagccttggcgccgacagcagtagcaacatggaaggcaaagagagccggttcggtattctcgccagcagcctgtttgccgtggtcaccaccgccgcgtcctgcggggcagtcaacgccatgcacgactcctttaccgcgctgggcgggatggtccctatgtggctgatgcagataggcgaagtggtcttcggcggcgtcggctcgggtctgtacggcatgctgctgttcgtgatgctggccgtgtttatcgccgggctgatgattggccgcaccccggaatacctcgggaaaaaaatcgacgtccgcgaaatgaaaatgatcgcgctggcgatcctcgttaccccgacgctggtgctcctcggcacggcgctggcgatgctgaccgaggccggtcgcgcgggcatgtttaaccccgggccgcatggcttcagcgaagtactgtatgccgtcacctcagcggcgaacaacaacggcagcgcctttggcggcctcagcgcggcaacaccgttctggaacctgctgctggcattctgcatgctggtcggccgcttcgcggtgattatcccggtgatggcgattgccggttcgctggtgacgaagaaaattcagcccgccggcagcggcacgctcgccacccatgacgcgctgtttatcggcctgctgatcggcaccgtgctgttggtcggcgccctgacctttattcccgcgctggcgctcggcccgctggcagaacatttttccttactttaa

SEQ ID NO: 255292 - DNA, 207 bp, Klebsiella pneumoniae; identical to SEQ ID NO: 174960

SEQ ID NO: 255293 - DNA, 1443 bp, Klebsiella pneumoniae
atggccacccatctggtctggtttcgcgcggatttgcgcatccacgataacctggcgctcgccgccgcctgccgcgatccgcatgccagggtgctgggattattcatcgccacgccagggcaatggcgtctgcacggtatggcgccgcgccaggcggcgtttatggtcagccatctgcacagcctgcaagcggcgctggccgaaaaggggatcccgctgcagattgaacatgctgaagatttcaccgccagcgtagagctactcgtcagcatttgccggcagcagcaggtgacgcatctgttttacaactaccagtatgaaatcaatgagcgccagcgcgatgcggcggtggagagaaccttagcagaggtgacctgtcaggggtttgatgacagcgtgctgctgccgcccggcagcgtgctgaccggcagtcgcgaaatgtataaggtatttacgccgtttaaaaatgcttttattcggcgtttacaggaggcgctgccggagtgcgtcgccgcgccgaaagtccgcgcgggtgggcccgtcacagcctcgtctgcagtaaaaatagattttccacagacgtcatttgatagcgaactgttcgccgcggatgaaaaaagcgctatcgcccggcttcgcggcttctgccagcaaaaggccgccgaatatgaacagcagcgcgattttccggccatcgaagggaccagccgactgtcgccgtgcctggcggtgggcgcgctctcgccgcgccagtgtctgcaccgcttgctggtggagctgccgcgggcgctggatggcgaagccggagcggtatggctcaatgagcttatctggcgcgagttttatcgccacctgatggtttactacccggacttgtgtaaaggtcggccttttattggctggaccgataaggttgcctggctggacgataaatccgcgcttcaggcctggcagcgtgggcaaaccggcttcccgattgtcgacgccgcgatgcgtcagcttaatgcgaccggctggatgcataaccgcctgcggatgattgtcgccagttttctggcgaaagatctgcgcatcgactggcggctgggggagcgctattttatcgaacagcttatagatggcgatttggcggcgaataacggcggctggcagtgggcggcttcgaccggcaccgatgccgcgccctattttcgtatttttaaccctacgacccagggagagcgcttcgacaaagcggggcaatttattcgtcaatggctaccggagctggccggggtgcctgagaaagcgctgcatcaaccgtggctgtgggcggagaaacagggcgtaacgctggattatccgcgcccgattgtcgatcacaagcaggcgcggctggagacgctggcggcctgggaagccgccagagaagttaagactccatcgccaggcggcgagccctga

SEQ ID NO: 255294 - DNA, 1482 bp, Klebsiella pneumoniae
atgaacacacaatcttcacagccgcgggcgatttattacgtcgtcgcgctgcaaatctgggaatacttcagtttttacggcatgcgcgcgctgctcattctttatctcaccaatcagctcaagtatgacgataatcatgcctatgcgctgttcagcgcctactgttctttagtctacgtcacgccgattctcggcggcttcctggccgataagctgctgggcaaccgtatggcggtgatgctcggcgcgctgctgatggccatcggccatctggtgctcggcgccagcgaaatcgcccccacctttctctatctgtcgctggcgattattgtctgcggctacgggctgtttaaatccaacgtcagctgtctgctcggtgaactgtatgaacccacagacccgcgtcgcgatggcggtttttcgctgatgtacgcggcgggcaacgtcggatctatcgtcgcgccaatcgcctgcggctacgtacagcaagagtacagctgggcgatgggcttcgcgctggcggccgttggcatgattgccgggctggtgattttcctcagcggcaatcaccatttccgccacacccggggcgtgaatcgcgaagcgctgcgggcgcggagttttgtcttaccgaattggggctggctgctggttctgctgatcgccgcgccgctgctgatcaccgtgctgttctggcaggagtggtcggtgtacgcgctgattgtcgcgacggtgattggtctggcggtactggcgcggatctacctgcgggcagagaccgccaggcagcgtaaagagctgcgcctgattatggtgctcacctgcttcagcctgctgttctgggcctttgcgcagcagggcggcagctccatcagcctgtacatcgaccgttttgttaaccgtcattttatgggctatgagattccgaccgcgatgttccagtcggtcaatgcctttgcggtgatgctctgcggggtggttctggcgtggctggtgaaagaaaacatcaacggcaaccgtaccgtgcgcatctggggtaagttcgcgctgggccttggcctgatgagcgccgggttctgcatcctgacccttagcgcacgttggtcagccgcctatgggcactcctcaatgccgctgatggtgctgggcctggcggtgatggggtttgccgaactgtttatcgacccggtggcgatgtcgcagattacccgtatcgagatccccggcgtgaccggcgtgctgaccggcatatatatgctgctctccggcgctatcgccaactatctggctggggttattgccgatcagacctcgcagggatcgttcgacgccgccggagccgtcaactattcaattaatgcctacattgaggtgttcagccagataacctggggctcgctggcctgcgtcggcctggtgctggctatctggctgtatcactccgttaagatcagggctcgccgcctggcgatggagtcttaa

SEQ ID NO: 255295 - DNA, 744 bp, Klebsiella pneumoniae
atgaaaaatagtgaactggaacaactgattaatgaaaaactcaatagcgcggccatcagtgattacgcacccaatgggctccaggtagaaggtcgcgagacggttcggaaaatcgtcaccggcgtaaccgccagccaggcgctgcttgatgaggccgtccgtcttgaggcggatgcggtcatcgtccaccacggctacttctggaaaggcgagtcgccgattattcgcggcatgaagcgtaatcgcctcaaaacgctgctggctaacgacatcaacctttacggctggcatctgccgcttgatgcccatccggagctgggcaataacgcccagctggcgtcgctgctcggcattaacgtgatgggcgaaattgaaccgctggtgccgtggggcgaactgtcgatggcggtctcgggcctggaactggcgtcgtggattgaagcgcggctggggcgcaaaccgctgtggtgcggcgacaccgggccggacaaagtggcccgcgtggcgtggtgtaccggcggcggccagagctttatcgacagcgcagcccgctttggcgttgatgcatttattaccggcgaagtttcagagcaaaccatccattcggcgcgcgagcaggggctgcatttttacgccgccggacatcatgccaccgagcgtggcggaattcgcgcgttaagcgaatggctgacggaaaataccgagctggatgtcacctttattgatatcccgaacccggcctga

SEQ ID NO: 255296 - DNA, 657 bp, Klebsiella pneumoniae
gtgcagcgagcgcgttgttatctattaggtgaaacggcagtcgtactggagcttgaacctccggtgacgctggagagtcagaagcggatctggcgattagcccaacggctggttggtcataccgaggtggtggaagccgttccgggtatgaacaacattaccgtgatactgcgaaatccccagcagacggcgtgggacgcgatcgagcgcctgcaaatctggtgggaggagtgcgatacgctcgaaccggaatcgcgggagattctggtgccggtcgtttacggcggcgaaggcggtccggatttgggggaagtggctcgccacagcggactgagcgaaaagcaggtggtggagctgcattcatcggtggagtacgtggtgtggttcctcggcttccagccggggttcccgtacttcggcggcctgccggagcgcctggcgatgccgcggcgggcggaaccgcgcctgctggtgccggcgggttcggtagggatcggcggagcgcagaccgggatttatccgctggcgacgccgggaggttggcagctgctgggccgaacgccgctggcgctatttgatccgaagcgcaaggagccggtgctgctgcgctccggcgacagagtgcgtttcgtcccgcaaaaggagggcgtatgttaa

SEQ ID NO: 255297 - DNA, 933 bp, Klebsiella pneumoniae
atgttaaaaatcatccgtgccgggatgtatacctcggtgcaggacggcgggcgtgaaggtctgcgtcagctgggcatcagccgctgcggtgcgatggataaaccggcgctggttaccgcgaatctgctggtgggcaacggggccaatgccgcggcgctggagatcacgctgggccaggtggatattcaatttgaacgcagcggctggttcgcgctcaccggcgccgcctgcgaggcgaagcttgacggcgagccggtgtgggtgggctggcggacggcggtcaaggccgggcagcgtctggtgctcaagaatccacagcacggcgtgcgcagctatctggcagtggcgggcggcatcgcggtgccgaaggtgctgggctcgcgcagtaccgatctgaaagtgggtattggcggtctggaaggtcgacgtttgcaggatggagaccgactgaagctggggaaatcggataagcagttccgcgggccgcgcggggtgaagcaactgcccatcggcaaccgcatccgcgcgctgcccggccccgagtatcaggagtttgacagcgtgtcgcaggacaccttctggcgctcgccgtggcagcttagcccgcagagcaaccgcatgggctatcgtctgcaggggcaaccgctgaagcggacgaccgatcgcgagatgctttcgcacggtctgctgcctggcgtggtgcaggttccgcataacggtcaacctatcgtactgatgaacgatgcccagaccaccggcggttacccgcgcatcgcgacgattatcgaggccgatatgtatcagctggcgcaaatcccgctggggcagccgatccactttgttccctgctctctggaggaggcgctgaaggcgcgcgccgaccggcaacgttattttgaacaactggcatggagactgaacgatgaagattga

SEQ ID NO: 255298 - DNA, 747 bp, Klebsiella pneumoniae
atgaagattgatttaaacgccgaccttggcgaaggctgcgccaacgatagcgcgctactgcagctggtctcttccgccaatatcgcctgcggtttccatgcgggcgatgcggtgatgatgctgcagtgcgtgcgcgaagcgctgaaatatggcgtcgcggtgggcgcgcaccccagctttcctgaccgggaaaattttggccgcacggcgatgcagctgccgccggagacggtttatgcgcaaacgctgtatcaggtgggcgcgctggcggcgctggtgcgcgcgcagggcggcgaactacagcacgtcaaaccgcacggcatgctctataaccaggcggcaaaagatccgcagcttgctgacgctatcgccaaagcggtatatgacgttgacgccggtctggtgctggtgggcctggcgggcagcgagctgattcgcgccgggcagcgttatcagctgaccacccgccaggaggtcttcgccgaccgcggctatctggcggacggtagcctggtgccgcgcacccagccaggggcattgatcgagagtgaagagcagtcgctggcgcaaacgctggaaatggtgcagcacagccgggtacgcagcatcaccggcgaatgggcgcacgtggtggcggaaaccgtttgtctgcacggcgacggcgagcatgcgctggattttgcgcgacgcctgcgcgcggcgttcgccggacgtaacattcaggtgagtgcggaagcagaagaataa

SEQ ID NO: 255299 - DNA, 750 bp, Klebsiella pneumoniae
  misc_feature (459)..(468): n is a, c, g, or t
atgggagagtcattatctctctggccgctgatcggcattgccgcgatcgtggtcggatttgttctgcgttttaacccggtgctggtggttattgtttccgggatcatcacgggtctgacggcgcatatgccgatcgcgaccattctggagaagctgggtgaaggatttctcaatacccgcaatctgccgtttattcttctgttgccgctggcggtgattggcctgctggagcggcacggtctgaaagagcgcgcgcagacgtggatcgcgaaaatccgcagcgccaccgctggtcgtctgctaatcgtctatcttttcgtgcgtgaagtgaccgcggcgatgggccttaccagcctgggcggtcatccgcagatggtgcgcccgcttctggcgccgatggcggaaggggcggcggaaaaaaactttggcgccttgccgggaaatgtccgctatcccctnnnnnnnnnngtccgctatcgcctgcgcgcgatgtcggcggccaccgacaacgtgggcctgttcttcggcgaagatattttcgttgccttcggggcgattatctttatgcataactttatgctggagtcggggggcattcagactgagccgctgcatattgccctgtgggggatcccaacggcggtatgcgccttcctgatccactctgcccgcctgtggcgcctcgaccgtcatctccagcgcgagctggacaaggttaacgccggacaggcgaaaggcggtgccgcatga

SEQ ID NO: 255300 - DNA, 996 bp, Klebsiella pneumoniae
atgaattttcagcaaacctggctgtactggctggcgggcatcgttctgctggtggtggcggtgatgtcatggcgcgataaggctaatccgcgcaggctgacaaccggtctgttctggggtctgtacggcgtggtctttctgttcggcgactggacctatgcgctggtcggcgacaagcgcctcgtcaatatcggcgttggcgtggtggtcgtggtgctggcgctgatcgccggatttggcggcgtgcgtctcggtcgttatcaccagcgctcgcaggaagaacgcagcgccagcgccgcgcgcctcggcaatcggctgtttttcccggcgctggcgatcccggtagtgacggtgatcggcgtcctgctgtttaataatttgccctcgctgcaggtcgccatctttggcccgggcaatcacgccacgctgattacgctgttttcaatgaccgcgggcacgttgattggtctggtgatggctatccgcatgacccatgaaacggcggttcagccgttacaggaagctcgccgtctgctggattctgtgggctgggcgtttattttgccgcaaattctggcggttcttgggctgctgtttaccgccgcgggcgtcggcaacagcatctcctggctgacgcagcactatctggcggtggacagccggtttatcgccgtcgccgtctatacccttggtatggcgctgctgacgatggtgatgggcaacgcgtttgccgctttccccatcgtgacggcaggggtcgggatcccgattctggtgctgcagcacggcggtaacccggcggtgatggcggcaattggcatgttctccggctactgtggaacgctgatgacgcctatggcggcgaacttcaatatcgtcccggccgcgctgctggagctgccggacaaaaacgcggtgatcaaagcccaggtgccgaccggcattatgttgcttatcgtgaacgtatttttgctctatttcctgatgttcctgtaa

SEQ ID NO: 255301 - DNA, 645 bp, Klebsiella pneumoniae
atggctggcgtattgattaccggttttgaaccgttcggcggcgaagcggttaacccttcgtgggaagtggtaaagcagctggatggcgctatcattgccgggcaaccggtggtggcgcggcagctgccctgcgtcttcggcgatgccctgacggtgctgaacaccgcgctggatgagctgcagccgcgcctgatcctggcgattggccaggcgggcggtcgtgtcgacatcaccgttgaaagggtagcgatcaacgtcgatgatgcgcggatcccggacaataaaggtctgcagcccattgacgtaccgatcgtggctgacggtccggcggcgtactttagcacgctgccgatcaaagcgatcgttgccgcgctgcgcagtaaggggatcccggcgtcggtatcgcagacggcggggacgtttgtctgtaatcacgtgatgtacggtctgctgcatagcctgcgtaacagcagcggcgtgaagggcgggtttatccatattccgtatttgcctgagcaggccgcggctcaccccggtgccgccagtatggcggtagagacggtgcgtgcggcgctggaaacggctatcgccgttgccctgcagcaggatggcgacgtgaaaatcggcggcggcgcaacgcattaa

SEQ ID NO: 255302 - DNA, 792 bp, Klebsiella pneumoniae
atgccggaaggtccggaaattcgccgtgcggcggatagcctggaagcggcgattaaaggcgaacccctgactgaggcgtggttcgccttcccgcagttacaacattaccaatctcagcttgtcggccagcgagtaacacgcattgaaacacgcggtaaggcgctgttgacccatttctccggcggattaacgctgtatagccacaatcagctgtatggcgtctggcgagtggtggacgcgggggcgcagccagaaaccacgcgcgtgttgcgcgttcggctgcagacggcgcgtagagcgattttgctctacagcgcctccgatattgaaatgctgacgcccgagcagctcgcccgacacccatttttgctgcgggtcggaccggatgtgctcgatatgagccttagcgttgaacaggttaaagagcggctgctgtcggcgaaattccgcaaccgccagttctccggactgctgctggatcaggcgtttcttgccggattgggcaactatctgcgcgtggagatcctctggcaggtcgggctaaccggtcgtcataaagcctctgaactggatgaaaagcagctcgatgcgctggcccatgcgctgctggagatcccgcgtttgtcctataacacgcgcggtctggtggacgacaataagcaccacggcgcgctgtttcgctttaaggtttttcatcgccagggtgaggtctgcgagcgctgcggcgggattatcgagaggaccatgctctcgtcgcggccgttttactggtgccccggatgccagcaataa

SEQ ID NO: 255303 - DNA, 1284 bp, Klebsiella pneumoniae
atgtctgatgctaaagcaaaaatcaccctgggtggtgatactgctattgaactggatgtgctaaagggcactctcggtcaggatgttattgatattcgtagtcttggttcaaaaggcgtatttacttttgaccctggtttcacctcaaccgcatcctgcgaatctaaaatcacctttatcgacggtgatgaaggtatcctgctgcaccgcggtttcccgatcgatcagttagcaaccgactctaactatctggaagtatgctacatcctgttaaacggtgagaaaccgacccaggcacagtacgacgaatttaaaaccatcgtgacgcgccacaccatgattcacgagcagatcactcgtctgttccacgcgttccgccgcgattctcatccgatggccgtcatgtgcggtattaccggcgcgctggctgcgttctatcacgattcgctggatgtaaataacccacgccaccgcgatatcgccgcattccgtctgctctccaagatgccgacgatggcggcaatgtgttacaaatattccatcggccagcctttcgtttatccgcgcaacgacctctcctacgcgggtaacttcctgaatatgatgttctccacgccgtgtgaaaaatatgaagtgaacccgattctggaacgcgcaatggaccgtattctgatcctgcacgccgaccacgaacagaacgcttccacctccaccgtgcggactgccggctcttccggcgccaacccgtttgcctgcatcgctgcgggcattgcttccctgtggggaccggcacacggcggcgccaacgaagcggcgctgaagatgctcgaagagatcagctccgttgaacacattccggaattcgtccgtcgcgcgaaagacaaaaacgactctttccgcctgatgggctttggccaccgcgtgtacaaaaattacgacccgcgcgccaccgtgatgcgtgagacctgccacgaagtgctgaaagaactgggaacgaaggacgatctgctggaagtggccatggagcttgagcacattgcgctcaacgatccgtacttcatcgagaagaaactctacccgaacgtcgatttctattccggtatcatcctcaaagcgatgggcattccgtcttcgatgtttaccgttatcttcgcgatggcgcgtaccgtgggctggattgcgcactggaacgaaatgcacagcgacggcatgaaaatcgcccgtccgcgtcagctctataccggctacgaaaaacgcgacttcaagaacgatatcgcccgctaa

SEQ ID NO: 255304 - DNA, 405 bp, Klebsiella pneumoniae; identical to SEQ ID NO: 174972

SEQ ID NO: 255305 - DNA, 348 bp, Klebsiella pneumoniae; identical to SEQ ID NO: 174973

SEQ ID NO: 255306 - DNA, 1767 bp, Klebsiella pneumoniae
atgaaattgcctgtcagagaatttgatgcagttgtgattggtgccggtggcgcaggtatgcgcgcggcgctgcagatttcccagagcggccaaagctgtgcgctgctctccaaagttttcccgacccgttcccataccgtttccgcacagggcggtatcaccgtcgcgctcggtaatacccatgaagataactgggaatggcacatgtacgacaccgttaaggggtcggactacattggcgatcaggatgccatcgaatatatgtgtaaaaccggcccggaagcgattctggagctggaccatatgggtctgccgttctcgcgtctcgataacggcacgatttatcagcgcccgttcggcggccagtcgaaaaacttcggcggcgagcaggcggcacgtaccgctgcggcggctgaccgtaccggtcacgccctgctacatactctctatcagcagaacctgaaaaatcacaccacgattttctccgagtggtacgcgctggatctggtgaaaaacgccgatggcgcggtggtcggctgtaccgccctgtgcatcgagaccggtgaagtggtttacttcaaagcccgcgctaccgtgctggcgaccggcggcgccggccgtatttaccagtccaccactaatgcgcatatcaataccggcgacggcgttggcatggcgatccgcgccggcgttccggtacaggatatggagatgtggcagttccacccgaccggtattgccggggcgggggttctggtgaccgaaggctgccgcggcgaaggcggctatctgctgaataaacacggcgagcgctttatggagcgttatgcgccgaacgcgaaagacctggcgggtcgcgacgtagtggcgcgttccatcatgatcgaaatccgtgaaggtcgcggctgcgacggtccgtggggcccgcacgccaagctgaaactcgatcacctcggtaaagaagtgcttgagtcccgcctgccgggtatcctggaactctcccgtacctttgcccacgtcgacccggtgaaagagccgattccggtcattccaacctgccactatatgatgggcggtattccgaccaaagtgagcggccaggcgctgaccgtcaacgagcagggcgaagacgtggtgattccggggctgtttgcggtaggcgaaatcgcctgcgtatcggtacacggcgcaaaccgtctgggcggcaactcgctgcttgacctggtggtctttggccgcgcggtaggtctgcatctgcaagagtctatcgccgagcagggcgtactgcgcgatgcgacggatgacgagatcgacgcttctctggaacgtctgaaccgctggaacggcaaccggaatggcgaagatccggtcgaaatccgcaaagcgctgcaagagtgtatgcagcataacttctcggtattccgcgaaggggatgcgatggcgaagggccttgagcagctgaaagccatccgcgagcgcctgaaaaacgcccgtctggatgatacttccagcgagttcaacacccagcgcgttgagtgcctggagctggataacctgatggaaaccgcttacgccaccgcaatgtctgcaaattatcgtaccgaaagccgcggcgcgcatagccgcttcgacttcccggatcgtgatgatgaaaactggctgtgccattccctgtatctgccagagtcggaatccatgacgcgtcgtagcgtcaatatggaaccgaaactgcgtccggcattcccgccgaagattcgtacttattaa

SEQ ID NO: 255307 - DNA, 717 bp, Klebsiella pneumoniae
atgaaactcgagttttcagtttatcgttataacccggacgtagacgatgctccgcgtatgcaggattacaccctggaagcggaagagggtcgtgacatgatgctgctggatgcgttaatccagctgaaagagaaagatccgtcgctgtcgttccgtcgctcctgtcgtgaaggggtatgcggttccgacggtctgaacatgaacggtaaaaatggtctggcgtgcatcacgccgatctccgcgctgaatcagccgggtaagaaaattgttatccgtccgctgccaggattaccggttatccgtgatttggtggtagacatggggcaattctatgcacaatatgagaagattaagccttacttattgaataatgggcaaaatcctccggctcgtgagcatctgcagacgccagagcagcgtgagaaactcgatggtttgtacgagtgtattctctgcgcatgttgttcgacttcttgcccgtcgttctggtggaacccggacaagtttatcggcccggctggcctgctggccgcgtatcgcttcctgatcgacagccgcgataccgaaaccagcgatcgcctcgaagggctgagcgatgctttcagcgtattccgctgtcacagcattatgaactgcgtcagtgtgtgtcctaaggggctgaacccgacgcgcgccatcggccatattaagtcgatgctgctgcagcgcagtgcgtaa

SEQ ID NO: 255308 - DNA, 576 bp, Klebsiella pneumoniae
ttggggattacttccgggcgctacgacgtggcgctggtgaatattgcggtaaccgagcagcggaaagcgaagtttgattttgcgacctatcgcgtcgattcgctggccttttccgtaaaatcgaccagcgacatcgccagcgtgagcggcccggcggatctcgccggtaaaaaagtgattgtcgggtccgggactaaccaggagcgaattttgctcggctggaacgccgaaaacgaagccgccgggcgacaacctgcgctaccggtctacctgaccgatgacgcttcgggcaatctctatattcagtccggtcgcgcggacgtgttttttgggccgcagtcggtagccgcatacaaagcggcgctcagcggtaaaaccaaagtcgtcgggctggggccgaaaaaggcttatgtcgccaccaccaccaggaagggtaacggactggtctatgcgcttcaggccgcgctggatggcgcgatagcgcgcggagagtatcagaaagtgctggcccgttggggtgagcagggcgaagaggtgaggcaatcggaggtcaatccgccggggattacctactaa

SEQ ID NO: 255309 - DNA, 618 bp, Klebsiella pneumoniae
atgatcaccgtctatggcgtacccggctggggctcaacgataagcgaactgatgctgacgctggccgatatcccgtaccattttgtcaacgttgagggctttgaccaaccgggcccgcagcgcgaccgtctcaagctgattaacccgctgtgtcaggtgccgaccctcacgcttgaagatggcagcgtgatgaccgaatccgcggcgattgctctgatgatcctcgacgtgcgaccggatctggctccggcgccgggatcgccgcagcggcatgcctttcagcgtctgctcatctggctggtggcgaacgtttatcccacctttacctttgcggattacccggagcgctggaccgccgatgcgccagagcagctgcgggaaagctgcatcagctatcgcaaatcgctttatcagtggctggaggagcagcttgccgccgcgccgtatgcgctgggggcggaaataactctgctggactgctatattgcggcaatgtgtgcctggggcccgcgacgggagtggtttgcggcgcaaacgccaaaattcgtcgccgtggcggacgcggtgtatcgccatcccaaactcgaagccgttcttcgccgcaacgagctgatttaa

SEQ ID NO: 255310 - DNA, 228 bp, Klebsiella pneumoniae; identical to SEQ ID NO: 172274

SEQ ID NO: 255311 - DNA, 279 bp, Klebsiella pneumoniae
atggacctgaatcccaacggccgaacctatcgctacgacagcggcgtgcatcaataccaggcggtgagcggcgatttttacaagctgaccttcgccccgacgttcaaagttggcgatgtgtttgatatcaaagcgaggccggagatacgtttctttgtcacgtggatgaattgggataaagacctggatcgttatgcgatcaacgatgatttcggcagtaaaggctttaccgccggaggaaactggaactttggcgtgcagacggagatttggttttaa

SEQ ID NO: 255312 - DNA, 1320 bp, Klebsiella pneumoniae
atgcgtatctctttgattagcgcagcggtttgctgcgcccttttttcggcttacggcgcgagtgcggccccgctcaccgtcgaacaacggctagcgcagctggaggcccggcttaatcatgcggagcaggaggccggagaggccaaacgtcgggcgcagcaggcggagctgcgcaccagcgccgcggaacaacgcgcggcggcagcggaaaagcaggtgcagaccctcagtcagcgcaccgcagcgaccgagcaaaagcagcaggctgccgacaaacagctggcgaaaagcagcctcagcgatggcttcgagttcaacgcctacgcgcgctccggtatgctggttgacagccatggtaaaggcgcgcgcggcggcccgggtgtctccccggccagttcgctcaacggcgatgcccacgttggccgtctcggcaacgagaaagataactacgtggagctcagcttcggcaaaaaaatgaccttcagcgacgggtcatgggcgcactttaaaaccatgcttgccgacggggcaaccaacccggatccgtgggtacaggataacgacagccaccacctgaacgtgcgtcagctgtacgtcgagatgggcaatttcgccgatttttccgggccgttcaggagcgcgtccatctgggcgggcaagcgcttcgaccgcgataatttcgatatccactttaccgatagcgatattatgttcctcggcggtaccggcggcgggatcaatgacgtgaagtggggtaatacgctgcgcggcgattactcggtctatgcgcgtaacttcggcgatctgggtagcgataactaccaggataacgatatacagaacctgatgttcaccgccaaccacttctggaacaactggcagctgatgaccacggcgatgaccgcccagggcaatgatgatctgaaagataatacctcgaccaccggcagttacgctctgcgcagcgataatacggcgaaaaacggctactacgcgatgctggcgtatcacgacaaacagcaattctatggcctcgcgccgggcgtatcggagagcgccctgcagtacggcggcgggctgggcgccgaggcgcgccagcccggcagcgatggcgatcttaccgagaacgcaaagtccctgcgttttgcgtcctacggcattttgccgttggggaaaaactggcagcttgcaccatcggttatcgcccagcatagcgaagatcgctaccgcgatggcgaccgctacgattgggcaacctttaacctgcgggtttcccaggggatcacccgcaacttcgccctgctatacgaggcgtcctag

SEQ ID NO: 255313 - DNA, 1383 bp, Klebsiella pneumoniae
atggcagaaacaacctttaccctttggcggcagcgccttggctatggcatcgccgacctctcctgcaaccttgtgtggcagatgatctctctttatctgatgttcttttacaccgacgtgatgggcctgcccgcttattacgttggcctgatgttcctcgtgacgcgcctggtggacggcgttgccgacgtgcttatggggctggttatcgacaataccgccacccgctgggggcgctgccgtccgtatctgctgattggcgcgatccccttcggactgctgtgtattctggccttttacgtgcctgattttggcaccaccggtaagctgatctacgcttttgtcacctatctgtgtctgtcgtttctctataccctcgttaatattccattctgcgccatgctgccgtttctgacgaacgactcgcgggagcgcacgacgctgtcggcggtgcgcattctgctcggctcgctcggcgcgactattgtcgcggtcgccactctgccgctggttggcgcgctggggaaaggcaatcaggagcaaggcttcttctatacggcggtggttttcggcgttattgccaccttttttctgctggtgagcttccggaacgttaaggaaaatatcagcattactcaggagcgcatgaccttaaaacgcgcctgggtcagcctgcgcgccaaccgtccatggttcgtcttcgccatcaatattttcctgatgtggggcgcgtttttcttccagaccggggcgctggtctacttcttccattattacgtcggtaataacgatctcacggcgatcgtcgccgggatctccaccttcgttcctctgctgggtaccctcaccgttccgctgctcgccagcaggatgaaaaaacgccacgtctatctggtcgccagcgcgatcaacctggtcggcatgggcatgatgatggcggcaggcattaacagctggggtctggttgccggagcggtcgtactctcgcttggcgccggacagcgcacggcaatttacttctctatgcaagccgatccggtggattacggagtatggaaaaccggcatcaataccgccggcattttgacctccatcaacggctttcttggcaaggtggcgatggcgggcgcgggagccattaccggggccctgctctcatccggcggttatatcgctaaccagacgcaaagcgacggcgcgatgctggcgataaaagcctgctacctctatatcccggcgctgctgattgtggcttcaatgctgtggattggtcgcttctaccgactcgacgaccagtacgagcagatccgcgccgaccttgacgctggacgccgtgcgccgtcgaacccatcgtccgttgctggagaaaaccacgccctttaa

SEQ ID NO: 255314 - DNA, 825 bp, Klebsiella pneumoniae
atgatgatgttgaccgttgagtattatttcacccatccgcaggataagctgggcatgtacgccagcgatccggaagataatagccatgaacatagtcatgaatttgctgagctggtgatcgttgaggaagggcacggtttacatgttattaatggcagaccactatatattcaacagggcgacgttttttacgttcagccgggtgacgttcattattatgatgagctagggacgcttaagttaattaatgtgctgattaacccgttggtagggtttcattatttacagcctctcgatactttattacagactttctctgcgcagaatgcgtcctgctacggttggctggcgccggacacccgccatatctgcaaggaactggtggataagatattttctgccgagctgcggcaggggcaaaatattgccctgcgcgaagccgcgtttttccagttggtgacgacgattctgcatgccgaaaccgaagccgaatatagcaccactaaatataagctgcataaattgctgacctggctacaggagcactgttttgaagatcataactggcagcagctggcggagaaattccatctgaccacgcgtaccgcttttcgccatattaaagaggcgacgggattgacgccggataattatttaaagcgtctacgattagtttcggcgcgcgtcaaattacgcgagaccgatatgacgattaccgaagtggcttatctatgcggctttgccaacagtaatcactttaccactttatataaaaaggtttttggcctgactcccagcgaagaccggcggcgtttgctacgctag

SEQ ID NO: 255315 - DNA, 582 bp, Klebsiella pneumoniae
atgagccgttttcgccacgtggaactccagtacgccagtcgcctgctcaaccatggcccaacgattttaataaccagctacgacgcccatactcagcgccgcaacgttatggccgccgcatggtcgatgccggtggagttcgccccgccgcggctggctatcgtggtggataaaagcgcctggacgcgggaaattattgagcgcaacggcacgttcggcatcgtcgttccgggcgtcgaggccgccagctggacctacgcggtcggtagcatcagcggacgcgatgaggataaatttaacgcttacggtattccggtggtgcaaggcccggagctgggattgccgctgattgaagaaaagtgtctggcgtggatggagtgccgactgctgccggcaacggcggctcaggagcagtacgatacgctgtttggcgaagtggtttccgccgccgccgacgaacgtgcgtttgtcaccggacgctggcagttcgacgatgataagatcaataccctccatcatctcggcaccggcaactttgtcgccagcggccgccacgtccgcgccaatacgccagaagagtag

SEQ ID NO: 255316 - DNA, 702 bp, Klebsiella pneumoniae
atgcgcgcgcttaccagcattaagcttgacggcgtttctttcgccttcggcgccaacaccgtccttaatcagatcgatctgcatatcgatgcgggcagcatcgtggcgctgctggggccttctggctgcggcaaaagcacgctgctgcgcctgctcgccggattaaccgtacccgccagcggcagcattcacttcggcgctcggctggtggcgaaagccggctggggtatgccgccggagcagcgcgatctcggcatggtcttccaggattacgccctgtggccgcatatgacggcggcgcagaacgtggctttcccgctgcgcatgcgcggcatcgggcacaaggaacgacagcgacgggtcgaggaggcgctggcaatggtcggtctcagcggcttcgccgagcgtaaaccgtcgggcctttccggcggacagcagcagcgcgttgccctggcccgcgccattgtcgcagaaccgcgcgtgctgctgttcgacgagccgctctccaatctcgacagcgaactacgcgagtcgctgtgcgtcgaaatgagccgcctgctgcgccagctgggcatcactgccgtctacgtcacccacgaccgtcgcgaagccgaactgttggccgacaagattgttcatttatctgcgggctgcgttgccgccgttcgcgccgtgacttcaacctcaggggaatccgtatga

SEQ ID NO: 255317 - DNA, 969 bp, Klebsiella pneumoniae
atgaaaaccgttattaccgttaccaaaggagctgcgctcgcgatgatgctgtccgccaccacgatctcctgcgcccactcgctcaccgtctacaccgccgggccgggctcgctggcgaaaagccttgccagcggctatgagaagaaaaccggggtgaaggtaaatattttccaggctactaccggtaaggtgatggcgcgtcttgaggccgagcaggccaacccgcaggcggatgtgctgatttccgcttcgtgggatacggcggaggatttgcatcaccgcggctggctgctgccatatcagagcagcaacgccgataaggtaccggagaacctgaaatccgccgattacgttgcccaggggatttcggcgctggggatcgtctggaataccaatagcggcaccccggagccgaaagagtggcgcgacctgaccgaagcggcgttcaaagacaaagtgacgacgccggacccggcgctttccggcgcatcgctggatttgctgatcgggttacagaatggcatgggcgaccaggcctgggcgctgtttaaagacttgaagaagaatggcatggtggtcagcgggccgaatgcccaggcggtgacgccggtgatgcagggcgcgaaagcggcggtattcggcgcggttgattatgtctcttacggcaatatccatcagggcgaatcgctaaaggtgattttcccggccagcggcacggtgattgcgccgcggccgatgatgatcctcaaaaccagcccgcatgctgacgatgcaaaggcctttattgattatgtgctgtctccggaaggccaggcgctggtcgccgacgcctggcttatgcccgcccgcagcgatattccggcgaagcgcccgctgctcaacgagctgaaaattctgccgaccgccggcgaaggcactagcgaacgtagtgcggtgctttcccgctttaatacgcttttcgcccagtaa

SEQ ID NO: 255318 - DNA, 1488 bp, Klebsiella pneumoniae
gtgaaacagagacttatttcagcgggcacgctggcggcactgctggtgctggtagcgttgccgctgctctttatcgtcctccaggcgatttttccccggtttagcgccggttcgctgagcggcgcgtttagcggcgtgtcaacgctgattgccgacccgcagctacccgcgatgctcggcggtactctgtgggtggcctgcggcgtggcgctgatgagcgtggtcatcggtctaccgctgggcgtcgtgcgcggattgtttactatcccactgccgcggctgtgggatctgctctttctgatcccctttctgacgccgccctacatcgcggcgctgtcgtggatgctgatgctgcaacgtcatggctatctccagcagctgaccggctgggatcttaacgatctgctttttagccgcatcgggattgtgctggtgatgaccctcaatattttcccggtagtctattttgccgtttcgcgcagcctgctggcgagcggtcagcggttggcgattgtcgcccgggtgcacggcgccagcgcctggcgggcgttctggcacatcacgctgccgatgctctcgccggcgctggcggcggggatgctgttggcgtttaccctggcgattgaggaatacggcgttccggcggccctcgggtcgcgggcggggctggtcatgctgaccgtaggcattgagaaaaagcttgccgactggcctgtcgatctgcccggcgcatcgctgctttcgctgctgctgatcgcggtggcgctgctggcctggtggctgcaaaaacggctgactggcggtaaagaggtaaccagcgtcaccggtaaaccgggggagaatagcggggcggagctgggctggctgctgtcggcgctggcaaccagcctttcgctggcgctggcttcggctggggttgttgggctggtggggctgctcgccgcctggctggttgtggtgcaaaaaatcaaggggagcgcgatagtcgatgccttatcgctgctgccggcggcgctgccgggcgtggtggtaggcgtcgggttgattctgttgtggaatcagccgttctggccgctttccccctacaacagctggtttatgctgctgctctcctacagttgtctgctgctgccctggccggtacgctacgtcggcagcgcgctgcgccagcttggcaataatcttgagcctgcggcaagggtacatggggcgacggccctgcaggcgctgcgtctgatcgttctgccgctggtcttcccggcgctgctggcggcgatgctgatggtgttcgccgtcgcctcccgcgagctggtaacttcgctgctgctcgcgccagccggaacgcaaaccgtcgcggtgtttatctggcgccagtttgagcagggctcggcggggcagggaatggcaatggcgtcgctgacgctgcttaccggtctcgggctgatgctcagcgcgctggcgctgatgcagcgaggcacgcgcggataa

SEQ ID NO: 255319 - DNA, 846 bp, Klebsiella pneumoniae
atgagtccctttttaagcgcctatttttctcgtctgggctggacgggcaccccggacgtttcacttcacaccctgcgcgaactgcatattcaccataacggcgcgatcccctttgaaaatctggatgtgctgctgcccagagagatacatctcgacgatcgcaccctcgaagagaagctgattcacggtcgtcgcggcggctactgcttcgagcaaaacggcctgctggagagagcgctgcgcgaaattggtttcaacgtgcgcagccttctggggcgcgtggtgctggccaatccgccgcatatgccgccgcgtacccatcggctgctgctggtggacgtggagggcgaacgctggattgctgacgttggtttcggcggccagaccctgaccgcgccgatcaagctgctggccgatgtggaacaagcgaccccgcacggtgagtatcgcctgatctacgaaggggaagagtggaccctgcagttcagccatcacggccactggcagtcgatgtaccattttgacttaggtcgccagtacgcttccgactatgtgatgggcaacttctggtcagcgcactggccgcagtcgcacttccgccatcatctgctgatgtgccgccacttaccggatggcggcaagatgacgctgaccaatttccactttacccattgggataaaaaccatgtggtcgaaaagcgggatttagcggatgttccggcgctgtatgaagcgctgcaaacgcgttttggcctcggcgtggatgatgccaaatatggcttcagcgaagcggaactggcggcagtgatggcggcgtttgatacccatcccgaagccggaaagtag

SEQ ID NO: 255320 - DNA, 348 bp, Klebsiella pneumoniae
atgaagacacagcgcaaattctaccgaattgccttcggaatagttggttttttattactcacttatattagagtgcaattaggttacaatcctctcaacccactccttgccgatttatgttttttagctgcagggtatgttttcatctattttgttatattttcactgagtgaatccggtgtggaaaagatgggctccttccatcaaaaatacaataaagacaacctgcataaacaacctcttaagtgtttcatgcagcatcaatcgacagtcgctggaggatacaaactggtttttaaccttgggtatattttaatcactcacctgatattaaaacaacacctgtga

SEQ ID NO: 255321 - DNA, 681 bp, Klebsiella pneumoniae
atgatacagtacctgaacgtctttttttacgacatctacccctacatctgcgcgacggtcttttttctcggcagctggctgcgctatgactacggtcagtacacctggcgcgcctcctccagccagatgctcgataaacgcgggatggtgatctggtcgaatctttttcatatcggcatactcggcattttctttggccatctgttcggcatgttaacgccgcactggatgtatgcctggtttttaccgattgcggtcaagcagcagatggcgatggtgctcggcggcgtctgcggcgtcctgacgctgattggcggcgccggtttgctctggcgtcgtttgaccaaccagcgcgttcgcgcgacctcgaccaccccggatatcatcatcatgagcattctgttgattcagtgcctgctcgggctgagcacgattcctttttcggcgcagtatcctgacggcagtgaaatgatgaagctggttggctgggcgcaaggcatcgtgaccttccgcggcggctcgtctgaaatgctcagcggtgtcgcctttgttttccgcgtacatctggtactgggaatgacgattttcctgctgttcccgttcacccgtctggttcacgtctggagcgcgccgtttgaatatttcacccgccgctaccaggtggtacgttcaagacgctga

SEQ ID NO: 255322 - DNA, 696 bp, Klebsiella pneumoniae
atgcaaatcctcaaagcgatcggcctgctgatggagtacccggatgagtttctttggcagtgcaaggaggaggtgctggccatggtgcggcacgacgcccccatgctcaacgacttcgccgctgagatgctgaatgccccgctgctggacaagcaggccgaatggtgcgaagtgttcgaccgcggccgcgccacgtcgctgctgctgtttgaacacgttcacgccgagtcccgcgatcgcggccaggcaatggtcgatctgctcgctcagtatgaaaaagcgggtctacagctcgactgtcgcgaacttccagaccatctgccgctgtatctggaatacctcagcatcctgccggaaaacgaagcgcgtgaggggctgcaaaacgtcgcgccgattctggcgctgctgggcgggcggctcaagcagcgcgaggtagcgtggtacccgctgtttgacgccctgctgagcctcgccgggagccccctctcaagtgacagtgtcacgcagcaggttaacaacgagtcccgtgatgatacccggcaggcgctggatgcggtctgggaagaagaacaggtgaaatttatcgaagataacgccacaacctgtgacagctcaccgttacagcaatatcaacgacgctttagccaggacgtggcgccgcagtacgtcgacgtcagcgcgggaggcccgaaatga

SEQ ID NO: 255323 - DNA, 456 bp, Klebsiella pneumoniae
atggccattaagccttttaattaccagcaagacttttccagcatcgattttcgccagcacccggagctctatcaggtaggaagaggcgaacagggcgtgttgttggttgagccctataaaagcgaaatccttccctactggcgctataaagatgaagcatccgcgactgaatctgccagggaaatttatcagctcttcgagttttatcgacagcagaatgatttcgttggtatggatatggcgcgcaaatttattcagatgggctacacccgggcaagacgttatgccaattacaaaggtggtaaaaaatatgcgaaggatggctgcctgaatccacgtggtaatgatcctgttaaggcagcagctgcggcagtctttaaacaatggtgggataaacttcggcaggatgaagattatctccagagaaaaaagaaacatcaggctcaatgggggtaa

SEQ ID NO: 255324 - DNA, 1299 bp, Klebsiella pneumoniae
atgacagaaagcagtattagcgaacgtgaatcgctggaacatgccgatacccggcgccgtatatgggccattgttggggcatcgtcagggaatctggtggaatggtttgatttttatgtctattcattttgctcactctatttcgcgcacatcttctttccttccgggaataccacaacccaattgttacaaacggcaggagtgtttgctgccggttttctgatgcgtccaatcgggggatggatattcgggcgcattgctgatcgtcgtggacgcaaaacttctatgctgatttccgtatgcatgatgtgttttggttcactggtgatagcctgcctgccgggttatgcaacgataggaacctgggctccggctctgcttctgcttgcacgtttattccagggattatccgtcgggggggaatacggtaccagcgccacctatatgagcgaagttgccgtagaaggtaagaaagggttctatgcctcatttcagtacgtcacgctgattggtggtcaacttctggcggtgctggttgttgttgcattacaacagatcctcagtgatgaagatcttcatgcctggggatggcgtattccgtttgcccttggcgcagtcctggccatcgtggccttgtggctgcgacgccagttggacgaaacttctaagcaggaaacgcgcgcgttaaaagaggctggttcgttcaaagggctctggcgtaaccgcaaggcatttattatggtactgggctttactgccgccgggtcgttaagcttttataccttcaccacttatatgcaaaaatatctggtcaataccgcgggtatgacagcgggcaccgccagcatgattatgaccgcagctttatttgtttatatgctggttcagccgctttttggcgccctctcggacaagattggccgtcgtacctcaatgctctgttttggcgcgttggtcaccctctttaccgtgccgattcttaatgcgctacaaaacgtgagttcgccgtatgcggcgtttgctctggtgatatgcgccctgctgatcgtaagtttctacacctcaatcagcggcattctgaaggctgaaatgtttccggcccaggtacgtgctctgggcgttgggctttcttacgctgtagccaatgcgctattcggcggctcggccgagtatgtcgcactgtcgctaaaatctgtgggaattgagcacgctttttactggtacgtgaccgtcatgggggcgattgcttttctggtctctctgacgctgcatcgtaaaggtaaagggctgcgcttgtag

SEQ ID NO: 255325 - DNA, 327 bp, Klebsiella pneumoniae
atgcgcaatatcatgcttattgccccgctgttacttctgaccggctgcagccatatggccaatgattcatggagcggtcaggacaaagcccagcacttcctcgcctcagcgatgctttctgccgcaggcaacgaatatgcccagcatcaaggctatagtcgcgaccggagcggcgctattggctttatgttttccgtgagcttaggggcatcgaaggagctatgggacagccgcccgtcggggagcggctggagctggaaagatttcgcctgggatgtggcaggcgccacaaccggctatgcggtatggcagctggcacatcaataa

SEQ ID NO: 255326 - DNA, 1356 bp, Klebsiella pneumoniae
atgttgtcaaaatttaaacgcaataaacatcaacaacaccttgcccaactccctaagctttctcagtcagttgatgatatcgagttcttttacgctccggcagattttcggcaagcgttactggccaggatagctcaagccacccagcgtatttgtatcattgcgctctatctggaacaggatgatggcggtaaaggaattttgcaggcgctgtacgacgctaagcgtcagcgtccagagttagatgtccaggtgctggttgactggcatcgtgcccagcgcgggcgtattggcgtcgccgcgtcaaacaccaacgccgactggtattgccgcatggcgcaggagaaccctggcgtcgatatcccggtttatggcgttccggtcaatacccgggaagctctcggcgtcctccatttcaaaggctttatcattgatgattgcgttctctacagcggcgccagtctgaacgacgtttacctgcatcagcacgataagtatcgctatgatcgctaccagtgcattcgcaacgcgaaaatggccgatgtgatgtttgactgggttacgaataacctggtgcaaggtcgcggcgttaaccgccttgataaggccgatcgcccaaaaagcccggaaatcaagaatgaaatccgccagtaccgccaggagctgcgcgatagccgctaccatttcccaggcgatgccgacgaagagcagctgtcggtaaccccgctagttggcctgggcaagacgagcctgctgaataaaaccattttccatctgatgccctgcgctgaacataagctgactatctgcaccccctatttcaacctgccggctctgctggtacgtaatatcattcagctgttgcggagtggcaaaaaagtcgaaattatcgtcggcgataaaaccgccaatgatttctatattccggaagatcagccatttaaaattatcggcgcgctgccctatctttatgaaattaatctgcggcgcttcctgagccgtctgcaatattacgtgaatactgaccagctcattgtccgtttatggaaggatgatgataacagctaccacctgaaaggcatgtgggttgatgatgagtggatgctactgaccggcaataacctgaacccgcgcgcctggcggctggatttggaaaacgcgattcttatccacgatccaaagcatcagcttggtgccatgcgcgaaaaagaactcagcctcatccgcaaacataccacgatcgttaagcactatcgcgatctccaaagtattgccgactacccgataaaagtacgcaaactgatcaggcgcctgcgacgtattcgaatcgaccgccttatcagccgtattctttga

SEQ ID NO: 255327 - DNA, 2679 bp, Klebsiella pneumoniae
atgagccaacgaggcctcgaagcattgctgcggccgaaatcgatcgccgttatcggcgcatcaatgaaaccacagcgcgccggttatctgatgatgcgcaacctgctggctggcggatttaacggccctgtccttcccgttacgccggcgtggaaagcggttcagggcgtactggcctggcctgacgtcaacagcctgccctttacccccgatctcgcggtgctttgcaccaatgcccgaagaaaccttgagcttctggaagcattggggcaaaaagggtgtaagacctgcattattctctcttcactacccgaacagtatcccgcgctgcttgaatgcgcagcccgctatcaaatgcgcctgctcgggccgaatagtctcggcctgcttgcgccctggcagggccttaacgccagcttttcgccggttcctatccatcgcggtaaactggcgtttatttcgcaatcggcggccgtatccaacaccatcctcgactgggcccagcagcgcgaaatggggttttcttactttattgcgctcggcgatagcctggatatcgacgttgatgacctgctcgatttccttgctcgcgacagtaaaaccagcgctattctgctctatcttgaacaccttagcgacgcccgtcgctttgtctccgcggcccgtagcgcgtcgcgcaataagcctatcctggtgatcaaaagcgggcgtagtccggcggcgcaaaagctgctgcacgtcaattccggtatggatccggcctgggacgccgctattcagcgcgcgggtttgttgcgggttcaggatactcacgaactgttctctgcggtggaaaccctcagccatatgcgcccactgcgcggcgagaaactcatgattatcagtaacggcgcagcgccggctgcgctggcgctggatgagctttggctgcgcaacggcaaacttgccgctctcagcgaagagaccagcgctcttctccgccaggcgttgcctgaaaccatggatatcgctaacccactggatctccgcgatgacgccagtagcgagcattacctcaaagcgctgaacgtgctgctggatagccatgattacgacgcgctgctggtgatccattcacccagcgctgctgctccggggacggaaagcgcgctggcgctgattgacgccctgaagcgccatccgcgcggtaaatacgttacggttctgactaactggtgcggtgagttttcatcgcaagaggcgcgtcgtctgtttagcgatgcgggactaccgacctatcgcacccccgaagggacgataaccgcgtttatgcatatggtggaataccggcgtaaccagaagcagctcagagagaccccggtactgccagtctcattagccactaacacagccgaagcgcatagtctgttacaacgcgcaatcaatgaaggtgccaccacgctggatacccatgaagtgagtcctgttctgcgcgcttacggtattcatactctaccgacgtggattgccgcagatagcgccgaggccgtgcatatcgccgaacagataggttaccccgtcgcgctcaagctccgctcgccagacatcccccataagtcggaagtccagggggtcatgctttacctacgtacggctaccgaggtacagcaggccgcggacgcgattatcgatcgcgtcaaaatgacctggccgcaggcgcgtattcacggactgctggtgcaaagcatggccaatcgagccggggcgcaggagctgcgggtcgtcgtcgagcacgatccggtttttggaccgctgatcatgctgggcgaaggcggcgtcgaatggcgagcagaagatcaggccgccgtcgcactcccgccgctcaatatgaaccttgcgcgctacctggtcatccaggccatcaaaagcaaaaaagtgcgcgggcgcagcgcgctgcgcccgctcgatattcccggcctgagtcagctactggtacaggtatcgaatttgatcgtcgactgcccggaaatccagcgcctcgatatccaccctctgctggcttccggtcacgagtttaccgcccttgacgtcacgttaactctcgcgccgttcactggcgatagtgaaagccgcctggccatccgcccttatccgcagcagcaggaggagtgggtggtgatgaagaatggcgaacgctgccttttccgtcccatactcccggaagatgagccgcagctgctggcctttattgcgcaggtcacgaaggaagatctttattatcgttacttcagcgaaatcaacgaatttactcacgatgatttagctaacatgacgcagatcgactacgatcgagaaatggcctttgttgccgtgcgcacgacggctgaagggaatgagatcctcggcgtgacgcgagcgatctccgacccggataacatcgatgccgaatttgccgtactggtgcgctctgatttaaagggtatgggtttaggccgtaagctactggaaaagctcattgcctatacgcaaagtcacggtctgcagcggctgaatggcattaccatgcctaataataaaggcatgattggactcgccagaaagctaggattctcagttgatattcagcttgaagatggaattgtcagtttgtctctacagcttgtatctgagcaattacaatcggctggccgcaattgttga

SEQ ID NO: 255328 - DNA, 699 bp, Klebsiella pneumoniae
atgactgataacgccgtccttcgccttcgcaccgaacgtctcgcgcgcgccacccggccttttcttgctcgcggcaaccgtattcaccgctgccagcgctgtttgctgccgttgaaacagtgcctctgcgcgacccttaatcccgttgccgccaccagccgtttttgcctggtgatgttcgataccgagccaatgaagcccagcaataccggacgcctgattgccgatatcctgccggatacggaagcctttcaatggtcacgaaccgaaccgccgcaggcgcttctcgatctcgttgccgacgcgagatatcagccaatggtggtttttcctgcctcctatgccagcgccgggcgccgggtacttgacgcaccgcttcccggcaaacctccgctgtttattatgctcgacggcacctggcccgaggcgcgaaaaatgttccgcaaaagtccctggcttgatgcgctgccgatgatttccgttgatctgtcccgcgtctccgcttatcgcctgcgagaagcccatgcagaaggccaatactgtaccgctgaagtcgccatagcgctgctggatcttgcgggggatgtcaccgcagccagcgcacttggcgatcatttcagcttattcagaacgcgctatctggcaggaaaaacgcagcataagggcggtatcacagcacaactaacagaaaacgtttaa

SEQ ID NO: 255329 - DNA, 426 bp, Klebsiella pneumoniae
atgaataccgtttgtgccagttgtcaggctctgaaccgcatccccgacgatcgtagcgctgatggcgcgaaatgcgggcgctgcggccacgatctttttgacggcgatgtgatcaacgcgaccggggcaacgctggataaactgctgaaggacgatctgcccgttgtcgttgatttctgggcgccgtggtgcggcccctgccgtaactttgcgcccattttcgaagatgtggctgaagagcgcagcggcgaaatgcggttcgtgaaagtgaataccgaaatggaacgcgaactgagcgcccgcttccgcatccgcagtatcccgaccattatgatgttcaaaaatggcgaagtcatcgacatgctgaacggcgccgtaccgaaagcgcctttcgatagctggttgaacgaagccggccagcaataa

SEQ ID NO: 255330 - DNA, 1074 bp, Klebsiella pneumoniae
atgagcgacgacgaactgaaaaataaaagcggcaaggtcaaagtgatgtatgtccgcagtgatgatgattctgaccgacgtacccataacccgcgtaccgggaaaggtgggggacgcccaggaaagtctcgtgttgacggtcgtaaccgccctgcgcgcgatgaaagagacagccgcggtggcgatcgtaaacgtgacgatcgcaagcgtgaaggcttcggcggtgagggttcctctccgtggcgtaccgtatcccgcgcgccgggtgatgaggcgccggtaaaagcggatcacggcgggatcagcggaaaaagctttatcgatcctgaagtgctgcgtcgccagcgcgcggaagagacccgcgtttacggcgagaatgcctgccaggcgcttttccagagccgtccggacgctattgtgcgcgcctggtttatccagagcgtgactccgcgcttcaaagaagccctgcgctggatggcggctaaccgtaaagcttatcacgtcgttgatgaagcagagctggcgaaagcttccggtactgaacaccacggcggggtttgcttcctgattaaaaaacgtcatggcacctccgttgagcagtgggtggcgaaagccgacgctgaagattgcgtgctggcgctggaagatgtcggcaacccgcacaaccttggcgccatcatgcgcagctgcgcgcacttcggcgttaagggcgttatcgtgcaggatgctggcgttatggagtccggtgccgcgattcgcaccgcagaaggcggggcagaacacgttgaaccgattacgggcgacagctttatcgatacgcttgagcgcttccgtaaagcgggctacgcgattgtttcaacttccagtcataacgggactccgctgtttaaagccgagctgccgaagaagatggtgctggtgttaggacaggagagcgacggtctgtctgatgccgctatctccagcgccgatctgaatattgctatcgaaggcaccggcaacgttgaaagcctgaacgtttccgtggcaaccggcgttctgctggcagaatggtggcgacagaacaaagcttga

SEQ ID NO: 255331 - DNA, 690 bp, Klebsiella pneumoniae
atgaccaccccattaacctggcacgatgtgctggcagaagagaagcagcaaccctggtttgttaataccttaaaaacggttaccgaagagcggcaatcgggcatcactatctatcctccacaaaaagacgttttcaacgcgtttcgctataccgagctaagcgacgtcaaagtggtgatcctcggtcaggatccctaccacggaccaggccaggcacacggtcttgccttctctgttttaccgggcgttgcgacccctccttctctgctgaacatgtataaagagctggaaggcactatcccgggctttcagcgcccgaatcatggttatctcgaaagctgggcgcgtcagggggttttgctgcttaataccgtattaacggtacgcgccgggcaagcgcactctcacgctagtctcggatgggaaacctttaccgataaagtgatttcgctgattaaccagcatcgggaaggcgtcgtctttctgctgtggggttcgcatgcgcagaagaaaggcgcgataatcgatcgccagcgccactgcgtgctcaaagcgccgcatccgtcaccgctctccgcgcaccgcggcttcttcggctgtaatcatttcgtcctggcgaatgaatggctgaccgaacgcggcgaagcccccattgactggctgcccagactaccggctgaaagcgaatag

SEQ ID NO: 255332 - DNA, 384 bp, Klebsiella pneumoniae
atgattactggtatccaaattactaaagctgcaaatgacgacctgctgaactctttctggctgctggacagcgaaaaaggcgaagcccgctgcctgtgcgcaaaggccggttttgctgaagatgacgtggttgcggtgagcaatctgggcgagatcgaataccgtgagatcccggtagacgtaaaacctgaagttcgcgttgaaggcggtcagcatctgaacgtgaacgttctgcgtcgcgaaactctgctggatgcggttgaacatccggaaaaatatccgcagctgaccattcgcgtttctggctatgcggtgcgctttaactccctgacgccggaacagcagcgcgacgttatcgcccgtacttttaccgaaagcctgtaa

SEQ ID NO: 255333 - DNA, 1332 bp, Klebsiella pneumoniae
atgactgtaacgactttttccgaacttgaactcgacgaaaacctgctggacgctctccaggacaaaggtttcacacgcccgacagccattcaggccgccgctattccgcctgcgcttgatggccgtgatattctcggttcagccccgacaggcaccggtaaaacggcggcgtatcttctgcccgcgttgcagcatctgctcgattttccgcgcaagaaatctggtccgccgcgcattcttatcctgaccccaactcgcgaactggcaatgcaggttgccgaccacgcgcgtgagctggcaaaacatactcatctggatatcgccaccattaccggcggtgtcgcctatatgaaccatgctgaagtgttcagcgagaaccaggatatcgtggtcgccacgaccggccgcctgctgcagtatattaaagaagaaaactttgattgccgcgccgttgaaaccctgatccttgatgaagcggaccgcatgctggatatgggcttcgcgcaggatatcgaacacattgccggtgaaacccgctggcgtaagcagactatgctgttctccgccaccctcgaaggtgacgccattaaagattttgctgaacgcctgctggaagaaccggtagaagtctcggctacgccctccacccgcgagcgtaaaaaaattcaccagtggtattaccgtgccgatgacgtcaagcacaagaccgctctgctggtccatctgctgaagcagccggaagcgacgcgctctatcgtcttcgtacgtaagcgcgagcgcgttcatgaactggcgggctggctgcgtgaagcgggtatcaatacctgctggctggaaggcgagatggtgcaggcgaaacgtaatgaagcaattagccgcctgaccgatggtcgaattaacgtgttaatcgctaccgatgttgccgcacgcggaatcgacatcgcggacgtaagccacgtatttaacttcgacctgccgcgcacggccgatatttacctgcaccgtattggtcgtaccggccgggcgggtaaaaaaggtacggctatttcactggttgaagcccacgatcatctgctgctgggtaaaattggccgctatactgaagagccgctaaaagcccgcgttattgatgagctgcgcccaactacccgcgcgccaagcgagaagcaaaccggtaaaccgtccaggaaagtattagcgaagcgtgcagagaagaaagagaaagaaaaagagaaaccgcgcgtgaaaaaacgccaccgcgataccaaaaacattggtaagcgtcgtaaaccaagcggagcggataccgcgcagaagccaaacgaagagtaa

SEQ ID NO: 255334 - DNA, 741 bp, Klebsiella pneumoniae
atgtcccagtcgaagttcgcgctgccgcgcaatggttttacgtttaagcagttttttgtcgcccacgatcgctgtgcgatgaaagtgggtaccgacggcattttacttggcgcatgggccccgatcgcgcaggttaagcgcgtgctggatatcggcgcgggcagcggcctgttagccctgatgctcgcgcaacgtaccggggagacggttatcgtggatgccgtggagctggacgaagaggcggcacaacaggcgcgagaaaacgccgcggattctccatgggccgggcgtctgcagattcatcaggccgatattcaacaatggcagccgcggcaaacccgacgctatgagctgattgtcagcaacccgccttttttcgcagaaggcgtaccttgcgctacctcgcagcgcgagcaggctcgatatacttcctctctcgatcacgcaacattattaacctgcgccgccgaacttattacggaagaggggtttttctgcgtcgtgcttccggtcgacatcggtaacgcgtttgtgcagcgggcgcagaatatgggctggcatctgcgtctacgaacggatgtcgcggaaacggaaatgcgcccgccgcatcgggttctgctggctttttcgccgtcggcgggggaagagtgctttagcgacagattagttatccgcgggccagagcagcaatattccgaaggatttaccgctttgacccaggatttttatctttttatgtga

SEQ ID NO: 255335 - DNA, 1620 bp, Klebsiella pneumoniae
atgaatacaactcctgattcctcctgtgatgtgctaattgttggcagcggcgctgctggtttatctctcgccctgcgcctggcggaacgctgtacggtcaccgttctcagcaaaggcccaattagtgaagggtctactttctatgcgcaaggcggcatcgccgccgtgtttgatgaaaccgacagcgttgaatcccacatcgaagatacgctgattgcgggagcgggtctttgcgatcgccatgcggtctcctttgttgcgagcaacgctaaaccctgcgttcaatggcttatcgatcagggcgttttgttcgatactgaggtacaggcaaacggcgaagcgagctatcacctgacgcgcgaaggggggcacagtcaccgccgtatcctccacgccgccgatgcgaccgggaaagccgtagagaccaccctggtgagcaaggcgctggcccaccctaatatccgggtgctggagcgcagcaacgccgttgatctgattctctccgataaaatcggcctgccgggaacgcggcgcgttgtgggagcctggatctggaaccgtaataaagaagcggttgagacctgcagcgcaaaagctgtggtgctggcgaccggcggcgcagcgaaggtttatcagtatacgaccaaccctgacgtctcttccggggatggtattgcaatggcctggcgagccggctgtcgggtcgccaatctggaatttaatcagtttcacccaacggcgctgtaccatccgcaagcgcgcaatttcctgttaacggaagcgctgcgcggcgagggcgcactgttgaaacgtccggacggcacacggtttatgccggaatttgacgagcgcggcgaactggctccgcgcgacattgtcgccagagcgatcgatcatgagatgaagcgcctgggcgttgactgtatgtatctcgatatcagccataaaccggcagaatttatccgccaccacttcccgatgatctacgagaagctgctggggctgggcattgacctgacaaaagagccagttcccattgtgccggcggcacattatacctgcggcggcgtgatggttgacgatcatgggcgcactgatgttgacgggctgtacgccattggcgaagtgagctacacgggattacacggcgctaaccgtatggcttcaaattcattgctggagtgccttgtttacggctggtccgctgccgaagatatcgttaagcgtatgccgttcgctcaggcggtcaataaactgccttcctgggacgaaagccaggtcgaaatacctgatgaactggtcgtaatacagcacaactggcatgagctgcgcttgctgatgtgggattatgtcggcatcgtgcgtaccactcgtcgtcttgaacgcgccctgcgccgtattactatgctgcaacaggagctggacgaatactacgcccgcttccgtgtctctaataatttgctggagctgcgtaacctggtacaggttgctgagctgattgtacgctgtgccatgcagcgtaaagagagccgcgggcttcactatacgctggattatcctgagcagctgcccgacagcggaccgtcggtgctctcgccgctggctcacataaaaagataa

SEQ ID NO: 255336 - DNA, 576 bp, Klebsiella pneumoniae; identical to SEQ ID NO: 174542

SEQ ID NO: 255337 - DNA, 651 bp, Klebsiella pneumoniae; identical to SEQ ID NO: 174543

SEQ ID NO: 255338 - DNA, 957 bp, Klebsiella pneumoniae
atgaagcaactttggtgtgccatgtcgctcatggcaggcagcctgttcttctccgtcaacgcctcggctgatacatcgtccggggcgttgttgcagcagatgaatctggccagccagtcccttaattacgagctctctttcgtcagcatcaacaagcagggtgttgagtcgctgcgctatcgacacgctaaactggataatcgcactctggctcagcttctccagctcgacggcccccgccgggaagtggtgctgcgcggaacggagattagctactttgaacccgggctcgatccttttacgctaaacggcgactatattgttgattcgctgccctcgctggtttactccgactttaaacgtctttcatcctattacgacttcatttccgttgggcgtacgcgtattgccgatcgtctatgcgatgtggttcgcgtcgtggctcgcgacggtacccgctatagctatatcgcctggctggatgcggaaactaagcttccgctgcgggtggatctgcttgatcgggatggcgaaacgcttgagcagttccgggtggtctccttcaacgttggcgataacgtcagcgccagcatggaaaccctgtctaaagctaatctacctcctcagctgtccgttccggaggggggcaataaggccaactttaactgggcgccaacctggctgccgcagggtgttgccgaagtgtccagcagccagcgtcgcctgcccactttcgatgggccggtagagtcccgattgtattccgacgggctgtttagtttctccattaatatcaatcgcgccacggcaaatagcaccgatcagctactgcgtaccggccgtcgtaccgtagcgactaccgtgcgtgataacgcagaaatcaccattgttggcgagctgcctccgcaaaccgccaagcggatttccgacagtatcaaattcagggcagtacaatga

SEQ ID NO: 255339 - DNA, 480 bp, Klebsiella pneumoniae; identical to SEQ ID NO: 174545

SEQ ID NO: 255340 - DNA, 1800 bp, Klebsiella pneumoniae
atgaagaatatacgtaacttttcaatcatcgctcacatcgaccacggtaagtcgacattgtctgaccgaattatccagatttgcggtggcctttccgatcgtgaaatggcagcccaggttctggactccatggatcttgaacgtgagcgcggtattaccatcaaggcgcagagcgtcaccctcgattacaaagcgtctgatggcgaaacctatcagctgaactttatcgacacgcccggccacgtcgacttctcttatgaagtttctcgttcgcttgctgcctgtgaaggcgctttgctggtggttgatgcggggcagggcgtagaagcccagacgctggctaactgctatacggcgatggaaatggacctggaagtggttccggtcctgaacaaaattgacctgccggcggccgatccggagcgcgtggcggaagaaattgaagacatcgtcggtatcgacgctaccgatgcggtgcgctgttctgcaaagaccggcgttggcgtgccggatgtgctggaacgcctggtgcgcgacattccgccgccggaaggcgacccggaagcgccgctgcaggctctgatcatcgactcctggttcgataactacctcggcgtcgtctctctggtgcgtatcaaaaacggcaccatgcgtaaaggcgataaaattaaggtgatgagtaccgggcaggtgtataacgccgaccgcctgggcatcttcacgccgaaacaggttgaccgtaccgagctgaaatgcggcgaggtaggctggctggtttgcgccatcaaagatattctcggcgcgccggtcggcgatacgctgactctctcccgcaacccggcggaaaaagcgctgccaggctttaaaaaggttaaaccgcaggtttacgccggcctgttcccggtcagttctgatgattacgagaacttccgcgatgcgctgggcaaactgagccttaacgatgcctctctgttctacgaaccggaaagctccaccgcgctgggcttcggtttccgctgcggcttcctgggtcttctgcatatggagatcatccaggagcgtcttgagcgtgaatatgacctggatctgatcaccacggcgccgacggtcgtttatgaagtagaaaccacctcgaaagaagttatttacgtcgatagcccgtccaagctgccgccgttgaacaatattcaggagctgcgcgagccgatcgccgagtgtcatatgctgctgccgcaggaatttttaggcaacgtcattaccctgtgtatcgaaaaacgcggcgtacagaccaatatggtctatcacggcaatcaggttgcgttgacctatgaaattccgatggcggaagtggtgctcgacttctttgaccgtctgaagtctacttcccgcggctatgcctcgctggactacaacttcaaacgcttccaggcctccaatatggtgcgcgtggatgtgttgattaacggcgagcgcgtggatgcgctggcgctgatcacgcataacgataatgcgccgtatcgcggccgcgaactggtagagaagatgaaagagctgatcccgcgtcagcagttcgatatcgctatccaggctgctatcggcaaccacatcattgcccgttctaccgtaaaacagctgcgtaaaaacgtcctggcgaaatgctatggcggcgacgtcagccgtaagaaaaagctgctgcagaagcagaaagaaggtaagaaacgaatgaagcaggtcggtaacgttgagctgccgcaggaagcgttcctcgccattctgcacgttggtaaagacggcaaataa

SEQ ID NO: 255341 - DNA, 975 bp, Klebsiella pneumoniae
atggcgaacatgtttgccctgatcctggtcatcgctactgtggtgacgggtctgttgtggtgcctggataagtttatctttgcgccaaaacgtcgcgaaagtcaggccgctgcccaggcggcgaccggcgaccagctggacaagaaaacgctgaaaaaggtgggcccgaaaccgggctggctggaaaccggcgcttccatcttcccggtactggcgattgttctggtggttcgctcatttatttatgagcccttccagatcccatccggctcaatgatgccgacgctgctaatcggcgattttattctggtagagaagtttgcttacggcattaaggatccgatttaccagaaaacgctgatcgaaaccgggcatccgaagcgcggcgatatcgtcgtctttaaatatccgcaggatccgcgcctggattatatcaagcgggccgtcggcttaccgggtgataaagtcacttacgatccgattgctaaacaggtcactatccagccgggctgcagttctggtcaggcctgcggcaacgctctgccggtcacttactccaacgttgagccgagcgatttcgtacagaccttctcccgcagcaacggcggtgaagcgaccagcggtttctggcaactgccgaaaggcgagaccaaagcgaatggcattcgtctgaccgaacgtaaagagacgctgggtgacgtgacgcaccgcattttgaccgtgccgattgcgcaggatcaggttgggatgtattaccaccagtccgggctaccgctggcaacctggattgtccccccggggcagtattttatgatgggtgacaaccgcgataacagcgccgacagccgttattggggctttgtgccggaagcgaatctggtgggtaaagccaccgcaatctggatgagtttcgaaaaacaggaaggtgaatggcctaccggcgtacgtttatcgcgcattggcggcattcattaa

SEQ ID NO: 255342 - DNA, 624 bp, Klebsiella pneumoniae; identical to SEQ ID NO: 213059

SEQ ID NO: 255343 - DNA, 528 bp, Klebsiella pneumoniae; identical to SEQ ID NO: 195998

SEQ ID NO: 255344 - DNA, 435 bp, Klebsiella pneumoniae
atgttcgatcccgtaaacctgcaattgtttgagttaatttgccacctggaagttagcctgcatcaggcatcaacacgccgcagcgcgcagcttttgcagcagttgttgcatgacgaatttctggagataggccgtagcggagaacgttacgataaaacgcagaccgtaacagcattaattaacgaggacgtggaggccatcaacgcttacagctttcagttggctttactaaccaaagattgcgcgttgcttacgtaccgcagcgaggttatcgattcagacggacgcgctgctaaaaaaacgcttcgttcgtcaatctggcagaggagccatatttgtgcaaatcatcaggaatgctggcagctcagatttcaccaggggacaccagtgaaagaagttcaggaagaagagcaggcgagcaagacggcgaattaa

SEQ ID NO: 255345 - DNA, 2076 bp, Klebsiella pneumoniae
atgccaaaggaaaatgcttttatcatacggccaggccacggccagcagttgggggctaatttcgacgggaagggggtgaacttcgcactgttttcagcgcatgctgaacgcgttgagctgtgcttattcgatccttccggtaaaaccgaaatagcccggcttgaactgcctgaatatacagatgagatctggcacggctatgtacccgatctgcagcccggcgcattgtacggttatcgggtttacggaccttacgatccggaaaacggtcatcgctttaatcccaataaattgcttatcgatccctacgcgcgggagctggaaggcgatgttgagtggaacgatgcgcatttcggctacgagttgggccatgaggagagcgacctgagctttgatagtcgcgatagcgcgccctatacgccaaaatgtaaggttatcgacccggatgccttcgactggcagggggaaaaccgtcccaatgtcccctggccgaagacggttatctacgaaacccatgtcaaaggttttacccggcttaatccggcgcttcctcaggagctgcgcggcacatttgaggggcttgggcatcaggcttccgtcgattatattaaaagtctgggcattacttccgtcgaactgctccccgtacactggtttcccgatgaccagcatctgctcgatcggggactgaaaaacttctggggttacaatacgctaggcttctttgctcctgcttcccgctattatggccctgaaggtatagcgggctttcgcaacatggtgcgcgcttttcatgatgccggcatcgaagtgatccttgacgtggtgtataaccacaccgcggaaggcaatgagctgggcccgacgctctcatttaaaggtatcgataatttctcttattaccggacgatgccggatcaacatcgttattacattaatgataccgggaccgggaatacggtgaatacatcgcatccccgggtgctgcagatggttatggattcgctacggtactgggcgcaatcgatgcacgttgacggctttcgtttcgacctcgggactattcttggacgcgagccagaaggcttcgatccgcgaggcggttttttcgatgcggtaacccaggatccggttttatcgaagcttaaactgattggtgagccgtgggatattggccccggcggctatcaggtcggcggtttcccgcctggctggggcgagtggaacgacaaatatcgtgatacggtgcgggaatactggaagggagataacgtttccaacgactttgccgcccgcttactgggctcgggcgatctgtacgatttacgcggtcgtcgtccgtggtcgagcgtcaattttattaccgcccatgacggctttacgttgaacgatctggtttcatataacgagaagcataatgaagccaacggtgaggacaataacgacgggcacaacgataaccgttcctgcaactatggcgaagaaggcccaacggaaaatcaggatattattgccgtccgtgaacgccagaagcgtaattttctggcaacgttatttttctcccacggtacgccgatgctgctggccggcgatgagtttggtcgttcgcagcagggcaataataacggctactgccaggacagcgagatttcatggttcaactgggaagcgcagtctgagcgggatcgtgcattacgagacttcacccagcatctgattgcactgcgcgcggagcaaccgcttttacgtcgtgaaagctggcgcgacgggttggaaatacgctggtttaacgccggcggcggtttgcagcaatcagagcaatgggatgagggttcgaccttaggccttgccatcagtcgacccgatcttgagaaggaggagggcatctggcatgacgtgctgatgctgttcaatccctttgaaggcgatgttccgttccagatcccgcagtttggcgaaggcggctgggttctcgaattgtcgaccgcagaggaaaaaacagacggcgcgattattaccgagacgattgattttgttctcgccgggcgcagtattgcgctattcagacggccttag

SEQ ID NO: 255346 - DNA, 2541 bp, Klebsiella pneumoniae
atgatcccttccgcaacctaccgtattcaattccgtaatggtatgaccttcgatcgcgcggcggcgctggccccgtatctgaaagcgctgggtattagccatctttacgcgtcgccgatatttacggcgaccaccggctccacccatggctatgatattaccgatccaaacgaaatcgacccggctattggcggccgcgaagggtttgaccggctggtaaaggcgctgcggagtgcgcaaattggcctgattctggatattgttcccaaccatatggcgacctctctggagaatcgctggtggcgggacgtcattgaacagggtaagcacagcgcctgggccaattatttcgatattgactgggcgcgtcccgttacgctgccgtttctgggggatacctttgaggcagaactggagagcggggcgcttgagcttaagcgcgatcctgaaacggggaaaccggcgttcgtctattacgaccaggcctggccgctgaatcctgaaagtctggcaacaggtgagcaactactaacttcgccagatcgcgacgcgattgtggcgctgcacgaggcgcaaagctggcggctgatgtcgtggcgggaagcgcccagacagctctcctggcggcgctttttcgaaattacgggcctgattggcgtcagggtcgaagaacaggcggtattcgacgatacccaccgtcttattcttgaactggtacatgccggtatcgtcgatggtctgcgcatcgatcatatcgatgggcttgccgacccattagggtatttgcagcgtctgcgccaggccgccgggccagaatgctacattacggtggaaaaaattcttgcgaaaggcgagcagcttcccgctgattggcccgtctccggcaccaccggatatgagtttatcgcttcgctggctgaagtgctggtggatgacaataatctcgaccagctgcagcaggtgcatgacgaagcgctcggcggcgcggtagatcgtcaccaggcgctgcgtgaggcgaaagggctgatggcggatcgcaactttgagggcgaatttaccactttgttgaggctggccatcgaactggcgcagcgtaatagcatggaggttgaaagcgaagcgctgcgccacgcattacgtgaactgctgctggcctttccggtatatcgcacctacggtaccgctgaggggatgagcgccgaggatattacgctattaaaccgggtcgtcgatcgggttaacgctcgggaaaaccgccccgatcccagggcccttgaggtcattatcgctatcctgaccggcaatttacaaacaagtagcctcgatgccgcctcgcttttcaggacccgttttcaacagctgacagggccgttaatggctaaatcggtcgaggatacgctgttcttccgccataacctcgatctggcgctgaatgaagtcggcgcggatcccacgccgcgcgctttctcgctttctcgtttccatcaggagatgcgtattcgccttgctcgccagcccgacgcgctgctgggaacgtcgacgcacgacactaaacgcggggaggatgcgcgcgcccgtctgtataccttaacggaagctccgcagctgtgggcgaccaatcttgcgcgctggcgtcagatgaatcaaaccctggtgcgttttttgaacgacggtacggcgccgaacgcggcagatacgtggatgatctatcaggcgctcgccggcgtgtggcctgcaacgttgctgcctgacgatagcgcagggctgaaagccctcgaagaacgttttctcgcttttatggaaaaagcgctgcgcgaggctaagcaaagaaccgattggatcgacagcaatgaaagctatgaaagcgtcgtactgaactatgttcaacagctgttttctgctgataacgcgctgtttctcaatgattttcacacctccctgcagccttttgtccgagccggtctggtgaacagccttagccagacggtcatcaaactgaccgcgcccggggtaccggatatttatcaggggagcgaggcgctgaactttagcctcgtcgatccggataaccgccgtgaacctgacttcgccgccctggcacaacatcttgatagcggaagcgcggaactgtttcatcatgaaagcgcatggcgagacggacggttgaagcaatacgtcaccgcttcgtttctcagattaaggcagcagcattccgcgctctttcattatggtgactgggtaccattaaaagtcgcgggtgaaagagcagataattttatcgcctacgcgcgtatcaaagacgaggaagcactcatcgtggtggttcctcggctggtgtttgacgtggcggcgcacgggttgggcgagtcatcggcgcaactgtggggcgatacggcagtatcgctcccggaagatctggccggaaggcgttattgcgatgcattaactggtgaaagccgtctggtagaagagacgctcgatctggcgtcagcaaccgggtggttattgacacttattagtgaaaaggaacgtggagaataa

SEQ ID NO: 255347 - DNA, 1788 bp, Klebsiella pneumoniae
atggaatccatatcgtttaaaaagcattggggggcggaattcatttccgcggatattgtccgctttcgcgtctgggccgaaggtcaaaagtcgatgacgcttagcctgagagaccgggatattgcgatggaagccgtgggaaatggctggttccagatcgatgtccctggcgttaagcacggggatgaatatcagcttcgtttagccgacggccgcctcattcccgacccggccacccgcgcgcagcgcgatgatgtcaatggcccctcagtagtgatcgatccccgacgctatcaaccggttaaccgtgactggaaagggcgtccctgggaagaaaccgtgatatatgaacttcatccgggcacctttacgccagaaggcacctttgtcgccgctatcgaaaagctcccctggctggcagagttggggatcacccagatagaggttatgccggtgtctcagtttggtggttcgcgcggctggggctacgacggggtactactttatgccccgcactcagcttatggtaccccggcggattttcacgccttcatcgatgccgctcacgggttagggctttcggtggttctcgatatcgtgctgaaccattttggtccggaaggcaactatctctctttgctgtcgccgggcttttttcatcaggaccgaatgaccccctggggtaatgccattgcctatgaaaacgaggccgtgcgtcagtatattaccgatgcgccgctgttctggcttaccgagtatcaacttgatgggctgcgctttgatgctattgaccagattgaagatcgctccgcccggcacgtgctgatagaaatagccgagaatatccgcgcggctatacccgaccgccatattcacctgacgacggaagatagccgtaacgtgattttcctccatccgcgcgatgaaaacgggcacacaccgctgtttaccgctgaatggaatgatgacttccataatgccgcgcacgttttcgcgaccggtgaaacccatgcgtattatcaggattttgcgcatcagccggcaaagaatgtcgctcgggcgctggcggaaggatttgtctatcagggggaggtctctccacaaaccgggcaacctcgcggcgtctcctgcgccgttcagccaccgcagttctttgtcgactttattcagaatcacgatcagaccgggaaccgagcccatggcgaaaggcttatctccctggccggcgctgagaaaacgcgcgtgctgcttgccgcattgcttctctctccccacattcccttactgtttatgggcgaagagtatggtgaaacccatccttttctattttttaccgattttcagggtgctctcgccaaagcggtaagagaaggacgggcaaaagagtttgccggacacgcagggcatgatgcctccgttccggatccgaacgatcctcaaacctttatccgctctaagctcgactggcagaaggcggcaagcgaggaggggaaatcctggctgcgctttacccgcaaccttatcttactgcgccatcgctatatcgtcccgctgctcgcggcagggggcaccgtggaaggcaggatcctgcacgcggcggcgcatgcgctggcggtgagctggcgcttccccgacgggacgctctccgtggcgctgaatatcggcgcggaccccgtgacgatgccggagataccgggagaggtcatttttagctggccggagcggcaggaagcgttaacgccaaacagcattgttgtccgttttgcacatggagaagcttcatcatga

SEQ ID NO: 255348 - DNA, 528 bp, Klebsiella pneumoniae
atgcagattcgtaaaggattaaattctgaccttgctcgcctcgaatattgtgatttttccttcacggtcagccaggttgccagaggccctttcatcaataatgatctgaaaattgagacacttccctgcgcttataataaaacctatgagctggatatccagacgctggaaaaccactgtattaatccggatgcaatattcctgattgccgaaaccgaagcgggacaggtggccggttttatcaccgcatccctgagctggaacaggtttatttccgtcgattatattgccattgaaagctcacatcgcagagccggcgcggccaacaagctcatggccgccgcccatatctgggcgcgcagtatgaacgctgccggattaaagcttgagacgcagaacgttaacgtgcccgcctgcctcttctatcgaaattatggttttactctcggaggatacgatcgatatctctacaacgctttagcggaaaaagatgaaattgcgctgttctggtattacatgttgaactaa

SEQ ID NO: 255349 - DNA, 885 bp, Klebsiella pneumoniae
atgacaacaggaaataattcatcgctacattatcctcttccgccgtttgttgagcagccgcagcaggctccggggctggcatctgaaatgaagccccttcccgaccacggtgagaccagctatatcggctccggaaagctcgcgggaaaaaaagcgcttattaccggcggtgattcaggtattggccgcgctgtcgctatcgcctatgcgcgtgaaggcgcggatgtcgccatcggctacctgccggaagaagagtcggacgcggctgccgttatcgcgctgattcaggccgagggacgaaaagccgtcgccattcccggcgatattcgggttgaatctttttgcgacaccctggttgaaaaagcggtagccgagctgggcgggctggatattctggtgaacaatgccggcagacagcagtattgcgaatccattgaacagctgagcaccgctgcgtttgatgccacctttaaaaccaacgtctatgcgccgttctggataaccaaagccgcccttcgtcacctgtctgcgggggcggttatcatcaatacctcttccgtgcaggcgtttaaacccagcgagattctgctggattacgcccagaccaaagcctgcaacgtggcgtttactaaatccctggcgcagcagcttggcccgcgcggtattcgcgttaacgccgttgcccctggcccttactggacaccgttgcagtcgagcggcggccagccgcaggagaaggtgcaaaaatttggtgaggatacgccacttggccgaccgggacagccggttgagattgcgccgctttacgtccttctggcttccgacgcctgctcctacgcttcgggtcaggtctggtgctcagatggcggtaccggcgtagcctaa

SEQ ID NO: 255350 - DNA, 228 bp, Klebsiella pneumoniae
atggacaacatcgttcttcaaaaggtcatcgccatctttctgatggtttggtggggttgggatattctgagaagaaaaaagaaaaagcagaaccccgatccccttattgcgcaggcaaacgctgcggagcgctatcaatggcgctacttgcgttggggatggcgactcttgcaattcgcctgtggcgggtatttgctgataatgatggtcacctttctgttacgctag

SEQ ID NO: 255351 - DNA, 162 bp, Klebsiella pneumoniae; identical to SEQ ID NO: 172177

SEQ ID NO: 255352 - DNA, 546 bp, Klebsiella pneumoniae
atgaaaaagactcaattcattatcgcgtgttctttaattatggcttcaggctctgccctggcaatgggttttaccgctgagcaggggaaaaactttaccaatcttaatatggaaatcggtaagagttcttccggcctgtatgcggaaagtaactggattaaaaatactcaggacggaagtcagcttggcggcgtcggcgttggctacaatcttgcgctgggtccgctcacggcgaatattggcacaaaagccgtatatctcgggccgaagaaaggggacaacggcgtggccttcccgattggcggcggcatcgatctggcgctgactgacagtatccatctgtacggcgaaggatattccgcgccggaagggttaactaacagcgttaaaaattacgtcgaagcgaatggcggaattagctggacgccgctgacgccgctgactatcaaggctggctatcgtcacgcgagcgttgatggaaaagatggccgcccgggacataccatcatagatggcgcttacgtaggcgctggcgtgactttctga

SEQ ID NO: 255353 - DNA, 339 bp, Klebsiella pneumoniae
  misc_feature (277)..(286): n is a, c, g, or t
atgcttaaaatgtttaccgcgctggctattctggcgacgtcagcaaacgctatggcacaggacgatattacgctgaacagcctcgccaaaaaggagcccgccgcgtttaatcagatgctcaaaggacatcacctgcccggttgggtcagttcaggcggcacgaccacgcccgcgcgtacggtaaagcttggcgaggatgtttatcaggtgctcagcgtctgcaaacctcacgattgcgctgcggagcggctcgcggtgctgtggtcggaaaaatccnnnnnnnnnnaatgtccggagttttttccaccgttgacgaaaagacatcccaggaaaagctga

SEQ ID NO: 255354 - DNA, 600 bp, Klebsiella pneumoniae
ttgttcgaatctcacctgaatatttttatccgcgcggttttcgttgaaaatatggcgctcaattttttccttggcatgtgtacttttctcgctatttccaaaaagatcgatgtcgcatttcggctcgggatcaccgtgacggcgctgctagccattgcgacgccgattaacaacctgatttatcatcacctactgaaagaaaatgctctgattgaaggcgtggatctcagttttctcgatttcatcacgtttatcggcgtccttgcggcgctggtgcagatcctggagatggtgatcgacaaatatttccatgcgttaaaccatgctttagggccgtttctgccgctgttgaccatccactgcgccatttttggcgcgaccatatttatggtgcagcgtgaatacagcttccttgagtcgctgacttatggcaccggatgcggtattggctggacgctggcgattgtggcgctggctggcattcgcgaaaagctgaaatatgccaatatgccgaaagggttacgcggattaggcagcgtgttcattaccgccggactcatgtcgctgggctttatgtcgttcgcgggtatttccctgtaa

SEQ ID NO: 255355 - DNA, 1521 bp, Klebsiella pneumoniae
atgaactactcatcgtcacgccatcgtctgtggataatcctatttctcatggcattaatcagtcttggcaccggtctttgctactggcagatgcaaaaaaaggtggataaggatatccagtcgcggctgcagcaggcgatagccagccttgatgtgaccgtttcccacgccgaacaggccgccgacctggcggaaccttttatgggaaaaaactgcaatgagaacgtcctgacggagctgcgcacgctggtggcgaccattcccgacgtgcgctcggtaaatttagggcgggataacgagatctactgcacttcagtttttggcggacgcaaatttcagtttgatagaactcaatatacccaaggatcgttgcagttattccaggggaacgatattacgccgtctcatccgttaatggtgtatagcgaacaggacgaccgggggaataccacgttgataggtattgatggctattatttatacaatattttatccgttctggatggcgatgctcatctgtatcttcaggttggtaatcgggtaatgaaccgcaaaggggaagtcaccacgacgccgaagatcaaaattcccgtgcgtctgacctctgagcaatttaattattcggtcattgccgatcgcggctttgcctccggcgcagtcgcatttatccgctatgaacagcataccctcatcgccattcttctcgcctccttgctgctcgcctttttgttcagaaactatctccgctatcggcagacgattgagtaccagctgaggaaggcgatcgagctgaagcagctcaaaccgtatattcagccgataattaacgatgaggacggcgccattatcggcggcgaggtgctggtacgctgggaacatcccaaacagggatttattgcgccggataaatttatctccgttgcggaacagaccggtttgattaaagacgtgacggcgatttgctttgcggaagtaagccgacagctccgtcgccagcagtccctgctccctgaaggactctttatttgctttaacaccagctcggttaactttcaggatgacgagatagtccaactctgccagacgtttatccaggagctgaaagaggcggaagttcggctcgtccttgagataaccgagcgggagtcgattgaaaatacgctgcaaacctcggaggtgacggataagctgcggcgcatcgggattcagttttcgttggatgatttcggtaccggttacgcaaactacagctacatccagcagtttaatcctgagattataaaaatcgataaggtgtttaccttcaatatcgtcaccaataatgcttccgcgctggtggtcaagaatatggtgaatctggcgaagaagtttaactgtcagattatcgccgaaggcgtggaggataaggagcagcttacaatgctcaggaatatgggcatcgctatttaccagggctactacttctcacaaccggtgccggttggcgagtttatcaaaatgctgccacgttcatttcgctag

SEQ ID NO: 255356 - DNA, 1338 bp, Klebsiella pneumoniae
atgctggcaaatatgacgattcaatcccgtaatagcatcctgaaaaaagtaaaagcatccgccgtagctatcgctgcagcgctgctgctgtcgcactgcggcagtaaaccgcccgtttctcttgtcacgccgctgccgcccgcaacaaagcagccgacgttacccaaaagccacgagccggtgcgcggcgtctggctgacaaccgtctcgcgcctcgactggccgccgctggaatccgtgaacggcggcattaccgccgatcgccgcatcgccctgcagcagcaggcgctgattgccaagctggataatttaaaaagcctcggtatcaataccgtttttttccaggtgaaacctgatggcaccgcgctctggccgtcgaagatcctgccgtggtccgatatgctgaccggtaaaatcggcgaggacccgggctacgatccgttaaagtttatgctggatgaagcccataagcgcggcatgcgcgtttatgcatggttcaacccctatcgcgtctcggtcaatactcgccccaaaaccgtcaccgagcttaacagtaccctttcgcagtttcccgccagcgtctatgtcctgcatccggagtggatccgtacctccggagaccgtttcgttctcgacccggggatcccggaagtgcgcgactggatcaccagcatcgtggcagaggtcgtagagcgctatccggtagacggcgtccagttcgatgattacttctataccgaaacgccggggtcgaagctgaacgacaatcggacgttccagcagtatggccagggctttgctgccaaagcggactggcggcggcacaatacccagctgctgattgagcaggtttcccgcactatcaagcagctgaaccccgccgtagaattcggcgtcagcccggcgggcgtctggcgcaatcgctctcacgatccgtccgggtccgatacccgcggcgcggcggcctacgatgagtcttacgcggatacccgcctgtgggttcagcagggatggctggactatatcgcgccgcaaatttactggcccttcgcccgcgacgccgcgcgctacgatgtgctggcaaagtggtgggctgaggtggtgaagcctacccacacccggctttatatcggcgtggcgctgtacaaagttggcgaaccgtcaaagagcgagcctgactggatgattagcggcggcgtgccggagctgaaaaagcagcttgatctgaatgaatccatgccgcaaattcagggcactattctgttcagagaaaattaccttaatcagccgcagacccagcaggccgttaactacctcaaaggccgctggggaggttga

SEQ ID NO: 255357 - DNA, 453 bp, Klebsiella pneumoniae
atgttgaaaaaatcgctcatcgccttttccctgttttgcgccctgtcgcccgctgtttttgcgggcaacagtgaaagcgaacaactgaataagaagaacgtcattgatttttataacaaagcgttaaatgacaaggactttgccgccgccaggccctatctgggagaccgctacatacagcataacccgatggcgaaagacggcgttgaaggctttcagcagtttatcgccttcctgaagagtcaatatcccgactcgcgcagcgttatcaagcaggcctttgtcgacggcgatcatgtgatcctccatgtggaggtaaccggtcgcgagccgggagtgacgcgggcgattatcgatatcttccgcgttgatgaacagcataaaatcgtcgagcactgggacgtgacccagaacgttccgcagaaaaccgccagcggcaacggcatgttctga

SEQ ID NO: 255358 - DNA, 423 bp, Klebsiella pneumoniae
atgttcaacgaaggaaaatgggcaaagctgttttgtttcattggattatcatttcttccctgtgtagcgaaggcctcactgctgagtctggctacgcaggatcagcagattcaggcggcatgttcacgtgtagatgaaccggctcaggccaggctatgtcacgccctgctcgttagccagcaggcggagcagcgccaacgctatctgcattttttactgcagcagaatattttcagcattcagacctatgactttctgtggggtgaataccagcgtacgactgcatgttctgaaatcagccgcttttttctgtcgagggcgctggatgcggcgctaccggctccacccacgccggcacttcccccatcccccgggctaagcgaaccgccggccgtgtttgcgctacaagaatccctcaactga

SEQ ID NO: 255359 - DNA, 618 bp, Klebsiella pneumoniae
atgggcgcacagcgtcggcgtcagggtcagtgcgaccagcgcggaaagcaccatcgccgaaacgatagtcacgctgaactgccggtagataatccccaccgagccgccgaaaaacgccatcgggataaaaaccgccgagagtaccagcgcgatgccaatcagcgcgccggttatctcattcatcgagcgcagcgtggcttcaagcggggtaagatcctcttccaccatcaggcgttcaacgttctcgaccaccacgatggcgtcatcaaccagcagaccgattgccagcaccatcgcgaagagggtgagcgtattgatgctatagcccagcaggctaaggatgccgaaggtaccgagcaggacgaccggcaccgtgagggtcgggatcagcgttgcccgccagctctggagaaagagatacatgaccgccaccacaaaaagaatcgcctcaatcagcgtgcgcactacgctttcgatagagaccgtcacgaacggcgtgctgtcgcgcggataagcggcgacaacgccctgcggaaagcggggcgtcaggcgttcgacttctgtccggatcttctccgccgtctccagcgcgttggccccggaggccagctgaattga

SEQ ID NO: 255360 - DNA, 753 bp, Klebsiella pneumoniae
gtggcgagccatgccgccgtaggtatcaacgatgattttacgcccggtcaggccgcagtcgcccatcgggccgccgataacaaaacggccggttgggttgataaagaatttggtcgcgctgttcagccactcggtcggcagcaccggtttgatgatctcttccattaccgcttcctgcagcgatttctgatcgatgctttcggcgtgctgtgtggagagaacgaccgcatcaataccgacaactttgccgtcgtcgtactggaacgtcacctggctttttgcgtccgggcgcagccacggcagggtgccgtttttgcgtacttcagcctgacgctgcaccagacggtgagcgtaggtgatcggcgcaggcatcagcacatcggtttcgttagtcgcatagccaaacatcaggccctggtcgcccgcgccctgctccagcggatcggcgcggtcaacgccctggttgatgtccggagactgtttaccgatagcgctcagcaccgcgcaggagttggcgtcaaagcccatatcggaatgcacgtagccaatttcacggaccgtattgcgggtgatctcttcgatatcaacccaggcgctggtagtgatttcgccacccaccagaaccatgccggttttgacgtaggtttcacatgctacgcgcgcttttggatcctgttcaaggatcgcatccagcacggcgtcggagatttggtcagcaattttgtcgggatgcccttcggatacggactctga

SEQ ID NO: 255361 - DNA, 1977 bp, Klebsiella pneumoniae
atgtctgacgacatgtctttatcttcgccttcgtcagcaggcgatcacggtgtactacgttccatgcaggaggttgcgatgagctcccaggaagccagcaagatgctacgtacttacaatattgcctggtggggtaataactactacgacgttaacgaactgggccatatcagcgtctgcccggatcctgacgttccggaagcgcgcgttgaccttgccgagctggtgaaagcgcgtgaagctcaggggcagcgcctgcctgcactgttctgcttcccgcagattttgcagcaccgcctgcgttcaattaacgccgcctttaaacgggcgcgtgagtcttatggctataacggtgactactttctggtttatcccatcaaggttaaccagcatcgccgcgtgattgaatcgctgatccactccggcgaaccgctgggtctggaagccggctcgaaggccgagctgatggcggtactggcgcacgccggcatgacccgcagcgtgattgtttgtaacggttataaagaccgtgaatatatccgcctggcgctggtgggtgaaaagatgggccataaggtctatctggtcattgagaaaatgtcggaaatcgccatcgtgctggaagaagccgagcggctgaacgtggtgccgcgtcttggcgtgcgtgcgcgtctggcttcgcagggctctggcaagtggcagtcctccggcggcgaaaaatccaaattcggcctcgcggcgacccaggttctgcagctggttgaaattctgcgcgctgcagggcatctcgacagcctgcagctgctgcacttccaccttggctcgcagatggccaatattcgcgatatcgccaccggcgtgcgtgaatcggcgcgtttctacgtcgagctgcataagctgggcgtgaatattcagtgcttcgacgttggcggcggtctcggcgttgactatgaagggacccgttcgcagtccgactgctcggtgaactatggcctgaacgaatacgccaacaacattatctgggcaattggcgatgcctgtgaagagaacggtctgccgcatccgacggtgattaccgaatccggccgtgcggtcaccgcgcaccacaccgtactggtatccaacatcatcggcgttgagcgtaacgaatataccgaggcgaccccgcccgcggaagatgccgcgcgtccgctgcaaagcatgtgggaaacctggctggagatgcaggaaaccggcaaccgccgctcgctgcgcgaatggctgcacgatagccagatggatctgcacgatattcatatcggttactcctccggcacctttaatcttcaggaacgcgcctgggccgagcagctgtatctgaatatgtgccatgaagtgcagaaacagctcgatcccagcaaccgcgcgcatcgcccgataatcgatgagctgcaggagcgtatggcggataagatttacgtcaacttctctctgttccagtcgatgccggatgcatggggtatcgatcagctattcccggtgatgccgctggaagggttgaacaaggtaccggaacgccgcgcggtgctgctggatatcacctgcgactccgacggcgcaattgaccactacgtcgatggcgatggcattgcgaccaccatgccgatgccggaatacgatccggaaaatccgccgatgctgggcttcttcatggtaggcgcctaccaggagattctgggcaatatgcacaacctgttcggcgatacggaagccgtagacgtgtttgtcttccctgacggcagcgtcgaagtggagctgtcggatgagggagacaccgtcgcggatatgctgcagtacgtccagctggatccgaacacgctgctgacgcagttccgcgatcaggtgaaaaagaccgatctcgacgctgacctgcagcagcagttccttgaagagttcgaagcgggtttatacggctacacttatctggaagacgagtga

SEQ ID NO: 255362 - DNA, 921 bp, Klebsiella pneumoniae
atgagcaccttaggtcatcaatacgataactccctggtatccaacgcatttggctttctgcgtctaccgatgaattttatgccgtacgacagcgatgcggactgggtcatcaccggcgtaccgtttgatatggcgacctccggacgcgcgggcgggcgtcatggcccggcggcgatccgtcaggtgtcgactaaccttgcgtgggagcataaccgtttcccgtggaactttgatatgcgcgagcggctgaacgtcgtggactgcggcgatctggtttacgctttcggcgatgcgcgtgaaatgagtgaaaagctgcaggcgcacgcggaaaaactgctggcggcgggtaagcgcatgctttcattcggcggcgaccactttgtgacgctaccgctgctgcgcgctcatgctaagcacttcggcaaaatggcgctggtgcattttgatgcccacaccgatacctacgccaacggctgcgaatttgaccacggcaccatgttctataccgcgccgaacgaaggcctgatcgacccgcaccattcagtgcagatcggcattcgcaccgagtttgataaggacaacgggtttaccgtgctggatgcgggtcaggttaacgaccgcagcgtcgacgacgtgatcgctcaggtgaaacagatcgtcggcgatatgccggtatacctgacctttgatatcgactgcctggatccggcgtttgcgccgggcaccggtacaccggtgatcggcggactgacctccgatcgcgcgatcaagctggtgcgcggcctcaaggatctgaacatcgtcggtatggacgtggtggaagtcgctccggcctatgaccagtccgaaatcaccgccctggcggcggcgacgctggccctggaaatgctctacattcaggcggcgaaaaaaggcgaataa

SEQ ID NO: 255363 - DNA, 483 bp, Klebsiella pneumoniae
  misc_feature (337)..(346): n is a, c, g, or t
atgacggcgcggatcgtgatagtcggcggcggccaggcgggcggctgggcggcgaaaacgctgcgcgaccagggcttcgggggcgagatttgcgtagtggcggaagaggaatgggatttctatgaacggccgccgctgtccaaagccacgttgctggataccgatgcgcagctaccgcgcttgttttcgcacgaggcgcagcaggcgctgaacctgacctggtaccgtccgctgcgtgcagagcggattgaccgactagctaaaacggtgattttaagcaacggcgaacgcctgagttacaacgtccttttaatcgccaccggggggcgagcgcgtnnnnnnnnnncgtctaccggacgagtcgtgggcggcgcattcccaggtttataccctgcgtcactggcaggatgcgcagcgtctgaaaagtcgtctggcggcaagtcaaaaactggcgatagtcggcggcggctggattggccttga

SEQ ID NO: 255364 - DNA, 651 bp, Klebsiella pneumoniae
atgcgttcggtgagcgcggaagtttcgcaggcgctggcgcagatgcaccgcgagcagggtgtcgatattcgctgcggctgcggcgcgccggagctggaagaggataacgctctgccaacgctgcactgcgacggccggcgggaaaccttcgatgcggtggtggtggggatcggggtcgttcttaatctcgaactggcgcgcgacgcggggctgaaaaccgagcgcgggatcgttgtggatagccaggggcgaacgtcggatccgttcatctttgctgccggggatgtggcgcagcatcatcactacggcctgtgcatccagtcctgggccttcgcccagaatcaggcggtggcgacggcaaaagcgattctcaaccccgatgcaccaggctacgacgacgcgccgtggctgtggtcggatcaatatcagcacaatatccagatcctcggtattccgcagccgggcagtagaacgatagcgcgtgaagattcgctgtacttctcgctggacgaaaacgggcagctgacgcagctggtggcgttcaacgatgcgcgtaccgtcaagctggcgaagcgctggatggcggcggggcgagatttatccgctgtaccgctcgccgacccggctttttcactgatgtcgttgcgatag

SEQ ID NO: 255365 - DNA, 696 bp, Klebsiella pneumoniae
atggactccaatggtctgcttagctccggcgcagaagctttccaggcttattcactcagcgatgagcaggtcaaagccctaagcgacaaagcctgtcaggagatggatgcgaaagcgactatcgcgcctgccagcagtgaatacagcaaacgtctgagtaaaatcgccgccgcgctgggggacaacatcaacggccagccggtgaactataaagtgtaccagaccaaggacgttaacgccttcgccatggctaacggctgtatccgcgtttacagcggactgatggatttgatgaatgataatgaagtcgaagcggttatcggccacgaaatgggtcacgtcgcgctgggccatgtgaagaaaggcatgcaggtggcattaggcaccaacgcggtacgcgcggcggcggcctccgctggcggtatcgtcggcagcctgtcgcagtcgcagctgggcgatcttggcgagaagctggtgaactcacagttctcccagcgtcaggagtccgaggcggatgactactcgtacgatctgctgcgcaaacgcggaattaatcctgcgggcctcgcgaccagcttcgaaaaactggcgaagctggaagccggacgccaaagctcaatgtttgatgaccacccggcatcggaagaacgcgctcagcatatccgcgatcgcatgaaggccgacgggattaagtaa

SEQ ID NO: 255366 - DNA, 906 bp, Klebsiella pneumoniae
atgcaggatctcaacgatttagcctggtttgtgcaggtggtggatcacggaggattcgcggcagcgggcagagcgctcgatcagccaaaatccaaactgagccggcgaatcgcccagttagaagaacgcctcggcgtacgtttgattcaacgtacaacccgtcagtttgcggtaacggaggtggggcacaccttctatcagcactgcaaggcgatgctgatagaggcggaagcggcagagcaggcggtagagaccctgcgttccgagccccgcggaagcgtcaagctgacctgtccggtgacgctattgcatgcgcacgtcgggcctatgctggcgcggtttatggtgcgctatccgggagttaatctgcagctggaagccacaaaccgacgagttgatgtcgttggagagggcgttgacatcgcgatccgcgtacgcccaaggccgatagaggatagcgatctggtaatgcgcgttctcgccgatcgtggtcaccgcctggtcgccagtccacagttagtagagcaaaaggggcagcctgtgtcgccgtcagaattaagcgattggccgggattgagcctgggcgcaggcaaacatcagcataagtggcagttgaccggcccggagggcgcacgggcggaagtctactttacaccccggctggtcaccacggatatgttggcgctgcgcgaagcggcaatcgctggcgttggggtggtacagctccctttattaatggtgcgcgatcagctggcggccggcgagctggtggttgtcctcgatgagtggcagccgcgcagggaggtgatccatgcggtgtttgcctcacggcgcgggttgctcccctcggtcagggcgctggttgatttcctgagcgaagagtatcagcggatggaggaggattag

SEQ ID NO: 255367 - DNA, 861 bp, Klebsiella pneumoniae
atgaaacagattaccggaatctacaccgcgcctgcgcagcattgggtaggcgatggtttcccggttcgctcaatgttctcttatcagacgcacggcgaacagctaagccccttcctgctacttgactatgcaggccctcatcacttcccggcagggtccgagaaacgcggcgtcggcgaacatccgcatcgcggatttgaaaccgtcaccgtggtgtactccggtgaagttgaacatcgagactcaacaggcagaggcggcgtcattggaccgggcgatgtgcagtggatgaccgcaggcgccgggatcctgcacgaagagttccactcggcggaatttacccgctccggcggcgagctgaaaatgattcagctgtgggtcaatcttccggctaaagacaagatgacgcatcccggctatcaaagcatcacggcggatgccatccctgacgccgagctgccggataacgctggccgcatgcgggtgattgccgggcgctatcaggatgttgtcggaccggcgcataccttttcgccgcttaacgtatgggacctgcagctaaaccagagtcatgaggtaaccctgcatcagcccgctggctggagcacggcgctggtggtgctggaaggtgaaatcgtggtgaacggcgagggtaacgcccgcgaaggtcagctggtggtgctcagccaaaaaggtgaaacgctccacctcgcggccagtagtcacgtcaaagtgctgctgatggccggcgagccgctgcaggagccgatcgtgggctacggcccgtttgtgatgaatactaaagcgcaaatcgcagaagcggttcgtgattttaatagcggccgcttcggccaaatctga

SEQ ID NO: 255368 - DNA, 678 bp, Klebsiella pneumoniae
atgtctaccccagctaactttaatggttctcgtcctgttattgatgtcaatgataccgccatgctgctgatcgaccaccagagcggtctcttccagaccgtaggcgatatgccgatgccggagttacgggcgcgcgccgccgcgctggcaaaaatggcctcgttagccggtattccggtgatcaccacggcatcggtgccgcagggaccgaacgggccgctaatccctgagatccatgagaatgcgccccatgcgcactatattgcgcgtaagggggagatcaatgcctgggataatccggaatttgtggccgcggtaaaggccaccggccgtaaaacattgattattgccgggacgattaccagcgtttgcatggcgttcccggcgattgccgccgtcgccgacggctatagagtttttgccgtcatcgatgcctccggcacctatagcaagatggcgcaggagatcactctcgcccgggtcgttcaggcgggcgtcgtgccgatggataccgccgcggtcgcttccgaactgcagcgcacatggaatcgaccagacgccgcagaatgggccgaggtttatactaaagtcttcccggcataccagctgctgatcgagagctatgccaaagcgcaggacgtggtgaagaataacgaacagcttgattcacagcgttaa

SEQ ID NO: 255369 - DNA, 699 bp, Klebsiella pneumoniae
atgaatgaaaataacagcggtttgctgaactatattgaattgcttaagtcgcatgaagcggctttaaaaaacaaattactcgccggcgataatagtaaatctgaccggtggctatttatcgggttagtggggatggttctggtttcctttggcgcaatgggcgggtatatgctgatcaagccctcaggccgctggcttattgatttgtcgatcgtactcatagcactttcctatgtagtgctgattctcatgccaatcattaaaatctaccagcagcgaaacacgataaaatacttcttcaccatgccgctcagcgcaagcgtagaacaaaatattaaaaaagaggccttaaccgacgagcgttttcttgcggattttgtacgcttaggcaagcctaccctggagttggggctgctcgagataaagcacgaacgtgagtttctgagtaaaagaatcaatcttattgtcggccccgtcgataaacttggtattctgccagggataatctctatggttattacgttagcaaaacctgtagcaggtcatgattgggttatggggctggcatatggctatatcggtctggtcgttctctctttgtcgtttataaatttattggtgaagtacgaccgcgtcatatcgttaaccgaggttgctctttcgcgctgcgatgaagtgaagggcgatgtacaggggtga

SEQ ID NO: 255370 - DNA, 294 bp, Klebsiella pneumoniae
atgagcactattgccgttgttgttctgacttacattaaaccgcttgaagaagtagatgcccagcttgccgcacacgtggaatggcttaagcaagggtatgctgagggaatatttctcgcgtcggggcgtaaaatccccaggtccggcggcgtgattctggctaaaggcgatgatatggctgcgctgcaaaatcggttaagcctggacccatttcagcaatctggcgtcgcgaaggccgaaatcattccctttgaagccacgatgaccagcccttcactgcaggccttgctgtaa

SEQ ID NO: 255371 - DNA, 1065 bp, Klebsiella pneumoniae
atgcccgattgctgtaacggaaaacgtcaaacccgataccgtactcatcagcacggaagccccacttccggccgcgattttctcaccgccaaatcatccccctctatcacagaatatctgaacccaggcaaggttatcggtgcgcgtagccgtgaccctctgccaattcgtcaggcaagcaatggcttacaaggaagccaaacctcaatcgttagtgcgcataatcgcgtcgaacgtggcgcgtgtgatgtaaaccaacaacgcaaggtgctatccatgggaagacaaaaagcagtgaccagagctcgtcgtgaggccaaacgtgtgctgagacaggattcgcgaagccataagcagcgcgaagaagaatcggtcacatcgcttgtgcaaatgagtggcgtagaagccattggcatggcgcgggatagccgcgatctatcgccaattgaagcgcgcaatgaggctcaggcgcattatttgaacgccatcgacaataaacagctgatctttgccacgggcgaggccgggtgcggtaagacctggattagcgcggcgaaagctgctgaagccctgattcataaagatgtggacagaattattgttacccgtcccgttctgcaggccgacgaagacctcggcttcttaccgggagatatcgccgagaagtttgctccctatttccgcccggtttatgacgtgctggtgagaaggctgggggcttcctttatgcaatactgcctgcgcccggaaatcggcaaggtggaaatcgcgccgttcgcctacatgcgcggacgtacatttgaaaatgcggtggtgattctggacgaggcccagaacgtgaccgcggcgcaaatgaagatgtttttgacccgcctcggggagaacgtgacggttatcgtcaatggtgacatcacccagtgcgatttaccttcaggcgtgcggtcgggtctggccgatgcgctggcgcgttttgaggaagatgaaatggtggggatcgtgcgctttacgacggacgattgcgtgcgttcaatgctttgccagcgcgcgttgaaagcctactactga

SEQ ID NO: 255372 - DNA, 831 bp, Klebsiella pneumoniae
atgtttgtcccatttctcatcatgttacgtgaaggcctcgaggccgcgctgattgtcagcctgattgccagctatctgaaacgcacccagcgcgggaactggattagcgttatgtggattggcgttttcctggcggcggcgctgtgcctggggctggggatctttatcaacgaaacgaccggcgaattcccgcaacgcgagcaggagttattcgaaggcattgtggcggtggtggcggtgtgtattctgacctggatggtcttctggatgcgcaaagtgtcgcgcaacgtcaaacagcagcttgaacaggcggttgataatgcgcttaagcgcggcaaccaccacggctgggcgctggtgatgatggtgtttttcgccgtcgctcgcgaaggtctggagtccgtattcttcctgctggcggcgttccagcaggatgtgggtatctggccgcccatcggagcgatgcttgggctgggaacggcaatcgttttaggattcctgatctactggggcggtatccgcatgaatctcggcgtctttttcaaatggaccagcctgtttattttgctggttgccgcaggtctggcggccggggctattcgcgctttccatgaagccggattgtggaaccattttcaggacgtcgccttcgatctcagcaacgtgatttcgacgcatacgctcttcgggacgcttctggaggggattttcggctatcaggaaacgccgactatcagcgaagtggcggtctactttatctatttggttccggcgctggtgctgttcgcgctgccgtcgggcaataacaccaccgcatcccgagccgcgtag

SEQ ID NO: 255373 - DNA, 1266 bp, Klebsiella pneumoniae
atgggattttttgcgccggatatttacccggccgaagagctgtggctaaatggcggccttatttactgcgaaatgaacaacatgactcaattcctgcacttcctgctggcgctggcggttatcctcgcgctcgcctggcttgccagctacgaccgtaaaaaaatccgcattcgctatattatccagttaattattattgaagttgcgctggctttcttttttctccacgccgaaagcggcctgtggctagtgaaaaatattgcatccttttttgaatcactgctcggcttcgctgccgaaggcaccaactttgtatttggcggcatgagtgaaaaagggctggcgtttattttccttggcgtgctctgccctattgtctttatctccgcgctcatcggtattcttcagcactggcgtattctgccgatttttattcgcctgattggtaccctgttatcgaaagttaacggtatgggtaagctggaatctttcaacgcggtcagttcgctgatcctcgggcaatcagagaactttattgcctataagggcgtgctcggcgacctctcttcgcgccgcctgttcaccatgtcggccactgcaatgtcgacggtttcgctgtccattgtcggcgcttatatgagtatgctcgacgcgaaatatgtcgttgccgcgctgatcctgaatatgttcagcacttttattgtgctgtcgatcattaatccgacgcgaccaggcagcgaggaagagatcaagcttgagaagcttcatgaatcgcagagcttctttgaaatgctcggtgaatatattctggccggattcaaagtcgccatgattattctggcgatgctgattggctttatcgccttaattagcgccattaacgcgctcttcgccaccctgtttggcctgagcttccagcagatactcggctatgtcttctatccgctggcgtggctgattggtatcccgctaagcgatgcgctcaacgccggcagtattatggcgactaagctggtggccaatgaatttgtcgccatgattgagctacaaaaaatcgctgccagcatgacgccgcgcgggctgggtatcttatcagtgttcctggtctccttcgccaacttcgcttctatcggcatcatcgccggggcgattaagggtctgaacgagcagcagggaaatatcgtttcccgctttggcctgcggctggtgtatggcgcaacgctggtcagcctgctctctgccagctttgctggtctggtactgtaa

SEQ ID NO: 255374 - DNA, 435 bp, Klebsiella pneumoniae
atgagtgtcaaacagggtgcgatggcgttagtactggcagggattttaagcggctgcgtagcgcccgccgcgaagatggccccggcggcggatgctgatgcctgcccggcggataacgccatggtgcaaaccacgctttattttggcttaagccgtccggccgggaaggacattaccgcccaggagtggcagcagttcgttgatcgcgacgtgacgacgcgctttcgcgatggcctgacggtctttgacgcgcgcggtcagtggctcggcaatgacggaaccgtggcgcgcgagcagagcaaggcgctgatgctgatccatggcaaagatgcgaagagcgaagaggggattgaggcgctgcgcaatacctataaatcgcgctttgcacaggagtcggtcatgcgcgttgaccagccggtctgcgtgcacttttaa

SEQ ID NO: 255375 - DNA, 1509 bp, Klebsiella pneumoniae
atggctattagcacacccatgttggtgacttttattgtttatatttttggcatggtactcatcggttttattgcctggcgttcgacaaagaactttgatgattatattctcggcggccgcagccttggcccattcgtcaccgcgctctccgccggcgcttcagatatgagcggttggctgctgatggggctgcccggcgcaatatttatctccgggatttccgaaagctggattgccattggcctgacgctaggcgcatggattaactggaagctggtggcggggcgtttgcgggtacacaccgaggtgaataataacgcgctgacgctgccggattatttcaccggccgttttgaagataaaagccgggtgctgcgaattatctcggcgctggtgattctgttatttttcaccatctattgcgcatccggtattgtggccggagcgcgtctgtttgaaagcacctttggcatgagctacgaaaccgcgctgtgggccggcgcggcggcaaccattatttataccttcgtcggcggtttccttgcggtgagctggaccgataccgtccaggccagcctgatgatatttgccctgatcctgacgccggtcatggtgattatttcggtcggcggctttggcgaatcgctggaagttatcaagcaaaagagcattgagaacgttgatatgctgaaagggctgaacttcgtggcgattatttcgctgatgggctgggggctgggctattttggccagccgcatatcctggcgcgctttatggcggcggactcgcaccatagcatcgtacacgcccgtcgtatcagcatgacctggatgatcctctgcctggcgggggccgtagccgttggcttcttcggcatcgcttacttcaacaacaacccgggcgtggcgggcgcagttaatcagaacgctgaacgcgtctttatcgaactggcgcagattctgttcaacccgtggattgccgggattctgctgtcggcgatcctggcggcggtcatgtcgaccctgagctgccagctgctggtttgctcaagcgccatcaccgaagatctgtataaagcgtttttgcgtaaaaatgccggtcagcaggagctggtatgggttggccgctttatggtgctggccgtggcgctggtctccattgcccttgcagcgaacccggagaaccgtgtgctggggctggtgagctacgcctgggccggcttcggcgctgcgtttggtccggtggtgctgttctcggtgatgtggtcgcgaatgacgcgtaacggcgcgctggccgggatgatcatcggcgccgtcacggtgattgtctggaaacagttcgcctggctgggcctgtatgaaattatcccgggctttattttcggtagcatcggaattatggtcttcagcctgctgggtaaagcgccttccgcagagatgcaaaaacgctttgccgaagcggacgcccattaccactccgcgccgccggtgcgcgcgaccgccgagtaa

SEQ ID NO: 255376 - DNA, 1638 bp, Klebsiella pneumoniae
  misc_feature (1571)..(1580): n is a, c, g, or t
atgggcaccaccaccatgggtgtaaaacttgacgacgcgacgcgcgaacgtattaaatccgcggcgagccgtattgaccgtacgccgcactggctgattaagcaggccattttcaattatctggaaaagctggaaaacgacgagacgctgcctgagctaccggcgttactttccggcgcggctaacgaaagcgatgaaacgggcagtccgggcgatgagccctggcagccgttcctcgaattcgctgagcagatcctgccgcagtccgtctcccgcgcgtcaattaccgccgcctggcgttgggccgaaaccgacgccgtgccgatgctgctggagcaggctcgcctgccgcagaatctcggcgagcaggcccacaagctggcatatcagctggcggagaagctgcgcaaccagaaaaccgccagcggccgcgcaggaatggtgcagagcctgctgcaggagttctcgctctcgtcgcaggaaggcgtggccctgatgtgcctggcggaggcgctgctgcgcattcccgacaaagccacccgcgatgccctgatccgcgacaaaatcagcaacggcaactggcaatcgcatatcggccgcagcccctcgctgttcgtcaatgccgccacctgggggctactgtttaccggcaagctggtctcgacccataacgaaaccagcctgtcgcgttcgctgaaccgtattatcggcaagagcggcgaaccgctgattcgtaaaggcgtcgatatggcgatgcgcctgatgggcgagcagttcgtcaccggcgaaaccatcgccgaagcgctggccaatgcccgcaagctggaagacaaaggcttccgctactcctacgatatgctgggcgaagcggcgctgaccgccgacgatgcccaggcctatatggtttcctatcagcaggctattcatgccataggcaaagcctcgaacggccggggtatttatgaagggccgggcatttcgattaaactctccgcgctgcatccgcgctatagccgcgcccagtacgatcgcgcgatggatgagctttacccgcgcctgaaatcgctaaccctgctggcgcgccagtacgatatcggtatcaacattgacgccgaagaggccgatcgcctggagatctcgctcgatctgctggaaaaactctgctttgagccggagctggcgggctggaacgggattggctttgtgatccaggcctatcagaaacgctgcccgtttgtcattgactacctgatcgacctggctacccgcagccgtcgccgcctgatgattcgtctggtaaaaggcgcctactgggatagcgaaatcaaacgcgcgcagatggacgggctcgaaggctatccggtctatacccgcaaggtttataccgatgtctcctatctggcctgcgcgaaaaagctgctggcggtgccgaacctgatctatccgcagttcgcaacgcataacgcccacaccctggcagcgatttatcagctcgccggacaaaactactaccccggtcagtatgagttccagtgcctgcacggcatgggcgaaccgctgtatgagctgtnnnnnnnnnnggtcagtatgagttccagtgcctgcacggcatgggcgaaccgctgtatgagcaggtga

SEQ ID NO: 255377 - DNA, 2418 bp, Klebsiella pneumoniae
atgggcgaaccgctgtatgagcaggtgaccggcaaagtcgccgatggcaaactcaaccgtccctgccgtatttatgcgccggtgggcacccacgaaacgctgctggcctaccttgtgcgtcgcctgctggaaaacggcgctaacacctcgttcgtgaaccgcatcgccgacaacaccctgccgctggatgagctggttgctgacccggtcgccgccgtggaaaaactggcccagcaggaaggtcaggttggcctgccgcatccgaaaatcccgctgccgcgcgatctctacggcaaggggcgcagtaactcagccggtctggatctggccaacgagcatcgcctggcctccctctcctcctcgctcttaaacagcgcgctgcataaatggcaggcgctgccgatgctggaacagccggttgccgaaggcgaaatgcagccagtcatcaacccggcggagccaaaagatatcgtcggccacgtgcgcgaagccagcgaggctgaagttcagctggcgctgaccagcgcggtcaacaacgcgccgatctggttcgccaccccgccgcaggagcgcgcggcgatcctcgaacgcgctgcggtactgatggaaggccagatgccaacgctgatgggtatcctggtgcgcgaggcgggaaaaaccttcagcaatgccattgccgaagtgcgtgaagcggtggatttcctgcactattacgcaggccaggtgcgcgcggattttgataacgaaacccatcgtccgctcggcccggtagtgtgtatcagcccgtggaacttcccgctggcaatctttaccggccaaattgctgccgcgctggcggccggcaacaccgttctggcgaaacccgcggaacagacgccgctgatcgccgctcagggcgtcgctatcctgctggaagcgggcgtaccgccgggggttattcaactgctgccgggccgcggagaaaccgtcggtgcggcgctgacttccgacgagcgcgttcgcggcgtgatgttcaccggctcaaccgaagtcgccacgctactgcagcgcaatatcgccagccgcctggatgctcagggtcgcccgacgccgctcatcgctgaaaccggcggcatgaacgcgatgatcgttgactcttccgccctgaccgaacaggtggtgatcgacgttcttgcctcggcgttcgacagcgcgggacagcgctgctctgcgctgcgcgtgctctgcctgcaggatgatatcgccgaccatacgctgacgatgctgcgcggcgcgatggccgagtgccggatgggcaatccgggccgcctgactaccgatatcgggccggttattgacgccgaagccaaagagaacattgagcgccatattcagacgctgcgcgccaaagggcgcaaagtcttccaggcggtgcgcgaaaccagtgaagattcgcgcgagtggaccagcggtacgttcgttccaccgacgctgatcgaactcgacagcttcgacgagctgaaaaaagaggtcttcggcccggtgctccacgtggtgcgctataaccgcaacgagctggacgggctggttgagcagatcaacgcctcgggttatggcctgaccctgggcgtgcatacccgtatcgacgaaaccatcgcccaggtcaccggcaacgccaacgtcggcaacctgtacgtcaaccgtaatatggttggcgccgtggtcggcgtgcagccgttcggcggcgagggcctgtcgggtacgggtccaaaagccggcggcccgctgtatctgtaccgactgctctccagccggccgcagaacgccgtcgggatcaccctcgcccgccaggatgcggagtacccgctggacgcgcagttgaaaacgctgctggagaaaccgctgctcgcgttacagcagtgggctaaagaccgcccggaactgcaggccctgtgccaacagttcagcgaacaggcgcaggccggtacccagcgtctgcttccgggcccaaccggtgagcgcaacaccctgacctttatgccgcgcgaccgcgtgctgtgcgtcgccgataacgagcaggacgcgctcacccagctggcgggcgtgaccgccgtggggtgcgaagtgctgtggcctgacgcgcctctgcagcgcgagctggcgaaaaaactgccgcgcgaagtcagcgaacggatccactttgccaaagcggaaaccctggcgagcgagcctttcgatgcggttatctaccacggcgattccgatcagctgcgtgagctgtgtgaacaggtagcggcgcgcgatggtgcgattgtttcggtgcagggcttcgcccgcggcgagagcaatctgctgctggagcggctctatattgaacgttcgctcagcgtcaataccgccgcagccggcggcaacgccagcctgatgacgattggctaa

SEQ ID NO: 255378 - DNA, 396 bp, Klebsiella pneumoniae
atgaaacgcactttactcgcttttgccgcgctgctggcaagcacccatgcgctggcggacgaatgtagcaacgccagcaatcaaacggaaatgaaccagtgcaccgccgagcagtaccaggctgacgacaaaaaattaaatgaaacgtatcaggaagcgctgaagcgcgcctctgaaaaacagcaggaactgctgaaaaaagcgcagctgacgtggattgccctgcgcgacgccgactgtcaattcctcgcctccggcgcagaaggcggcagcgtacagccaatgctgatcaaccagtgcatgtccgataaaaccgtcgagcgcgagtcgtatctcgcttcgctgctgcagtgcgaggatggcgatcagagctgcccgctgccgcccgccaattaa

SEQ ID NO: 255379 - DNA, 639 bp, Klebsiella pneumoniae
atggcacagggcggcgtgaaaaagatcggcaaacgttcacaggcggtgagcgcaaaaaaagaggctattctggccgccgcgctggacgcgttctcgcagtatggcattcacggcacgcggcttgagcaggttgccgagctggccggggtgtcgaaaaccaatttgctctattactacccctcgaaagaagcgctgtatatcgcggtgctgcagcagatcctggcaatctggctggcgccgctcaaggcgtttcgtgaagacatcagtccgctggtggccatcggcgaatatattcgccttaagctggaggtttcccgcgatcaccctcaggcgtcaaagctgttttgtctggagatgctgcaaggtgcgccgctgctgatgggcgagctgaccggcgatctgaaagcgttggtagatgagaagtcggcgattatttccggctgggttgagagcggcaggctggcgcccgtcgacccgcagcatctgatctttatgatctgggcgactacgcagcattacgccgatttcgccactcaggttgaggcggtaaccggcgcgacgctgcgcgatgaggcgttttttcagcaaaccgtcgataacgtccagcggatgattatcgaagggattcgggtgcgttaa

SEQ ID NO: 255380 - DNA, 1305 bp, Klebsiella pneumoniae
gtgctggctaaagccaacgaactgcgttcgggggatgtgctggcgggcgtggcggcagaaagttcgcagcagcgcgtagcagcgaagcaggtgctctccgatatgacggtcgccgatattcgtaataacccggtgatcccttatgaagaggactgcgtgacgcgcctgattcaggacgatgtcaacgaaaccgcttatcagcggattaaaaactggaccatcagcgacctgcgcgaatacgtgctcaacgatgaagtcaccagcgacgatattgcgtttgtgcgcaaagggctgacctcagaagtggtggcggcggtggcgaaggtctgttccaacgccgacctgatctacggcgcaaagaaaatgccggtgattaaaaaagccaacaccaccatcggcctgccgggcacctttagctgtcgcctgcagccgaacgatacccgcgatgacgtgcagagcattgcggcgcaaatctacgaaggtctctcgttcggcgcgggcgatgcggtgatcggcgttaacccggtgaccgatgacgtggagaacctgacccgcgtcctcgataccgtctacggcgttatcgacaagtttaatatcccgactcagggctgcgtgctggcgcacgtcactacccagattgaagcgatccgccgcggcgcgccgggagggcttattttccagagcatctgcggcagtgaaaaggggctaaaagagttcggcgtggagctggcgatgctcgatgaagcgcgggcggtcggcgccgagttcaaccgtatcgccggagaaaactgcctctattttgaaaccgggcagggctcggcgctgtcggctggcgcgaacttcggcgccgatcaggtgacgatggaggcgcgcaactatggcctggcgcggcactacgatccgttcctcgtcaatacggtggtgggctttatcgggccggagtacctctataacgaccggcagattattcgtgccggtctcgaagatcactttatgggcaagctgagcggcatctcgatgggctgcgactgctgctacaccaaccatgctgacgccgatcagaatctcaatgaaaacctgatgattctgctcgccaccgccggttgcaactacatcatgggcatgccgctcggcgacgacatcatgctcaactatcagaccaccgcgtttcacgataccgccaccgtccgtcagctgctgaatctacggccgtctccggagttcgaacgctggctggaaaccatgggcattatggcaaacggtcgtctgacccaacgggcgggcgatccgtcactgttcttttga

SEQ ID NO: 255381 - DNA, 897 bp, Klebsiella pneumoniae
atgatggatcaaaagcagattgaagaaattgtacgtagcgtgatggcgtcaatgggacaaccgcagacggccgcagcggcgcctcaggctgcggcgacgaagtgcgcgagccagtgtgaggtcgcggcggagagctgcgcgctggatttaggatcgccagaggctaaaggctggattggcgtgcagcagccgcatcgcgcggaagtgctggccgaactgaaacgcagcacggcggcgcgcgtttgcaccggccgcgccggcccgcgtccgcgcaccctcgcgctgctgcgcttcctcgccgaccattcgcgctctaaggatacggtgctgaaagaggttccggaagagtgggtgaaaaaccagggattgctcgaggtgcgttccgagattagcgacaagaacctctacctgacgcgcccggatatgggccgtcgcctgagtccggaagcgattgacgcgctgaaggcgcagtgcgtggcgaatcctgacgttcaggtggtggtatccgatggcctctctacggacgcgattaccgtcaactatgaagagatcctgccgccgctgctgtcggggctgaagcaggccgggctgaaggtcggtacgccgttcttcgtccgctacggacgggtcaaaattgaagatcagattggcgaaatcctcggcgcgaaggtggtcatcctgctggtaggcgagcgtcccgggctggggcagtcggaaagcctctcctgttacgccgtgtattcgccgcgcgtggcaaccaccgttgaagcggaccggacctgtatttccaatattcaccagggcggcacgccgccggtagaagccgctgcggtgatcgtcgatttggccaaacgcatgctggagcagaaagcttccggcatcaatatgactcgttaa

SEQ ID NO: 255382 - DNA, 660 bp, Klebsiella pneumoniae
atgcctgcattagatttaattcgcccttcggtgacggccatgcgcgtgattgcttcggtaaatgacggctttgcccgcgagcttaaattaccgccgcatatacgtagcctcggactcatcacggcggattcggatgatgtgacctatattgccgctgacgaagcgacaaaacaggcgatggttgaagtggtttacggtcgctccctctacgctggcgcggctcacggcccgtcgccaaccgcaggggaagtgctgattatgctgggcggcccaaacccggcggaagttcgcgctggcctggacgcgatgatggcgcatatcgaaagcggagcggcgtttcagtgggccaacgatgccgaagatacggcgttcctggcgcacgtggtttcgcgtaccggctcttatctctcgtcttcctcaggcatcgcgctgggcgatccgatcgcctatctggtggcgccgccgctggaggccactttcggcattgacgcggcgatgaaatcggccgacgtgcagctggtgacctacgtgccgccgccgtcggaaaccaactattcggccgccttcttgacggggagccaggccgcctgtaaggccgcctgcaatgcctttaccgatgccgttctggatattgcccgtcatccaatccagcgcgcgtaa

SEQ ID NO: 255383 - DNA, 549 bp, Klebsiella pneumoniae
atgcctttaccgatgccgttctggatattgcccgtcatccaatccagcgcgcgtaagggggaagcgatgatcaacgccctgggattactggaagttgacggcatggtcgccgccgttgatgcggcggatgcgatgctgaaggcggccaacgtgcggctgctcagccatgaggttctcgaccccggcaggttaaccctcgtggtggaaggcgacctggcggcgtgccgggcggcgctggatgccggaagcgctgcggcgcagcgtacggggcgcgttgttagccgtcgggagatagggcgcccggaagaggacacccagcggctgatcggcggctttcagccgcagccggaagccccgcagccaccggtgatagcggagtcctctgagcctttactggcgctgctggcatcgacgcgtcagggaatgacggcaggggaggtggccgcccattttggctggtcgcttgacgaagccagaaaggcgctggaacagctgttttctaccggatcgttgcgtaagcgcagtagtcgctatcgtctaaaaaattaa

SEQ ID NO: 255384 - DNA, 1053 bp, Klebsiella pneumoniae
atgaaaaagaaaacaccggccagcctgcaccatctttatcatgaagcattacccgaagacgttaaattgacgccgatggtcgaggtggataacgtccaccagcggcggaccaccgatgtctatgaacatgccctgacgattaccgcctggcagcagatttacgatcagctgcatccggggaaatttcacggtgaatttaccgaaatcctgctcgatgatattcaggtttttcgcgagtataccggtctggcgctgcgtcagtcctgcctggtgtggccgaactctttttggttcggcatcccgacaacccgcggcgagcaggggtttataggatcgcagtgtctcggcagcgccgagatcgccacccgacccggcggcaccgagttcgaactcagcacgccggatgattacaccattctgggagtggttatctcagaggatgtcatttcccgtcaggccagcttcctgcatcacccggagcgggtgctgcatatgctgcgtaaccagtcggcgctggaggtcaaagaggagcacaaggcagcgctatggggctttgtgcagcaggcgctggcgacgtttagcgagaatccggaaaaccttcatcagcccgctgtgcgcaaggtattgggcgataatctcctgctggcgatgggggcgatgctggaggaggcgcagccgatggtcaccgccgagagcatcagccatcagagctaccggcggctgctttcccgggcgcgggagtacgtgctggagaatatgtcggagccgctgacggttctcgatctgtgtcagcagctgcacgttagccgccgcacgctgcaaaatgcctttcacgcgattctggggatcgggccgaacgcctggctgaagcgcattcgtttgaacgcggtgcgccgggagctgattagcccgtggtcgcagagcgcaacggtgaaagatgccgcgatgcagtggggcttttggcatctgggccagttcgccaccgattatcaacagctgttcgccgagaaaccgtcgttgacgctgcatcagcggatgcggcagtgggtttga

SEQ ID NO: 255385 - DNA, 900 bp, Klebsiella pneumoniae
atgaaacccgacgcgcaccaggtaaaagctttccttcttcagctccaggatgacatctgccaaaagcttagcgccgttgacggtagcgaatttatcgaggatagctggcagcgggaaggcggcggcggcggacgcagccgggtactgcgcaatggcggtatctttgagcaggctggcgtgaatttttcccacgtgcacggtgatgcaatgccggcttccgcaaccgcgcatcgtcctgaactggcaggccgcagcttcgaagcgatgggcgtctcgctggtcgtacacccgcgcagcccgtacatccctaccagccacgccaacgtgcgcttttttatcgcggaaaaagcgggtgccgatccggtatggtggttcggcggaggctttgatttaaccccctactacggttttgaagaagatgccgttcactggcatcgtaccgcccgcgatctgtgccagcccttcggtgaagaggtttatccgcgctataaaaagtggtgtgacgactactttttcctcaagcatcgtaacgagcagcgcggcatcggcggtctgtttttcgatgatttgaataccccgaactttgaccattgtttcgactttatgcaggcggtgggcaacggcttcaccgaggcgtatctgccgattgtcgagcggcgtaaagagagagtctggggcgagcgcgagcgcgatttccagctctaccgtcgcgggcgctacgtggagttcaacctggtgtgggatcgcggtaccctgtttggtctgcaaaccggcggccgtaccgagtccattctgatgtcgatgccgccgctggtgcgctgggaatacgactaccagccggaagcgggcagcccggaggccgcgctaagcgagtttattcaggtacgtgattgggtttaa

SEQ ID NO: 255386 - DNA, 876 bp, Klebsiella pneumoniae
atgagcacttttaaaccattaaaaatacttgcttcgcgccgccaggtgctgaaagccgggctggcagcaatgacgctttcagggatcgcctctcaggccagcgcgaaagaacaacagccattgaaaacatccaatgggcacagcaaacccgtagcgaagaaaaaaggcgccaggcgcgtcgtgatgctcgacccgggccatggcggtattgataccggcgctatcggccataacggttcaaaagagaagcacgtcgtgctggctatcgccaaaaacgtgcgcagcatcctgcgcaacaacggtatcgatgcgcgtcttacgcgcagcggcgatacctttattccgctctatgaccgcgtggagatcgcccataagcacggcgccgatctctttatgtcgattcacgccgatggcttcaccaacccgagcgccgccggcgcctccgttttcgccctctccaaccgcggcgccagtagcgccatggcgaagtatctctcggatcgcgaaaaccgggcggatgaagtggccggcaagaaaacgaccgataaagaccatctgttgcagcaagtgctgttcgatctggtgcaaacggacaccatcaagaacagcctgacgctcggctcgcacatcctgaaaaagattaagccggtgcataagctgcacagccgcaataccgaacaggctgcgttcgtcgtgctgaagtcgccatcaattccgtcggtgctggtggagacgtcgtttattaccaacccgaacgaagaaaaactgctgggcaccaccgcgttccggcagaaaatcgccacggcaatagccaacggcattatcagctatttccactggttcgataaccagaaagcccactcgaagagacgttaa

SEQ ID NO: 255387 - DNA, 426 bp, Klebsiella pneumoniae
atggagatacgcgtttttcgccaacaagatttcgaagaggttattaccctgtgggagcgctgcgatctcctgcggccatggaacgatccggaaatggatattgagcgtaagctgaaccacgacgccagcctgtttctggtggccgaagttaacggtgaagtggttggtacggtgatgggcggttacgacggtcaccgcggctccgcttattatctcggcgtgcatccggaatatcgcggtcgcggtattgctaacgcgctgcttaatcggctggagaaaaagctgattgcccgcggctgcccgaaaataaacattatgatccgcgaagataatgatgtggttcaggggatgtacgaacgccttggctatgagcattcggacgtgctgtgcctcggcaaacgcttaattgaagatgaagaatactga

SEQ ID NO: 255388 - DNA, 450 bp, Klebsiella pneumoniae
atgaagaatactgagtttatccccgccgattttgatacccacggccgcctgcgcttgccgttccttttttggtgcgtgctgctgcttcaggcgcggacgtgggtgctgtttctgatggccggcgcgtcgcggcagcagggtgacgcgctgctgaatctgttttatccggatcacgataatttttggctgggattgctgcccggcatcccggcggtactggcatttctcatcagcggtcatcgtcagcgttttcctcgcctctggccgatgatgcgctggcttctggtgctttctcagagcctgctgctggtctggcagccgctgctgtggctgagcggagaatcgccctcggcggtgaccatctccctgctggcggcggatctttatgcgctctggtggctgttaagcaaccgtcggttgaaagcctgttttcgcgaagagcaggtttaa

SEQ ID NO: 255389 - DNA, 576 bp, Klebsiella pneumoniae
atgaaatcgcgacgtttacttctctgcgcattaccgctggcgttaaccggctgctcgacgatgagctcggttaactggtcgtcggcttatccgtggaactggtttggttcctctacgcaagtgaccgaacagggcgtaggcaacctgacggcgacaacgccgctgaacgagcaggcgatcggcgatgcgctcggcagcagctaccgcctgcgcagcggcatgaaaacggctaacggcaatattgtgcgctacttcgaagcgttaaaagatgacaagattgcgctgaccattaacggcgagagcgggactattagccgtatcgacgtgcgggatagcaacattaaagccgccagcggcgtgaaaatcgggaccccgtttagcgatatttacagcaaagcgtttggcaactgtcagaaaggcagcaacgataacggtgcggtggtggagtgtaaggccgagggcagccagcatattagctatgcctttaccggtaactggagcggccctgaggagttaatgccttccgatgacacgctgaaaaactggaaggtgagcaaaattatctggcgtcgctaa

SEQ ID NO: 255390 - DNA, 900 bp, Klebsiella pneumoniae
atgtctcaggttcagagcggcattttgccggaacattgccgtgcggcgatttggattgaagcgaatgtcaaaggcgatgtggacgcactgcgcgaagccagcagagtgtttgccgataagttagccacctttcagacaaaatatccggaagctaagctgggagcagtcgtcgctttcggtcatcacgtctggcgccatctgagcggcggcgtaggggccgaagagttaaaagcgttcccgggctacggtaaaggtctggctccgtcgacccaatatgatgtgctgattcatatcctgtccgcgcagcatgagctgaacttctctgtcgctcaggcggccatgtccgcttttggcgccgcgattgaggtcaaagaggagattcacggcttccgctggattgaagagcgcgacctcagcggttttgttgacggtaccgaaaacccggcgggggaagagacccgtcgtgaagtggcggtgattcaggatggcgtggatgcgggcggcagctacgtattcgtgcaacgctgggagcacaacctcaagcagcttaaccgcatgagcgttcccgagcaggagatgatgatcggccgtaccaaagaggccaacgaagagattgacggcgatgctcgaccggaaacctctcacctgagccgcgtggatttaaaagaagaagggaaagggttgaagattgtgcgtcagagcctgccttacggtaccgccagcggtactcacggcctctacttttgcgcctactgcgcgcgtctgcacaatattgaacagcagctgctgagtatgttcggtgataccgacggtaagcgcgacgcgatgctgcgttttaccaaaccggtgaccggcggatactacttcgcgccgtccctggataggctgctggcgctgtaa

SEQ ID NO: 255391 - DNA, 1017 bp, Klebsiella pneumoniae
atggccgttaaatcactgaaaaaaggatatctggcgctggctgcttctgtgctgctggttgcgcaggcgcaggcgacggaactgctgaacagctcctacgatgtttcccgcgagctgtttgccgcccttaacccgcagtttgaacagcagtgggcgaaagataacggcggcgataagctgacgattaaacaatctcatgccgggtcatcaaaacaggcgctggcaattctgcaggggcttaaggccgacgtggtgacctacaatcaggtgaccgacgtacagattctgcacgacaaaggcaaactgattcccgccgactggcaaagccgtctgccgaataacagctcgccgttttactccaccatgggcttcctggtgcgtaaaggcaacccgaagaatatccacgactggaatgacctcgtgcgttccgacgtgaagctgattttcccgaacccaaaaacctccggcaacgcgcgttacacttatttagcggcgtggggcgcggcggacaaggctgacggcggcgataaagcgaaaaccgagcagttcatgacccagttcctgaaaaacgtcgaagtgtttgataccggcggtcgcggggctaccacgaccttcgccgagcgcggtctgggcgatgtgctgatcagcttcgaatcggaagtgaacaacatccgtaaacagtacgaagatcagggatttgaagtggttatcccgaagaccaatatcctggccgaattcccggtggcctgggtagataaaaacgttcaggctaacggaacggagaaagcggcgaaagcctatctgaactggctctacagcccgcaggcgcagacgatcatcaccgactattactatcgcgtgaacaacccgaaggtgatggattcgctgaaagataaattcccgcagaccgagctgttccgcgtggaggaccagtttggctcctggccggaagtgatgaaaacccactttgccagcggcggtgagctggacaaactgctggcggcggggcgtaagtaa

SEQ ID NO: 255392 - DNA, 834 bp, Klebsiella pneumoniae
atgtttgctgttgcctcaaagcgcgtgctgccgggctttaccctgagcctcggcaccagcctgctgttcgtgtgcttaattctgctgctgccgctgagcgcgctggtaatgcagctcgcggaaatgacctggagtcaatactgggatgtgatcagcaacccgcaggtggtagccgcttataaagtcaccctgctgtcggcctttgtggcgtcgatctttaacggcgtatttggcctgctgatggcgtggatcctcacgcgctaccgctttccggggcgcacgttgctggacgcgctgatggatctgccgtttgcgctaccgacggcggtggcgggcctgacgctggcctcgctgttctccgtcaacggcttttacggtgaatggctggcgaagcttgatattaaagtgacctatacctggctgggtattgccgtggcgatggcctttaccagtattccgtttgtggttcgtacggtgcagccggtactggaagagctgggaccggaatatgaagaggcggcggaaaccctgggcgcgacgcgctggcagagctttcgcaaagtggtgctgccggagctttctcctgcgctgatggccggcgtcgcgctgtcgtttacccgcagcctgggagagttcggcgcggttatttttatcgccggtaacatcgcgtggaaaacggaagtgacctcgctgatgatttttattcgtttgcaggagtttgattaccctgccgccagcgcgattgcttcggtgatcctcgcggcatcgttactgctgctgttctcaatcaacaccctgcaaagtcgctttggtcgacgcgtggtaggtcattaa

SEQ ID NO: 255393 - DNA, 876 bp, Klebsiella pneumoniae
atggcgatcgttgctcaattaaagcgttatgacgccctccgcattaactgggggaaatggtttttgatcggtatcgggatgctggtttccgcctttatcctgattgtaccgatggtctatatcttcgtgcaggctttcagcaaaggtctgatgccggtgctgcataacctggccgatccggacatgctgcacgccatctggctgacggtgatgatcgccttaattaccgtgccggtgaatctggtgtttggcacgctgctggcatggctggtgacgcgttttaactttcccggccgccagctgctcctgacgttgctggatattccgtttgccgtctcgccggtggtggcggggctggtttatctgctgttttatggctctaatggcccgcttggcggctggctggatgagcataacctacagattatgtttgcctggcccggtatggtgctggcgaccatttttgtgacctgtccgtttgtggttcgcgagctggtgccggtgatgatgagccagggcagtaatgaggatgaagcggcgattctgctcggcgcttctggctggcagatgttccgccgggtgacgctgccaaacatccgctgggcgctgctgtatggcgtggtgctgactaacgcccgcgcgatcggcgaattcggcgccgtatcggttgtttccggctctatccgcggcgaaaccttgtcgctaccgctgcaaatagaactactggagcaggactacaataccgttggttcgtttaccgccgcggctctgctgacgttaatggctattttgaccctgtttttgaagagtatggtgcaatggcgtttggccaatcaggaaaaacgcgcgcaactggagggaaatcatgagcattga

SEQ ID NO: 255394 - DNA, 1095 bp, Klebsiella pneumoniae
atgagcattgagattgccaatattaagaagtcttttggtcgcacccaggtgctgaatgatatctcactggatatcccttccggacagatggtcgcgctgttggggccgtcaggctccgggaaaaccacgctgctgcgcatcattgccgggctggagaatcagtccagcgggcacattcgttttcacggtaccgacgtcagccgggtgcacgctcgcgaccgtaaagttggctttgtttttcagcactatgcgctgtttcgtcatatgacggtgttcgacaacattgccttcggcctgacggtgctgcctaagcgtgaacggccaaatgccgccgggatcaaagcgaaagttaccaaactgctggagatggttcagctggcgcatctggccgatcgctatccggcccagctttccggcggacagaagcagcgcgtcgcgttagcgcgcgcgctggcggtcgaaccgcaaattctgctgctggatgagcctttcggcgcgctggatgcccaggtacgtaaagaactgagacgctggctgcgtcagttgcatgaagagctaaagtttaccagcgtattcgttacccacgatcaggaagaggcgaccgaagtcgcggatcgcgtggtggtgatgagccagggcaatattgaacaggcggatgcgcccgatcgggtatggcgcgagccggcaacccgctttgtactggaatttatgggcgaagtgaaccgcctgaaaggcaccattcgcggcggacagtttcacgtgggcgcgcatcgctggccgttaggctataccccggcgtatcaggggccggtggatctgttcctgcggccgtgggaagtggatatcagccggcgcaccagcctggattcaccgttgccggtacaggtgctggaagcgagcccgaaaggccactacacccaattagttgtgcagcctctcgggtggtatgacgaatcgctcaccgtggtgtatcagggcgaagaggcgccgtatcgcggggaacgcctgtttgttggcttgcagaatgcccgcctgtacaacggtagtgagcgtattgagccgcgcgaggagcttgctctggctgaatcggcctga

SEQ ID NO: 255395 - DNA, 1032 bp, Klebsiella pneumoniae
atgtttatcgccgttttcgcaacggcaggattgggtagcccggataagacgcctgcgtcgccatccggggatgtttgcaggccgggtaaacgcttcccggcctttttattgggcaaaaccgtgaatacattagaacaaacaatcggcaacacgcctctggtgaagctacagcgtctgggaccagataacggcagcgaaatctgggtcaaactggaagggaataacccggccggttcggtaaaagatcgcgccgcgctttcgatgattgtcgaagcggaaaagcgcggcgaaattaagcccggcgatgtattgatagaagcaaccagcggcaataccggcattgcgctggcgatgatcgccgcgcttaaaggctatcagatgaagctgctgatgccagataatatgagccaggagcgacgtgcggccatgcgcgcctacggggcggagctgattctggtcaccaaagagcaggggatggaaggggctcgcgatctggcgctggcgatggcccagcgcggtgaaggcaagctgctggaccagttcaacaatccagataatccctatgcccattacaccactaccgggccggaaatctggcggcagacagaagggcggattacccattttgtctccagcatgggcaccaccggcaccattaccggcgtttcccgctttctgcgcgaacaggctaaagcggtgagcatcgtggggctgcagccggaagagggcagcagtattcccggcattcgccgctggcctgccgaatatatgccggggatttttaatgcgcagctggtggatgcggtgctggatattcatcaacaggacgcggaaaacaccatgcggatgctggcggtgcaggaagggattttctgcggtgtgagttcaggcggcgcggtggcgggcgcgctacgcattgcccgtgaaaatcctggcgcggtagtggtagcgatcgtttgcgatcgcggcgatcgctacctttcgaccggcgtatttggcgaagagcactttacccagggcgcggggatctaa

SEQ ID NO: 255396 - DNA, 408 bp, Klebsiella pneumoniae
atgcacaatcccaatccgcagcttaaagccgccattgaagcctgcgatcgcgctatctcccaggaagattacgcgacgttgatggagtattacgccgacgacgccgcgctggtggtcaaaccgggcatggtcgtcaaggggaaagaaaatatccgtaaagcgtttatcgccattgccgactatttccagcaccggctggtggtaacgcaggggaaaatggagattattgaaggcggcggcaatgcgctggtgatcatggaaacccggctggatataccgacagcggaagccgggataactcaggttacgcgccgcgcaacctacgtctttcggcagcagggcaagcgctggctgtgtaccgttgataactcttacggtacggatctgctcgacgcccccgaggtttag

SEQ ID NO: 255397 - DNA, 708 bp, Klebsiella pneumoniae
atgcagatccactttatcgtccatgaagtctttgaagcgccgggagcttatctgcactgggcgcaggcgcgcggttacaatactagctggtcgcgggtttatgccggggatgcgctaccggaaaacgctaacgcctttgatatgctggtagtattgggcggcccgcaatcgccgcgtaccaccctagccgaatgcccatattttgatacccacgccgagcagcgtttgattgcgcaggccattgccgccgggcggatcgtggtggggatttgtctcggttcgcagcttatcggcgaagcgctgggcgcgccggtcatgcaaagtccggaaaaagagattggccactttccgataacgctcactaccgccggcctgcaggacggcaaactggcccattttggcccgtcgctggtcgtgggccactggcataacgatatgcctggcctgacgccggaagcggaggtgctggcctccagcgaaggctgcccgcggcaaattgtgaaatatcgcgatcgggtttatggcttccagtgccatatggaatttgacgctgaggtcatcgaactgctgatcgcccattcacagcaggagctcagcgccgccagaggcagacgcttcatccgcagcgaacaggagatgcgcgcctgggattaccgcgaaatgaatcagaagctgtggacattccttgataagctgacggaaaagtaa

SEQ ID NO: 255398 - DNA, 1299 bp, Klebsiella pneumoniae
atgatcgttggaaaaactgccagtgagatcttcgataatatccgccatctggtgcaaagcggcgtactcaagcctggcgatgttttgccgccggtacgcgaactggctggcaagctgtcggttaaccgcaatacggtcgccgccgcctataagcgactggtaacctccggtctggccattagccaggggcgtaacggtacggccattaagacgcataatacgcttcccgcccttgaaggtggcgatccctcttcgccgctaaaagatatctccagcggcaaccccgatcccacacgcctggcgaacgtcaaaaactacctcagcgctatcgccgccgctccacgcctgtacggcgatgcggcggttgacccacggctggccgcgtgggcccatgcctggatgagcaaagattcaggcgtggacgcggagattaacctcaccagcggcgctatcgatgcgctcgaacgtctgctgtgcgccctgctgctgccgggcgatagcgtggctatcgaagatccctgctttctcagcagcattaatatgctgcgctatgccggctttaccccctcgccggtgccggtcgacgctgaaggcatgcagcctgatgcccttgaggaggcgctgcgcaacggcgcccgggcggtgatcatcaccccgcgagcgcataatccgacgggctgtagccttagcgagccccgcgcccgggcgatacgcgatatcctggcccgctatccgcaggttctggtgattattgatgaccatttcgccctgctctcctcaacgccctggcactctccgctggccgccgaaagccggcgctgggcgctggtacgctcgctgtcgaaaacccttgggccggacatgcgtctggctatcgttgccagcgattgcgaaacgtcggcggcgctgcgcctgaggcttaattccggtagccagtgggtcagccatctgctgcaggatctggtcatcgcctgccttaacgatgacgcatttatggcatcactgacggagagtcgccgccactatcgtcggcaacatgaaaagctgatcgccgcgctcgctcgctgcggaataacccacctgacgccaggagacggcctgaacttttggtttccgctggaggaaccaagccagccggtagcgcttcgcctggcgcatgctggctggctggtccgcgaaggcgaaacgttcggaattcgcgccccttcacacgggctgcggctgtcgcttgctacgctcagcgatgatgaaattaataagctcgccagtgacttatgtcagatattacaacaacagtga

SEQ ID NO: 255399 - DNA, 867 bp, Klebsiella pneumoniae
atgggccagcaggatgaaatacaatcggtgctcttcaacgataaaagtcgggcactacaggtcgatatcgtggccgtgcagtcgcaggtggtctacggcagcgtaggaaacagtattgcgataccggcgataaagcagcacggcctgcgagttatcgcggtgccgacggtgctgttcagcaatactccgcactatgacacctactatggcggcgtcatcccggaagagtggtttgccggttatttaaaggcgctggaggagcgtgacgccctgcgcgagttgcgggcggtcacgaccggctatatgggaagcgcggtgcagattaagcgccttgcgcaatggctgcagcgcattcgcgagcatcatcccgagctgtgtattctcgttgatcccgtcattggcgatgtggatagcggtatttatgttaaggccgagattccggaagcctatcgtactcatttgctcccgctggcgcagggaatcacgcctaatctgtttgaactggagacgctaagcggactgccttgccataatcagcaggaggcgattatcgccgcccgcagcctgctttctgattcgttgaaatgggtcgttattaccagcgcgccgggagcggatagcgccacgatcaacgtgctggtggttagcgcagagtcggtcgaggtgatcgaacatccgcgcgtagaaaccgaccttaagggaacgggcgatcttttttgcgccgagctggcgagcggcctggtgtgcggaataccgctgggtgatgccgctcatgccgccgcgcagcgggtgctggcggtaatgacctggaccgatgaacagggctgcgacgagcttattcttccgccgtcaggggaggggatatga

SEQ ID NO: 255400 - DNA, 240 bp, Klebsiella pneumoniae
atgaagagctatcgtttagtggttcgtcagcagggaagagtcgtcggctattttgagacgaccggcagcgaagcgctggaggatgtttgcgaagtggggtcgctatttggcgccgttggcggatatcagtgtgatttgcaggtttctgatagcgagaagcggattctggaaagcggccctgaggggatgaaaatactttcgcgggagaagtgctatcggccatttaaagcggcgagataa

SEQ ID NO: 255401 - DNA, 510 bp, Klebsiella pneumoniae; identical to SEQ ID NO: 174690

SEQ ID NO: 255402 - DNA, 1437 bp, Klebsiella pneumoniae
atgactgccgatgcggcagccaatgaagttatcgaaggtcaggctactgccctggaagaactggacgatgaatacctgaaagagcgtgctgctgacgtacgcgacatcggtaagcgcctgctgcgcaacattctcggcctggccatcatcgatcttagcgcaattcaggatgaagttatcctggttgccgcagacctcaccccgtctgaaaccgcacagctgaacctgaacaaggtgctgggctttatcaccgacgcgggcggccgtacttcccacacctccatcatggcgcgttctctggaactgccggccatcgtgggcaccggtagcgtcacaagccaggtgaaaaacggcgattatctgattctcgacgctgtaaataaccaggttctggttaacccgagcgaccagcagatcgaagagctgcgtaacctgcaggctcaggtcgctgaagagaaagcggaactggctaagctgaaagacctgccggcaattacgctggacggccatcaggttgaagtttgcgccaatatcggtaccgtacgcgacgttgaaggtgccgagcgtaacggcgcagaaggcgttggtttatatcgtactgaattcctgttcatggaccgtgattcgctgccaactgaagaagaacagttcgcggcttataaagcggttgccgaagcatgcggctctcaggccgttattgttcgtaccatggacatcggcggcgacaaagagctgccgtacatgaacttcccgaaagaagagaacccgttcctcggctggcgcgcagtgcgtatcgccatggatcgcaaagaaattctgcgcgaccaggtacgtgccatcctgcgcgcctctgctttcggtaaactgcgcatcatgttcccgatgatcatctctgttgaagaagtgcgtgcactgaaaaaagagatcgaaatctacaagcaggaactgcgcgacgaaggtaaagcatttgacgaagcaatcgagattggcgtaatggtggaaacccctgccgctgcgactattgcacgtcacttagccaaagaagttgatttctttagtatcggtaccaatgatttaacgcagtatactctggcagttgaccgtggtaatgatatgatttcacatctttaccagccaatgtccccgtctgtgctgacgctgattaagcaagttattgatgcttctcatgctgaaggcaaatggaccggcatgtgcggtgagcttgcgggcgatgaacgtgctacacttctgttgctgggtatgggtctggacgagttctctatgagcgccatttccatcccgcgcattaagaagattattcgtaacacgaacttcgaagatgcgaaggtattagcagagcaggctcttgctcaaccgacaacggacgagttaatgacgctggttaacaagttcattgaagaaaaaacaatctgctaa

SEQ ID NO: 255403 - DNA, 549 bp, Klebsiella pneumoniae
atgcaatttaatatccctacgttgcttactctgtttcgcgtcattcttattccattctttgtactggcgttttatctcccgtttagctgggctccttttgcctgcgcgctgattttcttcatcgcggcggtgaccgactggtttgatggctacctggcgcgtcgctggaatcagagcactcgtttcggcgctttcctcgatccggttgcggacaaagtcatggtggcgattgcgatggtgctggtggccgagcattatcatacctggtgggtaacgttaccggccgctacgatgatcgcgcgcgaaatcatcatctccgcgctgcgcgagtggatggctgaactgggtaagcgcagcagcgtagcggtatcatggattggtaaagtaaaaaccacggcccagatggcggcgctggtgtggatgctgtggcggccaaatatctgggttgaatgggcggggatcgggctattcctcgtggcggcggtgctgacgctgtggtcgatgctgcaatatctgaacgccgcgcgcggggatttgcttgatcagtga

SEQ ID NO: 255404 - DNA, 1833 bp, Klebsiella pneumoniae
gtgagtgatgtttttgatgcaaaagctttcctgaaaaccgtaaccagccagccgggcgtctatcgtatgtatgatgctggcggtactgttatctatgtaggcaaagcaaaagatctgaaaaagcggcttagcagctattttcgcagcaacctggcttcgcgtaaaaccgaagcgctggtggcgcttattgcccagattgacgttaccgtgacccacaccgaaacggaagcgctgctgcttgagcataactatattaagctttatcagccgcgctataacgtgctgctgcgcgatgataaatcctacccctttatttttcttagcggcgatacgcatccccgcctggcgacgcatcgtggagccaagcatgcgaaaggcgaatatttcggtccgttccccaacggctacgccgttcgcgagacgttagcgctgctgcaaaagatctttcctgtccgccagtgcgaaaacagcgtttatcgcaaccgctcgcggccgtgcctgcagtaccaaattggccgttgtctcgggccatgcgttgccgggctggtgagtgaggaagagtatgctcagcaggtcgactacgtacgcctgttcctggcgggtaaagacgatcaggtactgactcagctgattgcccgcatggaaaaagccagccaggcgctggagtttgaagaggctgcgcggatccgcgaccagattcaagccgtccgtcgggtaacggagaagcagttcgtctccaataccggggacgatctcgatgttatcggcgtgtcgtttgatgccggaatggcatgcgtccacgtgctgtttatacgccaggggaaagtccttggcagccgcagctatttccccaaagtgccgaatggtaccgaactgggtgaagtggtggaaacgtttgtcgggcagttctatttacagggcagccagatgcggacgctgccgagcgagatcctgctggatttcaacctcggcgacaaaaccctgctggcggattcgctctcagaactggccggacgccgggttaacgtacagaccaaacctcgcggcgatcgcgcccgctatctgaaactggcgcggactaacgccgcgacggcgctgaccaccaggctttctcagcattcaacgataactcagcgcctgcaggcgctcgcgacgctactcaaactccccgccgtcaatcggatggaatgttttgatatcagccatacgatgggcgaacagaccgtcgcgtcgtgcgtggttttcgatagcaacggaccgctgcgtgcggaatatcgccgctacaatatcactggcatcacgcccggggacgattatgcggcgatgaatcaggtacttcgtcgtcgctacggcaaggcaatagaagagagtaagatccccgatgtcatcctgatcgacggcggtaaaggccagcttggccaggcgaaaacggtctttgccgagctggacgtgccgtgggataaaagtcatccgctgttattaggcgtggcaaaaggcagcgatcgcaaagcgggcctggagacgttgtttttcgaaccggaaggcgagggctttagcctgccgccggattcccccgcgctgcatgtcatacagcatattcgcgacgagtcgcacgatcacgccattaccggccaccgtaaaaaacgggcaaaagtaaaaagcaccagcacgctggaaaccatcgaaggggtggggccaaaacgccgacagatgctgctgaaatatatgggtggtctgcagggactgcagaaggccagcgtcgaagagattgcgaaagtaccgggtatatctcacggtctggcagaaaagatcttctactcgttgaaacattag

SEQ ID NO: 255405 - DNA, 690 bp, Klebsiella pneumoniae
gtggcgttatccctaattctggagaatattcctttgatcaacgtccttcttgttgatgaccacgaactagtgcgcgcagggatacgacgcattctggaagatataaaagggattaaagttgccggcgaggcctgctgcggtgaggatgccgtgaaatggtgccgcgcaaatcccgttgatgtagtcctgatggatatgaacatgccgggaatcggcggccttgaggctacgcgaaaaattgcccgttccgttgctgatgccaaagtgattatgctgaccgtgcatacggaaaatccgctgccggcgaaagtcatgcaggccggcgccgctggctacctcagtaaaggcgctgcgccgcaggaggtagtcaatgcgattcgttgcgtggcttcgggtcagcgttatatcgcatccgatatcgctcagcagatggcgctcagccagattgaaccggaaaaggccgaatcgccgtttgccagtttgtctgagcgagaattgcagattatgctaatgattactaaaggtcagaaggtcaacgagatctcagagcagttaaatctgagtcccaagaccgtgaacagctaccgctatcgcatgttcagtaaattgaacattcacggcgatgtggagctgacgcacctggcaattcgccatggcctgtgcaatgcggagtcgttagcaagtcagtga

SEQ ID NO: 255406 - DNA, 225 bp, Klebsiella pneumoniae; identical to SEQ ID NO: 176127

SEQ ID NO: 255407 - DNA, 780 bp, Klebsiella pneumoniae; identical to SEQ ID NO: 176128

SEQ ID NO: 255408 - DNA, 753 bp, Klebsiella pneumoniae
atgagtgcgattgaagtaaaaaacctggtgaaaaaattccatggccaaacggtgcttcacggtatcgaccttgaggttcaacagggcgaagtggtggcgattatcggacccagtggttcagggaaaaccacgctgctgcgcagtattaatctgctggaacagccggaaaacggtaccattcgcgtcggcgacgtgaccatcgataccgcgcgcagcctcggtcagcaaaaagcggacatccgccgtctgcgtcagcatgtgggcttcgtgtttcagaactttaatctttttccccaccgtacggtgatggagaacatcattgaagggccggtgatcgtcaaaggggaggataaaaatgaatccatcgcccgggcgcgtgagctgctggccaaggtggggcttaccggtaaagaaaacagctacccgcgtcgtttgtccggcgggcagcagcagcgcgtggcaattgctcgcgcgctggcgatgcgccccgatgtcatcctgtttgatgaaccaacctcggcattggatcccgagctggtgggggaggtgctgaacaccatacgtcagctggcgcaggagaagcgtacgatggttatcgttacccatgagatgagctttgcccgcgacgtagcggaccgcgctatttttatggatcaagggcgtatcgttgaacagggagacgcgaaatctctttttgccaatcctcagcaggcgcgtacccgccagttcctcgaaaaatttctgatgcaataa

SEQ ID NO: 255409 - DNA, 669 bp, Klebsiella pneumoniae
atgcaagaaagtatccaactggttatcgattccgcgccttttttgcttaagggcgcggtattcacgctacagctcagcatcggcggcatgttttttggcctggtgctggggtttatcctggcgctgatgcgcatgtcacccgtctggccgattaaatggctggcgcggatgtatatctccatctttcgcggaacgccgctgattgcgcagctgtttatgatctattacggcttgccgcagttcggtattgagttggatcctattcccgcagcgatgattggcctgtctttaaacaccgcggcctacgcggcagaaacgctgcgcgcggcgattgcctccattgataaaggacagtgggaggcggcggcgagtattggtatgacgcgctggcaggcgatgcgccgcgcgattcttccgcaggccgcgcgggtggcgctgccgccgctttccaacagctttatcagcctggtcaaagatacttctttggccgcgactatccaggtgccggagctgttccgccaggctcagctaatcacctcgcgcacgctggaagttttcactatgtacctggctgcttcgctgatttactgggtaatggcgacggtgctttccacgctgcaaaactattttgaaaatcagctgaaccgccaggagcgtgatccaaaatga

SEQ ID NO: 255410 - DNA, 987 bp, Klebsiella pneumoniae
atgtcactgcaaaatttaacccttttcccgcgtctggagctgatcggcgcgccgacgccgcttgaatatctgccgcgcctttccgattacctcggtcgtgaaatcttcatcaagcgtgatgacgtcaccccgcttgcaatgggcggtaataagctgcgcaagcttgagtttctcgcggctgatgcgctacgggaaggtgcggatacgctgattaccgccggagccatccagtcaaaccatgtccgtcagactgcagcggtggcggcaaagcttggcctgcactgcgtggcgctgctggaaaacccaatgggtacccgggctgagaactatctgactaacggtaaccgattgctgcttgatctgttcaatacccaggtcgaaatgtgcgacgcgctgaccgatcctgatgctcagctggaagagctggcgacccgcattgaagctcagggctatcgtccctacgtgattccggtgggcggttcgaacgcgctgggcgcgctgggctatgtggagagcgcgctggaaattgcccagcagtgcgaaggggcggttgagctttcctccgtggtcgtcgcatccggcagcgccggtacgcatgccggtcttgcggtgggacttgaacagctgatgccaaatgtcgagcttatcggcgtaacggtgtcgcgcaaagtagccgaccagctgccaaaagtcgccgcgctgcagcaggcggtggcaaatagcctggagctggaagcaaaggccggtatccagttatgggatgattactttgcgccgggttacgggataccgaacgacgaaggaatggcggcggtcaagctgctggcgcagctggaaggtatcctgctggatccggtctataccggaaaggcaatggccggactgattgatggtgtcagccagaagcgctttaaggatgaaggcccaatcctgtttgttcataccggcggcgcgcctgcgctgttcgcctatcatcctcatatctga

SEQ ID NO: 255411 - DNA, 801 bp, Klebsiella pneumoniae; identical to SEQ ID NO: 176132

SEQ ID NO: 255412 - DNA, 1488 bp, Klebsiella pneumoniae
atgaaaaaccccacgttactgcagtgctttcactggtactacccaaccggcggcgaattatggcgtgaagtcgaagccctcgcgccaaaccttaacgaaatcggcatcaacatggtttggttgcctcctgcctacaagggcgcctccggcggctactctgtcggctatgattgctacgacctgtttgacctcggcgagtttgaccaaaaaggttcagttgccaccaaatatggcgataaagaccagctccttgccgcaatctccgcgctgcgccagcacgatatcgccgtgctgcttgacgttgtggttaaccacaaaatgggggccgatgaaaaagagccggtacgcattcagcgcgttgatcaaaacgatcgtacgcaaatctctgatgagattattgagtgcgaggcctggacgcgttacaccttccccgcccgcgccggtaaatactctgaattcatctgggactataagtgcttcagcgggatcgatcatatagagaatcctgatgaagatggcgtgtttaaactcgtcaatgactacaccggcgacggatggaacgatcaggtcgatgatgaaatgggcaacttcgactatctgatgggcgaaaatatcgattttcgcaatcgggcggttaccgaggagattaaatactgggcgcgctgggtaatggagcagaccgggtgcgatggcttccgccttgatgcggttaaacatatccccgcctggttttataaagagtggatcgaacacgtccaggaggtggcgacaaaaccgctgtttatcgtcgcggaatactggtcgcacgaagttgataagcttcagcagtatatcgccatggttgacggcaagacgatgctgttcgacgcccctctgcagatgaaatttcatgaagcttcgcggcagggtcgcgattacgacatgagccagatttttagcggcacgctggttgaagccgacccgttccacgccgtcaccctggtgaccaaccatgatactcagccgctgcaggcgctcgaggcgccggttgaggcctggttcaagccgctggcgtatgcgctgattctgctgcgtgaaaacggcgttccctcggtcttttatgccgatctcttcggcgccagctatgaagataccggtggcgatggcgagagctacgctattgagatgccggtaatcgaacaactacacgaactgatcgacgcccgccagcgttttgcccacggtgtacaaacgctctggttcgatcatccgaactgtattgccttcagccggagcggcaccgaggatgatccgggctgcgtggtcgtactctccaacggcgacgatggggaaaaaacgctccctctgggcgaaaattaccgcaataaacgctggcgagattttctcggcaaccgcgatgaggttattgaaaccgacgatgaaggaaacgggactttcacctgtagtggcggcagcgtaagcgtgtgggtgattgaggaagcactataa

SEQ ID NO: 255413 - DNA, 414 bp, Klebsiella pneumoniae
atgaaaaagatggtactggctggcgcgctgctagccctgaccgggtgcgtgcaggttgatagctacagcgatgttgttaaagcgccggcgcctgcagggctggagggatactggcaaacggcaggcccgcagagtgaaatgatgagtcctgacgcgatagcgagccttatcgtgaccaaagagggtgatacgcttgactgtcgacagtggcaacgggtgatcgtcctgccggggaaattaatgaagcgtgatgatgtgatctataacgttacctccgcgttagatgtctatccgcttgagcgtgaaggcaatacgctgcgctacgatcgtatgacgcttaaacgggtggatcgcctcactccggagtgtgaactggcgtggaaaaaagcgtcggctgataaaagcggacggtaa

SEQ ID NO: 255414 - DNA, 624 bp, Klebsiella pneumoniae
atgtcaacgattatcatggatttatgcagcttcacccggctgggattaaccgggtacctgacaagcaggggggtaaagaagcgtgagatcgcagaagtacagagtgcgtcaaacctgaaggcaatgtgtgaggccagccgccctgccgtagtatttatcaatgaagattgttttattcatcatgaagagagcaaccagcttgtccgacaaatcatcagccagtatcccgccacgctattcattatctttatgtcgctggccaatattcatttcgaccattacctgctggtgcgcaaaaacttactcgtgtgctcgaaatcgctgaccgaaaaagaccttgatgacattctcgccaaccgtcttaaatatgagaactatcgtgctgcccggattaatattcccacgctgaccttaagccagaccgaatcaaatatgcttcagatgtggatggccggacacggaacctcgcacatatcagcgcagatgaacattaaggccaagaccgtgtcctcgcacaagggcaatattaaaaagaagattcaaacccacaataaacaggtgatttatcacatcgtccgcctgaccgaaaacatcacatccggaattcacgtcaacctgcgttga

SEQ ID NO: 255415 - DNA, 189 bp, Klebsiella pneumoniae; identical to SEQ ID NO: 176136

SEQ ID NO: 255416 - DNA, 216 bp, Klebsiella pneumoniae
atgaaaatcgccaaagagcacaaaggcacgggaagcgttgatgttgacgccctgctggcggcgattaatgaaatcagcgaaagtgaagtccagcgaacgcaagacgatcctcatcacgtcagcattgatggccggggttaccatacctggcgcgagctggccgaggcctttgaactcgatatccatgactttagcgttaccgaagctaatcgctga

SEQ ID NO: 255417 - DNA, 1668 bp, Klebsiella pneumoniae
atggataagctgatgtgggtgaaaaagctgcgccagattttaagccccggatatgtggttaacctctgtttttttattgtcttctgcttctctacgctgttgatatggcgtgagatcaaggttctggaagaagcctacgtcgctaaccagcgcaacaaccttgaaaacgtggcacatgaatttgacagcctgctgcaatttaatatcgacagaatgattttttttcgtaacggcatgcattccgcgctggagacgccgttagattttgccgtgctgcgcaaggccgaagagagttatttagcgaagcgacacgatccgatctggtcagttgagattcacaatcgacgaacgctgccggtctacggcgttgccgatgcctttatcgacggcgacgaacttctttcccgcgacactcccttttccgggaacgagctgatggctacccttgaactcggttatatgctgcgcctggccaataacaaccggggtttcgctaagcgtatgctgtacgtgtcgcgcagcggcttttttatcaccactgagccgctgaaaaattcgacgcaggcgctcgcgctctattcccaggctacgagcgatgtctggtttacccgccaaacgcagcgtaataaccctgctcgcggtatcgtatggcaaacgtttcccggcgatgaatcgccgcgtgaaataccggtcataacggcgtctattccgcttgatttccagcgtttctggctcggtgtcctggcgatggacttctcggtacaggagatgaaggcgtttctggtcaatgcgataaagacgggtgaggaaggcgagtatcagctttatgataatcaacttaatttgatagcttcttctgcgccgggcaacgtgctgacgctgctgtctgcgcatgaacaggagatgctgaagcgcgcttttgctggtgagaatcagggggggattcgcctggttacccgttatatcagctgggagaagatccgcaattttgatggggtgctaatccgtattcacactattcaggagggggtacgcggcgactttggcagcatcactattgccctgatgctgatgtggttaatgttcaccctgatgttgatgatctcgtggttcgtaattcggcgaatggtgcgcaatatgagtatgctgcagacctccctcgaatggcaggcctggcatgatgcgttgacccgcctgttaaaccggggggcgttatttgaacgtgccacggcagctgctcgccagagcgaacgcctgaagcgtccagtggcggtgattcaactcgatcttgattactttaaaagcgttaacgatcggtacgggcatcatgcgggggatcgcgtgctgacgctggtggccagtactatcgccagccatattcgcgaaggcgattttgcagggagggttggcggagaagaattctgcatcgtcctgcctgataccagactaaaagaggcgacggccattgcagaacggatccgtatacgggtcaatagtcgtgaaattttactcggcaacagcgcctctttacgtatcaccgcgtcgtttggagtgagctgcagtgaggattccagcgactacagctttgagaacctgcagtcggtcgccgatcatcgtttgtatcttgccaagcaaaacgggcgcaatcaggtatgtgcggacgggtga

SEQ ID NO: 255418 - DNA, 180 bp, Klebsiella pneumoniae
atggtcttgttggtcagtgatgaagtgagacgcaaaaacggtggcccccgcatggtcgttaccggattcgccagcggcatggtggaatgtcgttggtatgacggttacggcgtaaagcgcgaggcatttcgtgaggatgaacttatccgtggaggaggagggaagctgaaccgcacctga

SEQ ID NO: 255419 - DNA, 912 bp, Klebsiella pneumoniae
ttggcgggaagtagtctattaaccttattggatgatattgccactttactcgatgatatttcggtcatggggaaactggcggcaaaaaaaacggcaggcgtattgggtgatgatttatcgcttaatgctcagcaggtaaccggcgtgcgggccaaccgtgaattgccggtggtatggggcgtagctaaaggctcattgatcaataaagtgattctggtgccgctggcgctgttgattagcgcttttatcccgtgggcgattacgccactgctgatgctgggtggcgccttcttgtgctttgaaggcgtcgagaaggtggtgcacactctgcaggcgcgtaaacataaagaggatccgcaggttcgccagcagcggcttgaagccctggccaatcaggacccgatggcgtttgaacgagataaggtaaaaggcgcggtgcgcacagattttattctgtctgcggaaattgtcgcgattaccctcgggattgtagctgaggcgccgttattaaatcagattctgattttgtccggcattgcgctgctggtgacggtgggggtgtacggtctggtgggggttatcgtcaagcttgatgatatgggctactggctggtggagaaaagcagtgcgctggcgcagtggacagggaaagctttactggcgattgcgcctcgtctgatgaaggtgctgtccatcgtcggcaccctggcgatgttcctggtcggcggcggcattgtggtccacggtatcacgccgctgcaccatgccattgaaaatctggctcaggggcagaatggcgtcattgcctcgctgctgccaacggctgcaaatctggtgctgggattcattattggcgccatcgtgctggccgtggtgaaagcgatagccgctcttcgcggttctacgaagtaa

SEQ ID NO: 255420 - DNA, 495 bp, Klebsiella pneumoniae
atggccgacgtccacgataaagccacccgtagtaaaaacatgcgcgcgatcggcacccgcgatacggcaattgagaaacggctggcggggctgctggcgcgtgccggtttttcctttaccgtacaggacgccgcgctccccggccgcccggattttgtggtatcagactatcagtgcgtaatctttactcacggctgcttttggcaccatcacgactgctatctgtttaaggtgcccgcgacgagaaccgaattctggctcgacaagatagccaaaaacgtggcgcgcgatcgccgggatatcgggcgactggtggagcagggatggcgggtgctggtggtctgggaatgcgcgctgcgcgggcgaaagaagcttaacgacgaagcgctgggcgaacgactggaagagtggatctgcggcggcgatcggtgcgcgcagatcgatactcaaggcataggtctgttagacgttacttctgcgccttacaggacgtaa

SEQ ID NO: 255421 - DNA, 1473 bp, Klebsiella pneumoniae
atggtaacctctgcaaaaatagtcgggctggttgaggttatggcgcaaaatttatccaaggaaaatcccccgtcttttaaggttgagcataccgaagaagacgcgcagacgttattgcgccagctaatggcaatttatgacgttaaaacgctggtggcgcagctggttgccgtcggtgagcagcactggagcccggctatcctcaagcgcgttgcgacggtatcgcgcgcggcagggcgcataagcgcgcaggagcaggcacatcttcgttcgctcctgccgcagcctccagcgcatcatccccactatggattccgcttcgtcgacctgttcgccggcatcggtggtattcgtcacggttttgaggcgattggcgggcaatgcgtgtttaccagcgaatggaataaacatgcggtgcgcacctataaagccaactggtactgcgatcctgagcagcatcgctttaatgaagatatccgcgacgtcacgctgagccatctccctgaggtgagcgatgaagaagccgcgcagcatatacgccaggcaatcccgcagcatgacgtactgctggccggcttcccctgccagcctttttcactggccggcgtctcaaagaaaaatgcccttggacgcgctcatggttttgcctgtgaaacccagggaacgctgttctttgacgtggtaaggatcatcaccgcccgccagccgccaatttttgtgctggagaacgtcaaaaacctgaagagccacgacaaggggcggacctttcgtattattatgcagacgctggatgagctgggttacgaggttgccgatgcggcgcataccggagcggacgatcctaaggtgattgatggacgccattttttacctcagcatcgggaacggattgtgctggtgggtttccggcgcgacctccagctccatgaggggtttaccctgcgcgatattgcccacctctttcctgccagcagacctacttttggcgagctgctggaacccacggttgacgacaagtttatcctcaccagggtgctatggaagtatctctatcgctatgcgcgtaagcatcaggagcgagggaacggttttggttacgggctggttgatccaacgaatccgcacagcgtggcgcgtacgctctctgcccgctattacaaagatggcgcggaaatcctcatcgatcgcggctgggatcggccgttaggcgaaaaatattttgatgacccggagaatcagttgcgtcgtccgcgcaggctgacgccgcgggagtgcgcgcgtctgatgggttttgagacgccgcaggggtatcgttttcgtatcccggtctcggacactcaggcctatcgccagttcggcaactcggtcgtggtgccggtatttgctgcggtagcgaggctgctggcaccgcgaatcgaaaaagcggtagccatgcgtgagcaagagattaaccatggccgacgtccacgataa

SEQ ID NO: 255422 - DNA, 696 bp, Klebsiella pneumoniae
atggatctttatcaatggcagcaacgatttgaagcctggctaagtgaacatcactcgcaaggggatgccgctcacgatatttcacacttccgccgggtatgggccaccgcgcagcagctggccgaagagagtgatgctgatcggctggtgatcctcaccgcctgctattttcacgatattgtcagcctggcgaagaaccatcctgagcgtaggcgctcttcggcgatggctgcggaacaaacgctgactatcctgcagtcagattttcccgattttccgccggagcgctatgcggcggttctgcacgccattgaagcgcatagttttagcgcggggatggctccccgcagtgaagaagcgaaaattgtccaggatgccgatcggctggaggctttgggggcgattggcctggcgcgcgtattcgcggtatccggtgcgctgaacaatatcttgtttgatgccgacgatccctttgccgatcggcgtgaactggatgataaaaaatacgcgctggatcacttccagtgcaagctgctgcgtttaccggaaacgatgcagacagaaaagggtagggcgatggcgctgcacaatgcgcgctttctggttcagtatatggctaagctcagcgccgaacttcgcggagacccgatgtctcttgatgacaaggttttgcagcgctttgatccactagcataa

SEQ ID NO: 255423 - DNA, 315 bp, Klebsiella pneumoniae
atgttagttgttgaatatatggagaacaaattaatggaagagaaagcgaaaagaagccctggcgggaagctggcactatgggcgttttacgctttttgcggctatttcctgtgggcgatggcgcgttactggtgggttgtcgggcagatccaaagcgtacccggcgcgacgattgacggtgagctcggttcaacggcagggaaatggatcggcgcgctgctgggatttctggtattgggcattgtcggcgctattctcggcgcaattgcctggtatacgcgtcctgatccgcagatgtatgaacatcacgagtaa

SEQ ID NO: 255424 - DNA, 753 bp, Klebsiella pneumoniae
atggaacagtttggcctggctaatcgcgttttgcccggtgctggcgtcaatggtcagcatgacctcatgcggcgcatcgacatccagttttttcatgacgcggacaatcttcttcagttcttccatcaggtgcgatttattctgcagacgacccgcagtatcggcaatcaggacgtcaatgttgcgcgccttcgccgcctggatggcatcgaaaataaccgatgccgaatccgcgccggtatgctgggcaatcaccggaatattgttgcgttgaccccacacctgaagctgctctaccgccgccgcgcggaaggtatcgcccgcggccagcatcaccgatttgccctgctgctcaaactgacgcgccagcttgccgatggtggtggttttaccgacgccgttgacgccaaccatcagaattacaaatggcgccttgccttctacgttcagcggctcgtccaccttcgccagaatatcgcccatctcttctttcagcaggccgtacagcgcctcggcgtcgcgcaactgcttgcggctggcgtcgttggtaagattagtgatgatcttacgggtggtttccacgccgacatcggcaatcagcagctgctcttccagctcttcaaacagatcatcgtcgattttcttgccgcggaacagactgataaatccggaaccgaggttctgcttggtttttatcaggctgcgtttgaggcgagcgaagaacccttctttggtgggtttttcctgctctaa

SEQ ID NO: 255425 - DNA, 597 bp, Klebsiella pneumoniae
atgaagaaaccaaaccacgcaggcagcggtcagatccgtattatcggcgggcaatggcgaggccgtaaattaccggtgccggagagcccgggtctgcgcccgaccaccgaccgggtgcgcgaaacgctatttaactggctggcgccgtcgatcgttgacgcgaactgcctcgattgcttcgccggcagcggcgcgctgggccttgaagccctctcccgctacgcggctaacgccacgctgctggaaatggaacgcggcgtcgcgcagcagttgcaaaaaaatctggcgactctcaaagccagcaacggcaaagtcgtgaataccaataccttagcgtttcttgctcaggcgggcacgccgcatcacatcgtgtttgtcgatcccccgtttcgcaaagggctgcttgaagagacgctaaagctgctggaaaacaacggctggcttagcgatgaagcgctcatctacattgaaagtgaagttgaaaacgggttaccgccggtgcctgtaaactggcatccgtaccgtgagaaagtagccggacaggtcgcctaccgtctctatcaacgtgaggcacaaggagaaaaccatgctgattaa

SEQ ID NO: 255426 - DNA, 279 bp, Klebsiella pneumoniae; identical to SEQ ID NO: 173370

SEQ ID NO: 255427 - DNA, 360 bp, Klebsiella pneumoniae; identical to SEQ ID NO: 173371

SEQ ID NO: 255428 - DNA, 627 bp, Klebsiella pneumoniae
atgctttggtcatttattgctgtctgtttctccgcatggctttacgtcgatgcgtcttatcgtgggcctgcctggcgtcgctgggtgtttaaacccgtcacgctgatcctgcttctgttactggcctggcaagcgccgatgtttaacgccatcagctatctggtgctggcggggctttgcgcctcgctggtcggcgacgcgctgaccctgctgccgcggcagcgggtaatgtacgccgtgggggcattctttctctcgcatctgctctacaccatctggtttgccagccagctgacgctatctttcttctggccgctgccgctggtgctgctgatcctcggcgcgctgctgctggcgattatctggacgcgtctggaagagatgcggatgccggtgtttacctttatcgcgatgacgctggtgatggtctggctggccggggagctgtggtttgcccgcccgacggataccgccctgtccggcttcgctggcgcggcattcctgctgctcggcaacgcggtctggctgatcagccattatcgccgccgcttccgcgctgacaacgcgatctcctcggcattttacttcgccgggcacttcctgatcgtccgcgcgctttatttgtaa

SEQ ID NO: 255429 - DNA, 2205 bp, Klebsiella pneumoniae
atgtcggctccagaatcgcaggataaaaaagtcccacacttctcatcgttaaaatttacccctgccgcgcagccggcggaaagctgctgcgcggaccacgcctgccgcagcgaaaccaccgaggaaaacgaggctctgaggcacgcacgctttagttggctggtagaaggcatggattgcgcagcctgcgcgcgcaaggtcgaaaccgccgttcgccaggtaccgggggtcagccaggtgcaggtactgttcgccaccgaaaagctgctggtcaatgccgagggcgatgttggtccgcaaatcgaaagcgccgtgcgcgccgcgggctatcagctgcgtgatgaaaacgcgccacgggcagaggagtccacctcgtggctgcgcgagaatctgccgctcatcacgctggtcatcatgatgggactaagctgggggctggagcagttcagcccgcctctgggcgaaatcgccttcatcgcaaccacgctggtcggcctgtggccggtcgcccggcaagcgatacgcctgatcagaagcggaagctggttcgccattgaaaccctgatgagcgtcgcagccatcggcgcgctgtttatcggcgccaccgccgaagcggcgatggtcctgctactgtttttaatcggcgaacgtcttgagggatgggctgccagccgcgcgcggcaaggcgtcagcgcattgatggcgctgaagcccgacacggcaatccgcgtgcgcgatggcgtgcgtgaaaccgtagcccagcacgacctgcgccccggcgacgtgattgaagtcgccgccggaggccgcctccctgccgatggccagctactctcccccttcgccagcttcgatgagagcgctttgaccggtgaatccgtaccggtagagcgtaacgccggggaacgcgtagcggccggcgccaccagcgtcgatcgtctggtacagctgacggtgatctccgaaccgggcgacagcgctatcgatcgtattcttaagctgattgaagaagcggaggagcgccgcgcgccgattgaacgctttatcgatcgctttagccgcatctataccccggcgattatggtcgtcgccctgctggtggccattgttccgccgctgctgttcgcgggcgcctggctgccgtggatctataaaggcttaacgctgctgctgattggctgtccgtgcgcgctggtgatctccaccccggcggcaattacctccgggctggcggtagcggcacgacgcggcgcgctgattaaaggcggcgcggcgctggagcagctcggccgcgtgcgccaggtggcgtttgataaaaccggtaccctgaccatcggccagccgcgcgtcactgcggtgatggcgaccgcagacatcagcgaaaacgatctgctggcgctcgcggccgccgtggagcaaggctccagccacccgttagcccaggctatcgtgcgtgaggcagaacagcgccggctggtcattccgtcggcaagcgatcagcgcgcgctggccggatccggcattgaggctcaggttgaaggacgccaggtgctgatttgcgccgccggtaaaactcgcgatccgcagtacgatgaacctattcagcagatggagagcgccgggcaaaccgtggtgctggtaatgcgcgataagacgctgctggggattctggcgctgcgcgatacgcttcgcgatgatgcccgtcaggcggtggatgagctccatcagttgggcgttcagggagtgatactgaccggcgataatccacgtgcggcggcggctatcgctaacgagctgggactggcgttccgcgccgggctgctgcccgcggacaaagtgcaggcggtgatagcgcttaatgcccagtcgccgctggccatggtcggcgacggtatcaacgatgcgccggcgatgaaagcggcgacgataggtatcgcgatgggcagcggcaccgacgttgctctggagaccgccgatgcggcattgacccataaccgcctgaccgggctggcgcagatgatttcgctggcgcgcgccacccacgccaatatccggcagaacatcgccatcgctttgggtctgaagggcattttcctcgtcaccaccttgctcggcctgaccggcctgtggctagcggtgctggctgataccggggcgacggtgctggtcaccgctaacgcgctgcggttgctgcgtaagaagtaa

SEQ ID NO: 255430 - DNA, 246 bp, Klebsiella pneumoniae
atgagcgaacttttctccagccctgaccatacgcttgatgcgcaggggcttcgttgcccggaaccggtgatgatggtgcgcaagaccgtgcgtacgatgccggtgggcgagacgctgctaattgtggccgacgatccggcgaccacccgcgatattcccggtttctgccgctttatggagcatgagctactggcgcaggaaaccgaggcgctgccgtaccgctatctgattcgtaaaagccactga

SEQ ID NO: 255431 - DNA, 666 bp, Klebsiella pneumoniae
atgagtccgtttactaccgtacagcgtaaaaaagcgctgatctggctatcgcttttccatctgctggtcatcacttccagtaactatctggtgcagctaccgatctccatctttggttttcataccacctggggcgcgttcagctttccgtttattttcctcgccaccgatctgacggtacgcattttcggcgctccgctggcgcgacgcattatcctcgcggtgatgatcccggcgctgctgatctcctacggggtttccgcgctgttctacatgggcgagcggcagggctttgccgccttaaccagctttaacctgtttgtcgctcgtatcgccgccgccagctttatggcctacgcgctggggcaaatccttgacgtccacgtctttaaccgcctgcgtcagagccgccgctggtggctggcgcccacggcatccacccttttcggtaacatcagcgatacgctggccttcttctttatcgccttctggcgcagcccggacccgtttatggcggcgcactggggggaaatcgccatcgtcgattattgcttcaaggtgctgattagcatcgtattcttcctgccgatgtacggcatgttgttgaatatgctgctgaaaaaactggcagataaatctgatttatccgcattgcagccaggttaa

SEQ ID NO: 255432 - DNA, 558 bp, Klebsiella pneumoniae
atgcgcaatttggttaaatatgtcggtattggcctgctggttatggggcttgctgcctgtgataacagcgataccaaaacgccgactgccggggctgctgcggaaagcaacgccagcgggcaacctattagtctgctggatggcaaactgagcttctccctgcctgccggtatgaccgaccagagcggcaagctgggcacccaggccaacaatatgcacgtctactctgatgccaccggacaaaaagcggtgatcgtgattgttggcgacaataccaatgaagagctggcggtgatgagccagcgcctggaagagcagcagcgcagccgcgacccgcagctgcaggtcgtgagcaataaatccattgagctcaaaggccacaccctgcaacagctggacaccatcatctccgctaagggccagaccgcctggtcttccgtgcttctcggcaaggttgatgacaaactgctgacgctgcagatcacgctgccagcggacaaccagcagcaggctcagaccgaagcggaaaacattatcaacaccctcgtcatccagtaa

SEQ ID NO: 255433 - DNA, 1221 bp, Klebsiella pneumoniae
atgcccgaaaccgtcgctgaaccggcgcttaatggattgcgcctcaatctgcggattgtctctgtcgttatctttaactttgccagctacctgaccataggcctgccgctggcggtattacccggctatgttcatgatgtaatggggtatagcgccttctgggccgggctggtgattagcctgcagtattttgctacgctgctcagccgccctcacgccgggcgctatgccgatctgctgggcccgaaaaaaatcgttgtttttggcctgtgcggctgctttctgagcggactgtgctatctgctggcggcgttatgcggcggctggcccgtggttagtctggcgctgttgtgtctggggcgcattattctcggcatcgggcagagctttgcgggcaccggctcaacgctgtggggcgtaggggtagtcggttcgctgcatatcgggcgggttatttcctggaacgggattgtgacctacggggcgatggcgatgggcgcgccgctcggggtgctctgttactcgctgattggcctgcacggtctggcgttgacgattatggtggttgcgctggtggcggtgctgtgcgcgttgccgcgggcggcggtaaaagcgggtaaggggaaagcgatgtcgtttcgcgcggtgctggggcgcgtctggctctacggcatggcgctggccctcgcatcggcgggtttcggcgttatcgccacctttatcaccctgttttatgatgccaaaggctgggacggcgcggccttcgccctgacgctgtttagctgcgcctttgtcggcactcgcctgctgtttcccaacggaattaatcgcctcggtgggctgaacgtggcgatgatctgttttgtcgtcgagattatcgggctgctgttagtgggcctggcggagacgccgctgatggcgaaaatcggtactttctttgccggagccggtttttcgctggtgttcccggcgcttggcgtggtggcggtgaaggcggtgccgcagcacaaccaggggtcggcgctggcaacctatacggtatttatggatctctcgctggggatcaccggcccgctggccgggctgctgatggcgtgggcgggaatttcatcgatctatctggcgacggcggggctggtcgcggtagcgctgctgctgggatggcgattaaaaaaacggcccccggtcaatgaaccggaggccgcggcgtcaggccagtag

SEQ ID NO: 255434 - DNA, 1050 bp, Klebsiella pneumoniae
atgacaacccctcagcccgataaaacgggcatgcatattctgctcaaactggcgtcactggtggttatcctcgccggtatccacgccgcggcagatatcatcgtgcagctattactggcattgttcttcgccattgtcctgaatccgctggtcacctggtttattcgccgcggtatcagacgtccggtagccattaccatcgtggtcgtggtgatgctgatcgtacttaccgcgttaattggcgtgctggccgcgtcggttaacgaattcgtcgccatgctgccaaagtataataaggagctgacggcgaaagtcctgcgcctgcaggaggcgctgccgtttttgcatattcacatgtccccggaacgtatgctgcaacgcatggactccgacaagttaatgacattcactaccgtcctgatgactggcctctctggcgccatggccagcgttattttactggtcatgaccgtggtctttatgctgtttgaagtccgtcatgtcccctataaactccgctttgcactgaacaacccgcaaatccatatcgccggtcttcaccgggcgttaaaaggcgtctcgcattatctggcgctgaaaacgctgctcagcctgtggacaggggggattatctggttaggactgatgctgatgggggttcagtttgcgctgatgtggggcgtgttggcttttctgctgaactatgtgcctaacattggctcggtgatttccgccgtcccgccaatgatccaggcgttactttttaacggttattacgaatgcctgctggttggcgcgctctttttagtcgtgcatatgattatcggcaatattctcgaaccgcgcatgatgggccaccggttgggcatgtctacgctggtagttttcctctcattgctggtctgggggtggctgcttggcccggtgggaatgctgctgtcggtgccgttaaccagcgtctgtaaaatatggatggaaaccactaaaggcggcagtaagttagccatcctgctcgggcccggacgcccgaaaagcaggctgccgggctag

SEQ ID NO: 255435 - DNA, 384 bp, Klebsiella pneumoniae
atgggcttaatctgggcgttattcagcgtcggactggtgagcggcgcgcagctgctgctgcgcagcgcgatggtcgagctgccgccgctgacggatctatttaccttcctcaaccatctgctgcatctgcgggcgggcacctttggcctggcgtttggtcttttgggctacctgctgtcgatggtctgctggtactttgccctgcatcagctgccgctggcgaaagcctacgcgctgctgagcctgagctacattctggtctgggccgccgccatctggctccccggctggcatgaacctttccactggcaatcgctgctgggcgtgctgctgattgtcgccggggtgctgacgatcttctggccggtgaagcggcagggctag

SEQ ID NO: 255436 - DNA, 339 bp, Klebsiella pneumoniae; identical to SEQ ID NO: 173380

SEQ ID NO: 255437 - DNA, 1656 bp, Klebsiella pneumoniae
atgaaaagcattcgctacggcgcctctctggtcgccctttttgtcctctactatttactccccctcaacttccgcctgctgtggcaaccggatgaaacccgctacgcggagatcagccgcgaaatgctggcgaccggcgactgggtggtgccgcacttcctcggtctgcgctactttgagaagccgattgccggctactggatcaacagcatcggccagtggctattcggtcataataattttgccgtccgctttggggtggtgttctccattaccgccaccgccctgctggtggcctggctggcatggcgtattttccgcgataaacgcctggcgattttgtcgccagtgatattcctgaccgcgctgctggtctacggtatcggcacctatgcggtgctcgacccgatgattaccatgtggctggcgctggcaatgtgcagcttctggggtgcggcgcaggctcaaagccacagcggtaaaatcttcggctacgtcttgctgggcgtggcctgcgggatgggggtgatgaccaaaggcttcctcgcgctggcggtgccggtggttggagtgctgccatgggtcattgcgcgtaaacgctggcgtgaagtgctgacttacgggtggctggcggtgggcgtctgcgcgctggtggttctgccgtgggggctggccatcgccaaacgagagccggacttctggcgctacttcttctgggttgaacatatccagcgtttcgcggaaaaagatgcccagcataaagcgccgttctggtactacatcccgttcctgattgccggaagcctgccgtggctggcgctgctgccgggagcgctcaagcgcggctggaccgagcgcgacgagtcgcgcggggcgctctatttgctcggatgggtggcgatgccgtttctgttcttcagcattgctaagggtaagcttccgacctacatcctgccgtgtttcgcgccgctgtcgattctgatggcgcgctacgcgctggatgcggcaaaggcgggggcgaaagcgctgaaaattaacggcgcgatcaacctggcttttggcctgattggtctggtagcggtgctggtggtttcgccgtggggctttatgcacaagccggtatggagccatattgagctgtataaatgcctgctggtggcgctaatattcggctgttgggcgctgatgggatggctggcgatgaagaataacggtcgccgctggacgcttgccgcgtgctgcccgctggggttggcgctgctggtgggtttcgcgattcccgaccgggttatcgacagcaagcagccgcagtttatggtggatatcgtgagcgaatcgttgacgccgagccgctacgtgttgaccaataacgtcggtattgccggcggactgtcctgggagctcaagcgcagcgatattatcctgttcgacaagcagggcgagctgaaatatggtctctcctggccggatgcgcagcaccagtttgtcgataaggcgcaatttgctgactggttaacggcgcaccgccagcaggggccgatctcgttggttctgctgatggataaaggagagagtatggccgatctaccgctaccgaaaccggatagctcttatgagctggggcgggtagtgtttatccagtacctgccgcaatga

SEQ ID NO: 255438 - DNA, 903 bp, Klebsiella pneumoniae
atgaaacaggtcggcttacgcatagatgtcgatacctttcgcggcacgcgggacggggtcccgcggctgctggctctgctgagccagcacgggattcaggcaagcttctttttcagcgtcgggccggacaatatggggcgtcatttatggcgcctgataaaaccgaaatttctgtggaagatgctgcgctcaaaggccgcttcgctgtacggctgggatatcctgctggcaggtaccgcctggccagggcgcaggatcggcgcgggcaatgaagaggttatccgcgccgccgcgcaggagcatgaagtcggtctgcacgcctgggatcactatagctggcaaacgtggagcggagtctggccgcaggagaagttaacgctggaggtggagcgcgggctgctggagctggagcggatcatcggtcgtccggtgacctgctccgccgttgccggctggcgtgccgatcagcgggtcattaaagccaaagaggcgtttgatttcctctacaacagcgactgccggggaaccgccccttttctgccgcagctcggtaacggcgcttccgggaccgtgcagatcccggtcaccttacccacctgggatgaagtggtcggcagcgcggtcgatattgcgggcttcaatcgctatctgctggattgcatccaccgcgataagggcaccccggtctataccatccacgctgaagtggaagggatcgcctttgcgcaacagtttgacgagctgctgaccatggctgctcagcaagagatccgtttttgcccgttaagccagctgctgcccgccgattttagcgcgctgccgcgaggcaaggtggttcgtggtgaattagccggccgggaaggctggcttgggcgtgaacaattactgaattcgggtgtttga

SEQ ID NO: 255439 - DNA, 1986 bp, Klebsiella pneumoniae
atgaaagccgtagtcttcgcttatcacgatatgggttgtgcaggtattcagtctctgttggatgccggttatgacatcgccgccatttttacccatccggataaccctggcgaaaaccatttctttggctccgtggcgcgcattgccgcggaacaaggtattccggtatgggcgccggaagatgtgaatcatccgctgtggatcgaacgtctccgcgagataaaaccggacgtgctgttctcgttctattaccgcaatctgctgtgcgaggacattctgaatatcgcgccgcagggggcttttaacctgcatggttccctgctgccaaaataccgcggccgcgcgccgctgaactgggtgctggtcaacggcgaaagcgaaactggcgtgacgctgcaccgtatggtgagccgcgccgatgccgggaatatcgtagcgcagaaaagcgtagctatcagcgaggatgaggcggcgctggccctgcatcgtaaactctgcgctgcggcgtcggacctgctggctcaggcgctgcccgcgatccgcgatggcaaaatcgaagagcgcgcgcaggatgaaagccaggcgacctgggtcggtcgccgcacgccggaagacggtcgcctcgactgggatcactccgcccggagcctgcataatcttgtgcgcgcagtttccgatccatggccgggcgcgttcggctatgctggcgcgaacaagtttatcgtctggaagtcccgcgtacgtgacgatctacccgccgccaaagcggggaccgtgctttccgtcacgccgctggtcgtcgcctgtcaggaaggggcattagaaatcgtcaccgggcagaccgagcgcggcgtttatatgcagggtacgcagctggcgcaggcgctggggctggtagccggagcggtgctgagcagcaaaccggtcgtggcgattaagcggcgcacccgcgtgctgatcctcggggtgaacggttttatcggcaaccacctgaccgagcgtctgctgcaggacgacaactacgagatttacggactggacattggctcagacgccatcagccgcttcctcgacaacccgcgtttccacttcgttgagggcgatatcagcatccactccgagtggatcgagtatcacatcaagaagtgcgatgtggtcctgccgctggtggcgattgccacgccaatcgaatatacccgtaacccgctgcgcgtgtttgagctggatttcgaagagaacctgaagattatccgcgactgcgtgaagtacgataagcgcatcattttcccgtcgacctcggaagtgtacggcatgtgcaccgacaacaatttcgatgaagatgcctctaatctggtcgtcgggccaattaacaaacagcgctggatctattcggtctccaagcagctgctggatcgcgtgatctgggcctacggcgataagaacggcctgaagtttaccctgttccgtccgttcaactggatggggccgcgccttgataacctgaacgccgcgcgtatcggcagctctcgcgccattacccaactgatcctcaacctggtagaaggctcgccgatcaagctgattgaaggcgggaaacagaagcgctgcttcaccgatatcagcgacggtatcgaagcgctgttccgcatcattgagaacaaagacggccgctgcgacgggcagatcatcaacatcggtaacccggataacgaagcgagcatcaaagagctggcggaaatgctgctggcctgctttgaacgtcatccgctgcgcgaccgtttcccgccgtttgccggtttccgcgaagtggaaagcagcgattattacgggaagggttatcaggacgtcgagcaccgtaagcccagcattcgcaacgcgaaacgctgcctgaactgggtgccgacggtcgaaatggaagagaccgtggaacataccctggacttcttcctacgcacggttgaatcgacggacaacggcaaatcatga

SEQ ID NO: 255440 - DNA, 984 bp, Klebsiella pneumoniae
atgtttagctatcctcccgtgaaaaaggtctcggtcgttattcctgtctataacgagcaggagagcctgccggagcttatccgccgtaccgataccgcctgcgcgacgctcggtcggcagtatgaaattctgctggtcgacgatggcagcagcgatgactcggcgcgaatgctgaccgaagccgctgaagccgaaggcagccatgtagtggcggtactgttgaaccgcaactacggccagcactcggcaattatggcgggttttagccacgtcaccggcgacctgatcatcaccctcgatgctgacctgcaaaacccgccggaagagatcccgcgcctggtggagaaggccgacgaaggctacgacgttgtcggtaccgtgcgtcagaatcgccaggatacctggttccgtaaaagcgcctccaggatgatcaatcgtctgattcagcgcaccaccggtaaagcgatgggtgattacggctgcatgctgcgcgcctatcgccgccatattatcgacgcgatgcttaactgccatgagcgcagtacctttatcccgattctggcgaatacttttgcccgtcgcgcggtggagatcccggtgatgcacgccgagcgcgagttcggtgattccaaatacagttttatgcgtctgattaacctgatgtatgacctggtgacctgcctgactaccacgccgctgcgcctgctgagcctgttcggcagcgccatcgctctgctgggcttcgccttcggtctgctgctggtggtgctgcgcctggtatttggcccgcagtgggcggcggaaggggtgttcatgctgttcgcggtgctgtttatgtttatcggtgcccagttcgtcggtatgggtctgctcggggagtatatcggccgtatctataacgacgttcgcgcccgtccccgctactttattcaacgtgttgttcgccagccggaaacggcatctcaagaggaagatcgttcatga

SEQ ID NO: 255441 - DNA, 1140 bp, Klebsiella pneumoniae
atgagcgattttttgccgttttcgcgcccgtcgatgggcgacgcagagctggctgcgctgcgtgaagttttgcaatccggctggatcaccaccggaccgaaaaatcaggcgctggaagaagcgttttgcgcattaaccggcaaccgccacgccatcgccgtcagttcggcgaccggcggcatgcacgttacgctgatggcgctgggtatcagcgccggcgatgaagtgatcaccccttcgcagacctgggtctccacgctgaacatgatctgcctgctcggcgcgacgccggtgatgatcgatgtcgatcccgataacctgatgattactcccgaagcggttgaagcggcgatcactccacggaccaaggcgatcgtcccggtgcactatgcgggcgcgccggtggatatcgacgccattcgcgcgattgccgagcgtcacggtattccggtgattgaagatgctgcccacgcggcagggacgtactacaaaggccgtcacgtcggctggcgcggcaccgccattttctcattccatgcgatcaaaaatatgacctgcgccgaaggcgggctggttgtaaccgacgatgatgaactggccgcacgtattcgcagcctgaaattccacggcctcggcgtagatgcttacgatcgacagaccctgggccgcgccccgcaggcggaggtgatttcgccgggctttaaatacaatctggcggatatcaacgccgcgctggcgctggtgcagctggacaagcttgccgccgccaatcagcgccgtgccgccattgcgcaccgctatctccgcgagctggcggatacgcctttcaggccgctggcggtgccgtcatgggagcatcagcacgcctggcacctgtttattatccgcgttgatgaagccgcctgcggtatcagccgcgatgccctgatggaaaaactgaaggccatgggcattggcaccggtctgcacttccgcgccgcgcatacgcaaaagtattaccgcgagcgtttccccgacgtttcattaccgcatacggaatggaacagcgcgcgcatttgttccatcccgttgttcccggatatgaccgacgacgatgtcactcgggtcatttccgcactgcaccagctgtcaggacgttga

SEQ ID NO: 255442 - DNA, 504 bp, Klebsiella pneumoniae
atgagcacattcgacaaacatgacctgagcggttttatcggtaaacatctggtttatacctatgataatggctggaactacgaaatttacgtgaaaaacgccaccactctggattaccgcattcacagcggcatcgtcgcgaatcgttgggtgaaagatcaacaggcttacatcgttcgcgttggtgaaagcatctacaaaatttcctggaccgaaccgaccggtaccgacgtcagcctgatcgtaaacctcggcgacaaactgttccacggcactatctttttcccacgctgggtgatgaataatccggaaaaaaccgtctgcttccagaacgatcatatcccgctgatggtttcctaccgtgaagccggcccggcgtatccgacggaggtgattgatgagtttgccaccatcacttttgtgcgcgattgcggcgcggataatgacgaagtgattaattgcccggctaatgaattgcctgaaaattttcctggcaatctgtaa

SEQ ID NO: 255443 - DNA, 861 bp, Klebsiella pneumoniae
atgcacaagactacgctggaacaatgggcgctgctggaaaaggtggtcgaactgggtagcttcgcgaaggcggcggaagaaacccaccgcagtcagtcgtcggtgagctataatctcgcgctgctgcaggagcgcctcggcgtcacgctactcacgccatcgggccgtcgcgcggtgctgaccccggcgggtgagctgctgcttggccaggttaaaccgctgctgcaggccttcgcttacgtcgaaacccatgccgccaccctgcgcgacggcacgcggacccgactggacctggtggtcgacagcatttttccgcgccagcggctgttcgccattctgcgccagtttcaacagcgctatccgcagacccaggtcaggctgaccgaagtgctggaaaacgttgaagaggaacatccggcccgcagcgaggcggacgtgatggtgctgacccgccgccaggatattaccggccgcggcgaatggctgatgaatattgattttgtcgccgtcgcccatcgcgagcatccgctctccgcgctgcagggaccgctggatgataacgcgctggccccctggccgctggtgcgcatcgccgatcgcagcaacgatccgcaatcctcccgcgatgcatggaccttttccaccattgatgccgccattgatgcggtgctgtaccaggtcggtttcggctggctgccggaggagcgtattcgccctcagctacagcaaggagtgctgaagatgctgccgctgggacacggcgcgcggcgcgccacgccgctgcatttgatcgttaagcgtgatttaacgcccattgatgagcaggtcgccacgctgctggatctgttcagaaccccctga

SEQ ID NO: 255444 - DNA, 582 bp, Klebsiella pneumoniae
gtgcagctgttgaccatcaccaccgccggctacgtcttcgcctgccacgagtttcgcggcaagaagacgctgttcctgatgttcctcgtccagctgatgatcatgccggtggtgatgatggtgccgaacatgctgaccctgaaaaccttcggcctgctcaacaccctcaccggggtgatgatgccctacttcacctcggcgttcggcgtgttcctgatgcgtcaggcgtttctggccatacccaaagagctggaagaggcggcgctgatggagggctgtcgctggtggcaggtgctgttccgcgtgctgctgccgatgtcctggccgtcggtgctggccttcgccaccgtcagcattacctaccactggaacgagtatctgtggccgctgatgatgctgaacgacccggacaaacaggtgctgaccgtggggctggtctcgttcgccatgggcgccgaatccggcggtcagtggggcatcatcggcgccggcacgctgatggtctgcctgccgctgatgctggcgtttatcctcttccagaaacagttcctgcgaagcttcggcttctccgggatcaaataa

SEQ ID NO: 255445 - DNA, 825 bp, Klebsiella pneumoniae
atgctgttagcgcaaatttccgatacccatttccgcagccgcagccagaagctgtacggctttattgacgtcaacgccgccaatgccgacgtcgtctcccagttgaacgccctgcaggagcgtccggacgcggtggtggtgagcggcgatatcgtcaactgcggccgcccggaagagtatgaggtcgcccgccagatcctcggcagcctgaactatccgctgtatctcattcccggcaaccacgacgataaagcgctgtttctggagtacctgcatccgctgtgcccgcagctcggccgcgacgcgcaaaacatgcactacgcggtagacgattttgccactcgcctgctgtttatcgactccagccgggcgggtacgtcgaaaggctggctgaccgaggaaaccatcaaatggctggaagcccagctgtttgatggcggcgataaaccggcgacggtatttatgcatcatccgccgctgccgctgggcaatgcgcagatggatcctatcgcctgcgaaaacggccatcgtctgctggcgctggttgagcgtttcccgtcgctgacgcgcattttctgcggccataaccacagcctgaccatgacccagtatcgccaggccatcatctccaccatcccgggaaccgtccaccaggtaccctacttttatgaagatacccgaccgtattacgacctctctccggcgtcgtgcctgatgcatcgccaggtcgacgagcagtgggtgagctatcagcatcctctgacccactacgccggcccctggatgtacgacgaaaatatcagctgcccaacggaagattgctaa

SEQ ID NO: 255446 - DNA, 1074 bp, Klebsiella pneumoniae
atgcttagtctgcaaaacatcagtaaacagtttgacggtaaatcggccctcagcgccctgtcgctggatattcgcgaaggggaattcgtggtgctggtgggcccgtccggctgcggtaaaagcaccctgctgcgcctgctcgccgggctggagccggtcagcgagggggagatctggctgcacgatgagaacatcaccgagatgtcgcccagagagcgtaatttcgcgatgatcttccagaactatgcgctgtttccgcacctgtcggtgcgcgacaacatcaccttcggcatgaaggtgcgcaaagaggagaagaccagctggcagccgcgggtggataaagtcgcgcaaatgctgcagctggataccctgctcgatcgcaaaccggcgaagctctccggcggccagcggcagcgggtggcgatggcgcgggcgattgtgcgcaatccccgcctgttcctgatggatgagccgctctccaacctcgacgcccgcctgcgtagcgaagtgcgcgacagcattatggatctccaccagcagctcagaaccagtaccgtctacgtcacccatgaccagacggaagcgatgtcgatggccgaccgcatcgtggtgatgaacagcggccacgtacagcaggtcgggcgaccggagtatctgtacgccaacccggccaacctgtttgtcgccgggtttatcggatctccggcgatgaatctgctctcactgccctgcgctgatggtgaggtattactgggtgagctgcgctatccgctgccgccgcgctaccgtgaagaatcccgagtgtggttaggcattcgcccggaacatatcagcgaccgcgtggaggagaaccatctgcgcttgcccgccaccgtgctgcaacgagaactgatgggagccgattatttgctccacgtcagcacccccatcggcaccttacgctttagccgtcgccatcgcggcgcggtaccggagaaaggcgattcgctgatcctcggcttttcacctgccgatgtgcatctttttcatgctgagaaacagcataatttactgatggagacagaccatgtttaa

SEQ ID NO: 255447 - DNA, 1311 bp, Klebsiella pneumoniae
atgtttaaacctctcaccgctctcgcggttgggctcagccttgccctgagcggcgcggcgctggcgaaagagaagatcgacttcatgtttccggcgccggtggacggcaagctgaccatggagatgacccgcgtcattaagcaattcaacgagtcgcagcaggatgtcgaagtgcgcgggatctttaccggcaactacgacaccaccaagatcaaagccgaatcagcgcagaaagccgggcagccgcccgcgctggtgattatgtccgccaacttcaccaccgatctggcgctgaaagatgagatcctgcccatggacgaactgttccagtatggcgatcaaaaagcgggggaatttctggtgaaggcgttctggcccgccatgcataaaaacgcccaggtgatgggcaccacctatgcgatcccgttccataactcgacgccgatcctttactacaacaaaacgatgttcgatcgggccgggatcaaacagccaccgcaaacctgggccgagctgctggcggacgccagaaagctgaccgacgaaagcaaaggcaagtgggggatcatgctgccgtcgaccaacgatgattacggcggctggatcttctcggcgctggtgcgcgccaacggcggaaaatactttaacgaggactatccgggcgaagtctattacaacacgccaaccaccatcggcgccctgcgcttctggcagaacctggtctataaagacaaagtgatgccttccggggtgttaaattcgaaacagatcggcgccagcttcttctccggcaaagtcggaatggcgatgctgagcaccggcgcgctgggctttatgcgcgagaacagcaaagattttgagctgggcgtggcgatgctgccggctaaagagcagcgggcggtaccgataggcggcgccagcctggtcagcttcaagggcatcaacgacgcgcagaaaaaagcggcgtatcagttcctgacgtatctggtgagcccccaggtcaacggcgcctggagtcgctttaccggctacttctccccgcgtaaggccgcctacgatacgccggaaatgaaggcgtatctgcagcaggatccgcgcgcggctatcgccctcgaacagctgaagtatgcccatccgtggtactccacctgggagaccgttgccgtgcgtaaggcgatggaaaaccagctggccgcggtggtcaatgatgccaatgttaccccggaagccgcggtgcaggcggcgcagaaggaagccgatgcgttgatgaagccctacgtcgataagaccgcgctggcggaagtgaagtag

SEQ ID NO: 255448 - DNA, 1500 bp, Klebsiella pneumoniae
atgtctaaggaacaatatcttacactcaataaagcgtcgggaccgaatagcgataccccgacaacgccctttgtaaaagttgtcgccctgatcgcgacgcttggcggtttactttttggctatgataccggggtgatttccggtgccttactctttatgggcaccgagcttcatctcactccctttaccaccggcctggtcaccagctcgttgctgttcggtgccgcctttggcgcactgctatctggcaatctggcgaatgcggcgggcagaaagaaaattattctgtggctggcggtgctttttgccatcggcgcgataggtacctctatggcgccggacgttaactggatgattttctttcgtcttattctcggcgtcgcggtcggcggggcggcggctaccgttccggtctatattgccgagatagctcccgcgaataagcgcggacagctggttactttgcaggaactgatgatcgtatccggtcaactgctggcctatatttctaatgccacgttccatgaagtctggggcggggaaagcacctggcgctggatgctggcggtggcgacgctacccgccgtgctgctctggtttggcatgatgtttatgccggattcaccgcgctggtacgcgatgaaagggcgcctggcggaagcccgtcgcgtgcttgagcgcacccggcataaagatgatgttgagtgggagctgctggaaatcaccgaaacgctggatgaacagcgcaatctcggtaagccccggttcagcgagattatgaccccgtggttgttcaagctgtttatgatcggtattggtatagcggttattcagcagcttaccggtgtaaataccattatgtactatgcccccacggtactgacctcggttggtatgactgataattccgcgctgtttgccactatcgccaacggcgtagtctcagtattgatgacattcgttggcatctggatgcttggcaaaattggccgtcgcccaatgaccatgattggtcagttcggctgcaccgcctgcctggtctttatcggtgcggtcagctatctgttgccggagacggttaacggccagcctgatgcgctgcgtgcctatatggttctggcagggatgttactgtttctgagctttcagcagggggcgctgtcgccggtgacctggctgcttatgtcggaaattttcccaacccgtctgcgcggtatttttatggggggggcggtattttcaatgtggattgccaacttcctgatctccctgttcttcccgatactgctggcgtggttagggctttcaggcaccttttttatcttcgccggtattggcgtatttggcgcgatattcgtcattaaatgcgtaccggaaacccgacaccgtagtcttgaacaaatcgagcactatctgcgggataagctggacaccagtgaagaagggcaggccgccagggcccggcgaataatggctgaatcgcaggcgaataaagtgtaa

SEQ ID NO: 255449 - DNA, 900 bp, Klebsiella pneumoniae
atgaacaaagataacgtaaaactggctatcgccccgattggctggactaacgacgatatgccggagctgggcagcgagaatacttttcagcaaatcgtcagcgaaatggcgctggcgggttttaccggcagcgaagtcggcagcaaatatccacgcgatccggcggttctcaagccgatgctggatatccgcggcattcagatttgcaacgcctggttcagcaccttttttgctaacggccagcgggaaaaaaccattgatgaattcgttaaccacatgaatttcctgcatgctatgggcgcgaaagtgatcggctgctcggagcagagcggcagtattcaggggctggaaaagcctatcctggagaatgagaaaccgtgctttagcgaagaagagtggcagcgggtggcggaaggctataacaccctcggtcgcctggcggcggaaaagggcatgcaggtctgtctgcaccaccatatgggtaccggtattcagacgacggcagagatcgacaagtttatgtcgctggtggatgacaaggtcttcctgctctacgacaccggacacgcctggtattccgaaggcggcgaagagccgatgctggcgattctgaaaaaatatctgccgcgcattaaccatgtccacctgaaagacgtacgtccgccggtgatcgagcaggtgcgccgcgaagggctctccttcctggatggcgtgaagaaggggaccttcaccgtgccgggcgacggcgtcattgatttccgtccggtgtttaaactgctggacgagcatggctataaaggctggatggtggttgaggccgagcaggatccggcgctggctaacccattcgaatacgccgtaaaagcgcgcaaatacatccgcgagacggcaggaatctaa

SEQ ID NO: 255450 - DNA, 885 bp, Klebsiella pneumoniae
atgaaaattgcttttgacgttgatgtcattaaagacctcggggtaacccgaatggtccatcaggtggcggagtggggctacaagtacattgagcaatcgccgcacccgcagatcaacccgttctacaagcacccgcgagccagccgggaaattatggctgagtacaagcaggcgctgcgcgataccggtgtggagctctcctcgtttatctgcgtctaccgctggtccggtccggatgagctgcgccgtcaggcagcagtaaaaaactggaaacggctgatcgaaatcgcggttgaaatgggtgtacaggtgatcaacaccgagttctccggcgatcctaaccagccggagatttgcgatgagatgttctatcgctccatggaagagctgctgccgatttttgagcgcgaaggcatccgcgttgaaattcaggcgcatccgtgggacttctgcgaagagaacaacgaaaccgtcgatatcgtgaagtcgttccgcagcgataacgttaagtacgtttacagcgtcccgcacaccttcttctatgacaaaggcgtgggtgacgttgagaagatgctgcgctacgcgggaagcgatctctcccatgtgctgatcgcggatacccgcaaccatacaaaacactgccgctatatcgttaacccaccgggcgtagatgccgtcgttcaccagcacgtgggcgtcggggaaggggatgttgatttcgacgcgctgttccgcaccctgcgcgatatgaaatttgccgagcagaccttcaaggtcggcggtgagcctatcgtggccacctcgctgttcggctacccggaaaaaatgaaataccaggcagtggaaacccgtgaactcatcgaacgtgaattgctgcgccggtag

SEQ ID NO: 255451 - DNA, 1014 bp, Klebsiella pneumoniae
atgtcactcaaattaggtgtcatcggtgccggcgctatcggtaaagaacatatccgtcgttgcactcaggtactgcagggagccacggtagtggcggtttcggatatcaacgaagagaacgcgcgcgccgcggttgcgctgccgggcgtgcatgccgaagtgtacgccgacggtcatgacgtgattaaggccagcgatgtggatgccattctggtcacctcatgggaccccacccacgaagagtacacgctggccgccatcgccgccgggaagccggtgttctgcgagaagccgctggcgatgagcgcggaaggctgccgccgcatcgttgatgcggaaatgaaagccggtcgccgcctggtgcaggtcggatttatgcgtccttatgacgaaggctatctggcgctgaaaaaagtgatcgatgacggcgatatcggcgcgccgctgatgctgcgctgcgcgcaccgcaaccagtcggtaggtgaggattacatcaccaacatggcgatcaccaacaccctgattcacgagctggatgtactgcgctggctgctgaatgacgactatgtttccgtgcaggtgcgctttcctcgctccacttcccacacccatgcgcgcctgaaagacccgcagatcgtgtcgtttgaaacgaaaaaaggcacgctgatcgacgtggaagtctttgtgaactgtcagtacggctatgacatccagtgtgaagtggtgggggaaaccggtattgcccgcctgcctgagccgtcggctgtgcagatgcgcaaagccgctaacctgtcgaccgctatcctgaccgactggaaggatcgctttatcaaagcgtatgacgttgagctgcaggcctttatcaatgatgttcaggccggtcagctgcacggcccatcggcatgggatggctacgcggcatccgttgcagccgacgcctgtatcaaagcccagggcaccagcgagccggttgaggtgacgctgcctgagtgccctgatttctacaaacgctaa

SEQ ID NO: 255452 - DNA, 2025 bp, Klebsiella pneumoniae
  misc_feature (63)..(72): n is a, c, g, or t
atgggcaaactgagactgacaatggcgcaggcgctggtgaagttcctggataaccagtacctnnnnnnnnnnggattgggcaacatgggcaaactgagactgacaatggcgcaggcgctggtgaagttcctggataaccagtacctggaagtcgatggcgaagagcataagttcgttaaaggcatctttgctatctttggccacggcaacgtgctgggaatgggccaggctcttgaacaagatagcggtgaaatgcgggtctatcaggggcgtaacgagcaagggatggcgcatgtcgccaccggttttgccagacagtccctgcgtcgtcagattattgcctgcacctcctccattggccccggcgcggcaaacatgattaccgctgccgccaccgcgaccgccaaccgcatccctctgctgctgctgccgggagatgtgtttgcgacccgccagcctgacccggtgttacagcaaattgagcagagccacgatctcagcattaccactaatgatgcgtttcgcgcggtgagtaaatactgggatcgcatcacccgtccggaacagctgatgagcgcctgcatcaacgccatgcgcgtgttgaccgacccggcggaaaccggtgcggtcacgctctgtctgccgcaggatgtccagggcgaagcctgggattatccgcagtccttctttacccgtcgggtacaccgccttgaccgccgtccggccagcgccgcacagctggcggatgcggtggcggcgattaaagccagccgtaagccgctgatcgtctgcggcggcggggtgaaatactccggcgccggcgaagcgttgacccattttgccgaacgctacggcgtaccgtttgccgaaacccaggcgggtaaaggcagcgttgtctcttcgcatccgtataacgtgggcggcgtcggcgaaaccggctgcctggcagcgaacctgctggcgaaagaggcggacttagtcatcggtctcggcacgcgtttcagcgatttcaccacctcgtcaaaatggattttccagcacccgggcgtgcgcttcctcaatattaacgtcagcaacttcgatgcctggaagctggatgggattccgatgctggcggatgcccgcgaagccctcaccgccctcgatgacgccctgtccggcgaatcctggcaagcaggctggggcgagcagattgaaagcgtgcagagccgccagctgaaagagacccagcgcgtttaccaggcggtatggcaggaaaccgctttcgtcccggaaatcgacgatcatctggatcgggaatcggtatatcgcgaatttcgccagataaccgactccaccctgacgcaaagcagcgtccttggcgtactcaacgaaacgctgccggtggatgcggtgattgtagcggcggcggggagcctgccgggagacctgcagcgcgtctggcgcaaccgggccaccaacacctatcacgttgaatacggctactcctgcatggggtatgaagtcagcgccgcgctgggcgtgaagttagcccaaccgcaaagcgaggtctattcgctggtcggcgacggctcattcatgatgctgcactccgagctggtgacctccctgcaggagcgcgcgaagatcaacattgtgctgctcgacaacatggccaacggctgtatcaacaacctgcagatggaacacggtatggacagcttcggcaccgagttccgcttccgctgcgccgaatcgggccagctgcagggcggcctggtaccggtagatttcgccaccgtcgctgccggctacggctgcaaaacctggcgcgtcacgacgctagaagaactacgccacgcgctggacgccgcgcgccgcgaaaccgtcagcaccctgatagacattaaagtgctgccgaaaaccatggtgcacaaatatggcagctggtggaacgtcggcgtcgcgcagtctgcgctctccgagcggatccgtaaggttgcgcaaatgatcaatgaaaaacgcgctcaggcgcgggattactaa

SEQ ID NO: 255453 - DNA, 1914 bp, Klebsiella pneumoniae
atgaatgcagcagtaaagcgactcgacgtcatctgtattggccgggtggcagtcgatctctatgcccagcagattggcgcgaggctggaagatgttgccagtttttctaagtacctgggtggctcttccggcaacgtcgccttcggcaccgctatacagggattaaaatcggcgatgcttgcccgcgtgggcgatgagcacaatggtcgttttttacgcgaaacgctcagccgcgccggcgtcgataccgaatatctgatcaccgataagcagcgcctgacggcgttagtgatgctggggattaaagatcaggagacatttccactcattttttaccgcgataactgcgccgatatggccctttcgccagaagacattaaggaagagtacatcgcctcctcccgggcgctggcggtaaccggtacccacctttcgcacgccaacacgcgtgaagcggtgctgaaggcgctggagtacgcccgccgtcacggcctgcgtacggcgctggatatcgactatcgtccggtgctttgggggttaacctctttaggcgacggcgaaacgcgtttcattgagtccggtcaggtgaccagccagctgcaggaagtcctgcatctgttcgatttagtggtggggactgaagaggagtttcatattgccggcggcagtaccgatactctgatcgcgctgaaaaacgtgcgtaacgctacgaaagcgacgctggtttgcaaacgcggtccgatgggctgcgtggtgctggaaggcgacattcccgacagctgggatagcgtgccgctgcagcagggcgtgcgcgtagacgtgcttaacgtcctcggcgctggcgatgcctttatgtccggcctgctgcgcggctggcttaacgacgaaggctgggagcaggcctgtcgctacgctaacgcctgcggcgcgctggtggtttcacgtcacggctgcgcgcccgcgatgccaaccaaagccgaacttgacgactatctgtcgcgagcagaatctgtcccgcgtccggatatcgacgctcgcctcaaccatctccatcgcgtcaccagccgccgccaggcgtggccggagctgtgcattttcgcctttgaccaccgtaagcagctggcagacctggcgctggaaaccgggcgtgatgaatcctgtattccgcagctgaagctgctgctgctggcggccgcggaagccgccgcagacgaagccggtcttgacggccgcagcggcattctcgccgatggcacctacggccagcgctcgctcaatgccatcaccggcaagggctggtggattggccggccgattgaaatgccaagctcgcgcccgctgcgcctggaacatggcaacatcggttcccagcttatcgactggccgctggagcacgtcgtgaaatgcctggtcttctaccacccggccgaccctgccgaactgcgcgctgaacaggatgcgctgctgctggaagtctggcaggcgtgcaacaagtccgggcatgagctgctgctggaaattattctgccggaaaacggcccggataaagatgaacgccactaccacgacatgctggagcacttctatcagctgggcatccagccggactggtggaagctgccgccgctgtcgagcgcggaatgggaaaggattggcaaactgatcgcgcgcgaagatagctggtgccgcgggatcttaatcctcggcctggacgccccttcggaccgtctgcgcgccggttttgccgaagcggcgaagcatccgatgatcaaaggttttgccgtaggacgcaccatttttggccagccttcacggcgctggatgcagggagagctcagcgacgaggcgctgattaacgaagtgaaacgcaactacctcacgctcatcggctactggcgagaagcccgcggctga

SEQ ID NO: 255454 - DNA, 858 bp, Klebsiella pneumoniae
atggccaataatccgacccaacttaccatcttgcaggatgaaatcaggcgtcgctacgatacgttaagcaaacgcctgaaacaggtagcccgctatattctcgataacagcaatagcgtggctttcgataccgtggcctctatcgcgcaacaagctgacgtccccccttccacgctgatccgcttcgctaacgcctttggttttagcggtttcaacgaaatgaagcagatgttcaagcagcacctgatggaagagaccgctaactataccgagcgcgcgcgtctgttccgccagaccaccacggatgacgcaaccccgccggaaacgccgaccgaaatcctgaatatgttcactatggttaatactcaggcgctgcagcagctggcgatgcagacctccggcgacgatctgcagcgtgcggtcgcgctgttggcggaagcggaaaatatctacgttatcggcctgcgccgctcttttagcgtcgcctcctatctgacctacgccctgcgccatctggaccgtaaagcgttcctgattgacggtctgggcggcatgtttaccgaacagctcagcctggtcgggccgaaagatgtcgtcgtggcggtgagcttctctccgtatgcgcgggaagtggttgaactggtggagctcggcgcgcagcgtaaagcacgtcagatagcgattaccgacagccaggtcagcccgctggcggccttcagcgacgtctgctttgtcgtgcgcgaggcgcaggttgatggtttccgctcgcaggtggcctccctgtgtctggctcagacgctggcggtctcgctggcgctgaacagcagcaaggatgcagaaacgaagcagctggcttaa

SEQ ID NO: 255455 - DNA, 531 bp, Klebsiella pneumoniae
gtgacggcagattctgaccttgagctggcggtatgcagcgccccgggtaaaggaactttaccggctcgagttatctccccgcaggacgtgggcgtagagcatcgcggtaaagggcgtaaccagcggctggtgcacaatattctgccggatagcgcgcaggcggactgcctgctggtggtagaggtttacactgacgaaggagcgaccagctcatggccgtcgcacaagcacgacacggcgctgccgggtcaggaaactcagctggaagagacctactaccaccgtttcgatccgccgcagggttttgccttccagcgcgtctataccgatgaccgtagccttgatgcctgtatggctccctacaaccacgatgtggtcatggtaccgcgcggctaccatccggtagcggcgatagccgggtatgacagctactacctgaacgtgatggccggtccggatcgcaaatggatgtttacctgggaagaggatcacgcgtggatcaacagccctgattatccccgccacgattaa

SEQ ID NO: 255456 - DNA, 273 bp, Klebsiella pneumoniae
atgtctttactggctaaagcaaaaaaagaagggcagattcagcacatcaccccgcagagcgcggggtggaagtacattggttttgatgtctggatgttaaagaaagggcaaaccgttaccctggaaagcggcgatcgcgagctgtgcctggtgctggtcgccgggctggcttcggtaaaaacctcgcaggccgattttccgaatctgggccagcgtatgtcgccgtttgagcgcgaccccgccctggtcagtttacgtgccgccgcaggataa

SEQ ID NO: 255457 - DNA, 1506 bp, Klebsiella pneumoniae
atgactatcacaggaaactttattggcgggaagaccgttaccagcggcagcaacaatacaatgccggttttcgaccccgcgacgggcaaagtggtccgcgaagtcacgttatcgaccgcgcaggaagtctccgatgcgattcaggtggcgcatgatgcttttgatggctggtcgcgtaccacgccgctgcgccgggcccgcgtgctgtttaattttaaaatgttacttgaacagcacgctgaagagctggcggggattatcgtcagcgaacacggtaaagtcttttccgatgcgatgggcgaactgacgcgcggcatggaagtcgttgagtttgcctgcgggattccgcacctgatcaaaggcgagttctcatcggatgtcggcaccggcgtcgatagctattctctgatgcagccgctgggcgtagtggcgggcattacgccgttcaacttcccggcgatggttccgatgtggatgttcccgctggcgctggcctgcggcaacagctttgtccttaagccgccagcgctggcccctggcgctgcgttgcgcctggcggagttgctgaaagaagcggggctaccggacggcgtctttaacgtggtgcactgcaacaatgaagatgctgagcagctgtacaaggatccgcgtattgcggcggtaagctttgtgggatcttccggcgtggcggagcatatttataaaaccgccagcgcttatggtaagcgcgttcaggcatttggcgcggcgaaaaaccacgcgattgtgatgccggatgccgatcttgatgccaccgtgaatgcgataatgggcggcgcgttcggctctgcgggcgagcgctgcatggcgctgccggtggtcgtcgctgtgggcgatgaaacggcagataaactcattgcgcgcctcaagccgctggtggagtccctgaaggtcggcccgggctgtatgcgcggaaaagaagagaacgaaatgggtccggtcgtctcagaggcgcatcagaaaaaagtgctgggatatattgataaaggcgtcagcgaaggggcgacgctggtggttgacgggcgcaagctgcgagttgccggtttcgaagagggttactacgttggcggaacgctgttcgacaacgtgacgccggaaatgactatctggcgcgaagagatttttggcccggtactgggtattgtccgcgtggcggactaccacagcgcgctggagctggtaaacagccatgagttcggcaacggcagcgccgtctttaccagcaacggccacaccgcgcgtgagtttgtacatgatgtccaggccggaatggttggggtcaacgtgccggtacccgttccaatggccttccatagctttggcggctggaaacgctccgtatttggcgcactgaacgtgcatgggccggatggcgtgcgtttctatacgcgtatgaaaaccgccaccgtccgctggccgcagggtcagcaaaccgtatctgaattcagcatgccgacgttaggctaa

SEQ ID NO: 255458 - DNA, 822 bp, Klebsiella pneumoniae
atggctattgcagcacagcgtttctgtatcaaccgcaagattgccccttccctcagcattgaggccttcttccggctggtgaacagcctcgggctaaacaaagtcgagctacgtaacgacctccccagcggaaaagtgaccgacgacctgagccaccagcaggttcgtgaactggctgaccgctaccatattgagatcctcactatcaacgcggtttatcctttcaactgccgcaccgcagaggttcgcagcctgacggagtccctgctaaaagaggccaaagccgtcggcgcgaaatcgctggtgctgtgcccgctgaacgatggtaccgaggttccggcgagcgaaacccttaacgccctgcgcgacctggcaccgctattcgccttctatggcattgagggactcgtcgagccgctcggcttcccgcaaagctcgctgcgctcctcggcgcaggcgcaaacgctgattcacgacgcacgggtgccgtttaagctgctgatcgatacctttcaccatcatctttatccgcaggcggagcaggagtttagccaggtggatgtcggcgaaatcggcctggtgcatctttccggcgtagaagatacccgcccgcgcgaaaccctgaccgacaacgaacgcattatgctgaccgaaaaagaccagctgcaaagctgcgagcaggtcaaaaacctggaggcccgcggctatcagggcgtatatgcgttcgagcccttctcaccggagctggcaaactggagcgaagacgatatccgccgcgaaatcgagcagagtatcgcgttaattcagcgccactgcgcctga

SEQ ID NO: 255459 - DNA, 1503 bp, Klebsiella pneumoniae
atgagctcaccgctgctgattgcacgcacgctggaaaaacagctgcatttattgcccgctatggcgaaccgccacggcttaattaccggcgccacggggaccggtaaaaccgtcacgctgcaaaagctggcggaatctttctcggaaatcggcgttccggtatttatggccgatgtgaaaggcgacctcaccggtatcgctgaggcgggccaaagttcggaaaaactgcaggcgcggctggaaaaaatcggcgcaacggactggcagccgcatgctaatccggtagtgctatgggatatttttggcgagaaaggccacccggttcgcgctacggtttccgatctcgggccgctgctgctggctcgcctgctcaacctcaatgaggttcagtccggggtattgaatatcatcttccggatcgccgacgaccgcgggctgctgctgctcgactttaaagacctgcgcgcgattacccaacacattggcgacaacgccaaagcttttcagaaccagtacggcaacatcagcagcgcctccgtcggggcgattcagcgcggattgctgaccctggagcagcagggtgcagagcactttttcggcgaacccatgctcgatatccaggactggatgcgcgttgatgcgcagggtaaaggggtaattaatatcctgagcgcggaaaagctctatcagatgccgaagctgtacgccgccagcctgctgtggatgctttccgaactttacgaacgtctgccggaggccggtgaccaggaaaagccaaagctggtctttttcttcgatgaggcgcatctgctgtttaacgatgcgccccaggtgctgctggataaaatcgagcaggtcatccgcctgattcgttctaaagccgtcggagtctattttgtttcacaaaacccggcggacattcccgatgcggtgctgggtcaactgggcaatcgggtgcagcacgccctgcgcgccttcacgccgaaagaccaaaaagcggtaaaaaccgccgcgcaaactatgcgcgcgaatccggcgttcagcaccgagcaggcgatccaggagctgggcaccggcgaggcgctgatctcctttcttgatgagaaaggcagcccctcgatagtagagcgggcgatggttatcgcgccctgctcgcgcatgggcccggtcaccgatgacgaacgtaacggactacttaatcactcgccgctgtacggaaaatatgaagaagagattgaccgtgaatcggcgtttgaaatgctgcagcagggcgtgcagaccacaactgagcagcagcaatccccgcccgcaaaaggccagccaaacggcgatgacgacggcctgctcggcgggctcaaagatatcctgttcggcactaccgggccgcgcggcggcaaacgcgacggcattgtgcaaacggcagcgaagagcgcggtgcgtcaggtcaccaggcagatagtcaggggaatgctgggaagcttgcttggcggacggaaacgctaa

SEQ ID NO: 255460 - DNA, 963 bp, Klebsiella pneumoniae
gtgggtaccttcgaatccggtaccaccgaatggtatgacgttatttataactacctggacctggaaaaccagaaaggccgcaacggtttcaacgtctataccgaccaggtggccaatgcggattacctctacaacccggaaagcaaactgttcatgtctctggacacgccgcgttctgttaaagccaagggcgagtacgccgcgaagctggggctcgggggaatgttcacctggactatcgaccaggacaacggcgtgctggtgaacgccgcgcgtgaaggtctgggctatgaaatagcttctgaagttatcgatatggagccgttctatttcgaaggcatcaacgtcgatccggcagatgaacaggatgacgatagcgttcagcctgaaccggcgatcaaccacgcgccgaaggctgccattgaactgcgcgttgtgggcggttctaccgtacagctctctggtgaaggttcctctgatgaagataaagacgagattacctggagctggggcgttccttctgaaatcagcgtggcagacaagaccagtgccgtcatcgagttcgtcgttccggaagtgaccgttaacaccaacttccagttcaccctgttcgttcgtgatgcctggggcgagccttcttcccagcagcgttatgtgctggttgccgttccgtcggcgtctcaggtgcagcctgagcctgaagaggacgataccgtggttccggtagagcctgtcgaaccggaagaagacaccacacctgcggaagatgacacttccacggatgacgcgacgacgccttacccgctttgggatgccagcaccatttatggcggcaactggggcacctttgaaaccgtcagctggaaaggccataactaccaggtgaaatggtggtctctgggcgaccagccggatctgaactgcgctgcgggccaggcatggactgaccttggtgcttactga

SEQ ID NO: 255461 - DNA, 3060 bp, Klebsiella pneumoniae
atgacggtctcgattaaaaacagccagatcgatgtgaacagctggtatcaaaaaatcaccttaaccatcaccaatgaaaataacagcgccgtggatatcaatcatgcggccattggttttaccgggtccggacatcaggatccgtggggcaattttggcggtacgcttaaagggaatatgcccctcaccttaagcggtaaagcgcagggaaccctcgacgtcaatgaaatcattattaataacagccaaccgctgctactgcagcccggtgaaagcggcacgttattcttcagctttgccgccactcaggtgccggtcaaaatctcaacttttagcttaaccctggcctcatctgcgcaagatgatagcgctgatgaatctgcggaagaagggctgccggaacctgaagcccccgtcgatgatcaaactgatgatgtcgcgcctgaaccggaagagattatccctgacgatgagggtacggatgagatggctcctgagcctgaagagcaggacgatgatgcggttgtggaaggagagggaatgactgttgtcgcaagcccgctgagcacgaccagctggtatcaacgggtgactctgacgctgaccaacctctatgcccaggctatcgaccttaaccaacttaagctgcagtttaccgccagcgcgcatcccgatccttacagcgcgttcagcggatctttgctcggcaacaagcccgtaacgttgggcagcgacggcggttggccaatcgaaaagaacacgattacgataaataatgatgggcaattctggctaaagggcggcgcaagcgctgagctgcagttctatctttccgctacccaaactccggtcactatgagcggcttaacggcaatcctcgcgcacgacccaggccgtcagggcaagatcaatattcagttcccttcgttaaaacaaaacaccaccctgaagccgacgatcgacctgttctatccggatgcgacttcacgacgctttgcaggcgagtggggagagacgctgaccatcagcgatcttagcgcgggtgagtacacgatcgctgtgctggagctgagtaatgatgatatgcggatcgtacccgttgaatcgacgttcaggctgaagctggctggcggatctgactgccagacctgtcaggtcgcgtatcaggcgccggtacagtttgcttcagtacgccttatcgtcgatgcccctgagtttgccggcgcggaaatggtggttgagctgtggtcggaatctggggtatgcgaaagaaccctgacgatgcccgtcaaccaaatacagctggtggatcggcttatcgccggtcactgctacgagattggcttacagccgacggtaatcaataaccagatgattagccatcccgccagaccgacgatttttacccctgagcagggccaggtgaaagaggtgagcatcggcttccagcagaccggggttgatagtcatgattttgtcgaagttcaggtgacgatactaggtttacctgagggcgtatcgcctcagcgctatcggttctgctgcgggcaatatcaatataccgtgatgctggagagcgatgcccgtctgcaaacgctggcgatgcatctggctcccggacagtatagcgttgagactcccgatgtttacgtcgccggtacaccgtggcgctgtgaacaggatgcgccgctgcggctgctgaaaagcgtcaatcatattacgctcgagtttgtgcagggcgttccactgcaggttaaaggctggccggactatcttgcccacggcggggtgacggtgaatgccgcggataccgtatcgctatatcgcgacgtcccttttagcgccctgtttaaatatgatggttttgacggcggcggcgacccgataccggcggcggaagtggataaaaacggtgacggcttccttgattatgactcgctgccgattcacaaaaccgttccgctggtgcgtgagattgaaaaagaggcggaacgctccgtgatgccggtcatggtggtttataccgctaacgccagcggcggcagcgcgctctcggatcttcaggacggacagcggttacgtaaccactttggtaacttcatcacccagtgtcttgcggcgcagtcctggaaggacgaccagcacgccgttcccgccacctttgtgctgaatccggatttccttggcgcgatacagcaggagccgtacggctataccgcggtacgtaaagcgaatagcgtacaggttaacgttcaactggcggcggcgattaacgctttgcctgctcttccgggattcagcgcgccgctgttgccgacgttctctaacgatctctacggttatgtccaggcaattaactatattgtgcgccagtttgcgccggacgtggccttcggctggcagaccaacgtctgggcgacgggaacggcagactgggtactcagagcaaatgccgatcctgttgcccaggggacagagatagccagctttatcaatgagctgggagtgtatagcggtgagtatgcgccagattttatcgcctttgataaatttgaacgcgattgctttagcccggatgcattagcgcactatggctggaacgcgtcctgctggtttaattatttagggatggtaaaacaagcggctaaagacctgcataaaccggctatgctatggcaaatcccggggggccatatgccaaccgtagacgaaggcaacagtaaaattgccgccgcgcactacgcgtcgggcggaagcttctttatgggcgatgcgcgtattggcagcgatctcaataccatcgcttcggatctgttaaatacgacggtgaatagcgctacttatggcgtagcgacagtcggtgactttttacgccaggataatggctacgactgggggcagatgcaggcgttaaatctccctgactataacgttttctcggtactttggggcggaggctcaacggtaagtattacgacgattcactctaacggtgaagatggcggttggctggcagaaaaaatggtggaatattactcagcgccaaaatattttagctaa

SEQ ID NO: 255462 - DNA, 717 bp, Klebsiella pneumoniae
atgattatggtttttaatgaaaaaatgaaagttgatgttgctgaaaacgataatgagaataccttacactcatatttattttcccagcaggctaaaccttatgcagcgcttgatgcgctcttctccgcattatggtcttttggaaagccttttaatttaaatcctggcgatgagtttttactgaattcttccggagaaagtaaaatagttcttctgcagtccggaattttttcattttgccgctgcggcagcggacttcatgtatgttccgcttttgcgccctctattgtcggattagttgacagctacggggtgacctacgatgttccgacccgaccggagcactttctggtggccgaaaccgagtgcagtggacgtgcggtttctttgcccgactttattaagaccgtcgatgagtgcgatctgtggcacgatgtcgcacgaatacttgcctatcgtctgatggtgatgagcgtacgggatcgggagctggttggtgtggattcttatctgaaggtgcgcgcattattaatcgagctttgggcttatgccagcgaataccgacaaagtattaacgtccttaactttattcaaagacgaacgggcatatcccgtagccgtacgatgaaactcctctctgaacttaagaaagggggttacattagtattgatggcggtcgtttattagacatgaagaaattaccgacagcctattaa

SEQ ID NO: 255463 - DNA, 543 bp, Klebsiella pneumoniae
atgaaaaagcatctattagccatgatggtgactgctatttctgcaggcggcatgatgacttccgcttttgcggatacggcgaccgtttctggtggcactgttaattttgttggccaggttgttaatgccgcctgttctgtttctgctgactccgttgatcaaacggtcaccttaagccaggttcgtgccagcaaattaacggccgccggcatggttgcgaatcaaaaagaagatttctcgatcaaactggaagattgcgataccacggtaagccaggaagccgcagttatttttaacggtcagcaggacggtacgctggccggctcccttgccaacaccgcaggtgctggtgcggctaccaacgtcgctctgcagctgtatggtccggacggccagccgctcaatattggcgatacttctggcaccgtaactttaattgatggtgaaaacgtggttccgctgagcgtcgattatatcgccaccggcgctgtagttgccggtaacgtctctgctaccgctacctttagtatggtgtactcctga

SEQ ID NO: 255464 - DNA, 684 bp, Klebsiella pneumoniae
atgcttaaaagaacaattcaatttctatcgctgttgctggctatcgctggaataataaaccaggcgcacgcgggcggtatcgctctgggatcaacccgcgttatctatccgcagggaagcaagcaggtctctctgccggttattaactcctcggagaacaacgttttcctgattcagtcctgggttgccaatgccgatggtagccggagcgctgattttattattaccccgccgctgttcgtgattcagccgaaaaaagagaacaccttgcgaattatgtacatcggtccgtctttgcccaccgaccgggaaagcgtgttttatctcaatagcaaagcgatcccctcggtcgataaaaccagactggcgaataattcattgcaaattgcgactcaaagcgtcattaaactttttattcgtcctgcggatttgcccgttccttccgcaaatgcgcccgcgatgctgcgctgccatagccaaaacggtcgattaatcgttaccaatccgtcgccctactatgtctctctggttgaaatacatgctggaagccgaaaactgccgaatgccatggtcgcgccgaaaagcgagctgacgttgcagagcagtgaaagccgggtaaccttccagaccgtcaatgattttggtgcgaccacgcctgtacaaacctgccagagccaatcttag

SEQ ID NO: 255465 - DNA, 2670 bp, Klebsiella pneumoniae
atgattttggtgcgaccacgcctgtacaaacctgccagagccaatcttagcgtgcagaaaatggctgctataaagcgtcaatcgccgtctgtcagtaaaccggtgctgatgaccctgactttagtcagcgtgttaacgctgccgaagagctgggcggataactattttaatcccgcgtttttatcagacgatccgtcaaagatcgccgatctttcacgttttgaaggcaacggccaggcgcctggcgtctatcgggtcgacgtctatctgaatggcgcctttcttgccacccgcgatatgaccttctacgaagcgaaaccctccgccaggacgccagccgcagatgactccgggctaagcgcttgtctgacgcctgatatgctcaaagagatgaaggtgaacgttgaggcctttccggggttgttaaagccctcttctcaagggtgcgtggatattgccgccgccattcctgcggccttcgcgcgctttgatttcacccagcagcgcctgaatatcagtattccccaggcggcgatgaagaacagcgccaggggctatattgcacctgaatactgggatgaagggatcaacgcgctattgcttaattacacgtttaccggtgcgaatagccgcgatcgcagcgagggcggcgttgatgcccataccctgtttctcggcctcaacagcggcctgaacctcggcgcctggcgcttgcgtaactattccacctggaacgataacagcggcggcgagagcaataaaagcgactggcagcatatcagcacgtatgtagagcgcgatctgcgcgctctgaaaagcgaactgaccgcaggagatagctatacgccttccgcgatcttcgacagtttgccctttcgcggcattcagctggcttccgatgacaacatgctgcctgacagtatgaaaggcttcgcaccgaccatccacggtatcgctaaaagcaatgcccaggtgaccattcggcagaatggctacaccatcgaccagcgctacgtctctcccggcgcatttaccattgacgacctttactccacggccagcagcggtgatttgagcgttgagataaaagagtccgatggcagcatcactcgctatagcgtgccgtattccgctgtgccaattctgcaacgtgaagggcggttgaaatacgcggccacggcggcgagctatcgcggcgacagcagccagaaagaggacgttaagtttggccaggcgacgctgatatggggcctgccgcacggctttaccgtttacggcgggacgcagtttgccgatcattatcgcgcgctggcgttaggtacgggagccaatctgggcgactggggggcgatttccgtcgacctgacccaggcgcgcagcaccctggctgatgatagcgagcatcaggggcaatccacgcgttttctttacgctaaatcgctgaatagtctgggaactaactttcagctgctcggctatcgctactcaacatcgggtttttataccctcgacgaggcggcgtggaagcgcatgtctggctataacggtccaaccgacgaaaacgaagaccagcgtagctggagcgattactacaacctctattacaccaaacgcggcaagattcagctgaatatctcgcagcagcttgggcgttttggttcgctttatgtaaccggtagtcagcagagctactggcataccggtgagaagaacacgctgctgcaagtgggctatagcgataccctggcgggcgtgtcatggagcctgtcttataaccaaagccgtgccccgggagaggacaagagcgaccagcttattgccctgaatctctcgctgccgctcagccagtggctacatcacagcgatgatatcacccacaagcatcacaatatctacgccacgttcagcaccagtaccgatcggcacggcggcgtcagccaaaatgccggaataagcggtaccgcgctggcgcaaaacaatctcagctatagcgtacagcagggttatcaaaatcatggcgttggcaaaagcggcgccgccagcctcgaatatgatggcgccgaaggcaatgtcaacgtgggctataacaccagcaataacggcgattatcagcagataaattacgggctgagcggcggcatagtggcgcatgcgcacggcttaacgctgagccagccgctgggcgagaccaacgtgctgatcgccgctccgggagcaggcaatgtcaatattgatgacgagccgggcattcataccgatcgccggggctatgcggtggtgccttacgccacgacctatcgccaaaatcgcatggcgctggatgtgaactcgatggcggatgacgtggatatcgacgatgccgtcgtgaacgtcgtgcctacgcagggcgcgctggtactggccagctttaaagcgcgcgtcggcgaacgtgcgctcctgacgctgctgcatgacgggcagccggtaccgttcggcgcgaccgcctcgaccgatgcgtcagcggaggaggcgatcgtcggcgatggcggcgaagtttacctggccggtctgagccctcaggggacgcttaaggtgcagtggggccggggagcttcccgccagtgtctggtgcattatcaacttcccgcaacccggcaggccctggtgcgacaacgcgtggaatgccgctaa

SEQ ID NO: 255466 - DNA, 1008 bp, Klebsiella pneumoniae; identical to SEQ ID NO: 203119

SEQ ID NO: 255467 - DNA, 537 bp, Klebsiella pneumoniae
atgagcttaaaacgcggtctctttttagcgctcctctgcgggagcccattttgccgggccggtgataccggcaataacctggaatttaccggcacgatcgttgcgcaaacctgcgatgtggagatttccagcgtcagccagagtatcgatttggggcagttttcggttgaggattttcccgcaaccggaacgacgacaaaatttaagccgtttaacattaatctgaaaaactgctcccggggaattaccggaaccaaaatctggtttaccggcacggcagacagtgatgatccatcgctgctggcgctgaccgataccggcatgggtaacgaaaatatgctggccagcggcatcggcgtggagctgcttgatgaagatcaagatgatgtcagtatgaataatagcgaatcagtaatttatcccctcaaggccgggcgcaatacgctctccttctacattcgctacaaatcgacacggccagtggtcacctccggcaatgcgacggcggtgatgtatttcgacctgcaatacgaatag

SEQ ID NO: 255468 - DNA, 474 bp, Klebsiella pneumoniae
  misc_feature (116)..(125): n is a, c, g, or t
atgacgggcgtgtctatgtcaccggcacgattaccgacaatacctgcacgctgtcgccggattcagaaaacattaacgtggagatgggcagcgtatcgaaccgtcagttttaccannnnnnnnnnttaccatgctggcgatggttctgcctggcagcctttcgccattgatttgcaaaactgcggcagcaccgtcagcggcgttacggtgagcttcagcgggacggcaaatcagcgaaatacggatctcctggcgcttatcgacgcggcggacgatgccacagggattggcattggcctctatgaccaggataaacatcttattccgccagggcagacgagcgaagtcatcgcgctttctccggggcagacttccgcgcatctgcagttctatgctcgctatatcgcggacggcagcgcggttacggccggaaaggcgaatgcttcagccacgtttatcctcgcctatgaataa

SEQ ID NO: 255469 - DNA, 732 bp, Klebsiella pneumoniae
atgcttcagccacgtttatcctcgcctatgaataaacttcttttttatatcgtgatgatctggctgctgccgatccctgtggctcaggcgggcgtggtgatcggcgggacgcggtttatctatcatgcgcagatgccgaccctaagcgtgccggtgagcaacacctcttctgagagctggcttattgatagccacattcagtcggcgcgacgatggaccggcgcggctattgccgcagggaacagacccccctttatcattacgccgccgttgttccgtcttgcggcagagcaggagaatacgctgcgcgtgacctggaccggcgacgcgctcccccccgaccgggaaagcctgttcacattgagtattgccgccataccctccggtaagcctggcgaccatcatgttcagatggcctttcgttccgcgctgaagcttatctatcgtcctgctggcctggcaggcaatccccagcaggcgtaccgggggctgcgctggacgttgaccccggaggggctgtcggtacagaacccgggcccttattacgtcacgctcttctcgctcaaggccaacggccggcccattgataccgcaggtgtcgtcgcccctttttcgacgcgcaaaaccgactggtgccagcgggcgacccgctgcgaggtgcgctggcaaagcattaatgattatggccgcgtgctgccgccgatagcggcgaacgtactgctggcgcgctga

SEQ ID NO: 255470 - DNA, 846 bp, Klebsiella pneumoniae
atgcacgattcatctttaaagctaagctgcctggcggcgctggcgctgattagcggcgcgatttctttaccggcgcaggcggagaacggcgagccggcgtcgcagattggtccggcggcggaggcctatatcgccagccatccggataaagtcggcgaagccgtagccacgtatctggccaatcacccggaatttctcatcgccgccagcgaaacgctacatcagcggcagcagatcgcccaacagcaggcttacgtacagctggccctgcagtatcaggccgggctgttgagcagcgccagcccatccgttggcccggcagatgcgaaagctgcagtggtcatgttctttgattatcagtgttcatggtgcagcaaaatggcgccggttatcgaggcgctgatcaaagccaacccggatacgcgctttgttttcaaagagttccctattttttcttcgcgctggccggtatcggggctggcagcaaggatcggcgaacaggtgtggttaagcgacggcggcgccaaatatcttgactggcataacgcgctctatgccaccggtaaagtggaaggcgcgctcacggaacaggatgtctatggcctggcgcagcattatctgtcgaaagagaagatcgcggaggtcaagcaggcgcaggatagcggggcggttcatgacgctctgctggcaaatcaggcgctggcccagcatatgaacttttccggtacccccgcgtttgtcgtgatgccacaggcgaaaacgccggaggctaaccgcgtctcggtgatgcccggcagctcctcgcaggatgctctgcagacggcgattcagaaagcgaaaggctag

SEQ ID NO: 255471 - DNA, 300 bp, Klebsiella pneumoniae
atggaaaaaatgcccctcatacatagtgtgatgcccgcgctggtcttgccgctatggtttatcggctgcgcgtgcctcgcctccggcggtcagcttcagttttccggtagcgtgataaccgccgcctgctggaacgaaacgggaacctccgatattttatgccagcgtcaggatcgtcttgagcgtcatatcaccgtggaaaacctcattgtgcccatatcctccccctatgccacgattgaaaagtcctacctggatgaggacaaacagctaacgctgctacgcgtggtctatgactga

SEQ ID NO: 255472 - DNA, 144 bp, Klebsiella pneumoniae; identical to SEQ ID NO: 176974

SEQ ID NO: 255473 - DNA, 1494 bp, Klebsiella pneumoniae
atgaaaaaaacatgtgttgccggcctgattggcctggcattatgcgcaggtagcgccatgcattctgtttatgccgctgatgctaaacatcccaatctggtcatcattctggcagatgatttaggctatggtgacctgggcgcctatgggcatcaaatcgtcaaaacgcccaatattgataagctggctcaggaaggggtgaagttcaccgattattatgctccggcgccgctctgctcaccttcgcgggcgggcctgttgaccggccgcatgccgtttcgtacgggcattagatcgtggatcccggaggggaaaaatgttgccttaggccgtaacgagctgacgattgcgaatctgctgaagcagcagggttacgatacggcgattatgggcaaactccatctcaacgccggcggcgatcgtaccgaccagccgcaggcgaaggacatgggctttgactacaggctggtcaataccgccgggttcgtgagcgactcaacgctggataacgccaaagagcgtcctcgctacggcatggtctatcccaccggttttacccgcaacgagaaacctatcggtcgcgcgaagacgttcagcggcgagctggtgagttcggaagtcgtcaactggctggataagaagaaagataacaaccccttcttcctctacgtcgcctttaccgaagtgcatagcccgctggcctcgccgaagaaatatctcgatatgtatgcgccttatattagcgcttatgcgaagcagcacccggatctgttctacggtgattgggcggataagccctggcgcggcgccggtgagtactatgccaacatcagctatatggatgctcaggtagggaaagttctcgacaagattaaagcaataggtgaagaagataacacgatcgtaatttttaccagcgataacggcccggttacccgcgaagcgcgaaaagtttatgagctgaaccttgctggtgaaacggatgggctgcggggtcgtaaagataacctgtgggaaggcggaattcgcgtcccggcgattatcaaatatggtcaccatattccgcaggggatggtctcagaaacgccgatgtcgggtctggactggatgccgacgctggcgcagatgatgaacttccctctgccgaaggaccgtacctatgacggccagtcaatcgtaccggtactggagaagcaagcgttcaagcgggaaaaaccgctgattttcggtatcgatatgccgttccaggacgatccgaccgatgaatgggcgattcgcgacggcgactggaaaatgattattgaccgccaaggtaaggctaaatacctctataatctgaagcaggatcgcgcagaaacgctaaatcaaatcggtaagcagcccgaaattgagcagcggatgttcgctgagtttctgaaatataaaaatgacatcgataatgattcactgatgaaagcccgcggcgataaaccgacgccggtgacctggggctga

SEQ ID NO: 255474 - DNA, 1263 bp, Klebsiella pneumoniae
atgtttaacgacgttaatgttaatagttgcaaaacgcccggttgtaaaaatcttggcgtgcttaatagccctgattaccttcgtcagggagaaaatatcctgtgccgggaatgcggctttctctttccgcccatttcggcgatttcccttaacgcttttcgccgcacggtaaaccagggatggaaggggctggttaagcagtgtccgggatgcggcagcgtttctctaaaacgctacggctactcggcgcagggcgagcggcgtatggcatgtcgcgactgcagcaagaccttcgtgataccggacagcctgaccctcacgcctcgccagcaggagcttgccgctctcatccagcaaggcagctcgcttaacgatattcgcactctactggctatcgataacactacattaggccgcgaattagctaacctctcttatcgcgcggacctggcggagcgcgcttttgactttccggcgtttgatattgttctcaccacccgggcgtttagccttggttttaacggtggagagaatcggctgtatgtgctggtcaccgctgaggaaaaaagcggtaaagtggtggctatctcgacgaactatactccacgcccggttgagccggcgtatcagtatcaatcgcaatatgaagaacgactgcccccaggcacgctggcgtatctcgtgcaacgcaaagaaatgctcactatgcggcgtcgtggcgcgctgtttgatattgattacgggccgggaacgttgcaccggcatgtgcgaggtatgctggttaaacccgtattgccggcctatcgacattttgaactggtgcgaatgttaaccgatgagcgttcgctaaatgtgcagcattatctcgatcatgagtgtttcatccttggcggatgtatgatggcaaacctggcgcaggtccggcaggggcgctgccatatctcattcgtcagagaacgcggtgtaaacccccctcagggcgaaatgccaccgcgactgttctacagcggcgggatccgcaacaatgtctggcgaacattctccacgcgggactacgccatggccgtttgtaacctgaccggaagtaagaaaaccggcctgttacggcatgcgaccctgcgaagcgccagcgaatttatagactatatttatcgccatcctttccttccctggctcaccaggatgtcgcctgccaacgtgacgtctgcgctaaatcatttgaaatatgaatataacaaccgtctttcctgcctgcctttttaa

SEQ ID NO: 255475 - DNA, 1176 bp, Klebsiella pneumoniae
gtgaaacatctacagcgtttttttcatagcgaggcatccggggggataatcctcatcttcgccgccgctatggcgatgctattagccaatacgggcctgaccagcggcctgtatcgctcttttctggagacgcccgttcagctgcgcgtaggcgcgttagagatcaacaagaacatgctgttgtggataaacgacgcgctgatggcggtatttttcctgcttataggtctggaagtaaagcgcgagatgaaacagggcgcgttggccagccgtcgccaggccgtatttccggtcgtcgcggcgttgggcggcatggtggttccggcgttagtctatctggcatttaacggccaggatgcgattgccagagaagggtgggcgattccggctgcgaccgatattgccttcgcgctgggcgtactggcgctgctgggcaatcgggttcccgctgcgctgaagatctttctgatggcgctggccatcatcgacgatctgggcgccattattattattgcgttgttctacacgcacgatctttccgtggtgtcgttggttgtcgctgccggcgccattatggtgctggcggcgctgaatctgagcggcgtacggcgtaccgggatctatattctggtcggcgccatactctggactgcggtgctgaagtcgggggttcacgcaacgctggctggcgttattgtcggctttatgatcccgctaaaagagcagaacggtaaatcgccggcgaagcagcttgagcacgtgctgcatccgtgggtggccttcctgatcctgccgctgttcgccttcgctaacgcgggcgtttctttgcagggcgtcacggtagaagggctgacctcgctgctgccgttaggtattattgccgggctgtttatcggtaagccattgggaattagcgtattctgctggctggcgctgaagctgaaatgggcctcgttgccggaagggacaacctgcaagcaaattatggcggtcggcattctatgtgggattggcttcacaatgtcgatttttattgccaccctggccttcggcagcgtcgaccccggattgatcaactgggccaagcttggcatcctgattggatcgatattatcggcagtcacgggatacatcatactgcgtaagcgcgtaacggattcgggctacgcggcttaa

SEQ ID NO: 255476 - DNA, 282 bp, Klebsiella pneumoniae
gtggtgaaaatccgcaacgcgaagcacaaaagcgataccgcgccgctggacgccgagtgtgattgctatacatgtcgcaattattcacgcgcttacttgcatcacctcgaccgttgcaacgaaatattgggcgcgcgtctcaataccattcataacctgcgctactatcagcgtttaatggctggtttacgcaaggctatcgaagagggtaaattagagagcttcgtgaccgatttttaccaacgtcaggggcgcaccgtgcctcctttgaacgttgattaa

SEQ ID NO: 255477 - DNA, 702 bp, Klebsiella pneumoniae
atgtctttaagcgcacagcagttggcggcacaaaagaacatctcctgggtattagcggagaaactagctcaaaaaatcctgaccggggaatacccgccagaaagtatccttcccggagagatggaactgggtgagcagtttggcgtgagccgtacggccgtgcgtgaagcggttaaaacgcttgctgcgaaagggatgcttttacctcgtccacggatcggaacgcgggtgatgccccgcagcagctggaactttctcgataaagaactactcgcatggtggttaacggaagataatttcgctgaagttgtcggccatttcctcgttatgcgcgaaagcctggagccccaagcctgttttctggcgtcaacctcaggcacgccggagcagaaggctcaactcaacgctttgatggaggagatggttgagctaaagaggaactttcagcgcgagcgctggattgaggtcgatatggcctggcatgaacatatatatgaaatgagcggcaatcctttcctgacctctttcgcttctttatttcattcggtttaccacacctacttcacttcgattacccaaaatgaagtggtgaagctggatctccatcaggcaatcgttgatgccattctggatagcgacggcttgcgagcgctgagcgcctgccaggcgttgttgagtgcccccaaccattccgacaaatag

SEQ ID NO: 255478 - DNA, 1398 bp, Klebsiella pneumoniae
atgaccaaaaagaaagcccgcagtatggccgggctgccatggatcgcagcgatggctttttttatgcaggcgcttgacgctaccattctgaatacggcccttcccgctatcgcccatagccttaaccgttcaccgcttgcgatgcaatcggccattatcagctacacgttgacggtagccatgcttatcccggtcagcggttggctggccgaccgcttcggcacgcggaaagtatttatcatcgccgtcagcctgtttaccctcggttccctggcctgcgcgctttccaactccctgatggaactggttatcttccgcgtcattcagggcatcggcggagcgatgatgatgccggttgcgaggctggcgttactgcgcgcctatccgcgcagcgaactgctgccggtactcaacttcgtcaccatgcctggcctggtcggccctatcctcggccccgtgctcggcggcgtactggtgacctgggcaagctggcactggatattcctgattaatattcccatcggcattatcggaatcgtctacgctcgcaagtacatgccggatttcaccacgccacgacggcgcttcgacacgctcggttttatcctctttggcctgagcctggtgctgttttccagtggaatcgagctgtttggcgagaagattgtcgccacctggatggctctggccgttatcgccctgagcatcgttttactgtgggcctatattcgccacgctcgccgtcatcccacaccgctcatttcgctatccttatttaagacgcataccttctctgttgggatcgcgggaaacctggccacgcgcctgggcactggctgcgttccgttcctgatgccgctgatgctccaggttggcttcggctatccggcgattattgctggctgcatgattgcgcctacggctatcggttccattattgcgaaatcaaccgtcacccagatacttcgctggttcggctaccgtaaaacgctggttggggtcacggtattcatcggcctgatgattgctcagttttcgctgcaatctccggatctgtcgatctggatgctgctgctgccgctattcgttctggggatggcgatgtccactcagttcacctcaatgaataccatcacgctcgccgatttaaccgatgaaaacgccagcagcggcaacagcatgctggccgttactcagcaactctctatcagtctcggggtcgccgttagcgcggcggtgctgaggttttatgaaggatttgatagcgcaaataccattgagcaatttcattacacctttattaccatgggggctatcaccgtggtatcggcgctggtatttactttattaagagcaaaagatggccgcaacctgattaaggagcggcataagcgttag

SEQ ID NO: 255479 - DNA, 984 bp, Klebsiella pneumoniae
atgaaggatgtagcccgcatagcgggcgtttccacttcgacggtttctcatgtcatcaacaaagatcgtttcgttagcgaagcaattaccgctaaagtcgatgccgcgattaaaagcctgaactacgcgccgtctgcgctggcgcgcagccttaaattaaaccaaacccgtaccataggcatgcttattaccgccagtaccaacccgttttattcggagctagtgcgcggcgtggaacgtagctgctttgagcgaggctatagcctggtgctgtgtaataccgaaggcgatgagcagcggatgaaccgtaatcttgagacgctgatgcaaaagcgcgtcgatggtttactcctgttgtgcactgaaactcatcagccttcgccggaaattatgcagcgctatccttctgtaccgacggtgatgatggactgggcgccgttcgacggcgatagcgatctgattcaggataactctctgctcggcggcgatatggcgacccagtatctgattgaccagggctatagtcggattgcctgtatcgcgggtccgctggataaaacgccagcccgattgcgcctggagggatatcaggctgcgatgactcgagccggacttgcggtaccggaaggatatgtgattagcagcgattttgaatttggcggcggattcagcgccatgcagacgctgctgacgctgtcagagctaccgcaggcagtatttgtcggtaacgatgcgatggcggtgggcgcctatcaggccctttaccagagcggcctgcgtattccgcaggacatggcgctggtgggttatgacgacatcgaactggcgcgctatatgacgccgccgctaaccacaattcatcaaccgaaagatgagctgggcgaactggccatcgatgtgctgattcaccgcatggccgatccgggacaaaaacagcagcgcgtgcagttaacgcctgagctggtggttcgtggctcagcctaa

SEQ ID NO: 255480 - DNA, 930 bp, Klebsiella pneumoniae
atgaaaaccgcaggcaaacttgtcgtccttggcagtatcaacgccgatcacatcctgaatctcgacgccttcccaacgcctggtgaaaccgttaccggtcatcactatcaggtcgcttttggcggtaagggcgcaaaccaggccgttgctgccggacgcagcggggctaatatttcctttatcgcctgtaccggcgatgacgacattggcgagcgcgttcgtcaccagctggaaagcgacaatattgacgtttcgccggtcagagccgtcaccggagaatcaaccggcgtggcgctgatttttgttaacgctgaaggtgagaatactatcggtattcatgccggtgctaatgccgcgctctccgttgcgcaggttgatgcggaaaaagagcgtattgctggcgcgcaggcgctgctgatgcagctggaatcaccgctggaaagcgtactggccgcggcgaaaatcgctcaccagaatcaaacctcagtcatcctcaatccggcgccggcacgtgaattgcccgatgagctgctctcgctggtagatatcattacccctaacgagaccgaagcggaaaagctcaccggcgtgcgcctggaaagcgacgatgatgcggcaaaagccgccaaagtgctccatgataaaggtatcggtacggtgatcattacccttggcagccgtggcgtatgggccagctgcgaaggtgaagctcgtcgggtgcccggctttaaagtgcaggcggtagataccatagccgctggcgatacctttaatggtgcgctggtcaccgcgctgcttgaaggtagtgaactggcgcaggcgattcgttttgcccatgccgccgccgctatcgccgtcacccgcaaaggggcccagccctccgtgccctggcgaaaagaaatagacgaatttttacgtcaacaggggtaa

SEQ ID NO: 255481 - DNA, 891 bp, Klebsiella pneumoniae
atgaatatgaaaaaactggcgaccctggtctctgctgtagcgttaagtgcgaccgtaagcgcaaacgcgatggcaaaagatactatcgctctggttatctctacccttaacaacccgttctttgtctcgctgaaggatggcgcgcaaaaagaagcggacaaacttggctataacctggtggtactggactcccagaataacccggccaaagagttggctaacgttcaggatttaaccgttcgtggcaccaaactgctgctgatcaaccctacggattccgatgcggtgggtaacgccgtgaagctggctaatcaggcgaaaattccggttatcaccctcgaccgtcaggcgtcaaaaggcgacgtggtaagccatattgcatctgacaacgtgctgggcggtaagatggccggtgactatatcgcgaagaaagtcggcgaaagcgcgaagatcattgaactacaaggcattgccgggacctccgcggcgcgcgaacgtggtgaaggtttccagcaggccgttgctgcgcacaagtttaacgtactggccagccagccggcagattttgaccgtaccaagggtctgaacgtcatgcagaacttgctgacggcgcatcctgatgtgcaggcggtatttgcccagaacgatgaaatggcgctgggcgcgctgcgtgcgctacaaacggcaggcaaatctgatgtgatggttgttggatttgacggcacgccggatggcgaaaaagcggttaatagtggcaaactggctgcgaccatcgcccagctaccggagcagatcggcgttaaaggcgttgagaccgccgataaagtgctgaagggcgaaaaagtggataccagctacccggttgagttgaaactggtcattaagcaataa

SEQ ID NO: 255482 - DNA, 966 bp, Klebsiella pneumoniae
atgaataacccggctgtttctggtcgtcgctacttcacaaaagcgtggctgatggagcaaaaatcgctgattgccctgctggtgctgattgcgattgtctcgaccatgagccccaacttttttaccgtgaataacctgttcaatattctgcagcagacttcagttaacgccattatggcggtagggatgacgctggttatcctgacgtcgggtatcgacctgtccgtcggttctctgctggcgttgaccggcgcggttgctgcttcaattgtcgggattgaggtcaacgcgctggtggccgtggccgctgcgctggcattaggcgcggctatcggcgccgtgaccggcgtgattgtggcgaaagggcgcgtgcaggcatttatcgctacgctggtcatgatgctgctgctgcgcggcgtgacgatggtgtataccaatggaagcccggtaaataccggctttaccgacaacgccgatctgttcggctggttcgggattggtcgtccgctggggatcccaacgccggtgtggattatggcgatcgttttcctggccgcctggtacatgctgcaccatactcgcctgggccgttatatttatgcgctcggcggtaacgaggcggcaacgcgcctttccggcatcagcgtgaataaagttaaaatcatcgtctattctttgtgcggcatgctggcctcgctggccgggattattgaggtcgcgcgtctctcttccgcgcagccgacggcgggcacaggatatgaactggatgcgattgcggcggtggtgctcggtggtaccagcctcgcgggcggtaaaggccgtattgtcggcacgctgattggtgcgttgatccttggctttctgaacaacggcctgaatttattaggcgtttcatcctattaccagatgatcgtgaaagcggtggtcattttgctggcggtactggtagataacaagaagcagtaa

SEQ ID NO: 255483 - DNA, 1506 bp, Klebsiella pneumoniae
atggaagccttattgcaattaaaagggatcgataaatcgttccctggcgtcaaggcgctctccggcgcctcgctaaacgtatatccgggccgcgtgatggcgctggtcggggaaaacggcgccggtaaatccacgatgatgaaagtgctgaccggcatttactcccgcgatgccggttcgctgctgtggttgggtaaagagaccaccttcaacggtcccaaatcttctcaggaagccggaattggcatcatccaccaggagctaaacctgatcccccaattgacgatcgccgagaacattttcctcggccgtgaatttgtgaatcgctttggcaaaatagactggaaaacgatgtacgccgaagccgataagctgctggcaaagctgaatctacgttttaacagccagaagctggtgggggatttatcgataggcgatcagcaaatggttgagatcgctaaggtgctgagctttgagtcgaaggtcatcattatggatgagcccaccgatgcgttgaccgacaccgagaccgaatccctgttccgcgtaatccgcgaactgaaatcgcaggggcgcggtattgtctatatctcccaccgtatgaaagagatcttcgagatttgcgatgacgtcacggtatttcgcgatgggcagtttatcgccgagcgtaaagtggccagtctggatgaagatctgctgattgagatgatggtcggccgtaagctggaagatcagtacccgcatctggacaaagccccgggcgctgttcgtcttaaggtcgacaacctgtgcggttcgggcgtggaaaatatctcctttattctgcgtcagggcgagattctcggcgtcgccgggctgatgggcgccgggcgcaccgagctgatgaaggtgctgtacggtgcgctgccgcgcagcagtggttcggtcacactggatggacgcgaagttgttacgcgctccccgcaggatggtctggccaacggaatcgtctacatctcagaagaccgtaagcgcgacggtttagtgctcggcatgtcggttaaagagaacatgtcgctgaccgcgctgcgttacttcagccgcggcggcggtagtctcaagcacaaagatgaacaacaggcggtgagtgattttatccgcctgtttaacgtgaaaacgccttcgatggagcaggccattgggctgctttccggcggtaatcagcagaaggtcgcgatagcccgcgggttgatgacccgcccgaaggtattgatccttgatgagccgacccgcggcgtggatgttggggcaaagaaagagatataccagctgattaaccagttcaaagccgaaggtctgagcatcattctggtctcttcggagatgccggaagtgctgggcatgagcgatcgcatcatggtgatgcatgaagggcatctcggcggtgaattcacacgcgagcaggccacccaggaagtattgatggctgccgctgtgggcaagcttaatcgtgtgaatcaggagtaa

SEQ ID NO: 255484 - DNA, 420 bp, Klebsiella pneumoniae
atgaaaaaaggtaccgtcctcaatgctgaaatttcgtcggtcatctcccgcctgggtcataccgatacgctggtagtttgcgatgccgggttacctgttccccgcagcagcgcccgtatcgatatggcgttaacccacggggtgccctccttcatgcaggttctggaggtggtgacgagcgaaatgcaggttgaagcggctatcctcgcggaagagattaaaacgcttaatccgcagctccacgcgacgttgctcaatcatcttgagcagctgcagcaacaccagggaaacaccattgaaattcgttacaccagccatgagcagttcaaaaaagaaaccgcagatagtcaggcggtgattcgcagcggggaatgttccccgtatgcgaacgttattctctgtgccggcgtgacgttctga

SEQ ID NO: 255485 - DNA, 1869 bp, Klebsiella pneumoniae
atgagcactgataataagcaatcgctgccggcaataacgctggcggcaatcggcgtggtatacggcgatatcggtaccagtccactgtatacacttcgtgaatgtctgtccggccagtttggctttggcgttgagcgtgatgctgtttttggcttcctgtcgctcattttctggctattaattctcaccgtatcactcaaatacatcaccttcgtgatgcgggcagacaatgccggcgaaggcgggatcctgacgttaatgtcgctggcggggcgaaacacttccgcgcgcgcaacctccatcctggtgatccttgggcttatcggcggcagcttcttttatggcgaggtggtgattacgcctgctatctcggtgatgtcggcgatagaggggctggaaattatcgccccggatctggatacgtgggtggtccccatatccatcatcgttctgacgctgctatttgccattcaaaagcacggtaccagcatggtcggtaagctgttcgcgccgattatgctgatctggttcctgctgctggcggtactgggcgcgcgcagtatctttgctaacccggaagtgctgcaggcgctgaatccttactgggcggtacactttttcctcgaatataaaaccgtctcgtttgtggcgctgggcgcggtagtgctgtcgattaccggcgtggaggcgctgtacgcggatatggggcattttggtaaactgccgattcgcctggcctggttttcggtagtactgccttcactggtgcttaactactttggtcagggcgcgctgctgctcaaacacccggaagcgattaaaaacccgttctttctgctggcgcccgagtgggcgctcattcccatgctgattattgccgccctggcgacggttatcgcttcacaggcggttatctctggtgtcttctcgctaacccggcaggcggtgcgcctggggtacctgtcgccgatgcggattattcatacttcggaaatggagtccgggcagatttatattccgtttatcaactggctgctctatatctcggtggtcatcgtcattgttaactttgagcactcctcgaatctggcggcggcctacggtattgcggtgacggggacgatggtgctgaccaccattctgttcacgacggtagcgcgtcaaaactggcactggaataagttcgttgtggcgctgctgctggttgcctttatgtgcattgatatcccgctcttctccgcgaacctcgataaaatcgtctccggcggctggctgcctctgaccctcggcctggtgatgtttaccatcatgaccacctggaaaagcgagcgtttccgccttctgcgtcggatgcatgagcacggtaattctctggaagcgatgatctcttctctggagaaatcgccgccggtccgcgttccgggtaccgccgtctatatgtcgcgggcgctgaacgtcattcctttcgcgctgttgcataaccttaagcataataaggtgctgcacgagcgggtgattttgctcacgctgcgtactgaagatgcgccgtacgtgcataacgttcgacgcgtacagattgagcagatttcgccatcgttctggcgcgtcgtagccagctacggttggcgggaaacgccgaatgtcgaagaagttttccaccgctgtgggctggaaggcctgagctgccggatgatggagacctccttctttatgtctcatgagtcgctgatcatcggcaagcggccatggtacctgcgcctgcgcggcaagctttatcttctgctgcagcgcaacgctctgcgagcgcctgaccagttcgaaatcccgccgaaccgggttattgagctcggcacccaggttgaaatctga

SEQ ID NO: 255486 - DNA, 1500 bp, Klebsiella pneumoniae
atggctcaatcacatttactggcagaaagaatttcccggctcagcgccgctctggaaaaaggactcttcgaacgcagccacgccattcgcctttgcctgcttgccgcactcagcggcgagagcgtttttctgctgggtccaccgggcatcgccaaaagtctgatcgcccgacgcctaaaattcgccttccagcaggctcgcgcatttgagtacctgatgacgcgtttttccacgccggaagaggtttttggcccgctctccattcaggcgctaaaagatgaaggacgctacgagcgtttgaccgcgggttatcttccggaagccgaaattgttttcctcgatgagatctggaaagctggcccggcgatcctcaatacgctgctgacggcaataaacgaacgtcatttccgcaacggggcaaccgaagaaaaaatccctatgcgcctgctggtggcggcgtcgaacgaactccccgaagcagacaacagcctggaggcgctatacgatcggatgcttatccgtttatggctggataaggttcaggataaaaccaacttccgctcaatgctgataagccagcaggacgagaacagtaaccccgtcccggcgaatctacaggtcagcgacgaggagtttcagcaatggcagcaggatatcggcagcgttaagctgccggacagcgtttttgaacttattttccagctgcgccagcagttagatacgctgccgaacgcgccgtacgtctcagatcgtcggtggaaaaaagccattcgtctgctgcaggccagcgcctttttcagcggccgcgacactatcgcgccaatagacctgatcctgctgaaagattgcctgtggcacaatattgagacgatgaacctgatgtccgcgcagctggagaccttaatgaccagccacgcctggcagcagcaggcgatgctcactcgcctggggtcgattatccaacgacgtattcagcttcaacagcagcaaagcgataaaaccgcgctaaaagtaaaccgtcttggcggtatgttcagccgtaaacctcattatgaactgcccgctgaagtgcaggaacccacgctgacgctgctcctccagcagccgcttaagctgcacgacctggaagtgattcatattacgtttgttcgtgaagagcttgctcactggctggagaaagggggtgagattcgcggcaagctcaacggtatcggttttgcccagccgctgaatatggatgtcgataccagccagcatctggtcgtgcgcgatgtcagcttacaggggtcgcgactttccctgcccggtagcgaatcgcgggaaaatatgccggccgaaatccggcagcagctggaagcgctggacgacgaatggcatcagcaacataaccgcttcagcgaacagcagaaatgtctgtttattcccggtgagtggctgggacgcattgaggccagcctgcaggacgtcggaacgcagattaaacaggcgcgtcagtcatga

SEQ ID NO: 255487 - DNA, 1449 bp, Klebsiella pneumoniae
atgacgctggacatgctgaatgtcatgctggcagtcggcgaagagggtatgatcgatgagatgctgctggcgctgctggcggcacctcaactggcggtattctttgaaaaattcccgcgcctaaaaaatattatcgccgccgacattccgcgctggcgggaagcggtcagatcgcgactcaaagagaccaatatcccccccgagctggatgcggaggttcagtgttatcagcaatcacagcggctttctacctcgcagtttatcgtccagcttccgcaaattttgagccagctgcataagctgcactccccttttgccagccaggcccagcagctggtggataacaacagcacctttacgccagcgctgcacacgttattcctccagcgctggcgcttgagtctggtggtgcaggcaacctcccttaatcagcaactgctggatgaagagcgcgatcagctactgagcgaagttcaggaacgcatgaccctcagcggccagctggagccggtgctggtggaaaatgacaatgcggcggggcacctgtgggacatgagcgctggcgagctgaagcgaggcgactatcagctgatcgtgcgctacggcgactttctaagccaacaacccgagctcatgcagctcgctgaacagctgggacgctcacgtgaagcgaaagcggtgccgaaaaaagatgcgccgatggaaacctttcgcagcctggtgcgcgaaccggccaccgtaccggagcaggtggacgggcttcagcagagcgacgatattctgcgtttgttgccgccagagctggctaccctcggtatcaccgagctggagttcgagttctatcgtaagctggttgaaaagcagctgctgacctatcggcttcacggcgatgcgtggaaagaaaagatcaccgaacggccggtcactcgccaggattttgatgaacagccgcgcggaccctttatcgtctgcgtcgatacttccggctcaatgggcggttttaatgaacagtgcgccaaggcgttttgtctggcgctaatgcgggtcgctctggcggataaccgccgctgctttattatgctgttttccagcgaggtggtgcattacgaacttaccggcccgcaggggctggaacaggcgatccgctttctgagccagcgcttccgtggcggcaccgatctggccagctgttttcgggcagtgattgagcgtatgcagaatccgcagtggatcgatgccgatgctgtagtcatttcagattttatcgcacagcgcttgccggatgaggtgatcaataaggtgggagagctacagcataaacatcagcatcgctttcatgcggtggcgatgtcggtacacggcaagcccggtattatgcgcattttcgatcatatctggcgctttgataccgggctgcgtagccgcctgctgcgacgctggcggcgctaa

SEQ ID NO: 255488 - DNA, 993 bp, Klebsiella pneumoniae
atgaaaaccgcatacatcgcaaaacaacgccagattagtttcgttaagtcacacttttcccgtcagcttgaagagaagctcggcctgatcgaagttcaggcgccgatcttaagccgcgtgggcgatggaactcaggataacctttctggttgcgaaaaagcggttcaggttaaagtgaaaacactgccagacgcccagttcgaagtggttcattcactggcgaagtggaagcgtcaaaccctgggacaacacgacttcagcgcgggcgaagggctgtacacgcacatgaaggcccttcgccccgatgaagaccgattaacgcccatccattccgtttacgttgaccagtgggactgggagcgcgtaatgggtgacggagaacgccactgcggaacgctgaaatcgaccgttgaagcgatctatgccgggatcaaagctaccgaagacgccgtcagtaaagaatttggcctcaagccgtttttgccggagacgatccagtttgttcatagcgaggagcttttaagccgctatccggatcttgatgccaaaggtcgtgaacgggcgattgctaaagagctgggggcggtattcctgatcggtatcggcggcaagctttccgatggtcagcgccacgacgttcgcgcgccggattatgatgactggagcacgccggctgctgaaggctatgccggtctgaacggcgatattctggtatggaacccggttctggaagatgccttcgagctctcttcaatggggatccgcgtggatgccgaagcgctgaagcgccagcttgcgattaccggtgatgaagatcgcctgcagctggaatggcaccaggcgctgctgcgcggagagatgccgcagactatcggtggcggcattggtcagtctcgtctgacgatgctgctcctgcagcttgaccatatcggccaggtacagtgcggcgtatggccgacacaggttcgtcaaagcgttgccgctcttctttaa

SEQ ID NO: 255489 - DNA, 459 bp, Klebsiella pneumoniae
atggaaaattatcagatcgacaatctggaccgcggcatccttgaggccttaatggccaacgcgcgcaccgcttatgctgaactggcaaaacagtttggcgtcagtccgggaaccattcacgttcgcgtggagaagatgaagcaggccggaattatcactggcgcacggattgacgtgagcccaaagcagctgggctacgatgtgggatgttttatcggcatcattctgaaaagcgccaaagactatccctcggcgctggcgaggttaaacagtctggatgaggttaccgaagcgtattacaccaccgggcactacagcatctttataaaagtcatgtgccgatcgatcgatgcgctccagcatgtacttatcaacaagatccaaacaattgatgaaattcagtccaccgaaacgctgatcgtgctgcaaaacccgattatgcgtaccatccgcccgtga

SEQ ID NO: 255490 - DNA, 441 bp, Klebsiella pneumoniae; identical to SEQ ID NO: 173967

SEQ ID NO: 255491 - DNA, 1890 bp, Klebsiella pneumoniae
atgttttatcaggatccttttgacgtcatcatcattggcgggggtcatgcaggcactgaggccgcaatggctgcagcgcgaatgggtcaacagactctgcttttgacacacaatatcgacacgctggggcaaatgagctgcaacccggcaattggcggcattgggaaaggacacctggtaaaagaagtggatgcgcttggcggcctgatggcgaaggccattgaccatgccggtatccagtttaggatactaaacgccagcaaaggcccagccgtacgggcgactcgcgctcaggccgatcgcgtgctttatcggcaagccgtacgcacggccctggaaaatcagcctaatttgatgattttccagcaggccgttgaagatctgattgttgagaacgatcgcgtggtgggtgctgttacccagatggggcttaaattccgcgccaaagcggtagtgctgaccgtagggacattcctcgacggtaagatccatatcggactcgataactacagcggcggtcgcgcaggcgatcctccgtcgatcccgctgtcccgccgtttacgtgaactgccgctacgcgtcagccgcctgaaaaccggtaccccaccgcgtattgatgcgcggaccattgatttcagcgttctggctcagcagcacggcgacgatccaatgccggttttctcgtttatggggaatgcttcccagcacccgcgtcaggtaccatgctatgtcacgcataccaacgagaaaacccacgacgtgatccgcaataacctcgatcgtagcccgatgtatgccggcgtgattgaagggatcggccctcgctactgtccttcgatcgaagacaaggtgatgcgttttgccgatcgtaatcagcatcagatcttcctcgagccggaaggactgacgtcgaacgaaatttatccaaatggcatctccaccagcctgccgtttgatgtccagatgcaaatcgtccgctcaatgcaggggatggaaaatgcaaaaatcgttcgccccggctacgctatcgagtacgatttcttcgatccgcgtgacctgaaaccaacgctggaaagtaaatttatccatggcctgttctttgcgggccagattaacggcactaccggttatgaagaagcggccgctcagggcctgctggcaggcctgaacgcagcccgcttctctgccgagaaagagggatgggcgccgggtcgctcccaggcctaccttggcgtcctggtggacgatctgtgtacgctcggcaccaaagagccgtaccgcatgtttacttcacgtgcggaataccgcctgatgctgcgtgaagacaacgccgatctgcgcctgactgagcaaggccgtgaactgggtctggtagatgatgaacgctgggcgcgtttcaacgagaagcttgagagtattgaacgtgaacgtcagcgcctgaaatccagctgggtaaatccgctggcggaaagtgccgctgaagttaacgcacagctgacggcgcctttgtctcgcgaagctaacggtgaagatttgctccgtcgtccggaaatgacctacgaacagctggtgaaaatgtcgccattctcgccgggtcttgaagacaagcaggccgcggaacaggttgagattcaggtaaaatacgaaggctacatcgcgcgccagcaggatgagattgagaaacagcagcgcaatgaaaacacgttgctgcctgccacgcttgattatcgccaggtgaatgggctgtcgaacgaagtcattgctaagttgaacgaccacaagccgtcttcaatagggcaagcatcgcgtatttccggcattacgcctgcggcaatctcgattttgctggtgtggttgaaaaagcagggaatgctgcgccgtagcgcctga

SEQ ID NO: 255492 - DNA, 624 bp, Klebsiella pneumoniae
gtgatcaacaaactttctcgtctgcttgatgaagcgggtatttcacttaccgatcaccagaaaaatcagctggtcgcctatgtaggcatgctggataagtggaataaggcctataacctgacctcggttcgcgatccggatgagatgctggtacgccacattctcgatagcattgttgttgcgccataccttaaaggaacgcgttttatcgatgtgggtaccggaccgggtctgccggggatcccgctgtctatcgtacgtcctgaatctcatttcaccctgctggatagcctcggtaaacgagtacgtttcctgcgacaggtccagcatgagttaaaactggataacatcacgccggtacaaagccgcgtggaaacgtttccggctgaaccgccgtttgatggcgtgatcagccgcgcttttgcgtcgctgaatgatatggtgagctggtgccatcatttaccggcgcaggacggtcacttctatgcgctcaaagggttagcgcaagaagatgaaatggccaatcttccggaagggtttgccattagtgatgttttcgaactgcatgttcctcagctggatggtgagcgtcaccttgtggtgatccagccaaaaatgatttaa

SEQ ID NO: 255493 - DNA, 537 bp, Klebsiella pneumoniae
atgggtgctttcgcgcccggaaaccgccgctaccttgtaccccagctgatgcagcaaagcgactgcggtgctgccgacgccgccgctggccccggtaactacaatttcgccatcttcaggacgaattccggcatcttccagcgccatcacgcacagcatggcggtgaagcccgcggtaccaatggtcatggctttacgcccattcagtccttgaggcattgctaccagccagtcgcctttaacgcgagcgcgttccgccagaccgccccagtggttttcgccaacgccccatccggtgagcagcacctgctggcccgcatgaaagcgaggatcttcgctgctgtggaccgaaccggcaaaatcgatgccaggaatcatcggaaagttgcggatgatttttcctttaccggtgatcgccagcgcatctttatagttaaggctggaccactcgatatccactgtcacatcgccctgcggcagctggctggcgtcaatggtttgcaccgaagagagagttttgccatcctgctgttctaa

SEQ ID NO: 255494 - DNA, 1983 bp, Klebsiella pneumoniae
atgtttatcgggcactcattcactcgcggagttaacacagggatgcgattaacgacgaaattctcagcctttgtcacgttactcaccagcctgactatctttgtcacgctgattggcgcttcgctgagtttttataacggtattcagataaaaatgaccaaccgcgttcaggcggtggcaacgatgctggataaccgcctggtctctatatcttttgaccagttagaaccgcagatggatgagctgatgacgccggtcgaagtcgtgcacgttgattttcagcttaatggcaaatcggtctatagccattcccgcaacgataactatcgtccgttaggcagcagcaatcagttccgtagtatcaccgtgccgtcgctcaagcacccgggcatggttatccatttggtttatctggatccgatggccaattatttccgttcgctgcacgttaccgcgccgctttccatcgccattggtttcatggtgctgattatctttttttccgtgcgctggatccgtcgtcagctggcgggccaggagctactggagcttcgctctgtgcgtattcttaacggcgaacgcggcccgcaggtgcgcgggtcggtacacgaatggccagtcaacaccagcagtgcgttagatacgctgctatcagaactgcagtttgccagcgatcagcgaagccgcatggataccctgattcgttcttacgttgcgcaggattcaaaaaccggactcagtaaccgattgttctttgataatcagctgtcgacgctgcttgaagatcaggagaaggtggggtcgtacggtattgttatgatgatccgcctgccggatttcgacctgctgcgcgataactgggggcgtacagcgactgaagagcattactttacgctgatcaacatgctttccacctttattatgcgttatcccggcgcgctgctggcccgctatcaccgaagcgattttgccgttctgctccctcatcgcacgttaaaagaggcggatagcatcgccggattgctattgaaggctatggatgccctgccgccaacgcgaattctcgatcgtgacgacatgatgcatatcgggatctgcgccttccgtagcggacaaacggcagcccaggtgatggagcatgcggaagcggcaacgcgcaatgcggtattgcagggtagcaacagctgggccgtctacgatgactctctcccggaaaaggggcgcggcaacgtccgctggcgcacgcttatcgagcaaatgctcagccgcggcggaccgcgtctctaccagaaacctgccgtaacgcgtgacggtcgcgtacaccaccgcgagctaatgtgccgtctttacgatggcaaggaagaagttatcgcggcggaatatatgccgatggtactgcagttcgggctggcggaagagtatgaccgcctgcaaatcacccggttgctgccgtttttaggcttctggccggaagaaaatctcgcgctacaggtgacggttgagtcattaattcgcccccgattccagcgctggctgcgcgatactttgatgcaatgcgaaaaatcgcaacgtcggcgtattatttttgaacttgcagaggcggatgtttgtcaatatatcggccgcctgcagccggttatgcggttggttaatgctttaggtgttcgagttgccgtagttcaggctggtctgacgctggttggaaccagctggattaagcagctcgacgttgaggttatcaagctgcattcggggttatcgcgcaatatagaaaaacgcagtgagaatcagctgttggtgcagagtctggttgaagcctgtaagggaatgccggttcaggttttcgcaaccggcgtgctcagccgtagcgagtggcaggtgctgtctcaatgcggtgtcaccggcggtcagggggaattttttgccgcctcacagccacttgacacaaatgtgaaaaaatattcgcaaagatactctgtttga

SEQ ID NO: 255495 - DNA, 1044 bp, Klebsiella pneumoniae; identical to SEQ ID NO: 176932

SEQ ID NO: 255496 - DNA, 489 bp, Klebsiella pneumoniae; identical to SEQ ID NO: 176934

SEQ ID NO: 255497 - DNA, 582 bp, Klebsiella pneumoniae
atgacgactctgtatctggcttcaggctctccccgtcggcaggaactgctgactcagctcggtctctcttttgaacgcgtgattcccggtattgaggaacagcgccgtccccaggagagcgcgcagcagtatgttgtacgtctggcgcgtgagaaggctcaggctggggtggcgttagcgccgcttgatctccccgtactgggagcggataccattgtcatccttaatggtgaagtgctggagaagccgcgcgatgctggccacgccgccgaaatgctgcgtatgctttccgggaaaacccatcaggtgatgaccgccgtggccctggccgataagcagcagacgttggattgcctggtggtcacggaggtcactttccgtgtgctctcagtacaggatatcgccgattatgttgccagcggcgaacctttagataaagcaggtgcatacggtattcaggggttgggtggctgttttgtcaggaagataaatggcagctatcacgccgtagtgggcttaccgctggtggaaacgtatgagttgctgagtaactttaactcactgcgtgaagaaaagggataa

SEQ ID NO: 255498 - DNA, 1470 bp, Klebsiella pneumoniae
atgactgctgaattattagttaacgtaacgccatcggaaacgcgcgtcgcttatattgatggcggtattcttcaggaaattcatattgagcgtgaagcgcgacgcggaatagtaggcaatatctacaaaggtcgtgtcagtcgggtgctgccgggaatgcaggcggcttttgtagatattggcctcgataaagctgcgtttctgcacgcttccgatattatgccgcacaccgaatgcgtggcaggcgaagagcaaaaacagttcaccgttcgcgatatttccgaactggtgcgccaggggcaggatttaatggtgcaggtggtgaaagacccgctgggtaccaaaggcgcccgtctcaccaccgatatcaccattccttctcgctatctggtctttatgccaggcgcttcgcacgtcggcgtctctcagcgtattgaaagcgaagcggaacgtgagcgcctgaaaaaagtggtgtctgaatactgtgacgaacagggcggtttcattattcgtaccgcggctgaaggggtacatgagcaggagatggccgcagatgccgcctacctcaagcgcgtctggacaaaagtcatggagcgcaaaaagcgccagcagacgcgttatcaactgtacggtgaactggccctggcgcagcgcgtgctacgtgatttcgccgatgcgcatcttgaccgtattcgcgtagactcccgtctgacctacgaatcgctgcttgagtttaccgccgaatatattccggagatgaccagcaagctggagcactacagcggccgccagccgattttcgatctctttgacgtggaaaacgaaatccagcgcgcgctggagcgtaaagttgaactgaaatcaggcggttatctgatcatcgaccagacggaagcgatgactaccgtcgatatcaataccggagcattcgtcggtcaccgtaatcttgacgatactatttttaataccaatattgaggcgacccaggccattgcccgtcagctgcgtctgcgcaatcttggcggtattatcatcattgatttcattgatatgaataatgaggatcaccgtcggcgggtgctgcattcgctggaacaggcgctgagcaaggatcgggtaaaaaccagcataaacggcttctctcagcttgggctggtggagatgacccgcaagcgcacccgcgaaagcgtggagcacgtgctgtgcaatgagtgcccgacctgccacggccgcggcacggtgaaaacggtagaaacggtgtgctacgaaatcatgcgtgaaatcgtgcgcgtacaccacgcctacgattctgaccgattcctggtctatgcttctcctgcggtagcggaaacgctgaaaggggaagagtcgcatgcgctggcggaagtcgagatctttgtcggtaagcaggtcaaagtacaaattgaaccgctctataatcaagagcagtttgatgtagtaatgatgtaa

SEQ ID NO: 255499 - DNA, 3798 bp, Klebsiella pneumoniae
gtgaggcgactgcccgggattttactgctcaccgcggcaacagtgattgttgtcgtcgcactgctggtgagcggtctgcgtctcgtactgccgcagttgaacagttggcgtccacaggtgctggaaaaagtatcggcgatggccggcgtaccggtcgatgcctcacaaattaccgccagctggcagacgtttggcccgacgcttgatgcccgtgatatcaaggcaggcctgagcgacggcggtgagctttccgtcaaacgcgtcactctggcgctcgacgtatggcaaagtctgctgcatatgcgctggcagtttcgcgacctgaccttctggcagctacaggttcataccaacacgccgatccaaaccaataacagcggcgaaggtctgaaaactgaccgcatcagcgatcttttcctccgccagttcgatcactttacccttcgcgatagtcatctgagcttcctgacgatttccggtcagcgggcagaacttacgattccgcagcttacctggctgaacggtaaaaatcgccatcgcgcggaaggacagcttagcctcagcagcctgaccggccagcatggcgtgatgcaggtgcgaatggatctgcgcgacgaagacggtttgctcaataaggggcgcgtctggcttcaggccgatgacatcgacgttaagccctggcttggacgctggatgcaggacaacatcgccctacagagcgcgaagtttagcctggaaggctggatgactatcgacaaaggcgatgtcgccagcggcgatgtgtggctgaaaaaaggcggcgccagctggcagggcgataaagataagcatcatctgtcggtcgataatctgaccgcgcacatctatcgcgataaccacagctggggctttcgcatcccggacacgcgtatctccatggatgataaaccctggccgcgcggcgcgctggcgatggcgtggatacctgcccaggatgtcggcggaacaaatgctcagcgcagcgatgagctgcgcatacgcgccagcaaccttaatcttagcggcctgaccgggctgcagccgatggcggataaactggcgccgtcgctgggtgaaatctggcgtacaacgcagccggatggcaagatcaatcttctggcactcgatattccgctccagatggcggagaagacgcgtttcaaagcggactggagcgacatgtcctggaagcagtggaagctgttgcccggcgcggagcatttttccggcagcattgccgggagcgtggagaacggtatcctgcatgccagcataaagcaggcaaaaatgccttatgagacggtatttcgcgcgccgctggagatcgctaaaggcgatgcgacgctcagttggataaagaacgacaaaggttttatgctcgacggtcgcgatattgacgtgcaggctaccggcgttcgcgcccgcggcggcttccgctatctgcaaccgcagggtgatgaaccctggctcggtattctggccggtatcagtaccaatgatggcggtcaggcatggcgctacttccctgaaaatctgatgggtaaagagctggtggattatcttagcggggcgattaaaggcggccaggccaccgacgccacgctggcttacggcggtaatccccatctgttcccttacaagcacaatgaaggtcagtttcaggtctcggtgccgctaaaaaacgccaccttcgcctttcagcctgactggccagcgctcaccggcctgaatatcgatcttaactttatcaatgacgggctgtggatgaaggccgataaggcgatgctcggcaaagtgacggccagtaatctggacgcggtgataccggactactcgcgagaaaaactgctgattgatgccgatgttaacggcccgggtaaagaggttggtccttactttaacgagacgccgttgaaagagacgctgggcgcggcgttggacgagcttcagttggatggggatgtgagcgctcgcttacatttgaacatcccgctggacggcgagatgaccaccgccaaaggcgacgtccagctgaagaataatagtctgtttatcaagcctatcgataccacgctgcaaaacctgagcggtaaattcagctttgtaaacggcgatctgaaaagcgaaccgatgagcgcgacctggtttaatcagccgctgaacgttgatttctcgaccaccgagggcgagaaagcgttcctggttaacgtcgggatgaacgccaactgggagcctgcgcgtaccggtctgttgccgaaagcgctggagaacagcctgagcggcagcgtgccctgggacggtaaagtggcgattgagcttccgtaccgcggcagcgcaaattataaagtcgatattaacggtgagctgaaaaacgtaagtagtcacttacctgctccggttgataagcaggccggtgagcctttaccggtaaaaattaaggttgatggcggattaagcagctttaatttgaccggctccgtggggacgaagaatcatattaatagccgctggctgctgggcaataagctcacactagatcgcgcgattttaacttctgacagtaaagccgtatctccgctgcctgcgcagtcaggcgtcgagctgaatatgccgccgatggatggcgcgcagtggctggcgctgttccagcgcggagcggcaactgacgtcagcagtagtattgtcttcccgcagcaggtcacgctgcgtacgccgacgttaacgatggcgggtcagagctggaataacgtcagcctggtctcccggcccgatgcagggggaacgaagattgaagctcaggggcgtgaagtcaacgctaccctgacgatgcgcaaaaatgccccgtggctggcggccattcgctacctctattacaacccaacttcggcgaaaagcagcgggacggaaaatagcagcgctccgctgaccgagacaaaagtagatttccacggctggcccgatctccagcttcgctgcgcagagtgctggctgtgggggcaaaaatatggtcgtatcgacggcgattttacgatcagcggcgataccctgaccctggcgaacgggctggtggataccggttttggccgtctgacgagcgatggcgtatgggttagcgccccgagcggcgtacggacctcattaaaaggtaagctgcacgggaataaaaccgatgattttgtaaacttcttcggcgtgtccacaccggtaaaaggatcgtcgttcgatattgattacgatctacactggcgcgcgccgccgtggcagccggacgttgcttcgcttaacggcattcttaaaagccgtctcgggaagggagagtttaccgatatcagcaccggacacgccggccagcttctgcgcctgctgagcgttgatgcgctgctgcgcaagctgcgcttcgactttagcgatacgttcagcgaagggttctacttcgattcgattcgcagcacggcatggattaaagacggcgttctgcataccgatgatacgctggtcgatggtctggaagcggatatcgcaatgaaaggctcggtggatcttgttcgccgccagctggatatgcaggccgtggtcgcgccggaaatctccgcgaccgtaggcgttgcggcggcctttgccgttaacccgataatcggtgctgcggtctttgccgccagtaaggtgctgggaccgctatggaataaggtctctattttgcgctatcgcatcaccggtcctatcgatcagccgcaaattaacgaagtgctgcgccaggcgcggagcgacaaaaagcaatga

SEQ ID NO: 255500 - DNA, 1446 bp, Klebsiella pneumoniae
atgagtctgaacctggtaagtgaacaattactgtcggcaaacggcctgaatcatcaggatctgtttaccattcttggccagctggccgagcgtcgtctggattacggcgatctctattttcagtcgagctatcacgagtcctgggttctggaagacagcatcataaaagatggttcgtacaatatcgaccagggcgtcggcgttcgcgcggtgagcggggaaaaaaccggctttgcgtacgctgatcagattagccggctggcgctggaacagagcgcgcaggcggcacgcaccatcgtgcgcgatcgcggtgatggtaaagttcatacccttggagcggtggagtacagctccctctataccagcattgacccgctgcagagcatgagccgcgaagagaagctggatattctgcgccgggtcgataaaaccgcccgcgcggccgataaacgcgtgcaggaagtgtccgccagtctgaccggtgtctatgagttaattcttgttgccgccaccgacggcacgctagcggctgacgttcgtccgctggttcgtctttccgtcagcgtgctggtggaagaaaacggcaaacgcgagcgcggcgccagcggcggcggcggccgctttggctacgactatttcctggcctcgctggagggagaagtgcgcgctgatgtttgggcgagagaagccgtgcgtatggcgctggtcaacctgaccgccgtcgcagcgcctgccgggatgttgccggttgttctgggtgctggctggcctggcgtgctgctgcatgaagccgttggtcacggcctggaaggcgattttaaccgtcgcggaacctcggtgttcagcggtcatatgggggaactggtggcctctgagctatgtaccgttgtggatgacggcaccatggccaaccgtcgcggctccgtcgccattgacgatgaaggtacgcctgggcagtataacgtgctgatcgaaaacgggattctgaaaggttatatgcaggacaagctcaacgccaggctgatgggcgtggcgccaaccggtaacggtcgccgcgaatcctatgcgcatctgcctatgccgcgtatgaccaacacctacatgctggcgggtaaatccacgccgcaggaaattatcgcatcggtcgattacggtatctatgcgccgaacttcggcggcggccaggtagatatcacttccgggaaattcgttttctctacctcggaagcctacctgatcgagaaagggaaagtgaccaaagcggtgaagggggcaacgcttatcggctccggcattgaagcgatgcagcagatttcgatggtggggaacgatctgaagctggatagcggcgtcggcgtttgcggtaaagagggccagagcgtgccggttggcgtcggtcagcccacgctgaaagtggataaactcaccgtcggcggcaccgcctga

SEQ ID NO: 255501 - DNA, 747 bp, Klebsiella pneumoniae
atgaaagccgcgcgtcagcagcagatagttgagttactcaatcagcatcacactttaaccaccgaagcgttgtcccatcttctgcaggtcagcattgagaccattcgccgcgatttgagtgagctacagaggcaggggagcattcagcgtagtcacgggcgggcgcgagttcttcaacgcgataatcatcactgcgagaagccttttcatcgtcgcgtgaaaagccactatgcccataaatccgatattgcgcgtacggcgctggcgtggattgatgcaggcatgacgatcgcgctggatgccagctcaacctgttggtttctggcgcgtcagctgccggatattaacctgacggtatttaccaatagccacccggtctgcgttgaacttggccgccgcgagcggatccagttaattagcgccggtggtcagcttctgcgtcaatatggctattacgttaaccccgcgctgttatcgcaggtcaaatcgctggagatcgatctgtttattttttcctgcgaagggatcgataacgatggcgtactctgggattccagcgttaacaatgccgcgtacaaatccttgctcctgaaacgggcggcgcagtcgctattgcttatcgacaaaagtaaatttcatcgtgccggcgaggtgcgcatcggaaatctcagcgaagtgacgcaaatcatttccgatgccggacctgataatgagttaatgccctctttggctgattcggacggctag

SEQ ID NO: 255502 - DNA, 930 bp, Klebsiella pneumoniae
atggaacgattaaaacgcatgtccgtttttgccagagtggtcgaattagggtcatttaccgccgcggctcgccagctccagatgagcgtttcttccatcagccagacggtagccaaactggaagatgagctgcaggttaagctgctcaaccgcagtacgcgtagccttggcttaacagaagcgggaaaaatctactatcagggctgtcggcgaatgctgttcgaagtccaggatgtccatgaacagttgtacgcgtttaacaatacgcccatcggtaccctgcgcatcggctgttcttcaactatggcacagaatgtcctggcgcgcataacggcggacatgcttaaagagcaccccggactatcgataaatctggtcacgggcatccccgctccggacctgattgcggacggtctggatgtggttattcgcgtgggggcgctgcaggattccagcctcttttcccgccgcctgggttcgatgccgatggtgctgtgcgcggcgaaaagctatctccagcatgccggctgtccggaaaaaccagcagatctcgccagccactcctggctggaatacagcgtccgaccggataacgaatttgaaatcatcgccccggaagggatctcaaccaaactgatccctcagggccgatttgtcactaacgatccaatgacgctggtccgctggctgacggcaggcgtcggcgtggcttatgttccgctgatgtgggcgatcgacgagatcaaccgcggcgaactggagatcctgctgccgagctaccagtccgatccgcgcccggtttacgcgctgtataccgagaaagataagctgcctctgaaagtacaggtatgcattaattatctgacggagtatttcgtcggggtggcaaaaatttatcagggcatgcacggtcgggggattgcccgctag

SEQ ID NO: 255503 - DNA, 204 bp, Klebsiella pneumoniae
atgagtctgtttcctgtcattgtgattttcggcttgtcgtttccgccgatcttctttgagttgctgttgtcgctcgccgtcttctggctggcgcaccgcctgctggttccaacgggcatctatgattttgtctggcacccggccctgttcaataccgcgctatattgctgcttgttttatctgatatcacgtttgttcgtttga

SEQ ID NO: 255504 - DNA, 933 bp, Klebsiella pneumoniae
gtgaaaacactaacaagaaatatcctccgtaccgcaatcactgtgatactggttatccttgcatttatggcgatttttcgcgcatgggtgtactacaccgcatcgccctggacgcgcgatgcgcgctttagtgcggatattgtggccattgcccccgatgtttccggcctgatttcgcaggtgaatatcaaggataaccaactggttaagaaagaccagattttgttcgtcattgaccaaccgcgttaccagaaagcgttagcagaggccgaagccgatgtctcctattaccagactctggcgcaggagaagcgcgtggaagccggccgtcgtaaccgtcttggcgtccaggccatgtcccgggaagagatagaccaggcgaataacgtcctgcaaaccgttgaacatcaattagccaaagcgacggcgagtcgcgatctggcgaagcttgaccttgaacggacggtgattcgcgctccggccgatggctgggtgaccaacctgaacgtgtaccgcggcgagtttatcacccgaggttccaccgcggttgcgctggtgaagcaaaataccttctatgtcatggcctatcttgaagagaccaagcttgaaggcgtgcgccccgggtttcgtgctgaaattacccctctgggaagcgtacataccctcagggggaccgtcgacagcatcgctgctggcgtcaccaatgccagcagcagcagcgattcaaaagggctggcctctattgattctaatcttgagtgggtgcgcctggcgcagcgggtaccggtacgtattcgccttgatcagcagcagggcaatctctggccagcgggcaccacggcgacggtggtgatcacgggtaaagaggatcgcgataccagtcaggcaaacttcttccagaaactggcgatgcgcctgcgtgagttcggttaa

SEQ ID NO: 255505 - DNA, 1968 bp, Klebsiella pneumoniae
atggggatcttcaccatcgaactccggcatctccgcttcgccgttaagttagcctgcgcggtggtgctggcgttattcgtcggttttcattttcagctggaaactccacgctgggcggtgctcaccgcagcgatcgttgctgccggtccggcatttgccgcaggcggggagccttactccggcgccattcgctatcgcgggatgctgcgtatcgtcggcacctttatcggctgtatcgccgcactggcgattatcatcctgatgatccgcgccccgctgttgatggtactggtctgctgcctgtgggcgggtttctgtacctggatctcctcgctggtgcgggttgagaactcctatgcgtggggtctggcgggttataccgcgctcatcattattatcactattcacgaagagccgatgctggcgccgcagttcgccgtcgaacgatgcagtgagattgtcatcggtatcgtcagcgccattgtggccgatctgctgttttctccgcgatcgataaaaaaagagatcgatcttgagctggataacctgctgatcgatcaatatcgcctgatgcagctttgcgtggcccatggcgataaagatgaggtcgataaggcctggagcgccctggtacgccgtaccaacgggctggaggggatgcgcgccaacctgatcatggagtcttcgcgctgggctaaagtgaatcaacgcctgaaggcgatcaacaccctctctttgaccctgattactcaggcctgtgaaacctttctgattcagaacacccggcctgagatagtgacggatgattatcgggagctctttgctgaaccggttgagaccgtgcaggacgtgcaccgtcagctaaaacgtatgcgccgctttttgacctggaagggggagcataatacgccggtgacgatctacagctgggtaggtgctgcgacgcgctatctgcttttgaagcggggcgtggtcggcaataccaaaatcagccgtattgaagaggaagtactgcagggcgaagtggtggtgaaggcggaatccgccgagcgccatcatgcgatggtgaacttttggcgaacttctatctcttgtatcctcggtacgttgttctggctatggaccggctggacctcgggaagcggggcgatggtgatgattgcggttgttacggccttagcgatgcgtttgccaaatccgcggatggtggctattgatttcctttacggcacgctggcggctttacctctgggcgcgctgtttttcctggtgattatgcctgcgacgcagcaaagtatgctgctgctgtgcattagccttgcggtgatggcattttttatcggcatcgaggtacagaagcggcgcctggggtcgttgggcgcgctggccagcacgattaatatcctggtgctcgacaacccgatgaagtttgaattcaaccagtttcttgatagcgccttaggtcagatcgtaggatgcttcctcgcgctgatggtgatcctgctggtgcgtgataactcccaggctcgcaccggacgcgtgctgcttaaccagtttgtctcggcagcggtatcatcgttgaccaccaatacggcgcgacgtaaagagaaccatttgcccgctctgtatcgtcagctttttttattgctgaataagtttcctggcgacatcgcgcgctttcgtctggcattaaccctgattattgcccatcagcgcctgcgcgatgcaccggtaccgataaacgacgatctgtccgcctttcaccggcagctgcgtcgcacggcggatcgcgtcatttccgcgaagagcgatgataagcgtcgctactattttgcccgtttgcttgatgaactggatatctatcagcaaaaattacagcactgggaagcctcttcccaggtgaccgagccggtacgaaggctggtggatatgctgcataagtatcagcacgtactcaccaacagttag

SEQ ID NO: 255506 - DNA, 279 bp, Klebsiella pneumoniae
atgacgactacctatacctttgattttgacgaaatagctgagcagcaggatttttatcgcgagttttcacgtacttttcacttagagcgtgagaaagtgaacaaccttgattcattatgggatgcggtgatcgccgggttgctgccgctaccgctggagattgaatttattcatttaagcgataatcagcgacgccgattcggcgcattaattctgctttttgatgaggcggaagaggagctggaaggagagcttcgttttaatgtgcggcattcataa

SEQ ID NO: 255507 - DNA, 267 bp, Klebsiella pneumoniae
atgaaaagcgcaattattatcgcatccctgggtctggcttccgttctctctttcggtgcaaacgccgccgttaaccaagtgaacgcagaacaggcgcaaaatctacagtccatgggcaccgtttccgtttctcaggtaggcagcgcaccgatggatatgcgtcaggagctggcggctaaagctgaaaaagaaggcgccagcagctaccgcatcattgaagcccgtaccggcgataactggcacgctacggctgaactgtacaaataa

SEQ ID NO: 255508 - DNA, 264 bp, Klebsiella pneumoniae
atgaaaatcaaaaccactgtagcagcattgagcatcctttccgttctgtcctttggcgcctttgccgctgactctatcaacagcgaacaggctcagggccgtcaggcaatcggcaccgtttccgtcggcgcggtaagttcttccccgatggatatgcatgaaatgctgaacaaaaaagcgcaggaagaaggtgcttcttcttatcgcattattgaagcacgtaccggtgaccactggcacgcaacggctgaactgtataaataa

SEQ ID NO: 255509 - DNA, 1794 bp, Klebsiella pneumoniae
atgttgcttaagaaacggtatggtcgtcaattgtcagcgctcagtctgggcttggcttttgcattcgctccactgttcaatgtccaggccgaagagcctgaaattgtaccatcggatagctcagccaccatcagcgagctctcttccgcactcagccaaagcgcaaaccagtctgcggcggttgccaaaatggctggtgagcaggcgcttcctgccgatgcggcggcgaaaagccgtgccgatattcaggcggtactgccgtccggttatcaacccgtctttatgaatccgctggtctcgctgtatgcggccagggatatgaagccgatgtgggataaccgtgaggcggtgcaggcgtttcagcagcagctggctgaagtcgctattgccggttttcagccgcagttcaccacctgggttgagctgttaaccgacccggcggtgaacggtctggcgcgggatgttgttttgtctgacgccatgatgggctatctgcattttattagtggtattcccactcagggcaaccgctggctgtatggcaccaaaccgtatgccatgtcgacaccgccgctatcggtggttaatcagtggcaggtggcgctggatagcggttcgctgccgcagttcattgcgggcctggcgccgcagcatccgcagtatgccgcaatgcatcaggcgctactggcgcaggttgccgattcgcgtccgtggccgcagctcaccggtaagacctcgctacgtcccggggagtggagcaatgatgccggtgcgctcagggaaattttacagcgcaccggtatgctcgatgactcggcgaaaattgccctgccgggcgatgacgtggtgagcccatccgccgggaaaaaggctaaaaacagcggccgcggcgtttacgatcgccagttggttgaaggcgttaagcgctttcaggcgtggcaggggctgggcgctgatggcgtgatcggtcaggcgacccgcgactggctcaacgtctctcccgcgcagcgcgccggcgtgctggccttaaatatccagcgtttgcgtctgctgccgggtaatcttgcgaccggtattatggttaatattccagccttttcgctggtttattaccaggatggcagcgaggtgctggcatcacgagttatcgttggccgcccggaccgcaaaacgccgatgatgagcagtgccctaaacaatgtggtggtcaacccgccgtggaacgtgccgccgacgctggcgcgcaaagatatcctgccgaaggtgcgcaataaccccggctatcttgaacaacacggctatacgatgatgcgcggctggaacagcaaagaggccatcgatccttatcaggtggactgggagacgataaccgcatcgaatctgccgttccgcttccagcaggctcccggcgcgcgtaattcgctggggcgctataaatttaatatgccaagctcagatgccatatatttgcacgacacgccaaatcacactctgttccaacgggatgggcgagcgctgagctccggatgtgtgcgggtgaataaagcttcagagctggcgaatatgctgttgcaggacgcgggctggaacgacgcgcgtatttcggatgccctcaagcagggaaatacccgctatgtgaatattcgtcagaatatcccggttaatctctattatttgaccgcctttgtcggggctgatggacgtacacaatatcgaacagatatttacaattacgatctcaccgcgcgatccagcgcacaaatcctgcctaaagctgaacaattaatcagataa

SEQ ID NO: 255510 - DNA, 4449 bp, Klebsiella pneumoniae
atgattgaacgcggtaaatttcgctcgctgacgctggttaactggaacggcttttttgcccgcacctttgatcttgatgaattagtgaccacgctttccggcggtaacggcgccggtaaatccacgaccatggcggccttcgtcaccgcgctgatccccgacctgacgctgctgcatttccgtaatactacggaagccggggccaccagcggctcgcgagataaagggcttcacggtaagctgcgcgcaggcgtctgttactcggtgctggacgtcattaactctcgccaccagcgcgtggtggttggcgttcgcttacagcaggtcgccggtcgcgatcgtaaagttgatatcaagccttttgcgattcaggggttgcctacctccatccagccgactcagctgctgaccgaaacccttaacgagcgccaggcacgcgtggtgacgctcaacgagctgaaagataagctcgaagcgatggaaggggtacagttcaagcagtttaactctattaccgagtatcactcgctgatgttcgatctgggcgtggtggctcgccgcctgcgttcagcttccgaccgtagcaagtactatcgcctgatcgaagcgtcgctgtacggcggcatttcaagcaccattacccgctcgctgcgcgactacctgctgccggaaaacagcggcgtgcgtaaagcattccaggatatggaagcggcgctgcgtgaaaaccgcatgaccctggaagcgatccgcgtaacgcagtcggatcgcgacctgttcaaacatctgatcagcgaagccaccaactacgttgccgccgactatatgcgccacgcaaacgagcgacgcattcatctcgacaaagcgctggagtatcgccgcgatctgttcagctcccgcgctcagctcgcggctgaacagtataagcacgtcgatatggcccgcgagctgcaggaacataacggcgcggaaggcgatctggaagccgattatcaggccgccagcgaccatctgaacctggtgcagaccgctctgcgccagcaggaaaaaatcgagcgctatgaggcggatcttgatgaactgcagattcgcctcgaagagcaaaatgaagtcgttgcggaagcggttgaccagcaggaagagaacgaagcccgcgccgaagccgccgagctggaagtggatgagctgaaaaaccagcttgccgactaccagcaggcgctggacgtgcagcagacccgtgcgattcagtacaaccaggcgctgcaggcgctggaaagagcaaaagcgctttgccatctgccggatttaaccccggagagcgccgacgagtggctggaaactttccaggcgaaagagcaggaagcgacggagaaaatgctgtcgctggaacagaaaatgagcgtggcgcaaactgcgcatagccagtttgaacaggcataccagctggtggtggagatcaacggtccgctggcgcgtaatgaagcctgggacgtggcgcgcgagctgctgcgcgaaggcgttaatcaacgccaccaggcagagcaggcgcacgggttgcgcagtcgcctgacggaacttgaacagcgtctacgtgaacagcaggatgctgaacgccagctgaacgaattctgtaagcgtcagggcaaacgttacgatatcgacgaactggaagctctgcatcaggagctggaagcccgcatagcctcgctttccgacagcgtttcctccgccagcgaacggcggatgaccctgcgtcaggagctggaacagctgcagacgcggacgcaaacgctgatgcgccgcgcgcccatctggctggcggcgcagaacagcctcaatcagctgtgcgaacagagcggcgagcagtttgagtcgagccaggaagtcaccgaatatctccagcaactgctggagcgtgaacgcgaagctatcgtagagcgcgacgaagttggcgcccgcaagcgcgcaatcgatgatgaaatcgagcgccttagccagccgggcggttcagaagatcagcgcctgaacgcgctggcggaacgctttggcggcgtactgctgtcggaaatctatgatgacgttagcctcgatgatgcgccgtattactcggcgctgtacggcccttcccgccacgctattgtggtaccggatctgtcgctgattgccgagcagctggaaggccttgaagattgccccgaagatctctacctgatcgagggcgatccgcagtcgtttgatgacagcgtatttagcgtcgatgagctggaaaaagccgttgtcgttaagattgccgatcgtcagtggcgctattcacgcttcccgacgctgccgctgtttggccgcgccgcgcgtgaaagccgcgttgaaacgctgcacgccgagcgtgaaagcctctccgagcgttttgcgaccctgtcgtttgatgtgcagaaaacccagcgcctccatcaggcgttcagccgctttatcggtaaccatctggcggtggcctttgaggacgacccggaagaagaaatccgcaaactgaatactcgtcgcggcgagctggagcgggcgctgaccgcccatgagagcgataaccagcagaaccgggtgcagtatgagcaggcgaaagagggtgtatccgcgctcaatcgcttgttgccacgtctgaatctgctggccgacgactcgctggccgatcgcgtcgatgaaatccaggagcggctcgacgaagcgcaggaggccgcgcgttttgtgcagcagtatggtaaccagctggctaagctggaaccgatcgtttccgttctgcagagcgacccggagcagtttgaacagctaaaagaagattacgcgtactcgcagcagactcagcgcgatgcgcgtcagcaggcgtttgcgctgaccgaagtcgtgcagcgccgcgcccactttagctactctgattccgcagagatgctcagcggtaatagcgatctgaacgagaagctgcgccagcgcctggagcaggcggaagcggagcgcgcccgcacccgcgaagcgctgcgtacccacgccgcgcagctcaatcagtacaaccaggtgctggcatcgctgaaaagctcctacgacaccaaaaaagagctgctcaacgatctgcataaagagctgcaggatattggcgtacgcgccgacgccggcgccgaagagcgcgcccgtttgcgtcgcgatgagcttcatgctcagctcagcaacaaccgcgcgcggcgtaaccagcttgaaaaagccttgaccttctgcgaagcggaaatggataacctgacccgcaggctgcgcaagctggagcgtgattactgcgaaatgcgcgaacaggtggtcagcgccaaagccggctggtgcgcggtcatgcgcctggtgaaagacaacggcgtggagcgtcgtctgcatcgccgcgagctggcctacctttcggctgatgagctgcgctcaatgtcggataaagcgctcggggcgctgcgtctggcggtctctgataacgaacacctgcgcgatgtgctgcgtatttcggaagatccgaaacgcccggaacgcaaaatccagttctttgtcgccgtttatcagcatctgcgcgagcgtatccgccaggatattatccgtaccgacgatccggtggaagcgattgagcagatggagattgaactcagtcgactgacggaagagctcaccaaccgcgagcagaagctggccatcagctcccgcagcgtggccaacattatccgcaagacaatccagcgcgagcagaaccgtattcgcatgctcaaccaggggctgcagagcgtctccttcggccaggtcaacagcgtgcggctgaacgtcaacgtgcgggaaacccactcgatgctgctggacgtgctgtccgagcagcatgaacagcatcaggatttgttcaacagcaatcgtctgaccttctcggaagcgctggcgaagctgtatcagcgcctgaatccgcaaattgatatggggcagcgtacgccgcagaccattggtgaagagctgctggactaccgcaactatctggagatggaagtggaagttaaccgcggttccgacggctggctgcgcgctgaatccggtgcactatcgaccggtgaggctatcggtaccgggatgtcgattctggttatggtggtgcagagctgggaagatgaatccatgcgcctgcgcggcaaggatatttcgccgtgccgcctgctgttcctcgatgaagccgcgcgtctggatgcccgttctatcgccacgctgttcgaactgtgcgatcgactggagatgcagctgattatcgcagcgccggaaaatatcagcccggaaaaaggcaccacctacaaactggtgcgtaaagtggtgaacaatcacgagcatgtgcatgtagtaggtctgcgtggcttcgcgccgcagctgcctgaaacgctgccgggaacggctaatgcttcataa

SEQ ID NO: 255511 - DNA, 705 bp, Klebsiella pneumoniae
atgtcatcgacaaatattgaacaagtgatgccggttaaactggcgcaagcgttggctaatccgttatttccggcgctggatagcgccctgcgcgcgggccgtcatatcggccttgacgagctggataatcacgcatttttaatggattttcaggattacctggaagagttttatgctcgctacaacgtcgagctgattcgcgcgccggaggggtttttctatctacgcccgcgctcgaccacgctgatcccgcgctcggtgctctccgagctggatatgatggtgggcaaaattctttgctatctctacctcagtccggagcgcctggcgaatgaaggcatcttcacccagcaggagctttacgacgagctgctgaccctggcggacgaagccaagctgctgaagctggtcaataaccgttcgaccggctccgaccttgaccgccagaagctgcaggaaaaaatgcgcgcttcgctcaaccggctgcgccgcctcggcatggtgtggtttatgggccacgacagcagcaaattccgcatcaccgaatcggtgtttcgcttcggcgccgacgtgcgcgccggtgacgacccgcgcgaagcgcagctgcgtatgatccgtgacggtgaagccatggcgctggaaaatcgtctgcagcttaatgatgagaatgaagagaatcagccggatagcggggaggaagagtaa

SEQ ID NO: 255512 - DNA, 1323 bp, Klebsiella pneumoniae
atgagtgaattttcccagacagtccccgaactggttgcctgggccaggaaaaatgatttttctatttcgctgccggtcgacagactctcttttctgctggcgattgccacgctgaacggcgagcggatggaaggggaaatgaccgagggagaactggtggacgcgttccgccacgtcagtgatgcgtttgagcagaccagcgaaaccatcagccagcgcgccaataatgccattaacgatatggtgcgccagcgtctgctgaaccgctttaccagcgaaatcaccgagggtaacgctatttatcgcctgacgccgctgggcatcgggatcaccgattactatattcgtcagcgcgagttctccaccctgcgcctgtcgatgcagctctccatcgttgccggcgaactcaagcgcgccgccgactcggcagaagagggcggcgatgagttccactggcatcgtaacgttttcgctcccctgaagtactcggttgcggaaattttcgacagtatcgatctgacccagcggatcatggatgagcagcagcagctggtgaaagatgatattgcccagctgctgaataaagactggcgggcggcgatttccagctgcgagctgctgctgtcggaaacgtccggcaccctgcgcgagctgcaggatactctggatgcggcgggcgataagctgcaggcaaacctgctgcgtatccaggactcgaccatggcgcgcgacgatctgaattttatcgatcgtctggtgttcgacctgcaaagcaagctggaccgcatcgtcagctggggtcagcaggcgatagacctgtggatcggttacgatcgccacgtgcataaatttatccgtaccgctatcgatatggataaaaaccgcgtcttcgcgcagcgtttacgccagtcggtccagacttacttcgacgctccctgggcgctcacccatgcgaatgccgatcgtctgcttgatatgcgcgatgaagagatggcgctgcatgatgaagaggttaccggagaacttccggcggatctggagtacgaagagtttaacgaaattcgcgaacagctggcagcgctgattgaaggtcagctggcggtctataaagagaagggactgccgctggatcttggtctggtggtacgcgaatatctgtcgcagtatccgcgcgctcgccactttgacgtcgcgcgtattgttgtcgaccaggcggtacgtttgggcgtagcgcaagcagatttcaccggactgccggcaaaatggcagccgattaatgattacggagccaaggtacaggcgcatgtcatcgacaaatattga

SEQ ID NO: 255513 - DNA, 780 bp, Klebsiella pneumoniae
gtgcaggatcgtaatttcgatgatattgctgaaaagttttcgcgcaatatatacggcaccaccaagggccagctgcggcaggcgatcctctggcaggatctacaaccgttgctgaaccagatggggcctgggccattgcgagttcttgatgcgggcggcggcgaagggcaaacggcgatcaaagtggcggaaatgggccatcacgtcacgttatgcgatctctctggtgaaatggtggctcgcgccaggcaggcggctgccgataaaggtgtgatcgacaacatgcattttgtacaatgcgcggctcaggatattgagcagcatttggaaagtccggtcgatctgatactgtttcatgcggtgctggaatgggtagccgaaccacaggcgatgttgcgtacgctgtggtcgatgctgcgccccggcggcgcgttatcgctgatgttctacaatgctaacggcctgttgatgcacaatatggtcgccggcaatctggactatgtgcaaatcggcatgccgaaaaagaaaaaacgcacgctgtcgccggactatccgcgcgatccgcagcaggtttacggctggctggaagagattggctggcagattaccggcaagaccggcgtgcgggtgtttcatgattatctgcgtgaaaaacaccaacagcacgacaaatttgcggcgctgctggagctggaaacgcgctactgtcgccaggagccgtatattagcttaggccgttatattcacgtcaccgcgcttaagccgcagatgcaaggataa

SEQ ID NO: 255514 - DNA, 780 bp, Klebsiella pneumoniae
atgctttttacgctgaaaaaggttttaggcggcatgatgctgccgcttcccctgctgctgttgcttatagcggtcggcatcgccttgctgtggtttagccgtttccagcgcaccggcaagctctgcgtcagcttcggctggctgctgttgctgctattaagcctgcaaccggtggccgatagtttgctcaaaccgattgaagataaatacccgacgtggcggggagaagagcgcgtacagtacgtcgtcgtactgggcggaggatacacctggaatccagcctgggcgcccagctcaaatctcattaataacagcctgccgcggctgacggagggcatccgcctgtggcaggaaaatccgggagccaaaatgatctttaccggcggaagagcgaagaccaacccggtaagttctgcggaaaccagtgcccgggtagccgagaccctgggcgtaccgcgcagcgaaattatcgttctcgataaacccaaagataccgaagaggaagccgccgcggtgaaagaggcgattggcgatgcgcctttcctgctggtcacttccgcttcacatctgccgcgggcgatgattttctttcgccgcgccgggctgaggcccttgcctgccccggccaaccagctggcaattgagtcaccgctcaacccatgggagcgggcaatcccctcgccggtctggctaatgcatagcgatcgggttggctacgaaacgttaggtcgcatctggcagcgactgaaaggatcttcaggcgagccagggcaggattga

SEQ ID NO: 255515 - DNA, 894 bp, Klebsiella pneumoniae
atggaacagttgcgtaccgagctgagccacctgctgggtgaaaaactaagccgcgtggagtgcgtcagcgagaaaccctcgtcggcgctgtggtcgctatatgatgcgcagggaaacccaatgccgctgctggcgcgcagctttacgacgccgggcgtggcgcgtcagctggcgtggaagatatcaaccctcgcgcgaagcggtactgtccgtatgccggtggtctacggcgtaatgacgcacgaagagcatccgggcccagatgtactgctgatcgaacgactgcgcggcgtttcggtagaagcccccgcccgtacgccggagcgttgggaacagctacaggagcagattgttgaagcgctgctggcctggcaccgtcaggatagcggcggctgcgtcgggatggtcgacagcactcaggaaaatctctggccatactggtaccgccagcgtgtagaggtgctatggagcacgctgaacctttatcaggataccggcctgacgatgcaggacaaacgcattctgttccgcactcgcgaatgccttatggatttgtttaaagatttcaatgataactgcgtgctggtccacggcagcttcacgctgcgcagcatgcttaaagatccgcgcagcgatcagctgctggcgatggtaggtccgggcatgatgctctgggcgccgcgtgaatatgagctattccgtctggttgagagcggccaggaagagcagctgctgtggcactatctccgccgggcgccggtagcggaagcgtttctctggcggcgctggctgtatctgctgtgggatgaagtggataatctggtcaataccggacgctttgaccgcgtccggtttgatctggcggctaaatcaatcctgccctggctcgcctga

SEQ ID NO: 255516 - DNA, 747 bp, Klebsiella pneumoniae; identical to SEQ ID NO: 173916

SEQ ID NO: 255517 - DNA, 183 bp, Klebsiella pneumoniae; identical to SEQ ID NO: 173915

SEQ ID NO: 255518 - DNA, 1185 bp, Klebsiella pneumoniae
atgccggtattgtccctctcgcttaaagaagctcgccatcttcacctggccgcgcaggggctgctgaaaaagccccgccgtcgcgccaaacccgaggatgttctgcaaaccattaagcagatgtccctgctgcaaatcgataccatcaacgttgttgcccgcagcccttatctggtgcttttcagccgccttggccactatccgcagcgctggctggatgaggcgcttcgcgccggtgaactgatggaatactgggcacatgaggcctgtttcttaccgcgcagcgacttttcactggtgcgtcaccgtatgctgacgccggataaaatgggctggaaataccataccgcatggatgaccgagcacgctccggccattcaggaactgctggcccatattgccgaaaatggcccggttcgctcggcagactttgaacatccgcgtaagggcgccagcggatggtgggagtggaaaccgcataagcgccatcttgaaggtttatttaccgctggagagctgatggttatcgagcggcgcaactttcagcgcgtttacgatctcacgcagcgggtcatgccggactgggaggatgagcgggatggcctctctcaggagcaggccgaagccattatgttacgcaatagcgcacgcagcctcgggatcttccgcgcgcagtggctggcggattattatcgtctacgtcgaccctcgctacccccgctgctggcgagctggcaggatgaggggctggtgaaaccggtaaacgtggaaaccctgggggaaatgtggcttcaccgtgatgcgctgaagctgctggagtcttcacccggcggcaggctcgccgccagccacagcgcggtgctctcgcctttcgatccggtggtgtgggatcgcaagcgggctgagcagctatttaacttcacctatcgcctggagtgctatacgcccgcaccgaaacgtcagtatggctatttcgtattaccgctgctgcatcaggggaagctggtgggcagaatggatagcaaaatgcatcgtaaaaccggcgttctggaaattatcgctctgtggctggaggagggggtcaaggtgacctcgggactcgagagcgggctaaaacgcgccattgatgattttgccctctggcagggggcaacacgggtgagctgcgggaagctgccggcgtaa

SEQ ID NO: 255519 - DNA, 981 bp, Klebsiella pneumoniae
atgattgcgcgcatctggtccggcgaatcgcctttatggcggctactgcttccgctctcctggctctatggcctggtgagcggattaatacgactaagctataaactgggatggcggaaagtgtggcgagcgtcggtgccggtagtggtggttggcaatttgaccgccggcggcaatggcaaaacgccggttgttgtctggctggtggaacagcttcagcagcgcggtattcgcgtcggcgtggtgtcacgcggctacggcggaaaagccgcgaactatccgctgctgcttaatgtggatacgcataccggggaagcgggcgatgagccggtgctgatttatcagcgtaccggcgcgccggttgccgtctcgccggtacgcagcgatgcggttaaggcgctgctcgccgccaacgatcttcagcttatcgtcacggatgatggtctgcagcactataagctggcgcgtgacaaagagattgtggtgattgacggcgtacgtcgttttggtaacggctggtggttgcctgcgggtcctatgcgcgagcgcgcttcgcgtttgcgcagcgtggatgcggttatcgttaacggcggtctcgcccgcccgggagagatacctatgcagcttcgtcccgggctggcggtgaatctgctgaccggtgaacgccgggatgcggcggcgttggacaacgtggtggcgatggcaggaatcggccatccgccgcgtttcttcgccaccctcgagagctgcggcgtacgtccggtgaaaaccatctccctggccgatcatcaggctctgtcgcagagcgatgtcgccgcgctggcggcgccgcagcaaactctgctgatgaccgaaaaagatgcggtgaagtgccgcgactttgcgcaggcaaactggtggtatctaccggtcgacgcgataatgactgaccagcgcgcacagcggctgctcacggatttagtgacgctggcgcagcgctaa

SEQ ID NO: 255520 - DNA, 1749 bp, Klebsiella pneumoniae
atgcagaacgataaagatctttccacgtggcagaccttccgccgactctggccgattatagcgccgtttaaacccgggctaatcgttgcagcggtagcgttagtgcttaacgcggctagtgataccttcatgctatcgcttcttaaaccgttactggatgatggttttggtaaaacggatcgctcggtgctgatatggatgccgctggtggtgatcggattgatggttctgcgcggcatcaccagctacgtttcgagctactgcatctcttgggtgtccggcaaagtcgtgatgacgatgcgccgtcgtttattcagccacatgatgggaatgccggttgcattctttgacaagcagtccaccgggacgctgctatcacgtattacctatgattcggagcaggtggcctcttcctcctccagcgcgttgattaccgtcgtgcgtgaaggcgcgtcgattattggcctgtttgcgatgatgttttattacagctggcagctgtcattgattctgatcgttctggcgccgatcgtgtctattgctattcgcgtggtctcgaagcgttttcgtaatatcagcaagaatatgcagaacaccatgggccaggtgacgaccagtgcagagcagatgctgaaagggcataaagaagtgctgatgtttggcggtcagaccgtcgaaaccaagcgctttgataaagtcagcaacaagatgcgtctgcaggggatgaaaatggtctccgcgtcctcaatttctgaccctattatccagctaatcgcctccctggctctggctttcgtactttatgcggcaagcttcccgagcgtaatggagacgttaacggctggtacaattaccgttgtcttctcctcaatgatcgcgctgatgcgtccgctaaaatcgctgactaacgtcaacgcgcagttccagcgcgggatggccgcttgtcagacgcttttcgctattcttgactccgagcaggagaaagatgaaggcacgcgggttatcgaacgtgcgaagggcaacctcgaatttaaaaacgttaccttcagatatccggggcgtgaagtcgctgcgctgcgcaatattgacctcaatattccggaagggaaaaccgtggcgctggtagggcgctcggggtcgggtaaatcgaccatcgccagcctgattacgcgtttttatgatgttgatgaggggcagatcttgctggacggccacgacctgcgtgaatacacgctgagttctctgcgcgatcaggttgcgctggtgtcgcaaaacgtccatctctttaacgacaccgtggcgaataatatcgcctatgcccgaaccgaagagtacagccgcgagcagattgaagaagcggcccgcatggcttatgccatggactttatcaataaaatggacaatggcctggatacgattatcggtgaaaacggcgttatgctttccggcggccagcgccagcgcatcgctatcgctcgcgccctgctgcgcaacagcccgattctgatccttgatgaagcaacttcggcgctggataccgaatcagagcgcgccattcaggcggcgctggacgaactgcagaaaaaccgcacctcgctggttattgctcaccgtctctcgacgattgagcaggctgacgaaattgtggtagtggaagatggccagatcgttgaacgcggcagccatgccgatctgcttgaacataagggcgtttacgctcaactgcataagatgcagttcggcgcatga

SEQ ID NO: 255521 - DNA, 2265 bp, Klebsiella pneumoniae
atgcgtttaccacaacttgctggctgtgtgattatcggcattctgccgctgctctggttgcccgatttgcccgggcgttcggttacctggggactgatgctgctggcgctgcttattgcgcaatgtcgccgtagagctgcgcaatacgcggcattgataacgctgttttttgtctggggagtactcagcgctcgccaggccctatggccgacacagacgttaacaaacgggaatcgtcaggttgaggttgtgctgaccgcaacagatgggcagacaactcatcagggcagaattgtccgtctggatgggcgacggctatttcccgcgccaggggtaagcctctacggtaattatttgcctgagccgccctgtgcagggcaggtttgggccatgacgctacgcgcgcgtccggtacatggtcagctcaacgaaggcgggtttgacagccagcgctatgcgctatcacagcatcgtccgttaaccggacgctttatcagcgctgaagttcgcgagcgaaactgtagtgtacgagcgcgttatctggcctcgctcaatcaaaccctggcggaactgccctggcaatcggtgatgctggggttaggcatgggggagcgtctggcgatccctcgcgagataaagatcctgatgcaggaaaccggtacatcgcacctgatggcgatctcagggttacatatcgcgttaggagccactctgggctggttgctgctaaggggtttgcagttctttcttccgtgccgctggctgggctggcgggcgccgctgcttactggcctggcgagcgctattttttacgcctggctaaccggaatgcagccgcccgcgctgcgcacctgtgttgccctgatcgttggctgcgcgctgcggctatccggaaaacgctggtcgccatggcaactatggctctgctgcattggtgcaatactgtttgccgatccgctggcagcgttgtcagaaagcctctggctatcggcgtttgccgttgcggcgcttatcttctggtatcagctggccccgatgcctggcggtaaaaggtgctggttgctgcgccaaagcctcgcgttatgtcatctgcagatcggcttgatgtttttacttgcacctttacagattgctctcttccacggcatcagcttaacgtcggtgctggcgaatttgattgccgtgcctctggtgacttttatcgttgttccgctgattctgaccgccatgtttttacacctctgtgctccgctcaccattgagatggtgatatggcaatcagcagaccgtatcctggcggcgctattcgggttcctgcggcagctgccgcccggctggctcgagctggatgctcgctggcttgggataagcctgctgccgtggccggcgttaattctctggcgttttcatgcgtggcgcacgttgccggcgttttgtttagcatgtctcgggctattaagctggccattctggcggagtacggctgccaacgaatggcgagtcaccatgctggatgtcgggcaggggctggctatggtgattgaacgccagggcgcggcccttctctacgataccggactcgcctggcctgagggtgacagcggtgagcagattatcatcccctggctacgctggcatcacttgcatctggaaggcgtcgtactcagccatgagcatctcgatcaccgcgggggactcaactcggtgttaaaagcatggcctcaaatatggatacgaagccctttaggctgggcgggccatttagcatgccagcgcggagagatctggcagtggcgaggtttaacctttcgtgcgttctggccgctgcccggcgcgacaaagcaggggaataatcgctcatgcgtggtgcgtgttgatgacggcaagcacagtatcctgctcaccggggatatcgaaacgcccgcggagcaaacgatgattagccactactggcaacatcttgcgtctacacttatccaggttccccatcacggcagtaatacgtcgtccgggaccgccctgttgcgcagcgttggcggggaggctgcgctagcttctgcttcccgctataacgcatggcgtatgccgtcaaccaaggtgaaacagcgctatcgaaaccagaattatcagtggttcgacacgccgcatcaggggcaaattacggttattttttccgcggatggctggcaaatccatagcttacgggatcaagttttaccgcgatggtatcatcagtggtttggcgggaacgttcagaacgggtag

SEQ ID NO: 255522 - DNA, 288 bp, Klebsiella pneumoniae; identical to SEQ ID NO: 173910

SEQ ID NO: 255523 - DNA, 414 bp, Klebsiella pneumoniae; identical to SEQ ID NO: 175058

SEQ ID NO: 255524 - DNA, 276 bp, Klebsiella pneumoniae; identical to SEQ ID NO: 175059

SEQ ID NO: 255525 - DNA, 642 bp, Klebsiella pneumoniae
atgacccagcgcgcgctgctactggtcgatttacaaaatgatttctgcgccggtggcgcacttgcggtcccgcagggcgatagtacggtcgacgtcgccaacctgcttatcgactggagcctgacgcggggcgaaacggtggtagccagccaggactggcatccggcgaatcacggcagctttgccagccagcatcaggttgaaccctatacccagggcgagctcgacggcctggcgcaaactttctggccggatcactgcgtgcaaaacagcgaaggcgcggctctgcatccgctgctcaaacagcagcatatcgccgccgtcttccacaaaggcgaaaatccggccatagatagctacagcgcctttttcgacaacggccaccgacagaaaacgcagcttgatgcgtggctgcgcgagcgcgatattcgcgaactcacggtgctgggtctggccaccgactactgcgtcaagtttaccgtgctcgacgctctcaatctgggctacaacgtcaacgtcattaccgacggctgccgcggggtgaatattcagccgcacgacagcaatcaggcatttatggagatggccgccgcgggcgccaccctctataccctggacgactggctggaaacccacgcataa

SEQ ID NO: 255526 - DNA, 747 bp, Klebsiella pneumoniae
atgaaaaagcgtgttctcgccctttgcctggccagtttcttctccatcaacgctttcgccctggttcccgccggtaacgacgtcaccaccaaaccggatctctactacctgaccaatgcgcaggctatcgacagcctcgcgctgctaccgccgccgccggaggtgggcagtatcgcgtttttaaacgatcaggccatgtatgagaaaggacgcctgctgcgcggcaccgagcgcggcaaactggcggcggaagacgcaaacctgagcggcggcggcgtcgccaacgccttctcgggtgccttcggctcgcccattaccgccaaagatgcgccggagctgcacaagctgctcaccaatatgattgaagatgccggcgacctggccacgcgaggggcgaaggagaaatacatgcgcattcgcccctttgcgttttacggagtcgccacctgtaacaccaaggaacaggatacgctatcgaaaaacggctcctacccctccggccacacctctatcggctgggccaccgcgctggtgctggctgagattaatccgcagcggcaaaatgaaattcttaagcgcggctttgagctgggcgaaagccgggtgatctgcggctatcactggcagagcgacgtcgacgcggcgcggattgtcggttcggcggtggttgccacactgcataccaacccgaccttccagcagcagcttcagaaagcgaaagacgaattcgccaaacggcagaagtaa

SEQ ID NO: 255527 - DNA, 1044 bp, Klebsiella pneumoniae; identical to SEQ ID NO: 175075

SEQ ID NO: 255528 - DNA, 2817 bp, Klebsiella pneumoniae
atgagtgactataaatcgaccctgaatttgccggaaacagggttcccgatgcgcggcgacctcgccaagcgtgaaccgggaatgctggcgcgttggaccgatgatgacctgtacggcatcattcgtgcagccaaaaaaggcaaaaaaaccttcattctgcatgatggccctccttatgcgaatggcagcattcatattggtcactcggttaacaagattctgaaagacattatcgttaagtccaaagggctggcgggctatgactctccgtacgtaccgggctgggactgtcacggtctgccaatcgagctgaaggtagagcaggaatacggcaagccgggcgagaaattcaccgccgccgagttccgcgccaagtgccgcgaatatgccgccacccaggttgacgggcagcgcaaagactttatccgtctgggcgtgctcggtgactggtcgcacccgtacctgaccatggacttcaaaacggaagccaacatcatccgcgcgctgggtaaaatcatcggcaacggccacctgcacaaaggcgctaagccggtgcactggtgcgtagactgccgttccgcgctggcggaagcggaagttgagtattacgacaaaacttctccgtccatcgacgtggcgttccacgcgaccgataaagcggcggtgctggcgaaattcggcgtggccgacgttaacggtccggtttctctggttatctggaccaccaccccgtggaccctgccagcgaaccgcgccatctccctgtccccggaatttgactatgcgctggtgcaggttgacggccaggcgctgatcctggcgaaagatctggtcgacagcgtcatgaaacgcgccggcattactgattacaccatccttgcggtggtaaacggcgccgagctggagctgatgcgctttaagcatccgttcctcgatttcgacgtcccggcgatcctgggcgatcacgtcactctggacgcgggtaccggtgcggtacataccgcgccaggccacggcccggatgactatgtcattggtcaaaaatatggcctggaagtcgctaacccggtgggcccggacggcgcctatctgccgggaacttacccgacgctggatggcgtaaacgtgtttaaagccaacgatattgtcgttgcgctgctgtctgaaaaaggcgcgctgctgcacgtagagaaaatgcagcacagctacccgtgctgctggcgtcacaaaacgccgatcatcttccgcgccacgccgcagtggttcgtgagcatggatcagaaaggcctgcgcgcgcagtcgcttgccgaaatcaaaggcgtgcagtggatccctgactggggccaggcgcgtattgaatcgatggtcgccaaccgtcctgactggtgtatttcccgtcagcgtacctggggcgtaccgatgtcgctgttcgtgcataaagagaagcaggagctgcatccgcgtactctcgaactgatggaagaagtggcgaaacgcgttgagatcgacggcattcaggcgtggtgggatctcgattcccgcgacatcctcggcgccgatgccgatagctatgagaaggtgccggatacgctggacgtgtggtttgactccggatcgacccactcctccgttgttgacgtgcgtccggaatttgccggtcacgccgccgatatgtatctcgaaggttctgaccagcaccgcggctggttcatgtcatccctgatgatctctaccgcgatgaagggcaaagcgccttaccgccaggtgctgacccacggctttaccgttgatggccagggccgcaagatgtccaagtctatcggcaacaccgtctctccgcaggatgtgatgaacaaactgggcgcggatattctgcgtctgtgggtggcttccaccgactacaccggcgaaatggcggtctccgacgagatccttaaacgcgccgccgacagctatcgtcgtatccgtaacaccgcgcgcttcctgctggcgaacctcaatggcttcgatccggctaaagatatggtgaaaccggaagagatggtcgtgctggaccgctgggcagtaggctgcgcacaagcggcgcaggacgatatcgtcaaagcctatgaatcttacgatttccacgaagtcgtgcagcgcctgatgcgcttctgctccatcgaaatgggttcgttctggcttgatatcattaaagaccgtcagtacaccaccaaggcggacagcgtcgcgcgccgtagctgccagaccgcgctgtatcacattgccgaagcgctggtacgctggatggcgccgatcatgtcctttaccgctgacgaaatctggggttacctgccgggcgaccgcgagaaatacgtctttaccggcgaatggtacaccggtctgtttggcctggccgacgacgaagcgatgaacgatggtttctgggacgagctgctaaaagtgcgcggcgaagtcaacaaggttatcgaacaggcgcgtgctgacaagcaggtgggtggctctctggaagcggcggtaacgctgtatgccgatgccgatctcgcggcgaagctcaacgcgctgggcgacgaattgcgatttgtcctgttgacctcaggggcgaaagttgccgattatgcgcaggctccggccgacgcatggcagagtgagctgctgaaaggcctgaaagtcgtgctgagcaaagccgaaggtgataagtgcccgcgctgctggcattacacgacggacatcggcaaggtggcggaacacgcggatatctgcggacgctgtgtcagcaacatcgccggtgacggcgaaaaacgtaaatttgcctga

SEQ ID NO: 255529 - DNA, 501 bp, Klebsiella pneumoniae
atgagtaaaccgattagttcaacggggctacgctggctctgggtcgtcgtagccgtgctgattatcgatttaggcagcaaattcctgatcctccagaacttcgctctgggggatacggtatcgctgttcccatcgcttaatctgcattatgcgcgtaactatggcgcggcctttagcttcctcgccgacagtggcggctggcagcgctggttcttcgccggtatcgctatcggtatctgcgtgatccttgcggtgctgatgtatcgctctaaggcgacgcaaaagctgaataatattgcctatgcgctgattattggcggcgcgttgggtaatttattcgacaggctttggcatggttttgtcgtcgatatgatcgatttctacgtcggggactggcatttcgccaccttcaaccttgccgataccgctatttgtatcggcgcggcgctgattgtgctggaaggcttcttgccgaacgcggctgcgaagaaacaggcgtaa

SEQ ID NO: 255530 - DNA, 450 bp, Klebsiella pneumoniae; identical to SEQ ID NO: 176965

SEQ ID NO: 255531 - DNA, 951 bp, Klebsiella pneumoniae
atgcagattctgttggctaacccgcgcggcttctgcgcaggcgttgaccgcgctatcagcattgttgaaaacgcgctgacgctatatggcgcgccgatctacgtgcgtcatgaagtcgtgcacaaccgctatgttgtcgacagcctgcgtcaacgcggcgctatttttatcgagcagattagcgaagtgccggacggcgcgatcctgattttctccgcccacggcgtctctcaggccgtacgcaacgaggcgaaaagccgcgatctgacggtttttgacgctacctgcccgctggtgaccaaagtccatatggaagttgctcgcgccagccgtcggggggaagagtcgatcctgattggtcacgccggtcacccggaagttgaaggcaccatgggccagtacagcaacccgcagggggggatgtatctggtggaatcgccgaatgacgtctggaagctggatgtgaaaaacgacgctaagctgtcgtttatgactcagacgacgctctccgttgatgatacctccgacgtgattgacgccctgcgcgagcgcttcccgaaaatcgtcgggccgcgcaaagatgatatctgctatgcgacgacaaaccggcaagaggccgtccgcgcgctggccgggcaggctgacgtagtgctggtggtggggtcgaagaactcctcgaactctaaccgtctggccgaactggcccagcggatggggaaagacgcctatctgatcgatgatgcgaccgatatccaggaagcctgggtgaaagacgcaacctgcgtcggcgtaaccgcaggcgcatcggcgccggatattctggtacagaacgtgatttcgcgtttgcaggagctgggcggcggcgaagcggtgccgctggaaggccgtgaagagaacattgttttcgaagtgccgaaagagctgcgcgtagacgtccgtgaagtagagtaa

SEQ ID NO: 255532 - DNA, 915 bp, Klebsiella pneumoniae
atgcgcttaactatcattctggataccgatcccggcattgatgacgccgcagcgattgccgcggcgctgttcgctcccgagctggatctacagctgatgaccacggtagcggggaacgtatccgtggagaaaaccacccgcaacgccctgcagcttttgcatttctggaacgccgatgttccgttggctcagggcgcttctatgccgctggtccgcccgctgcgcgacgccgcctccgtacacggcgagtccgggatggaaggctacgatttcgtggaacatcaccgtcagccgctggcaaaaccggcatttcaggcgatccgcgacgcgctgatgcacgctccggagccgatgaccctggtggcgattggcccgctaaccaatatcgcgcttctgctgacccagtatcccgaatgccgttttaatatccgtcggctggttatcatgggcggttccgccgggcgcggtaactttacgccgaatgcggagttcaatatcgctatcgacccggaagcggcggcgaaagttttccatagcgggctggagattgtgatgtgcgggctggatgtcaccaacgaggcgatgctggctccggactaccttgctacgctaccgacgctgaatcagaccgggaagatgctgcatgcgctatttagccactaccggagcgggagcatgagcagcggcctgcgtatgcatgacctgtgcgcgattgcctggctggttcgtccgcagctcttcaccctcaagccctgttttgtgacggtagaaacccagggaacctggacttcgggaacgacggtggtcgatatcgaaggcaaactgggccaaccggcaaacgtgcaggtggcgctgggtctggatgtagaaggttttcagcgctgggcagcggaggtgattgctttagcgccctaa

SEQ ID NO: 255533 - DNA, 939 bp, Klebsiella pneumoniae
atgaaaaatgaactatccgggatgaaagcctttgtcaccgttgcagagctaggctcttttagtaaagccgccgaacaattaaatcttacgcaaccggcattaactaagaagataaaaaaaatagagagtaatctggatattgcgctgttcgaacgaacgacgcgaaagattgcgctgacgcaagccgggaaaatgcttctcccaagagctaaatctttgatctccggccttgatgcggcaatatttgacctcaacgatttaacgtctcaattgcatgatacggttacgctatcctgcattcctactgccgtattttattttttaccgcgcgctatcgtgcaatttaatcaaagctaccccaacatcaaagtacgaatttatgaacaaggtattgaaacctgtatgaactcggtacgaaaaggcgatgttgattttggtataaacatgaacttcatcacacatccggatatcgatttcattcccttggtgaacgagccttttgttctggcctgccggcaagatcatcctctggcaaccaggaaactggtcgaatggcgggagcttgttagccagacgttaatcggcgtcaggaaatcaagcggcaatagacagttgatcgagaaatgcctggcggataaaccctggcagctgagctggttttatgaagtcagacatttgtcgacctcgctcggccttgtcgaagcaggcctcggagtctccgcactcccttgtctggcaatgccccaaagcggagggagcgccgtagtgagcgtcccgcttgtggagccggtcatcagacgcacgctgggtatgattcgcgttaaaaacaggcctctttccgcagcggcagagcgcttagcttccctgctactgatgatgtggacggatgaagcgggcacgctctggcgcaacgtcgtggattcaacgcagaaaacctga

SEQ ID NO: 255534 - DNA, 1056 bp, Klebsiella pneumoniae
atgaagagcattccctgtgtattaatgcgcggtggaacatccaaaggcgcctttttattagcggatgatttaccaaaggatattaaccaacgtaatgacttcctgttatccatcatgggatcgggccatgagctggaaattgacggaattggcggtggaagcccacaaaccagcaaagtagccattattagtcgatctgttagtgaaaaagcggacattgattatctgtttgttcaggttatcgtcaacgaacggcgggtcgataccacgccgaactgcggtaatatgctgtgtgctgtagggggattcgcaatagaacaggggttaattaaagcggattctccggtcacgagagtgcgcataaggaatgtgaacaccaatacttttattgaggctgacattcaaacgcctgagggaaaggttatctacgatggcgatacgcagatagacggcgttcccggccgtgccgcaccggttgcattaacctttttgaattctgcgggtgcaaaatccggccagcttttccctaccgggaatcggctggacgtatttgataatgtgcaagtcacctgtattgacatggcaatgccgatggtcatgattccagctcagaacttgggaaaaaccggttatgaatctgcctgcgaattagaccgggacacagcgcttttagaatctctggagtctattcgtcgacaagcgggaaaggcgatggggtttggcgatgtgacaaatatggttatcccgaaaccggttctgatttctcctgcgcttagcggcggaaatttaaatgttcgatattttatgccccacagttgccataaatcgttggcgattaccggcgctatcggtctggcgagtgcatgtattattccggggacgattgctaatgaactgacgaaattgtctggtgatggcatcgttaaaatcgagcaccccagcgggagtattgcggtcgacttaagtaatacgaccgaagcccctgaaacgatccgcgcctctgttattcgcacggcacggaagattctttccggctcggtttatattgccgactaa

SEQ ID NO: 255535 - DNA, 1260 bp, Klebsiella pneumoniae
atgtctccagttacgattacgttgtcgctattggttttttcgatcgtcatgttcgtttgggaaaaaataccattagctgtaactgccatgattgtttgtattactctggttgtcaccggggtcttcgatgtcaaaactgcttttgcaggttttattaatcagaatgttattttatttgtggctatgtttgtggtaggcggggctttattcgaaaccggcgtaaccgataaaattggcggtatcgtgacacgctatgcgcgtacagaaaaacagctgatagtcattattatgttagtgtgtgggaccctttctggatttttatcgaataccgggacggctgcagtgttaatacctgttgtgatcggcgcagcgataaaatcaggttatgcccagtcacgtctgcttatgcccctggcctttgcctctgcgttgggggggaatttgtcgcttatcggttccccaggaaatctgattgcacagtcggcgctggagcaggttggccaacgttttggtttttttgaatatgctaagctgggtattccgatgctggcttgcggtattctctattttgtcacgataggctaccgactattaccgcaaaaaagtacgctacaccagcaacgcactgaaagtatgcgcaagatagcgtgcccgaaatacaagcaggtgattgcgctgtcggtactaatcgcaaccgtatccggcatgattttcgaagaacagattggattgccgattgctattgttggctcaattggcgctttaacgctgattgtcacccgggtgattactgaaaaacaggcataccaggccatcgattcacagaccattttcctgttcggcggaacgctggcactagcaaaagcgctggaaaccaccggcgctggtgcgatcatggcgcgtgcaatgattgaacaactgggtaatcacgcttcccccttcttacttttaagcgcggtattgctcatctcctgtgtgttaacaaacttcatgtccaatacggcaaccgccgctttattaatgccgattggtctatctattgcgcattcgatgggggccgatccccgggcggtattaatggctatagttattggctgctcgtgtgcgtatgcaacccctgtgggtacgcccgccaatatgatgattttttctgcgggcggctataagtttattgattacgttaaaaccggattgccgcttattgttatatcggtaatcgtcagctttattttattgcctgtgttttttccattttattag

SEQ ID NO: 255536 - DNA, 2289 bp, Klebsiella pneumoniae
atgataaaactgtatgaccatggagtatgtatatcacaccagcatggtattatccctgttggtcatccttccttcccggtggacaagcaggaggcgcgtaaaggcacgatttcgtggtcgatcctctccgcccataatacttcaggcgatcaccgcaagttaaaaataaaatttgattgtatggcctcacacgatattacatttgtggggataatccaaaccgctaaagcgtctggaatgcagcgttttccactgccttacgtattaactaattgtcataattcgctatgtgcggtcggcggtaccattaatagtgatgatcatatattcggtttatcttcggccagaaagtacggcgggatttatgttccgccgcatatttccgttattcatcaatatatgcgcgagatgatggccggcggtggcaagatggtgctgggctcggacagccatacccgctatggcgctttagggacgatggccgtcggcgaggggggcggcgagttagttaagcaactgctgggagggacctgggatattgattatcccgaggttgttgcggtgtatttgacaggtaaacccagccctggcgtggggcctcaggatattgccctggcgataattggcgcggtgttccggcgcggttatgtgaaaaacaagataatggagtttgtgggaccgggggtggcgacaatgtctaccgatttccgcaacagtgttgatgtcatgacgacggagaccacctgcttatcgtctatctggcaaaccgatgaagagactcgaagctacttgcgcgttcatggcagggagcaagactattgttcgctctcagcatccgatatggcttattacgatggttgtatagaagtcaatttaagcgctatcaagccgatgatcgccttaccttttcatcccgccaacgtctatgaaattgatacgctgaaggagaacttgccggatattttgcatgaagtcgaaatggaatccgaaaaaatttcgcttgggcgcgcaaaactctccctgctggataaagtcgaaaagggtaagctccggatccagcagggaattattgccggttgtgccggcgggaattacgtcaacgtagttgaagcggcaaatgccttaaagcatcactcctgcggcgacaacgttttctctctctcgatatatccctcatcccagccggtgctgatggatctgaccaaaaaagggataacgaccgatttattaagcgctggcgcgattatgcgtaccgcattttgtgggccctgctttggcgcaggcgacacgcctatgcataatggattgagcattcgccatacaacgcgcaatttcccaaaccgggaaggttcaaaacccggaaatgggcaaatgtcggctgtcgcgctgatggatgcccgctcaattgcggcgacggctgccaacggaggtattctgacctcggcgtcagagctcgattgctgggagaacataccgcaatatgaatttgacgcttcaccctataaaaaccgggtctatcaaggctttattaaaggcgtatcccagcaatcgctgatttatggacccaatataaaagactggccggaaatgagtgagttaacggaaaatattctcttaaacgttacctctaaaatcatggatccggtgacgactactgacgagcttatcccatcgggagaaacctcatcatttcgctctaacccctcaggactggcggagtttaccctctcacggcgcgatccgggctatgttggccgcagtaaggagattgccgctctggaacaattgcgcgtcgcgggggacaatccttgcaggctgcatcctgaacttgaggacatctttacccaaatccgccagctgccggggcaggagggcgtcaccctgcagcagacggaaataggtagtatggtttatgcgataaaaccgggcgatggttcagcacgagaacaagcggccagctgccagcgcgtgctgggggggctggcaaatattgcgcaggaatacgccacgaaacgttatcgttcgaatgtgattaactggggaatgctgccgctgcaaatgaaagccttacccgaatttgaagtgggggattttatctttattccgggcataaaatccgccttagacagcgagctgggtcatattaccgcgtttgtcattagccgcgagcgccccataaaagagatcgcgctttacatggagggcctgacctcatcagagcgggagattattaaggcaggaagcctgattaattataataaatcacggttaacttcccaccatcagtaa

SEQ ID NO: 255537 - DNA, 954 bp, Klebsiella pneumoniae
atgaatctgaacttactgcccgatctcgccctgttcgtgcagattgtcgatcagggcagcttttccgccgtcgcgcgccagacaggcgcgacgccttccgccattagccgcagcgtctcgcggctggagcatgaaatgggctgcaagctgctgcatcgcaccacgcgcaagctgcgccttagcgatgccgggaaaacggtgtatgaacatgcgctggagatgctggagtcggcgcgtctggccatggattctgccagcagcgcccaggcggtgccgcagggtaagctcacgctaagcgtgccaaaagccgtgggacggtttgtcattcatccgctgatgctggagttttttagccgctacccgaagatcgacgtctgtctgcgccttgaggatcgggttctcgattttatcgatgacggtatcgatctggcgctgcgcatcacccataccccctcgccggggctgcacggtaagcctttgctgtccgtcagccatatcgtctgtgcgacgcccggctacctggcgcaatatggcagaccgcgaacgccgcaggatctgcgcgaacatagctgtatcagccttggggaaacccccgccgattcgcgctggaagtttcgccgcgacggcaaaacggagactatccagacccacggtcgttacgcggcaaaccacaccgccgtacgccttgatgccgtgaagcaaaatctgggtatcggcagcctgccgttgtttaccgcccgtgaggcgctggcgaacggcgagattgtgcaggttttaccggaatgggagtttatcagccgctattccggccagctctggctactgtggtcgggcaataagcacatgcccgccagaatgcgggcaatgattgattatcttagcgagaagatgaagccgactgcaggcagcacagccatagcgcaacgttcgaaaatcacggataagccgctatga

SEQ ID NO: 255538 - DNA, 630 bp, Klebsiella pneumoniae
atgactgaacgactttattacaccagcgatgccactgaatgccctgcgcgagtcgtcaactgcctgggcgaagccgacggccgctatgccattgagctggaccgcacgctgtttcatccgcagggcgggggacagccggcggatcgcggctggattggcgagcttgcggtcgagagcgttgccgcgcgcggcgagagcatcgtgcatattgttgcgcagccgctaccctccggcgaggtggcgatccgggtggacgcggacgcgagacggctgcacgctcggctacattccgccgggcacctgattggccaggccggagagcgctttggctggcggccgattaaggcgcatcactggccgggagaagggcgcatcacctttgccgccgggacgaacgcgtcactgcccgaagccagcgcgctgctggcgcagatcgaaggatggcaggcggaggatttaccgcgtcggatctcttttgccgaaggtctgcgcaaggtcgggttcggcgatatgccgagctatccctgcggcggcacgcacgtggtcagcctgtcagaactgggagaggtcgtcattacccaggtgaagatgaaaaaaggccagatgattgttagctacgctatagcgtaa

SEQ ID NO: 255539 - DNA, 699 bp, Klebsiella pneumoniae
atggatagcatcacaactctcatcgttgaagacgaacctatgctggcggaaattctggtggataccatcaagcaatttccccagttcgaagtcattggcattgcggataagctggaaagcgcaaaaaaaatgcttcgtctctatcagccccagctgattctgttggataactttttgcccgatggcaaaggcctcgatttgatccgtcacgccgtcaatatcaattataaaggacgtatcattttcatcaccgccgacaaccatatggataccatcagcgaagctctgcggatgggcgttttcgattatctgattaagccggttcactatcagcgattacagcatacgcttgagcgttttgcccgctatcgcagctccctgcgctcgagcgagcaggcgagccagacccacgttgacgcccttttcaatatccaggccaaagagcacgcggaagccgccggcaccgccctgcgcggaatcgatgaaagcacctttaaccgcgtattacagctcttcaccgacccggggatcgtccataccgcagactcccttgcgcgtatcctcggcagcagcaaaaccactgcccgccgctacctggagcaaggggtcaaaaacgattttcttgaggccgaaataagctacggtaaagtcggcagaccggagcggatttatcacggcaaaaatagtgagcacgtttaa

SEQ ID NO: 255540 - DNA, 1629 bp, Klebsiella pneumoniae
atgtttagccgaaaaatcacgcactggtttgcccgacgttcgttccagaaccgcatcttcctgttgatcctgtttacctcgacaatagtgatgctggcgatgtcatggtatctcaccagcatcacggaagagcgtctgcattatcaggtcggccagcgcgcgctgatccaggcgatgcagatctccgccatgcctgagctggtagaggcggtcgaaaagcacgatctggcgcgaattaaagcgcttatcgaccccatgcgatcgttttccgatgccacctacatcaccgtcggtgatgcaaaaggccagcgtctgtatcacgtgaatccggatgagatcggcaaatatatggaaggcggagacagcgacgaagcgctgtataacgctaaaagctacgtgtcggtgcgtaaaggatcgctcggctcttcattgcgcggtaagtcgccgatccaggacagcaccgggaaagtgatcggcatcgtctcggtgggctacaccatcgaacagttagagaactggctgagtctgcaaatcggatcgctgatgatcccgatggcgatcatgctgctcctgctgctctactgcgcccgacgcttctcgctgcatatcaaaaaacagatgctgaatatggagccgcagcagctatcacagctgcttatccagcaaagcgtcttgtttgaatcggtcttcgagggactgatagccattgactctcactaccgaattaccgccatcaaccaaaccgcaaggagattattaaacctcagccagccggaaactatcctgattggcaaaagcatcagcagcgtgatctctcaggagacgttcttttatgacgcgccgcagacaaataaaaaagacgaaattgtcacctttaatcagatcaaagtgatcgccagccgcatggccgtcacgctcaatagcgagccccagggatgggtcattagctttcgtagtaaagacgatatcaacaccctgagcctgcagctcagccaggtccagcagtatgcggataaccttcgcgccgtgcagcacgagcaccgcaatttgatctccactattgccgggctactgtttttgaaacgctacgataacgcgctggatctcattcagcagcaatctgaaagccaccagaaagttctcgattttatcgcccgtaattttaaagtgaaccatcttgccgggctgctgatcggcaaatattaccgcgccaaagagctcggattagagctggtcttcgatcccgcctgtcacgtggaaaccctcccctcctcgctttcgcataatgagtggatctcgatcgtcggtaacctgctggacaatgcctacaatgccgccttacgtcagccggcaggatcgaagcagatcgagtgcctgatcaacagcgagggcggcgaagcgatcgtcgagatcgccgaccagggctgcggaattgatgaatcgctgcgcgatcgtatttttgagcgcggcgtcaccagcagcgacagcggcgatcacggtatcgggctatggctggtacgcagctacgtcgagcaggcgggcggcaatatcgtcgtcgacgacaacatcccttttggcactatttttactctttatatccccctgacccgagatgaacaccatggatag

SEQ ID NO: 255541 - DNA, 609 bp, Klebsiella pneumoniae
atgaatattggggtcgagctgcttaatatcgccgacgttgagctccttaccggtgctcggcatgacctgcataacgccaatggcgccgacgtggctacgcaccgactgattaagccgcgattcctgatacccctgagcggccatcagcagccagtcaacatcgtagcgatcgccatatttgcgaaagatctccaccatggccagaaatttacgccgttctttttgccccgccgcgtttttaacgtagctggcatccttcaggtagcgcagcagtatcgtattacccagcctgctgccctggcgattcttgttgatgaacgcattaagcagggccagcagctgcgggctattgttacgtaccgcccaaccgatattaccttcgtcgcgcagaacaatgttctgatgaacctgaatcctggggaagacctgtttccagaacagggccttgtggcggtcgaccacgatcaatgggatcaggcccgcgctgagcatctctatcagatcctcatcttccagcgcttcgggcgccggttcgatggtgatggggggcagcgattgctgcgcaaagcgtgcgttgagcgcgaccaggctcgcgtaatagctggatga

SEQ ID NO: 255542 - DNA, 285 bp, Klebsiella pneumoniae; identical to SEQ ID NO: 190842

SEQ ID NO: 255543 - DNA, 366 bp, Klebsiella pneumoniae
atgaaatgggtagacattatgccgcgaaatgaaattcagcgttcagtgcttaacgaactggtgcaatggataaaaaacaatcttgcaaagaagctcacgatgcaggcgctaagccgcttttccggctactccgaatggcatctctttcgcctgtttcgccactattttaacatgtcgccgatggcgtatatccgccagcagcgaatgcaactatcccttaatttattgcagatcaacccgcctttccgcatcgttgatatttgtctgatggctggttatgaagatatcagcgcctttaaccgaacctttaagaggtattatacgatgacaccaacgcagtttcgcagaagcctgaacctgacctga

SEQ ID NO: 255544 - DNA, 390 bp, Klebsiella pneumoniae
atgaaatggactattcataatactcttgtctgcccgcattccggggtagctttttcctcaatttccagcctgcggtttttaaagtttattctgtggtatgaggccgacattttattactgccgggagagtcgataaaactctactcatcgagcgtgttaatcaacgagcaatatcatgcggtaaaagtttataacatcacgcgatacgatgaagcgcagtgggagaagctgcgggagcggccttcctgtccttatcattctaccgccacgacggcagactcctgccgttaccaggcgctctgcgccataaaacgctgcccgaacgactttccacgtgcagtaccggggctgccgtcggggcagcacgatctgggccagcagatacggtaa

SEQ ID NO: 255545 - DNA, 282 bp, Klebsiella pneumoniae; identical to SEQ ID NO: 175275

SEQ ID NO: 255546 - DNA, 1605 bp, Klebsiella pneumoniae
atgagtcgtagcgcgccacacaaggcgttgagaattgttggcatcgtgctggtcattctgctaccggtggtgctggcattgtggtttgcgcaaatccgcgccaaagcggaaaccgccgatcagctgcggctgttttctcggctggcgctacaaaaaacggagttggttattcgagaagctgacgaagcgcgcgataaggcccgtttgtatcagggagaagtgtgttcgccgtatcatcagcaatatctgctcggcattgtacgcggtctgctctatatcgacgacttaatctacgccaacggcagccattttttctgctccactgcggtacgccgcgagagggggtggcaaattccggccgcaacctataccaaaaagccggatatcgcgatttactactaccgcgaaacgcctttctaccctggctatgcgatgaactatctgcagcgcggccactatgtggtggtgattaatccgctctcgttcagcgcgctgatatccagtgacagcaatctcgcctggggcgtgtttgataccaaaacgaaccattttttttccgtcagcaagaacgccgaccctgaggaattacgtcatctgattcgcgctgaagaggcgctctttcagcaggatggccgcgtttatgccatcgcccattccaccgttcgcccgattgccgtcatcatgtccacctcgcgcgtcagctattaccagaatttttataatcaggtgacgctgactctgccgctggggctgatttgcagcgtgttgctgttactggtgtggtcgcgcacgcggcagcagtaccactctccgcgtaatatgctgcagcgcgcgttaagccgtcgccagctgtgcctgcactatcaaccgattatcgatattaaaaatcaccgctgcgttggtaccgaagcgttattgcgctggccggggtttgatggcccggtgatgagtccggcggagtttattccgctggcggaaaacgaagggatgatcgcccaggttaccgactatgtcatcgatgaggtattttccgatctcggcgaatttctggcgcggcatccgcacctgtacgtagcgattaatctctcggctgctgattttcaatccgcgcgcttgattgagcatatcaatgagaaggtccggcgctacgccatcaaggcggaacaaataaaaatcgaagtgaccgaacgcgggtttattgacgtcccgaaaacgacgccggtgattcaggcttttcgcgacgcgggatatgaaatcgctatcgatgacttcggcaccggctactccaatctgaacaatctccatgcgctcaacgtcgatatcctcaagattgataaatcttttgtcgacacgctgtcaaacaacaccaccagccacctgattgccgaacatatcatccagatggcgaacagcctgcatttaaagatcgtcgctgaaggcgtggaaacggcagagcaggtcgcctggctacaaaagcggggcgtgcaatattgccagggctggctttttgcgaaagcgatgccgccgcaggagtatatgcagtggctggctaacgaccgcaccagcctctgcccctggcaacaacgttatcaggcggaaatctga

SEQ ID NO: 255547 - DNA, 330 bp, Klebsiella pneumoniae
atgtcccatcaggatattatccaaacgcttattgaatggattgatgaacatatcgatcaaccacttaacattgatgtagtcgccagaaaatcgggatactcaaaatggtatctccagcggatgttccgctccgtgatgcatcaaacgctaggtgattacattcgccagcgccgtctgctgctcgctgcggaagcgctaagaaccacccagcgccctatttttgatatcgcgatggatctcggctacgtatcgcagcagactttctcacgggtgttccgccgcgaattcgaccgtacgcctaccgactatcgccatcagatttccgcctga

SEQ ID NO: 255548 - DNA, 459 bp, Klebsiella pneumoniae
atggaaaagaaatctccccgcatcaaaatgctgctgactcccggcgaagtggcaaaacgaaccggcgtggccgtctccgcgctgcacttttatgaaagcaaagggttgatccacagtcagcgcaacgcgggcaatcagcggcgctaccggcgcgacgtcctgcgtgcggtggcgatcattaagattgcgcaacgcattggtattccgctggccactatcggtgatgcatttggcgtactgccggaagggcataacctcagcgccaaagagtggaagatgctgtcgtcccagtggcgggaggagctggaccgacggattcacaccctgaccgcgctgcgcgatcagcttgatggctgcatcggctgcggctgcctgtcgcgccgcgactgtccgttacgcaacccgggcgataagctgggagaagaggggaccggcgcacggctgctggaagaggattaa

SEQ ID NO: 255549 - DNA, 669 bp, Klebsiella pneumoniae
atgttaacggtacatcatctcaatcagtcacgatcgcagcgcgtattatgggcgctggaagagttgcagctgccttatcaggttgtctcttatcagcggggaaaggatatgctcgcgccagcggagttaaaaagcgttcatccgttggggaaatcgccggtcgttgaagataacggccatattctggcggagtccggcgccattctggagtatttacaggaaacctatgatagcgccaggcgcttaaagcctgagtcggtggaagataaactgcaataccgcttttggctgcactatgccgagggttcgctgatgcccctgctgctgatgaagctggtgttttccagcctgggcaagcccccggtgccgtttggcatacgcacgctgggcaatgcattaggcaaaggggtgcaaaagacctggcttaaccgacaggttgagacccatgcccgctttattgaatcgcacctttctcgccagcgctggtttgccggcgctgagctgagtatggctgatattcagatgagctttccggcaatggcgctgctggcgcgcggcggggtgggggatttaccgcatctgacgcagtgggttcagcgggtagagcagcgtccggcctggcagaaggcgattgagcgtgggggcccatttaccttacccggcgaatga

SEQ ID NO: 255550 - DNA, 1350 bp, Klebsiella pneumoniae; identical to SEQ ID NO: 175270

SEQ ID NO: 255551 - DNA, 1647 bp, Klebsiella pneumoniae
atggaaatattctttaccatactcatcatgaccctcgtggtctctctctccggggtggttacacgcgtactgccctttcaggttccactacctttaatccaaatcgccatcggcgcgctgttggcctggcctaccttcggattgcatgttgaattcgatcctgaactctttctggttctgttcatcccgccgctgctatttgccgatggctggaagacgccgacccgcgagtttattgagcatgggcgagaaatcttcggtctggcgctggcgttagtggtggtgacggtggtcggtattggctatctcatctactggatcgttcccggtatcccgctgattccggcttttgccctcgcggccgtcctgtcgccaacggatgccgtcgcgctgtccggcatcgtcggcgaagggcgtattccgaaaaaaattatgggaattttgcagggcgaagcgctgatgaacgatgcgtccggcctggtctccctgaagtttgccgttgcggtggcgatgggcacgatggtctttaccgtcggcggcgcgacggtggagttcttcaaggtggcggtcggcggtattctcgcgggctttgtggtcagctggctgtacgggcgttcaatgcgcttccttagccgctggggcggcgatgaaccggcaacgcaaattgtgctgctgttcctgctgccgttcgcctcttacctgatcgctgaacacatcggcttttccggcatcctggcggcagtcgcggcggggatgaccatcacccgttccggcgtgatgcgcagcgcgccgctggcgatgcgcctgcgcgccaatagcacctgggcgatgctggagttcgtgtttaacggcatggtgttcctgctgttgggcctgcagctgccggatattctctccagctcgctggtggccgcagaggcggatcccaacgtcgaaacctggatgttgtttaccgatatcatcctgatttatgccgccctgatgctggtgcgttttggctggctgtggacgatgcgcaagctgagccagcgtttcctgaaaaagaaaccgatggagttcggctcctggaccacgcgcgagctgctcatctcctcggtcgccggcgttcgcggggctattacccttgccggtgtgctgtcgattcctctgctgctgccggacggcaacgtcttcccggcgcgctatgagctggtattccttgccgccggggtgattctgttctctctgtttgtcggcgtgattgtgctgccgattctgctgcgccatatcgagtcgaccgaccatgtacagcagcgcaaagaggagcgcctggcgcgggcggcaacggcggatgtggcgattgtcgcgattcagaaaatggaagagcgtctggcggcggataccaaagaaaacatcgataatcagctgctgactgaggtcagctcgcgggtaattggtaacctgcgccgtcgcgttgatgggcgtaacgatgtggaaacctcgatgctggaagagagcctcgagcgccggttccgtctggcggcgctgcgttctgaacgcggggagctgtaccatctgcgcgccacccggcagatcagtaacgagacgctgcagaagctgctgcacgatctcgacctgctggaagcgctgcttatcgaggatcagtaa

SEQ ID NO: 255552 - DNA, 882 bp, Klebsiella pneumoniae
atggatatccgaacgctgcgctattttgtcgaagtggtgcgccagcaaagctttacccgcgcagcggagaagttgttcgtcacgcagccgaccatcagtaagatgctcaagaatctggaagatgagctgaactgcacgctgctgatccgcgacggtcgtcggctgctgctgaccgataccggtcgggtagttttcgagcgcggacaggccatccttggtgaatttcatcagctggagtcggagctaagcgatattaatcatctgcataagggcgtactgcgtctcggcattccgccgatggtcgggatgttgatggccgaaccgattagccgctttcgccagcgctatgcgggtgtggaattgaaaatctccgaattcggcgggctgaccgtgcagcaggcggtaagcaacggtgaactggatttagccatgaccgcgcttcccgttgatgaggccagcggcttaaccacgctctcgctgttcagccatccgctctgcgtgctgacgccgagaacggcgcagtgggaaggcatcagttcgttgtcgccggaagcgctcgccgcacatccgctggtgatctacaacgaggatttcgccctcagccagcagctgatgcggctatttactcagcatgaagttaagccgcgtatcgccgtgcgcagcggacagtgggattttctggccgcgatggtacaggccggaattggcgtcgcgattttaccggagccgatttgccagcgcctcgacccgcagagcttttgctggatactgttacaaagcgatctacgctgggaactgggaatgatttggcgggaaggcgtgtacatgtcgcacagcgcgcgggcgtggctggagtgcagtaaggcgttctggctgaagtaa

SEQ ID NO: 255553 - DNA, 690 bp, Klebsiella pneumoniae
atgagtgatttccagctgagcgtcctgtgtcttcttgtcacgctggggctctattttgccaataaacggctttatcgccgcttccataaactgcccctgatgccgctggttttcaccccgatcctgctggtgatgatgctggtattcggccatatctcttatcaaagctatatgggggaggcccactggctgctatggctgctgggcccggcgactatcgctttcgccgtgccggtgtatgacaatctggcgattattaaacgccactggatgtcgctgacggccggagtaacgaccgcgtcggttgttgcggtgaccagttcggtgtggctggcgcgactgtttaccttgcccgatgagatccagcgtagcctggcggtacgttcagtgaccacgccctttgcgctggcggcagctaaaccgctgggcggtcagcctgatttagtcgccctgtttgtcgtggtcaccggggtattcggcatggcggtgggtgatgtgctgtttctgcgtctttctattcgcgaagggatggctaaaggagcgggtttcggcgcggcatcccacggcgccggtaccgcgcgatcttatgaactggggccgcaggagggcgtcgtcgccagcctggtgatgatgctttccggcgttgtgatggtattggccgcgccgctggtgcgctgggcaatgttctga

SEQ ID NO: 255554 - DNA, 1017 bp, Klebsiella pneumoniae
atggcgaccattaaagatgtagcccgactcgcaggcgtttctgtcgctaccgtctcccgcgtgattaacaattcaccgaaagccagtgaagcctcgcgccagtcagtaggcgcggcgatggaaacgctaaattatcaccccaacgccaacgcccgcgcgctggcgcagcagtcaacggaaaccgtcggcctggtggtgggtgatgtctccgaccccttcttcggcgcgatggtcaaagccgtcgagcaggttgcctacaataccggcaattttttgctgatcggcaacggctatcacagccttcacaaagagcgtcaggcgattgaacagctgatccgccaccgctgcgctgcgctggtggttcatgccaaaattatccccgacgacgagctggcctcgctgatgaagcaaatccccggcatggtgctgattaaccgtatcctgcccggcttcgagcagcgctgcgtggcgctggatgaccgctacggcgcgtggctcgctacccgccacctgattcagcaggggcacactcgtatcggctatctctgctcaaaccacgccatttccgatgccgaagatcggctgcagggctactattcggcgttaaaagagagcaacctgccgtgcaacgatcggctggtgacctttgccgaacccgatgagagcggcggcgaactggctatgaccgagctgctgggccgcggcagaaattttaccgccgtcgcctgctataacgactcaatggccgccggcgcgatgggcgtcctgaacgataacgggattgatgtgccgcgcgagatttcgctgattggttttgatgacgtgctgatttcacgctacgtgcggccgcggctgactaccgtgcgctatccgattatcaccatggcgactcaggccgctgagctggcattagcgctggcggaacatcggcctccgccggagataacgcatcttttcagccctacgctggtccgccgtcactcggtgattgcgcctctcgatagcgacaaatcgtag

SEQ ID NO: 255555 - DNA, 495 bp, Klebsiella pneumoniae
  misc_feature (34)..(43): n is a, c, g, or t
atgatccaacccctctacgccgcgccgcagcacnnnnnnnnnncgcagcacgcttcacgcgtgacggaatggctatggcgggcttttggcggtgaaacgctgccgcaggcgttcttcgccagtattgtcgggcatagccagacgccgggggcgctgccgatgacctttattgccgctgagggggagacgctgttaggcaccgtcggcctgtggcgctgcgatttaatcagccgtcaggacctttatccatggatggcggcgctctacgtggctcctgaagcgcgcgggcaggggctggccgggaaactacagcagcacgttatcgactatgcccgaaagcagggctatggcgagctgtttctctactccgcctgccgcgatttttatgaacgtttcggctggctgtacatcggcgaaggcctggattatccggccgccgccgtcagtttataccgctacgatttgtcgctatcgagaggcgcaatcaccgagtga

SEQ ID NO: 255556 - DNA, 774 bp, Klebsiella pneumoniae
gtggagaaggctatcattccgccggaaaagaaaccctaccaggaaataggtgatgatttacgcgcacagattgcgcaggggcgctatcccatcgggtcgcgcctgccgccggaacgcaatatcgccgagacctacggcgtgagccgcaccatcgtccgtgaagcgctgttgatgctggagctgcaggggacggttgatatccgccagggctcaggggtgtatgtgatgcgcatcccgcacgaggacgatagtgaggaagaacagatgctgagcagcgacgtcgggcccttcgaaatcctgcaggctcgccagctgctggagagcaacatcgccgcctttgccgccaaaatggccacccgcgccgatatcgataacctgaagcgcattatcgagcaggagcagcgggccattgccgctaacgataccagccaggacaacgcccggctgtttcacctggtgctggccggcgcgacgcaaaatcagatgctgctggcgacggtcgagcgcatctggctgcagatggacagcagcccgctgtggcagcagttcaacgtgcacattgccagccgggcgtatcgcctgaagtggctcggcgatcggcaaacgcttctcgccgccctgcgtcgtcgcgatgtgatgggggcctggcaggctatgtggcagcatctcgaaaacgttaaaaacagtctgctggagctgtccgatgaagacgcgccggactttgatggctacctctttgaatcggtgcctatttttcagggaaagctggtgtga

SEQ ID NO: 255557 - DNA, 1428 bp, Klebsiella pneumoniae
atgacgacagtaaagatggccattccccgcgactttatcctcggcgccgccgcttcggcgtggcaaaccgagggctggagcggcaagcaagagggtcaggattcctggcccgatctctggtacaagaacgaccgtcacgtctggcataacggctacggtccggctgtggcgacggattttatcaaccgcttccgcgaagatgtgcagttgatgaagctggccgggctcacccactaccgtacgtcgataaactggtcgcgctttctcaccgattatgaaaacgtcacggtcgatgaagcctatgcgacgtactacgaccagttgttcgatgaactgctggccaacggcatcgagccgatgatctgccttgagcactatgaactccccggctatctgctggagcagtacggcggttgggcgtcaaaaaaagtggttgcgctgtttacgcagtatgcagagaaagttttcgcccgctatcaccgcaaggttacgcgctggtttactttcaatgagccgatcgtcgtgcagacccgcgtttacctggacgcgctgcgctggccctacgagcagaataccggcatctggatgcagtggaaccaccacaaggtgctggcgacggcaaaagtggtccagctgttccgcgagaaaggctatcgcggcacggtaggctgtattcttaacccggaggtaacgtacccgcgctcaacagcgccgcatgacgtgcgcgccgccgagcgctacgatctgttctataaccggatttttctcgacccgctggtccacggcgaatacccgcccgagctgctggccctgctcgaacagcacgaggttgcatgggattatcgagcggaagagctggcgattatccgcgaaaacaccgtcgatgagctggggattaacctttactatccgcatcgcgttaaagcgccatcgcgcgcctggcacccgcagacgccgttccatccggcttactactatgagccctttgaactaccgggacggcggatgaataactcccgcggctgggaaatttatccgcaaatcatttttgatatggcgatgcggatcaaacgggactatcgcaatattccgtggttcgtggcggaaagcggcatgggtgtggaaaacgaagggcagtttcgcaatagcgaaggcactatcgccgacgactaccggatccgttttatcagcgagcatctttggcagacgctgcgcgcgcgggaagcgggagccaactgcctgggttacatgctatgggcatttaccgataacgtttcgccaatgaacgcctttaaaaaccgctacgggctgattgaaatcgatctgcaaaataatcgtgcccggcggcccaaggcttccgccagctggttccgtaagcttggcgagagtcgcgaattgacgctggatattgatgatgagtggcgctag

SEQ ID NO: 255558 - DNA, 1338 bp, Klebsiella pneumoniae
atggcattgcaggacaaactgatcgactcactggggagtttcgccacgaaattcaacagctaccgctacatcatggcgataaaatccgcctttattaccctgatgccggtgatcatcgttggcgccttttcggtgctgatctccaatatggtgctggatccaaaaaacggcctcgccagctttcaggcgctctcttttctggcggcgctcaaacctattaccagcgcgatcaactacgccacccttaactttctcaatattggcgcggtgttccttattggcattgagctggggcggattaacggcattaagagcctgttccccggactgctggcggtgatctgctttatctgcgtcacgccgaccaccgtcgtgatgatggtcgacgggcaaatgcatgaagtgaaggatgtcctgctgcgccagttctccgatacccgcagcctgttccttggcatgtttatcgctattctgtcggtggagatctactgctggctggagggccgtaaggggctgaagattaagatgccggataccgtgccgcccaacgtatcggcatcattttccgcgctgatcccggccattatcaccaccacggtgattgccacctttggctttatttttcatcaggcgaccggcatgtatctgtatgacgcggtctatcaggtggtgcagcagccgctggagcgggtggtgcaaagcctgccggggatcctgctgctgatgtttgtcgcgcagctgttctgggttatcggcattcacggtaatcagatgatcaaaccgatccgcgaaccgctgctgctgggagccattaccgtcaatatgagcgcctttgagcagggcaaagaagtgccgaatatcatcaccatgccgttctgggatgtctatatgagcattggcggatcgggactgacgattggtctgctgattgcggtgatgatcgccactaaacgcaaagagatgaaagagatcgccaagctgtcgattggaccgggcctgttcaatatcaacgaaccggtcattttcgggatgccgatcatgctcaatccgatcctcgcgatcccctttattattacgccgctggtgaccggcagcatcggctacttcgcgactgccgccggttttgccggtaaagcggtggtgatggtgccctggaccacgccgccgctgatcaacgcctggctgtcaacggcgggctcgatgggcgcggtggtgacgcagcttatctgcatcctgaccgcggtgcttatctacctgccgtttgtcaaaattgcttcccgtcgcgcggaaaacgcccagcgtcaggcggacaacgcgcaagccagcgaaaatgcatga

SEQ ID NO: 255559 - DNA, 1263 bp, Klebsiella pneumoniae
atgccacactcgctttacgccaccgataccgacctgaacgcagacaatctgctgcgtttgcccgccgagttcggctgcccggtttgggtctacgacgcgcaaattatccgccgccagattgctcagttgagcaagttcgacgtagtgcgttttgcgcagaaggcctgctcgaatatccacatccttcgcctgatgcgcgagcagggcgtgaaggtggattcggtgtcgttgggcgagatcgagcgcgcgctggctgccggatacgatccgcatcagcatccggaagatatcgtctttaccgctgatctgatcgacgatgcaaccctggcgcgggtgaaagaactgcagatcccggtcaacgccggctcaattgatatgctgagccagctgggcgaagtttcaccgggccatcgcgtctggttgagggttaacccggggttcggtcacggtcatagccaaaaaaccaataccggcggcgaaaacagcaagcacggcatctggcacagtcatttaacggcggcgctggaagtgatgcgtcgttatcagctacagctggtgggaattcatatgcatatcggctccggcgtagactacggccacctggagcaggtctgcggcgcgatggtgcgtcaggttgtcgaattcggtcaggatctgcaggcgatctccgccggcggcgggctgtcgatcccttaccgcgaaggcgaagaggcgatcgataccgatcactatttcggcctgtggaacgcggcgcgtgaacaggtcgctaaacacctgggccatccggtcgcgcttgagatcgaaccgggtcgcttcctggtggcggaatccggcgtgctggtttctcaggttcgcagcgtaaaagagatgggcagccgccacttcgtgctgattgacgccggttttaatgatttgatgcgtccggcgatgtacggcagctatcaccatattaccgctctggccgcggacggccgcgatctgagcgccgcagcggagattgaaaccgtggtggccgggccgctgtgcgaatcgggcgatgtctttacccagcaggagggagggaaagtggagacccgcctgctgcctgcggtggtgccgggcgattatctggtgctgcacgataccggcgcttacggcgcgtcgatgtcctcaaactacaatagtcgtccgctactgccggaagtgctgttcgacaacggtaaagcgcggttgatccgccgccgtcagactatcgaagagctgctggcgctcgagcagctgtaa

SEQ ID NO: 255560 - DNA, 924 bp, Klebsiella pneumoniae
atgcccgccgttaatctgcgtcatattgaaatcttccatgccgtcatgaccaccggcaatctgaccgaggccgcaagaatgctgcatacctcgcagccgaccgtcagccgcgagctggcgcgttttgaaaaggtgctgggattaacgctgttcgcccgcgcccgcggccgtctgcagccaacggttcagggtttacgcctgtttgaagaggtgcagcgctcctggtacggcctggacagaatcgtcagcgctgcggaaagcctgcgcgagttccgccagggcgaactgtcggtcgcctgtctgccggtattttcccaatcattcctacctctactgctggagccttttttgacgcgctacccggaggtcagcctgcaaatcgtcccgcaggagtcgccgctgctggaggagtggctttccgcccagcgccacgatctgggattgacggagaccctgcatactcccgccggaaccgagcgtacgcccctgttgaccctgaatgaagtgtgcgtattgccgcagggccatccgcttgccgctaagcaagtattaacgcctgcagactttaatggtgaaaactatattagcctgtcgcgcaccgacagctaccgtcagctgctcgatgcactgtttcatgaacatcaggtgaaacggcggatggtggtggaaacgcacagcgccgcctccatttgcgctatggtgcgcgccggagtcggtatttcagtggttaacccgctcaccgcgctcgattatgccgggaacggcgtggtggtccgacgctttagcattgaagtgccttttaccgtaagcctggttcgcccgctccaccgcccgggatccgcgctggtcgacgctttttgcgatcatttattaaatgaaatacccagcgtcaggtcctcattggaaagcctgatgaataattaa

SEQ ID NO: 255561 - DNA, 708 bp, Klebsiella pneumoniae
atgaatgtaaaattgaacctctgtgcgctcttattagcatgcctcgcaccaataagttacgccaatatgtccgtctacccgatgtccgttgatatgaacaatcaaggtgaaggcaatgtccgtgtgatttcacgaaccaacgatgttcagtttatcaaaacgactattgtcaaaatttccgatgctggtacagcaaaagaaagggaaaacgaaattaaaaccggcgatcccaatgcgattgtggtgatgccgccaaaattcgcgctcccggcaggcgccagtaaaatggtgcgactggtgtcgatggagcccgcccagcaagagaccacttatcgcgttaaatttgaagccgtttcgcaacttgatgaccctctggaaggaacgaaaggcaccaaaacgcagctcaacattaatctcatctggggggttctggtaagcgttccgccagagcatcccgaactgaaaatgagcttacagccgggtggggaaattaccaataacggtaaccagcgttttaaaattttaaaaattggcctgtgcaagaaagcacaggcggataaagagtgcgcatggcaagacgtagggcgaaatctttaccctactgcccattttgcaccaaagaacatattgaattacgaccgcgtcgttattcaatattggaactggattgataagaccaggaaatctcaaagcttctcaattcattaa

SEQ ID NO: 255562 - DNA, 519 bp, Klebsiella pneumoniae
atgaaagcagcaatttctaaatctttacttgctttggcaatggtatccgtaatgggttctgctatggcagtacaaaaagatattaccgtaactgcaaacgttgacgctgccctggatatgactcaggtcgacaactctgcgctgccgaaaaacgttgatatgcagtatatcccgggcaccggcctggtaccgtatcagctgcagaccaaaatctgggcaaacgacaccgcgaaagatgtcatgatgcagctgaccagcgatgcagtactggttaacagcctgggcggttcaaccgttccgatggaagttacctggggcggcgaaaagctttcaactaccccagcgacgatgaaagcgaccgaactgttcccgaatccggatactgctctgcagaccggttctgttgctaaaaccctgcagatcgctcaggcaactcaggaacctctggcgactggcacctaccagggcgtagtcagcatctatctgtaccaggcaacaacggctccagttactcagtaa

SEQ ID NO: 255563 - DNA, 2697 bp, Klebsiella pneumoniae
atgaaaagatcaattcttggactattaatattttccatactcaatgttgcaaatgcacgtaccgagaaaattcctccaggatttgaaattatcgtactcggacaacaggaatacctggacgtctacctcgcgggacgtaatctgggtaaatattttgccaccgttagccttgataccgttaagttcgatcaaccgcaaaaaatcatcgccgccatgggccttgacaacgatcctgcgcgtcttaaagcgattacagcaaaactcagccagccccttgagcgccacggcgaactggcatgcagcgtcattaaccacagcacgggttgcggctacctgaccaccaaagatgtcgcgctgatttataacgacgaacaaaactccgtctctttgtttcttaataaagactggtatcccgaaagcgggaaggagacgctctatcgccccccaacccaggacgataacgtggttaatgcctttgtccaccagcaagatattaacgtctccattcaggatgactacaaatcggcctggttgcagggtaccggcgcgctgggcgttacggacaacagttacatcggcgcttactggagcctgaacggtaacgaaagcgatggcgaaaccgaaacggacgctgacgtcagcgaactctactatcgctacgaccttctgcagagattttatgttcagggcgggcgaatggacagccggagcctgtacaatctcaacggtggtaactttaatttctcattcttaccgttggatacctttgacggtatccgcgcaggttctacgctaagctacttaaaccaggagcaagccagtcaggggacgcccgtcaccatactgctttcccgcagctcacgcgtggatgcttaccgcgacaatcaactgctcggttcattttacctgaacggcggcaatcagaagctggatacatcctccttcccctcaggaagttatacgttacagctaaagatttatgaaagtaaccagctggcgcgtactgaagtcgtgccatttaccaaaaccggcgacatgacagatggccatattcaatggtttattcaggccggtaagctggccgagagcaccagcacatcacaaaacgacaacaatgatggcgcgacgtctgcgcaagcggggatccgtatccccgtcactccccatattgaactgacgggcggcgtcgcctctgtcgataacaacttctcggcggagattaacagtcacgtcatcccggctctcggcgactttggcgatctggatttacagaacggctttttctataacgaccagggcggccgcggtaatatgcagcagttaaactggcatattccacaatggccggcacttagcgtgtaccggaaggataccagcggaggtcaatgttccggcgatagcgatgccaaagactacgatctcaactgctttgaaagcgtcaacgtcggcctgacgcagaatgcatgggactggaatatctccctaaactggaaccgtacccgtaatcacgcgaactatcatactcactgggataacagcgaagattttgcgaataactatttcagccaggccgatggcaatagcacatctgacagcgtgcagctgagcgctacgcgctccttcagcctgacaaactggattgtaaataccagccttggcgtcttctcccgcaacgacagctccagcagcggtaatgataacggcgcttatctgatgtttacgtttagcgaaacgccgcgccaggacaacaacgcccgcagccggtccactacaatcggcgttgactatcgaaccagcaaggatagtagcgatcggacgtcgtggaatctgtcacgtacctggtatgatgataatgtgaatcatcgggaagcgggcttcagcctgagcggaattaacaccgatacgctggacagcggaatcaacggacgcctcgacagtttgtacggcaacttcagcgcttatttgtccgacagttacaatattgaggaccatacccacacaaccgcctttaccggtagctacagctcgaccctggcggtcagtcgccatggcgtacagatcggtcgctcggggaacggcgatccttccgctgcggttctggttgcagtgaaaaaagtgaatgacgaagacgccgatgagctatccgtcgacgcttcagcaaacggtagccgggccagcctgacggggcaggagtccgtattgttcccctatacgggttatgaatcgggctacctcgaggtcaacgacagttcccgtaaaaatcagtccggcaccaccaacctgatcacaggctccgggagacaggatttgatgctacttcccgggaagctgcgatatcgcgagatctccgccagctttagctacaactacatcggccgtttagtgatccccgacacggttaaacgcttcccggtcatcgggctaaacagcacgatgctgctgatggcggaagatggcggatttaccctggagatgccgggctcggcgcgagacttatatgtacttgccggctcgacttacctcaagtgcccgctcaccgtggtcaaaaagcgcgccagcattcgctatgccggaagtatcgtctgtaccatcgttaattacgagagattgccgtcacaggttcaggtacaggctcagctaaaacaatcgctacgcaagcaggcgctggaaactgcccaaagggagagtactgaatga

SEQ ID NO: 255564 - DNA, 1119 bp, Klebsiella pneumoniae
atgaaattagtcccatttttagcgctctgcggatggatgattagcggcgctgcagcggcattgacacccgttggcccgactccgacagtctcgacgctgcaggattatgaaatcccttccggcgcgccagccgacatctatttatggagccaggactatgccggtacctatggatattacgacggcggcggcacctatacctgtcagtttaacgatgtacagcaaacctgcagtcatcaaaagaatagctcaacgattacgatgatcctgaaagaaaagcgcagcggcatgacgcatcctgtgaaattacaggcctatatggatcagctgtattataaccaagcagacccaacgcaatcaaaaatctgcggctctacattaccgttgaatagcgcagtttatactagctgctacaccagcacttcaggttacaaaactaacgccaggttgcttaccgtctggcttccgcagagcgaaatgaacaatcttccgatcggcgggatatgggaaggccagctaaagctcaaatatgctacatatagccgtaacctgaactacagcgcaaatatcaccctaaaggggaaagcgccctcccgacaggacatctttttcccggaatttaacggtgcgaatccactggtgcagcttgatctgcaccctaccggttccgtgaccggtaataacctggtggaagatatcaccacgctggatatgtgcctttatgatggttttaactccaacagcgacagtatgacgctgtccttcagagatgagggaaaaggcgggtcggcgcgaaaaagcggcgagttctccatctataacaccgcatactccgggaccggtcagggcgagcggatagactaccgggtagaaatgtttaacccccatacccacagctggatgacaatgaaaaattcagaaacagtgaagatctcggcgggcgctaacggtcaggatcaggtgcgtccggtacgtctgccgtcaatcacctatccggtactctgcgctccgacgccgctgcggctgatcgtcagcaaatttagtgtgtcgcaaaaatcagccggatattataaaggtaaactgaccgttgaatttagcccaagcctgaacagcatctga

SEQ ID NO: 255565 - DNA, 693 bp, Klebsiella pneumoniae
atgaaaacgattggtctgttaggcggtatgagctgggaatcaacgattccttactaccggttgataaatgaaggtattaaagcacgcctcggcggtctgcactccgccagcctgctgttgcacagcgtcgatttccacgaaattgaagcctgtcagtcaaacggcgactgggaacgcgcgggcgagatcctcgcgcaggcggccttcgacctgcagcaggcgggcgccgaggggatcgtcctgtgtaccaacaccatgcataaagtcgcgcaggcgatagaaacgcgctgcgacgtgccgtttttgcatattgccgacgctaccggacgagcgattatcgcaaagggccagcgccgcgttgcgctattaggcacgcgctataccatggaacaggatttttatcgcggccgcctgcagcagcagtttgctattgatacgctgattccggaagctgaagatcgcacgcggattaaccagatcatttttgatgaactgtgcctcggcgtctttaacgcgcattcacgcgactactatctgcaggtcattgacgctctggcggagcagggggcggaaggggtcatttttggctgcaccgaaatcggcctgctggtgccggaagagagcagcccgctgccggtgtttgataccacagcgattcatgcggcggacgcggtggagtttatgctctcctga

SEQ ID NO: 255566 - DNA, 327 bp, Klebsiella pneumoniae
atgtttatttttcataaagagaccacccttgaagatctgggtaatggcgtcacgcgccgcattcttgcgcacgatggcaaaatgatggcggttgaagtgaacttcgaacaaggcgccattgggccgatgcataaccacccccatgaacagcttacctacgtgctctcaggcgagttcgagttcaccatcggtgatgaaaagcacgtggtcagcgccggcgatacgctctacaagaaaccggaaattatgcacggctgcgtttgcctcaaggcgggaacactgctggataccttcacccctgttcgtcaggattttctgcaaaagtag

SEQ ID NO: 255567 - DNA, 912 bp, Klebsiella pneumoniae
atgatttctgcgagcacactgaactcagaactcattaataaaatcgcacaggattttgcgcaggccaccagtctggcggtggtggtcgtcaatattcatggtgatgaaatatctgaactgtttaacttcacacctttttgccagctgatgcgccagcatccccagcacagcacccgctgtcgaatgagcgaccgctgcggcgggcttgaggcgtctaaaaccgatcagctctgtatctaccgctgccacgccgggttaaccgatttctccattcctctggtcattgccgggcaccttgtgggctttgtgctttgcggccaggtgcgcttaagcaacgatgttgaactggtcgatatcctcaacgtggatgaccgctggcaggccgaccctgagctgcttaaagcgtttcgcgacgtgccggaaatggactactccagagtgattgcttctgctgatttactgaagctcatcgtcgaaaactgccttaaaaaacagctcaactttgtggtgattaaagataatccccagcagccggaacctgcgcgcgccagccgcgttgccagccctcatgacagcaaaatgaagaaggcgctgcgctacattgatgcccatttatccgacgagcttcgcctggaagacgtcgccgctcacgtttatctcagcccctattacttcagtaagctgttcaaaaaatatcagggtattggctttaatgcctgggtgaaccatcagcggatggtgagcgccaaagagctgctttgccacagcgactggagcatcgccagcattgcgcggaatttaggattttcgcaaacaagctatttttgcaaagtttttcgccaggcctatcaggtgactccgcaggcctatcgccagcaaattaacgccagatcacaaactgagccattttaa

SEQ ID NO: 255568 - DNA, 1380 bp, Klebsiella pneumoniae
atggcagccaggcagcacgcattcattcttgcaggtaccggcagcggttgtggtaaaactacggtcacgcttggcctgctcagcctgttgaagcagcgcggcatgcgggttcagccctgcaaagtcggcccggactacctcgacaccggctggcacaccgccgtcagcggcgtcgcttcccgcaacctcgacagctttatgctcccggagccggtgcttaacgcgctattttgcgaacagatgcagcgggcggatatcgcggtcattgagggcgtgatggggctgtatgacggctttggtaccgacccaggctactgcagcaccgccgcgatggctaaacagctcggctgtccggtcattttgctggtagatggcaaagcggtttccacctccatcgccgccacggtgatgggatttcaacacttcgaccccagtcttaacattgccggcgttatcgtcaatcgcgtcaacagcgaaagccattatcagcttctcaaaggcgccattgaacgctactgcgagctgccggtgctcggctacgtaccgcgagtggaaggggtggcgctacccgaacgccatctgggactggttaccgcccgcgagtcgctggttaaccagcagccgtggcgcgattttgcccaaacgctggcgcaaacgctggatattgaacagcttcttaccctcagccagctctccatcctacccgccggggagtggccgacgctgccgtcccctgatgctggcgcgggcctgacgctggcgctggccgacgacgaggccttcaacttttactacccggataacctctcgctgcttgaacgctgcggagtgaatatcgtgcgcttcagcccgctgcacgatagcgagcttccaccgtgccagatgatttggctcggcggcggctatccggaaattcatgctgccgcgctggcggccaatacgccgatgctggcgcagctgcaggaggcgcaccggcgcggggtggcgatttacgctgaatgcggcggtctgatgtatctcggcagctccctggaagacgccaacggtgatatctacccgatggccaaccttattcccggccatagcaaaatgggcaaacggcttacccgctttggctactgcgaggcgcgagctatgcgcaaaacgctgctggcggcgccgggcgaaaccctgcgcggacatgaatttcactactcggattttactcccgagtccccggcggttctggcctgccgcaaggtccgcgacggtatgacccttcagcagtggtccggcggctggcaggtgggcaacgcgttcgccagctatctgcacctgcactttgcgcagcgccccaccatgctcaaccactggctggctgcggcaaggagcgcgctatga

SEQ ID NO: 255569 - DNA, 456 bp, Klebsiella pneumoniae
atgggcatcgactcgcaggtggtggtcaccatgagcaacttcgtcggctacatgattgaagaggccgtgcgcctcgggttccgtcagattgtgctgattggccatcccggcaagctgattaaagtcgccgccgggatcttccatacccacagccatatcgccgatgcgcgcatggaaacgctggtcgcgcatctggcgctgttgggggcgccgctggcgctgctgcaactggtgagcgaatgcgataccaccgaagcggcgatggagcacattgatgcgtacggttttcagactatctataaccatcttgctgaacgcatctgcctgcgggtgatgcagatgctgcgttttaccaaaacgccgcccgtctgcgacgccatcatgttctcctttgataacaaggtcctcggcagcaatcgcccggtggccgagattgcgcgggagatgtcatgttaa

SEQ ID NO: 255570 - DNA, 1734 bp, Klebsiella pneumoniae
gtgctacaaatccgccagttatgtatcaccagccttttgctggtcagcggggtcgccagcgcagcgaacgtgcgtttgcaggttgaggggttatccgggggactggaaaaaaacgtccgcgcccaactctctacgatccagagcgatgaagttacgccggaccggcgctttcgcgcgcgcgtggatgatgctatccgtgaaggtctgaaagcgctcggctactatgagcccaccatcgattttgatttacgtccgccgccggcgaaggggcgccaggtactgatcgccaaagtcacgcccggcgaaccggtgcgcattggcggcactgaagtcattttacgcggcggagcccgaaccgatcgcgactatctggatttgttaaacacgcgaccggccatcggtaccatcctcaatcacggtgattatgatagctttaaaagctctctgacccgggtcgcgctgcgtaagggctacttcgatagcgagtttaataaaagccagcttggggtttctctcgaccgtcatcaggccttctgggatatcgactacaacagcggcgagcgctaccgctttggcccggtgacctttgagggctcgcaaattcgcgacgaatatctgcaaaatctggtgccgtttaagcagggcgactattacacctcgcaggatctcgccgaactcaaccgccgcctggcggcgaccggctggttcagttccgtcgtcgtggcgccgcagtttgagaagtcccgccagacgaaagtgttgcctttgcagggcgtggtttctccgcgcaaagagaatactgttgagaccggggtcggctactcaaccgacgtcgggccgcgcgtcaaagggacctggagaaagccgtggatgaactcctacggccacagtctgacctccagcctcagcctgtccgctcctgaacagcagcttgatttcagctacaaggtaccgctgctaaaaagcccgcttgaacagtactacctgatgcagggcggctttaagcgtaccgatctcaatgatacccaggcggattctaccaccctggccgtgtcgcgctattgggagatgtcgagcggctggcagcgcgcgctgaacctgcgctggagtctcgaccactttacccaggccaacgtcaccaataccacgatgctgatctatcccggcgtgtcggtgaaccggacccgttctcgcggcggcctgatgccgacctggggcgattcacagcgctattcggtggactactccaacaccatgtggggctcggatattaactttatcgtgatgcaggcgcaggacgtctggatccgcaccctttatgaccgccaccgcttcgtggtacgcggcaaccttggctggattgaggccgataacttcagcaaagtcccgccggatctgcgtttcttcgccggtggcgaccgcagcattcgcggttataaatacaaatctatctcgccaaaagatgatgacggcaagctgatgggggcttcgaagctggccaccggctcgctggagtatcagtacaacgtgagcggcaaatggtggggcgcggtgttcgtcgatagcggcgaagcggtgagcgatatccgcgaaagcaactttaaaaccggcgctggcctcggcgtacgctggcagtccccggtcggtccaatcaagctggatatcgccagaccgatcggtgacaaagaagaacacggtttacagttttatatcggcctggggcctgaattatga

SEQ ID NO: 255571 - DNA, 639 bp, Klebsiella pneumoniae
gtgagtctatttgataaaacgcatcttgtcgcccaagcggacgcgctgccgggacgcaatacgccgatgccggtggctacgctccacgccgtcaatggccattcgatgaccaacgtccccgccggaatggaagtcgctctgttcgccatgggctgtttctggggcgtcgaacgcctgttctggcaactgcccggcgtttatagcaccgccgcaggttacaccggcggctacacgccaaaccccacctatcgtgaagtttgcagcggcgagacgggccatgctgaggccgtgcgcgtggtctacgatccgcaggttatcagctatgagcagctgcttcaggtcttctgggaaaatcacgacccggcgcagggcatgcagcagggtaacgaccgcggcacgcagtatcgttccgctatttatccgctgacgccggaacagagcgaagccgcgaaagccagcctcgcgcgtttccaggcggcaatgaagcaagccaacgacccgcgcactatcaccaccgagatcgccacggcaaagccgttctattatgcggaagacgatcatcagcagtatctgcataaaaacccctacggatactgcggtatcggcgggattggggtttgtttaccgccgcagccctga

SEQ ID NO: 255572 - DNA, 207 bp, Klebsiella pneumoniae; identical to SEQ ID NO: 176751

SEQ ID NO: 255573 - DNA, 558 bp, Klebsiella pneumoniae
atgaccctacgtagattactggccgtttcatgtctcctgttcccactgttggcctcggcgcataactttgtcgacggtcagcgcgttgcgccggtcggcatagcggatcggggagaactggtgctggataacgataaatttagctataaaagctggaatagtgcgcagctggcgggaaaagtgcgcgttgtgatgcacattgccggtcgctcgtcggcaaaagaaaaaaacgcgcccttaattgaagccattaaaagcgcgaagctgccgcacaatcgctaccaaacgacgactatcgtcaataccgatgacgctatcccaggctcgggaatgtttgtccgcagcagtatcgagaacaataagcagctctacccctggtcacagttcatcgtcgacagcaacggcgcggtgcgcaaagcgtggcagctcgaagaagagagttcggccatcgtggtgctggacaaagagggtcgcgtgcagtgggctaaagacggcgcgctcagccagcaggaggtgcagcaggtagtgggcctgctgcacaagttgcttaataaatag

SEQ ID NO: 255574 - DNA, 744 bp, Klebsiella pneumoniae
atgttagaacaagtatgtcagcttgcacggaatgcgggcgatgccatcatggaagtttacgatggaaagcagccgatggacgttaccagcaagaaggacgattctccggttacggccgcagatattgcggcgcacaaggtgattatcagcggcctgctggccctgacgcccgatattccggttctgtcggaagaggatccgccggcctgggaggtgcgtcagcactggcagcgctactggctggtggacccgctggacggcaccaaagagtttatcaagcgcaacggcgagtttaccgtcaatatcgccttgattgaaaacggtaaaccgaccctgggcgtggtctacgcgccggtgatgaaggtgatgtacagcgcggaaaagggtaaagcatggaaagaggagtgcggcgttcgcaaacagattcaggtccgcgatgcgcgtccgccgctggtggtgattagccgttcacacggcaatgacccggagctgcaggagtatcttgagcagcttggtgaacaccagactacctcaattggttcgtcgctgaagttctgtctggtcgctgaagggcaggcccagctttacccgcgcttcgggccgacgagtacctgggacaccgcggccggtcatgcggtcgccagcgccgccggggcgcacgttcacgactggcaggggcgtactcttgattacacgccgcgtgaatcgttcctcaaccccggcttccgggtctctatttattaa

SEQ ID NO: 255575 - DNA, 1944 bp, Klebsiella pneumoniae
atgattaagtttagcgcaacgctgctggccacgctgatcgccgccagcgtaaatgcggcaacggtcgatttgcggatcatggaaaccaccgatctgcacagtaatatgatggactttgactattacaaagatgccgccacggaaaaatttggcctggtgcgtaccgcaaccttgattgagaaagcgcgtcaggaagtcagcaatagcgtactggtcgataacggcgatgttattcagggcagcccgctgggtgactatatggccgcaaagggtctgaaagagggcgatgttcacccggtctacaaggcgatgaatacccttgattatgtcgtgggcaacctcggcaaccacgagtttaactacgggctcgacttcctgcataaagcgctggcaggggcgaagttcccctacgtgaacgccaatattatcgacgtcaaaaccggcaaaccgatgtttacgccttatctgattcaggatacccaggtgaaggatagcgacggcaaaacgcagacgctgcgcattggctatatcggcttcgtaccaccgcagataatgacctgggataaggccaatcttagcggtaaggtgaccgttaacgacattaccgcaaccgcacgcaagtttgtcccggaaatgcgcgaaaaaggcgcggacgtggtggtggtcattgcccactccggcctctccgccgacccgtatcaggccatggcggagaactccgtttactatttaagccaggtgcctggggtcgatgctattatgttcggccacgctcacgccgtcttcccgagcaaagattttgccggtatcaaaggcgcggatatcgcgaaaggtacgctgaacggcgtaccggcagtgatgccgggcatgtggggcgatcaccttggggtggtcgatctggtcctgaacaacgacagcggcaaatggcaggtcagcgcagcgaaagccgaagcgcggccgatctacgactcggtggcgaagaaatcgctggcggcagaagacagcaacatggtggcggtattaaaagccgaccatgacgccacccgcgagtttgtcggcaaaccgattggtaaatcctcggataatatgtacagctacctggcgctggtgcaggacgacccaaccgtacaggtggtcaatatggcccagaaggcctacgttgagcactatattcagggcgacccggatctggcgaagctgccggtactctccgccgccgcgccgtttaaagtcggcggacgtaaaaatgacccggccagctttgttgaagtggaaaaagggcagctcaccttccgcaacgccgccgacctctacctgtatcccaacaccctggtggtgatgaaagtcagcggtaaagaggttaaagagtggctggagtgctccgccggacagttcaatcaaattgatcccgccagcagcaagccgcagtcgctgattaactgggacggcttccgcacctacaacttcgacgtgattgacggcgtgaactaccagatcgatatcacccagccggcgcgctacgacggcgaatgcaacagcgtgaatccgcaggccgagcgaattaagcatctgacctttaacggcaagccaatcgatccgaacgccactttcctcgtcgcaaccaataactaccgcgcctacggcggtaaattccagggcaccggcgaggatcatatcgcgttcgcctcgccggatgaaaaccgctcggtgctggcggcgtggattggcgcggagtcgaagaaaaacggcgagatccatccggcggcggataacaactggcgcctggcgccgatccacagcacagtaccgctggatattcgctttgaaacctcaccgggcgacaaggccgcggcatttatcaaagagaaagcgcaatacccgatgcgccaggtggctaccgacgatatcggctttgctatttatcagctggatttgagtaaataa

SEQ ID NO: 255576 - DNA, 384 bp, Klebsiella pneumoniae; identical to SEQ ID NO: 176747

SEQ ID NO: 255577 - DNA, 849 bp, Klebsiella pneumoniae
atgatcgcaattaccggcgcaaccggccagcttggccaacacgtcctggaaaacctgttaaaaaccgtccccgcgggccaggttgtggctatcgtgcgcaacccggcaaaagccgaatcgctgagccaaaggggcataggggttcgtcaggccgactacagcgatgaagcggccctgaccgccgccctacagggcgtggacaaactgttgctgatctcttccagcgaggtcggccagcgcgccgtccagcaccgcaacgtgattaatgcagcgaaagctgccggcgtgaaatttatcgcctataccagcctgctgcacgccgatacctccccgttggggctggcggatgaacatatcgccaccgagcagatgctcgccgactccggcattgcatatgccctgctgcgcaacggctggtacaccgaaaactatctcgccagcgcgccgccggcgattgagcacggcgtgtttatcggcgctgccggtaacggcaaaatcgcctctgctacccgcgcggattacgccgccgctgccgctcgcgttatcgccgaagagggccacgccggaaaagtgtatgaactggcgggcgatgaggcgtggactttgagcgaactcgccgctgagctgagcaaacaaagcggtaaaaacgtggtgtatcaaaacctcagcgaagccgacttcgccgccgcgctgaagggcgtcggcctgcccgcaggcctggctgatatgctggcggattctgataccggcgcctccaaaggcgggctgttcgacgatagccgcaccctgagcgcgctgattggccgcccgaccaccaccctcgctgatagcatcaaaggcatcctgtaa

SEQ ID NO: 255578 - DNA, 825 bp, Klebsiella pneumoniae
atgcaaggcgtaccggaacagtttaatgatgaaagagacagcgcgcgctttcgccatctggcgcagctgcccggcgttgagctgtatcatgcccacatctcccgctacgcctttgaaccgcacacccatgaagcctttggtatcggcgcgatagagctcggcgccgagcgttttcgctatcgcggcagccagcatgtggcttcggttaactctatcgtcaccatgaatcccgatgaactgcataccggcgaggcggagactgccgacggctggcgctatcggatgatttatctcgacccggatacgctggaaaaggtgactggcgtgcgccactggtggttcagcgaagtggtgcgtcaggacccgcttcgctcccggcaaatcggcaatctcatctacggcctgtggcatactgacgatccgctcgcgcagcagggtctgctgctggatttaatcgataccttccggccattcgctcaccatgccgctgcgctgcccgaagctcgccaccgcttcgagcgggtgcgcgactatctgcatgataactatatgcgtacggtgaccctcgatgagctggcgcaggtggcggcgctgagcccgtaccatttccagcgccagttcaaagcgcacttccacgttacgccgcaccagatgctgatggcgattcgcctgtggcgcgccaaagcgtttctcacccacggtatgcccgctgccgacgtcgctctcgccgccggactgaccgaccagtcgcacctgacccgcgcgtttacccgccgttacggcattaccccggtacgttatcaaaagcaggttctcccgcgctaa

SEQ ID NO: 255579 - DNA, 972 bp, Klebsiella pneumoniae
atgattagtggtgtgctgtacgccctgctggcagggctgatgtggggattgatattcgtgggccctttactggtgccggaatacccggctgttttacagtcgatggggcgctatctggcgctgggactgatcgccctgccgctggcctggctgggccgcgcacggctgcgccagctcgccaggaaagagtggtggacggcgctgggactgaccctgatgggcaacttaatctattacgtctgcctggccagcgcgattcagcgtaccggcgcgccggtgtcgaccatgattatcggcactctgccggtcgtgctgccggttttcgccaacctgctctatagccagcgcgatggaaagctgccgtggcggcgactgttcccggcgctggtctgtattgccttcggcctggcatgcgtcaatatcgctgaactgcatcagggcttacccgatttcagcccgtggcgctacggctccggtatcttgctggcgttgatctcggtggtgtgctgggcctggtacgcgctgcgcaacgcccgttggctgcgggaaaacccggataaaccgccgatgatgtgggctaccgcgcaggcgctggtgaccctgccggtatcgctggtcggataccttatcgcctgcgggtggctgcatggacagcacccggacttcccgctccccttcggcccgcgcccggcggtgttcgtcaccctgatgctggcgatcgctatattctgttcatgggttggggcgtggtgctggaacgttgccagccagcgtctgccaacggtgatcctcgggccgctgatcgtcttcgaaacccttgccggactgctgtatacctttattctgcgccagagcctgcccccgcttctgaccctaagcggtattctgctgctggtgatcggcgtggtgtctgccgtgcgtgctcgtccggaaaaacccgtgctgcagaaactggtcagcgagaaaaaatag

SEQ ID NO: 255580 - DNA, 663 bp, Klebsiella pneumoniae
atggctttccgtgaccaacctttaggcgagctggcgctgacgattccgcgcgcctccgcgctgttccgtaagtacgatatggactactgctgcggcggcaaacagacgctggatcgcgcggcatctcgcaaagagctggacgtcgcggtgattgaagccgagctggcaaaactggcggaagagccggtagagcgcgactggcgggttgcgccctatgcggaaattatcgatcacattatcgttcgctatcacgacaggcatcgcgagcagctgccggagctgattttacaggccactaaagtcgagcgcgttcacgccgacaagcccaacgttccgaaaggcttaaccaagtatctgaccatgctgcaccaggagctttccagccatatgatgaaagaggagcagattctgttcccgatgatcaaacagggcatgggaacgcaggccggcggtcctatcagcgtgatggaaagcgagcatgatgaagcgggcgagctgctggaggtgattaagcacatcacgcagaacgtgacgccgccggcggaagcctgcaccacctggaaagcgatgtacaacggtatcaacgagctgattgatgacctgatggagcacatcagccttgaaaataacgtgctgttcccgcgtgccctcgcaggtaaatag

SEQ ID NO: 255581 - DNA, 1404 bp, Klebsiella pneumoniae
atggtagatcaggtaaaagtcgttgccgacgaacaggcgccgactgaacagtcgctgcggcgaaatctcactaaccggcatattcagcttatcgctatcggtggtgcgataggcaccgggctgtttatggggtcaggcaaaaccatcagccttgccgggccgtcaattatttttgtttatatgatcatcggtttcatgctgtttttcgtcatgcgcgccatgggtgaattactgctgtcgaatctcgaatacaagtcattcagcgattttgccgccgacctgctgggcccctgggcaggttatttcaccggctggacctattggttctgctgggtggtgaccgggatggcggacgtggtggcgatcaccgcctacgcgcagttctggttcccgggactctccgactgggtcgcctcgctggcggtcatcctgctgctgctgggtcttaacctcgccaccgtgaagatgttcggcgagatggaattctggtttgcgatgatcaaaatcgtcgctatcgtggcgctgatcgtggtcggcctggtgatggtgctgatgcacttccagtcaccgaccggcgtggaagcctctttcgcccatctgtggaatgacggcggctggttcccgaaaggcatcagcggattctttgccggcttccagatcgccgtcttcgccttcgtgggcatcgaactggtgggaaccacggcggcggaaacgaaagatcctgagaaatccctgccgcgggcgattaactcgattcccattcgtatcattatgttctacgtctttgcgctgatcgtcattatgtcggtgactccgtggagctcagtcgtgccgtcaaagagcccgttcgttgagctgtttgtgctggtcgggctgccggcggcggcgagcctgatcaacttcgtggtgctgacctcggcggcttcttccgctaacagcggcgtattctctaccagccgtatgctgtttggtctggcgcaggacgggcaggcgccgaaaatgttcgccaagctgtcgaaacgcgcggtaccggcgaaaggcctgaccttctcctgcatgtgtctgctgggcggcgtggtcatgctgatggtcaatccaagcgtcattgcggcgtttaccatgattaccacggtgtcggcgatcctgtttatgttcgtctggacgattatcctgtgctcgtatctggcctatcgcaggaaacgtccgcagctgcatgagcagtccaaatataagatgccgctgggcaaactgatgtgctgggtgtgcatggcattcttcgtctttgtgctggtgctgctgacgctggaagccgatacccgcgaagcgctgatggtgaccccgctgtggtttgtactgctcggcgcgggctggctgtttgccggcaagaagcgtctggcgaaataa

SEQ ID NO: 255582 - DNA, 621 bp, Klebsiella pneumoniae
atggcaacccctacttttgacacgattgaagcacaggcaagttacggtatcggcttgcaggttggacaacagctgagcgaatctggcctgcaggggctgctgccggaagcgctggtcgcgggtattgctgacgcgctggaaggtaaacagccgcaggtgccggtggaagccgttcaccgcgcgctgcgtgaaattcacgaacgcgctgacgccgtgcgtcgcgaacgtttccaggaaatggccgcggatggcgagaaatacctggaagaaaaccgcgagcgcgaaggcgtgaacagcaccgaatctggcctgcagttccgcgtactgacccagggtgaaggcccgatccctgcgcgtactgaccgcgttcgcgttcactacaccggcaaactgatcgatggcaccgtcttcgatagctccgttgcgcgcggcgaaccggctgagttcccggtgaccggcgtgatcggcggctggattgaagcgctgaccctgatgccggtaggctctaaatgggaactgacgattccgcacaacctggcctacggcgagcgcggcgcgggcgcatccattcctccgttcagtaccctgatttttgaagttgaactgctggacattatttaa

SEQ ID NO: 255583 - DNA, 267 bp, Klebsiella pneumoniae; identical to SEQ ID NO: 176740

SEQ ID NO: 255584 - DNA, 663 bp, Klebsiella pneumoniae; identical to SEQ ID NO: 176739

SEQ ID NO: 255585 - DNA, 951 bp, Klebsiella pneumoniae
atggacgcaccctcaatattttcccgcaagaatgtggcttatgcctgcgcaaccctctgctgcctgctgtggggaagctcctatccggcgattaaaagcggctatgaactgtttcagattgccactgatgatgtgccgtcaaaaatcgtttttgctggctatcgcttcctgtttgccggaaccctgctgctgctcttcgcgctggtgcaacgtaagccgattgcccgcttaaatccgcgtcagtgcgggcagctggcgatactgggcgttacgcaaacgtctatccagtacgttttcttctacgtgggcctggcgtttaccaccggcgtgaagggctcgattatgaacgctaccggaaccttcttcagcgtcctgttggcgcacttcatctatcagaatgacaagctgagctataacaaggccatcggctgcattctcggttttgccggcgtcatgctggtgaactttaatcattcattgagcgattttagctttgtctggcaaggagatggttttgtggtgctggcggcttttattctgtcggcggcgacgctatatggtaaacgcatttcacaaacggttgacccaacggtgatgaccggctggcagctggcgtttggcggtctagtgctggttggcggcggttacctgaccggcggaaccctcgaggttcacagctccgcagcggtgctggttctggcttatttgacgctgctctcttccatcgcttttgctttgtggagcgtgctgctgaagcataaccgcgtgagcatgattgcgccgttcaactttgtcatcccggtagccggaaccgtgctgtcggccatcttccttggcgagaatatttttgaaccgaaatatgcggttgcgctggtgctggtgtgcgccgggatctggtgggtaaataagccgggggcaacatccggaaaatcttcacagcaggccgggtaa

SEQ ID NO: 255586 - DNA, 507 bp, Klebsiella pneumoniae
atgttaactattttcagccataatcatttttttaaaaaagccatgcgtctgaaaataaatgatataaaagcggtcagaaaggcgaatctcgtcgatctgtgcttaaccagatactcatccagcagccatgcgcagtttcattttttgataaatagctttgaaatgaaaaagaattttgtgtgtttcaaggtggaaggcaatatcatttgcttgatcaacaagaggcgcaccgcgcacatcgccagtattatcgccagagtcactgacggtatccctgtcggtgaggacatcaccctaacggaaagagaattccagtatatttttattatgaaatttaacgtgctggcaaaagactatccggaactgctcggcatctcacctaaagcctacagcaactataaaagaagattaattgataaattcggttttaactcatttcatgcgctgttggcgctgtctaattatttacacgcgttttcgctgattgataaattcaccccagactaa

SEQ ID NO: 255587 - DNA, 723 bp, Klebsiella pneumoniae
atgatgaataaatttagtccggcgaattgcccgcagacgtatgtcaatcaaaatatgatggggccaaatgtattaaggctggttgaagagcttagccgctccctggaactgtggcctggaatgcgtattctcgatctgggctgtgggacagggttatcttcgatgtatctggcgacggaattcggcgtggaggtggtcgcggcggatctgtgggttcgcgccgacgataacgcccggcgttttgcggcagcgggcatggacaataaaatcaccccgatcaatcttgatatcagcaccctgccgggactgggtatttttgcccgcgacgcctttgatgccgtggtcagtatcaatgcctggcactattttgcccgcgatgccctgttctttgaccagcgcattgcgccttatgtcaaaggcggcggaacggtggctattgtcatcccgggtctgcgcagcagcgacgctgaaacgcgacctgaaatccatgcgctcattgctagcggcatcgccctttttaccaccgaccgctggcgcgcaatctggtccgggagccagcatcttgcggtcaatcagtgccgtcatatggcatccggccgtcaggcgtggctagagtggcaaaagtgcgataatgattttgccgctaccgatgccgccatgagaagtgatgagctgggtcagcagctgcgctttatgcaaatcattggccgggtaaacaaataa

SEQ ID NO: 255588 - DNA, 1086 bp, Klebsiella pneumoniae
atgaaattaaaattactaacagtggccgtctctacacttcttgctgcaggaaccgtgcaggcagctgaggtgtataacaaggacggaaacaaactcgacctctatgggaaagtgaccggcctgcattatttctccagcgataagtcagaagatggcgatcagacctatgcccgtctgggcttcaaaggtgaaacgcagatcaacgaccagctgatcggctacggccagtgggaatataacttcagcgccaataacgttgaaggcgacaactccggcgacaaaacgcgccttgcgtttgctggcctgaagtttggcgaatttggttctctggactacggtcgtaactacggcgttgcctatgatatcggcgcctggaccgatatgctgccggagttcggcggtgatacctggacccagaccgacgtcttcgccaccgcgcgtaccaccggcgttgccacttaccgtaacaacggtttcttcggtctggttgacggtctgaatatcgccgtacagtaccagggtaaagaagagggcaacgaccgcgatctggcgaaacagcatggcgatggctggggtatggcctcgacctatgagtacgaaggatttagcgcaggtgcggcctacgcggcatccgatcgtaccgatgcgcaggtcagggaaggtcgcgtcaatccagacttctacgcccgtggcgaaaaagcggaagtgtgggcggccggtctgaagtacgatgccaataacatctacctggcgaccacctatgcggaaacccgcaacatgactaagttcggtaaaggctatatcgccaacaccgcgcagaactttgaagtggttgctcagtatcagtttgatttcggcctgcgtccgtccatcgcctacctgaaatcaaaaggcaaagatctgggccgctatggcgaccaggatctggttgaatacgttgatgtaggcgcgacttactacttcaacaagaacatgtctacctacgtggactataaaatcaacctgctggatgacaccaggttcactaaagatgccagcatcagcaccgataacatcgttgccgtgggcataacttaccagttctaa

SEQ ID NO: 255589 - DNA, 996 bp, Klebsiella pneumoniae
atgaaatgtctggcaattgccgatctgtttatcaatgcagcgatgatggacgcgggtctgaaagcgctcaaagataaaggtattgcagtggaagtacgcgaatggtcgcacgagtcaattgaaaaactgcaggaggataatttactggttgaacagcaaggttctgaggcgctggcgctgcctgccgctctgcttcagggtgctgaggagacggagatcctgatagtccagttcgccccggttaacgcggcggtattcgacaagctgccaaagcttaaatacgtcggggtgctgcgcggcggcattgaaaacgttaatcaggcggaggcaaaagcgcgcggaattgaggtgatgaacacgccggggcgtaacgcccgcagcgtggcggaatttaccgtcgggatgattctggcggaaatgcgcaatatcgcccgctcacacgatgcgctgcgcgataagttctggcgcaaagagagtcctaaccaccgggccattcctgaactgggcggcaaagtggtaggtctggtcgggctggggcatatcgcgcagctggtggctggcttcctgcgcggtttcggcagcgagattatcttttacgataagtacgtccccggccatgaaagttatgaaaaggtggatactctcgacgaactggtgcgccgtgcggatgtgatttcgctgcatgcccgtatgaccccggaaacggaaaacctgatcaacgcccatcattttgaattaatgaaggagagcgccatcatcgtcaacacggcgcgctccggattaattaatgaaggcgatctgatcgccgcgcttcgggcgggtaaaatcatgggcgctgccctcgacacttttgatgacgagccgctgccggacgatagcgcgttttattcgctgaataacgtcacgataacgccgcatattgccggcagtaccattgatgccttcagcaattcgccgaagattttttcagaaatattgctgaagcaactcggttaa

SEQ ID NO: 255590 - DNA, 762 bp, Klebsiella pneumoniae
atggatctgaatttacaccaccgcacggctatcgttaccggaggcgctacgggcctcggcaaagagtttgtcctttcactcgcccgagaaggggtcaacatctgcttcacctatatgcgtgatgaggagcgcccggaacagctgatcgctacggtaaaaagtagcgccagcgtcgaaattattgcggtgaaaaccgatctttccgacgagcatagccgggagaatctgttcgcgacctgcctcgaacgcctggggaacgccgatattctggtcaataacgccgggatctggctgagcggttacgtcactgaaatcacccagcaggagtgggatagcgtgatgaacgtcaacctgaaggcggtgttccacctgagccagctgtttgtcaaccactgcctggcgaaagatcaggccggcagtattctgaatatcacgtctcaggcggccttccacggttcaaccaccggtcatgctcattacgcggccagtaaggcgggtctggtggccttctcaatctcgctggcgcgcgaggtggcgaagcagaaaatcaatgtcaacaacatcgccgtcggcatcatggataccgcgatgatccgtaaaaacattgaacagaatcctgactattacgtcagccgtataccggtaggccgggtggcccaaccgcacgaaattgccgacatcggcgtcttcatggtctccccgaaaacccgctatatgacgggagcgactctggatgtcaccggcggtatgttgatgcgttaa

SEQ ID NO: 255591 - DNA, 1539 bp, Klebsiella pneumoniae
atgaaacaacactatgtcatgggcattgataacggcggcaccgttacaaaagcggcgatttacgatcgcgccggcaacgtggtggccagcgcgtcgaaatcaacgcaaatgctgaccccgaaggaatttcataccgagcgggatatcaacgaactctgggcggctaacgtcgaagtcattaaaaaagccatcgcgcagtcgggtatcgaccccagccaaatcaaaggcgtggcggtaaccggtcacggcaacgggctttatatggtggatgaaaccggtgccccggtgcgcaacggaattatctccaccgatagccgggctaaggcctgggtagaaaagtggtaccgcgacccgacgtttgttagcgatattttgcccaaaactatgcagtctatctgggccgggcagcccgtcgccctcctcgcctggctgaaagagaacgagcctgaaacactgtgtaaagcgcgctacattttcatggtcaaagatctgattcgtttttatctgaccggcgaagcttttctcgaacttaccgatatctcaggaaccaacctgatcaacgttcgcgaccgcgactatgacgcctcgctgctggcctggtggggactcggcgatctgcgcgataagcttccgcccatcaagctctccaccgattgctgcggttacattaccgaagacgtcgcgcagctcaccggattgcgtgccggaacgccggtctcgggcggggtgtttgatatctcggcgtcatctgtcgcatccggtatcaataccctggataagctggcaattattaccggaacatggagcattaacgaatacgtgaccgaccatccggttattgaccaggatctctttatgacctcgatttatccgattgagggcaaatggttaattaccgaggcaagccccacctccgccagtaatctggagtggtttatcaataactttatggagagcgatcgcaccgccgccgctgcgcagggatcgtcagtctacgatctgtgcaatgagctggtctccacaaccacgccggcggagagccacctgctgttcttcccgtttgtcttcggttccaacaccatcccggacgcctctgcggggtttatcggcctgaatagtttccacaaaaaagcgcattttttacgcgcgatatatgaaggggttgctttcagccacctgtatcacaccgaacggttacgcaatattaacccgcagctcagccgcaccattcggattgcgggcggcgtgactaactcagcggtctggctgcagatattcgccgacattttccagtccaccctggagattgtcgacgtgaaagagcacggcacgctgggcaccgcgatgaccgccgcggtgatggttggctggtttgatgacgtctttgccgcctcaaatgagatggttcacgtttcgcgaacggttacgccggacccggacagcaacaaggtctatcaggataagtatcagctttacaaaaacctgctatcggaaatgcagtctccgtggaaaagctgcagtaactacatcacgcattaa

SEQ ID NO: 255592 - DNA, 552 bp, Klebsiella pneumoniae
atgctcttaaataacaccatcattccttcaatcagaaaatataaacattttgaacaggcgctggcctgcgcatcagaatacgtactgttatccgaggcgaatattggcaatctgcaatcgttgatcggtaaatgtcatcagagtggcaagaaagtgcttattcacctcgagctactgggtggttttaaacctgaccaggcgggtattagtttgctcaaaaattactacaaggttgatggtgttatttcgtccaatctctcggccctacgctatgccaaaaaagagggattgttaactatctttcgggtactgctcatcgactcgcgctcgctggatcactccatcgatattgttaagcataacccgccagatgctattgaaatcttacctgctgaatatgcctgccagtgtctggaattgattagccggaatttaaaaggctttgatgtgatattcatcgccggaggctttgttaagcggaaataccttgtagataaaattttccatgccggatttaaaggcattaccaccagcgaacccggtttatggtaa

SEQ ID NO: 255593 - DNA, 792 bp, Klebsiella pneumoniae
atgtctaaagaacgtcgtctctctcgcattttcgcaaaagatggtaaatcagtcactctggcgctggatggctactatttttcgaccaaaactaatggtattgataatacgataaaccagctcccggccctcgtcgacagcggtctggactgcgcgctggtgacctggggcatgttgaaaaatttccgtgaagttttcaattgcgtccccgttgtattacgcgtcgatagcacagtgagtatttttgacaataccgttcccgataccacccccgtattttccattgaggacgcgctgaaagtggcggcggaaggcgtggtgtgcatgacttttcccggcgcgttcaatgaggagaaaacgcatatcatggcgatgcagctggcgcaggccgccgaccgctggaacgtaccgctgatcgtggaatccctgccgtacggctatcccgtcactagcgacgactccaacaatccggccgttatcgccgcctctgcccgcattgccgttgaactgggggctgacgtgatcaaaacccgcttcaccggcaccgaggacgaccggcttatcgtcgaagcggccggcgtgccggtgctggcgctgggcgggccgaaaaccgggattgacggttattttaaatttgttcatcactgcatgcaggttggtgcaaaaggcgtggcggtgggtcgcaatatcactcaggacccacagccggcaaaagtagtagcaggtctgaatgccatcatccatgaaaatgcgacagcggaagatgcctacagcctctatatggctaaataa

SEQ ID NO: 255594 - DNA, 588 bp, Klebsiella pneumoniae; identical to SEQ ID NO: 172075

SEQ ID NO: 255595 - DNA, 678 bp, Klebsiella pneumoniae
atgatgaaaaaattatacccatttttatttctgccgctgttaatcagcgctagcgcggcggcgattggcgttggggaagtgacttccattatgttcgccaatgaccagatgctggcgaaagagatcgataacgccagcgactcggcgcgatttgttagcgtcagcgcccaccgcctctctacgccgatggcagggggcaaaattattccgatggaacagcccggcgagttgctttctaccccggcaaacgtgattcttcccgccggcgccagagaacatttccgctttatttatcatggtcctgaagatgataaagagcgctattaccggctatcgtggctggatgaaccggtgagcgatcatcaggccagcagtaattcacgtcacggtatggcgacaacctcagcgcaaattaacaccattctggtggtggcgccgcgcaaggcggaatttaactatcagcatcgcggcgatacggtgacgaataccggcaatgtgaccttccgggttatttcctatgggccctgtaaagatcctgaaaaaaacaaaggtgagggctgccgtgaacgttattacgtcatgcccggacttagcgcaaaaataacgcatacgcaggtcgcgaataaacagacgcgaatcggtatctggcacgaaggtaaatatattcacgtcaaatag

SEQ ID NO: 255596 - DNA, 2547 bp, Klebsiella pneumoniae
atgtcaggatggttattcagaaaaggaatgctgctgccgggaatatgtctcgtctgtaccgtcgatgcttcagccaacgaaagcgcgggcagagcgacgctgctgcgggtgggggattatgttattccgcccgtttttgctgatgcgcttaagcaggggatgcgggtaccggtttttatccgctacaaagaggcggagctgccgtcgcgcagtcggcaaaaaatcgccgatgcgctgattgcgaccaaggacggggcgctgacgatccgcgaactgacgctgctctccacgccggataacctgtcgctatctgcgccggtagaggagattgtcaatggtctgcaggaccaacaattttctgcggatatgacgctgcgtctctccggcgcggcgcagatcactttcgacgtccgggcattttaccttgaaatgaccgtcgatcgcagcgcgctggcggcgacgacgcttgccaggcacagcgttttgggcgactcaaccgccggtgcgccgtcgaacgtgctcaattatacctttggtacttatcatcaccgttataacggctacgacggcaccagcagctacctgacgctggataacaccgcggcatttcgcgagcaccacgtgaatatcaacggctctatctacggtatcggctctggcgacagcagcggtaacctctaccgggcgatgtatgagcgcgatatggcaggccaacgcctggcgttgggaatggtcgatacctggaatctacaatccatcgccagcatgagcgcgctgaattccagccgcatctacggcgtgagctatggcaataaaagcaactcgcgccttgaagataccgccctgtccctgacgccgattaccgtctttttaccggcggcgggcgaagtgcatattctgcgcgatggcaaattactgagcattcagaactttgcgatgggcagctacgaagtcaataccgcaacgctgccgttcggcatatatcaggttgaggtgcaggttgtgatcaacggcaaagtggccagcagccgcacggaacagattaacaaaacctacgcccgtcgctcgagcgtcaccgagcgctggtcgtggcaagtattcggcggaatgctcgaataccataaaaccgactatcgaccacaacatgcccggcgcgaggggaagcaggaaacctggcttagcggcggcgcggcggcggtcacgctgccctggctcgccgggactgggtttaaaaccacgctatacggtttcgacagtaacgccgtaaacgaaagcgaagtggatgtgttgttcaacgaacgtctgcgggttaatcaacaggttttgctggccaacgacggcagcaggaaaagcatcaccaccctcaatctgagtctgcctgcgggctatggttcactttggggttcgcgagaatttacgcatattggcaatcacttaccgctgcgcaaaggggattactttacctgggggacaacgctgccgctgcaatcgctgacgccctacctcggcacattgaccttcagccgtacggaaaactacagtaacaaaacgcgttataacaaccttgattactcgcagacgctggcgtcggggcgctacggtaccgttactctgagaaccggggtgcagaattaccactatcagcgcaaccaggacactacgcgggataaatacattaacctcgatttttcgttgccgctggcggcgtggttcagcgccggggtttccagcgaaaacggcaacatgctggcgaatatggcgctcagaaaacgcttcgccgatagcgccatcactcaggcgggcatctcagcttcccggcggttaaaaagcaaagagagcgagagctaccgcagcgataaacgggcgatcaatggttttgccagctacgacactaaatacagcagcggcacgctatccgccacccatgcttcggataacagtaccaacctcaatttcagtaccctgggcagcgtcgcctggaccggaaaagatgttgttccggccaaaggaagccatacatcgggggtgctgatccataccgatttccgcgacaacgccactatgactgccaaaattaacggccagcattacccgctcagcggccagaaaaactttattccgctgcccgcctatgggcgctacagcgtggagctgatgaatgacaaacgcagcgccgatagcgtggatatcgtcagcggcagaagccatcaggcggtgctgtatcccggtaatgtggacgttattcgtccggagataaaacagctggttacggtgtttggccgcattcggcgcgataacggcaccgtcgccgcccacctcgatattcataatcacatcggcaaagggcgcaccgatggacagggagaattcgccatggatgttgataaacgctatccgaccatcactctggtcgaaaaaaacggacagcgctgcgagctggagctgaatctgcaggaagcgcgcggcgcggtgtggatgggggacctgcagtgcgaggcgcagatgcgtatggcggtacagggggaggggcagcgtgacacctggtaa

SEQ ID NO: 255597 - DNA, 1614 bp, Klebsiella pneumoniae
gtgacacctggtaaactgatttgcggcctggcgctgggcgcttgcctggcgaccacgtcattccagagcctggcggtgaaagccagcagcagcggctcggggaaaaatgactatatgtttattgaaaaccatgtcgataacgaatatttcgttacccccggcagcctggacccgcgcttttccggcgcaaacgtctggacccgctactcgacgaagcagcgcagtctgggctatatgggctacgtcagctggagctatcgatcctactactacgatatgtggttgtcggactcgccggtgaattcgccgtttatcggcattcgctgtatgaccaccggcgccgactgcccgtcgcagggctatatttccggcgaggttattgatagtgaaggtttttatcatacgatgtccggaagctctttgaacaatggcggcaccggctacgccacgttctctccggcaatgtatgaatatctgcgcaaccgtcagcctggcgagagcgatgcttttgtgctcaatctttgttacaccaaaactaattacgatgcggcatccggccagcgctgtcgggatctcgcttcgggcgcgacatggcgttattacaccatcaatgccactaaagtcgggcatttaacgctgaacagcaccggcgcgctggcggaaatctggattgccagcgacggcacgcccagcgtcaatatcggtagcgagcactgcgaggtcagtatcgtcggcggcgaaagcggaatgacctgtaaaatggtgtcgtatcgctatcgtcaaaccaagcgggtgacctcttctctgtcatttgaaatggtggtcgataccgccaggctgggctttagtccggcgtctaaaaccatcaaatatagcggcaatggatccacctggtataactggagcgcttccactacctatagcaacgtctttacccccgaaggccagtacgtttatgtgttcctctcgaaaacctttttccagaacttgatccagcgcggaattagcattaccaataacgacgatttgtttaccttcttctttgataacagtaacaccgcgcagtccgggttctatcagtttacggcgtcgagtatgatcaatattctgccgaaagagtatgggatcagtattgtgtccacggacggcaatgctgcgccgaaagagtcgggcaatatcggcgacccgacgccgatcggctttgaatatcaggtaaccgtctcctccgagcgtatggcggacgcggtgacggctcaggtgatcggcgaaggcacctctattgatggtgtctcatactgcctgtttacgtcgcaagagggcggctggcaggtgccgatcccggcctttctctcctggacggcatccaccggagaaacccgcaccagccgcaatagctgcatcgatgcggagatcgatatgaccgctgcgcgctggacgcaaacgccgtggaatgcggcaattgatgacggctactatttcaccacccgcctgcagttgctgtttccgatggacgatccgcgctccagacgcactctcgacggcagcgactggatgggaacggtgaacgccagcggcgaggtcagagtgactgccaaatggctgggcgtcgagtga

SEQ ID NO: 255598 - DNA, 144 bp, Klebsiella pneumoniae
atgaaaaatactccatggctcgtgcgcttacgtaatacctctattccggagcataagcttcgtcccgcgaaatggctggcgctgattgccctgctgctgctgctggcgcagctgatgatcgaatccctgttgctcactgaatag

SEQ ID NO: 255599 - DNA, 393 bp, Klebsiella pneumoniae
atggctcgccacggcggcggcgcgttctccggtaaagatccgtctaaagtcgaccgttctgcggcctacgcggcgcgctatgtggcgaaaaacatcgttgccgccggtctggccgatcgttgcgaaattcaggtttcctacgccatcggcgtcgcagagccgacctcgattatggttgaaaccttcggtaccgaaaaagtaccgtccgagcagctgacgctactggttcgtgagttcttcgacctgcgtccgtatggtctgatccagatgcttgacctgctgcacccgatctacaaagagacggcggcttacggtcactttggtcgcgaacatttcccttgggaaaaaaccgacaaagcagctcagctgcgcgaagcggccggcctgaaataa

SEQ ID NO: 255600 - DNA, 1395 bp, Klebsiella pneumoniae
atgcctgacaacaaaaaacaagggcgttcaaacaagacgatgacgttctttgtctgcttcctcgccgcactggcaggcctgctatttggcctggatattggtgttattgcgggtgccttaccctttattgccaacgagttccagataagcgctcatacgcaggaatgggtagtaagctccatgatgttcggcgccgcggtcggcgcggtcggcagcggctggctctccttcaaactcgggcgtaaaaaaagcctgatgattggcgccatcctgttcgttgccggttccctgttctccgccgccgccccgaatgtggaagtcctgctcatttcccgcgtgctgctcggcctcgccgttggcgtcgcttcctacacggccccgctgtatttgtcggaaattgcgccggaaaaaatccgcggcagcatgatttcgatgtaccagctgatgatcactattggtattctcggggcgtatctttcggataccgctttcagctacagcggcgcctggcgctggatgctcggggtgatcattatcccggcggtgctgctgctgattggcgtggttttcctgccggacagcccgcgctggtttgccgctaagcgccgctttgtcgatgccgaacgcgtcctgctgcgcctgcgcgacaccagcgctgaagcgaaacgcgagctggatgagatccgcgaaagcctgaaggtaaaacagtccggctggtcgctgttcaaagaaaacagcaacttccgccgcgcggtgttccttggcgtcctgctgcaggtgatgcaacagttcaccggtatgaacgtcatcatgtactatgcgccgaagatttttgaactggcgggctatgccaacaccaccgaacagatgtgggggaccgtcatcgtcggtctgaccaacgttctggcgacctttatcgccatcggactggttgaccgctggggccgtaaaccgacgctgatcctcggctttatcgtcatggcgctcggcatgggcgtgctgggcagcatgatgcatatcggcatccactccgccacggcgcagtactttgccgtcctgatgctgctgatgttcatcgtgggttttgcgatgagcgccggcccgctgatttgggtgctgtgctccgaaatccagccgctgaaagggcgtgatttcggtatcacctgctcaacggcgaccaactggattgccaacatgatcgtcggcgcgaccttcctgacgatgctgaactcgctgggcagcgccaataccttctgggtctatggcggccttaacatcctgttcatcttcctgactctgtggttgatcccggaaaccaaaaacgtttcgctggaacatattgaacgtaatctgatgaaaggccgtaaactgcgcgaaatcggcgcgcgcgactag

SEQ ID NO: 255601 - DNA, 459 bp, Klebsiella pneumoniae; identical to SEQ ID NO: 172921

SEQ ID NO: 255602 - DNA, 708 bp, Klebsiella pneumoniae
atgtcccgtatttatatttttgctgccgcgtttcttagcgcggcggcgtgtgccccgcttgctgcggagggaatcaacagtttttctcaggccaaagccgctggcgtcaaggtcaacgccgacgtccccggcgatttctactgcggctgtaaaatcaactggcaggggaaaaagggcgttatcgatctggaatcatgcggctataaagtgcgtaaaaatgagaaccgcgccagccgggtagagtgggaacacgtggttccggcctggcagtttggtcaccagcttcaatgctggcaggacggcgggcggaaaaactgcgccaaagatccggtctatcgcaagatggaaagcgacatgcataacctgcagccggcggttggcgaggtcaacggcgatcgcgccaactttatgtacagccagtggaacggtggcgaaggccagtacggccagtgcgcgatgaaggttgattttaaagataaagttgccgagccgccggctcgcgcccggggcgcgattgcccgcacctacttctatatgcgcgaccgctaccagctcaatctttcccgccagcaaacccagctgtttaccgcctggaataagctgtacccggtaacacgctgggaatgcgaacgcgacgcgcgtattgcaaaagttcagggcaaccataatccttacgtcctgcaggcttgccaggcgcaaaagagctaa

SEQ ID NO: 255603 - DNA, 732 bp, Klebsiella pneumoniae
atgcgcatccctcgcatccatcacccggaacgcatcaccacgggtagccagatagccctctccgacgacgcggccaaccatgtcggtcgcgttttacggatgggtaaaggccaggcaatcgagctttttgacggcagcaatcaggtcttcgaggcggtcattgtcgaggcaggtaagaaacatgtgctggttgaagtacagagcggcaaaatcgataaccgcgaatcccctctgcatatccatttaggccaggtgatgtcacgcggcgaaaaaatggaattcaccatccagaaatcgatcgaacttggcgtaagcctcataacgccactgttttccgaacgctgtggcgttaaactggacgccgaacgtttgcacaagaagattcagcagtggcagaaaatcgccattgccgcctgcgagcaaagcggccgcaacgtggtgccggagatccgcccggcaatgcagctcgaagcctggtgcgcggagcaggacgagggcctgaagctcaatttacaccctcgcgccagcgccagcatcaatacgctgccgctgccggtcgaacgtatccgactgctgatcggtccggaaggcgggctttcggcagaagagatagcgatgaccgctcgctaccagtttactgatatcctgttgggaccgcgcgttctgcgtacagagacaactgcgctcactgccattaccgccctgcaggtgcgttttggcgacttaggttga

SEQ ID NO: 255604 - DNA, 1011 bp, Klebsiella pneumoniae
  misc_feature (461)..(470): n is a, c, g, or t
atgattaagctcggcatcgtgatggaccccatcgcaaccatcaacatcaagaaagacaccagctttgctatgttgctggaagggcagcgtcgcggctatgaactccactatatggagatgaacgatctgtacttaatcaacggtgaagcccgcgcccgtacgcgcaagctgagcgtcgagcagaactacgacaaatggtacgagttcaacggcgagcaggatctgcctctggcggacctggacgtcattctgatgcgtaaagatccgccgtttgataccgagtttatctatgcgacctacatcctcgaacgcgccgaagagaaaggcacgcttatcgtcaataagccgcagagcctgcgcgactgtaacgaaaagctgtttaccgcctggttctccgaactgacgccggaaacgctggtcacccgcaataaagctcagctgaaagccttctgggaaaagcnnnnnnnnnnggaaacgctggtcacccgcaataaagctcagctgaaagccttctgggaaaagcacggcgatgtcatcctcaagccgctggacggcatgggcggtacctccattttccgcgtgaaagagggtgaccctaacctcggcgtgattaccgagaccctgaccgagctgggcagccgctactgcatggcgcagaactatctgccggccattaaagacggcgataagcgcgtgctggtcgtggacggcgagccggttccttactgcctggcccgtattccgcagggtggcgaaactcgcggcaacctcgccgctggcggccgtggcgaagcgcgccccctgaccgaaagcgactgggccatcgcccgccgcgtaggcccgacgctgaaggccaaaggcttaatcttcgtcggcctggatatcatcggcgatcgcctgacggaaattaacgtcaccagcccaacctgcgtacgtgaaatcgaagccgccttcccgatttccatcaccgggatgctgatggacgccatcgaaaagcgcctcaataattaa

SEQ ID NO: 255605 - DNA, 564 bp, Klebsiella pneumoniae
atgaatttacagcatcactttctgattgccatgcctgctctccaggacccgatgttccgtcgctccgtagtctatatctgcgagtataacgatgacggcgccatgggcatcatcatcaataagccgatggaaaatctgcaggttgaagggatcctggagaagttaaaaatcacgcctgagccgcgcaatcccgagatccgcctggataaaccggtgatggttggcggcccgctggccgaggaccggggttttatactgcactcgccgccctctgacttttcttccagcattcgtatttccgataatacggtgatcaccacctcccgcgacgtgctcgaaacgctgggcacggataaacagccggacaacgtgctggttgcgctgggatatgcctcctgggagaaaggtcagctggagcaagagatactggataacgcctggctcaccgcgccggcggatcggaacattttgttcaatacgccaatagccgaccgctggcgcgaggctgcgaagctgatcggcatcgatatcgtcaccatgccggccgcagcggggcatgcctga

SEQ ID NO: 255606 - DNA, 417 bp, Klebsiella pneumoniae
atgagcggaacgtttttaggctttgattttggcaccaaaagcatcggcgtcgccgtagggcagcgcatcaccggcactgcccgccccctgcccgcattgaaggcgcaggacggcaaacctgactggaatattatcgagaagctgctcaaagagtggcagcccgaaaaggtggttgtcggcctgccgctgaatatggacggtacggagcaacctctgaccgcgcgcgcgcgcaacttcgcgaataaaatccatggccgtttcggcgtgcagataatcctgcacgatgagcgtctgagcacggtggaagccagagccgggttatttgaacacggtggattccgtgcgctcaataaaggcagcattgattcagcgtccgctgtcattattctggaaagctacttcgagcagggcttctga

SEQ ID NO: 255607 - DNA, 654 bp, Klebsiella pneumoniae
gtgattaatttttctgaggattcagttctttctcatcaggttacctttattactcacccctcaattcaaagcaaggcatttgcaacctggctggctgacaggttatctgctacagtgatcctgcaaaatattaacaaacccctcgcgcaacgacttgtgaaagattctgtaatattatttgatattgcagtttcaaataaaaagttgaatagcgtgtggcgtgatattattcgcctgcaggtagataacccccgtttattgattatcaacagcgcacaaaagtatgagctctacgaaatggcacagtggccagcgctttatggcgttttccgtcacgacgatgatgaattgcgcttaattgagggcgttaaagctgtgcttaacggcgaacagacggctgaattgagcgtaatgcacccggctatgtacgcagcggatcatcaatcggcgcctgtggaaagttcgccgctgaccgagcgcgaatgtgaaatccttaatgaacttcgctgcggggcgaccaatatggatattgctcgcgcgctgtttatcagcgaaaacacggtgcgtacccatctgtacaacgtgttccgtaagctaagcgtgaagaaccgaacccaggcggtcagctgggcgaatgagcatctgcgtcactaa

SEQ ID NO: 255608 - DNA, 867 bp, Klebsiella pneumoniae
  misc_feature (842)..(851): n is a, c, g, or t
atggaactggaagaaatagtggcccttagtgtaaagcataacgtctccgatctacacctgtgcaatgcttcagcgccgcgctggcgtcgccagggaaagctggagcctgcgccttttacctcccctgatatcagcaaaatactccatgactggctcaacgccgagcagctcgcgcagtggcaggccagcgggcaggtcgatttcgctttagcgccggctggcgggccacgccttcgcgccagcgcatttgcccacagccgcggcctgtcgctggcgctgcgtctgctggcggaaacctgtccgcagctggaggcgctcggtgtaccagccgccttaagcgatctgctcaatgaggagagcgggcttatcctcgtcacgggcgccaccggcagcgggaaatcaactaccctggcggcgatggtgggctatcttaatcagcgcctcaatggtcatatcctgacgctggaagatccggtcgaatttattcaccacagcgagcgttgcctgatccagcagcgggaaatcggccgccactgcccctcctttgccgcggctttacgcgctgcgctgcgtcaggatccggacgtcattctgttaggggaactgcgcgatagcgaaactatccgcctggcacttacggcggcggagaccggacatctggttatggcgacgctgcatacgcgcggcgccgcgcaggcggttgaaaggctggtggatgtctttcccgcccaggagaaagagcaggttcgcagccagctggcgggaagtttgtgcgcggtactggcacaaaaattgtttccggatgctgcaggcggcagagttgcgctatacgagcttttagnnnnnnnnnngtatacgagcttttag

SEQ ID NO: 255609 - DNA, 705 bp, Klebsiella pneumoniae
atgaacgatattgcgcataacctggcacaggtccgggacaaaatctcagccgctgccgcacgctgcggccgtgctccagaagaagttacgctgcttgcagtcagtaaaacgaaacctgcgagcgctatcgaagaagcgatggccgcaggccaggtcgcgtttggcgaaaactatgttcaggaaggggtggagaaaatccgctactttcaggagaccggggcaagcgggctgcagtggcactttattggtccgctgcagtccaacaaaagccgcctcgtggccgaacattttgactggtgtcataccgtcgatcgactcaaaatcgccgctcgcctcagtgaacagcgccctgcccacatgccgccgctcaacgtgctgattcaaatcaacattagcgatgagcagagcaagtcgggtattccgcctgcagagctggacgcgctggcggcagagatcgctaaattgccgaatctgcagctgcgcggtttaatggccatccccgcgcctgagtcagaatatgtaaggcagtttgccgtcgcccaacaaatggcggtagcatttgcgcggctaaaaacgcactaccctaccgtcgatacgttgtcgctgggaatgtcggatgatatggaagccgccatcgcggcgggaagcactatggtgcgcatcggaaccgcaattttcggcgcgcgcgactacagcaaaaaataa

SEQ ID NO: 255610 - DNA, 291 bp, Klebsiella pneumoniae
atgagtgctgtccaggcctgcgctgacggtctggtcttaaggctgtatattcagcctaaggccagccgcgacagcatcgttggtttacatggcgacgaactcaaagtcgccattaccgcgccacccgttgacggccaggccaacgcccatctggtaaaatttctcgccaaacagtttcgcgtagcaaaaagccaggtgcttattgagaagggcgaactgggtcgccacaaacagataaaaatcattcatccgcagcagatccccgacggggtcgctgcgctgacagaatag

SEQ ID NO: 255611 - DNA, 1179 bp, Klebsiella pneumoniae
  misc_feature (1069)..(1078): n is a, c, g, or t
atggctaatttgccgcccctgagcctctacattcacatcccgtggtgcgtgcagaaatgcccgtactgcgatttcaactcgcatgcgttgaagggcgaagtgccgcatgatgactatgtccagcatctgctgaacgatctgcgcgccgacgcccactatgcgcagggacgtgaaatcgggacgatttttattggcggcggtacgccgagcctgctctccggcccggcgatgcaaaccctactcgatggcgtacgcgcggctcttccgctggcggccggagccgaaatcacgatggaagccaaccccggcaccgtggaagcggatcgcttcgtggagtatcagcgcgccggcattaatcgcatctccatcggcgtacagagctttagcgagcaaaagctgcagcgtctggggcgcattcatgggccacaggaagccaaacgcgcggcaaacctggcaagcggtctgggactgcgcagctttaacctcgatttaatgcatggtctgccggaccagtctctggaagaggcgctggacgacctgcgccaggcgattgcgctcaatccgccgcatctctcctggtatcagttgaccattgaaccaaataccctgtttggttcgcgaccgccggtcctgcctgacgacgatgcgctgtgggatatttatgagcaggggcatagcctgcttagcgccgcgggctaccggcaatatgaaacttccgcctatgcaaaaccgggatatcagtgccagcataatctgaactactggcgctttggcgactacctgggcattggctgcggcgcgcacggtaaagtgacgtttgcggacggacgcattctgcggacggcgaaaacccgccacccgcgcggctatatggaaggccgttacctggagcgccagcatgatgttgagaacgcagataaaccgtttgagttctttatgaaccgtttccgcctgctcgaagcggcgccacgggatgaattcagccgctttaccggcctcgacgagcggacgatccgcccgcaaatcgatgccgctattgctcagggctacctgacggaagatgaaggcnnnnnnnnnntgctggcagattaccgagcacggcaagctatttttgaactcccttctcgaattattcctcagcgaataaacctctccctgattatcccgttatataaatag

SEQ ID NO: 255612 - DNA, 987 bp, Klebsiella pneumoniae
atgaaaaaactctcgttttctcgttctctggtatgtgtttctttgcttgccctgctctcagcgggcgccagcgcagctgaaaaagttacgttaaaactggcacataaccttgaacgcagccacgttgttcatcaggcgtttgagcagatggcgaaagaggttaaccaactttccaacggcaatatgaaaatccgcatttaccccagtagccagatgggcagcgcgcgtgaaacgatggagttattacaaaacggcgcactggatatgacgaaaggttccgccagcgacctggagtcatttgataacgtctacgcgatatataatttaccgttcctgttcaaggatcagaatcacttcaataaagtcgtcttcggtgaagtgggtaaagaaataatggagtccacgaaagataaaggattctttgccctttccgcttatgttgccgggacccgaagtttttatgctaaaaaacccattactaaaccggaagatttaaaagggctgaaaatccgcgtccaggccagtccgacaacgttgaaaatgatcgaattaatgggcggttcgccaacgccaatttcgtttggtgaagtctataccgcgatgcagcagggcgtagtggacggcgcggaaaataacgtaccttcctgggtacaaacgcgccatatcgaaatcgctaaggttttctcagaagatgaacatgcctccatcccggacttcctcgttatctccagcaaaacctgggacaagctgacgccggagcagcagcaaatcctgaacgaggcggcgaaagcctcagaggcctatcagcaaaaactgtgggacaaaattgacgccgacacccgcgcgcaggccaaagccatgggcggcgaaattatcaaagttgataaagcaccgttccgcgccgccgttcaaccgctctttgatgacttcaaaaaagatccgaagcaggcggctctgctggccaaatttgaagctgctgctgaataa

SEQ ID NO: 255613 - DNA, 504 bp, Klebsiella pneumoniae; identical to SEQ ID NO: 172907

SEQ ID NO: 255614 - DNA, 1302 bp, Klebsiella pneumoniae
atggacagctatatcgcactgatgctatttggctctttctttattctggtttttattggcgtacctatctccttctccattggcatcgctaccgtcggttcgatgctgctgatgttcccctgggatatcgcagcgattaccgtttctcagcgcctggcaaacggcctcgataacttcgcgctgctggcgattccattctttatctttgccggaaccctgatgaacagcggcgggattgccatacgtttaatcaatctggcccaggtgatggtcggacgcgtgccgggctctctgggccacgtcaacgtgctggccaatatgatgttcggctcgatttcaggctcagcggtcgccgccgccgccgcggtcggcggcacgctcaaccccatacagacgcagaaaggctacgatccggccttctctacggcggtgaacgtctcatcctgcatcacgggtctgcttattccgccgtcaaacgtactgatcgtcttttccctgaccgcaggcggcgtctcggtggcctcgctgtttatggccggctatttgccgggcatcctgatgggcctggctattatggtggtctgtgccgtcattgctaaacgtcgcggctatccggtttccgagcgtccgacctgcgcccaggcggcaaaagcgtttttcgatgctctgcccagcctgctgctggtcatcattgtgatgggcgggatccttggcggcatttttaccgcgacggaagcctctgccatcgccgtggtctacacctttatcctgtcggtactgatatatagggaagtgaagtggcgcgatctgccgaagctgattctggaatcggtagtcatgacctctattgtgctgctgctgattggcttttccgtgggcatgtcgtgggcgatgaccaacgccgacattccctacatgataagcgacgcgctaatgggcgtttctgaaaacccggtggtgattctgctgctgataaatatcgtgctgttaatcgtcgggatctttatggatatgaccccagcggtgctgattttcacgccgatattcctgccaatcgcgcaggacctggggatggatccggtgcacttcggtattatgatggtcgccaatctgtgtatcgggctgctcaccccaccggttggcagcgcgctgttcgttggctgttctatttctggcgtcaaaattcagcagttgatcaaaccgctgctgccgttctacgctgccctgctgatcgcgctgatgatgattgtctatatcccgcagatttcgctgtttattccgcagctgctggggctgatgtag

SEQ ID NO: 255615 - DNA, 717 bp, Klebsiella pneumoniae
atgcgcaaaacgctgttagctgtggcgctttccgtcactgctttgtccgcgcatgcggactaccagtgtagcgtcacgccgcgtgacgatgtcatcctcagcccgcagcaggtgcaggtgaaaggcgaaaatggcgatctggtgattaagccggacggcagcctgagctttaacgggaaagcgtattctctgaacgccgctcagcgcgaacaggctcaggactatcaggccagcctgcgcagcagcctgccgtggattgatgaaggcgcacgctcgcgggtagaaaaaggccgcgccgcgctggataaaattattaccgaacaggtaggggccagcagcagcatgcatagccgcctgaccaagcttgatgcgcagctgaaagcgcaaatgagccgcataattgaacatcgtaacgatggcctgacgttccactataaagctatcgatcaggtgcgcgccgacggccagcagctggtaaaccaggcgatgggcggcatcctgcaggacagcatcaacgagatgggcgcgaaggcggttctcaaaggcggcggtaacccgctgcaggggatcctcggcagccttggcggcctgcaaaccgccattcaggatgaatggaaaaatcaggaagccgatttccagcagtttggtaaggatgtctgcagccgcgtggtttcccttgaggatagccgcaaagcgctggtggagtcgttaaagtaa

SEQ ID NO: 255616 - DNA, 327 bp, Klebsiella pneumoniae; identical to SEQ ID NO: 191405

SEQ ID NO: 255617 - DNA, 1239 bp, Klebsiella pneumoniae
atgcgatggataagcctgctgtttctgctcctgccgctgatgggcgacgcggcaaaaaaggatcttcccgtgtcgctggtcatcgatgatgccccggtggctcaggtactccagtcgttggcggagctaaagcaaaaaaatctcgtgatcgctcctgacgtcagcggctcggtatctcttcatctgaatgaggttccctggctgcaggcgttgcgatcggtgatcgacagcgccggtttgacccttacccagcaaggttcggttctctacgtacacacccaggcgtggcaaaaggcgcagcagatgaaccttgaggcggaaagagcaaagcgtctgcagaatctccctttgcaggggcatagcgtgacccttcgctatgctgatgcggaggatctggctaaagccggcgaaaaattgctgagcgctcgcggacatctgacggtcgataagcgaaccaaccgtctgttgattcgagatgatgtccggcaccttccggcattaaaagcatgggcccaggagatggatgtacccgtaggtcaggtcgagctggcggcgcatatcgtttcaatgagcgaaaccagcctgcgggaactgggcgttaaatggagcctggcagaagcgagcagcccgccaggctcgggtaaattaaccaccttgagcagcaacctggcggtaggggatgccagtacaagggccgggtttaacatcggccgcatcagcgggcggcttctggagctggagctctccgcgcttgagcggaagcagcaggtagacatcatcgccagccctcgactgctggcttcgcatatgcagcccgccagcattaagcaaggaagcgagataccttatcaggtctccagcggcgaaagcggcgcaacctctgtggagtttaaagaggcggtgctggggatggaggtaacgccgacggtgttacatcaaaaccgcgtacgtttaaaactcagaattagcgaaaatacgccgggccaggtgctcaaacaggataatggcgaagtattggctattgataaacaagaaatagaaactcaggtagaggttaaaagcggcgagaccctggctttaggcggtatctttgcgcaaaaaaataaaacttctcgcgagggtattcctctccttagcgacatcccctggtttggccagctgtttcgccgcgacggcaaggataacgaacgacgtgaactggttgtcttcatcactccacgtattctggcagtgcattaa

SEQ ID NO: 255618 - DNA, 441 bp, Klebsiella pneumoniae
atgcgggggagcattgaacgcttgctggcggagcgtaaaagtctgttagcgatacttctcctgctggttctgattgccgcaatcgggcgctggctcatgctgccttcccagacagaaacgccagtggagctctcgccgcgcatacagatgcagtggcgaaaattgctgccgctggtgagcgcgctacgtgccgccggaatagatgacgcagcgacccagccattttctcccattgagctcccggtggctggggcggcgcttatcgcctggcggccgatgggcggcgggggcgagatgcagctggaggctgactggcaagcggtgcctgcgctcttttcctggcttgcccgctgcgggatgcgggctacggctttctctgtgcagccggaaaaacaggctctacggttgactctgcatctgggggcggaagatgcgccttaa

SEQ ID NO: 255619 - DNA, 540 bp, Klebsiella pneumoniae
atgagccacatcgtcaactttcttccctggcgcgaaacgcggcgaaaacagcgcctgcgcataggcggcctggtgagcgtcggtttactgcttatcctgcttgcggcgctgcttgccccacggctcaacaaacgggccgctcactggctggcaaccgttaagctaaacgctgataaccagctttacagcgcattacagcagcgtgagcgcaccatgcgtcagcagctacagcacagggatcaacagcgcctgcgccgcctgcggcgcgaaaaaaccgccgcgtggcagccaaggctgcaggagatagcggcgcgtatgccggaagatgcctggttaacccatctggaataccgccagaacgctctgtcgctaagcgggctaacgttgaatcttaaagggttagccgcgctggaaaaggcgctggcaaacattagcggttttcttccggcaaaggcaggggaaacgcaccgcgatagcgaagggcgctggctatttcacttttccatggttggagaggacgaacatgcgggggagcattga

SEQ ID NO: 255620 - DNA, 792 bp, Klebsiella pneumoniae
atggcttttagaaactggcgcataggaatgcatattcagcaggaccatattgctattgtcgcgttgttgcatgagcgctcacgctgggcgctgcgccgctggtggaatatcccattaatgcccggcaccgtgcgtcaggggatggtagtggacgttgagtcgctggcccaccagttgcaaagctggcggcgggagctgcctttgcagcatcaagtctgcattgccttcccggcggcgcgaacgctgcagaagcagctcctgcgtccgcagatttcattaagagaaagcgagcaggcgacatggataaccagcgccatggcgcagcagctggaaatgcccgcctcttcgctgtgcgtcgattatgcccaatctgctgcggtcgatggctggcgggttaccgctgcacagcgcttagacgtcaacgcgctatgccggctggcaacccgcctcaggttaagagtggtggggattgtcccggatgccagcgcgcttagcgcttttatcccctggctgccggttgaaacgcaggggctggcgtggcgcgacgaagcgagctggctttgggcaaccgccgagaactggggatactgtttgtgcagcgacgctccctctttttcccacatggtttcccgggtaaacgccggagcatttcgtctctgcacttcagcgccgtgcgacgggcagagctttgacgcctggagcgtcatcgatcgcctgcagccgcctctgccgagctgcggcgacagctataccgttgctctggggttggcgctgggagcgcgccagctatga

SEQ ID NO: 255621 - DNA, 1953 bp, Klebsiella pneumoniae
  misc_feature (1693)..(1702): n is a, c, g, or t
gtgaagttcgtaaagtatctttttatccttgcagtctgttgcgtactgctgggagcaggctcgatttttggtctctataaatatatagagccgcagctccccgacgtcgcaacgctgaaggatgtgcgcctgcaaatcccgatgcaggtctatagcgcggatggcgagctgatcgcgcaatatggcgaaaaacgccgtattcccgtcacgctgcagcaaatgccgcctgagctgattaaagcgtttatcgccaccgaagatagccgtttttatgagcatcatggcgttgaccctgtcgggattttccgcgccgccagcgtcgcgatgttctccggtcacgcctcgcagggcgccagtacgattacccaacagctggcgcgtaacttcttcctgagccccgaaaaaacgttgatgcgtaaggtgaaagaggccttcctcgcgatccgcatcgagcagttactcaataaagatgaaattcttgagctatacctgaacaaaatctatcttggctatcgcgcctacggcgtcggcgcggccgcgcaggtctactttggcaaatccgtcgatcagcttacgctgagcgagatggcggtgattgcaggcctgcctaaagcgccgtcaacctttaacccgctctattccatggatcgtgcaaccgcccgccgcaacgttgttctttcgcgtatgctgagcgaaggctacatcacgcaggcgcagtacgatcaggcgcgtagccagcctattgacgcaagctaccataccccggaaatcgccttctcctcgccgtatctcagcgaaatggtgcgtcaggagatggtcagccgctacggcgagcaggcttatgaagacggctatcgcgtctacaccaccatcacccgtaaaaatcagcaggcagcccagcaggcggtgcggaataacgtgctggattacgatatgcgccacggctatcgcgggccggaaaaggtgctgtggaaagtgggtgaaacgccgtgggataaccagaaaatcatcgataccctgaaaaaaaccccaggctccggaccgctctctccggcggttatcacttcggcaaatccgcaggaagccgtcgcgctactgagcaacggaacctcggtctctctgaatatggaaggcgttcgctgggcgcggcgctttatctccgatactcaacagggcgccacgccgcgtaaggtgaacgatgtcgtgcagaccggacaacaggtctgggttcgccaggtaggcaacagctggtggctggcgcaggtgccggacgtcaactcggcgctggtatcgatcaacccgcaaaacggggcgatcattgcgctggtcggcggtttcgatttcaaccaaagcaagttcaaccgcgccactcaagcgctgcgtcaggttggctctaacattaaaccgttcctctacaccgcggcgatggataaaggcctgaccctggcgagcatgctcaacgacgtgccgatttcccgctgggatgccggttccggctccgactggcggccgaaaaactccccgccgcagtatgcgggtcctatccgcctgcgccagggtttgggtcaatcaaagaacgtggtgatggtccgcgcgatgcgggctatgggcgtggattacgcggctgagtatctgcagcgcttcggcttcccggcgcagaacatcgtgcggaccgaatcactggccctgggcnnnnnnnnnngggcgtggattacgcggctgagtatctgcagcgcttcggcttcccggcgcagaacatcgtgcggaccgaatcactggccctgggctccgcatcgttcacgccgctgcaggttgcgcgcggctactcggttatggctaacggcggtttcctggttagcccttatttcatcagcaaaatcgagaacgatcagggcggcgtcatttttgaagagcggccaaaaattgcctgcccacagtgcaatattccggtga

SEQ ID NO: 255622 - DNA, 705 bp, Klebsiella pneumoniae
gtgatttacggcgatacgccgaagtctgatgtgctggaaaataaagacgttgaggacgtagcgacctcgcaggatccgcaaaatcccggcgttcctccgcagccgcagctggcgcaggcaaaccagtctctggtcgcgcaaagtggcgctccggagtatgcgccgcacgtgatcaacacgccgctggcgttcctgattaaaagcgccctcaacaccaatatcttcggcgaacccggctggatgggtaccggctggcgagcaggccgcgacctgcagcgtcacgatatcggcggcaaaaccgggaccactaacagctcaaaagatgcgtggttctccggctatggccctggcgtggtgacatcggtatggattggctttgacgaccaccgtcgcgatctcggccgcaccaccgcctccggcgccatcaaaaatcagatatcgggctacgaaggtggcgccaaaagcgctcagccggcctgggatgattttatgaaaagggtgctggaaggcgtaccggaagagccgctcacgccgccgccgggcattattacggtcaacattgaccgcagcaccggtcagttagccagcggcgggaacagccgcgcagagtactttattgagggaactcaacctacccagcaggcagttcacgaagtgggcaccaccatcaccgatggcgggggcgagactcacgaactgttctga

SEQ ID NO: 255623 - DNA, 480 bp, Klebsiella pneumoniae
  misc_feature (431)..(440): n is a, c, g, or t
atgagcaaatcattacaaaaacccaccattctcaacgttgaaacagtcgcgcgctcgcgcctttttaatgttgaaagcgtggaccttgagttcagcaacggggtgcgccgcgtatatgaacggatgcggccttctacccgtgaagccgtgatgattgtgccgattgtcgatgaccacataatcctcattcgcgaatacgctgttggtaccgagtcctatgagctgggcttttcgaaaggcctgatcgatcctggcgaaagcgttatggaagccgccaaccgcgaactgaaagaagaggtcggatttggcgcgcaaaagctgacgtttttgaaaaagctcagcatggctccgtcctatttctccagcaagatgaatatcctggtggcggaagatctgtatccggaatcgctgcctggcgatgagccagagcnnnnnnnnnngagccgctgccgcaggttcgctggccgctatcgcagctga

SEQ ID NO: 255624 - DNA, 2130 bp, Klebsiella pneumoniae
atgggcacctttctgatatttttgttagctctgctaatctgcgcattgcttatcgggtggtggtatcgctcgcatgccagacgtcgccgcctgccgctgctgcacgcctttagcgatgccgctacgcgcaacctctccgatgaagagcgcagcgccgtagaaaaatacctcgaaagtctcagccgcaaccagcagttgccagcttcaggcgccagtaccgcgccgctaaacctgatactgaacgaacagagcgataccgtttatagcgttacccgagcgatcactcgctacggcatcaccacggacgatctcaacaaatggcgctacttccttgattcagttgaaattcatctgcccccattctgggagcaacatattaatgacgagaacagcgtcgaattaatctccaccacgagcctaccgctggtgattgcgcttaacgggcagacgctgagcgactatccgcaggagtcccgtggtttcgcccttgaacaagccccggcgacccaggcatctatccgcggggaagagagcgaacaaattgagctgctcaacatccgcccggaaacgcccgaagagcatgcactgagccgccccgacggccttcgcgaagctattctggcagtcgccgcgttcctgctgttttattgtagcctgatcgcccccgacgtcttttcgccctggcttctcggcggcggtatactgctacttcttgccagcgtatggggaatctacgcgccgccgcgcaaaacgtcgctgcgggaaattcattgtttgcgcggtatgcctaaacgctgggggttgtttggtgaaaacacccaggagcataccaacaatatttctctcggcattattgacctcatctacccgcgccactggcaaccgtggatcgcgcaggaccttggccagcaaacggatatcgacatctatctcagccgccatgtagtccgccagggacgctatctgtcgctgcacgatgaggttaaaaacttcccgcttcaatactggcttcgtagcacgattatcgccctgggagcactactggttgttgtcatgctgtgggccagcgttccgctaaacatgccttttaaattcacgctgtcatggctaaaaggcgcacagaccatcgaagccactacggtcgcccagctggagaaatcgaaaattcgcattggcgatacgctgcgcctgaaaggctcgggaatgtgtaacattcacaccccgggcgcgtggacagcaaaagagaactcgccgtttatgccgttcgattgttcacaaatcgtctggaatgatgcgcctcccctgcccctgccggagtcagatatcgtcagtaaggccgccgcgctgatgcagaccgttcagcgccagctccaccccgaatccgatgacgattcgcgggtcagcccggcgctacgctccgctattcagaaatccggcatggtgctgttggatgactttggcgatatcgtcaccaaaaccaacgacctgtgctctgcgaaagacgattgcgttcgcctgaagaatgcgctggttaacctcggtaacacccgtaactgggaaacgctgaccaaacgcgccagcgcgggcaaactggacggggttaacgtgctgctgcgtccggtaagcgcggagtcgctggagaatctggttaccacctccaccgcgccgttcgtcagtcgggaaacctcacgtgccgctcaggcgctgaatagcccggcgcctggcggttttctgattgccagcgatgaaggcagcgacctggtcaatcagccctggccaagcaccggattatacgacttccctgcacaccagcagtggagtgaactacggcgcctggcgagcatgttgatgcacacgccgttccaggctgaaggtatcgtcaccagcctttataccgatgctaacggcacacagcatatcaacctgcaccgtatccctgaccgcactggcctgtggcgctacctcgggacaacgctgctgctgctggccatgctgggctgcacggcgtatcacggcatccaggcttttcgtcgctatcagcgccatcgccagcgccaggaagagatccagaaatactacgaaagctgcctgaatccggttctgctctcctcgccggacccgcaagaataa

SEQ ID NO: 255625 - DNA, 684 bp, Klebsiella pneumoniae
atgcattttgatatcgcctggcaggaggttgataccgttctgctggatatggacggcacgctgctcgacctcgctttcgacaactacttctggcaaaaactggttcccgaaacctggggcgccgcgcgcgggctcaacctgcaggaagccagagacgcgatgcgccaggaatatcatgcggtgcaacatacgctaaactggtactgcctggactactggagcgagcgcctgggtttggatatttgtgcgatgaccagcgagcaggggccgagggcgacgctacgtgatgataccgtgccgttccttgaggcgcttaaaaccagcggtaagcgccggattttgctgactaacgcgcatccgcacaatctggcggtgaagctaaaacataccgggctggatgcgcaccttgatttattgctttccacccacacatttggttatccgaaagaagatcagcgtctgtggcacgctgtggctgaagagaccggcttcgacgcgcgtaatacgctcttcgtcgacgataacgaggcgattctggacgcggcggcggagtttggcgtccgctattgcctgggcatcaccaacccagattccggactggcggaaaaaagctacgttcgtcatcccgggttgaatgactaccggcatctgatcccctcgctgaccctacaggagaggccatga

SEQ ID NO: 255626 - DNA, 402 bp, Klebsiella pneumoniae
atgaaagaaaaacccgtcgcagccgtcaggctggacaaatggctgtgggcagcccgcatttataaaacccgagcgctggcgcgcgagatgattgaaggcggcaaggtacactacaacggacagcgtagtaagccgggaaaagtggtcgaactcaacgccaccctgacgatccgccagggcaatgatgaacgcactatcgtggtaaaaggcattaccgaacagcgcagacctgccagcgaagccgtcgcgctctatgaagagacggcagagagcatcgagaaacgcgagaaaatggcgctggcgcgaaaaatgaacgcgctaaccatgccgcatcccgacaggcgtccggataagaaagagcgccgcgacctgatgagatttaaacacggcgatagtgaataa

SEQ ID NO: 255627 - DNA, 879 bp, Klebsiella pneumoniae
atgactcaacacgatcaattacaccgctatctgtttgaaaactatgccgtacgcggtgagctggtgacagtttctgaaacgttagaacagatcctgactaaccatagctatccgcagccggtgaaaaccgtgctcgcggaactgctggtcgccaccagcctgctgaccgcgacgctgaaattcgctggcgatatcaccgttcagctgcagggcgatggcccgctgtcgctggcggtgatcaacggcaacaaccagcagcagatgcgcggcgtagcccgcgtccagggcgagatcccggatggggcggatctgaaaactatggttggtaacggatatctggtcatcaccatctctccggaagagggcgagcgctatcagggcgtggtcggccttgagggagacaccctggctgcctgcctggaagattacttccagcgttccgaacagctgccgacccggctgatcatccgcagcggcgagcacgaaggcaaaccgatggccggcggcatgctgctgcaggttctgccggcgcaagatgcgcaggcggctgattttgaacatctgagcacgctgaccgaaaccatcaaagctgaagaactgtttaccctgccagcgaacgatgtgctctggcgtttgtatcacgaagaggaagtcaccgtttacgagccgcagaacgtcgagtttaagtgcacctgctctcgcgaacgctgcgccggcgcgctgaaaacgctgcccgatgaggagattgatagcatcctcgccgatgagggtgagatcgatatgcactgcgactactgcggaaatcattacatctttaatgcaatggatattgccgagatccgcaacaacgcctctccggccgacccgcagctccactaa

SEQ ID NO: 255628 - DNA, 1623 bp, Klebsiella pneumoniae
atgcgcgttaataatggtttaaccccgcaggatctcaaggcttatggtatcaatgacgtccaggatatcgtccataaccccagctacgatactttgtatcaagaagagctcgcccccaatctggaaggttatgaacgtggcgtattaacaaatcttggtgcaatcgccgtagataccggtatttttaccggccgttctccaaaagataagtatatcgttcgtgacgacaccacccgcgatacggtgtggtgggctgataaaggcaaaggcaagaacgacaataaaccgctgtcagaggaaacgtggcagcacctgaaaggactggtcacccgccagctctccggcaagcgtctcttcatcgttgacgccttctgcggcgctaacgccgacacgcgcctgagcgtccgctttattaccgaagtcgcctggcaggcgcatttcgtgaagaacatgtttattcgcccgagcgatgaagaactggcaaactttgagccggatttcatcgtgatgaacggcgccaaatgcaccaacccgcagtggaaagagcagggtctgaactccgaaaacttcgtcgcctttaacctgaccgagcgcatccagctgatcggcggtacctggtacggcggcgaaatgaaaaaagggatgttctcgatcatgaactacctgctgccgctgaagggcatcgcttccatgcactgctccgccaacgtcggggaaaaagaggatgtcgctatcttcttcgggctttccggtactggcaaaaccaccctttccaccgacccgaaacgccgcctgattggcgatgatgaacacggttgggatgacgacggggtatttaacttcgaaggcggctgctacgctaagacgattaagctttcagaagccgcagaaccggatatctatcatgcgattcgccgcgatgctttgctggagaacgtggtcgtactggccgacggcaccatcgactttaacgacggttcgaagaccgaaaatacccgcgtctcctatccgatctaccatatcgaaaacatcgttaagccgatatccaaagcgggtcatgccactaaggttatcttcctgaccgccgacgcgtttggcgttctaccgccggtttctcgcctgaccgccgaccaaacccagtaccacttcctgtctggctttaccgccaagctggccggtaccgagcgcggcgtcacggagccgacgccaaccttctccgcctgcttcggcgccgcgttcctttcgctgcacccgacgcaatacgctgaagtgttggtaaaacgcatgcaggcctccggcgcgcaggcctatctggtcaacaccggctggaacggcaccggcaaacgtatctcgatcaaagatacccgcgccattatcgatgcgatccttgacggttcgctggacaatgccgaaaccttcacgctgccgatgtttgagctgcagatcccgaccgagcttccgggcgtggatactcatatcctcgatccgcgcaacacctacggatcgccggagcagtggcaggaaaaagcggagcagctggcgaaactgtttatcgagaacttcgagaagtacaccgatacgccagcgggcgctgcgctggtggccgcagggccaaaactctaa

SEQ ID NO: 255629 - DNA, 2094 bp, Klebsiella pneumoniae
atggagagtaaacgccttgataacgctgccctggcggcggggataagcccaagctacatcaatgctcacggtaagccgcagtctattgctgcggcgaccaagcagcggctgcttgatgcgatgcatcgtacagcaactgccgtgaaggcgacggttgatccgctgcctgcggtgcaggtgttcacctatggcaaaaagatgtctctgccggtggcgggccagggggagtttcactggatcctcaccaccgaagaagggaaacagtatcagggccaggcgcgcggcggagaaaccctgccgctgccggcaaaattgccggaagggtatcacacgctgacgctgactcaggacggcgagcgcagccactgtcgggttatcgtcgcgcccgcgcgctgctatgaaccgcaggcgctgaaggatggtaagaagctgtggggaacctgcgtgcagctgtatacgctgcgctcggagaagaactggggaattggcgacttcggcgatttacgcgctatgctgccggaaatcgctcgccgcggcggcgcgtttattgggcttaacccgattcacgcgctctacccggctaacccggagagcgccagcccgtacagcccctcttcacgccgttggctcaacgttatctatatcgacgtcaacgcggtagacgatttccgtcacagcaaagaggcgcaaaaatggtggcaatcatcggccacgcagcaagccttacaggccgcgcgccagaccgatgacgttgactataccgccgtgaccgctcttaagctcactgcgctgcgcatggcctggaaaggtttttccgcgcgcaatgatgagacgacggcggagttccgtcagtttgtgacccgtgagggcgaaagtctgtactggcaggcggcgtatgacgcgctgcacgcctggcaggttaagcaggatccgatgcgctggggctggcccgcgtggccgaaggcttaccaggataccgatagcccggaggttaaagcattctgtaccgagcatgccgacgaagtgaatttttacctgtggctgcaatggctcgcttacacccagttcgccgagtgctggcataccagccagaacgatgccatgccgatcggtctgtatcgcgatctggcggtcggcgttgcggaaggcggagcggaaacctggtgcgatcgcgagctgtactgtctgaaagcctccgtcggggcgccgccggacattctgggtccgctgggacagaactggggcctgccgccgatggacccgcatatcatggtggcgcgcgcctatgagccatttgtcgagctgttgcgcgctaatatgcaaaactgcggggcgctgcgcatcgatcacgtgatgtcggtgctgcgtctgtggtggatcccttacggtgagacggccgatcacggtgcttacgttcagtatccggtagacgatctgttgtcgattctggcgctggagagtaagcgtcaccgctgtatggtgatcggcgaggatctgggaaccgtaccggttgagatcgtcggtaagctgcgaaaaagcggcgtttactcttacaaagtgctctatttcgaaaatgaccacgagaagactttccgtgcgccgaaggcgtatccggagcaatcaatggctgtggcaacgacgcatgacctgccaacgctgcgcggctactgggaaagcggcgacctgacgctggggaaatcgcttggcctgtatccggatgaggtggtgctgcgcggactttatcaggatcgcgagctggcgaagcaggggctgctggatgctctgcaccgctacggctgtctgccgaagcgtaccgggcataaagcgtcgctgatggcgatgacctcaaccctgaatcgcggtatgcagcgctatattgccgacagcaacagcgcgctgctgggcctgcagccggaagattggctggagatggccgagccggtcaatattccgggcaccagcacggagtatccaaactggcgtcgcaagctctccaccacgctcgaggcgatgtttgccgatgagcaggtgaataagctgattaaggatctggataagcggcgtaagtcggcaagtaaaaagaaacccgcctga

SEQ ID NO: 255630 - DNA, 2391 bp, Klebsiella pneumoniae
atgtcacagacttcttttaacaaagctcagtttcaggctgcactgacgcgtcagtggcagcattttggtttacagtccgcttccgagatgacccagcgtcaatggtggcgcgccgtaagcggtgcgctgtccgagctgttatcggctcagccggtagcgaaagcggccgcagggcagcgtcacgtaaactacatctcaatggagtttttgattggtcgcctgaccggcaacaatttgctcaaccttggctggtatcagcaggtcagcgatgagctacaggcgcatgacgttaacctgaccgacctgctggaagaggaaatcgacccgggtctgggcaacggtggcctcggccgtctggcggcatgtttcctggattcaatggcaaccgtgggtcagtcggctaccggctacggcctgaactatcagtacggtctgttccgccagtctttcgctgacgggcagcagatggaagcgccggatgactggggacgtagcaactacccgtggttccgccacaatgaagcgctggacgtacaggtgggcctcggcggtaaagtgactaaaaatggtgagtgggttccggcatttgtgattaccggcgaagcctgggatctgccggtgctgggctaccgcaacaacgtggctcagccgctgcgtctgtggcaggctaagcacgcgcatccttttaacctgactaaattcaacgacggcgatttcctgcgtgccgaacagcagggcattgacgccgaaaaactgacgaaagtcctctacccgaacgataaccatcaggcgggtaaaaaactgcgtctgatgcagcagtacttccagtgcgcctgctcggttgccgatattctgcgtcgccatcatctggcaggtcgcaagctggcagagctggcggattatgaagttattcagctgaacgatactcacccgacgattgcgattccggagctgctgcgcgtgctgattgacgagcatcagctgagctgggacgacgcctgggcgattaccagcaaaacttttgcttacaccaaccacaccctgatgccggaagcactggagtgctgggatgagaagctggtaaaagcgctgctgccgcgccacatgcagatcatcaaacagattaacgaccgctttaaaacgctggtggataaaacctggccgggcgacaagcaggtttgggcgaagctggcggtggtgcacgacaaacaggttcgtatggcgaacatgtgcgtggtcagcggctttgcggttaacggcgttgccgcgctgcactccgatctggtggtgaaagatctgttcccggaatatcaccagctgtggccgaacaaattccataacgtcaccaacggcattaccccgcgtcgttggatcaagcagtgtaacccggcgctggccgcgctgctggataaaacgctgaagaaagagtgggccaacgatctcgaccagctgatcaacctcgaaaaatatgctgatgacgcgacgttccgtcagacgtatcgtgagattaagctggccaacaaggttcgtctggcggagttcgtgaagcggcgtaccggtatcgagattaatccgcaggcgattttcgatattcagattaagcgtctgcacgaatataaacgccagcacctcaacctgctgaatatcctcgcgcagtacaaagaaatccgcgagaacccgcaggccgaccgcgtaccgcgcgtgttcctgttcggtgcgaaagcggctccgggctactacctggcgaagaatattatctgggcgatcaacaaagttgccgcagcgatcaataacgatccgctggtaggcgataagctgaaagtcgtattcctgccggactactgcgtctcggcggcggaaatgctgatcccggcggcggatgtctctgagcagatctctacggcgggcaaagaggcctccggtaccggcaatatgaagctggcgctgaacggcgcgctgaccgtgggaaccctcgacggcgccaacgttgaaattgctgagcaggtgggcgaagagaacatcttcatcttcggtcatactgtggaagaagtgaaagcgctgaaggccaaaggttacgacccgctgaagtggcggaagaaagataagctgctggatgcagtgctgaaagagctggagagcggtaaatatagcgatggtgataagcatgccttcgaccagatgttgcacagtctgctgaaaggcggcgacccgtacctggtgctggcggattttgaagcctacgtggcggcgcagaagcaggttgatgagctgtatcgcgaccaggaagcctggacgcgcgcaacgattctgaacaccgcgcgctgcggcatgttcagctccgaccgttcgattcgcgattatcagcaacgtatctggcaggcaaaacgctaa

SEQ ID NO: 255631 - DNA, 495 bp, Klebsiella pneumoniae
atgatgatggtattcgggctttttgtctttgaactcaggacgctgccctatcagcagttgcagctgtcccgtaactggcggcacgtcaaaaatgatcgtgttggccgtagcgcaaaatggcagtacgtgggcgcgggtgaaaatcagctgacgctgggcgggctgctctatccagaaattaccggcggcaacctgtcgctgggtgccgtctccacgatggcgtataccgggctggcctggccgttaattgatggggttggcgcgatttacgggatgtatgtcatcacggggttacaggaaacgcaccaggagcttgatcgctatggtaaggcgaaaaaaatagagttcacgctttcactgcaaagggttgatgaggatatcagggagaggctgcaaagcgcctctgtcagcgacttgatggcaacactaaaggaaggagcagagactgcattaaatacagctcaggagacgctcggcggtctgaccttgtattag

SEQ ID NO: 255632 - DNA, 3012 bp, Klebsiella pneumoniae
atgaagaatcttgatatccgcgttgcattcagcgcagtagacaggtttacccgccccgttaatgccgcccgccagagtgcgggcggcttgtctgactccctcagaaaaacacaatccaccctgaaaggcctcgataaaagcactgctacctttcagcgtatgactgccgccgtcagcaaaacagatcgctctgtctcacgtgcgcgcactcgctttgaggggctgtcagagacgcagcgcaaaaacgggacgctgacggaaaggcagcaaacactgatgacgcggctgggtgagcgcctcgacaggctgagcgcaaagcgcgtgacggaggtggcccgcctgcgcgagagcgcatcagcattgcgccagcatggcgtgatgctctcaggtagcagcgcaaccatcagcaatgcaatacgccgcacggatgaattgagccggtcgcttgagcgggaaaaagcgcagctggctgcggtgactcaggcccgcaagcgctacgagggtgcgcagcagatggccgggaaattgcgcacaggcggcgcgctggcggtcggcacagcaaccgccgccggttatggtgccgggcggttcctgtcgcctgcggtgggctttgatgaggaaatgtccaacgtccaggcgttgacgcggctcgataaaaacgattcgcagctggccgccctgcgcgctcaggccaaaaaactcggtgcggaaacagccttcaccacgcgtgacgccgccagcggccaggccttcctggcgatggcgggctttacacctgatgctattcgtgacgccctgcccggcgtgcttaatatggcactggcgggagggatggacctgggcgccagcgctgatatcggttctaacattctttctcagttttctcttgatgctggagagatggaccgcgtcagtgatgtgctgactggcacctttacccgcaccaataccacgctaagcagcctgggcgaaacaatgaaagttgtcggccccgtagcggcagggcttggaattaacctggaagaagcagcagccatgaccggcacgctggcgcgcgtgggtattcgcggtagcgaggcggggacagcaatgcgccgtgccctctcccggctggcctcccccactacagcagcaaaaaaagcactcaaagagctgggtgttgaaactgccgacgccagcggaaaaatgcgccgcccgttcgatattcttctggaccttcagaaaaaggcttccagatttggcgatgttgatcagatttcatttttcaaagacattgctggcgaggaaggtttcaccggccttcagtctttggttagtggcgcgggcgatggctatctccagtcactctatgagcaaatcgctcaagcgcacaaaaatcaggaagcaaacacggtcgcaaaggtcaaaacgaataaccttggcggcgatctgaaggagctggacagtgcctgggaggcatttcgcatctctgtcgctgaaacggtggacgggcctttgcgccgactgacgcagggactcagccatgttattggcaatatcaaaagctgggtggaagaaaacccgcgactggctaagacgctgtttgttgccggtggtgttgcgctggcgctgactgccgcagtcggcgggctgtctcttgctgctggcttactgctggggccgatggcaaagctcaggcttggctttgcgctgctgtctggcgggagtggtattggtggcacgctgtccgcgttccgggcgctgtctgccattggtggtagctcgctcgcgaaattcagcggctggcgcatcgtgttcgggagtatttccgcgcacgccagcaccatggttaaaagtatcggcgcactcggcggacgcttcaccgcccttgccggcggtctggcccccgttcgcggcgcgctactcgcggcgtttgtctcccctggcgctgcgcttggctccctggctaaaggaattggtgggctgactctcagactgaccggcctcccagccctgtttaacgtggtaagggtgggattttctgcgctgggtggcgggctgtctctgctgttgagtccgatcggtttgctgggtactgcgtttgtggcggcagcagtgctgatctggaaatactgggggccaattaaggcgttttttgcgggtgtcttcacggggctgatgcaggggcttgcaccgcttcgcaccgcatttgcaggtttggtgcctgtctttggcttgattggtgatggcgtcaaacaggtctggaactggttcaagaagttgctcgctcccgtggagcaaagccgtgagtcgctgaataaatgcgcgagcgtaggtgaaaggttcgggagggtattagcgggcgcgttagggatggcgctaacacctgcaaaagccttgctgagcgcgctcacctggatccttgaaaagctcggcgttttgcccgatgaaacggaaagagtacgtaaaaagctggaggaggcgcaaacgacgtcgcttttacaagaaaagctgacgctccttcagggtgacattggagcgataacacctaaaaaagctgaagaaccaaaaggtgatgcgtcaccaaatgaaaagcctcttactggtgataagcccctgcgtcgcctgggtgagattgcagacaatacaaaaggccttttagatgaggaaaagcgcaagcgcgtcggaccgggagatatcgtatttaaaaacctgccgcctgcactggcggtgcggggggaatggcaggagtcgcggcttgtccgccagtccgtcagcgcccgccctatcattgcggccggtgagccggtggtgttgcagacgccggcccggaaaccagtgcgcagggatgaggttaagcgcgcggcagctgcggcgcaggccggagttttttctggtgagatccacgtccatttgcatgacgtgcgtagtgataacccgcgcgagctggcgcggctggttggcgaagctgtccgcgcggaaatggataaacggcggcgcgctgaccggggttcgttccgggataatgattaa

SEQ ID NO: 255633 - DNA, 312 bp, Klebsiella pneumoniae
atgaccagtaaaaatactttcaaattgactcgtccaattgtgcgtaaaggtggcgagattagtgaagtagagatcaccggcgccatcagtcaggccggatccctgcgcggtctgaaccttattcgggttgccaatatggatgcggattccatcgccacgctgttaacgcgagtcaccgcccctattctgacgcaaaaagaaatcaacgaaatgcacatgctggactttatcggactggcagagaagatggtccctttcttgaatccgccggagcctggaacatcgagcgcggcggagacggagagcgagtaa

SEQ ID NO: 255634 - DNA, 516 bp, Klebsiella pneumoniae
atggctgttcctcacaaactgcggctttttagctgctttgttaacggcgacaactatctgggaaaagtgacctctttcactcgccccaaactctcacgaaaggtagaggactatcagggcggcggcatgctgggcgcggtcggggttgatctcggccttgatgctggcgcgctggattccacgattgtatttggcggcgtcattaaggctcttttccttgaattcggggcagaaattgacggcacgcgactgcgcttttcgggtgagtattacaccgacggcgacagtcagctggttgaggtcgagctgcgcgggcgatttaccgagcttgacggcggagattcaaaacagggggaagatacggaggaaagctacacctttaaatccacctattacaaattctccatcgatgatcagcccattatcgaaattgacctgctgaacttcatctacaaaaagaacggtcagaatatgttccctgaccgcattacttccgccctgggcatgggcagttaa

SEQ ID NO: 255635 - DNA, 1170 bp, Klebsiella pneumoniae
atgtctgaaactcgttttcacggcgtccgcaaccgcgaaacaaccgatctgcaaacggcaatcaatgatattgattcgagcgtgatcgggattgtggcgattgctgacgacgccgatcccgaaactttcccgctgaatacgccggtactgctgacgcgggtgcgtaatgtactcagcaaagcgggtaaaaccggttcgctgtataaaacgctcaaagccatctccgatcagtgcagccctcgcgttgtggtagttcgcgtggcggaggccgccaacggtgccagccagtcgcaggcagtgattggcggagctgacggcgacagctatacggggatgtacgccctgctgacagcggaagccaaaaccggttatcgtccgcgcatccttgcggtgccggactatgacacggcagaggtaaccgggcagctttgcgtgattgcccagaacctgcgcgcctttgtttatgccggttgcaacggttgcgcaaccatggcggaggctatcgcttatcgcaaaaccttcgcttaccgcgagcttatgcttatctggccggacttcatcgcttacaaccccctgacggatgacaacgaaacgtttcccgccccggcttacgcctgcggcctgcgcgctgctattgataacagccagggctggcacaaatcgctgtccaacgtagtggtgaataacgttctgggcatttcaaaagatgttttctgggcattgcaggcagaagacagcgacgccaacgagctgaacaacaacgaaattacaacgcttatcaagcgcgacggattccgcttctggggcaaccgtaccacggacaccaaaacctacactttcgaggtgtttacccgtaccgcgcagatcctggcggacagcatcgcggaggcgcaatttaccacggttgacagtccactcaccccggccaacgtgaaagatgtggtgagcggcattcgtgcggctctcagcaagaaagtcactgcgggccagcttatcggtgcggattgctggtatgacacgctggacaacggcaccacggatttgcgccagggtaagctgattgtgcgctacagctacggcccggtcccgccgcttgaggatctgacgctttaccagacctttacagatgatttttacgaaccggcgttcgcgtcgctcgggggtgaataa

SEQ ID NO: 255636 - DNA, 1134 bp, Klebsiella pneumoniae
atggcgatagcggacacactacaaacagcagccgaaaactatacagaaaaactgagcgaggccgttaagaagccggatttcagtattacgctgggcggcgtggaactgactgagctggcagaccgtatcacggcgctctctgtcacggacaataacggctttgaggccgatcagctcaccatctccattgacgacgcagacgggatggttgatctgccgccgcgtggcgcagagctggctgtctctattggctggctgggagagccactgatttacaaggggctttataccgttgatgaagtcgggcatggtggcccgccggatgtgatcgacgtgacggcgcatagcgcggattttcgcgaagaaatgaacgtaaggcgggaggtgtcctggcatgacgtgacagtagagcgcgtggtgtcggccattgcccggcgttatgacctgaagccgatgattagcgaagatctgatcaacatcgagatagaccatgctgaccagaccgaagagagcgacatgtcatttttaacccgcatggccgacatgctgggcgctattgccaccgtgaaaaacgggtgcctgctgttcatcctccccggcggcggcgtgagcgcttccggcagggcgctgccttctgctgaaattacccgcgccagcggcgacggtcaccggtttcgcattgctgatcgtgatgcttacaccggcgtgcgggcgtactggctggatcttaattttggtaagaaaaaagcggtaaaggtcacaaagcgcaaaagcaaggcccggaaaaaagtagagaaaagcagcagcgcggaaggggattacatggaaggcgcggaggggaatgtttacgtgctgcgcaaaacctaccagaacgaaacggcagcgaggcgtgcagctgcggcaaagtggatccagatccagaagggcgcggcgcaattctccatcaccctggcgcgaggccgcgcggatttatacccgggtatgcatctgaccgtgtccgggtttaagcaggagattgatgcacaggactggattatcgctaaagctgagcatgtgacaggcgatagcggatttaccacacaactggaacttgaagcaaaaacaggcgactggattgcagaagcggaccagtaa

SEQ ID NO: 255637 - DNA, 240 bp, Klebsiella pneumoniae
atgaagtggatgatagctatgttgcctctggcgatggccggatgtgcgcagactcagccgacgcaacctgcacatccggtggggatggctaacccggcttcggtttactgtcagcagctcggcggcacgcaggttcccatccaaagcccgcagggcgtacgcactgaatgtaagctgcccagcggggaaacgttagatgaatgggcgctctggcggcgcgatcacccgaataagccgtag

SEQ ID NO: 255638 - DNA, 348 bp, Klebsiella pneumoniae
atgattcagtgtaaacgcgtttatgacccgcaggaaacgagcgacggctaccggatactggtagaccgtctgtggccgcgcgggataaaaaaagaaacgctgaactacgatgagtggtgtaaaacgctgacgccatcagcagatttacgcaaggcttttcacagcgagaccatcgatttcgcccactttagccaactctatcgccaggagcttgaggctcaacgggaggaaggcaaacgcctggcggccctggccagtcaacagccgctgacgttactctatgcggcgaaaaacacccggcaaaatcatgcgcaggtgctggctgactggctaaaatcgctacaataa

SEQ ID NO: 255639 - DNA, 510 bp, Klebsiella pneumoniae
atgaagagcaaaattctggttagcgcctgcctgatgggctttcaggttcgctataacggcagccacaaggcccgcttgactgacgcattgactcgctggcagcgtgagggacggctggtcacccactgcccagagctggcggccggattgcctgtaccgcgactaccggctgagatcctcaacgtccagggcgcagaggtgatgcaaaatcgcgggcaaattgttgaaagcgacggcaaggatgtcactgctcattaccagttggccgcctggctggcgctaaaagcggcgcaagaagaagggtgcgctgcggctctgcttaccgatggtagccccacctgcggcagccagtttatctatgatggtacctttaaaggccagcgcaaacccggtgctggtgttgccgccgccctgcttcgtgagcacggcattaaggtattttctgagcagcagctcccgcagctgctggcgtggatggaacaaagggagggcaatgatgattcagtgtaa

SEQ ID NO: 255640 - DNA, 693 bp, Klebsiella pneumoniae
atgaactcccccctgcgtattgccctggttggtgattacaaccccgatgttgtcgcccacaaagcgattcccctggcaatagatgatgctgcagccgtcctcgagctttcgttgcgctatgactggctggcaaccagtgagataaaatctactgaggatcttgctgactacgatgctatttgggtggtacccgccagcccctataaaaacgtcgcaggcgcatttatcgccattcgccacgcccgtgaaaacagcataccgttcctcggtacctgcggtgggtttcagcacgccattattgagtatgcgcgcaacgttatgggctggcaggatgccgcgcatgcggaaaccgataccgaaggccggatggtcatcgcgccgctaagctgctcgctggttgaaaagacggataatattgagctgcgcgccaatacgcttatcgcgcgcgcttacggtcgcgatagcattcaggagggataccactgtaattatgggattgccgacgattttgctcgcgaactggagcagggcgatctgcgggtgaccggctgggacgatgacggcgagattcgtgcggtcgagctggttacgcatccattctttgtcgccacgctgttccagcacgagcgcaatgcgctggaggggcggcccgcgccgctggttcacgcgtttttacacgccgcgagccgttaa

SEQ ID NO: 255641 - DNA, 1185 bp, Klebsiella pneumoniae
atgaattctgttttaccttctgccggccgccgtcctcttttgttgattgccggtattctgcttatcgccacgaccttacgcgtggcatttaccggcgccgcgccgctgctcgacgccattcgcagcgaatatggcctcactaccgcacaaaccgggctgttaacgacgctgccgctgctggccttcggcttggtgtcaccgctggctgcgggagtcgctcgccgcttcggcattgaacgcagcctgctgctggcgatgatactgatttgcctcggaattggtctgcgctccctgcccttcgtctcgctactgtttatcggcaccgcggtgatcggctgcggtatcgcgctggggaacgtactgctgccggggttaatcaaacgcgacttttcgcagcacgtcgccaaaatgaccggcgcttactctctcaccatgggtggcgcggcggcattgggctcggccatggtggtaccgctggcgcttgccggacttggctggcgcggcgcgctattgacgctgatggtttttccactgctggcgctgtttgtctggctgccgcagtcgcgcaggcaggctatcgcgccgctgaccggttcgggagccatccataaccgcggtatatggcgttcggcgttagcctggcaggtgacgctgtttcttggcattaactcgctggtctattacgttatcatcggctggctgccggccattttgcaaagtattggctacagcgaagcgcaggcgggttccctgcacgggttgctgcagttggcgaccgccgcgccgggactggcgattcccttaatccttcatcggttaaaagatcagcgcggtattgcggtgctggtcgctatgatgtgcgcggtcagcgcgctcggattatggtttctcccgggtcaggcggtaatgtggacgcttatcttcggctttggctccggcgcgaccatgattctggggctgacctttatcggactgcgcgccagctcagcccatcaggccgctgcgctgtcgggaatggcgcaggcggtgggctatctgctggccgcctgcgggccgccggtgatgggtaaaattcatgacgcctcgggcgactggcatattccgctgatcgccgtggcgctaatttctgtcgtgatggcggtcttcggcgcgctggctggccgcgatcgagaaattcacggctag

SEQ ID NO: 255642 - DNA, 792 bp, Klebsiella pneumoniae
atgatcggactcggcctggacggctacgacccggacagcggccacgaggcggcgctggcttttcgtattcaggttgtcgcggatgaacagtacattccgcgccatcagcatcgtaaagggcaactcatactggcccttcacggggcgctaacctgtgaagtcgagaacgccatgtggatggtgccgccgcagtacgcggtgtgggtgcccgggcaggtaccgcacagtaatcgcgcgacgccggaggcgcaaatctgcttcttatttatcgaacccgatgcggcgccgatgccggatttctgctgtacgttaaagatttcgccgctggtgcgcgagctgatcctcgcgatggcccagcgcggcagggcctggctcggtaaaccggagatggaccggctggtgcaggtgctgtttgatgagctaccgcagcagccgcaggagcatctgcagctaccggtctccggacatgccaaaattcgtcaaatggcggaaatgatggccgtcgacccggcccgctggcaaaccctggcgcagtgggcggcggagtttgccatgagtgaacgcaatctggcgcggctggtggtgcgcgagacggggctgagctttcggcgctggcggcatcagctgcagcttattctctccctgcagatgctgattcgcgggcaaacggtacagcagacggcgcagagcctgggctacgactccaccaccgcttttattactatgtttaaaaagggccttgggcagacgccgggacgctatcttgccagcctggctacgacttcccgataa

SEQ ID NO: 255643 - DNA, 447 bp, Klebsiella pneumoniae
atgctcgacaccaccctgttaatactgctgggcctggcggcgctcggctttgttagccataacacaaccgtggctatttctatcctggtgttaattatcgttcgcgtcaccccgcttaacgctttctttccgtggatagaaaagcaggggctgaccatcggtataattattctcaccattggcgtgatgacgccaatcgccagcggtacgctcccgccttcaacgctgctgcattccttcgttaactggaaatcgctgctggccatcgcggtaggcgtttttgtttcctggcttggcgggcgcggcgtggcgctgatgggctcgcagccgcagctggttgccgggctgctggtcggcaccgtgctcggcgtcgccctcttccgcggcgtaccggtcggcccgttgatcgccgccgggataatttcgctgtttatcgggaagtcgtag

SEQ ID NO: 255644 - DNA, 501 bp, Klebsiella pneumoniae
atgaacgcgtctgcaggactcagcattcatcagcagctgatcgcgctgcttaaccgctcccatgcccgctaccgggttgtggaacatgaagccgtcgggaaatgtgaagcggtgtcgaagatccgcggtaccgcgctgggtcagggagccaaagcgctggtatgcaaaattaaaggtcatggcgtaaatcagcacgttctggcgattcttgccgccgacctgcaggcggacttagcccgtctggccgagtatatcggcggcagtaaagcctccctcgccagcccggcggaagtggactccctgaccgcctgcgtgtttggcgcgattcccccctttagtttccacccggcgttgcggctggttgccgatccggtcctgttcgagcgtttcccggaaatcgcctttaacgccgggcagcttgataaatcgatcatcctggataccgccgactatctgcgcattgctcggccggaattggcggcttttcatcgccagccctga

SEQ ID NO: 255645 - DNA, 1497 bp, Klebsiella pneumoniae
atgaaattaaagaataaattacttcgtcatttgatttcggctggggtagtggtcctgacctcttcattcctggtctatgagttagtcgtcagccatcgggatatgtcggaatatatgcactatattgtcgaaaaaggcgagtatgcttttctctacgataaatatcaaaatcagctggttatctcccagatcgcccgcaagttagataccctaccttctgctgaagttgctcaacaggcatgcgacagcgtacaaacaaaaggcagcgttagcggtctgaatattacggagtacacctttcccctgcttagcggcacgctcagtgcgaatcagtcttcctgcctggcgtgggttaacgatctgcccgcgctgcaggcctttgataccattatcgaccataacagaacccaccatggccaggaaaccggtccttataaatccgacaacaaattacgttacttcattgattttaaaaataaatatgtgtatttccatactcaagtcgagattaaaaaccgcgcactggacaactggaactttctccacgacggcaaattaggtattacccagactaaccttaacagcttactgcgcggccgcacgttgatgtccagcatctacgtggacgcggtgaccgggcaaaatattctctcgtttttgtccccggtgtatcaccacgaagggcttaaaggggtcgtcatggtcgatgtcagccgtaaagatatcgaagagctcctgtataccgctgaccgcccgctggtgtggcgttatctcgacatcatattaacggattcggactcaacctcagaaatcattgttcaccgcagcaaaacgcatctttttagctatgcccattatcaacatgcggtagccacaaacctgcagatctcgctgtcgctggacgtgatgtatttcctgctcagctcctggaagctcttcctgttttacctgatatctaccggcgtgctgcttcatcttgttcgcatgcatttccgtttgtatatcgatgtttttaaagaaaatattagtgattcattaaccggtctttacaaccgtaaaattctctcctcgctgctggaatcgcgtatgcaaaagctgacggaacagggggtgaatattgtgtttatggcgctggactgcgaccggcttaaatacattaatgatacctttgggcataacgaaggcgaccgcgcaattgtgatgcttgctcagtccatatccgccgccatacgcaaaagcgattacggtatccggttgggtggcgatgagttctttctgatactgattgattacgccgaagaagacgccaaaaatattaccgagcgtatccgccagcatctgcgaacgattgacgtcaacaagcgcgttaacttctcatggggtgcctgtagcatggcgccgggagatagcctggccgataccatgcaaatcgccgatgcccggctgtacgaaaataaaaaacaaaaaaagcacgtccatccagggcgagaggattaa

SEQ ID NO: 255646 - DNA, 1158 bp, Klebsiella pneumoniae
atgatggaaaacgcagcggtgcaggtagctccccggaagtttaaaaaaataagagagctcaaccggcgccgcaattatttttttaagaaattacgcaatattctgcgggtttatatcgcaaaagcgttatgggatagtcgcgcgcgtcgcgaagcagatttaacgtccgccaaaacggtactgcttatgcgcaatgaaggcgcgataggcgacgttgtcgttgattctgcgctggttaaatgcctccataaggcaggtatgaccgttgattttctgttaacgaaatcgaacagccaggtcatgcgtgataatccacatattcgccatatttatgaagctgagaatgtcgactcggcggcttatctgcgtaagtttacccataacgttcctcagtccgttattaatgagcttgcgaataataagtatgatattgttattgacccctcgctgtttgatattccggtgcaccggatgctgctgttacggcagataaaagcgcgctcggtgctggggtttaataaatggccttctattaatcactatacccgctcttttgattttgactgtgcaaactggcacgtcagcaagacctttacgctcattgccgattatctccagctggacaaaaaatacctgcagtcctatgacttgcatattcccgagaatgtcgagcacgaggtgcgtgattatctggcgtctaaaagtggacgaaatgtggtcattaatatttttgccggccatccggaccgcagcatgtcgcaggagcagctggccacgcttctcacccgactgcgcgaagagtatcccgctatcaatattatattgctcgaccaccgcaatgaaattcgtctttctctgccggagaaggtcagcgtgaatccgtttaaaacgctgcaccactgcatggcgctgattgcgcaggccgatttggttatctcgccggatacctcggtggtacatatggcggctgcgtggaaaaaaccgctggtcgcagtgtataaggatgtgcgcatgaataatcggctgtgggcgccgggatatgatagggcccggcagatcatcgttaagtgcggtaaggttcaccagctggagagcttgcccgacctgataatggcggagattgaccctggcactctacagcagacccgggccggataa

SEQ ID NO: 255647 - DNA, 1158 bp, Klebsiella pneumoniae
gtgaccgatattcagagcggagagtccgtctccatcccaacggacgatatcaacgaaccgatgtttcatcaggggcgcggcggcctgcgcaatcgcgttcatcccggtaacgatcacttcgtgcagaatgaccgtattgaacgtcctcagggcggcggaggcggtggaggaagcggtcaggggcaagccagcgccgatggcgaaggccaggatgagtttgtttttcagatctcgaaagatgagtatctggatctgttattcgaagatcttgccctgccgaatctgaagagaaatcagcatcggcagctgacggaattcaaaacccatcgcgcaggctacaccgctaacggggttcccgccaacatcagcgtcgttcgctcgctgcaaaactcgttggcgcggcgcacggcgatgaccgccggtaagcgccgggagctgcatgctctggaagaagatctggagagtattagcaaaagcgaaccggcgcagctgctggaggaggagcggctgcgcaaagagattgccgagctacgggcgaaaatcgaccgcgtgccgtttatcgatactttcgatctgcgctacaagaactacgaaaagcggccagagccctcaagtcaggcggtgatgttttgcctgatggacgtctccggctcgatggatcaggcgacaaaggatatggcaaaacgtttttacatcctgctgtatctgttcctcagccggacctataaaaacgttgatgtggtttatatccgccaccatacgcaggcaaaagaggtcgatgaacacgaattcttttattcgcaggagaccggcggcaccattgtctccagcgctctgaagctgatggatgaagtcgttaaagagcgctatgacccggcgcagtggaatatctacgccgctcaggcatcggacggcgataactgggcggacgattcaccgctgtgtcacgagctgctagcgaagaaaatcctgcccgtggtccgctactacagctatatcgagataacccgtcgtgcgcaccagacgctgtggcgggagtatgaacacctgcagtcgacctttgaaaactttgccatgcagcatattcgcgacccggaagatatttatccggtgttccgggaactgtttcacaagcaaacctcaaaagcggacggttaa

SEQ ID NO: 255648 - DNA, 318 bp, Klebsiella pneumoniae
atgcaccagcagttcgcagccgtaggctttagcggtacggtcgcggaactcgtacatttcgcggaatttccagccggtatcaacgtgcagcagcgggaacggcagagttcctggataaaacgctttacgcgccagatgcagcattacgctggagtctttaccgatggaatacatcatcaccgggttagagaattcggcggccacctcacgaataatatggatgctttccgcctccagttgccgcaggtgagtaagtcgtttttggtccataaccgttccttaagccagatttactacagaagccttaaaggcatctga

SEQ ID NO: 255649 - DNA, 1428 bp, Klebsiella pneumoniae
  misc_feature (631)..(640): n is a, c, g, or t
gtggaatacttgccgatatttgccgaagtgaaagagagacccgtactggtgatcggcggcggcgagattgccgcgcgcaagattacctttctgctgcgtgctgaagcgaaggtacagattgtcgccgacgcgctaattccggaacttgccgacaaggttgagcgtcaggaaattcagtggcgggccaccgaatttgaagagcagcagcttgataacgtattcctggtgattgccgctaccgaagatgacgcgctgaaccagcgcgtttatgccgcggccaacgcgcgctaccggctggtcaacgtggttgataatcaggcgctgtgctcgtttgttttcccgtcaatcgtcgatcgttctccgctgctggtggctatctcttccagcggcaaagcgccggtgctgtcgcgaattttgcgcgaaaaaatcgaagcgctgctgcccaccaacctggggcggctggccgaaacggcgagctactggcgtcatcatattaaaacccatctgaaaaccactgccgaacgccgtcgtttttgggaacgcgtgtttaccggccgctttgccagcctgatgctggcgggcaataaagccgaagcggaaaaggcgctggaagatgagctccgacagccgnnnnnnnnnncggaaaaacggctcggtgaaattatcctcgtcggcgcggggcctggcgatgccggattgctgaccctgcgcggcctgcaggctatccagcaggcggatgtggtgttttacgacaatctggtcacgccggaagtccgcgagctggtgcgtcgcgacgcggagacaatctgcgtgggcaaaagcgccgccggcgtctccgtaccgcagcaggacattaaccgcatgctggtagaggcggcgaaagcgggcaatacggtgattcgcctgaaaggcggcgacccgtttattttcgggcgcggcggcgaagagctgcaggctgcggctgaagccggtattccgtttcaggttgtcccgggcgtgacggcagcggctggtgccacggcttatgccgggatcccgctgacccaccgcgattacgcgcaaagcgcaacttttattaccgggcacttcggtgcggaaaactccccgctcaactggactcggctggcgcaaagcggccagaccctggcgatttatatgggcagcctgaaagcggcggaaatcagcgctcagctgatcgctaacggtcgcgtgggcgacaccccggtggcggtgatctcgcggggtactcgcgccgatcagcaaacccggaccggcacattacaacaactcgaaaacctggcgaaagatgccccgatgcccgcgctgctggtagtgggcgaagtggtgcgattacatcatcagcttgcctggtttcaacacacctcatcctcagatgcctttaaggcttctgtagtaaatctggcttaa

SEQ ID NO: 255650 - DNA, 1056 bp, Klebsiella pneumoniae
atgttttccgcattgtgccgtcgcctgcttcccctggcgttgagcgcaggttttgtcttcaccgccgccccggcaataagcgctctgggcgacaccgccaatgctcaggctcgtcacatcgctaccttttttcccggaagaatgaccggttcgcccgccgagatgctgtcggctgattatttgcgtcagcagttcacgcaaatgggctacgagagcgatattcgcagttttaatacccgatacatttacaccaacaacgataatcgcaaaaactggcaaaacgtcaccggcagcacggttatcgccgcgcatgaggggaaagatcgccagcaaatcatcatcatggcccatctcgatacctacgcgccgcagaccgatgccgacatagaaaataacctcggcggcctgacgctgcagggcatcgatgacaacgccctcggtctgggggtcatgctggaacttgctgagcagttaaagaacatccctacgcgttatggtattcgcttcgtcgccaccagcggtgaagaagagggtcgtctgggtgcgcagaatatgcttaagcgtatgagcgacgcggagaagaaaaataccctattggtcattaacctcgataatctggtggtgggcgataagctctattttaatagcggccgcagcacgccatcctcggtgcgcaagctcacccgcgaccgggcgctggctatcgctcgtagtaaaggtattagcgccgccagcaatcctggcctgaatcctgactatccaaaagggaccggctgctgtaatgatgccagcgtgtttgacgaagccgggatcccggtattaaccgtcgaagccaccaactggtctctgggacgaaaagatggctaccagcagcgcgccaaatctcgttcgttcccggacggtaccagctggcacaacgttcagctggataaccagcagtatattgataaagccctgccgggccgtattgctcagcgcagccgcgatgtgatgagggttatgctgccgctggtgaaagagctggcgaaggcggagaagaaacccgcctcaaaatag

SEQ ID NO: 255651 - DNA, 171 bp, Klebsiella pneumoniae
atgatgcgttttcattttttaataccgttgttcctgctactggctgtcagcatgcgctccatcgccgacagccaggtttataactgggtagctgaaaaaacgctgccccgaacctgttcagataacaaatacgccaccactgacctctcacctctgtcaaattacacttga

SEQ ID NO: 255652 - DNA, 2595 bp, Klebsiella pneumoniae
atgcccccaataaccgaatcttttaagaaacgttttggtaatcatcagcttaccactacgggcgatccgtgctgggttcctcccgcttttccgaaagagggccggttgcttttaagccagcggcaggtcaacgccaatataatcaaaatcgacagggaggaggcattatttcgccaggagtcccgccggcaaaaaagcagcccctgctgtaagagcctgcatatcagcctgttttttgacggtaccaataataatgcgctaaaagataccgcctgcatgccgccgcacccgtcgaacgtggcaaaactataccgcgcctgcgcgcctgatgatctcatggcaaatgagcgtggattttacgccttctatattcccggcgtcggtacgccttttccgcagattggcacctatgactattattcgtcgggactgcagtttgctgtcggcggcgaggaccgtatcaactgggggatggtgcagctgtgtaatgccctgaaccataccgtgacaaaaaatttcctcggcaacggcataatgaaaagggcggttcaggcgatgaacagctccagcactccggcggctgtggaactggggttattcgcgggcagcgcggcgatgtcttacaaccgtgaaaaagtaaaccaggcctatctggactcgcggaagacaatgcctggtcagatgcggatgcggctgcgtatgtttgaacaactcttaaggctggtgcaggaaaaattcgtgcgcgcgcagtgtaagacggcagcgataaagctgtttgtgtacggtttttcccgcggcgcggcagaagcccgtgcttttgtcagctggctggatgaagcgctggccgaaggactactcggtttcccggcaggaacgctgctcggcgtgaaggtttcggtggattttttaggcctctttgataccgtgccggcagtgggaattgccaacgtggttccgggttttaccggtcacaacggctgggcgaaacagacgcagccgctgacgcagtcggggttaatcaagcgctgctatcatctggtggcggctcacgagcagcgtcaggcattttcgctggactccatccgtaccgccgctggcagctatttatcccagactcaggaagtggtctaccccggtatgcactcagacgttggcgggggatacccctgtggggatcagggcaagggccggggcggtgcgggcgatctgttatcgcaaattactctgcatgatatgtatgcggccgcgatggatgccggggcgccgctgtcgtttgctcctgaagtctttgcgcttttacatccagaattaagaaggatgttggcgttcagagaaatgaaccttgaaactgcaacagaatttaatatctctcccgaactgatagacacctttaacaactggcggtcgaccctctcccttgacaatcagcaggaggatccgctgtctgacgatgctatctacgcgccgtttcgttttgagtcagtctgtctggaagagatgctggaagcggaaatgatctggatgaccggctggcgtatcgcacgttttgcttcgcccaggacatcgccaataaatctcacgtcgcagcccttcttccagcatgcgccccagcacccggagattaccgcccagccgtatgcggcagggttcagccaacaggcgcagcgcgcccttgcccgtgagtggtcgcttttgcaatgcaaagctgaggcgatagcgcaggcgcgtaataaagaggcgtccagacacaggggcgatgaaaattggttccctggcccggagcttgttgggcaaccgttgttcgatgccaacaacgcccgcggtcagctttgggaagccgccaccgagtttgcggcggactacatgcgtaaagctcgcccccaggcgctgtttaaaccggcgatgaagcagaaagcgcagggggcgatcgattcggccacctgcactattgccgcaagtgccgaaactggcttttcatgggagataagcacgacggcggcaaatctacagatactggatccactgctcgcccaggcggcctacttttatacccatcagaatgaagcctatgaatatctgcgatttaagcaggcgggcgagtacagattccgtcagcatattgagccgtgcctgttgaaacgagagcagaacgataaaatcagcgggctgatcactctgtatgataactatatccatgattcccgggcctggtttatgcactcggaaagcggcgtcagagagccttttggcagctactttttatccagaatgatctattttggcgataagtggagcaaggccgtccagctgcgctttgatgggcaaacgatgtcaggtattagcgaggcgctgcaggataaggccatttttgctcatgtgccaacctacggtgtaaaggtctttaaccgtgataccgggcaagaaattcccgttgacgaaagcagtctgccagcgcccacgcatgagtttatcgcgcagcttaaacccctggttaaacagtgccagcaggcaacggaaacggccaggcgcgagcgcatcgcaaatgcgctcaacgacttatgggactccgaaatactccattcacctcaagtgtaa

SEQ ID NO: 255653 - DNA, 300 bp, Klebsiella pneumoniae
atggctgcctcacaggaaatggatataaatatgatttacctgaaccatcacgctataactatcaccgcttctgcagttcgctctaccgtcactgcgttttggttccagacgcatttccagcggcatacaatgccagcgcgcgttttattgatttaccatctgcatccggatttttgcgtgctatttgctctctggttattgcgtaaaacgtttgctgcgcatgttgttttcggcggcgggtggatactgtcagggatgagctttccgggcatatctaaagattttgtcgaatcgtactaa

SEQ ID NO: 255654 - DNA, 789 bp, Klebsiella pneumoniae
atgcagccaattgagccatcccatgctttttctatggagttcttctccctcaaagggaaaaccgccattgtcaccggggggaatagcggactggggcaggctcttgcccttgctctggccacggcgggagccaatctgtttattcccggacgacgcgtcgataatgcgcaaacccgtgaacgcattgagcagcagggcgctgaagtggagttcatgctggcgaatattaccgacaacggcatgccgcagcgcattatcgccgcctgctgccagcgtttcggcacggtcgatgtcctggtgaacaatgccggtatttgtcgtttgaataaggtcctgcgctttggccgcgccgactgggacccgatgattgagaccaacctgacggcggctttcgagctcagccatgaggcggcgaaaataatggttccccgccgctgtggcaaaattatcaatatctgttcggtgttttcttatttaggcggcagctggtcgccggcttatgcagcaaccaaacatgccctcgcggggttaaccaaagcctattgtgaagagctcggtccatataacattcaggttaacggtattgcccccggctattatgagaccgacatgacggcgatcgtccgcaacacgcctaaggaaaacaggcgcgtcctggcgcatattccggccggccgttggggtgaggcgcaggatctgatgggcgcagtcgtcttcctggccagccgggcctcggattacgtgaatggccatatcctggcggtagatggcggttatctggtgcgttag

SEQ ID NO: 255655 - DNA, 1110 bp, Klebsiella pneumoniae
atgaatacattattaattactggcgcgaccggatttctcggtggagcagtgttagaaagcattctgaataaaaagaatgcgcctaatctattactgttagttcgtgcagataatagtgtagcggccgtagagcgggtaaaggaaaatctgcgaaaattcaatattagcgaagagagactaacggccctgacgccaggcaacattctgctgggggatctggccaatccgcagccctttctcgacgacccgcgcctgaatcaggttacccacgtgctcaactgcgccgccgtcgcctcatttggtaacaacccgcttatctggaaggtcaacgtcgaaggtacgctgcagtttgcccggcggatggctcaggtcagccgccttgagcgctttctgcacgtcggcaccgcgatgtcctgctcgccagaccccgattctctggtagcggaaagcacagcgtttcgtgaacgcgctgcgcatctggtcgagtacacgcactctaaatcaatgattgagcgtctcatgctgcaggaatgctcaaccctaccgctggcgatcgcccgtccctctattgttgttggccacactcatcacggctgtcagccctccagcagtattttctgggtattcagcatggggctgatgctgcaaaaatttatgtgttcgatggaagaccgcattgatgtgatccccgtcgattactgtgccgatgcgctgctgatgctgcttgtcagcccgctggcgcgcggagaagtggtgcatatttctgcgggggaagaaaacagcgtaaggtttgcggatatcgataacgcaatggcctccgccctcgaacaggcaccggtcggcgataaatacgcgcaggtcagctatgaaacgctggtcaaaatgcgtcgtgagctgaaggctatttttggcccctgcaacgaacggctgatgctaaaagccatgcgcctttacggcgccttcgccacgctcaacgtacgattcagtaacgacaagctgctcagcatgggtatgccaaaaccgccgcgctttaccgattacattgaccgctgcgtacagaccacgcgcgggctttctattccgcagcaaatggcggtagattttaagtag

SEQ ID NO: 255656 - DNA, 267 bp, Klebsiella pneumoniae
atgcatgtctttgagtcgtacgccgccaacgtagcgttcgatctctttcaaatactggttaatcgggtgcccggtcaggtacagccccagggtctccctttcgccatccagcaccacctgttccggccacggctggcagctggcgtaggactgctcgatttgctccggctcttccgccagcacgccgaacatgtccgcctgaccgatagcttcggctttcgcgtgctgatcggcagccttcagcgcgtcgcccagcgaattcattaa

SEQ ID NO: 255657 - DNA, 387 bp, Klebsiella pneumoniae
atgcggcccgaggcggtcaaaggccccggacatgatcagtttttccagcacccgacggttgagttttttaatatccgtacgcgcgcagagatcgaacagttcgcggaaatagccgccctgattacgggcttcaatgatcgcttcaatcggaccttcgccgacgcctttaatcgcgccgataccataaacgatttcgccatcgtcgttaacgtggaaatggtacaggccggagttaatatccggcggcagaatcttcagccccatccgccagcactcatccacgaggccgacgactttttcggtgttatccatatccgcggtcatcaccgccgccataaattcagccggatagtgcgccttcagccacagcgtctgataggacactaa

SEQ ID NO: 255658 - DNA, 699 bp, Klebsiella pneumoniae
gtgcgatttgttaaagccataaccggcgaatttctccaccaggtcaaagatcttcatcgccagctcgccgtcaacgccatttttcttcgcgccttcttcgaagacagaacgctgcttggccatctcttccggttttttcttacccatcgcacgacgcagcatatccgcgccgccgagggtatagccggaaagctcctgggcgatctgcatgacctgttcctggtacaggataatgccataggttggctccagtaccggtttcagacattcatgctgccactgtacgtccggatacgatatctcttcacggccgtgtttacggtcgataaagttatccaccatccccgactgcagcggccccggacgaaacagggccaccagggcgatcatatcttcgaagcagtcgggctgcagacgcttaatcagatccttcatgccgcgcgattcaagctggaagacggcggtggtttccgagcgctgcagcatatcgaagctttttttatcgtcgagcggaatagcggcgatatccagcggcccctcgccattcttctcgcggcgggcgttgatcatctccagcgcccagttaatgatggtgagcgtacgcaaaccgaggaagtcgaactttaccagcccggcatattcgacatcgtttttatcaaactgggtaaccggatgctggcccgcttcatcgcagtatag

SEQ ID NO: 255659 - DNA, 954 bp, Klebsiella pneumoniae
gtgtttaccggcgttacgggtgaccccttcgagcttacgcgccatgtcgatcagcgctttaacctcttcatccgcctcgtaaatttccggcagctgcggttcggcttcaaacgctttcgccagcgtcatccccgggtctggcggcaccagcttggaaatacgatccacaaaaccgtacgggtgaccaagcacgcggccaacgtcgcggattaccgccttcgccgccatggtaccaaaggtaataatctgcgaaaccgcatcgcggccgtacatatccgcaacgtgctcaatcacctggtcgcgtttctccatgcagaagtcaacgtcgaagtcgggcatggagacacgttccgggttaaggaaacgttcgaacagcaggtcgaattccagcggatcgaggtcggtaattttcagcgcataggccaccagcgacccggcgccggaaccacggccgggcccgaccggcacgccgttatccttggaccactggataaactccatcacgatcaggaagtagcccgggaaccccatctggttaatcacctgcagctcaatatccagacgctcatcatattcaggacggcgttttgcccgctcatccgggtcggggaacaggaatgccagacgctcttccagaccctctttagatttcttaatcagataatcttcggtggtcatatccccggtcgggaactgcggcaggaagtattcaccaaggcgcacggtcacgttacagcgtttggcgatctcaacgctgttttccagcgcttcgggaatatcggaaaagagctcgcacatctcttcttcgctgcgcatatactgctgcggcgaatagttgcgcggacgctttggatcgtcgagggtaaagccgtcgtggatggccacgcggatttcatgagcatcgaagtcgcccggttcaaggaagcgaacgtcgttggttgccaccaccggtaa

SEQ ID NO: 255660 - DNA, 597 bp, Klebsiella pneumoniae
atgatggaattcgtgtatccgcatacccatctggttgcgggagtcgatgaagtcggacgcggtccgctggttggcgcggtggtgacggctgcggtgatactcgatccggccagaccgattgtgggtcttaatgactcgaaaaagctcagcgaaaaacggcgcctggcgctatttgacgagatcaaagaaaaagcgctgtgctggagcctgggtcgggcggagccacatgaaatcgatgaactgaatattttacacgcgaccatgctggccatgcagcgcgccgtcgcgggtttgcgcgtctccccggaatttgttcttattgatggtaaccgctgtccgccgctgcccgtaccttcgctggcggttgtcaaaggcgatagccgggtggcggaaatcagcgccgcatcgattctggcgaaagtgacgcgcgatgcggaaatggccgcgctggatcggcaatttccacagtacggctttgcacaacataaaggttatcccaccgcttttcatctgcaaaagctgctggaacatggcgttatcgagcaataccggcgcagttttggcccggtgaaacgcgcgctgggcctggcgtcctga

SEQ ID NO: 255661 - DNA, 1149 bp, Klebsiella pneumoniae
atggctgaatcacgtcccctgacgattgccctggtcgccggagaaacctccggcgatattcttggtgccggtcttattcgcgcgctcaaagcccgtatgcctgatgctcgttttgtaggcgttgccgggccgttaatgcaggcggaaggctgcgaggcctggtacgagatggaagagctggcggtgatgggcattgttgaagtgctgggacgcctgcgtcgactgctgcacattcgcgccgatctcacccgacgttttaccgagcttaaaccagacgtgttcgtcggtattgatgcgcctgacttcaatatcaccctcgaaggtaatctgaagaaacagggtatcaaaacgatccattacgtcagcccatcggtttgggcatggcggcaaaaacgcgttttcaaaattggcagatccaccgatctggttctggcattcctgcctttcgaaaaagcgttttatgacaaatttaacgttccctgccggtttatcggccacacgatggcggatgcgatgccgctggacccggacaaagacgcggcgcgcgaccgtctggggatcgcgcgtgacgtacactgcctggcgctgctgccgggtagccgtggggcagaagtcgagatgctcagcgccgacttcctgaaaaccgcgcaaatcctgcgagaatattatcccgatctggaagtggtcgttcctctggtcaacgcgaagcggcgggaacagtttgagcgcatcaaggcggaaacggcgccggagctggccgtacacctactggatgggcgggcgcgcgatgcaatgatcgccagcgatgctgcgctgctggcctccggcacggctgcgctggagtgtatgctggctaagtgtccgatggtagttggttatcggatgaagccctttaccttctggctggcgaaacggctggtgaagaccgactacgtgtcgttaccgaacttactggccgggcgtgaactggttaaagagctgctgcaggatgaatgccgaccgcaggcgctggcggaggcgctgaagccgctgctggccgacggtaaaaccagccacgatatgcatgaaaccttccgcgcgctgcatcagcagatccgctgcaacgctgatgagcaggcggcggatgcagttctggagttagcaaaatga

SEQ ID NO: 255662 - DNA, 789 bp, Klebsiella pneumoniae
gtgattgataaaaccgcctttattcatcctaccgccattgtagaagaaggcgccgttattggcgctaacgtccacattggcccgttttgtattgttggcgctaacgtcgaaatcggcgaaggcaccgtactgaaatctcacgttgtcatcaacggtcataccaaaattggccgcgacaacgagatctatcagttcgcttccatcggtgaagttaaccaggatctgaaatatgctggcgaaccgacccgcgtggaaattggcgatcgcaaccgcatccgcgaaagcgtcaccattcatcgtggcacagtacagggcggtggattaacgaaggtgggcagcgataacctgctgatgatcaacgcccatgtggcgcatgattgtacgcttggcgaccgctgtattctggctaataacgccaccctcgcaggtcatgtttcgctggatgattttgttatcatcggcggcatgactgccgtgcatcagttctgcattattggcgcgcacgtgatggtgggcggctgctccggcgtagcgcaagacgttccgccgttcgttattgctcagggcaaccacgcaacgccgtttggcgttaacatcgaagggttgaagcgtcgcggcttcagccgtgaggcgatcactgcgattcgtaacgcctataagctactgtaccgcagcggtaaaacgctggatgaagcgaaagccgagatcgccgaactggcgacacagtatcctgaagtgcagacatttaccgacttctttgctcgctccacgcgcggcctgattcgttaa

SEQ ID NO: 255663 - DNA, 456 bp, Klebsiella pneumoniae
ttgactactgacactcatactctgcacattgaagagattctggaactgctgcctcaccgttacccgttcctgctggtcgatcgcgtgctggattttgaagaaggtcgttttctacgcgcagtaaaaaatgtttctgtaaatgagccgtttttccaggggcatttccctggtaagccgattttaccgggcgtactgattctggaagcgatggcccaggctaccggcattctggcattcaaaagcgttggaaaactggaaccaggcgagctgtattattttgccgggattgacgaagcgcgtttcaaacgtccggtcgtgcctggcgatcagatgattatggaagtcacttttgagaaaacccgtcgcggcctgactcgtttcaaaggcgttgcgacggtggacgggaaagtggtttgcgaagcaacgatgatgtgtgcccgtagccgggaggcctga

SEQ ID NO: 255664 - DNA, 1026 bp, Klebsiella pneumoniae
atgccttcaattcgactggctgatttagcccagcagttggatgcagaattacacggtgatggcgatatcgtcatcaccggcgttgcgtccatgcagtccgcgaaagcgggccatattactttcatggtaaatcctaagtaccgtgaacacctggccgcttgccaggcatctgccgtcgtgatgacgcaggatgatttgccttttgcccacagcgccgcgctggtagtgcgtaatccctacctgacctacgcgcgcatggctcaaattcttgataccacgccgcagccggcgcaggatatcgcgccgagcgcggtcatcgatgccacggcgaagctgggtactcacgtagcgattggcccgaatgccgttatcgagtcgggtgttatcctcggtgataacgtggttatcggcgccggttgcttcgttgggaaaaatacgaaaataggtgccggctcgcgtttatgggccaacgtcaccgtttaccacgacattgagatcggcgagaattgcctgattcagtccagcacggtgattggcgcagatggcttcggctacgcgaacgatcgcggcaactgggttaagatcccgcagctgggtcgcgtcattatcggcgatcgcgtggagataggcgcttgtacgaccatcgatcgcggcgcgctggacgacaccgtcattggtaacggcgtgattattgataaccagtgtcagattgcgcacaacgtggtaattggcgacaacaccgcagttgctggtggcgtgattatggctggcagcctcaagattggccgctactgcatgatcggcggagccagcgtgatcaacggccacatggaaatctgcgataaagtcaccgtcacggggatgggaatggttatgcggccgatcaccgagccaggcgtttactcttcaggtatcccgctgcagccgaataaggtctggcgcaagaccgctgcgctggtactgaatattgatgatatgagcaagcgtctcaaagccattgagcgcaaggttaatcaacaagattag

SEQ ID NO: 255665 - DNA, 486 bp, Klebsiella pneumoniae
gtgaaaaagtggttattagctgcaggtctgggtttagcaatggtaacttccgctcaggcggcagataaaattgcaatggttaacatgaacagcctgttccagcaggttgcccagaaaacaggcgtttctaacacgctggaaaacgagtttaaaggccgcgcgagcgagctgcagcgtatggaaggcgacctgcagtctaaaatgcagcgtctgcagtccatgaaagcgggctctgaccgtaccaaactggaaaaagacgtgatggctcagcgccagactttctcccagaaagcgcagtcttttgaacaggatcgtgcacgtcgttctaacgaagagcgcggcaagctggtgactcgtatccagagcgctgtgcagagcgtcgctaaagatcagagcatcgatctggttgttgactctaatgccgttgcatacaacagcagcgatgtaaaagacatcaccgctgatgtgctgaaacaggttaaataa

SEQ ID NO: 255666 - DNA, 2430 bp, Klebsiella pneumoniae
atggcgatgaaaaagttgctcatagcgtcgctgctgtttagcagcgcaaccgtatacggtgctgacgggttcgtggtgaaggacattcatttcgaaggccttcagcgtgtcgctgttggtgcggccctcctcagtatgccagtgcgtcctggcgataccgtaaccgatgatgatatcagtaataccatccgcgccctgtttgcctccggcaactttgaggacgttcgcgttctgcgcgatggtgataccctgctggtgcaggtgaaagagcgtccaacgattgccagcatcactttctccggcaacaagtcggttaaagatgacatgctcaagcaaaaccttgaggcatccggcgtacgcgtaggggaatctctcgatcgcaccacgcttgctgatatcgaaaaggggctggaggatttctactatagcgtcggtaagtatagcgccagcgttaaagctgtcgtgacgccgctgccgcgtaaccgtgtcgacctgaaactggtattccaggaaggcgtctcagcgaaaatccagcagatcaatatcgtcggcaatcatgcattcagcaccgatgaactgatttctaccttccagctgcgcgatgaagtgccgtggtggaacgtggtcggcgatcgcaaatatcagaaacagaagctggcgggagatctcgaaacgctgcgcagctactatctggatcgcggctatgctcgtttcaacattgactccacgcaggttagcctgactccggataaaaaagggatctacatcaccatcaacattaccgaaggcgatcagtacaagctttctggcgtgcaggtgacgggagacctggcagggcattcggcagaaattgaagcgctgactaaagtcgagccgggcgagctgtataacggcaccaaagtgaccaaaatggagaatgacattaagaaactccttggtcgctacggctacgcctatccgcgcgttcagtcccagccggaaatcaacgatagtgataagaccgtgaagctgcacgtaaacgtcgatgcgggtaaccgctactacgtgcgtaaaattcgcttcgaaggcaacgatacctcgaaagatgccgttctgcgtcgcgaaatgcgtcagatggaaggtgcctggctgggcagcgacctggtcgaccaggggaaagatcgtctgaatcgtctgggctactttgaaacggttgataccgatacgcagcgcgtgccgggcagcccggatcaggttgacgtggtctataaagttaaagaacgcaataccggtagctttaacttcggcgtgggttacggtacggaaagcggcgtaagcttccaggccggcgttcagcaggataactggctcggtaccggctattctgtgggaattaacggcaccaaaaacgattaccagacctatactgaactgtcggtgacgaacccgtactttaccgtggatggcgtcagcctcggcggtcgtgtcttctataacgacttcgatgctaacgatgcggatctgtctgactataccaacaagagctatggtacagatattacgctgggcttcccggtcaacgagtacaacacgctgcgcgcgggccttggctatgtgcataacaagctgtccaatatgcagcctcaagtatccatgtggcgttacctgaattcgatgggacagtatccggacaacacgaacgacagaaactcgttcagtgctgacgacttcaccttcaactacggctggacgtataacaagctcgaccggggcttcttcccgaccgaaggttcacgcgtcaacctgaacggtaaagtgacgattccgggttcggataacgaatactacaaagcgacgctggataccgcgacttatgtcccgatcgatgacgatcataaatgggtcatgttgggtcgaacccgctttggttatggtgatggtctgggcggcaaagagatgccgttctatgagaacttctatgccggtggttcaagcaccgtgcgtggcttccagtccaacactatcggtccgaaggcagtgtatttcccggccagcagccgtcatgacgatgatgacagctacgataacgaatgtaagagcagcgagtctgcaccgtgtaaatctgatgatgcggtgggcggtaacgccatggcggtggccagccttgagctgattaccccaacgccgtttatcagcgataaatatgccaactcggtccgtacttccttcttctgggatatgggtaccgtgtgggatacgaattgggattcaagcgcttatggcggttacccggactatagcgatccgagcaatatccgtatgtctgcgggtatcgcggtgcagtggatgtcgccgttaggaccgttggtattctcctacgctcagccgtttaaaaagtacgatggagacaaagctgaacagttccagtttaacatcggtaaaacctggtaa

SEQ ID NO: 255667 - DNA, 1353 bp, Klebsiella pneumoniae
atgctgagcgttctctggaatttggctgcttttattattgcgctgggcgtgctgatcaccgtccatgagtttggccatttctgggtagctcgccgctgcggtatccgcgttgagcgtttttctattggctttggcaaagcgctgtggcgccgttttgataagcagggaacggaatttattatcgcccttatcccattgggcggttatgtcaaaatgctcgatgagcgcgttgagccggtggcgcccgagatgcgccactgcgcgtttaacaacaaaaccgtgggtcagcgtgccgcagtaattgccgcggggccgattgccaacttcctttttgccatttttgcctggtggctggtctttatcatcggtgtccccggcgtgcgaccggtcgttgccgatatcgctcctgactctattgccgcgcaagcacaaattgcaaaaggaatggaacttaaagcgatagatggcatcgaaacgcctgattgggatgcagtacgtatggcgctggtggcaaagattggcgatcggcaaacaatagttaccgtcgcccctttcgggaccaatcaacgccaggataaaatcctcgatctgcagcgttgggcgtttgagccggataaacaagatccggttgcttcattaggcattcagccccgcagcgcgcagattgataccgtcctggctgaagtacaatctaactcggcggcgcagaaggcgggtttgcaagcgggcgacaggatcgttaaagtcgatggtcaaccgttaacgcagtggatgacgtttgttaatctggtgcgtgataatccgggtaaggcgttagttctggacatcgagcggcagggtagccccctgtcggtaaccttgacgccggatacgaagtctaccaaaggtaaagctgaggggtttgcaggggtcgtacctaaggtcatcccgctgcctgatgaatataagacagtgcgtcagtacgggccgtttgccgccatcgctgaagccacggataaaacctggcagctgatgtcgttaacggtcaagatgctgggcaaattgataaccggtgatgtcaaactgaacaacctcagcgggccgatttctatcgcccagggggctgggatgtcagcggagtttgggctgatttattatctgatgtttcttgcgctcatcagcgtgaacctcggaataatcaacctgttcccgcttcccgttcttgacgggggacatctgctgtttttggcgattgaaaagctgaaaggcggaccggtatccgagcgagttcaagactttagttatcgcattggctcaatattgctggtgctgttaatggggcttgcacttttcaatgatttctctcggttgtaa

SEQ ID NO: 255668 - DNA, 858 bp, Klebsiella pneumoniae
ttgctgaagtatcgcctgatttctgctttcgtcttaatccccgtcgttattgcggcgctttttctattgccgcctgcgggctttgccatcgtcacgctggtggtctgtatgctcgccgcgtgggagtgggggcaatttagcggtttcacttcaacgacgcagcgagtctggctgtcggtgctttgcggtctgctgctggcgctgatgctattcctgatgccggaataccattatgacgttcatcaaccgctggttgagggagcgctgtgggcatcattcggctggtggatagtcgcgctgcttctggttctgacttaccccgcttctgcggccttctggcgcaattcaaaaacgctccgtctgatattcggcatcctgaccattgtcccgtttttttggggcatgctggcgctgcgagcgtggcattacgccgacgatcattacagcggtgcgctgtggttactttacgtgatgattctggtctggggcgcggattccggcgcctatatgttcgggaaaatgttcggtaagcataagctggcgccgaaggtttctccgggtaaaacctggcagggttttttcggcgggctgttaacggctgcggttatctcctgggcttacggctggtgggcccatctggacgtgacaccgacggtcctgctggtgtgttcggttgtggcggccctggcctcggtactgggcgatctgaccgaaagcatgtttaaacgcgaagctggcatcaaagatagcggaaatctgattcccggacacggcggtatcctcgatcgtatcgatagcctgacggctgcggtacctgtgtttgcttgtctactcttgttggttttcaggacgatttga

SEQ ID NO: 255669 - DNA, 759 bp, Klebsiella pneumoniae
atgttgtctgctaatcaaactgtcagcgaaatgttgcctgcgcatggctgtcgtcatgtcgccattattatggacggcaacggtcgctgggctaaacggcaaggaaaaatccgcgcctttggccataaagccggcgcgaagtctgttcgtcgcgccgtctcattcgcggctaataatggtattgaagcgttgacgttatacgcgttcagcagtgaaaactggaatcgcccggcgcaggaagtcagcgcgctgatggagctgtttgtctgggcactggatagcgaagtaaaaagtctgcacaggcacaatgtgcgcctgcgtatcatcggcgagaccacgcgattcaatgcgcgtttacaggaacgtattcgcaaagcggaagcgcttactgagaacaacaccggtttgactctgaacattgccgccaactacggtggccgctgggatatcgttcagggcgttcgtcatctggccaaacaggtacaagacgggttactccagcccgaacaaatcacggaagagatgctgagccagcaggtatgcatgcatgaactggctcccgtagatttagttattaggaccgggggagagcaccgcattagtaactttttgatttggcaaattgcctatgccgaactttactttacggatgttctttggcccgatttcgctgaacaggactttgaaggtgcactccatgcctttgttaatcgagagcgtcgtttcggcggcactgagccgggtggcagcaatgcctga

SEQ ID NO: 255670 - DNA, 1200 bp, Klebsiella pneumoniae
atgaagcaattaaccgttctcggttcgaccggttctatcggctgcagcacgctggacgtggtgcgccataatccagatagtttttctgtcactgcgctggtcgccgggaaaaatgtcgaccgtatggttgaacaatgtctggaattctcccctcgttacgcggtaatggatgatgcgcgcagcgctgaactgctgcggtcaaaactgcgcgagcagggtagccggactgaggtcatgagcggccagcaggctgccgcggaagtggcagcgctcgacgacgttgaccaggtcatggcggcgattgtcggcgcagcgggcctggtaccgacgctttcagctattcgcgcgagtaaaacggtgctgctggcgaacaaagagtcgctggtgacctgcggccgtctgtttatggaggccgtgcagagatacggagcgcgtttgttaccggtagatagcgagcacaatgcgatttttcagagtatgccggaaacagttcaacaggatctggggtacgctgatttaacccaaaacggcgtgtcgtcgattctgctaacgggatccggtggtcctttccgcgaaacggcgatttcggaactggcggcgatgacccccgatcgggcatgtaagcatccaaactggtccatggggcgcaagatttctgtcgactccgccaccatgatgaacaaggggctggagtatatcgaagcccgctggttgtttaatgcatctgcgcagcagatggaagttctgattcatccgcaatcggtgattcattcgatggtgcgctatcaggatggcagcgtgctggcgcagctcggcgagccggatatgcggacgccgattgcccatacgatgggctggccaaagcgtctcaactcaggagcaaaaccgttggatttttgtcaactgagcaacctgagcttctccgcgccggactatgcgcgttatccctgcctgaagctggcaatggacgcgtttgacgtggggcagacggcgacaaccgcgctgaatgcggcaaacgaagtctcggtcgcggcattcctcaacggtgatattcgctttaccgatattgcggcaatcaatcagtcggtcttggatcaacagacgctaaatgaaccgcaaagtattgatgaagtactggctattgacgctatggcccgggcaagcgcaggtcggctgctagcggcgcagcgcaaattctga

SEQ ID NO: 255671 - DNA, 558 bp, Klebsiella pneumoniae
gtgattagcgatatcagaaaagatgctgaagtacgcatggagaaatgcgtcgaagcgttcaaaacccaaatcagcaaaatacgcacgggtcgtgcttctcccagcctgctggatggcattatcgtggaatactacggcaccccgaccccgctgcgccagctggctagcgtaacggtagaagactcccgcacgctgaagatcaacgttttcgatcgctctatgagcccggccgttgaaaaagcgattatggcttccgacctcggtctgaacccaagctccgcgggaagcgatatccgcgttccgctgccaccgctgaccgaagaacgtcgtaaagatctgaccaaaatcgtgcgtggtgaagctgagcaggcgcgcgttgccgtacgtaacgttcgtcgcgatgccaacgacaaagtaaaagcactgctgaaagagaaagagatcagcgaagatgacgatcgccgttctcaggaagatgtgcagaaaatgactgatgctgctatcaaaaaagttgatgcggcgctggcggataaagaagcggaactgatgcagttctga

SEQ ID NO: 255672 - DNA, 726 bp, Klebsiella pneumoniae
atggctaccaatgcaaaacccgtctacaaacgtattctgcttaagttaagtggcgaagctctgcaaggttcagaaggcttcggtattgatgcgagcatacttgaccgcatggctcaggaaattaaagaactggttgagctgggtattcaggttggcgtagtgattggtggcggtaaccttttccgtggtgctggtctggcgaaagcaggtatgaaccgcgttgtgggcgaccacatgggcatgctggcaacggtcatgaacggccttgcaatgcgtgatgcacttcatcgcgcctatgtgaacgcccgcctgatgtcagcgattccgctgaacggcgtgtgtgataactacagctgggcagaagcaattagcctgctgcgtaacaaccgcgtagtgattctttccgcgggtaccggtaacccattctttactaccgattccgctgcctgcctgcgcggtattgaaattgaagccgatgtggtgctgaaagcgaccaaagtcgacggggtctttaccgccgatccggccaaggatccttctgcaaccatgtacgatcagctgacctacagcgaagtgctggataaagagctgaaagtgatggatcttgctgcctttaccctggcccgcgaccacaaattgccgattcgcgtattcaatatgaataagcctggcgcgctgcgtcgcgtggtgatgggcgaaaaagaaggcacattaattacggagtaa

SEQ ID NO: 255673 - DNA, 672 bp, Klebsiella pneumoniae
atggatttgtcatcgctacgcacacagcagctcagcctggcggcgtcggttgaacgaggcgatcggttggaacaggatccgccgacgctgatcggcggagcggatgtcggttttgagcaagagggggaggtcacccgggcggcgatggtactgctaagctatccgtccctggagctggtggagtatcaggtcgcgcgcgtcgcgaccacgatgccttacattcccggcttcctctcctttcgcgaaacccccgcgctgctggcggcatgggagctactttcgcaaaagccgaatctgttattcgttgatggccacggtatttcccacccgcgccgcctcggcgtcgccagccattttggcctgctggtggatgtaccgactatcggcgtggcgaaaaaacggctgtgcggtaagttcgggccgttgggcgatgaacccggcgcgctggcgccgttgttagataaaggcgaacagctggcgtgggtcttgcgcagcaaaaagcgctgcaatccgctgtttgtgagtaccgggcaccgcgttggcctggatagcgcgctgatgtgggtggagcgctgcctgaaaggctatcgcctgcctgagccaacgcgctgggccgatgcggtggcgtcccggcgtccggcgtttgtgcgttggcaagcaaatcgcgactga

SEQ ID NO: 255674 - DNA, 1065 bp, Klebsiella pneumoniae
atgaccgaactgaagaacgatcgttacctgcgcgcgctgctacgccagccggttgatgtcaccccggtgtggatgatgcgtcaggcgggccgctatttaccggaatataaagccacccgcgccgaagcgggcgattttatgtcgctgtgtaaaaacgcagagctggcctgtgaagtgacgctgcagccgctgcgccgctataagctggatgcggctatactcttctcggacattctcaccatcccggatgcgatggggctggggctctattttgaagccggggagggcccgcgctttacctcgcccattacctgcaaagccgatgtcgataaattgcccgttcctgacccggaaggtgagcttggctacgtgatgaatgccgtgcgcacgattcgccgtgagctgaagggagaagtgccgctgatcggcttttccggcagcccgtggacgctggcaacctatatggtggaaggcggcagcagcaaagcgtttacggtaattaaaaagatgatgtacgccgagccgcaggccctgcatgcgctgctcgataagctggcgaaaagcgtcacgctgtatctgaatgcgcaaatcaaagcgggcgcgcagtcggtgatgatttttgatacctggggcggagtgctgaccggccgcgactaccagcagttctcgctctattacatgcataaaatcgttgatgggctgctgcgtgaaaacgatggccgtcgcgtgccggtgacgctatttaccaaaggcggcgggcagtggctggaagcgatggcggaaacaggctgcgatgcgctgggactcgactggaccaccgatatcgccgatgcgcgtcgtcgcgtcggtcataaagtcgccctgcagggcaatatggatccctcgatgctgtatgcccctccggcgcgtattgaagaagaggtggcgactattctcgccgggtttggccagggtgaaggccatgtctttaacctcgggcacggaattcatcaggatgttaacccggaacatgcgggcgtatttgtggaggcagtgcaccggttgtcggcgcaataccaccgttaa

SEQ ID NO: 255675 - DNA, 774 bp, Klebsiella pneumoniae
atggatcgtattattgaaaaattagatcgcggctggtggattgtcagccacgaacagaaattatggttacccgatggggaattaccatatggcgaagcggtaaattttaatcttgccgggcaaaccgcgctgcgaataggcgaatggcagggcgaaccggtgtggctggtgcgccaggatcgtcgccatgagatgggatcgctgcgtcaggtgctcgatcaggatgctggcctttttcaactggcgggacgcgggatccagctggcggagttctaccgctcgcataaattctgcggctactgcggccatcccatgcaccccagcaaaaccgagtgggcaatgctatgcagccactgccgcgaacgctactacccgcaaatcgccccgtgcattatcgtcgccatccgtcgggatgattctatcctgctggcgcagcatactcgccatcgcaacggcgtgcatacggtgctggccggatttgtcgaagtcggcgaaaccctggagcagactgttgcccgcgaagtgatggaggagagcggcattaaggtgaaaaacctgcgctacgtgacctctcagccctggccgttcccacaatcgctgatgaccgcgtttatggccgagtacgatagcggcgagattgtcatcgacaagaaagagctgctggaggcgggatggtatcgctatgacaatctgccgcttttgccgccgccgggcaccgtggcgcgccgtctgattgaagataccgtggcgatgtgtcgggcagagtatgagtga

SEQ ID NO: 255676 - DNA, 498 bp, Klebsiella pneumoniae
atgttaaaccagctggaaaacctgacggaacgtgttggaggcagcaataaactggtcgatcgctggctacaagtacgtaagcatttgcttgtggcttactacaacctggttggcctgaagcctggcaaagaatcatttatgcggcttaatgagaaagcgctggatgatttttgccaaagcctggtggactacctctcctccggccattttaatatttatgaacgctttatcggcgaattggaaggcgatacgccacttttagccgccactaagatttatccacagctgcaggctaatacccagcagatcatggattattacgattcctgcctcgaaaacgctatcgatcacgataactatcttgagttccagcaggcgctatcggacatcggtgaagcgctggaagcccgttttgcgctggaagattcgctgattgccctcgccgtagcccacagtcgaaaagacaacgttagcgacaatatcgcgccgaccgcttga

SEQ ID NO: 255677 - DNA, 1896 bp, Klebsiella pneumoniae
atgtctacaacatcacttacgcgtcgagagcaacgcgaacacgcccagcgctttatcgacaccctggaaggcaccgcatttcccaactcgcagcgcatctatatccgcggttcgcaggaagatattcgcgtgccgatgcgcgaaattcagctgagcccgacgcttatcggcggcagcaaagaccatcctcagtatgaagcaaacgaagccatcccggtctacgacacgtccggcccctatggcgatccgcacatcgcgataaacgttcagcagggtctggcgaaactgcgtcagccgtggattgatgcgcgtcgcgactgcgaaacgcttagcgatcgcagttcagcctataccagagagcggctggcggatgatggtcttaacgcgctgcgcttttccggtctgcttacgcccaggcgcgccatcgtcgggaaatgcgtgacgcagctgcactatgcccgtcaggggattgtcacccctgagatggaattcatcgccattcgcgaaaatatgggtcgcgaacgcattcgtggcgaagtgctgcgccagcagcatccgggcgtcgggtttggcgcgcggctgccggagaatatcaccccggaatttgtgcgcgctgaagttgccgccgggcgcgcgattatcccggccaatataaatcatccggaatccgagccgatgatcatcggccgcaacttcctcgtgaaggttaacgccaatattggtaactccgcggtcacctcgtcgatagaagaagaggtcgagaagctggtgtgggcgacgcgctggggagcggatacggttatggacctttccaccggccgctatattcatgagacccgcgagtggatcctgcgcaatagtccggtaccgatcggtaccgtgccgatctaccaggcgttagagaaggtaaacgggatcgccgaagatcttacctgggaagccttccgcgacacgctgctcgaacaggcggaacaaggggtggactacttcactatccatgcgggcgtgctgctgcgctacgtgccaatgaccgccagacgcctgaccggcatcgtctcccgcggcggctcaatcatggcgaaatggtgcttatcccatcacaaagagaactttctctaccaacatttccgtgaaatctgcgaaatctgcgccgcctatgacgtttcgctgtcgctgggcgatggcctgcgcccgggctcgattcaggatgccaacgacgaagcgcagtttgccgagctgcacacgctgggggagctaacccaaattgcgtgggagtatgacgtacaggtgatgatcgaaggcccgggccatgtgccgatgcagatgattcagcgcaatatgactgaagagctggagcactgtcacgaagcgcctttctataccttagggccgctaaccaccgatattgcgccaggctatgatcatttcacctccgggattggcgcagccatgatcggctggttcggctgcgcgatgctctgctacgtgacgccgaaagagcatctcggcctgccgaataaagaggacgttaagcagggcctgattacctacaaaatagccgcccacgccgcagacctcgctaaaggccatcccggcgcgcaaatccgcgataacgccatgtcgaaagcgcgcttcgagttccgctgggaagaccagtttaatctggcgctcgacccgttcaccgcgcgcgcttaccacgacgaaaccctgccgcaggagtcaggcaaagtggcccacttctgctccatgtgcggccccaaattttgctcaatgaagataagccaggaagttcgcgactacgccgccgcgcagaccatggaagtggggatggccgatatgtcggaaaacttccgcgcccgcggcagtgaaatctatctacgtaaggaggaagcctga

SEQ ID NO: 255678 - DNA, 636 bp, Klebsiella pneumoniae
atgtatcaacccgattttccatccgtcccattccgtttaggcctctatccggtcgtcgatagcgtcgcgtggatcgaacgcttactggctgcgggcgttcgcactctccagctgcgcatcaaggataagcgcgatagtgacgtcgaaggcgatgtcgttgccgctatcgcgctgggacgcaaataccatgcgcggctgtttattaacgattactggcgcctggccattaaacatcaggcttatggcgtgcatttaggccaggaggatctggaaaccaccgacctcagcgccatccgcaacgccggactgcgccttggcgtttccacccatgacgatatggaaatggatatcgcgctggcggcgcgtccctcttacatcgcactgggtcacgtttttccgacacaaaccaagcagatgccttccgcccctcaggggctggatcagctggcgcagcatattcagcgactgggggattatccaaccgtggcgattggcggcatcagtcttgagcgcgctccggcagtactggccaccggcgtcggcagcattgcggtagtcagcgccatcacccaggcgaccgactggcggcaggcaacggcacggttgcttgagatagcgggagccggtgatgaatga

SEQ ID NO: 255679 - DNA, 756 bp, Klebsiella pneumoniae
atgaatgacagcgattttatgcgctatagccgccagctgctgctggaggatatcgccattgaaggccagcaaaagctgctggccagccgggtgttgatcgtgggtctcggcgggctgggctctcccgccgcgctctatcttgccggagctggcgtcggcacgctggcgctggccgatgacgacgacgttcacgtcagcaacctgcagcgacaaattttgttcaccagcgatgatatcgctcagcctaaaaccacggccgcaagggcccggctggctcggctaaatccgcagattgaactgattgcgctgaagcagcggttaggcggaaaggccctgcaggaggaagtggcgaaggccgatgtggtactggattgcaccgataacatggcgacccgacaggcgatcaacgccgcctgcgtcgcgcttaaaacgccgttgattaccgccagcgctgtcggactcggaggccagctgatggtactgacgccgccgtgggagcagggctgttatcgctgcctgtggccggatgctaacgaacccgaacgcaactgccgcacggcgggcatcattggcccggtcgtcggcatgatgggaaccctacaggcgctggaggccatcaagctgctcagcggcatggcggcgccgcgtaacgcgctgcgcctgtttgatgcgcgcaccagcagctggcgtacgctgacattacagcgatctctgggctgtccggtctgtggagggcagcatgcaggtgtggtttaa

SEQ ID NO: 255680 - DNA, 201 bp, Klebsiella pneumoniae; identical to SEQ ID NO: 177037

SEQ ID NO: 255681 - DNA, 771 bp, Klebsiella pneumoniae
atgttacgtattgcagataaaacgtttgaatcacatctcttcaccggcaccggtaaattcgccgctcccgaggtcatggtggaggccattcgcgcctccggtagccaactggtgacgctggcgatgaagcgcgtcgatctccgtcagcataatgacgccatcctcgcgccgctgctggcggccggcgttagcctgctccccaacacttccggggccaaaacggcggaagaggcggtatttgccgcccgcctggctcgggaagcgctgggcacccactggctgaaactggaaattcatccggacgcccgctggctgctccccgatccgatcgaaacgctgaaagcggcggagattctggttcgggaaggcttcgtcgtgctgccctactgcggcgccgacccggtgctgtgtaaacgtctggaagaagcgggctgcgcggcggtgatgccgctcggcgcgcccatcggctccaatcagggactggaaaccaaagcaatgctggagattattatcgaacaggccacggtgccggtggtcgtggatgcgggtattggcgtgccgagccacgcagcgcaggcgctggaaatgggtgccgacgcggtcctggtgaataccgccatcgccgttgccgatgacccggttaccatggcccgggctttccggctggcgattgatgccggattactggcgcggcaggccggaccgggcgcgcgcagcgcgcaggcgcaggccaccagcccgctgaccggctttctggaggcgcaggtatga

SEQ ID NO: 255682 - DNA, 1134 bp, Klebsiella pneumoniae
atgaacaccttcactgaccgttggcgacagctggactgggacgatattcgcctgcgaataaacgcgaaaaccaccgccgacgttgaacgcgccctggcgaccaaacagctcagccgcgacgacatgatggccctgctctcccccgccgctgctggctatctggagcctctggcccagcgtgctcagcgtctgacgcgccagcgtttcggtaataccgtcagcttttatgtgccgctgtatctctctaatctgtgcgccaacgactgtacctactgcggtttctcaatgagtaaccgcatcaagcgaaaaactctggatgaggcggaaattgcccgtgaatgcgcggcaattcgcgaaatgggttttgagcatctgctgctggtgaccggcgagcatcagggcaaagtcggcatggactactttcgccggcatctgcccgcgattcgccgccagttcgcctcgctgcatatggaagtccagccgctggcgagggaggaatacgccgagctgaaaaacctcgggctggacggcgtgatggtctatcaggagacctatcatgaaagcatgtatgcgaaacaccatctgaaagggaaaaaacaggactttttctggcggctggatacgccggacaggcttggacaggcgggaattgataagattggccttggcgcattaattggcctctccgacagctggcgcgtggactgctttatggtggcggaacatctgctgtggcttcagcagcgctactggcgcagccgctactccatctcctttccgcgactgcgcccgtgcgccggcggtatcgaacctgcctcattgatggatgaacgacagctggtgcaaaccatttgcgccttccgcctgctggccccggaagtagaactttcgttatccacccgcgaatccccctggttccgcgatcgggtcatcccgctggccatcaacaacgtcagcgcgttttcaaaaactcagcccggtgggtatgccgataaccatccggagctggagcagttcgcgcctcacgatgaccgccgtccggaagaggttgccagcgcgctggtggccagcgggctgcagccggtatggaaagactgggatagctggctgggacgcgcttcccagtcatcatga

SEQ ID NO: 255683 - DNA, 1533 bp, Klebsiella pneumoniae
atggctcgccataatagaaagctctctttcacctcgccgattgtgatcgggttcgcgggtattttattcagcttcttgctgatagcggtgttcgccacgacgacgcagcgaaatgattttcttgaagattatcatcatattaaccgcaatttcacccacaatatggcgaccaactacacggagacgctgctgcagggcaatgactttatcctcacccgtgccgccactttctttgcccgcaatgatgcgctcaatgaggcggttaacgtcaatcctgaaaaaggtttgatgcagctcatgcagctgcaaaatatgatgcaaaccgtttcgtccatctcgctggcggataccaatgggcactacctgcgcgcgcccgaggttctggagacggaagacagtcagtcttttgatgccaaatcgagaccgtggtttattaaacaagcggaagccagtaccttcagccggtataccagcccgtacaacgactacttcacgcatcatccgacgattaccgtctacaaacccataatttctccagagggacggctaaagggcagtctcgcatttcatctcgatctcacctcaatgggctacgcgttacggcagatggttgctccggtccagggggaattttttgtggtgcaacgcgatggtaaagtcgttctccatccggatcctggcgccttatttaaaccctacgtcagtgaagcgttgatggacagaatgaccagcggcgaaggccagctctacgataccgatacgaacgcctggtactactactactcgtttaccaaccccgactggtttgtcatttatcgggtcgataactcgacgctggtcaacttgactcgccatgaaacggatatcgtcgcctggagctttgccctggccgcgatcgttatcgtgctgtttggcctgtatctgcgccatgcttcacgtacggtgttgatgaacatcatcaatgccattaaaaccggggatgttcagcgcgccccgcggctggaagcgatgctcagcaaagccatcgagagcaataagcagcgcgagttaacctacgttcgccaggcgaccatcgatgcgctaaccggctgcaagaaccgacgcgccttcgacaatgatatcgccgcgctgatgaacgatcatcaacctttctctctcgcgctggtggatattgataactttaaaacgataaatgacacctggggtcatctcaatggcgatatcgttctgcgcaatgtcgcacgggaaggactgcagatcctccaacctctgcaaatttcactttaccgctacggcggggaggagtttgcggtgatctttaccaccggacatagcgatgacgctctgaagctgctggagagctggcgggcccgcgttgcgcagcgctcctggcgtgaagaagggctaacggtcacctttagcgcaggtctcggcgaatggaatatggaacccctggagcagcttgtcgtgcgcgttgatgaagcgctgtataaagccaagcagcagggcaagaatcgcatcgtccgcgcgtaa

SEQ ID NO: 255684 - DNA, 306 bp, Klebsiella pneumoniae
atgaagaatatcgttttatgctgtgccgcaggtatgtccaccagcatgctggttcaacgtatgcaggctgctgcgcaacaaaaaggtgtggaagtctccatcaaagccgtaccggttgccgagtttaaagataaccttgccgctgccgatattatcctgctcggcccccaggtgaagtatgagcaggccaagctacaggctatggccgacccgtttggtaaaaaagttgccgtcatcgatatgatggattacggcatgatgaaaggcgaagccgtgcttgataaagccctgaagctgatggagtaa

SEQ ID NO: 255685 - DNA, 318 bp, Klebsiella pneumoniae; identical to SEQ ID NO: 177042

SEQ ID NO: 255686 - DNA, 1341 bp, Klebsiella pneumoniae
atggaatttgctattcaacttatcattatcttaatttgtttgttctatggcgcgagaaagggcggtattgcgctcggccttttaggcggcattggtctggttattttagtgtttgtctttcatcttaagccgggaaaaccccctgtagacgtcatgctggtgatcattgcggtggtggccgcctcagcgacgctgcaggcttccggcggtttagacgttatgctgcagattgcggagaaactgctgcggcgcaacccgaaatacgtttcaatcgtggcgccattcgtcacctgcacgttgaccattctttgcggaaccgggcacgtggtatataccattctgccaattatttatgatgttgcgatcaaaaataatattcgcccggaacgaccgatggccgcgagttcgatcggcgcgcagatggggattatcgccagcccggtttcggtggcagtcgtctcgctggtggcgatgcttggcaatttcacctttaacggtaagcaccttgagtttctcgatctgctggcgatcactattccgtcaacgctgctggggattctggccattggtatcttcagctggtttcgcggtaaagacctcgataaagacgaagcctttcaggcttttattgcggtgccggaaaaccgccattacgtttatggtgatacggccacgctgctcgataagaagctgccgaccagtaactggattgcgatgtggatttttctggcctcaatagccgttgtcgccctgctcggcgccttctccgagctgcgtccggcctttgatgacaagccgctgtcgatggtgctggtgatccaaatgtttatgctgctttccggggcgctcatcatcatcattaccaaaaccaatcccgcttcgatttccaaaaatgaggtgttccgttccgggatgatcgccattgtcgcggtgtacggtatcgcgtggatggcggagacgatgtttggcgcgcatatgaccgagattaaaggcgtgctcggggagatggtgaaggagtacccgtgggcttacgctatcgtactgctgctggtgtcgaagtttgttaactcacaggcggctgcgctggcggcgattgttccggtggcgctggcgattggcgtcgatccggcttacatcgttgcttccgcacctgcctgctacgggtatttcattctgccgacctacccaagcgatctggcggcgattcaattcgaccgctctggtacaacgcatatcggccgctttgtgattaaccatagctttattctgccagggctcattggcgttagcgtctcttgcgtctttggttgggtatttgcggcgatgtatggatttctgtaa

SEQ ID NO: 255687 - DNA, 3111 bp, Klebsiella pneumoniae
atggcgctggagctgttcaaaccgtttatttacggcaagctggagctgcgtggcctggccaccaccatcaaagccgctaagaaaatggttgagcgcgaagaagctgtcgtttgggatatcctggacgaagtcatccgcgaacacccggtactgctgaaccgtgcaccaaccttgcaccgtctggggatccaggcatttgaaccagtgctgatcgaaggtaaagctatccagctgcacccgctggtttgtgcggcatacaacgccgacttcgatggtgaccagatggctgttcacgtaccgctgacgctggaagcccagctcgaagcgcgtgcgctgatgatgtctactaacaacatcctgtctccagcgaacggtgagcctatcatcgttccgtctcaggacgttgtactgggtctgtactacatgacccgtgactgtgttaacgccaaaggcgaaggcatggtgctgactggcccgaaagaagctgagcgtatttatcgcgctggcctggcctctctgcatgcgcgcgttaaagtgcgtatcaccgaatacgaaaaagatgaaaacggcgaattcgttgcgaaaaccagcctgaaagatacgaccgttggtcgcgccattctgtggatgatcgtaccgaaaggtctgcctttctccatcgtcaaccaggcgctgggtaagaaggctatctctaagatgctgaacacctgctaccgtattctgggcctgaaaccgaccgttatttttgcggaccagacgatgtacaccggctttgcttatgcagcgcgttcaggtgcatccgttggtatcgatgacatggtcatcccggagaaaaaatacgaaatcatcagcgaagcggaagcggaagttgctgagattcaggagcagttccagtcgggtctggtgaccgctggcgaacgctataacaaagttatcgatatctgggctgcggccaacgatcgtgtatccaaagcgatgatggacaacctgcaaaccgaaaccgttattaaccgtaacggcgaagaagagcagcaggtttccttcaacagcatctacatgatggccgactccggtgcgcgtggttctgctgcacagattcgtcagcttgccggtatgcgtggtctgatggcgaagccggatggctcaatcatcgaaacgccaatcaccgcgaacttccgtgaaggtctgaacgtactccagtacttcatctccacgcacggtgcgcgtaaaggtctggcggataccgcactgaaaacagcgaactccggttacctgacccgtcgtctggttgacgttgcacaggacctggtcgttactgaagacgactgtggcaccctggaaggcatcaccatgaccccggttatcgagggtggcgatgttaaagagccgctgcgcgatcgcgtactgggtcgtgtgaccgctgaagacgttctgaagccgggtacggcggacattctggttccacgcaacacgctgcttcatgagcactggtgcgatctgctggaagataactccgttgactccgtcaaagtgcgttccgttgtatcctgtgacaccgactttggtgtatgtgcgcactgctacggtcgtgacctggcgcgtggccacatcatcaacaaaggtgaggctatcggcgttatcgcggcacagtccatcggtgagccgggtacacagctgacgatgcgtacgttccacatcggtggtgcggcatctcgtgcggctgctgagtccagcatccaggtgaaaaacaaaggtagcatccgtctgagcaatgcgaagtcggttgtgaactccagcggtaagctggttattacgtcccgtaataccgagctgaaactgatcgacgaattcggtcgtaccaaagagagctataaagtgccttacggctccgttatggcgaaaggtgatggtgagcaggttgccggcggtgaaaccgtagcaaactgggatccgcacaccatgccggttatcaccgaagtgagcggtttcgtccgcttcactgacatgattgacggacagaccattactcgtcagaccgacgagctgaccggcctgtcttctctggtggttctggattctgcagagcgtaccactggtggtaaagacctgcgtccggcgctgaaaatcgttgatgctcagggtaatgatgttctgatccctggcaccgatatgcctgcgcagtacttcctgccgggtaaagcgattgttcagctggaagatggcgtacagatcagttctggtgacaccctggcacgtgtaccgcaggaatccggcggtaccaaggacatcaccggtggtctgccgcgcgttgccgacctgttcgaagcgcgtcgtccgaaagagccggcaatcctggctgaaatcagcggcatcatttccttcggtaaagaaaccaaagggaaacgtcgtctggttattaccccggtagacggtagcgatccgtacgaagagatgattcctaaatggcgtcagctcaacgtgttcgaaggtgaacgcgtagaacgtggtgatgtagtttccgacggtccggaagcaccgcacgacattctgcgtctgcgtggcgtacatgctgtgactcgttatattgttaacgaagtccaggacgtataccgtctgcagggcgttaagattaacgataagcacattgaagttatcgttcgtcagatgctgcgtaaagcgaccatcgaaagcgccggtagctccgacttcctggaaggcgaacaggttgaatactctcgcgtcaagatcgctaaccgcgagctggaagcgaacggcaaagtgggtgcaacattctcccgcgatctgctgggtatcactaaagcgtccctggcaaccgaatcgttcatctctgccgcatcgttccaggagaccacgcgtgtcctgaccgaagcagccgttgcgggtaaacgcgacgaactgcgtggcctgaaagagaacgttatcgtgggtcgtctgatcccggccggtaccggttatgcctaccaccaggatcgtatgcgccgccgcgcagccggcgagctgccagcagcgccgcaggtcagcgtggaagaagcttctgctaacctggcagagctgctgaacgcgggtctgggcggttccgacaacgattaa

SEQ ID NO: 255688 - DNA, 813 bp, Klebsiella pneumoniae
atgagccagagtttggcgaatctagtcgaagtgcgcggtattcgcttctcgcggggcgatcgcgtgatcttcgatgatatctcgctttcggtaccccgcggaaagatcaccgcgattatggggccatcagggatcggcaaaaccaccctgttacgcctgatcggcggccagatcccgccggacaagggcgagatcctgtttgatggtgaaaacgtaccgcagatgtcgcgctcgcgcctgtacaccgtgcgcaagcgtatgagcatgctgtttcaatccggcgcgctgttcaccgacatgaacgtgtttgataacgtcgcctatccgctgcgcgagcatactcgtctgccggaagcgctgctgcacagcacggtaatgatgaagctggaagccgtcggccttcgcggagccgctaagctgatgccttctgaactttcgggggggatggcgcgccgtgctgcgctggcgagggcgattgcgctggaacctgatctcatcatgttcgatgagccctttgtcggacaggaccccattacgatgggggtactggtgaaattgatttctgaactcaacagcaccctgggtgtcacctgtatcgtagtttcgcatgatgtgccggaagtgctcagcattgcggactttgcgtatattgtggcggacaaaaaagtcgtggcgcatgggagcgcgcagtcgctgcgtgaaaatgccgatcctcgcgttcgtcagttcattgatggtatcgctgacggcccggtgccgttccgctatccggcgggtgattatcatcatgatttattgggcaaagggagttaa

SEQ ID NO: 255689 - DNA, 978 bp, Klebsiella pneumoniae
atgctcttagcgacggctctgttaattattggtttattgctggttgtctacagcgccgatcgtctggtctacgccgcttcaatactctgccgtatgctggggatccctcccctgattattggcatgacggtggtaagcatcggaaccagcttaccggaaacgatcgtttccgccgccgcttctctgcatgggcaaaccgatttagcgatcggaacggctctcggatcgaatatcaccaacatcctgctgatcctcggcctcacggctctgtttcaaccttttaccgtgcattctgatatcctgcgccgcgaattgccgttaatgttgctggtcagtttactggcgggattcgtactgtacgacgggcagctcacgcggatagacggcctttttttgctggcgctggccatattatggctgctgtttaccattaaaatcgcccgcctggcagagcgtcaggggaacgacagcctgacccgcgaacagctggcggagctgccgcgggagggttcacttcccgtcgcgctgctctggttgggcgttgcgatgatagtgatgccgatggccacgcgaatggtcgttgataacgccacggttctggcgaacttttttgccatcagcgaactgaccgtcggcttaacggtcgtcgcgataggcaccagcctgcccgagctggctaccgccattgccggagcgcgcaaaggcgagaacgatatcgccatcggcaatatcattggcgctaatattctgaatattgtactggtcctcgggctccccgcgctgattgcgccgggtacctttgccgccgaggcctttacccgcgactatggcgttatgctgctggtcagcctgatcttcgctgcgctgtgctggcgccgtaagcagcagccaggtcgccttgccggcgccctgctggttggcggttttatgctttggttagcgatgctgtactggacagcgccgctcttcgttgaatga

SEQ ID NO: 255690 - DNA, 1005 bp, Klebsiella pneumoniae
atgattcgggataacattatgtcgcaaacagatttgccagcggattttgactttcaacgggcaggccgtgaggttctggaaattgaacgtgaaggtctggcccagctcgatcaatatattaatgaagattttacccgtgcctgtgagaccatcttccgctgtaacggtaaagttgtggtgatggggatgggcaaatccggccatatcgggcgaaaaatggcggcgacgtttgccagcaccggtacttcatctttcttcgttcaccccggagaggccgcgcacggcgatttgggtatggtcaccccctgcgatgtggtgattgcgctgtccaactccggcgaatcaaacgaaattctcgccctgatcccggtgcttaagcgccagcaggtgtcgctgatttgtatcaccagccgaccggacagcagcatggcgcgcgcggcggatattcatctgtgcgtaaaggtgcccaaagaggcttgcccgttagggctggctccgacatccagcaccaccgccgcgctggtcatgggcgatgcgcttgccgtagcgctgctggaagcccgcggttttaccgcagaggattttgcgctatcacatcccggcggcgcgctgggccgtaagctactgctgcgggtcaatgatatcatgcacaccggtgatgaaattccgcacgtgagcctggaggctacgctgcgcgatgcgctgctggaaatcacgcgcaaaaatttaggcatgactgccatttgcgatgatgagatgaatatcatcggcatcttcaccgatggcgatctgcgccgcgtatttgataccggtattgatatgcgtaacgccagcattgccgaggtgatgacgcgaggcggtatccgtatccgtcccggcactctggccgttgatgcgctcaacctgatgcagtcccgtcatatcacctgcgtgctggttgccgatggcgaccgcctggtaggtgtgatacatatgcacgatctcctgcgcgcgggcgtagtgtaa

SEQ ID NO: 255691 - DNA, 567 bp, Klebsiella pneumoniae
atgaataatgctgatgccctgatcgcgacctgctatgggccggtgagccaggactttattgaccgggcggcaaaaatccgtttactcatacttgatgtggacggcgttctgtccgacggcgttatctacatgggcaataacggtgaagagctgaaagcgtttaacgtgcgcgatggctacggcatccgctgcgccctgacttcagatattgaagtggcgataattaccgggcgaaaagctaaactggtggaagatcgctgccaaacgctgggcatcaggcatctgtaccagggacagtccgataagctgctggcgttccatgaactattgaataagctggccgttgatgctgatgaagtcgcctacattggcgacgatctgattgattggccggtgatggctaaagtgggtttaagtgtagcggtagccgatgcgcatccgttgctgctcccgcgcgcggattacgtcacgcgtattaacggcggtcgcggagcggtacgggaagtatgcgatttgctactattggcgcagggcaagctggatgaggccaaagggcaatctatatga

SEQ ID NO: 255692 - DNA, 576 bp, Klebsiella pneumoniae
atgagtaaaaccagacgttgggttatcattttactgtcgctggtcgcgctgattctgatcggcctgaacctggcgagtacggacgatacgacccagcaagcgatcaatcctgatgacccaacgtataccagcgaacataccgataccgtcgtgtatagtcccgagggggcgcttaactaccggctcatcgctgaacacgtggagtacttctccgcgcagcagctgtcgtggtttgccaaaccggtgatgaccacctttgatacgaataaagcaccaacctggtctatcaaagcggataaagctaagttgaccaatgatcgcatgctgtatctttacgggcacgttgaagtcgatgcgctgtcggctgactctcaactgcgcaaaattacgacggataacgcccagataaacctggtgacgcaggatgttacctccgatgacatggtgacgttgtacggaacaacatttaattccagcggcctgaaaatgcgcgggaacctgcgcagcaaaaatgccgagctgattgaaaaggttagaacctcatatgaaattcagaacaaacaaactcagccttaa

SEQ ID NO: 255693 - DNA, 546 bp, Klebsiella pneumoniae; identical to SEQ ID NO: 172682

SEQ ID NO: 255694 - DNA, 726 bp, Klebsiella pneumoniae
atggcaacattaactgcaaagaaccttgctaaagcctataaaggccgccgcgtcgtggaagatgtcagtctgaccgtgaactcgggcgaaattgtaggcctgctcggcccaaacggcgccggtaaaacgaccaccttctatatggtcgttggcatcgtaccgcgcgacgcagggaacattatcatcgatgacgaagatattagcctgctgccgctgcacgcgcgcgcgcgtcgcggaatcggctatctccctcaggaagcctctatttttcgccgcctgagcgtatacgataacctgatggcggtattgcagattcgcgacgacctgagcaccgaacagcgtgaagatcgcgcgaaagagctcatggaagagtttcacattgagcacctgcacgacagtctcggtcaggcgctctccggtggtgaacgccgccgcgttgaaatcgcccgcgcgctggccgctaatccgaaattcatcctgcttgatgaacccttcgccggcgttgaccccatttccgttatcgacatcaaacgtattattgaacacctgcgcgacagcggcctcggcgtgttgattaccgaccataacgtcagggaaacgctggccgtttgcgaacgcgcttatatcgtcagccagggccacctgattgctcacggtacgccacagcaaatccttgaagacgagcaggttaagcgcgtgtatcttggggaagacttcagactctga

SEQ ID NO: 255695 - DNA, 1434 bp, Klebsiella pneumoniae
atgaagcaaggtttgcaattaaggctaagccaacagcttgccatgacgccacagctgcagcaggcgattcgtttactgcagttgtctacgttagaactccagcaagaactccagcaggcgctggacagcaacccgttgctggagcaaaccgatcttcacgatgaggtagaaaccaaagaggccgaggatcgcgaatctctggataccgtcgatgcccttgagcagaaagagatgcccgacgagctgccgcttgatgccagctgggatgagatctataccgcgggaacgccctcaggcaacggcgtcgattatcaggatgatgaactgcccgtctatcagggcgagaccacgcaaagcctgcaggattacctgatgtggcaggttgaactcacgccatttaccgataccgatcgcgccattgcgacctcaatcgtcgatgccgttgatgacacggggtacctgactattcctgtcgaagagatcgttgaaagtattggcgatgatgaaatcggacttgaagaagttgaagcggtgctcaagcgcatccagcgtttcgaccccgtcggcgtggcggcgaaagacttgcgcgattgcctgctggttcagctttcacagtttgccaaagagacgccgtggattgatgaagctcgcctgatcatcagcgatcatctcgatctgctggccaaccatgacttccgtactctgatgcgcgttacccgcctgaaagaagaggtgttaaaggaagcggtgaatctgatccaatcgctggatccgcgcccgggccagtcgattcaaactggcgagccggaatatgtcatccctgacgtgctggtgcgtaaggttcacgatcgttgggttgtcgaactcaattcagatagccttccccgcctgaagatcaatcagcactatgcggcaatgggcaacagcgcgcggaatgatgctgacggccagtttatccgcagcaatctccaggaagcccgctggcttatcaagagcctggagagccgcaacgacaccctgctgcgcgtcagccgctgcatcgtcgaacagcagcaggccttttttgaacaaggtgaagagtttatgaagccgatggtgctggcggatatcgctcaggccgtcgaaatgcatgaatccactatttcacgcgttaccacgcaaaaatacctgcacagtccacgcggtatttttgagctgaagtatttcttctcaagccatgtgaacaccgaaggcggcggcgaagcatcgtcgacggccattcgcgcgctggtgaagaaattaatcgccgcggaaaaccccgcgaaaccattgagtgacagtaagctcaccaccatgctgtccgatcagggtattatggtggcgcggcgaaccgttgctaagtaccgagagtctttatccatcccgccgtcgaatcagcgcaagcagctggtttga

SEQ ID NO: 255696 - DNA, 288 bp, Klebsiella pneumoniae; identical to SEQ ID NO: 172679

SEQ ID NO: 255697 - DNA, 489 bp, Klebsiella pneumoniae; identical to SEQ ID NO: 172678

SEQ ID NO: 255698 - DNA, 855 bp, Klebsiella pneumoniae
atggtactgatgatcgtcagcggccgttcagggtcggggaaatccgtcgccctgcgagcgctggaagatatgggtttttactgcgtcgataacctgccggttgtgctgttgccagagctggcgcgttcgctcgccgacagaaacatctcggcggccgtcagtattgacgtgcgaaacatgcccgaatcgccggaaatcttcgagcaggcgatgaaaaatctgcccgcagagttttcacctcagctgctgttccttgatgccgatcgtaacaccctgattcgccgctatagcgacacccgtcgtttacatcctctatcaagcaaaaacctgtcgctggaaagcgccattgatgaagagagcgatctgctggaacctctgcgctcccgcgccgacctgatcgtcgatacttctgaaatgtcggtgcatgagctggcagaaatgttgcgcacgcgtttgctgggcaaacgcgaacgcgaactgacgatggtatttgaatcctttggctttaagcacggcatccctatcgatgccgactacgtttttgacgtgcgctttctgccgaacccgcactgggatccgaagctgcgcccgatgaccggccttgataaacccgtggccgctttcctcgaccggcacacggaagtgcataatttcatttaccagacccgcagctatcttgagctatggttacctatgctggagaccaataaccgcagctatctgacggtagctattggttgtaccggtggtaaacaccgttcggtttatatcgccgaacagctggctgactacttccgctcacgcggtaagaacgtgcagtcccgtcatcggacgctggaaaaacgcaaatcatga

SEQ ID NO: 255699 - DNA, 273 bp, Klebsiella pneumoniae
atgaccgttaagcaaaccgttgaaatcaccaataagctgggcatgcacgctcgcccggcgatgaagctgtttgaattaatgcagaactatgatgctgaagtcctgctgcgcaatgatgaaggtactgaagctgaagcgaatagcgtgattgccttgctgatgctcgactcggctaaaggccgtcagattgagattgaagccaacggtccgcaggaggttgaagcgctagccgccgttatcgcgctattcaacgccgggtttgatgaagactag

SEQ ID NO: 255700 - DNA, 729 bp, Klebsiella pneumoniae; identical to SEQ ID NO: 172675

SEQ ID NO: 255701 - DNA, 654 bp, Klebsiella pneumoniae
atgaagaaaattggtgtcgtgctgagcggatgcggcgtttatgacggaagtgaaatccatgaagccgtcattaccctgctggcaattgcccgcagcggggctcaggccgtttgctatgcgccggataaaatacaaaccgatgttatcaatcatctgaccggcgaagcgcaggtggaaagccgtaatgtgctggtggaagcggcgcgtatcgcgcgcggagagattcagcctttggccaatgcccgagcggatgagctggacgcgctgattgtgcccggcggttttggcgcggcaaagaatctcagtagctttgcctcgcaggggagcgaatgtgaagtggatagcgatcttaaagcgttggctctggcgatgcatcaggccggtaagccgctgggctttatctgcatcgctccggcgctgttgccgaaaattttcgctattccgctacgcgtgaccatcggtaccgatctcgataccgccgatgcggtagaggaaatgggtcctgagcacgtgccttgcccggtggatgatattgtagttgatgaagataacaaagtggtgacgactccggcgtacatgctggcgcagaacatcgcggaggcggcgaacggaattgaaaaactggtcgctcgcgtcctggtgctggccgcatga

SEQ ID NO: 255702 - DNA, 2340 bp, Klebsiella pneumoniae
atgaagcaaatccgtatgctggcgcagtattatgttgacctgatgatgaagctgggtctggtgcgcttttcaatgctgctggcctttgcgctggtggtgctggcgatagttgtgcagatggccgttacgatggtgctgcatggccaggtggaaagtattgatgtgatccgctccatcttcttcggcctgctgattaccccgtgggcggtctatttcctttcggtggtggttgagcaactggaagagtcccggcagcgcctctcgcggctggtagagaaactggaggagatgcgcgagcgcgatctcaagctgaatgtgcagcttaaggacaatatcgcccagcttaatcaggaaatcggcgaacgtgaaaaggcggaagcggaacgtgaaacgacgcttgagcagctcaaaattgagatgaaagagcgtgaagaggcgcaaattcagcttgagcaacaatcctcttttctgcgctccttccttgatgcttctccggatctggttttctatcgtaatgaagataaagagttttccggttgtaaccgtgcgatggagcttttgacaggcaaaagtgaaaagcagcttatccatctgaagccgcaggatgtttataccgaagaagtggcggaaaaggtgctggaaacggatgagaaagtcttccgccataacgtctcactaacctacgaacagtggctggattatccggacgggcgtaaggcctgctttgaaatccgtaaggttccttattacgaccgcgtaggtaagcggcgcggcctgatgggttttggccgcgatatcacggagcgtaagcgctatcaggacgctctggagcgagccagccgagataagaccacctttatctcaacgatcagccacgagctgcgtacgccgcttaacggcattgtagggcttagccgaattctgctggataccgatttgaccggcgaacaggaaagatacctgaaaaccatccatgtctcagcggtaacccttggtaatatcttcaatgatattattgagatggataagatggagcggcgtaaaattcagctggacaaccagccggttgattttaccggtttccttgcggacctggaaaacctctccggcctgcaggcgcagcagaaaggcctgcattttgtgctggaacccacgcttccgctgccgcataaagtgatcaccgacggaacgcgtttacgccaaatcttgtggaatcttattagtaatgcggtgaaatttactccgcaaggcgggaatgtgaacgtccgcgtgcgctatgacgaggggaatatactgcacttcgaagtggaagattcaggtatcggcatccctgaagcggagcaggataagattttcgccatgtactaccaggttaaagatagccagggcggcaagcctgcgacgggcaccggtatcggtcttgccgtatcacgtcgcctggcgcgaaatatggggggggatatctgcgtttccagcctgccgggtaaaggcgcgacatttaccctcaccgtacatgctccggccgttgcggaagaggttgaagatacgctggcggaagatgaaatgccattacctgcgctgaacgtgctgctggtggaagatattgagctaaacgtgatcgttgcgcgatcggtacttgagaagcttggcaatagcgtcgatgtggcgatgaccggtaaggctgcgctggagatgttcgtccccggcgaatacgatctggtgctgcttgatatccaactgccggatatgaccggccttgatatctctcgtcagcttaaacagcgctttgccgccgacgagcttccgccgttggttgcgcttaccgctaacgtactgaagaacaagaatgagtatctggaagcgggaatggatgatgtcctgagtaagccgttatcggttccggcattaaccgcgattatcaaaaaattctgggatgcgccggaagaagaggagaatgagatgccatctgtagatagcagtaaatcggcttccgtactggatattccgatgcttgagcagtacatcgaactggtagggccgaagcttatttatgacggtctggccgtctttgaaagaatgatgccgggctatatggcggttctggagtctaatttgaccgctcgcgaccagaaaggaattgttgaagaggggcacaagattaaaggggctgcgggctcgatcggtttgcgccatattcaacagttaggtcagcagatccagacgccggatttacccgcatggtcggataacgttggcgaatgggttgaagagatgaaatccgaatggcaaagcgatgtcgcggtactgaaagcgtgggtcgcggcggcagataaaaaatga

SEQ ID NO: 255703 - DNA, 1065 bp, Klebsiella pneumoniae
atgcaaatgacaatgcgttggtttgggccggaggaagacaaggtctctctggaatatatccgccaggttcccggcgttgaaggcgtggtgggggcgctctatgatgtcgcggttggtgaggtatggccgctggaaaaaatccagcgcctggtaaatcaggttcatgatgccgggctaaaaatggaagttatcgaaagcgtcaatattcatgacgatattaaaatagggctgccttcccgcgatcgctatattgccaactatcaacagactatccgtaatcttgcccggtttggcgtaaaagtgatttgctataacttcatgccggtttttgactggatgaaaaccgatatgaactatgttctgccggatggctcccggacgatggcttttgaaaaaaaagacattgataagagcctggaagaggtggtgaaagaggttctggataactcaaatggttttgcgctgccgggctgggaacctgagcgtctggccaaagttcaggagctgtttgcgcagtacaaagatgttgatgacaagacgctgcgggagaatctggtctattttctgaaggcggttatccccgtctgcgaagaggtcggcgtgaaaatggctattcatccggacgatccgccgtactctatttttggcttgccgcgtatcgtgaaaaatcgcgacgatctggattggatctgccgggcggtagattctgaggccaatggcatcacgctctgcaccggttcaatcgcggaagatcctgccaatgacgtctactcgattctggccgagtttacacggcgcaagcgtatccattttgcccatgtgcgtaatattaatcttattaaagataaagacttttatgaatgcgctcatccgtcagaatttggctctttggacatgtataaagtgatgcaggcgctctatgacaatggttttagtggctatatacgcccggatcatggacgttttatctggggtgaaacagggcggccaggttatggattgtacgaccgtgcgctgggcgtgacctacctgaaggggctgtgggaagcgctcagtaaacgctaa

SEQ ID NO: 255704 - DNA, 924 bp, Klebsiella pneumoniae
atgcagttacaaaaattagtcaacatgtttggtggggatcttgcgcgccgatatggagaaaaggttcacaaactgacgctgcacggtggatttagctgtccaaatcgcgatggcaccattggtcgtggcggctgtaccttttgtaatgtcgcttcttttgccgatgaagagcagcagcagcattcgattgctgagcagctagcccatcaggcgcagcgggtaaaccgggctaagcgctatttggcctatttccaggcctataccagtacgtttgccgaagttcaggtactgcgctccatgtatcagcaggcaatcagccaggccagcatcgtcgggctgtgcgtgggcacccgtccggactgcgtccccggagccgtattggacctgctgagtgagtatcgggagcagggctacgaagtatggctcgagctgggtttacaaaccgcgcatgataaaacgctgcaccgaattaaccgcggccacgattttgcctgctatcagcgaaccacccgcctggcacgcgagcgcgaccttaaagtgtgtagccaccttatcgtgggcctgccgggcgagggacagggtgaatgcctggagaccttagagcaggtagtggagaccggcgtagacggcattaagctgcatccacttcatattgtgaaggggagcattatggccagggcctggcaggcaggaaggttaaacggtattgcgctggacgactatacggttaccgcaggagagatgatccgtcacacccctccggaagtgatttatcaccgtatctccgccagcgcgcgccgcccaacgctgctggcgccgctgtggtgtgagaaccgctggaccgggatggttgaactggataaatacctcaatgaacacggcgttcaggggtctgctctcggtcgccgctggatctctccatag

SEQ ID NO: 255705 - DNA, 489 bp, Klebsiella pneumoniae
atgggtaatagttttcaaaatgaggtgccaaaatctcgagttaatcttcaattggatcttcacactggcggggcgggaaagaaaagcgagttaccgttaaagttacttgcggtaggcgattttagtaacggaaaagaacaacggtctttatctgaaagaaataaaataaatatcaataaaaacaattttgatagcgtaatggctgaactcttacctacggtcgatttgctggtcgaaagcactctgtcaggagaggcccggatagaaaatattaaacttaactttggtagcgtcaaagattttgaaccagaacaggttgctcgcaatatcccatcgcttcgtgcattgatttctatgcgtaatttactacgcgatctcaaagccaacttgctggataacgtcgagttccgtcgtgaactggaaaagattatgaaagatcctgcgatgagtagtgaactacgcgcagagctaacggcactcgcaccgtaa

SEQ ID NO: 255706 - DNA, 492 bp, Klebsiella pneumoniae
atggcaattcctgcttacctttggctgaaagatgacggtggcgcggatatcaaaggttccgtagacgtacagggacgtgagggcagcatcgaggtcgtggcgctggaccacgatgtgtatatcccgacggataacaataccggcaaactgaccggcacccgtacccataagccatttaccttcactaaggaaatcgacgtatccagcccgtatctctacaaggccgtcacgacgggtcagactctgaaaacggcagagttcaagttttaccggataaatgacgccggtcaggaagttgagtatttcaacattacgctggataacgtcaagctggtcagagtggctccgctgatgcacgacattaaggatcctgcgcgcgagaggcacaatcatctggagcgtatcgaattccgttacgaaaagattacctggacctacaaggacggaaacatcattcattccgatgcatggaatgaacgtccttcggcctga

SEQ ID NO: 255707 - DNA, 2634 bp, Klebsiella pneumoniae
atgaccgtaaaccagccagctgcactgctacgccgcctcaacccgttctgcgcccgcgcgctggactccgccgcatcgctgtgccagacccgcgctcacgccgagattactattgagcactggttgttgaagctgctggaacagggagaaggggatatcaccgtcattgcccggcgctatgagtgggatatggagattctctggcaagcgttgctggggcatcttgaaacgcttccacgctcggtacgtgagcgtccgcagctttctaaacgcctgacggcgctgatgacgcaggcatggttgttcgcttcgctggagagcaacgagccgcagatccgtagtcagcacttgctgatggcgctgacggagaagcccgaactgctggcttgcgacgatctgtgggtgttgttgagcgtgggtcgcgtccagttagggcggctgcgcgcgctactggacgagcagtcggaagagtgtccggtgcggcaaaggcaggcaggcgaaccgctggtggaagatataagtacaaattcttctgcgcttgcggcggatgatagacaagatgatgcgcatcgagctgtccttaaacgtttcacttcgaatattacagaaaaggcccggatgggccagatcgatccggtgtttggccgcgatgttgagatccgccagatggtggatattctgtcgcgccgtcgcaagaacaatccgctgcttgtgggcgagcctggcgtcggcaaaaccgcgctggtggaagggctggcgctgcgtattgtagatggcaacgtgccggatagcctgaaaatcgtgcatattcactcgctggatctggggctgctacaggcaggggctggcgttaagggggaattcgagcagcggctaaaaaacgtcatcgacgcggtgcaggcatcgccggagccggtgctgctgtttatcgatgaagcccatactatcatcggcgcgggaaatcctgcgggcggcgcagatgcggctaatttactgaaacctgctttggcccgcggtgagctacgcactatcgcagcgacgacctggagcgagtacaaacaatattttgagcgcgatgccgctctggaccgccgttttcaattggtcaaagtggatgagcctgatgacgacacggcctgcctgatgctgcgcgggctgaagacccgctacgcggagcaccatggggtgcacatccaggatagcgccattcaggccgcggtacgtctgtcgcggcgttatctgtccggacgccagttgcctgacaaggcggtagatctgctggacactgccggggcgcgtgtccggatgagtcttgacaccctgccggagccgttaactcagcttcagggacatctggccgcgctggatattgagcagaaggcgcttgaaaaggatcgcgcgttttatcctgcatccgcgcaggctcgactggcagagctcgccgacctgcgggatcaactccagcaaaaggcggatcatctggagtatcagtaccaacaagaaaaagcgctggtgcagcagattatagcgctacgccgggaaagtccggacagtgatcggctacctcaactgcaacagcagctgctatcgcaacagggattaacgccattgctggcgctggatgtggatgcccgggccgtcgctaccgtcgtagctgactggaccggcgtaccgctctcttcgctgctgaaagatgagcagagcgagctgctgaatatggaacagatgctcgccaggcgggtggtaggccaggatggtgcgctaaaggctattgcgcagcggttgcgagcagcaaaaaccggactcacgccggaaaatggcccgcagggcgtatttctgctgaccggtcctggcggcacaggtaagaccgaaactgcgctggcgatggcggatgcgctgttcggcggcgaaaagtcgcttattaccatcaatctctcagagtatcaggaaccgcatacggtttctcagcttaagggggcgccgccgggttatgtcggcttcggccagggcggcgtattgacggaagccgtcagaaaacgtccgtatagtctggttctgctcgacgaggtagaaaaagcgcaccgcgacgtcatgaaccttttttaccaggtgttcgatcgcggttttatgcgcgatggggaaggcagggaaatcgactttcgcaacaccattatcctgatgaccgctaatctcggaagcgatcacattatacaactgctggaaaagaggccggcggccacggatctggatctgcaggaactgctgtatccgctgttgcgggagcacttccagcctgcgctgctggcgcgtttccaaacggtaatttatcgccctctcgggtgggaggcgatgcggttcattgtggaaatgaagctggcggcagtgagccgccgcctgcacgaacactacggtatggagacggtgatcggggccagtctttacgatcaactggcctcctcctgtctgctgccggataccggggcgcgtaatatcgacagcttactgaaccagcagattctgcctgtactgagccagcagctgctggcgaatcaggcggcgcgacggcaacccaggctgctggcgctcggctggagtcaagaggacggcatcgtgctggaattagatacggaataa

SEQ ID NO: 255708 - DNA, 1611 bp, Klebsiella pneumoniae
atgcgaatgagtgaattactgcagcagttaacccgcagctgttttcccgaacggaatgcgcttgaggcagggcaacaacaggcggcgctgtggcagacgtggctgctgccagtgacgacggagtctccggtcgggagagaccccgtctaccacgacgatttccagctgatgcgcgacgagctgaataagctttccggcgcggataccgctctgatttgtcagcttgcggaatccctgctgctcactcaggcaaaagatgtacgcatcgccacctgctatatctgggcgcgattgcaccgcgacggcgaacgcggattagcggaaggtctcgccctactggccggactggtgcagcgcttcggaacgcaactgcttccctctcgtccggcgggccggaaaatggcgctggaatggttaactggcgaaaagatactcgacagcctggcgcgttacccggaagtggcaaaagaagactttgccaatattgtcgcggctctcaatctgctggtcgcttctttttctacatggccggaagagcaacagccgccgtccctgataccgctgatccaggcgctggagtcgcggctggcgcagtcgggcgggatgaacgcggtggtgccgcagaacagcgcggcaaccgcttcacctccgacaaattcgctacagatacagtccatcagttccgggcgcgacctgctggatcaggcaaaagcgctggcccgctacctgaacgcgcagccgcagggctggctggcggcgcatcggttgatgaaaactatgcgctgggacaccgtgcatgaactgccgcctgatgtggacggcagaacccggctggctccgccgcgtaccgagtcacgtactcagcttaagcgtttgtactcgcaacagaactggaccgagctgctggaacaggccgacctgatgttcagcgccggggtcaatcatttctggttcgatatacaatggtatttgtatcaggcgctgggcaaagcgggcgcgccgtgggacaagtggacggcaattatccgccaggacctgatgctgttacttgagcgtttacctgggctggagagcctggcgtggaacgacggcacgccgtttgccgatgaggtgacccgcagttggattacccggcaggtgctgccgcaagaggaggggaactggcttagcaggacgccaacggccccggcggaagagccgggcaacgatatgctggcgctggaaccggaggcgctggcgctggcggaccgcgagggcgttgatgctgcgctgagctggctccagtcccgtccggggatcgtcacggcacgccagcgtctgctgttgcgtctgttgatggctcgcatagcggagcaatacggtaaaagcgagatggcgctgctgctgctggaagagctgcatggcgctgcgcaggggctgacgttgacacaatgggagccggagttaattttcgaagtcacggcacgacagctgaagctgctgcgcctgcgggcgcaccgctatgcagataaagcccatctggcgcggaaaatggaaaatctgctggcggcgctggtggcgatggatcctgcgcgggcggcagtactgtgtgatacgcaatataaagactga

SEQ ID NO: 255709 - DNA, 1368 bp, Klebsiella pneumoniae
atgaagacgccgcactcttcatttatcagcccgttccgcacgggcggcgatccctgtacctttcgggaggccggcgaactgcaggccgaaataggcaaacttacgcatccggcgcggccggatgtggactggggcagggtagagagtctgagtctggctctgtttcggcaaaacggcgtggagttgcaaacgctggtctgttacgcgctggcgaggacccggcagtatgggatagcaggaatggtggacgctctggatgccctcgcggcattgataaaccagcgctggggagatttctggccgctgcaggtccattcaaggatcgcgctgctggcgtggcttgccgagaagatgaagcaggcgctgcgcacgcaggatcttcagtatcaggatctggcgcagattaaccactgcagccagcacctgacggaaatagagaacgtgctgcggcggtgcgaggtctggcatatgtcaaaactggagcaactggccgttcagttgcgaaatgcggcgatgcgcctggagcgactggcgccgcagggtgaaaaaacggcggcgaagaaaatcgccagggagcgcccctggccgagagatgtaaaaaatggggccaaaaaaaccgctgaagcgcaggcattgcgaaagcatgacgaaagcttgttattgaagaaaactacggagagtcctcgccagcggcgggtatggcccggctttatcgccgggatgctgacgatggtttgcctgggaggttgcggtttctggggttggtcatggctgaacccgccagaaatgggcctacgggaggcacagaccgcgacgtcggtgttggcgttggcgttgccctcagcgccggggagggatggcaacaagatgctgagctgggcgcagggaatggcgacgacccgcgcgcagctgaagatgctgaatgacctgccgccgctgtggcccctgcgccaggaagaggcgctgctcctggcccttgaaagccgctggccgaataattcgcaaattaaggcgatgagggccgagtggcgtaagcagcgggaagccagcgcgctgccggtgcctcaattacagcgctatgcccaggcgcaggcgaagctacggcagctttcgctaaggctggatgcgctggatgaacgcaaggggcggtatatgactgcttctgagttgaaatcggcaattttcagcatccggcagctgttacagacgccgccgctggaagaacagctcaggcaactggaggctcaggtacgagccggaagtctctcaccggtgctgcaaatgcagattgatttccattttaagcagttgctaagccgctacgctattttgctggatagcacggaagtgaaaccgaaccctcagtag

SEQ ID NO: 255710 - DNA, 804 bp, Klebsiella pneumoniae
atgacaatccctgcatttggtcttgggaccttccgtctgaaagatgacgtagtgatcgcatctgtaaaaacagcgcttgagctgggctatcgcgccattgataccgcgcaaatctatgacaatgaagcggccgtgggccaggctatcgcagaaagcggcgtcgcgcgcgatgaactgttcatcaccaccaagatctggattgaaaatttaagcaaagataagctcatcgcaagcctgaaagagagtctgcagaagctgcgtaccgaatatgtcgatctcacgctgatccactggccgtcgccaaacgatgcggttgccgtggaagagtatatggctgctctgctggaggcgaaacgccagggattgactcgccagattggtatctctaacttcactattccgctgatggagcgcgccattgctgccgttggggtagagaatatcgcgaccaatcagattgaactgtcaccttatttgcaaaatcgtaaggtcgtcgattgggcctctgagcatggcatccacattacctcttatatgactctggcttatggtaaggcgttaaaagatgaagccattgcccggattgcggcgaaacataatgccagtccggcgcaggttatcctcgcgtgggcaatgggtgaaggctatgcggtgatcccatcttcgaccaggcgcgaaaacctggcaagcaacctgaaagctcaggagctgcagcttgatgaagacgatcgcctggcgatcgccgcgctggactgtcacgatcgtctggttagcccggaaggtctggcgcctgaatgggattaa

SEQ ID NO: 255711 - DNA, 903 bp, Klebsiella pneumoniae
atgagagctacctcagaagaaatcgccatttttgtcgccgtggtagagagcggcagttttagtcgcgctgccgaacagcttggtcaggctaattccgccgtcagccgggcggtaaaaaagctggagtcaaagctcggcgtcagcctgcttaaccgtactactcgccagctaagcctgaccgaagagggcgagcgttatttccgccgagtgcaggttgtgcttcaggagatggccgccgccgaaaatgagcttctggagagccgaacgacgccaagaggattacttcgcgttgatgccgcgacgccggtgatattgcattttctgatgcctttgatcaggcccttccgtgagcgctacccggaaatgagcctttcgctggtctcgtcagagacctttatcaatctgattgagcggaaagtggacgtcgcgatccgcgccggcacgctaaccgattccagcctgcgcgcccggccgctgttcaatagctaccgcaaaattatcgcctcgccggactatcttgcccggcacggaacgccgcaaagcgtcgccgagctaaaacatcatcagtgcctcggctttagcgagcccgtatccctgaatacctggccagtttcctgctgcgatggccaactgctggaaatcgaaagcgagatatcttccaatagcggggaaacgctcaagcagctgtgcctggccggtaacggtatagcctgtctgtcggactatatggtggataaagaaattgctgaaggggcgtttgtcgaactgctggctgacaaacggctgccgattgaaatgccgtttagcgcggtgtactacagcgacagggcggtaagcacgcggatcagggcttttatcgactttcttagtgagcatgtaaaacagctcccgcaggagctgtaa

SEQ ID NO: 255712 - DNA, 1191 bp, Klebsiella pneumoniae
atgccgctggcgctacttgccttaactatcggtgcctttgcgattggcacgactgaatttgtcattgtgggcctggtgcctgacattgctgagcaactagctatttcgctaccttctgcagggctgctggtttctatctatgcgttgggcgtagcgataggtgctcctgtgctcaccgcgctgaccgggcgtatgccgcgtaagcaactactgctggcgttaatggcgctgtttaccgctggcaatctgctggcgtggcaggcaccgggttacgagactctggttctggcgcgcctgctgaccgggctggcgcatggggtattcttttcgatcggttcgacaattgcgaccagcctggtcgcgaaggagaaagcggcctcggcgattgcgatgatgttcggcgggttaaccgttgcgctggtgaccggcgtgccgttaggcaccttcattggccaacactttggctggcgtgaaacattcctggccgtgtctattcttggcgtaatcgcgttaatgagcagccttattctggtgcctggtaacattccgggccgcgtcagcgcgggtctgcgcgctcagcttaaggttctgacccatccgcgtttactgattatctacgcgatcactgctctggggtatggcggcgtatttacggcatttaccttcctggcgccgatgatgcaggatcttgccggatttagcccatcggccgtcagctggatccttctgggctacggtgtttcagtggcgataggtaacgtatggggcggaaggctggcggataaacatggcgccgtgcccgcgctgaagctgatttttgccgccctggctgcgctactggcgatctttcaatttacggccagtgtgcattatgctgctctggcgacggttttggtgatggggatctttgcttttggtaacgttccgggactacaggtgtacgtggtgcagaacgcgcagcaatacactcctggcgcggttgacgttgcctctggcctgaatattgcagcatttaacattggcattgcgttaggttcggtgattggcgggcagatcgtagcgcattatggtctggcccagacgccttggatcggcgctctgattgtgctggtggcgctcttactggtcggaattagcggccggcttgataagccagggcttcgcgctaacggccctggcgtagaaggctaa

SEQ ID NO: 255713 - DNA, 807 bp, Klebsiella pneumoniae
atgcctaaattgcgaaagaatacctatgccatgcgctatgtcgccggacagcctgcggagagaattttacctccggggtcgtttgcaggcatgactccggcttttccggcgggagtaccgttaagttcggatgaaaaaatccgcgtactggtgtggaacatcttcaagcagcagcgcgccgagtggaaatcagttcttaacaactttggtaaagatgcgcacctggtgttgttacaggaagcgcaaactacacctgaattagtgaagtttgccacgtccaactaccttgcagcggatcaggttccggcgctggtgctgccccagcatccttccggcgtgatgacgttagcctctgcgcatcctatctactgttgtcctctgcgtgaacgcgagcctatcctgcggttggcgaagtcggcattagtgaccgtgtatccgttaccggattcccgcctgctgatggtggtcaatattcatgcggttaacttcagccttggcgtcgatgtctacagcaagcagctgctgccgattggcgatcagatcgcccatcacagcgggccggtgattatggcaggcgactttaatgcctggagccgcccgcgaatgaatgccctgtaccgctttgcgcgcgaaatgtcgctgcgcgaagttcgtttctctgacgatcagcgccgccgtacgtttggccgcccgcttgattttgtcttctatcgtgggttaagcgtacacgatgcttccgtactggtgacgcgtgcctccgaccacaaccctctactagtcgaattcagtcccggcaagcctgattaa

SEQ ID NO: 255714 - DNA, 771 bp, Klebsiella pneumoniae
atgacaacacgctctcatcatgaccatgtagaaatgcagtttggctcacaggccagcgcctacctgaccagcgccgtacacgcctccgggcgcgatctgcaaagtctggccgaaaggctggcggattttcctcaggcgcacgtgctggatatgggatgcggcgccggccacgccagctttgcggcggcagggcaggttgcacaggtgacggcgtatgatttatccagccagatgctggacgttgtggctcaggccgcacgtgataaaggttttgctaatattaccactcagcagggatatgccgagtctttgcctttcgctgacgccagctttgatgtagcgatcagtcgttattctgcgcatcactggcacgatgtcggtctggcgctgcgtgaagtgaagcgagtgctgaagccgggcggagtaatgattattatggatgtgatgtcgcccggtcatccggttcgcgacgtctggctgcagactgttgaggccctgcgcgatacttcccatgtccgcaactattccagcggcgaatggctggcaatgacgagtgaggcgggtctggtgattaatcatctgctgaccgaccgcttgccgctggagtttggctcatggattgcgcgcatgcgaacgccagcggcgctggcggaagcgattcgcttatatcaggagagcgcatcggctgaggttaaggcctattttgccctgcagcacgatggttcgttcaccagcgatacgattatgtttgaggcccacaaggcggcctga

SEQ ID NO: 255715 - DNA, 834 bp, Klebsiella pneumoniae
atgatgcaacgtctgaacaaaatgttcgacggcgactggttgttaaccgttgcggcgtataacagcggcgaaggccgggtcatgaaggcgatcaaagcgaacaaagcgcgtggtaaacccaccgatttctggtcgctgtctttgccgcatgaaaccaaaatatacgtaccgaaaatgctggccctgagcgatatcctcaagaacagcaagcgctacggcgtgaggctgccgacggcagacgaaagccgggctctggcgcgcgtacgtctcgacagcccggttgagatttcacagttagccgatatggcaggaatgccggtcagcaaactgaagaccttcaatgctggcgtcaaaggatcaaccctgggcgcgaatgggccaaactacgtgctggtgccgcagaagcacgccgcacagctgcgcgaatcgttggcttccggcgatattgcagccgtgcagccgacgctgctggctgataacaagccgttaaccagccgtagctacaaggtgcgttccggcgatacgatttccggcattgcgtcgcgtctcggcgtatcaaccaaagatctgcagcagtggaacggtattcgcggttctaacctgaaggttggtcagaatctggtgattggcgcaggcagcagcgccgagcgtctggctaacaacagcgatagcatcacttatcgcgtgcgcaaaggcgactccctgtcgagcattgcgaaacgccatggcgtcaacattcgtgatgtcatgcgctggaatagcgataccggcaacctgaagcccggcgatcagctgacgctgttcgtgaaaaacagcgacagaccagaatcctga

SEQ ID NO: 255716 - DNA, 918 bp, Klebsiella pneumoniae
atgctcgctctcgaggccggaccaggtcgggctggagataattttgcgcggctgggcctgaatgtcgcggaagcggattttttcatcctctttattcagcgccaggtgcgtgtgctcgcggccggtaaattcgccgagcgcttgccaggctttgaccgccacctgaccattggtttccggggcgagggcgaggatcacttccgaggcgtcgatggcggtgtcgatgcgcgggcggcctttagccgggccatccagcttgacgtagttgagcttgccgaggaaatcgacctcgttctgggtgttccaggtgatgcctttaccgccgttgccgagtttgtcgagcagcgggccgagggaggtaaagcgctcataggtcgccggataatcgcgctcaaccacggcaatcgacggcgcggttttacccggcgtcagctcgcattcgcctttccgccagtccagcacgtcaaagggctgagagagttccgccggggagtcatgctgcaacggcaccagcaccacgtcggtctctttatcgaggtggccgacgcagacttcagagaaggttctggcgatatctttgtaaatttcccagtcgcttttcgcctcccacgccgggtcaacggcggcggagagcgggtgaataaagggatgcatatccgaggtgttcatatcgtctttttcgtaccaggtggcggttggcagaacgatatcggagaacagacaggtgctggacatgcgaaagtcgagcgtcaccagcaggtcgagtttgccctcaatggccgcggtttgccactccacctcttccggcttcacctcatcggtagcccccagctcttcgccctgaataccgctgtcggtccccagcaggtatttgagcatatactcatggcccttgccggaagagcccagcaggtttga

SEQ ID NO: 255717 - DNA, 1389 bp, Klebsiella pneumoniae
atgctgagcaaaaatgagaaaaagaatcattatcttttaagcgagtggaaacctgaaaacgcggcattctgggaaaataagggaaagaaaatagcccgcagaaatctttgcatttccgtagcttgtctgctacttgccttttgcgtctggatgttatttagcgccgtcgcggtcaacctcaataaagtcggttttaatttcactaccgatcaactgtttttattaaccgctctgccttcgctttccggcgcgatattacgcgtgccctactcctttatggtacccatatttggcggtcgctactggacggtattaagtacgattattctggtggttccctgcatctggctgggaattgccgtgcaaaataccgctaccccgttttgggtatttatcattatcgccttactgtgcggttttgccggagcgaactttgcttcgagcatgggaaatatcagttttttcttccccaaagccaaacagggtagcgcactggggattaacggtgggcttggcaacctcggcgtcagcgtgatgcagatgatcgcgccggcggtgatttttctgcccatctttgcttttctcggtgttcatggggtgcctcaggaggatggatctcttctcgcccttagcaacgccgcgctcgtctgggtaccgctgctggcgatcgccaccttcgcagcctgggtgggaatgaacgatatcgccagctcgaaggcctccattcgcgagcagctgccggtactgaagcgcccgcatatgtggctgttaagcctgctctaccttgccacctttggctcgtttatcggcttctccgccggttttgccatgctggcgaaaacgcagttccccgacgtgaatattctgaagctggctttcttcgggccgtttatcggcgcgctggcgcggtcatttggcggcattatttccgaccgtctcggcggcgtgcgggtcacgttgatcaattttatcttaatggcgctgttcaccggcctgctgttcctcaccctgcccggcaccggctccggcagctttctcgccttttatgtggtgtttatgggactgttccttaccgccggtctcggcagcggttccaccttccagatgatcgccgtgatcttccgccagataactatcgacagcgtgaagaagcgcggcggcagcgatgaacaggctcagcacgaagcggtgaccgacaccgcggcggcgctcggttttatctccgctatcggcgccattggcggcttctttatccctaaagccttcggcacctcgctggcgctgaccggctcacctgtcggggcaatgaaggtcttctttgttttctacgtggtttgtgtgctggtgacctggctggtctacggccgtcgtaaaccggcaaaaaaataa

SEQ ID NO: 255718 - DNA, 492 bp, Klebsiella pneumoniae
atgaccgtgcgccagattgccgccgaagccggcgtctccgccggtcaactgcaccaccatttcacttcagcaggcgagctgaaagcccatacctttgtacgtcttatccgtgaaatgctggacatgccgctggtcgctgacgacgccacgtggcgggaacgcctgttttccatggtgggcagcgacgacggcaagcttgagccctatattcgtttatggcgcgaagcgcagctgctggccgacagcgatagcgatatcaaaggcgcatatctgctgacgatgagtatgtggcatgaagagacgctgaaaattattcagcgcggaaccgaagcaggtgagtttacgccaaaagaccatgcggaaagtattgcctggcggctcattgcgctggtatgtggcctggatggtatttacgcgctgggtatggaggaaatagatgacgccacctttaaccggcatatcaattattttatttcgatggaactgttctga

SEQ ID NO: 255719 - DNA, 798 bp, Klebsiella pneumoniae
atgagcgaaaaaaaaccagatactctcagcgtccgccagtctgaacacgaccctaactttatgctgtccctggcgcgcgggctggaagtccttaacgcgtttaccccacagcggcagcgcctgaccatttcccagcttagccaaaaaacgcagatctcccgcgcggctgtgcgccgctgcctctataccctcgccgcgctgggtatggtgcatagcccggatggccgcagctatgagctactcccccgcgtgctggcggtgggtcacgcttacctggccggaacgccgctggcgaaagtcgcgcagagcgccctggataatctgggtaaaaacctcggagaatcctgctccgccgccacgctggacggcgataacgtcctgtatattgccagagcagcggtgaataacctgctcagcgtagatatcggccgcggtagccgtctgcctgcgtgggccacgtcgatgggacgcgtgctgcttagcgcgttgccggaagaacagcttgaagtgacattgtcacgagccagcttgatccgctataccccgtatacgctatgcgatctgccgggtttacggcaggaaatcgccagagtgcgtatgcagggctacgcgctcgctgaccggcaaattgaggtgggattatgttcgctggcggtaccgctgctttcccgcagcggtcaggtggtggcggcgcttaacgttggcgttccggcaggctataccaacgccgccgcgctgaaggagaaagccctcgccccgctacggcgggcggcgatggcgctttctcttcagctgtaa

SEQ ID NO: 255720 - DNA, 996 bp, Klebsiella pneumoniae
atgaccgcgaccattgaacgtattgaaagctggctggtagatatcccgaccattcgaccgcacaaactctccatgaccacgatgggctgtcagacgctggcgatcgtccgcataacccgttcggacgggatttgtggtattggcgaagccaccaccatcggtggattgagctacggcgtggagagcccggaagctatcgtttcggcaattaaccattacctgatgccgctgctgaagggccagcctgccgataatctcaattccctgaccgcgcgaatgaacggcgcggttaaaggcaacacctttgccaaatcggcgatcgaaaccgcactgatggatgcgcagggaaaggcgcttggcctgccggtttccgcgctgcttggcggcgcgctgacgaccgcgactgacctgcgccatacccgcgcgattgttgaagccctgggcgatcggaccagcatccgcgtcgacgtgaatcaggcgtgggaagccaccgtcgcggcaaagggctgccgcgagctggcggcgatgggggtcgatttgattgaacagccagttagcgctcaggataacactacgctggtgcgcctcagccatcacatcggcacggctattctggccgatgaagcggtagcgacccattacgaaggctatcgcctggcacagcagggattcagcggggcctatgcgctgaagattgccaaagcgggtgggccaaacagcgtgctggcgctggcgaaggtggcgcaagctgcgggaattgggctttacggcggcacgatgcttgaggggaccgttggcaccctggcctcgctgcacgcctggtcgacgctccccctacagtggggcaccgagatgtttggcccgttattgctgaaggacgatattgtcagcgtgccgctaacgttcgccgaaggcgaagtgacgctaccgcaaacgccgggtcttggcgctgaactggatgaagacaaactgcgcttctatagccgcaaaggataa

SEQ ID NO: 255721 - DNA, 291 bp, Klebsiella pneumoniae; identical to SEQ ID NO: 172253

SEQ ID NO: 255722 - DNA, 927 bp, Klebsiella pneumoniae
atgagtaatgcattcgtacaacaagatgctgtgcaacatttattgcgtgaaagtgcaggtttaaatgcaaccggcggcgacgaacgttttaaaacgattgttcaccgtctgctggaaaacatctgcacgctgattgatgactataacgtcactgaagaagagttctggcatgcggtgaattatctgcatgaattaggcggccgccaggaagcggcactgctggcggcgggcctcggccttgaacacttcctcgacctgcgccaggacgctattgatgccgcagcgcagcgggaaaccggcactcctcgtactattgaaggcccgctgtacgtggcaaatgcgccgctggcagacgggcatacccgcatggatgatggtaaagatgcgggggaggtgatgtggctttatggccaggttcgcgacacccagggccacccgatagccaacgctatcgttgatatctggcatgccaataccctcgggaactactctttcttcgatcaaagccagagtgaatataatctgcgccgccgcattcgcaccggcgccgatggctgctatagcgtgcgcagcattatgccatccggctacggttgcccgccggatgggccaacgcaaaaactccttgaccagttggggcgtcacggtaaccgtccggcgcatatccatttcttcgtttccgcgccgggtcataaacatttgaccagccaaatcaatctcaacggcgacaaatacctgtgggatgatttcgcgttcgctacccgcgacggcctgattgccgatccggtaaaagtcagcgaccgcgagcttattcagcagcgtgagctggaaggtgaacatactgaagtgcgctttgattttaccctgtgcaaagcacttaacgccgatgaagaacaccgcggtacgcgcctgcgcgcgcaggagtag

SEQ ID NO: 255723 - DNA, 1383 bp, Klebsiella pneumoniae
atgcaaaaaatgttcaccacattaaaagataaaatcaccaatgcattaattgttgatcgtgaaaagcatatttatcgctgccatcgctcaatatttaccgatccgcagctatttgattttgaaatgaagcatgtttttgaaggaaattggttgttccttgctcatgaaagccaaattgcgcagcctggggattattacaccctgacacttgggcgccagccggtaataataactcgcgacaaaaagaatgaactgcatgcgctaattaacagctgcgcccaccgcggggcgatgctgtgtcgccgtaaaaccggtaataaaagttcctttacctgtccatttcacggctggacattcagtaataacggcaagcttttaaaagccaaagatgaaagtaccggcggttacccggagactttcaagcatgaaggctcccacgatttaaagaaactgccgaggtttcaatcgtatcgcggcttccttttcggcagcctgaatgccgatgtacagccgctggaggcgtacctgggcgaaacctgcaaaattatcgacctgatcgttgaccaggcgccggaagggctggaggtgcttaacggatcatcgagctacgtttatgaaggcaactggaagctgggggcggaaaacggtgctgacggctatcacgttagcgtggtccactggaactacgcttccaccatgtcgcgccgcaactacgaagcggaagggacgcacgcggtagacgcaaacggctggtcgaaaagcgtcggcggcggttacggctttgacaatgggcatatgctgttgtggacccgggtgctgaacccggaagtgcggccggtctacgaacatcgtgaacgactgcaggtggaattcggccagtcccgcgccgagcagatggtcaacgaaacgcgcaacctgtgcctctatccaaacgtctatctgatggatcagttttcgacgcagatccgcgtgatacgccccatcgcggtggataaaaccgaagtcaccatctggtgcttcgcgccgaagggcgaatctgaccaggcgagggcgctgcgtattcgccagtatgaggatttcttcaacgttagcggcatgggaacgcctgacgatctggaagagttcagcgcctgccagcgcggctatctcggtgagaatctggcatggagcgacctcagccgcggggcgctgcactgggtcgacggccctgacgaacacgctcttcaggcgggcttcaggccgcagctaagcggggtgaaatcggaagatgaagctttgtatatcgcccaccatcatcactggcaaaacgtgatgctggcggcgctggaaaaagagcagcagcgctacgagcaatcgatcacgcaacgcgtggaggtggtctga

SEQ ID NO: 255724 - DNA, 486 bp, Klebsiella pneumoniae
atgctgactctcgaacaggttcgccattttctctattacgaagcccgcctgcttgacgatcgccagtgggatgattggctgaactgctacagtccacaggtggtgtactggatgcccgcctggggagatgacgacaagcttacccgcgaccctcagcgcgaaatttcgctgatttactacccgaaccgcgatggcctcgaagaccgggtataccgcatcaaaacggaacgctcaggggccagcacgccggaaccgcgcaccactcatatgatcggcaacgttgagctgcttggcgaaaccgaacaggggatggaggtgcgctacaactgggtcacctactgccatcgctatcagcagacggatacctggtttggctctacctgctgcacgctgattgaaagcgccggcaaaccgcagatcatccgtaaaaccgtgcgcctgaataacgattacatccgtcaggtaattgacgtttaccacatttaa

SEQ ID NO: 255725 - DNA, 1017 bp, Klebsiella pneumoniae
atgacctttaatattgctctcaattttgaagacggcatcacccgctttattcaatgtcacgccggagagaaagttctcgatgccgcctatcgtcagcaggttaatctgccgatggattgttcggacggcgtttgcggcacctgcaagtgccgctgcgtcagcggcgaatatggtctgggcgatgagtatcttgaagaggcgctcagcgaagacgaagccgcagagcgccaggtgctgacctgtcagatggtgccatccagcgattgcgtcattgatgtaccggcggcggcagcccagtgcaagaccgcgctggcaagcctgggggcgacggtgaaagcggtcaatctcctgtctgacaccgccattgagctggcgatcgtgctggatgagccgctggacttcctggcgggtcagtacatcaatattcaggtccccggcacgccgcaggtgcgcgcctattcgtttagctctctaccgggctcgcgtgaggggagctttctgatccgtaacgtgcccggcggcttgatgagtcagtggctgacgcagcgggccagtcccggcgatcgtctgacgctaagcggcccgatgggcaacttttatctgcgcggcggcgagcgtccgctgttgctgttggcggggggcaccggcttagcgccgctgctctcgatactgcaaacgctggctatgcaacgcagcgcccggcccgtcaccttgctctatggtgtgacccgcgacagcgacctggtgaaaactgatgcgcttgaagcatttaccggccagcttcccgcttatcgctggctgccggtggttgccgatgcgcaaagccaatgcccgcagcgcggttttgtgaccgaccatcttaatgacgcaatactcaacgatggcgatgtggatatctatctgtgcgggccaccgccgatggtcaatgcggtatccacggcgctgcgcgagagaggcatttcgccggcggggttctggtatgaaaaattcatcgctagccagagtgcggcggcataa

SEQ ID NO: 255726 - DNA, 786 bp, Klebsiella pneumoniae
  misc_feature (738)..(747): n is a, c, g, or t
atgcgatttaaccataaagtcgtggccattaccggcgccgcgcaggggattggccgacagaccgcagagcaagcggcgcgtgagggtgcgcggctgctattgattgaccgatctcgctatgttcacgaactggcggcggcgctgaacgccgccggttgccaggcgctggcgctggaagccgatcttgaacaatgggaaagtaccgagcgggcattcgccaacggcgtggcccattttggccacctggatgtattgattaacaatgtcggcggcaccatctgggcgcggccgtttgcggaatatcagccggatcagatagagaaggagattcgccgctcgctgtttccgaccctgtggggctgtcgggctgcgctaccgtggatgctgaagcagggcaagggcagtatcgttaatatttcgtcggtggcaacggcgggcgtgaaccgggtgccttattccgcagcgaaaggcggcgttaatgcgttgacccgttcgctagccctggaatatagcgcaaacgggatccgcattaacgccgtggcgccggggggcaccgaggcgcctgcgcgccggacgccgcggaatgaggagctgccgtcggcgcaggagcagacgtggtatcagcaggtggtcgatcagacggtggcgagcagcctgatgcatcgctacggtacgctggcggaacaggccaatgccatcctgtttctcgccagcgatgaggccagctacatcaccggnnnnnnnnnnttctcgccagcgatgaggccagctacatcaccggcgtga

SEQ ID NO: 255727 - DNA, 879 bp, Klebsiella pneumoniae
atggagaagaaaaaagccacgctaattggattcgccgccatcgtcctctggagcaccatggtcgggctgattcgtggcgtaagcgaagggcttggtccggtaggcggcgcggcgatgatctacagcctgagcggccttttgctcatctttaccgtcggttttccgcaaatacgtcagatcccccgcccttatttgctggcaggcagcgtgctgtttgtcagttatgaaatatgcctcgcgctgtcggtcgggctagccggaacccgccagcaggcgattgaagtgggcatggtcaattatctgtggcccagcctgacgattttatttgccattgtctttaacaatcaaaaaagcagctggctggttatcccggggttattgctggctttattcggcgtcacctgggtattaggcggtgagcatggcctgaacattgacgaaattatcagcaatgtggtttccagcccgctgagctatattctggcgttcgtcggcgcatttatctgggcggcctactgcacggtcaccgctaaatatgcacaaggcaaaaacggcatcactctgtttgttctgcttaccgccctgaccctgtggctaaagtttctgttcagcgaacagccgcccatggtctttagctggccggtaatagtcaaactgatcgcgctgtccattgccctgggcctgggctatgcggcgtggaacgtcggcatcctgcacggcaacgtcagcctgttagccgccgcctcctactttacgccggtgctctcctccgcgctggcggcggtactgctcagcgccgcgctctcgtggtcgttctggcagggcgccggcatggtgtgcgctggctccctgctctgctggcaggcgacccggcgctaa

SEQ ID NO: 255728 - DNA, 588 bp, Klebsiella pneumoniae
atggacgtcagccgcagaaagttttttaaaatctgcgcaggcggtatggccggaacaacagccgctgcattgggttttgcgcccaaaatggccctggctcaggcgcgtaattacaagttgctgcgcgccaaagagatccgcaacacctgcacatactgctccgtgggctgcgggctattaatgtatagcctgggcgacggcgcgaaaaacgcgaaagaagcgatttatcacattgaaggggatccggaccatccggtgagccgcggcgcgctgtgcccgaaaggcgcagggctgctggactatgtccatagcgacaaccgtctgcgctatccgcaataccgcgcgccgggttcagataaatggcagcgcatctcctgggatgaagcatttacccgtatcgctaaattgatgaaagccgaccgtgatgccaactttattgagaaaaacgagcagggcgtgacggttaaccgctggctgtccaccgggatgctgtgcgcgtcggcggccagcaatgagaccggcatgctaacgcaaaaatttgtgcgctcgctcggcatgctggcggtagataaccaggcgcgcgtctga

SEQ ID NO: 255729 - DNA, 1128 bp, Klebsiella pneumoniae
atgaaaggcaaaatcatcccgctgagctttctgcacacgcaggacagcgaaaccggtcaccaggtgatccggatgacgccaccgcatgttatctgccatcgcaactatttctatcaaaaatgctttacccgggatggcggcaagctaattttcggcggcgcgtttgaaggccactggaactactatttactcgatatcgccggccagcaggcgacccagctcaccgacgggccgggcgataacacctttggcggtttcctttccgccgacgaccggtcgctgtggtatgtgaaaaacaaccagcagctgcgccgcgtggatctggcctcgctggaggaacaggtcgtatatcaggtggatgaccaatgggtagcctacggaacctgggtcgccaacagcgattgcagtcagatggtcggaatcgaaatcaaaaaaagcgactggcagccgttgaccgactggggcaagttccgcgcattctacttcaccgagccggagtgccggttgattaatatcgatctgcgcagcggcgaacagcgcgtggtattgcaggaaaaacgctggctcggccacccgatttaccgcccgtttgacgacagcaccatcgccttctgccatgaaggtccgcgcgatgctatcgatgccagaatgtggcttatcaacgctgacggcagcaacatgcgcaaggttcgccagcaccagccgggtgagagctttacgcacgaattctgggtaccggatggctccgcgctttactatgtcgcgcatcaggaaaacgatccgcatcgctatctgtatcgcgccgacccggcaacgctggaaaatcgccagttgatggcgattcctccgtgttcgcatctgatgagcaatcacgatggcagcctggtggtcggcgacggcgcgccgcacagcaccggcgatatccagcttaacgatccgtttatttgggtgtttgatattgccgccgataggcagaccgccgtgtgccgccacgactctacgtggaaagtgattgagggcgagcgccaggcgacgcatccgcatccgtcgttttcaccggataaccgctgggtgctgtttacctccgataaagagggtatgcccgcgctgtatctggcggaggtgtag

SEQ ID NO: 255730 - DNA, 1347 bp, Klebsiella pneumoniae
atgaataaaatctgggtcgggtgtgttctgacgtctttatttacccctctggctaatgcacaggcgccgttatctcttgaggaacggctggcgcaaatggaacaacggctaaaggcgaccgagcagcgggcggccagcgcggaggcagaaatccgcgcgctgaaaggtcaggaagcgccagcggccacggtggccagcgccgcaccggctaaacctgctttacagcttaatgattatggtgaattaaaattctatggcgacgttgagtttaatatggacggagccagtcgtaccggtagcctgacgtcggtgaaaaccagtgccaataaaaactgggcgccgggagataaggaacgctgggatattaacggccgcattcttttgggctttgatggattacgcaaaggggctaacggtaaatatgccggattcagcgtgcagccgctggcggatatgaatggcaaaatgaatcttgatgatgccgcatttttcttcggtcagcaggatgactggaaaattaaaatcggtcgttttgaagcctacgatatgttcccgcttaatcaggatacctttattgaatattccggcaacacggccaacgatctgtatagcgacggctacggctatatttatatgatgaaagaggggcgcggacgcagcagcagcggcggcaatttcctgctgagtaaaaatatcgataactggtattttgaggtgaatacgctggtggaggacggcagctcgctgtttgtcgatcagaactatcacggcaacgcgctcgataatcgtaaaaacgtggtgtacgtgcgtccggtggcgtcctggcagtctggcccctggtcggtggcggcagcaatggagagtaacctcgttaacaatgcttacggctatcagaatcagaacgggcgctgggtcgatcagtccagccgcaccggctacggtatgaccatgagctggaatacgctgaagactgatgccgaggacggagcggtggtgaacctgagcaccgcgtatctggacgcggcggatgaaaaggatttcagcgccggtatcaacgctttatggcatcgcgtggagctgggctatatctatgcgcataacaaaatcgaccagtttaatctttccggcgtgagcgcggagtgcgatggcgactgcgcgattctgacgccggggcgctacgacatccatactattcatacttcctggcagctgccgaatattatggatatgccgaactttaatatttatctcggggcctatgcgtcatggctcgattcatcggcggcgaaaagcggtaataccgatgaacgctacggcgcgcgggtgcgatttaaatatttcttctga

SEQ ID NO: 255731 - DNA, 1434 bp, Klebsiella pneumoniae
atgacctattccatttcccgggctgagcaagaactgcaggctaaacatgaaaagctgaacctgcgctggtatccgcgctaccacctggccgcccgtgcgggctggatcaacgatcctaatggcctggtctggtttgacggctggtatcacgcgttttaccagcaccatccgtactctaccaaatgggggccgatgcactggggccacgcgcgcagcaaggatctggtgcactgggagcatctgccggtggcgctggccccggaaggcccggaggataaagacggctgcttctccggctcggcggtggtggatggcgatacgctggcgctgatttataccgggcacaaattccacggcgacccgagcgacgaagccaatctttatcaggtgcagtgtctggcgaccagtcgcgacggcattcacttcgaacgtcaggggattgtggtcgacaccccgccgggtatgcaccatttccgcgacccgaaagtgtggcgagaaggggacagctggtacatgatcgtcggcgctcgcgatggcgataccggccaggtgcggctgtatcgttcagccgacctgcgccagtggcaggatgccggcgtcctcgacgaggcggaaaaagagatgggctacatgtgggaatgcccggacttcttcgccctcaacggcaagcatattctgatgttctctccgcaggggctggcggctaaaggctatcaaaaccgcaacctgttccagagcggttatctgctcggtgaatggcagccgggacaggcgtttgtgcgcgagggggcgtttgtggaaatggatcacgggcatgatttttatgccccgcaaagcttcctcactcccgacggccgccgcattgtcatcggctggctggatatgtgggaatcgccgttgccggagcagcaggatggatgggcgggcatgctttcgctgccgcgtgaactgagcctgagcgcggataatcggctacaaatgcgtccggcgaaagaggtcgagagcatgcgcggcgccagcttcccatggccggtgacgacgctgaagaaccagcagaccacgatggtggaaaactgcgaggcgatggaagcgatcctccactgggactgcgccagcagcaacgcagagcagtatggcctgagcttaggcgatggtctgcgcgtttacgtggatgcgcagatgcagcgccttgtgctggagcggcattatccgcagtatggcctgtgcggcactcgcagcgtcccattgaccgagggggccgatctgaagctgagggtatttttcgatagctcttccgtcgaagtgtttgttaatgatggcgaggcctgtctgagtagtcgtatatatccggatgccacccgccgtgaattatcgctatttgcctggagcggttcggcgtatttaactgaagcaggagcgtggcagctggaataa

SEQ ID NO: 255732 - DNA, 1242 bp, Klebsiella pneumoniae
atgatgaaagcgcatcactctcacagctatccgttactcagtgcgttactgtttttctttttcgtgacctggtcatcttcaggctcgctgctctctatctggctgcaccaggaagtgggccttaagccgggggataccgggattatcttttcggtgctttcggtctccgcgctttttgcgcaggtgtgttacggctttattcaggacaagctcggcttgcggaaaaatctgctctggtacattaccgtactgctgatcctctccgggccggcctatatggtgtttggctatctgctgaaaattaacgtgttactcggcagtattttcggcgggatttatattggattgaccttcaacggcggcatcggcgtgctggagtcctacaccgagcgcgtcgcgcgccagagccagtttgaatttggtaaagcacggatgtgggggtcgctgggctgggcggtggcgacgttcttcgccggattactgttcaacattaacccgcatttaaacttcgccgtcgccagctgctctggcctggtattcttcattctcctggcgcgcctgcgggtctcttctgcgccgcacgccatgcaggaagcggtatcgggcggtaaagtgacgctggaagatgctctgcgtctgctgaccctgccgcgcttttgggcgctggtcttcttcgtgattggcacctgtatttacggcgtatatgaccagcagttcccggtctacttctcctcccagtttccgacgctgcaggaaggtaatgagatgtacggctatctgaactcgttccaggtgttcctggaggccgccggtatgttctgcgcgccgtggctggttaaccgtattggtgcgaaaaacggcctgatcttcgccgggatggtgatggccatgcggatggtggcttccggactggtggaagggccgctgctaatctccatcacgaaactgctgcacgcggtcgaactgccggtgctgctggtctccatctttaaatacaacagtttaaacttcgataagcgtctttcatccacgctctacctggtcggctttgcctgcaccagctcggttatcgccaccgtcctgtcgccgctggcgggctatagctatgagaaatacggcttcgcccagtcctatctgattatgggactgctggtgttctgcaccacctttatctccatcttcttgttgcgttcaagcaagtcctctgcggacccgctgatgccgcaaacttccgctatctga

SEQ ID NO: 255733 - DNA, 996 bp, Klebsiella pneumoniae
atggcatctctgaaagatgtggcaaagctggcgaatgtatcgctgatgacggtctcccgggcgctcaatagcccggaaaggctcaagccggagaccctggcgcgcgtccaggcggcaatcgaacagaccaactatgtccccgacctgtcggcgaaaaaaatccgcggcgctcatgcgacgccaaacactatcggagtgctggcgctggataccgtcaccacgccattttcagtagagattacgctctccatcgaagaaaccgcgcgggcgcacggctggaacagcttcgtggtcaatatgttctctgatgatagcccggaaaccattgtcgacctgctgctctcccatcgcccggatggcattatttacaccacgatgggcctgcgtcaggtgccgcttccggccaagctgttaaccctcccctgcgtactggccaactgcgaaagcctgcacgatccggtcgccagctatattccggacgacgaacagggccagtatacggcggtacaggcgctgctggccgctggctatcgccgcccgctgtgcctgcatcttccggccaatcatctggccaccgtccgccgccgcgagggactggagcgcgcctgccgggaagcgggtattgaccccgatacgctcgaccacagctatatggcctacggcgatgagcactatcgcgatattcccgccatcgtgctggcgcacatcgttcgacaaacgccgcagttcgattcagtgatttgcggcaacgaccgcatcgcgtttatggtttatcaaacgctgctggcgcaggggcttcgcattccgcaggatgtggcggttgtgggttacgataatatggtgggaattggcgatctgtttttaccgccgctctcaacggtgcagctaccgcactatgatatcgggcgcctgagcgccctgcatattattaacggcgacagccatcgggagacagttcgggttgccagcccctggctgccgcgcgactcattataa

SEQ ID NO: 255734 - DNA, 1419 bp, Klebsiella pneumoniae
atgacctctatcagtcacgactctacaaccatgccgcgttcgcagcgcgatacccgacgtatgaatcagtttgtctccattgccgccgcggtggcgggtctgctgtttggcctcgatatcggggtcatcgccggggcgctgccctttatcaccgatcatttcgttttatccagccgcctgcaggagtgggtggtgagcagcatgatgctgggagccgctattggcgcgctattcaacggctggctctctttccgcctcgggcgtaaatacagtctgatggttggcgcggtgctgttcgtcgccggctccgtgggctccgcatttgcgaccagcgttgaaatgctgctggtggcgaggatcgttctcggcgttgccgtggggatcgcctcgtataccgcgccgctgtatctgtcggaaatggcgagcgaaaacgtgcgcgggaagatgatcagtatgtatcagctgatggtgactctcgggattgtgatggcgtttctctcagataccgcgtttagctacagcggcaactggcgcgccatgcttggcgtgctggcgctgcctgcggtggtgctgattatcctagtgatcttcctgccaaacagcccacgctggctggcggaaaaagggcgtcacgtggaagcggaagaggtgctgcgaatgctgcgcgacacgtcagagaaagcccgcgacgaactgaatgagatccgtgaaagcctgaagctgaagcagggcggctgggcgctgtttaaggtcaaccgcaacgtgcgtcgggcggtatttctcggcatgctgttgcaggcgatgcagcagtttaccggtatgaatatcatcatgtactacgcgccgcgcatctttaaaatggcgggtttcaccaccacggaacagcagatggtcgcgaccctggtggtaggcctgacctttatgttcgccacctttatcgccgtctttaccgtcgacaaggccggacgtaaaccggcgctgaaaattggctttagcgtgatggccatcggcacgctggtgctgggctactgtctgatgcagtttgataacggcaccgcttccagcggcctctcctggctgtcggtggggatgaccatgatgtgcatcgctggctatgcgatgagcgccgcgccggtggtgtggatcctgtgttcggaaattcagccgctgaagtgccgcgatttcggtattacctgctccactaccaccaactgggtgtcgaatatgatcatcggcgcgaccttcctgacgctgttggatgctattggcgcggcgggaaccttctggctctataccgcgctgaacgtcgccttcattggcgtgactttctggctgatcccggaaaccaaaaacgtcactctggaacatattgaacgtaagctgatgtccggcgagaaactgcgcaatatcggcaattaa

SEQ ID NO: 255735 - DNA, 762 bp, Klebsiella pneumoniae
atgattcttgacgcattctccctgcagggcaaagtggccgttgtgagcggttgtgataccggtctgggccagggtatggcggtcggcctggcggaagccggctgcgacatcgtcggtatcaatattgttgaaccgaccgaaaccattgagcgcgtaacggcgctgggccgtcgttttctcagcctgaccgccgacctgcgtcagattgacggcatcccgcagctgctggagcgcgcggtagctgagttcggtcatatcgacattctggttaacaacgccggtctgattcgtcgcgaagacgcgatcgaattcagcgagaaaaactgggacgacgtcatgaacctgaatattaagagcgtgttctttatgtctcaggcagcggcgaaacactttattgcccagggcaccggcggcaagattatcaatatcgcttccatgctctctttccagggcggtatccgcgtaccgtcttacacggcgtccaaaagcgcggtgatgggcgtgactcgtctgctggcgaacgagtgggctaagcacggcatcaacgttaacgcgctggcgcccggctatatggcgaccaacaatacccagcagctgcgcgctgacgaacagcgcagcagcgaaatcctcgaccgtatcccggcgggacgctggggcctgccgagcgacctgatggggccggtggtattcctggcttccagcgcgtctgactacgtcaacggctataccgtggcggtggacggcggctggctggcgcgctaa

SEQ ID NO: 255736 - DNA, 696 bp, Klebsiella pneumoniae
atgttcgcaagatctctggcccttgctgcactctgtggcatgtctttcgcagcttcggcagtcacggtagatttacgtcacgaattcattgatggaggcaaaacggataagaccaacgccgaccgcgtctccgtctcccatcgtttcgctaacggctttggcttctccgttgaggcgaagtggaagtcgggcggcgataacaccagccagccttattctgatttcgtcggtaatggtcatgaagagagcatcagctggcagtggaaggctaacaagaacttctcggtcacgccggggttcaatattgaaagtaacgatagccgctcaatctacaagccgaatctgcgcgtgcaatacagcttcgataatggtttctacgttgccgcccgttatcgttatgactacacccgctacccggcgaatgcaggaaaagaggatgataaagtcaaccgtggcgatgcgtgggccggttacgtgttcggcgactggcgtgccgagctgaactatgtttatgcgcgcagtaccgaaggggttaaacgcaacgacaacaaaccttactctcaggagtacaaccttaaggttgcctacaagctggataaaaactgggcgccgtatggcgagctcggcaatgtcggcgtcaacgatcgcagcgatcgccagacccgtttccgcgtaggtgttgcctactcgttctaa

SEQ ID NO: 255737 - DNA, 1176 bp, Klebsiella pneumoniae
atgaaagatgtcgtaattgtcggcgcgttgcgaacgcccatcggctgttttcagggcacgttatcgcgtcattccgcggtagagctgggcagcgtggtcgtcaaggcgttagttgagcgcagcggcgtcgatccccagagtatagatgaagtgatcctcggccaggtactgactgcgggcaccggccagaatcctgcgcgccagtcggcaatccgcggcgggctgcccaataccgtttctgccattaccattaatgatgtatgcggttccgggctcaaggcgctgcacctggccacgcaggcgattcagtgcggcgaagcggatgtggttatcgccggcgggcaggagaatatgagccgcgctccgcacgtgctgaccgacagccgtaccggcgcgcagttgggcaatagtcagcttatcgatagcctcgtccacgacggcctgtgggatgcgttcaatgattatcatatgggggtgacggcggagaatctggcgcgcgagtacaacattagccgtgaactacaggacgcctgggcgctcagctcgcagcataaagcacggcgggcgattgattccggtcgttttcgcgatgaaatcgtgccggtagccagtgaactcaacggtaccctccgcctggtggacaccgatgaacaaccgcgcgttgaccccagcgctgaagcgctcgccagcctgcttccgacctttgacctacagggctcggtcaccgcagggaatgcctcaagcattaacgatggcgcggcggcggtaatgatgatgagcgaagccaaagcagaggagctggggctgccgattctggcgcgcatccgcgccttcgccagcgttggcgtcgatccggcgctgatgggcatcgcgccggtccatgccacccgtcgctgcctggaacgtgcgggctggaagctggatgaggtcgatcttatcgaagccaacgaggcttttgccgctcaggctatttcggtcggcagggttctggaatgggacgagcggcgggtgaacgtgaacggcggcgcgattgcgctgggccaccccattggcgcttccggctgccgtattctggtttcactggtgcacgagatgattaaacgcgatgcccgcaaagggctggccacgctgtgcatcggcggcggtcagggcgtggccctggcggttgaacgttaa

SEQ ID NO: 255738 - DNA, 873 bp, Klebsiella pneumoniae
atgcgctactctcccgaagcccttaccgctttcgtcgaagccgtcgcctgcggttcattttctgccgcggcgcggcggctgcgcaaaagccagtccaccatcagcaccgcgatcgccaacctggaagccgatctaggggtgacgttgttcgatcgtaccgccaggcagcccgcgctgacgccgcagggcgagcaggtgctcagctacgtgaaagcgattctggcggccagcgacaggcttgatgagctggcaatttcgctgtccggtaagacggaagcgcgtctgacctttgtgctctccgatacgctgcatcccgatgtgctggaagatctgctggcgcagttcgatcgccattttccgcataccgaatttgagtgcctgattggcgaagatgacgatgttatcgacctgctacaaaaggagcgggcgcaggtggggctgattgaggccagagataactacccgacagaaatcggcagcatccggctgccgatgcaaaccgaaatggctatttacgtggctccccggcatccgctggcggcccagggcagggtgacccgtgacgagctgtttagctggcgcgagctgcgactgagcacctatctggaaaacacgacggaaccggcacgcgggctggtatggtcggcgcctaactatcttctgctgttcagcatggcggctcaggggctgggatggtgtattttgcccagcgcgctggtggaggagtttgccggtagcggcagtctggtggcgctggacattgccggttggccgcgggtgatatcgaccgatttgctgtggaataaaaaggcgccgccgggagaggcgggaagctggctgcgtcagcatctgcaggggcatcggcgtgaatag

SEQ ID NO: 255739 - DNA, 462 bp, Klebsiella pneumoniae
atgcaacaacgacatgttcagcgcaaaacgctgacggaacgggttatccacgctatcagctttgaaggcctggcgacgctgatcctcgcccctaccgccgcgtggcttatgcagcgctcggtcgtggaaatgggcggactgagtatcctgctcgccacgctggcgatggtctggaacattatctataacgccctattcgatcgcctgtggccggcctcccgggtcgtgcggaacctgcgggtccgcgcgctgcacgctctcggcttcgagtcaggctttattattattggcgtcaccatggtcgcgctggtactgggcgtctcgctgatgcaggcatttatgctggaaattggctttatgctgtttttccttccctacaccatggcgtttaactgggtctgggatatgctgcgcgaacgcatcataaaggttcgccagcagcgaatcgccgcccgccagtaa

SEQ ID NO: 255740 - DNA, 1383 bp, Klebsiella pneumoniae
atgactgagaaaaaagcggaacttcagcggggactggaggcgcggcacattgagctaatcgcccttggcggcacgattggcgtgggactatttatgggggcggcaagtacgctgaagtgggccggaccttcggttctgctggcgtatattatcgcggggctcttcgtcttctttattatgcgttcgatgggcgaaatgctgtacctcgaaccggttaccggctcgttcgctgtttatgcgcaccgctatatgagcccgttttttggctatctgaccgcctggtcctactggtttatgtggatggcggtcgggatatcggagattacggcgatcggggtctatgtccagttctggttcccggagatggcgcagtggataccggcgcttatcgcggttgggctggtcgcgctggcgaatctggcggcggtacgtctgtacggcgaaattgaattctggtttgccatgattaaagtgaccaccattattgtcatgatcgtggtggggctgggcgtcatcttctttggctttggcaacggcggacactccattggctttagcaatctgaccgagcacggcggtttctttgccggcggctggaagggctttctgacggcgctatgcatcgtggtcgcttcctatcagggcgtcgagcttatcgggatcaccgccggtgaagcgaaaaatccgcaggtcactctgcgtagcgcggtcggcaaagtgctgtggcgaatcctgattttctatgtcggggcgatttttgtgatcgtcactattttcccgtgggatcagataggctccaacggcagtccgttcgtgctgacctttgccaaaatcggtatcaccgcagcggcagggattatcaactttgtggtgctgacggcggcgctttccggttgtaacagcggaatgtatagctgtggacggatgctctacgcgctggcaaagaatcgccagctgcctgcggccatcgccagagtttcgcgcaacggcgtgccgtcggcgggcgtggcgctgtcgatcctgattctgctggtcggttcgtgcctgaactacattattcctaatccacagcgggtatttgtttacgtctacagcgccagcgtgctgccgggaatggtgccatggttcgtaattctgattagccagctacgttttcgtctggtacataaagaagcgatggccagccatcctttccgctcgctgctattcccgtgggcaaactatttaaccatggcgttcctggtttgcgtgctgatagggatgggatttaacgacgatacgcgtatgtcgctctttgtcggaattattttcctcgccgccgtgacgcttatttataaggtatttggccttggtcgacgcggaaatgttgataatgtggcgtaa

SEQ ID NO: 255741 - DNA, 741 bp, Klebsiella pneumoniae
atgactgagactacatccgcgccgttgtacctgctgagagggttgcaactcattggttggcgcgatatgcaacatgctctggactatctgtatgccgatggcgagatccgtacgggtacgctggtggcgattaatgcagagaagatgctggcggtagaggataaccccgaagttcgggcgctgatcgaagccgcagagtttaaatatgctgacggcatcagcgtggtgcgctcattacgtaaaaaatatcctcaggcgcaggtatcgcgcgtcgccggggctgatttatgggaagcactgatggcgcgcgctggcgctcagggaacgccggtatttctgatcggcggtaagcccgaagtgctggcgcagacggaacagcagcttcgccagcgctggaacgtaaacatcgtcggcagccaggacggctatttcgctgctgaccagcgtcaggcgctgtttgaacgtattcgcgatagcggggcgaagatcgtcaccgtggcgatggggtcgccgcgtcaggagatcctgatgcgcgattgccgggaagtttatccgcaggcgctttatatgggcgtaggcggaacctatgatgtctttaccggccatgttcagcgagcgccgaagttctggcaggacctggggctggagtggttttatcgcctggtttcgcagccgagccgaataaaaaggcaggcgcgtctgctgcgctatttacgctggtattataccgataagctttga

SEQ ID NO: 255742 - DNA, 1347 bp, Klebsiella pneumoniae
atgacattaatgcaatttagcggactgctgctggtttggctgctgtcgacgctttttatcgccaccgccacctggtttgaatttcgtcgggtgcgcttcaacttcaacgtctttttctcgctgctgtttctgctgacctttttctttggctttccgctgaccagtattctggtgtttcgcttcgacgtggcggtcgccccgccggaaattctgttgcaaactctgctggtttccgtctgtttttatgcggtttactacgtgacttataaaacgcggctacgctcggcggcgcagagccatcagcatcgtccgctgtttacgatgaaccgcgtggagacccatctggcctgggggattttgctgggactggcgctgctctgcgtcgggatcttctttgcgcataacggctttctgttattcaagctcaactcctatagccagatcttctccagcgaagtttccggcgtggcgctaaagcgtttcttctactttttcattccggcaatgctggtggtctattttctgcgtcaggattataaagcgtggatattcttcctcgtcagcaccgtcgcatttggtctgctgacttacgccatcgttggcgggacccgggcgaatatcatcattgcgtttgccatcttcctgtttattggcatcattcgcggctggataagcctgtggatgctggcggcggcgggcgtactgggcatcgtcggcatgttctggctggcgctcaaacgctacggaatgaacgtcagcggcgatgaagcgttttatactttcctctatctgacccgcgataccttctcgccgtgggagaacctggctctgctgctgcaaaattacgacaagattgagtttcagggcctggcgccaatcgtccgcgatttctatgtttttatccccagctggttgtggcacggtcgaccgacaatggtgctcaataccgcgaactatttcacctgggaagtgctgaataaccattctggcctggcgatttcgccaaccctgattggctcgctggtggtgatggggggcgtctggttcgtgccgctgggcgcggtagcggttgggctgattattaaatggtttgactggctgtacgagcttggcaaccgggaaacgaaccgctataaagcggcgatcctgcacagtttctgttttggcgctatcttcaacatgatcgtgctggcgcgtgaagggctggattcctttggctctcgcgtggtttttttcctcgttatctttgggatctgcctactggcggcgaaactgctgtactggttcctcgatagcgtcgggctgattcataagcgggctaaaccgctgacgcaacctcaagtctga

SEQ ID NO: 255743 - DNA, 1080 bp, Klebsiella pneumoniae
atgacagcactgatacatgtactgggatcggatatcccgcaccacaaccagaccgttctgcggttctttaatgatgagctggccgtcaatgacgagcaggctcgcctgtttatggtcgtcggtgatgcgacaggaattcgcgaagcgtaccccgcgctctccatcagctgctatccggggaagaagtcgctggcaaaggcggttatcgcgctggcaaaggcgaaccggcagcagcgctttttctttcacggccagtttaataccggcctgtggctggcgctgctcagcggggggatccgcccggcgcagtttaactggcacatctggggcgcggatctgtatgagaattccgccagcctgaagtttcgcttgttttatccgctgcggcgcctggcgcaggggcgggtagggcgcgtctttgcgacccgcggcgatctcagttggttcgccgcccggcattcgggcgtgccgggcgaactgctctatttcccgacccgcatggatccggcgctgaactcgcttgctgaaagcgcgccgcgcggcgagacgctgactatcctggtggggaattccggcgaccgcagcaacgagcatatcgccgcgctgcgcgcgattcatcagcagtttggcgatacggtcaacgttgtcgtgccgatgggttatccggccaataatagcgactacatcaatgaagttcgcgcggccggcgaggcgctgttcagcccgccgcatcttcaggtactgggcgataagctggcgtttgatgactatctggccctgctgcgccgctgcgatcttggctacttcctgtttgcccgccagcaggggatcggcacgctgtgtctgctgattcaggcggggatcccctgcgtactgaaccgggagaatcccttctggcaggatatgtcggagcagcatattccggtactctttaccagcgatacgctggacgcggccgtggtgcgtgaagcgcagcgccagctggccggcgtggataagaatcagattgcctttttccgtcctaattacctgacgggctggcgacgggcgttgcggattgccgcgggggtggatgcatga

SEQ ID NO: 255744 - DNA, 1251 bp, Klebsiella pneumoniae
atgtcgctggctaaagcttctctgtggaccgcagcgtccacgctggtcaaaatcggcgccggtctgctggtagttaaactgctggcggtgtcgttcggcccggcaggcgtggggcaagcgggcaacttccgccagctggtgaccgtgcttggcgtgctggcgggggccggaatctttaacggcgtcacgaagctggtagcccagcatcatgacgatcgccggcagttgcacaacgtcgtcggcaccgcttcagcgatggtgctggggttctccaccctgctggcgctgatattcctgctggcggcggcgccgataagccagggtctgttcggtcatcagcattatcagaatctggtacggctggtagcgctggtacagatgggcattgcctgggcgaacttcctgttagcgctgatgaaggggtttcgcgatgcggcgggcaatgcgctgtcgcttatcgccgggagcctgattggcgtggcggcgtactatgcctgctaccgtttcggcggctatcagggcgcattgctgggactggcgctggtacctgcgctggtggtcgtgccggcggctatcgtactgtggcgacgcggcaatattccgctgagcgcgctgcgtccgcgctgggacaacggcctcgcagggcagctgtcgaaatttaccctgatggcgctgattacttcggtgacgctgccggtagcctacgtgatgatgcgtaacctgctggcggcccactatggctgggacgcggtggggatctggcagggggtaagcagcatctccgatgcctatttacagtttattaccgcatcatttagcgtttatctgttaccgacattgtcccgcttgacggcgaaagcggatatcacccgtgagattggcaaatcgttaaaatttgttctcccggcggtagctgcagccagcctgaccgtatggctgctgcgcgatttcgctatctggctgctgttttccgaccgctttacggcaatgcgcgatctgtttgcctggcagctggtgggcgatgtgctgaaggtcggggcatatgtttatggctatctggtgatcgccaaagcctcgctgcgtttttatattctgacggaaatcagccagttcacgctgttgaccgcattctcgcactggcttataccggcgcacggcgcaatcggcgcggcgcaggcgtatatggctacttatattgtttatttcgccctctgtagcggcgtgtttttactttggcgtaaacgggcatga

SEQ ID NO: 255745 - DNA, 1131 bp, Klebsiella pneumoniae
atgattccatttaacgcgccgccggtggtgggaaccgagcttgattatatgcagtccgcgatgggaagcggcaagctgtgcggcgatggcggttttacccgccgctgccagcagtggatggagcagcgcttcggtactgccaaagccctgctgacgccgtcctgcaccgcttcgctggaaatggcggcgctgctgctggatatccagccgggcgatgaagtgattatgccgagctataccttcgtctccaccgccaacgcctttgtgctgcgtggcgcaaaaatcgtcttcgttgatattcgtcgcgacaccatgaatattgatgaaacgctgattgaagcggcgatcaccgacaaaacccgcgcgattgtgccggtccactacgccggcgtggcctgcgaaatggacaccattatggctatcgccagcaaacataatctgtttgtcgtggaagatgccgctcagggcgtgatgtcgacctataaaggccgggcgctcggtactatcggccatattggctgcttcagcttccatgaaaccaaaaactacaccgcgggcggtgaaggcggcgcgacgctgattaacgatcgcaagctggtagagcgcgcggagatcattcgagaaaaaggcaccaaccgcagccagtttttccgtggtctggtggataaatacacctggcgcgatatcggctccagctacctgatgtccgatttacaggcggcctatctgtgggcgcagctggaagcggcggagcgaattaaccagcagcgcctggcgctgtggcagaactactacgaggccctgctgccgctggcgcgcgccgggcgtatcgagctgccgatcgtgcctgccgactgcgggcacaatgcgcatatgttctacatcaagctgcgcgatattgacgatcgcagtaagctgattgcctggctgaaagaggcggagattctggccgtgttccactatattccgctgcatagctgcccggccggggagaacttcggcgtgttccacgggacggatcgcttcacgactcaggagagcgaacgcctgctgcgtttgccgttattctacaacctgtcgagcgtaaaccagcgcacggtgattaactcgctgctgagctatttctcctga

SEQ ID NO: 255746 - DNA, 675 bp, Klebsiella pneumoniae
gtgcccgcccgcgccagtattgagtccctggagtgggagaaccgcttcttcggcgtcaatagcgctatcctgcgctttggcgatgatgcgccgccgctgacggtggacgcgctggcgaactggtcgcgggtacaggcgaaagttgcggcggatgataccgcacgcctggatgcgctgcaggcattgggcttccgactggtggagggcgaggtcgatctcgcgctttcgccagccgcttatggtgatagtggcgccgagccggcgaccgaggcggatattccccggctgcgtgaactggcagcgctggcctttgcgcagagccgtttccgcgcgccctggtacgcagccgatgccagcggccgtttctatgcccagtggattgaaaatgcggtgcgcggcaccttcgatcatcagtgtctggtgtttcgcgcccctggcggcgatatccgcgcgtttgtctccctgcgccagctcagcgcgcacgaggcaaggattggcctgctggccggacgcggagccggagcggaattaatgcaggcagctcagggctggaccgcgctgcgcgggctgaagacactgcgggtggcgacccagatgggcaacaccgccgcgcttaaacgttacattcttagcggtgcgaatgtcgaaagcaccgcgtactggttatacaggtga

SEQ ID NO: 255747 - DNA, 882 bp, Klebsiella pneumoniae; identical to SEQ ID NO: 176515

SEQ ID NO: 255748 - DNA, 1074 bp, Klebsiella pneumoniae
atggcggtgagaacgattctggtcaccggcggcgccggttttatcggttctgcggtggtgcgtgaaatcatcactgcaaccagcgataacgtggtggtggttgataagctgacctacgcggggaatctgatgtcgctggcgcctgtcgccggggatccgcgttttgcttttgaacaggtggatatctgcgatcgcgctgaactggaccgggtatttcgccactatcagcccgatacggtgatgcatctggccgctgaaagccacgttgaccgctctattgacggcccggcggcgtttatcgaaaccaacattgtcggtacctggacgctgctggaagcggccagggcctggtggaatacgctggcgaacgataaaaaatccgcctttcgtttccaccacatctcaacggatgaggtctatggcgatctgcacgacagcggcgcgttttttaccgaaaccacgccctatgcgcccagcagcccctattcggcgtcgaaagccagcagcgatcatctggtgcgcgcctggaagagaacctatggcctgccgacgctggtcaccaactgctcgaataactacggaccgtatcattttccggaaaaactgatcccgctgactatcctgaacgcgctggcgggtaaaccgctgccggtttatggcaacgggcagcagatccgcgactggctgtacgttgaagatcacgccagggcgctctatcgggtggcaacgagcggtgagccgggcgaaacttacaatatcggcggccataacgagcggaaaaatattgaggtagtggaaaccatttgcgatctgctggaagagctggcgccgcgcaaaccggaaggccttgcgcgctatcgcgatctcatcacctttgttgccgatcgtcccggccacgacctgcgctacgctattgatgcggcgaaaatagcgcgtgaactgggctggacgccggccgaaacgttcaccagcgggatgcgcaaaaccgttgcgtggtacctggctaatgaagcctggtggcagcaggtgctggacggcagctatcagggtgaacgcctggggctgcaagcctga

SEQ ID NO: 255749 - DNA, 1263 bp, Klebsiella pneumoniae
atgaatttttctaccatttcagtgattggccttggatatattggcctgccaaccgctgccgcgttcgcctcccggcaaaagcgggtggtcggcgttgatgtcaatcaacacgccgtggagaccattaaccgtggtgaaattcatatcgtggagccggatctggcgagcgtcgttaaaacggcggtcgagcagggctatctgagcgccaccaccgcgccagtagaagctgacgcctatctgattgcggtgccgacgccgtttaaagacctgcacgaaccggatatggttttcgtcgagtcggcggctaaatctatcgcgccgacgctgaagaaaggttcgctggttatcctcgagtccacttcgccggtaggttcaaccgaacagatggcggactggctggcggaaatgcgccccgatttgagcttcccgcagcaggctggcgaagcggcggacgtgaatatcgcctactgcccggagcgcgttttgccgggtcaggtcatgattgagctgatcaaaaacgatcgcgtgatcgggggtatgtcgccggtttgctcagcccgcgccagcgagctgtataaaattttcctcgaaggcgaatgtgtggtgactaactctcgcaccgccgaaatgtgcaagctgacagaaaacagcttccgcgacgttaatatcgcttttgccaatgaactttcgctgatttgcgccgatcaggggattaacgtctgggaactgattcgcctggcgaatcgccatccgcgcgtgaacattctccagcccggtccgggcgttggcggtcactgcatcgcggtcgacccgtggtttatcgtggcgcaaaacccgcagcaggcgcggcttatccgtaccgcgcgtgaagttaacgaccataaaccagagtgggtgatcgatgaagttaaagcgcgggtcgccgactgtcttgccgccagcaacaaacgcgccagcgagataaaaatcgcctgctttggcctggcgtttaagccgaatattgatgatctgcgcgaaagcccggccatggccattgccgcacaaatcgcccgctggcacggcggcgaaaccctggttgttgagccgaatatccaccagttgccgaagaagcttgatggcctgtgcgctctggcgttgctcgacgaagcgctggcgagcgccgatgtgctggtgatgctggtcgatcataaagaatttaaagcgattagcggggatagcgtcagccagcagtttatcgtcgataccaaaggggtatggcggtga

SEQ ID NO: 255750 - DNA, 1131 bp, Klebsiella pneumoniae
gtgaaagtactaacggtatttggcacgagaccagaagccatcaaaatggcgcctctggttcatgcgctggcaagggatcctcattttgaggcgaaagtttgcgtgaccgcgcagcatcgggagatgctcgatcaggtgttgaaacttttttctattgttccggactacgaccttaacatcatgcagccgggtcaggggttgacggagattacctgccgcatccttgagggcttaaagccggtgctggagtcgtttaagccagatgtggtgctggtgcatggcgataccaccacgacgatggcggcaagccttgccgctttctatcagcgcattccggtggggcacgtggaagccggactgcgcacgggcgatctgagctcgccgtggccggaagaagggaaccgcacgttgaccgggcatctggcaacgtaccattttgcgccgacggaaacctcgcggcagaacctgctgcgggaaaatattgccgataaccggatcacgataaccggcaatacggttattgatgcgctgttttgggtgcgcgatcgggtactgagcgatgaagcgctgcgtaacgagctgactcagcgttatccttttctcgccaacggtaagaagatgattctggtcaccgggcatcgtcgggaaagctttggccgcggttttgagcaaatctgtcacgcgctggcagagatcgctgccaataacccggacgtacagattgtctatccggtgcatctgaacccgaacgtcagcgaaccggttaaccgtattctcggccacgttgagaacgtcatgcttattgagccgcaggattatctgccgttcgtctggctgatgaatcgcgcgtggttgattctgaccgattccggcggtatccaggaagaggcgccatcgctcggcaaaccggtgctggtaatgcgcgaaatgaccgagcgtccggaagcggtcagcgcgggaaccgtatgcctggtgggtaccgacagccagcgcatcgtcaatgaagtcacgcgcttgctgcatgatgagtccgcctggcaggccatgagccgggcgcataacccgtacggcgatggacaagcgtgtcatcgtattttgtctgcacttaaaaataatcaggtaacgctatga

SEQ ID NO: 255751 - DNA, 1017 bp, Klebsiella pneumoniae
gtgaacgttgagaatgagctggatattcgcgggctgtttcgcgccctgtgggcaggaaaaagctggatagcaggtttcgcggtgctctttgcactgattgttctggtctataccttctttgctcgccaggagtggagcgcgacggcaattaccgaccggccgacggtgaacatgctgggcgggtactattcgcaacagcagtttttacgcaatctcgatatcaaggccaatctcgtctcggtcgatcaaccttcggtaatggatgaagcgtataaagagttcattatgcagcaggcgtcatgggatacccgccgcgatttctggctgcaaacggactactacaagcagcgccagtcgggtaacgcccgcgccgatgccgctttgctggacgatctgattaacgacattcagtttatgcccggcgatgcgctcaaaagcgttaacgacagcgtgaagctgacggcggaaaccgccccggatgccaataatctgctgcgtcagtatgtcgccttcgccagccagcgcgcggcgggtcacctgaatgacgagcttaagggcgcctgggccgcgcgaaccgtgcagatgaaagcgcaggttaagcgccaggaagaggtggcgcgcgaaattttcaatcgccgcatgcatagtgtggagcaggcgctgaaagtcgcccagcagcacaatatttcccgcagcgaaaccgatattccaccagaccagctgccggattccgaactgtttttactgggtcggccgatgctgcaggcccggctggaaaatctgcaggcggtcgggccgcagtacgatcttgattatgaccaaagccgcgccatgttaacgacgttaaacgtgggaccgaccctggacccgcgttttcagacttacaggtatttgcgaacgcctgaagaaccggtaaaacgcgatagcccgcgccgcgcgtttctgatggtgatgtgggggattgtgggcgcgctcatcggcgcaggcgttgcgttaacgcgtcgccgtgtccagtga

SEQ ID NO: 255752 - DNA, 1095 bp, Klebsiella pneumoniae
gtgaatttactcactgctattactgaattaatcagtattttcttattcaccaccctgtttatatttgtcgcccgcaaggcggcaaaaagagttgggcttgtggataaacctaactatcgtaaacggcatcagggtttgattccgttagtcggtggtatttcagttttcgcaggtatttgttttacgtttgccatcgccgattattacattccccacgcaaagttatacctggggtgtgccggggtgcttgtgctggtcggcgcgttagacgaccgctttgatatcagcgtaaaaattcgcgcggtaattcaggccgccatcgccgtcattatgatgatggtgggaaatcttcatctaagtagcctcggctttatatttggctcatgggagctggtgctcggcccctttggcttcttcctcacgcttttcgccgtttgggccgcgatcaacgccttcaatatggttgatggcatcgatggcctgctgggcggcctctcctccgtctcttttgcggcaaccggtatcattctgtggtttgatggccagtacagcctggcaatgtggtgttttgcgatgattgccgccattttgccctatattttacttaacctcggggcgcttggccgtcgctataaagtctttatgggtgacgccggcagcaccatgattggcttcactatcatctggatcctgctggagaccacgcagggaaagacgcatcccattagccctgtcactgcgctatggattattgcgatcccgttgatggatatggtggcgattatgtaccgccgcctgcgtaaaggaatgagtccgttctccccggaccgtcagcatattcatcacttgatcatgcgcgccgggtttacttcccgccaggcattcgtgctgatcaccctggccgccgcgctgctggcgctggttggggtggcagcggaatacacccgtattgttcctgaatgggtgatgttaatactctttttggtggccttctttctttatggctactgtattaaacgcgcctggaaagtggcgcgcatggttaagcgcattagacgcagaatacggcgacacagcggcaataatccaaattaa

SEQ ID NO: 255753 - DNA, 924 bp, Klebsiella pneumoniae
ttgttgaaagttaacgaagttaactacgataagccggaaaacgcccgtaacaagattctgtttgagaacttaaccccgctgcacgcaaattcacgtctgcgtatggaacgcggtaatggctcaacggaagacttaaccgctcgcgtgctggatctggcatcgccgatcggccgcggtcagcgtggtctgattgttgcgccgccgaaggcgggtaaaaccatgctgctgcagaatattgcgcagagcattgcgtacaaccatcctgattgcgtgctgatggtactgctgatcgacgaacgtccggaagaagtgaccgagatgcagcgtctggttaaaggcgaagtggttgcttctacctttgacgaaccggcctctcgccacgttcaggttgccgaaatggttatcgagaaggcgaagcgtctggttgaacacaagaaagacgttatcatcctcctcgactcgattacccgtctggcgcgcgcctacaacaccgtagttccggcttccggtaaagtgttgaccggtggtgtggacgccaacgccctgcatcgtccgaagcgtttcttcggcgccgcgcgtaacgtggaagagggcggtagcctgaccatcatcgcaacagcgctgatcgataccggttctaaaatggacgaagttatctacgaagagtttaaaggcaccggtaacatggagcttcacctctcacgtaagatcgctgagaaacgcgtcttcccggctatcgactacaaccgttccggtacccgtaaagaagagctgctcaccactcaggaagagctgcagaagatgtggatcctgcgtaaaatcattcacccgatgggtgaaatcgacgcgatggaattcctcatcaataaactggcgatgaccaaaactaacgacgacttcttcgatatgatgaagcgctcgtaa

SEQ ID NO: 255754 - DNA, 909 bp, Klebsiella pneumoniae
atgcatctcgtccccgtcggggacgcccatccagccgaccagcaggcggcggccatcgtcggcctgcatggtctgcggcgcgtagaactcaaatccgctgtccagctcgtgcagcgggccgtggtcgaagatcccgcgttcggcgtcgaagcggcctgccatccacaccgccggataggtattgagaaagcgctgcgcttcgcgggccagcccctgcgggcagcagatcagcaggtgggtgtccgccagcggaaagagatccgggcactcccacatgtagccggcgttcgccaggccgttcacgtcgtgcccggcgatctcgcccaccaggcgccactcccgcaggtcgctggcggtaaacagcagcactttgccgcgctgttgcacatcctgcgccccaagaaccatgtaccagcgcccgtcctgccgccacactttagggtcgcgcacatggccggtatagccttctggcagcggcagcaccggccccagcttgcggaaggtgccatcggcattctcggtcgccagacattgccaggcggtgcgcccgccgtcggggaatttcacgttgccggtgtagcacagagtcagggcgccctcgaactcgaccgcgctgccagagtagcagccgttgcggtcatactcttcatccggcatcagggcgataggttcgtgccgccagtgcagcagatcggcagagctccagtgtccccagcacttataggtatggtcgcaggcgagcgggttccactgataaaacaggtggtaacgcccggcgacctggcaaaagccgttaggatcgttcagcagtccgttgaccggcgccagatgccattgcggataatggctgtcggccagcgcctgcggctggccctgcataacggcctgcaggatcgcaggcaggcgtga

SEQ ID NO: 255755 - DNA, 822 bp, Klebsiella pneumoniae
atggagcgtggtaacggttctaccgaagacttaaccgctcgcgtactggatctggcctccccgattggccgcggccagcgtggcctcatcgtcgcgccgccgaaagccggtaaaaccatgctgctgcagaacatcgcgcagagcatcgcatacaaccacccggactgtgtcctgatggtactgctgatcgacgaacgtccggaagaagtgaccgagatgcagcgtctggtgaaaggtgaagtggttgcttccacctttgacgagccggcatcccgtcacgtgcaggttgccgagatggttattgagaaagcgaaacgtctggttgaacacaagaaagacgttatcatcctgctcgactctattacccgtctggcgcgtgcctacaacaccgtggttccggcttccggtaaagtgttgaccggtggtgtggacgccaacgccctgcaccgtccgaagcgtttctttggtgcggcacgtaacgtcgaggagggcggtagtctgaccatcatcgccacggcgctgatcgacaccggttccaaaatggacgaagttatctacgaagagtttaaaggcaccggtaatatggaactgcacctctctcgtaagattgctgaaaaacgcgtcttcccggctatcgactacaaccgttccggtacccgtaaagaagagctgcttaccactcaggaagagctgcagaaaatgtggatcctgcgcaaaattatccatccgatgggtgagattgatgcgatggaattcctcatcaataagctggcaatgaccaagacgaatgatgacttcttcgatatgatgaagcgctcgtaa

SEQ ID NO: 255756 - DNA, 438 bp, Klebsiella pneumoniae
gtggtcagcactatttttcatcacccggcatcacaacggcacgccgcatggctggcgctgtttgcgatcctgctgatcgtggtggcgccgctgatctctgtcgcgctgcaaaaagatccgatgagcggtatgcaccatttaacgatggaaatgacggaagagatgccatcacatcagatgcccatgatgcatactgacgcctcgattgcggaacacgcgcacagcatgccggtcgatcatgctgaagcctgcggctactgcgtactattagcccacgtgccagggatgatttttgcgctggtactgctgatcagcctggtgcttcgacgctatagcgcaccggttttccgtccggaacggaaacactggcactactttccctggctttaccctcatacccgcgctccgccgcaacagtctgcttgcttccttaactaa

SEQ ID NO: 255757 - DNA, 483 bp, Klebsiella pneumoniae; identical to SEQ ID NO: 173514

SEQ ID NO: 255758 - DNA, 1224 bp, Klebsiella pneumoniae
atgaataaggatttttctcaggccccgcgccccacatttaaaagagcgctacgccgtatcagcatgataagcgttgttatctctatgacactggtctggctattgctctgcgccgcttccatattcacactcaagcaatacgcacaaaaaaatctggagctcaccgccgccacgatgggccgtagtctggaagccgcgctggtctttggcgatagcgcggcggctgaagataccctggccacgctgggcaagcagggacagttttcgcaggcaatcctggtcgacggtcggcagaagccctttgcctcatggcataacgatggcctggccaggcaggataaagtcagcgacgttatcagcaaatggctattcccggaacccacggtacaacctatcctgcaccaggggaaagttatcggtgaacttcgtctgaccgcgctggacaggctgataagctatttcctcggtatctcaattattgtgctaaccggcagcatttttctcgcctcatgcattgcattgctgcttacccactcgctgcatcgcggcatcgtggctgcgctgcagagtattaccgaggtagttcatgatatccgcgaaaatcgccatttctctcgtcgggtccccgaagagcgtattgaagagtttcacctctttgcccaggactttaatagtctgctgggcgagatggaggactggcagcggcagcttcaggctaaaaatgcccagcttctgcgtagctccttgcacgatccgttgaccggcctggctaacagagccgctttccgcaacgttattaatgcgttgatgaaagacgaaaccgtccatggtagttctgcgctgctttttcttgacggcgataatttcaagctcattaacgataactggggccatgctgccggcgacaaggtgttaattgaggtcgccagccgcctgatggcctttgtcggcaaacagcaccaggcgtggcgtctcggcggcgatgaatttgccattctgctgcgcaatgttcatacagaggctgaagttcaggcactctgcagcgcattgtcggaacagtttatcccgccgtttaatctccacaacggccacaccgtcaggctgtcgctgagtattggttacgcgttaacctgggaacatgcctccgcggaaaatctgcaagaacttgccgaccaaaatatgtatcggatgaaacaccagcgcttacagcgaacgcaaaaataa

SEQ ID NO: 255759 - DNA, 510 bp, Klebsiella pneumoniae; identical to SEQ ID NO: 173512

SEQ ID NO: 255760 - DNA, 1071 bp, Klebsiella pneumoniae
atgcaaaaagacgcgctgaataacgtacatattactgacgaacaggttttgatcacgccggatcagttgaaagctgaattccctctgagcgttgagcaggaagcgcagatcgcgcagtctcgtcagaccatctctgacatcatcgccggtcgcgatccgcgcctgttggtggtatgtggtccttgttcgattcacgatcctgaaaccgccattgagtacgctcgtcgttttaaagcccttgccgaagaggtcagcgatagcctctatctggtcatgcgcgtctattttgagaaaccccgcaccaccgttggctggaaagggctgattaacgatccgcatatggatggttcgtttgatgtagaaggcggcttgaagattgcgcgtcgtctgctggttgagctggtcaatatggggctgccgttagcgacggaagcgttggatcctaacagtcctcaatacctcggcgatctgtttagctggtccgccatcggcgcgcgtacgacggaatctcagactcaccgcgagatggcctccgggttgtcgatgccggtcggttttaaaaacggcaccgatggcagccttgcaacggcaattaacgccatgcgcgctgccgcaatgccgcaccgcttcgtcggtattaaccaggccggtcaggtgtgtctgctgcaaacgcagggcaatccaaacggacacgtcattctgcgtggcggtaaagcgcccaactacggcccggaagatgtcgcgaagtgcgaaaaagagatgactcaggcgggactgaaaccctctctgatggtagattgcagccatgggaattctaataaagactaccgccgccagcctgcggttgctgaatccgtcgtcgcgcagattaaagatggtaatcgttccattattggtctgatgattgagagcaatatccacgaaggaaaccagtcctctgagcagccgcgttgcgatatgaaatacggtgtctccgtgaccgatgcctgcattagttgggaaaccaccgatgcgttgctccgcgaacttgataaggatctgcgaggccatctggcggctcgtctggcgtaa

SEQ ID NO: 255761 - DNA, 1122 bp, Klebsiella pneumoniae; identical to SEQ ID NO: 173510

SEQ ID NO: 255762 - DNA, 873 bp, Klebsiella pneumoniae; identical to SEQ ID NO: 173509

SEQ ID NO: 255763 - DNA, 1161 bp, Klebsiella pneumoniae; identical to SEQ ID NO: 173508

SEQ ID NO: 255764 - DNA, 336 bp, Klebsiella pneumoniae; identical to SEQ ID NO: 173507

SEQ ID NO: 255765 - DNA, 738 bp, Klebsiella pneumoniae; identical to SEQ ID NO: 173506

SEQ ID NO: 255766 - DNA, 981 bp, Klebsiella pneumoniae
atggcacaacgagtacaactcaacgcaacggtgtccgaaaatcaactcggacaacgcttagatcaggctttggccgaattgttcccggattattcgcgttcgcgcataaaagaatggatccttgaccagagagtgctggtaaacggcagcgtcagcgacaagccgaaagagaaagttctgggaggggagacgattgctatcgatgttgaaatcgaagaagaagttcgtttccaggcacaggatattccgctcaatatcgtttatgaagatgatgacatcctcgtaattaataaaccgcgcgatttagttgtgcatcctggcgcgggcaaccctgacggtactgtgctgaatgcgctgttgcactactatccggccattgctgacgtgccgcgtgcggggattgtgcaccgtcttgataaagacaccaccggtttgatggtggtcgcgaagactatcccggcgcaaacccgactggtggagtccctgcagctgcgcgaaatcacccgcgagtatgaggcggtggcgattggtcatatgacggctggcggaacggttgaagaaccgattagccgccacccgaccaagcgtacgcatatggcggtacatcccatgggaaaaccggcggtaacacactaccggattatggagcattttcgcatccatactcggctgcgtttgcgcctggaaaccggccgtacgcaccagattcgcgtacatatggcgcacattactcacccgctggtgggcgatcaggtctacggcggtcgcccgcgtccgcccaaaggggcatccgaagagttcatcgctgccctgcggaagttcgatcgtcaggcgctgcatgccaccatgctacgcttataccatccgatcagcggaattgagatggaatggcatgcgccaattccacaggacatggtggatttgattgatgccatgcgcgcggattttgaagcccataaagacgacatcgactggctatga

SEQ ID NO: 255767 - DNA, 732 bp, Klebsiella pneumoniae
atgactaaactgattgtaccgcaatggccgatgccggaaggcgtggctgcctgtagttccacgcgcgttggcggggtaagtttatcgccatacgattcacttaatctcggcgcccattgtggagacaatctacagcacgtagaagagaaccgtcggcgtatgttcgccgctggcggcctgccgtcatatccggtatggctggagcaggttcacggtacggcagttttgcgactcgatggcggaccgtacgagtcaaagcgagcggatgcttcgtactgcaatgtgccggggacggtctgcgcggtgatgaccgctgactgcctgccggtgcttttttgtaaccgcgcgggtactgaagttgcggctgcgcatgccggttggcgagggctgtgcgaaggcgtactggaagaaaccatcgcctgtttcgccgataaaccggaaaatatcatggcctggcttgggcctgccattgggccggatgcgtttgaggtcggcccggaagtgcgggaagcttttatggcaaaagatgccctggcggaacgtgcatttcgtcccgcgggtgaaaaatattttgctgatatttatcaactggctcgtcagcgtctggcgggcgttggcgttgagcagatttacggcggtgatcgctgtaccctcagcgaaaaggatgattttttctcttatcgccgcgacaagatgacgggtcgtatggcaagtttcatctggctgatataa

SEQ ID NO: 255768 - DNA, 2574 bp, Klebsiella pneumoniae
atgcgtctggatcgtcttaccaataaattccagcttgctcttgccgatgcccagtcccttgcgcttgggcacgacaaccaattcatcgaacctcttcatcttatgagcgccttgctgaatcaggaagggggatcggtacgtcctttattaacttcggctggcatcaacgccggagagctacgcacgaatattgaacaggcgctaagccgtttgccgcaggtggaaggtaccggtggtgatgttcaaccgtcccaggacttagtgcgtattctgaacctttgcgacaagctggcgcaaaagagaaaggacaactttatttcgtcagaactattcgttctggctgcgcttgaatcacgcggtacgctgaccgaccttttaaaatctgccggagcaacaaccgccaacgtgagtcaggcgattgaacaaatgcgcggaggtgaaagcgtgaacgatcagggtgccgaagatcaacgtcaggcattgaaaaaatttaccgtcgatctgaccgagcgtgccgagcagggcaagcttgacccggtcatcggtcgtgatgaagaaattcgtcgtacgattcaggttctgcagcgtcgtaccaaaaataacccggtgctcatcggtgagcctggcgtaggtaaaacggccattgttgaggggctggcgcagcggatcgttaacggcgaggtgccggaagggctgaagggccgtcgagttctggcgctggatatgggcgcgctggtggcgggtgccaaataccgcggtgagtttgaagaacgcttaaaaggcgtactgaacgatctcgctaagcaggaaggtaacgttatcctgtttatcgatgagctgcacacgatggtgggggcaggtaaagcagacggtgcaatggatgccggcaacatgctgaaaccggcgctggcgcgcggtgaactgcactgcgtgggtgccacaacgctggatgaataccggcagtatattgagaaagatgccgctctggaacgtcgtttccagaaagtattcgtggcggagccgactgttgaggataccattgcgattttgcgtggtctgaaagaacggtatgaactgcaccatcacgtgcagatcaccgacccggcgattgtggcggcagccacgctgtcccatcgttatattgccgatcgacagctgccggataaagccatcgacctgatcgatgaagccgcttccagcattcggatgcagattgactcaaaaccggaagagctggaccggctcgaccgccgtatcatccagctcaagctggagcagcaggcgctgaagaaagagtctgatgacgccagtattaagcgactggatatgctaaatgaggaactggcggataaagaacgtcagtactcagaattagaggaagagtggaaggctgaaaaagcctcgctttccggcactcagaccattaaggctgaactggaacaggctaaaatcgccattgagcaggcgcgtcgcgtcggcgatctggcgcgaatgtccgagctccagtatggcaagatccctgagctggaaaaacagctggcggcggcaacgcagtctgaaggcaaaacgatgcgcctgctgcgtaacaaagtaacggatgccgaaatcgcggaagtgctggctcgctggacgggtattccggtggccagaatgcttgaaggtgaacgtgagaaactgctgcgtatggagcaggatttgcatagccgcgttattggtcagaacgaagcggtggaagcagtatctaacgcgattcgccgtagccgtgctggtttatccgatcctaacaggccgattggctcgttcctgttccttgggcctaccggggtgggtaaaacagaactctgtaaagctctggccaactttatgttcgatagcgacgatgcaatggtacgtatcgacatgtcagagtttatggagaaacattccgtttcacgtctggttggggcgcctccgggatacgtgggctatgaagaaggcggctatctgaccgaggcggtccgtcgtcgtccttattctgtcatcctgctggatgaagtggaaaaagcgcacccggatgtctttaacattctgctgcaggtgctggatgatggacgtttgaccgatgggcaggggagaacggtcgacttccgtaatacggtggtcatcatgacttctaaccttggctccgaccttattcaggaacgctttggggcactggattatggccatatgaaggagatggtgctgggcgtggttagtcaaagcttccgtccagagtttatcaaccgtattgacgaagtggttgtcttccatccgctgggtgaaaaacatattgcttctatcgcgcagattcagctgcagcggttgtataaacgacttgaggaacgcggctacgaagtctacatgtctgatgaagcgctgaaattgctgagcgaaaatggatacgatcctgtttatggcgcacgtcctctgaaacgtgctatccagcaacagatcgaaaacccgctggcgcagcagatcctctccggtgaattgattccgggtaaagcagtgcaattggttgtgaaagatgaccggatagtggcagtgcagtaa

SEQ ID NO: 255769 - DNA, 552 bp, Klebsiella pneumoniae
atgaaattcaccgaaggcgcgtttaaagactggggctaccagctggcacgcgaagagttcggcggtgagctgattgacggcggcccgtggatgaagatcaaaaacccgaacaccgggaaagagattgtcgttaaagacgttatcgccgacgccttcctgcagcagatcctgctgcgtccggcggagtacgatgtcatcgcctgtatgaacctgaacggtgactatatttctgacgccctggcggcgcaggttggcggtatcggtattgccccgggtgcaaacatcggtgacgagtgcgcgctgtttgaagcgacccacggtactgcgccgaaatatgccggccaggataaagtgaacccaggttccatcatcctgtccgccgaaatgatgctgcgccacatgcagtggttcgaagccgcagatctgatcgttaaaggcaccgaaggcgctatcgccgccaagaccgtgacctatgactttgaacgtctgatggaaggcgctaagctgctgaaatgttcagagtttggcgacgcgatcatcgcgaacatgtaa

SEQ ID NO: 255770 - DNA, 339 bp, Klebsiella pneumoniae
atgtttttaaggtttacgctgttctacctactttttatccccttgcagacttttgcgcttaattactcttcaacctttttaaggctcaattgcccgcagagaggcctcgtggaggtcattttgcatgtttacgatcatactcaggaaaaatggcagaataattttgagaccggcgcagggcacaaacgctcaggcaacatggaactgatcccctttgccaacggggatattctcttccactcggtgtcaacagatgcatttagctatctctacagcggcgaagagaagctttaccgctgtttaaaattggatgaaagaccgctatacccttccttttaa

SEQ ID NO: 255771 - DNA, 1770 bp, Klebsiella pneumoniae
atgaccaattgggcctacgggatcaccgtcgccctgaccctcgcctcaggcatggcaatgctgatggcctcaagtgcggataatgctgaacgccgcgccgtcgaacaacgtcaggtgttcgaccagttgagtgaagaagtcgaaagcggcgcctgggagctttccgatctggcgcggctctatatcatccaaaaaaatcaggatgtgctacgcgaataccggcagcaggcgcagaccattgccgccattgaacaccggctggttaaactcaaagataatggcgcaaccgctgaagaactggcgctgctgcgggagggtttacagattgccgatgaactccaggatgagcagcaggcggcgctggcgcaggttgcccggggggaagaaaaagcggcggtaagcctgctttacggcgcggcctacgagcaggagcttgagcgggtacaaactcagcttgaccactttcgcctgctgctcgaaggccgggtgaataaaatcatcgctcaggccacggagaaatcacgtatctggcgtacgctctctgaagtcatggttggcctcaccgccctgatgtttctgtttgtgctgggatttatccttaagcggcgggtgctctatcccgtcgtccgtctgagcgatgtggtacagcggctggcatcgcaggattatgcggtcgagacgccgcagttcacccagatagatgaaattggcgatatggcccaggcgattcgtatctttcgcgagaacgggctggcgcggcagcggctggaacaagagcgcgatgccgactgggccgtccgcgagctgctggcgcggatgacccagcgtctgcagggctgcgaatcattcgaggatgtgatcaaggtggccgagcgctttgcccccagcatcgccccgcagatccccggccgactctatatcctcgacaccgatccctggcagatgcgctgcgttgcgcagtggctttctccgccgcaggaaacggatgtatttcatcccgataactgctgggccgttcggcgcgggctgagtcatcctccggttaacggcgagccggatatcgcctgttaccacctgactgaaccacaggccaatcagtcgctatgcgtgccgctgattgcgcaaggagaagcgattggcctgctctccttcagcaacgtcaccgccgcaaccgcgccttcccgcgcctatcttgaactgatggccgaagcgctgggtctggcgctggcgaatcaacgtttacgcaacgcgctgctggaaaaggcgctgttcgattcattaaccggcctgcgcaaccgtcaccatctggatgatgctctgcatactcaaatgaatctggcggttcgcaacggtacgccgctgagctgcctgatgatcgatatcgatcacttcaaggcaattaacgataattacggccacgaagcgggcgatctggtcattaaaaacgtcgccgcaattatacagcgtgcggtgcgtgatatcgggatggccttccgctacggaggcgaagagttcctggtgctgctgggcggaacccatgaagaggcggcaatggcctgcgcgaccgagatctatcacagcgttcagcgtctgactttgcgctatggccttgctgagattggtcagatcaacgtctccatcggcatcgccagctacccgcagcatacgcatagcgacagcctgctgcgcgcggcagacgctgcgctctaccgggcaaaagagttgggccggtcaagaattgtgagctttgggatgttgaaggcggattga

SEQ ID NO: 255772 - DNA, 1188 bp, Klebsiella pneumoniae
atgcgtatcgccttaaaatcagcattgatgctaacaacccgcgttatacaaatcattaatcctgaactgcagctgcatatgcagcgaacggcgctgatcgcactggagctggcgcaggcatcagggctttcgcgcccgcagcagcaaacggtcttttgcgccgcgctgctgcacgatattggcgttctgggtgacaaaagggccttctcctccctgaacgctatcgataatctcaatgacccccatcagcatcggggagcagaaatgctggccggattaaccaccctggccccaatcctgccgattattcgcgatcatcattttagcccacaccacaggggcagcctcgaacagcatatcgtctattttgccgatgtttttgagcgcctgctggccagtgataaaggcggttcggcttatcaacccgatattattattacgcaatttcgtacgctctatcaggcgattgacccgtcgctgtgtcagaccttgtgccagctcgcacaaaaagagcatttctggctgcatcttaatcctggacatattcagcgaatgctggaaattatcggcccaattaacgatgtctatatgggtattgatggcctgaaagatatctgtctgttaatcgccaacattgtcgatacctacagtagctttaccgccagccatagcctgaaggttggacaaatttcgcgcgcccttgccgcctggatgaatcagccggagctggagtgccggaagattgaaattgccggctatttgcacgatatcggtaaagtctacataccgctggccatcctcgagaaacagggcgagctcaatgacgaagagctgctgcaggttcgggaacacagctatatgaccggcgaaattcttagcgcatttagcgaactcggcgatatcgtgaactgggcggccaatcatcatgaaaaactggatggcagcggttatcctctgcatctgagtggcgattacctgcagctggcagatcgcatcatcgccatcgcggatattttcaccgctcttaccgaagaccgcccttatcgccccggaatgagccgtcagcaagcgttacggctgattgagtgtgatgtgacaaacggcgcgctggataaagacgtttaccgcgttttacatcagcatgccgaagcgctgcacgctattattactcacacgctgccctcttaa

SEQ ID NO: 255773 - DNA, 1044 bp, Klebsiella pneumoniae
atgaattttagagcattactgaccattgcgttactgtcgataagtgctttcgcgttcagcgacacgcgtctgccgcatattgtgatcctggcaaccggaggaaccattgccggttcggcggccagcaacacccagacaaccgggtataaagccggcgcgattggcgtacagacgctgattaacgccgtacctgaaatgagtaaagtcgcccgcgttgacggcgagcaggttgccaatatcggtagcgaaaatatgaccagcgatattattctcaagctggccaaacgcgtcaatgaactgctggcccgcgaggatgtcgacggcgtagtcattacccacggtaccgataccctcgacgagacgccttatttcctcaatctgacggtaaaaagcaataagccggtggtcttcacggcggcaatgcgcccggcaacggccatcagcgccgacggcccgatgaatctgctggaagcggtgaccgtggcggctgacccggaagcgaaaggccgtggggtgatggtggtccttaacgatcgcatcggggcagcgcgttttgtcactaaaaccaacgccacgacgctggataccttccgggcgccggaagagggctacctcggcgtgatcgtcagcggtaagccgcagttcgaaacccgcgtggacaaaattcacaccgtgcgttcggttttcgacgtccgtaacctgaacgcgctgccgaaagtggtcattatttatggctaccaggatgaccctgaatatatgtatgacgcggcgatcgctcaccatgctgacgggattatttacgcaggtaccggcgcggggtcggtctccgtacgcagtgcggcaggaattgaaaaagcggaaaaagccggcatcgtggtggttcgcgcctcgcgtaccggcagcggcgtggtgccggtagatggcggccagccgggactggtggccgattctctcaatccggcaaaagcgcgtattttgctgatgaccgcgctgacgcaaacgaaaaatccgcaggtgattcagcaatatttccacacttactga

SEQ ID NO: 255774 - DNA, 486 bp, Klebsiella pneumoniae
atgaaaccgttccggcacgctttttttatctggggatggccgctgctggcacaggataacccgctggtgctacttgatgaaccaacaacctggctggatattaatcatcaggtggagctgatgaagctgatgcgcgagctacagacgatgggcaaaaccgtggtcaccgtactgcacgatctgaatcaggccagccgctactgcgaccatctggtggtgcttgaagggggtcaggtgcaggctcagggcctggcggaaacggtactgacgccggagatgctgcgggagatttttcacctggaagcggagatttacccggagccggctgtcccagcgcccgatgtgcgtggtgaaataactcgggtaaggcgtactgcgccctacccgacgttaatcagtaagtgtggaaatattgctgaatcacctgcggatttttcgtttgcgtcagcgcggtcatcagcaaaatacgcgcttttgccggattga

SEQ ID NO: 255775 - DNA, 381 bp, Klebsiella pneumoniae
atgtttagccttgttcgtcagtgcattttagcccgctgtttgccgccaccgtacaggatgagcgcggtcgctttacgcttgataaaacgccgcagcgcatcgtggtgcttgaactctcctttgttgacgcgctggcggcggtcgacgttagcccaacaggcgtacgatccgttgcgtattctggcggacgtacgcgtacgtctgaagccctggcagtcggtgggcacccgtgcccagccctcgctcgaggccatccgcgcgctgcatcccgatccgatcgtcgccgatagcagtcgccatgccggaatctacgccgccgagcgtattgccagcgacatggttaaaatcgtccatcaccgggcggtagatatcacgccatga

SEQ ID NO: 255776 - DNA, 948 bp, Klebsiella pneumoniae
gtgaaaccgacgctgagcgaatctcgtcgtcaggcgctgcgctccgcctcgcactggtacgcggtgctcagcgatggatgcgtgagtccgcagcaggaggcccgctggcagcagtggtatgagcaaaacaaagaaaatcagtgggcctggcagcaggtagaaaacctgcgacagcagatggggcaactgccgggcggcctggccagccgtgcccttaacgatagccgactggcgcgtcgccacgtactgaagggtctgatgcttttgctggtcatcggaggcagctggcggctctgggattccgaactggcggagggcctgggcgccgactaccgtacggcgaaagaaatacctcgccagcagcagcttgccgacggttcgctcctaacgctgaatagcgaaagtgccgccgacgtccgttttgacagacgacagcgcatggttcatttacgctacggcgaaatcgccatcaggaccgctcacgacagcctgcagcgtcctttccgcgtgcaaacgcgggaaggcacgctcaccgcgctcggtaccgaattcaccgtccgtcagtttgccggcggcacccggctggcggtacagcagcatgccgtggaggtggttttaccatccggcagcgtccaaatcgtcaacgccggggaaagcctgtggtttacccgcaatcgcttcttcgccctggttaagttcaacgacggcgaggatagctggatcagaggcgtgctgaccttccgcgacgccccgctaagcgaggtggtcgaaaccctcgcccgctatcgctccggggtattgcgctgcgatcccgcggtggccgaattacgcctgagcggcacctttccgctggaggatcctgacgccatcctgaaggttattgcgcaaacgctgccgatttcattacggtttgtcactcgctactgggtgacgctcgttccagcctga

SEQ ID NO: 255777 - DNA, 522 bp, Klebsiella pneumoniae; identical to SEQ ID NO: 175036

SEQ ID NO: 255778 - DNA, 789 bp, Klebsiella pneumoniae
atgaacgctagcgaaaaagccggacatacttttttggcaagtttggggaaaacccgcttacgtcccggcggcattgaggccactgagtggctatttaagcaggcagggtttagcgccgacaataaagtcctggaggtggcctgtaatatggggacaacctctattgagctggcgcagcgttttcactgtaccgtttacgccatcgatatggataaaggcgcgctggcgaaagcccggcaaaatatcgttcgcgaaggtgtggatcatcgggtcatagtgatggaggcgaatgcgggtcggctaccatttgccgacgagacgtttgatgtggtgataaatgaagcgatgctcaccatgtatgcggataaagccaaagaaaaactggtggcagaatattttcgcgttctcaagcccggtggccgtttgctgacgcacgatatcatgtatacgcatgatacgctgggagaggacgcccggcgacagctgcagggggtcgtgaaatccaacgtcagcccgctgagcgctgccgcctggcgggcccttttccaacggagcggctttgatgccgtaagcattcatcatggaccgatgtcgctgatgtcgccgcgagggttaatgaaagatgaaggttttatacaggcgctaaaaattgtctgcaatggcttgctaaagcgcgagaatcgtccgagatttttatcaatgctgcgcttttttcaacgtcataaaaagcatttaaactttattgcctgctgctcggttaaagcaattcaggtaaaaagtccgaaataa

SEQ ID NO: 255779 - DNA, 915 bp, Klebsiella pneumoniae
atgtcttacgcttttaataaaagtcttcttcatcctcgtaattggggtacctggtttggcctgggcgtactctggctgattgtccagcttccttatcccgttttgcatcttatcggcaccagcgcgggacgcgcctcccggcgcttccttaaacgtcgtgagcatatcgccagacgtaatctcgaactctgcttccccacaatgtcgccagcggcgcgcgaaaagctgatcgagcaaaatttcatgtctctgggaatggggctgattgaaaccggtatggcatggttctggagcgatgagcgagtgaaaaaatggtttgacgtcgaggggatggtcaacctcaacaatgcgctgagcgaagggaaaggcgtgatggttgtcggcgtccactttatgtctcttgaactgggtggccgcacgatggggctgtgtcgccccatgatggcaacctaccgtccgcataacagtccgttgatggagtgggtgcagacgcgcggccgcctgcgctcgaacaaggcgatgattgaccgccgaaatttatccggactggtgcatgcgttaaagtcgggcgaagcggtgtggttcgcgccggatcaggactacggcccgaaggggagcgtatttgccccgttcttctcggtccagcaagcggcgacgactaacggcacctacgtgctttctcgtttgtcgggcgcaaaaatgctgacgatcagcatggtgcgtaaagcggaccgcaaaggttatagcctgcatatcagcgatgtgatgcgcgactatcctggagaagataaacaggatgcggcgagctatatcaacaagattatcgagaaagagatcctgcgcgcccctgaacaatatctgtgggttcatcgccgttttaaaacccgtccgctgggcgaaacttcgctctattaa

SEQ ID NO: 255780 - DNA, 639 bp, Klebsiella pneumoniae
gtgttcgctgagtttggtgtactgaattacctgacctatctggttggggctatctttatcattctggtgcccggtcccaataccttttttgtcctcaagacgggcgtcgctcacggcgtgaaaaaaggctatctggcggcagcgggcgtgtttatcggtgatgccattctgatgtttctggcgtttgccggggtcgcgaccctcatcaagaccacgccggtattattcaatatcgtccgctacctgggggcgatttatctactgtggatgggcgggaagatgctctacgcggtgttgacgcagcgcgatgggcactcgtcttctgattccgagccggggagcgcgattcttaagcgttcgctgaccctcagcctgacgaatccgaaagcgattcttttttatgtctcattcttcgtgcagtttattgacgtcaatgccaaaacgcccgggctggcgttctttattctggcgctgaccctggagataattagctttatttacatgagcttccttatcgtctccggctctttcgtcacgcgctacgtaaaaacgaaaaagaaactggcgaaaatcggtaatagcctgattggcctcgtgtttgtcggttttgccgctcgtctggcaacgctacagtcgtaa

SEQ ID NO: 255781 - DNA, 264 bp, Klebsiella pneumoniae
atgattctgcagaaactcaccagcaataaaaacagcaagaagttctttatgtcgatagcggcgatatttgccatcgcgcttatcgtggtaggacgtgcaacctttggcggcgtggtgagcgagtacaatatgccgtactcagagtggacgacttcaatgtttttcctgcaaggggcgatggtgacggtttatagcatcgtgtttacgctgctgttctccattccgctgggattcctttttttgggctccgaccgccgggactaa

SEQ ID NO: 255782 - DNA, 1014 bp, Klebsiella pneumoniae
atgtccgattttctcctcgctcgcgtttcgcaaacgctcgccaatgaacacaccctggaaacattggtgcgacagctgcttgagatgctggagcttgttacccgaatggaatctacctacctgactcgtatcgacttcgaggcgcagcgccagcagattatgtacgcgcacaatagcagcgaaatgcagatccctgaaggtttctccgttccctggaatgactccctgtgtaaacgtgcgctggacgaccgctgcatattcagcaacgatgtcgccgagcgctggcgttcgtgtatcgccgcccaggatttgggtatcgcaacctttttcagcatccccgtgcgcctgaccgatggctcattattcggcacgctctgcgccaccagccgggaaagacagccctataacattgagggtgagcaggtgatgaatctgtttgccaacctcatttcgcactatgttgagaaagagaccctggtgcagcagcttcgggcagcaaacgtcgcgctggagatgcactcgtacaccgatgagctcaccggtttgccgaatcgccgctcgttgttcaagcatcttgccgcacagtttgcgcaggccagagaacgccagcgcagcgtactgctcatttttatcgatctcgatgatttcaaggcaatcaacgaccgattcggtcacccctgcggtgacagctttctgattcaggttggagaacgcctgttggcccgcgcccgccgcggcgatattgttggccgcctgggcggcgatgaatttttgctggttggcctatgttccgaatcggagggacaacaggagtatattgccgctttacgtaaagagctaacggggatctatttccttggcgcgcaccgaattaactatcccggcgccagctttggcgtgattgaagccgacccacaggcagtggacgttgagcaagcgctacgaagcgccgacgacgcgatgtatcaggataaaaagtcacgtcgccagggaacattttttcatattgactaa

SEQ ID NO: 255783 - DNA, 393 bp, Klebsiella pneumoniae
gtgctgaccaacgacggcgcgctgcaggcggctctcacccaaccgggtaagcgcaccggtaaagtttattacgttcaggtggaaggtgaacccacggcggatgcgctgaccgcgctccgcgacggcgtcacgcttaatgacggccccacactgccagcaggagtggagcgtgtagcggagccagagtggctctggccgcgtcatccccccatccgcgagcgtaaatccattcctaccagctggcttaaaattaccctctatgaagggcgcaatcgccaggtgcggcggatgaccgcccacgtcggctttcccacgctgcgcctgattcgctatgcgatgggaggctatacgctggatggtctggccaacggcgaatggcgtaaaattgattaa

SEQ ID NO: 255784 - DNA, 477 bp, Klebsiella pneumoniae
atgtttaagccgcacgtcaccgtcgcctgcgtggttcacgctaaaggcaaattcctggttgttgaagagacgatcaacggtaaagcgttatggaaccagccggcaggccatctcgaagccgatgaaaccctggttcaggccgcagaacgcgagctttgggaagagaccggcattcgcgcgacgccgcagcactttctccgcctgcatcagtggatagccccggatcgcacgccatttttgcgtttcctctttaccattgagcttaacgatacgtgcgccaccgagccccacgatagcgatatcgaccgctgcctgtggctcagcgctgaggaaattcttagcgcgagcaacctgcgttcgcagctggttgccgagagcattcgcagctatcagcaggatccgcgctacccgctggcgctcatcggcgaatttaactggccgtttacagggggtgcctcaacggaggacgcgtgctag

SEQ ID NO: 255785 - DNA, 642 bp, Klebsiella pneumoniae
gtggcgaagaattattatgacattacgctggcgctggccggcgtttgccaggccgcgcgtctggttcaggaactggcgcaccaggggcactgcgatagcgacgccctgcatgtgtcgctgaacagcatcatcgatctcgacccggagtctacgctggcggtgttcggtggtagtgaagccaatcttcgcctcgggctggaaaccctcattggcgtgctgaataccagcagtcgccaggggctgaacgccgaactcacccgctatactttaagcctgatggtgctggaacgtaagcttgccgccagcaagggagccatggataccctcggcaaccgtatcggcggtctgcgccgtcagcttgaacatttcgatctgcaatccgagacgctgcttagcgcaatggcgggcatctatgtggatgttattagcccgctgggcccgcgtattcaggtcaccggctctccagccgtgctgcaaagccctcaggttcaggcaaaggttcgctctgccctgctggcgggtattcgctctgcggtgctctggcaccaggtcggcggcggccgtctgcagctaatgttttctcgtaatcgtctggttaaccaggccaaacaaattcttgctcatttaaccccggagttgtga

SEQ ID NO: 255786 - DNA, 1215 bp, Klebsiella pneumoniae
atgaaagcgacattattatcgccatcgccagaggggccgccaacggtcatgccgcgtagtctggtgctgctgtttgctatcgccagcggcctgagcgtggcaaatgtttattacgcacaaccgctccttgatgccctggcgcgcgattttgcgatcggccacgccgcgatcggtggcgcgatcgcggcaactcagcttggctgcgcgctggctttgttattgctggtaccgctgggagacaggctgaatcgccgccgactgatggcgacgcaggtgatattactgatcgctgcgctatttgccgtcagtctggcaacatcgacagtaatgctgttagccagcatgcttgccgttggtctgctgggtaccgccatgacgcaggggttgattgcttatgccgcaagcgcggccgccccctctgaacagggcagggtagtgggcgcagcgcaaagcggggtctttattggattgctgctggcgcgggtattttcgggaagcatcagcgatctattcggctggcgtggggtatatatctttgccgctttgctgatgttaggcatcgcgcttcccctgtggcgtcgtctgccggtactggcggttgcatcgcgcccactgagctatcctcagctgctgatatccatgctggcgctgctgcgtcaggagaaaaacctgcaggtgcgaggcatgctggcattactaatgtttgccgcgttcaatatcttctggagcgcgttagttttgccgttaagtgcgccaccctttagcttttctcataccgagattggcgccctgggcctggtgggcgcgatcggcgccctggcggcaggtcgcgctggtcaatgggccgaccgcggatatgcccagcgcaccagcgccgcggccctggtgatattgctgatggcgtggtggcctttatcactgatggcatggtcgccagcggcgctgctgattggcattgtcatgctggatctcggcggccaggcgctgcacgtcactaatcagagcatgattttccgtagccgtcctgaggcgcacagcagactggtcggtttgtatatgctgttttatgccctcggcagcgcgctgggagcgataagtacgactgcggtatatgccagcgcaggatggcaaggcgtctgcctgctgggagcatcagttagcctgctggcgctgctattctggttaataacccgggggatgacgacgatcggatga

SEQ ID NO: 255787 - DNA, 447 bp, Klebsiella pneumoniae
gtgtcctcatcagaaaacagggaaaacacaacctgccccgtcgcccgaagcgtggatattatcggcgaccgctggtcgctgttgattgtgcgcgatgcctttgatggcaccagtcgcttcagcgatttccagcgaagccttggtatagcgcgtaatattctctccgaccgtctgcacaaattgctaaactcgggtattctcactacccaatccgcctcagacggcacggcctatcaggaatacgtactgacggaaaaaggccagcgcttgttccctgtcgtcgttgcgctacgccagtggggagagcagcatctctttgccgatggcgaacgccactcggtactgatcgataaacgtacgcagcgcccggttcccgtgatgacgccgatggccgaggacggattaccgttgaattttcatgaggctaaggtacaaaaaattaaataa

SEQ ID NO: 255788 - DNA, 675 bp, Klebsiella pneumoniae
atgcgcgtactcgtggttgaggataacgctctgctgcgccatcacctgaaagttcagctacaggagcttggccatcaggtagatgcggcggaagacgcaaaggaagcggattactatctgggtgaacacgttccggacatcgccattgtcgatcttggcctgccggatgaagacggcctctcgctgattcgccgctggcgcagccacgacgtatcggtaccggttctggtcctcaccgcgcgtgaaggctggcaagataaagtcgaggtgctgagcgccggagcagatgactacgtcaccaagccgtttcacatcgaagaggtcgccgcgcgtatgcaggcgcttctgcggcgcaacagcggcctcgcatcgcaggtgatctcaataccgccattccaggtagatttatcgcgtcgcgagctgtcggttaatgaccagcccatcaagctgacggcgtttgaatacaccattatggaaaccctgatccgtaaccggggcaaagtagtcagcaaagattcattgatgctgcagctctatcccgacgccgagctgcgcgaaagccataccatcgatgtgctgatgggacgattgcgtaaaaaaatccaggctgagtatccgcaggatgtgattaccaccgtgcgcggccagggctatctgttcgaactgcgcggatga

SEQ ID NO: 255789 - DNA, 1467 bp, Klebsiella pneumoniae
atgaaagggctgttgcggcatattttaccgctatcgttacgcgtccgctttctgctggcgacggccgccgtggtgctgatcctatcgctgtcttatggcatggtcgcgctggtcggctatagcgtaagctttgataaaaccaccttccgcctgctgcgcggcgagagcaacctgttctatatgctggcgaagtgggaaaacaacgccatcgacgttgatattcccgacaacctcaatatgcaaagtccgacggtgacgctgatttacgacgctcacggtcggttattatgggcgcagcgcgatgttccctggctggtgaagcgtatccaaccggaatggctcaaaaacaacggctttcatgaaattgaggccgacgtggacagcagcagcatgctgcagcacaacaatcatgagatccaacagcagctgaatgccattcgggaagaggacgacagctccgaaatgacccactcggtggcgatcaatatctatccggccaccagcaccatgccgcagctcagcatcgtggttgtcgacaccataccggtggagctcaagcgctcgtatatggtatggagttggtttatctacgtactggcggccaacctgctgctggtgatcccgcttttgtgggtggcggcatggtggagtttgcgccctattgaatcgctggccaaagaagtgcgcgaactggaggagcatcaccgtgaactgctcaatcccaacaccacccgggagcttacgcggctggtcagcaacctcaaccgtttgctgaaaagcgaacgcgagcgttatgacaaataccgcactaccctgaccgacctgacccatagcctgaaaacgcctctcgcagtgatgcagagcaccttacgctccatgcgcggcgagaagctcagcgtcaacgaagcagagccggtaatgctggagcagattagccgtatctcgcagcagatcggctactacctgcaccgtgccagcatgcgcagcggcgggtcgctgctaagtcgcgagctgcatcccatcgctccgctgctcgatagcctgacctcggcgctgaataaagtttaccagcgcaaaggcgtgaatattagcctggatatttcgccggaaatcagttttgtcggcgaaaagaatgattttatggaagtgatgggcaacgtgcttgataacgcctgcaaatactgtctggagtttgtcgaagtctccgtccgtcagaccaacgacaaccatttacacatcctcgtagaggatgatggccccgggatcccccacacgatgcgcagcgcggtattcgatcgcggccagcgcgccgacacgctgcgtcccggccagggcgtggggctctccgtcgcgcgagatatcgttgcccagtacgatggtcgaattctcgccgaagagagcctgctcggcggcgcctgcatggaagttatttttggccgccaggccctggaagataaagagagctaa

SEQ ID NO: 255790 - DNA, 1122 bp, Klebsiella pneumoniae
atggattatcaattaacgcttaactggcccgactttatcgaacgctactggcaaaaacgcccggtagtgctgaaacggggctttgctaatttcgtcgatccgttaagcccggacgagctggccggactggcgatggagagcgaagtcgacagtcgcctggtcagtcatcaggacggtaaatggcaggtcagccacggtccgtttgagagctacgaccatctgagcgaaaataactggtcgctgctggtacaggcggtcaataactggcaccagccgacggcggcgctgatgcacccgttccgcgcccttcccgactggcgcattgacgatctgatgatctcgttttccgttccgggaggcggcgtcggcccgcatctcgaccaatacgacgtgtttatcattcagggtaccggtcgccgccgctggcgcgtgggcgaaaaggtgccgatgaagcaacattgtccgcacccggacctgctgcaggtcgacccgtttgaagccattatcgatgaagagatggagcccggcgatattctctatatcccaccggggttcccgcacgaaggctactcgctggaaaactcgctcaactattcggtcggctatcgcgcgcctaacgcccgcgagctgttcagcggctttgccgattatattctgcagcgtgaactgggtagccagcgctacgccgacccggacgtgccgtcgcgcgagcatcctgcggatattctgcccgtcgagctggaccgcctgcgcgatatgatgctgggattaattaatcagccagagcactttaagcagtggtttggcgaatttattactcagtcccgccacgagctggacgtggcgccgccggagccgccgtaccagccggatgagatttacgatgccctgcagcagggggataagctgacacgtctcggcggcctgcgcgtgctgcgaattgatggtgaggtgttcgtcaatggcgagaaaattaactctccgcaccgcccggcgctggacgcgctggcaacccacctgacgctcaatgcagagcatcttggcgatgcgctggaagatccctccttcctcgccctgctggccgcgctggtcaacagcggctactggttctttgaggactaa

SEQ ID NO: 255791 - DNA, 1137 bp, Klebsiella pneumoniae
atgggacagagtcaaaaattgaatatacaaccgcgttcgcgttctccgctggttcagctgacggaaattcgcaaaagctttgatggtaaaacggtaatctccggcctcaatctgaccatcaacaacggtgagtttctcaccctgcttggcccctctggctgcggtaaaacaaccgttcttcgtcttatcgccggactggaaaccgtcgatagcggccgaatccatctcgaagatcaagatatcacccatatcccggcggaaaaccgccacgtgaacaccgtctttcaaagctatgcgctctttccgcacatgacggtgtttgagaacgtcgccttcggcctgcggatgcagaaaaccccggcggcggaaatcgctccccgcgtccacgacgccctgcgaatggtgcagcttgaagagttcgcccagcgcaaaccgcatcagctttccggcggacagcagcagcgcgtggcgattgcccgcgcggtggttaacaaaccgcgcctgttgctgctggatgaatccctctcagcgcttgattataaactgcgtaaacagatgcagaacgagctgaaggcgctgcagcgtaaactcggcatcaccttcgtcttcgtcacccacgatcaggaagaggcgctgaccatgtccgaccgtatcgtggtgatgcgcgatggcaaaatcgagcaggacggcacgccgcgcgaaatctatgaagagccgaaaaacctgtttgtcgccagctttattggcgaaatcaacatcttcaacgccacggtcatcgagcggattgacgagcagcgggtgcgcgccagcgtagaaggccgcgaatgcaatatttacgtcaacttcgccgttgaaaaaggccagcggctcaacgtgctgctgcgcccggaagacctgcgcgttgatgagatccaccacagtaatgaagccgatggcctgataggctatatccgcgaacgcaactataaaggaatgacgctggaatcggtggtcgaactggaaaacggcaaaatggtcatggtcagcgaattcttcaatgaagacgaccctgattttgaccactctctcgaccagaaaatggccattaattgggtagaaagctgggaggttgtgctggccgatgaagaacaccagtaa

SEQ ID NO: 255792 - DNA, 858 bp, Klebsiella pneumoniae
atgaagaacaccagtaaattccagaatgtggtgattgccaccatcgtgggttggcttgtgctgtttgtctttctgcccaacctgatgattatcgccaccagctttctgacccgcgacgataccaacttcgtcaagctggtctttacgctggataactacgcgcgcctgctcgatccgctctactacgacgtgctgctgcattcgttgaatatggcgttcatggcgaccctggcctgtctggcgcttggctaccctttcgcctggtttctggcaaggctgccggagaaagtacgcccgctgatgctgtttctgctgattgtgccgttctggaccaattcgctgattcgtatctacggactgaaaattttcctcagcaccaagggctatctgaacgaatttttattatggctgggcgtcatcgatacgccgctgcgcatcatgtatacgccatcggcggtcattatcggcctggtctatattctgctgccgtttatggtgatgccgctctactccagcatcgaaaagctcgatcgtccgctgctggaagcggcgaaagatctcggcgccaataaactacaaacctttatccgcatcatcattccgctgaccatgccgggcattattgccggctgcctgctggtgatgcttccggcaatggggctgttctacgtgtctgacctgatgggcggcgcgaaaaacctactgattggtaacgtcattaagagccagttcctcaacatccgcgactggccgttcggtgcggcgaccagcattacgctaacgctggtgatgggcctgatgctgctgatttactggcgcgcagcgcgtttactgaataaaaaggtggagctggaatga

SEQ ID NO: 255793 - DNA, 786 bp, Klebsiella pneumoniae
atgatcggtcgactgctgcgcggcggctttatgaccgctatttacgcgtatctctacattcccattattatcctgatcgttaactcgtttaacagttcgcgcttcggcattaactggcagggttttaccaccaactggtatagcctgctgatgaataacgacagtctgctgcaggcagcgcagcactcgctgaccatggcggtgctgtcggcgactttcgctacgcttatcggatcgctgaccgccgtcgcgctgtaccgctatcgctttcgcggcaagccgttcgtcagcgggatgctgtttgtggtgatgatgtccccggatatcgtgatggcgatttcgctgctggtgctgtttatgctgatcggtattcagctgggattctggtcgctgctgttttcccacatcaccttttgcctgcccttcgtggtggtcacggtgttttcgcgcctgaaaggttttgacgtgcggatgctggaagcagcgaaagatctcggcgccagcgaaatgacgattctgcgaaagatcattttgccgctggcgctgcccgccgtggctgcagggtggctgctgagcttcaccctgtcgatggatgatgtggtggtctcttcgtttgtaaccgggccgggctatgagatcctgccgctgaagatctattcgatggtcaaagttggggtatcgccagaggtcaatgcgttggcgacgattctgttggttctgtcgctggtgatggtcattgccagccagataattgcacgtgataaaactcaggggacgttaaaatga

SEQ ID NO: 255794 - DNA, 1047 bp, Klebsiella pneumoniae
atgaaaaaatggtcacgccacctgctcgctgcgggcgctctggcaatcgggatgagcgccgcgcacgcggacgatagcaaaacgctctatttctacaactggaccgaatatgtcccgccggggctgctggagcaattcaccaaagagaccggcatcaaggtgatctattcgacctacgagtcgaacgaaaccatgtatgccaagctcaaaacctataaagacggcgcttatgacctggtggtaccttccacctacttcgtcgacaaaatgcgtaaagagggcatgctgcagaagatcgataagagcaagctgagcaacttcggcaatctcgatcctgaaatgctcaataaaccgttcgacccgaataacgattactcgattccgtacatctggggcgcgacggccatcggaatcaatagcgatgagatcgatccgaaaaccgttaccagctgggcggatctatggaagccagagtataagagcagcctgctgctgaccgacgacgcgcgcgaagtgttccaggtcgcgctgcgtaaactgggctactccggcaatactaccgatccgaaagagattgaagcggcctataacgagctgaaaaaactgatgccgaacgtcgcggcgttcaactccgataacccggcgaacccgtatatggaaggcgaggtaaatctcggcatggtgtggaatggctccgcgtgggttgcgcgtcaggccggtacgccgctggaagtcgtgtggccaaaagaaggcggcatcttctggatggatagcctgtcgattccggccaatgccaaaaacgtcgacggcgcgctgaagctgatcaacttcctgctgcgcccggaagtggccaaacaggttgcagaaactatcggttacccgacgccaaacctggccgcgcgtaaaatgctgagcccggaggtcgccaatgataaatcactctatccggacgccgcgacgattcagaaaggcgaatggcagaacgatgtcggcagcgccagcacgctttatgaagagtattatcagaagctaaaagcgggtcgttaa

SEQ ID NO: 255795 - DNA, 282 bp, Klebsiella pneumoniae
atggccactgagtatgttgactacctgatcctcggcgacgagcatcacggcgaaatccatcgggatattaaaagccactctctgcgagtccgttcgaaatacgccgccggttccggcaggggagacgcttctgctgcgcagccgaaaatggcgaactacaaagtacatgaatatccggcgcaggatgggcgattttatctggtggcgaccaactattcgctggccgattttgacgttgaggaagcgctaataaagtcgagaatacatccgctgagaagctag

SEQ ID NO: 255796 - DNA, 246 bp, Klebsiella pneumoniae
atgccgtccaccgacgcgttcgacaagcaggatgcggcttaccgtgaagcggtgctgccgaaagcggtctctgcgcgcgtggccatcgaagcgggtatcgccgactactggttcaaatacgtgggcctgaacggcgcgatcgttggcatgaccaccttcggtgagtcagcgccggcggagcagctgtttgaagagtttggcttcaccgtggacaacgttgtcgcgaaagcgaaagcgctgctgtag

SEQ ID NO: 255797 - DNA, 1989 bp, Klebsiella pneumoniae
gtggttttttatacctccgccggactgattttgttgttttccctgatgactctcttcttcagcgatttttccgcggcctggattggccgtaccctgaactgggtttcaaagaccttcggctggtactatttgctggcggcaacgctgtatatcgtgtttgtggtgtgcatcgcctgctcgcgtttcggttcggtgaagctcgggccggagcactcgaagccggagtttagcgtcatgagctgggcggcaatgctgttcgccgccggtatcggtatcgacctgatgtttttctccgtcgccgaaccggtgacccagtatatgcagccgccggaaggggcggggcagaccatggaggcggcgcgccaggcgatggtatggacgttgtttcactacgggctgaccggctggtcgatgtatgccctgatggggatggcgctgggatactttagctatcgttataatttacccctgaccatccgctccgcgctctatccgatcttcggcaaaaagattaatggcccaatcggccacagcgtggatatcgccgccgttatcggcaccatttttggtatcgccaccaccctcgggattggcgtggtgcagctaaactacggcctcagcgtgctgtttgatattccggattcgctgggcgcgaaagcggcgctgatcgtgctatcggtcattatcgccaccatctccgtgacctccggggtggataaaggcattcgtatcctttccgagcttaacgtggtgctggccctcgggctgatcctgtttatcctgtttatgggcgacaccgagtttctgctcaacgcgctggtgctcaatgttggcgactatgtgaatcgttttatgggcatgaccctcaacagcttcgccttcgatcgtccggtcgagtggatgaacaactggaccctgttcttctgggcgtggtgggtggcgtggtcgccgtttgtcggcctgttcctggcgcgtatttcacgcgggcgcaccattcgtcaatttgtggtgggaacgctgattatcccgttcacctttacgctgctgtggctgtcggtgttcggcaatagcgcgctgtatgaaatcatccacggcaatgaggccttcgccgccgaggcggtcgcccacccggagcgcggcttctataacctgctggcgcagtatccggcgtttacctttagcgcttcggtggcgacgattaccggcctgctgttttacgtgacctccgcggattccggggcgctggtgctgggtaacttcacctcgaagctgaaggatatcaacagcgatgcgccaaactggctgcggatcttctggtcggtggttatcggcctgctgaccctggggatgctgatgactaacggcatttccgccctgcagaacgcgacggtgattatggggctgccgtttagcttcgtgatcttcttcgtgatggcggggttatataagtcgctgaaggttgaggattatcgccgcgagagcgccaaccgcgacaccgccccgcgaccgctgggcgtgcaggatcgcctgagctggaagaagcgcctgtcacggctgatgaactatcccggcacgcgctatacccgccagatgatggagacggtgtgcttcccggcgatggaagaggtggcgcaggagctgaagctgcgcggcgcctatgtcgagctaaaaagcctgccgccggaagagggggacaacctgggccatcttgacctgatggtgcatatgggcgaggagcagaactttgtttatcagatctggccgcagcagtactccattcccggctttacctaccgggcgcgtagcgggaagtcgacctactatcgtctggagaccttcctgctggaagggagtcagggcaacgacctgatggactacagcaaagagcaggtcattaccgatattcttgaccagtacgagcgtcatttgaactttatccacctgcatcgcgaagcgccgggcaacagcgtgaccttccccggaatgtag

SEQ ID NO: 255798 - DNA, 153 bp, Klebsiella pneumoniae; identical to SEQ ID NO: 176798

SEQ ID NO: 255799 - DNA, 582 bp, Klebsiella pneumoniae
atgtatcgccactatcaggccctgatttttgatatggatggcacgctttttgacaccgaacctttgcaccgcaaagcgtggctgagcgtattcgctgccgacaatatcaccatttctgaagaggagctgattccgttcaatggttcagcgccctggcaggtggccagccagcttgtggccttaaaaggattacgagccgatccgttctccctggccgagcgtaaaaaacaggcgatcgagaacttgctgcagacggtcgatattcagcttttaccggccatgaagattttacagcagtggcagggcaaaattcccctggcgctgggaaccggaagcgaacgtagcaccgtggatatactgcttgcacgctttcaattaactcagcatttcgccgctatcgtctccgctgaccgggttaaaaatcataaacccgccgccgacacttttttattatgtgccagcgagcttaaggttcagcctgaacgctgcctggtttttgaagactcacgatttggtattgaagccgcaaaaaatgcaggtatggacgtggtcgacgtcaatactctgacgcctgccagataa

SEQ ID NO: 255800 - DNA, 786 bp, Klebsiella pneumoniae
atgatcgcaaaagattttgcccaacagctatttaatctgcaggaccgcgtagcctttgtcaccggcgcgggcagcggcatcggccagatgattgcttacggactcgccagcgcgggggcccgggttgtttgcttcgatctacgtgaagacggcggccttgctgaaaccgtcaaaaatattgaggcgatcggcggcggagcctgtttttacaccggcgatgttcgtcagcttagcgacctacgcgccggcgtcgcgctggcgaaaagccgctttggccgccttgatgtcgccgtaaacgccgccgggattgctaatgccaatccggcgctggaaatggaaaccgagcagtggcagcgggttatcgatattaaccttaccggcgtgtggaactcctgtaaggcggaagctgaactgatgcaggaatccggcggcggctcgattattaatatcgcttccatgtccggcattattgttaaccgcggcctcgatcaggctcactacaactgctcgaaagcgggcgtgatccacctgtcgaaaagcctcgcgatggagtggatcggcaaagggatccgcgttaactccatcagcccaggctacaccgccacgccgatgaacacccgccctgagatggttcatcagacccgcgagttcgaaagccagacgccgatccagcgcatggcgaaggttgaagagatggccggtccggcgctgttccttgccagcgacgcggcatcattctgtaccggggttgatctggttgtcgatggcggctttgtctgctggtaa

SEQ ID NO: 255801 - DNA, 798 bp, Klebsiella pneumoniae
atgcaaagaaatttccagaacaaaacggttgtgatcaccggcgcctgccgcggaattggtgcaggtatcgccgagcgctttgcgcgcgatggtgcgaatctggtgatggtctctaacgccgagcgcgtccatgaaacggcggaaaccttacgccagcgctatcaggccgatatcctgtcgttacaggttgatgtgaccgacgaagcgcaggtgcagtcgctgtacgagcaggctgcagcgcgttttggcaccatcgatgtctctatccagaacgcaggcgtgatcaccatcgactattacgatcgcatgccgaaagccgactttgaaaaagtgctcgccgttaacaccaccggcgtctggctgtgctgccgcgaagccgccaaatacatggttaagcagaaccacggcagcctgatcaatacctcttccggccagggtcgacagggttttatctacaccccgcactatgccgccagcaaaatgggcgtcatcggcatcacccaaagcctggcgcacgagctggcgccgtggaatatcaccgttaacgccttctgtccgggcattattgaaagcgaaatgtgggattacaacgaccgcgtctggggcgagatcctcagcaccgagcagaagcgctacggtaagggcgagctaatggcggagtgggtcgaaggcattccaatgaagcgcgccggcaaaccggaagacgttgccgggctggtggcgtttctcgcctccgacgacgcgcgctacctcaccgggcagaccatcaatatcgatggcggcttgattatgtcgtaa

SEQ ID NO: 255802 - DNA, 1056 bp, Klebsiella pneumoniae
atgaaccagaaatatatgatttatatgtacctgctgaaggccagaacgtttatcgctctgctgctggttatcgcattcttcagcgtgatggtaccgaatttcctgaccacatctaacctgctgattatgacccagcacgtggccatcaccggcctgctggccatcggcatgacgctggttatcctgaccggcggtatcgacctttccgtcggcgccgtcgccgggatctgcggtatggttgccggggcgctcttaaccaacggtctgcccttatggaacggcagcgttatctttttcaacgtgccggaggtaatcctctgcgtggcgctcttcggcgtgctggttggctttgttaacggcgcggtaatcacccgcttcggcgtggcgccctttatctgcaccctgggcatgatgtatgtcgccagaggctcggcactgctgttcaacgacggcagcacctatccgaacctcaacggcatggaagcgctgggcaataccggcttctccactctcggctccgggacgctgatgggcatctatctgcctatctggctgatgatcggcttcctgctgctgggctactggctgaccaccaaaaccccgctgggccgctatatctatgcaatcggcggtaatgaatccgccgctcgcctggccggcgtgcctatcgtcaaagcaaaaatcttcgtttacgccttctccggcctgtgctccgcattcgttggcctcatcgtcgcgtcacagctgcaaaccgcgcacccgatgaccggcaatatgttcgaaatggacgccatcggcgctaccgtgctcggcggaaccgcgctggcaggcggtcgcggccgggttaccgggtcaatcatcggcgcattcgtcatcgtcttcctcgccgacggcatggtgatgatgggggtcagcgatttctggcaaatggtcattaaaggcgtcgttatcgtcaccgccgtcgtcgtcgaccagttccagcagaaactgcagaacaaagtcatcctgatgcgccgccatgaggagaagctggctgcggcaggagccaccagttaa

SEQ ID NO: 255803 - DNA, 621 bp, Klebsiella pneumoniae
atgtataaaaaaatctcgctgatgctggtcgttgttgccctcggaggctgccgaattgtttctcagcaggagctggccgacctgaaatccccgcctaatccgcatatggcggatatcgatcggacatggcaagagcaggtcgttcctcaggttgtggccagggcccgccccgttgccgagttaatgactgccctgcgcacggcgaaagacattgatagcgcctgcaaagcgttaggttatcgcgctcaggatgagaacccgtgcgtgttctacgtcaaagtggaaggcaatatcagcaaaattgattccgcttcccgcagcggaaaaatgacgatccaggataccagcggcggcaacgtggtggtgcagattggcccgacgctgcgcggcacgcttttacgcgacggctaccagggcgccagctatcaggacttcaacgatcaggtgctgtttggtgaatatagccgggcgattaacgaacatgcggtcaaaatgatccagacggcgcaggttaaaaccggtgaagcggtgcaggtatatggcgtgttctcggcctgggatattccgcagaccgttcctgatattacgccggcaaaaattgttcgtttgggaggacaataa

SEQ ID NO: 255804 - DNA, 936 bp, Klebsiella pneumoniae
atgaaattacgtttaacgcttttaactgctgctaccctgaccgccttttcttttgccgctcaggccgcagaaaaaggcaccattatgatcatggttaactcgctggataacccgtattacgcctctgaagccaagggcgccagcgagaaagccaaagagctgggatatcaaactaccattctgtcccatggcgaagatgtcaaaaaacagaacgagctgatcgataccgccatcggtaaaaaagttcagggcattattctggataacgccgactccaccgccagcgtcgccgccattgaaaaagcgaagaaagcgggtattccggtggttttaatcaaccgtgaaattcctgtcgatgatatcgcgctggagcaaattacccataataacttccaggccggttctgaagtcgccaacgtatttgtcgagaaaatggcggagaaaggaaaatacgccgagctgacctgtaaccttgcggataataattgcgtaacgcgttcaaaatctttccaccaggttatcgaccagtacccggatatggtcagcgtcgctaagcaggacgcgaagggcacgttaatcgacggcaaacgcattatggacagcatcctgcaggcgcaccccgacgtgaaaggcgtgatttgcggcaacggtcctgtcgcgcttggcgccattgccgcgctgaaagccgctaatcgcaacgacgtggtggtggtcggtatcgatggcagcaacgatgagcgcgacgcggtaaaagccggcaccctgcaggccaccgtgatgcttcaggcgcaggccatcgccgctcagggagtgaccgacctcgataactacctgcaaaaaggcgaaaaaccggccaggcagcgcgtgatgttccgcggcattctgatcacccaggacaatgcagacaaagttcaggacttcaatatcaaatcctga

SEQ ID NO: 255805 - DNA, 1521 bp, Klebsiella pneumoniae
atgcaggcaacacctaaagagttcatcattgcactggacgaaggcaccacgaatgccaaagccgtcgtgctcgatagccgcggccaggtcgtggtgaaattctcccagccgctggcgattcaaacaccgcgtgagggctgggttgagcagtcgggagaagtgctggtagaggcgtcactggacgttattgcgcaagcggttgaacacgttggcgcggaaaacatcgctgccttagccatcagcaatcagcgcgagacggcgatcggctggtatcgccagagcggtaagccgatcaacgcggctatcacctggcaatgtacccgcagcgctgcgttttgcgatgaactacgccgcgacggtaaagagcaacaaattaaggccgctaccggcctgccgattgcccccctgttctctgcctcaaaaatgcgctggctgctggaatccattcctgagggtcgcatgctggcagagcggggagaaatctgcctcggcactatcgacagctggctgctgtggaacttaacccagggcgaagcgtttcattgcgattattccaatgccgcgcgcacgcagctactgaacctgcaaaccggccagtgggacgacgaaatgctggcgctattccagatcccacgcgccgcgctgccggagattaaaccgtccagcggattatttggctatacccgcgggctgaataatattcctgacggtattccggtgatggcgatggtcggggattcccacgccgcgttgtttggccacgcactgggcgaactcggctgtgttaaagccacctacggtacggggtcatcggtgatggcgccggtaaaatccgcacagtgcgatatcgacgcgctggccaccaccatcgcctggcacgacggcgacagcatcacctacgggctagaaggtaatattccccataccggcgacgccgtggcgtggatggccgacagcaccgggttaagcgagctttcggatgccgaactggctcacgagcttaacacccttcccggctccgtggactccactcttggcgtctattttgtaccagccttaaccggcctcggcgcaccgtggtgggacgacagcgcccgcggcgtgatttgcggtctgagccgcggcgtcaagcgcgcccatatgattcgcgccgcgctggaatccattacctatcaaatcgccgatgtcgtcgtcgccatgcgccagcaggatgacttccatttagcggcgctgatggtcgacggcggcccgaccaaaaacgactggttaatgcagtatcaggctgacctgctcggctgcccggtgatgcgcagcgacgttgccgaactgtcggcgattggcgcagccctccttgcgcgcaaggccctgaatccgggaacggtcaccgacctgaaagcctttttaaccgaacatagcgaatttattcccgatatggcccgccaccagcgcctgcagaagagatggcaggagtggcgccatgcggtgaacagaacattatggaaaccggcaacgtccgcctga

SEQ ID NO: 255806 - DNA, 951 bp, Klebsiella pneumoniae
atggctaagcaggatgaacaacggctattagttaagattgccacgctctactatctcgaaggacgcaagcagtccgacattgctcaacttctctcgctttctcagtcatttatctcccgagcgatcacccgctgccagaaagagggcgtggtgaaaattagcgttgttcagccatcaaatatttttcttaaccttgaaaaaggtcttgaggatcgttacggaattaagcaagccatcgtggtggataccgaagaggatgccagcgatcacaccatcaagcgcgctatcggttccgccgctgcccactacctcgaaacgcgattacggccaaaggatctgattggcgtctcttcgtggagttccaccatccgcgcgatggtggatgaggtacacgcgcaaaacctgaaagccagcggcgtcatccagctgctcggcggcgtagggccgaacggcaacgtgcaggccactattctcacccagactctggcgcagcatctgaactgtgaagcctggctgctcccttcccagagcattgaaggatccaccgaggagaagaatcgtcttgttgccagtaaagatgtcgccgacgttattgcccgctttgatgaagtcgatatcgcaattgtcgggatcggtattcttgaaccttcgcagctgctgaaaacatccggcaactactatcacgaagatatgctgcaggtgctggcggaacgcggtgccgtgggtgacatttgcctgcactattacgataaaaacggcagagcagtgttacgcgatgatgaagatcctgttatcggtatggcgctggagaaggtgaagaagtgccctaacgtggtggccctggccggcggcagcgagaaggtcgcggctatcaaaggtgcgctttcgggcggttatatcgatgttctgatcaccgattacccaacggccagactgcttattgccggttaa

SEQ ID NO: 255807 - DNA, 831 bp, Klebsiella pneumoniae
atgaatccctatagctatgatgtccaggcacttgagcgtaaagcccgcgccgtacgtcgccatatcgtcagattgaatgccaatagccctgctggcgggcacaccggcgccgacctgtcgcaggttgaactgctcactgcgctctattttcgcattatgaacgtcgcgccggaccgcgtggatgatgaccagcgcgatatctacatccagtcgaaaggccatgcggtgggctgctactactgcgtgctggccgaagcgggcttcttcccggttgactggctggaaacctatcagcatgcgaattctcatcttcctggtcacccggttcgtcagaaaacgccggggattgaactcaacaccggcgcgctgggccacggtttgcctgttgcggtggggctggcgctggctgcgaaaaaaagcaacagcacccgccgcatctttttaattaccggcgatggcgaactggcggaaggcagcaactgggaagcggcgctggctgcggcgcactacggccttgataacctcgtcattattaatgacaaaaacaatctccagctggcggggccgacgcgggaaattatgaataccgatccgctggccgataaatggaaggccttcggaatgacggttaccgaatgccagggtaacgacatggcgtcggtggtggcgaccctggaagggctgaagcaggaaggtaaacccaacgttattatcgccaacaccacgaaaggtgccggtatttcctttatccaggggcgcccggagtggcaccaccgggtaccgaaaggcgaagaaattgcactggcactggaggaactgaaagatgagtaa

SEQ ID NO: 255808 - DNA, 936 bp, Klebsiella pneumoniae
atgagtaatgcagaacacctggcgagcgtgatggttcaggcctttattgatgcggtcgacagcggtgtcgatctggtgccggtggtggctgactccacgtcaacggccaaaatcgcgccgtttattaaacagttccccgggcgtctggtgaacgtgggcatcgctgagcagagcatggtcgggacggcggcgggcctggccctgggggggaaagtggcggtcacctgtaacgccgcgccgttcctgatttcccgcgccaatgagcagattaaagtcgacgtttgctataacaacaccaacgttaagctatttggccttaacgccggcgccagctacggcccgctggccagcacccatcatgcgattgatgacctggcggtgatgcgcggcttcggcaatatccagattttcgccccgtcttcgccgcgcgaatgccggcagattatcgattacgccatcggctatcaggggccggtctatattcgtcttgacggcaaggcgctgccggaactgcatgatgaaagctatcgcttcgtgccgggagcggtcgttacgctgcgggaaggcgaggatatcgctctggtcgctaccggatcgacggtgcatgagatcgtcgatgccgcgcagatgctggccgacgcggggattcaggctaaagtggtgagcgtgccgtccattcgcccttgcgataccgccgcgctgctggcggcgctgaaaccctgcaaggcggtgataacggtggaggagcataacgtcaacggcgggttgggtagcctggtggcggaagtgctggctgaggccggggcggcaattccgctcaaacgcctggggatcccggatggtgagtatgcggcggcggcagatcgcggctggctgcgtaaacaccacggtttcgatgccgcttccgtcgccgggctggcgcagaaaatgcgctga

SEQ ID NO: 255809 - DNA, 624 bp, Klebsiella pneumoniae
atgcaaacccaacgttctatcattcagcttgccgatcgctcgctgcagcgtgtcgatttcgacccattgacctttcggcctgaagatctcctctggctgccgcaccatgcccggctaaccggctgcgcccgcaagcggcagagcgaacatcttgccgggcgtatcgctgcggtttatgcgctgcgggaagtcggtgaaacagaggtccctgccattggcgaccaacgccagcccctatggccgcacccgtggtacggcagcataagccactgtgaacgcagcgcgctggcagtcgtctctgtccggccgatcggcgttgatattgagcgcatcttgactcctgacctggcggctgagctggaaagctgcatcatcaacagcgcggaaaaaagtctgctggacgccagcggcctgggccccgagctggcgctcacgctggcattttcggcgaaagagagcgcgtttaaggccagccatcccgacgtacaggcgggcgtcggttttagcgattttacgctggcgtatataaaggagggaaatctgcttcttcggctctccgccggggagtatcggctgcaatggattaaggccggtgactacgtcattacgctctgcgcggcgtaa

SEQ ID NO: 255810 - DNA, 612 bp, Klebsiella pneumoniae
gtgacatggttccgtaacgactaccgcgataaaatcgaagcgggctacgcgccgatttcacagacgacgaacggtaaagtgaaaaccgatatctatcagtgggaaaacgtgcctaaagcggtggttgaaggtctcgaaggcaccctgaacgtgccggtcagcgaaacggtgaactggaccaataacatcacttatatgctgcaaagtaaaaacaagaaaaccggcgatcgtctgtcgattattccggaatataccctgaactccactctgagctggcagattcaggaggatatttcggtgcagtcgaccttcacctggtacggcaagcagcagccgaagaaatataactacaaaggtgagccggcggtgggttctgaaacggatgaagtcagcccttacagcatcgttggcctgagcgccacctgggatgtgacgaaaaacgtcagcctgaccggcggcgtggataacgttttcgacaagcgccactggcgcgcgggtaatgcgcaaaccaccggtagcctgacggatgtttcttatatggctggcgctggcgccaatacctataacgaatcaggccgcacctggtatctgggcgtcaatacccacttctga

SEQ ID NO: 255811 - DNA, 597 bp, Klebsiella pneumoniae
atgaccctattgccagatgccccctataccagacagcaaattcgccagcagatccgccttcgccgacgcgcgttaacgccggagcagcaaacgcagttcgccctccaggcggcggacagaatgatggcttatccgccggttctgctcgcgcagacggtcgcggtatttctttcgtttgatggcgagctggatacgctgccgcttattgaccagctctggcgggcaggcaaacgggtttatctccccgtgcttcatccgttcagccccggcaatcttctgtttctgcactaccacccaagcagcgagctggtggtgaatcgtctgaaaatccgcgaaccgaaactcgacgtgcgcgatgtcctcccgcttagccagctggatgtgctggtaacgccgctggtagcatttgatgccgccggacagcgcctgggtatgggcggcggattttacgaccggacgctgcaaaactggcggcagcatcgcctgcagccggtcggctacgcgcatgattgccagcaggtcgacgcgctgccgacggagcagtgggatatcccactgccagcggtcatcacgccgtcaaaaacctggctctggtaa

SEQ ID NO: 255812 - DNA, 1233 bp, Klebsiella pneumoniae
atggctaaggtatcactggaaaaagacaaaattaaatttctgctggttgaaggtgtgcatcaaaaagcggtggacagcctccgcgcagcaggctacaccaatatcgaatttcacaaaggcgcgctggacagcgaagagctgaaagcgtccattcgtgatgcccatttcatcggcctgcgttcccgtactcatctgactgaagagatcttcgcggcggcggaaaaactggttgcggttggctgcttctgtatcggtactaatcaggttgacttaaatgcggcggcaaaacgcggtattccggtatttaacgccccgttctctaatacccgttccgttgcggagctggtgatcggcgagcttctgctcatgctacgcggcgtgccggcggcaaacgccaaagcgcaccgcggcgtatggaacaagttggcggttggcagctttgaagcgcgcggcaaaaagctgggtattatcggctatggccacatcggtacgcagctgggcattcttgccgaatcgttggggatgcacgtctatttctacgatattgaaagcaaactgccgttgggtaacgcgactcaggtacagcatctctccgatctgttgaacatgagcgatgtggtaagcctgcacgtgccggaaaatgcctcaacgaagaatatgattggcgcggaagagctggcgctgatgaaaccgggtgcgctgctgatcaacgcctcccgcggtaccgtggtagatattccggcgctgtgtgatgcgctggcgagcaagcacctggcgggcgcggcgatcgacgtgttcccgaccgaaccggcgaccaacagcgatccgttcaactctccgctgtgtgagttcgacaacgttatcctgaccccgcatattggcggctcaactcaggaagcgcaggaaaacattggtctggaagtcgcgggcaagctggcgaagtattctgataatggttcaacgctctctgcggtgaacttcccggaagtgtcactgccgctgcacggcggacgccgtctgctgcatatccatgaaaaccgtccgggcgtactgaccgcgattaaccagatttttgccgcccagagcattaacatcgcagcgcagtatctgcagaccactgcgcaaatgggctacgtggtgattgatatcgaagccgaagaagatgtggcgcaggctgcgctgcaggcgatgaaggctattcctggcactatccgcgcccgtctgctgttctaa

SEQ ID NO: 255813 - DNA, 660 bp, Klebsiella pneumoniae
atgacgcaagatgaactgaaaaaagcagtaggctgggcggcattgcagtatgtacaaccgggcaccatcgttggggtcggcacgggctccacggcggcgcattttattgatgcgctgggcaccatgaaaggacagattgaaggcgcggtttccagctctgatgcctctactgaaaaactgaaaagcctcggtattacggtttttgatcttaacagcgttgaccgtcttggcatctatgtcgacggcgctgatgaaatcaacggccatatgcaaatgattaaaggcggcggcgcggcgctgacgcgcgagaagattatcgcttcggtcgctgacaaatttatctgtatcgctgatgcttccaagcaggtggacatcctgggtaaattcccgctgccggtggaagtgatcccgatggcgcgcagcgccgtggcgcgtcagctggttaagctgggcggccgtccggagtaccgccagggcgtcgtgaccgataacggcaacgtgatcctcgatgtgtatggtctggaaatcctggacgctattgcgctggaaaataccattaacggtattccgggcgtcgtgaccgtcggcctgtttgcgaatcgcggtgcggacgttgcgctgattggcaccgctgatggtgtaaaaactatcactaaatag

SEQ ID NO: 255814 - DNA, 894 bp, Klebsiella pneumoniae
atgaaacgaccggactacagaacactacaggcgctggacgcggtaatcagggaacgagggtttgagcgcgccgcgcagaagctttgtattacgcagtccgccgtctctcagcgcatcaaacagctggaaaacatgtttggacaaccgctgctggtacgtaccgtaccgccgcgtcccaccgaacaggggcaaaagctactggccctgctgcgccaggttgaactgctggaagaggagtggctgggcgatgaacaaaccggctcaacgccgctgctgctgtcgctggcggtcaacgccgacagtctcgccacctggctgttgcccgcgctctccagcgtgctttccgactcccctattcgcctgaacctacaggtggaggacgagacccgaacccaggaacgcctgcgccgcggtgaagtcgtcggcgcggtcagtatccagccgcaggcgctgccaagctgcctggtcgatcagctcggcgccctcgactatctgttcgtcgcctcgaaagagtttgcccagcgctatttccccaatggggtgacccgctcggcgctgctcaaagcgccggtggtggcattcgatcatctcgatgatatgcaccaggcctttttacagcagaacttcgatttgccgccgggcagcgttccctgccatatcgtgaactcttcggaagcctttgtgcagctggcccgccaggggacaacctgctgtatgattccgcatctgcaaattgagcgagagctgaacagcggcgaacttattaatctcacgccgggccttttccagcgccggatgctctactggcaccgttttgcgccggaaagccgtatgatgcgccgggtgaccgatgcgctgatcgattatggccataaagtgttgagacaagattaa

SEQ ID NO: 255815 - DNA, 2145 bp, Klebsiella pneumoniae
atgtcagagttacgagagtggcaaacgctcgccaacaaggagcttagccggcggggaaaaaccgtcgatgctctggtaaaacagacggcagaagggattgccgttaaaccgctgtataccgaagccgatattgataatctggaagtgaccggcaccctgcccggcctgccgccttacgtccgcggcccccgcgccaccatgtataccgcccagccgtggaccatccgccagtacgctggtttctcaaccgcgaaagagtccaacgccttctatcgccgcaacctcgctgccgggcagaaagggctttccgtcgccttcgatctcgcgacccatcggggctatgactccgacaatcctcgcgtggcgggcgacgtggggaaagcgggggtagcgatcgataccgtcgaagatatgaagattctgttcgatcgcatcccgctggatgaaatgtccgtgtcgatgaccatgaacggcgcggtgctgccggtaatggcgttttatatcgtcgcggcggaagagcaaggcgttgcgccggaacggctcaccggcacgatccagaacgatattctgaaagagtatctgtgccggaatacctatatttacccgccgaagccctcaatgcgcattattgccgacatcatcgcctggtgttcgggcaatatgccgcgctttaataccatcagcatcagcggctatcacatgggcgaagccggagccaactgcgtgcagcaggtggcctttaccctggccgacggcatcgaatacattaaggccgcgctctccgccggcctgaaaatcgatgacttcgccccgcgcctgtcgttcttcttcggcatcggcatggatctgtttatgaacgtcgcgatgctgcgcgccgctcgctatctgtggagcgaagcggtgagcggcttcggcgccaccaatccaaaatcgttagccctgcgcacccactgccagacttccggctggagcctcaccgagcaggatccgtataacaacgtgatccgcaccaccatcgaagcgctcggcgccacgctcggcggcacccagtcgctgcatactaacgcctttgatgaggcgctcggcctgcccaccgacttttccgcacgtatcgcgcgtaatacgcagatcatcattcaggaggagtcggagatctgccgcaccgtggatccgctggggggatcgtattacgtcgagtcgctgaccgatcaaatcgttaagcaggcgcgagccattatgcagcagatcgacgaagcgggagggatggcgaaggcgatcgaagccggactgccgaaacggatgatcgaagaggcctccgcccgcgagcaatcgctgatcgaccagggcaagcgcgtcatcgtcggcgtcaataagtacaagctggaaaaagaagatgaaacggcagtgctggagatcgacaacgtcaaggtacgcaacgagcagatcgcctcgctgaaaaaaatacgggccagtcgggacgatgtgacggtaaaagccgcgctgaacgccctcacccacgccgcgcagcataatgaaaatctgctggccgccgccatcaacgccgcccgcgtgcgcgccacgctgggcgaaatctccgacgcactggaggtggcttttgaccgctatctggtgcccagccagtgcgtcaccggcgtgattgcgcaaagctaccatcagtcagataaagccgcctgcgagtttgacgccattgttgcgcaaaccgaaaaattcctcgcggatcgcggccgtcgcccgcgcattttgatcgccaaaatgggtcaggacggtcacgatcgcggcgccaaagtgatcgccagcgcctattccgatcttggcttcgatgttgacctgagcccgatgttttctaccccggaggagatcgcccgcctcgccgtggagaacgacgtacacgtggttggcgcctcatcgctggcggcaggccacaaaacgctgatccccgagctggtcgatgcgttgaaaaaatggggacgggaagatatctgcgtcatcgccggcggcgttattccgccgcaggattacgcgtttctgcaggcgcgcggcgtggccgctatttatggccccggcacgccgatgctggagagcgtacgcgacgtcctgatgaggattagccagcatcatgattaa

SEQ ID NO: 255816 - DNA, 996 bp, Klebsiella pneumoniae; identical to SEQ ID NO: 175798

SEQ ID NO: 255817 - DNA, 786 bp, Klebsiella pneumoniae
atgtcttatcaatatgttaacgtcgaaattatccagaaggttgcggtgattgagttcaactatagccgcaagcttaacgccttaagcaaggtgtttatcgacgacctgatgcaggcgttgagcgacctcaacaggccggaaattcgctgcgtcattttacgcgcgcctggcggatcaaaggttttctccgccggccatgacatccacgaattacccggcggacgccgcgatccgctttcgtatgacgatccgctgcgccagattacccgcatgatccaaaaatatccgaaaccggtgatctccatggtcgaagggagcgtctggggcggcgcgtttgagatgatcatgagctccgatctgatcatcgccgccagtacgtcaacgttctccatgacgccggtgaatctcggcgtgccctacaacctggtcggcattcacaatctgacccgtgacgctggctttcatatcgtgaaagagctgattttcaccgccctgccgattaccgcccagcgcgcactggcggtcggtattctcaatcacgtggtggacgctggcgaactggaagattttaccttacagatggcgcaccacattgccgagaaagcgccgctggcgatagcggtcattaaggaagagctgcgcgtgcttggcgaggcgcacaccatgaattccgatgagttcgaacgtattcagggaatgcgccgcgccgtctacgacagtgaggattatcgggaaggcatgagcgcgtttatggaaaagcgtaaacctgaatttgtcggccattaa

SEQ ID NO: 255818 - DNA, 1467 bp, Klebsiella pneumoniae
atgaaacggatgagcgccgatgaagcggcggagattatccagcacgaccagatggtggcgttcagcggcttcactcccgccggttcgcccaaagcgctgcccacggctatcgctcgccgcgccggtgagttacatcgggcgcagaagcctttccagatccgcctgctgaccggcgcgtcaattagcgccgccgccgatgatgcattatcggcagccgatgccgtctcgtggcgcgcgccgtatcagaccgcgtcgggcctgcggcaaaaaatcaatcaggggaaagtgaagtttgtcgatctgcacctgagcgaagtggcgcaaatggttaactacggcttctttggtgagattgatgtcgcggtgatcgaagcctcggctatcgcgccggacgggcgggtctggctcaccagcggcatcggcaacgcgcccacctggctgctacgggcgaagaaagtgatcatcgaactcaatcattatcacagccctcgggttgccgagctggccgatatcgtgctccccggcgccccgccgcggcgcaacagcatcgccatctttcatgcgatggatcgcgtgggtagccggtacgtgcaaatcgatccgaaaaaaattgtcgcggtcgtggagaccgaactgcccgacgccggaaacctgctcgataaaaataatccggtttgtcagaaaattgccgataacgtggtcacctttctgctggaagagatggctcgcgggcgcatcccgcctgaatttttgccgctgcaaagcggcgtgggtaatatcaataacgcggtcatggcgcggctgggtgagaatccggatattccctcttttatgatgtactccgaggtcttacaggagtcggtagtccatctactggaaacagggaaagtcaccggcgtcagcgcctccagcctgacaatatccgccgattcgttgcgcaagatttacgccaatatggatttcttcgccagccgcattgtcctgcgcccgcaggagatctccaatcatccggaaattatccgccgtctgggagttattgccctcaacgtggggctggagtttgacatctacggacacgccaattccacgcacgtagccggggtgaatctgatgaacggcatcggcggtagcggcgattttgaacgcaacgcctggctctctatctttatggcgccgtccatcgccaaagacgggaagatctccactatcgtgccgatgtgcagccatgtcgatcacagcgagcatagcgtgaaggcgatcgttaccgagcagggtatcgccgatctgcgcgggttgtcgccgctgcagcgcgcccgcgctatcattgataactgcgcgcatccgctctaccgggactatttacatcgctatctgcagagcgctcccggcgggcatattcaccacgacctcacccacgccttcgacctgcatcgtaatctgcttgagcacggttcaatgctcggttag

SEQ ID NO: 255819 - DNA, 897 bp, Klebsiella pneumoniae
atggatatctttatttctaaaaagatgcgcaatttcattctgttggcgcagaccaataacatcgccagagcggcggaaaaaatccatatgaccgcatcgccctttggcaaaagcattgctgcgcttgaggatcagatcggctatacgttatttacccgcaaagataacagcatcagtctcaataaagcggggcaggagctctatcagaagctgtttcctatttaccagcgcttatcggccatcgataacgaaatacactattccgcgcgccgctcgcgcaacgttgttatcggcatcgacaacacctatccgacgataattttcgaccagctcatcagcctgggcgataaatacgatggcgtgaccacccaggccgtggagttcagcgagaatggcgtgattgataatcttttcgaccgtcagctggattttattatttcgccgcagcatgtttcgccccgcgtgcaggagctggaaaatctgaccatcagcgaactggcgccgctgcgtctggggtttcttgtttcccgccgttatgaagataagccgccgcaggatctgttacgtgaactgccctggctgcagatgcgtttccagaatcgggccaattttgaggcgatgctggacgcctatatgcgcccctgcggaatcaacccgacggttatctatcgcccctatagctttatggcgaaaattagcgccgtagagcgggggcagtttttaacggttattccttacttcgcctggcgtctggtaaatccggcgaagctgaagtacttcgacgcgcccggtagcgccatgtatatgcaggagtatctctattcgctgaaaaaccatcgctataccgccacgatgcttcagcacataactgaagatcgcgacggtacggagggctaa

SEQ ID NO: 255820 - DNA, 756 bp, Klebsiella pneumoniae
gtgaagttaaaagtcatggccctggcggcggcactcggatttagcgcaatggcagttcaggccaatgaattgccaaacggcccacatattgttacttcaggtaccgccagcgtcgctgcggttcctgatatcgccacgctggcgattgaagttaacgtctccgcgaaagatgcggcatccgctaaaaaacaggcagatgaacgcgtggcccagtatctctccttcctggagaagagcggcattgcgaagaaagacattaactctgccaacctgcgtacccagcctgattatgattatcagaacggcaaaagcattcttaagggctatcgcgcggtgcgtagcgttgaagtcacgctgcgccagctggataagctcaacgggttgttagatggggcattaaaagccggtctgaacgagatccgttcggtctcactgggcgtggcgcagccggacgcttacaaagataaggcgcgaaaagcggcgattgacgatgcgattcatcaggctcaggagctggctagcggattccacggcaaactggggccggtttatagcgttcgctatcatgtctccaactaccagccgagcccgatggtgcggatgatgaaagccgatgcggcgccggtatctgctcaggaaagctacgagcaggcgaccattcagtttgatgaccaggtggacgtggtgtttgagctgcagccgacccagcctgcgtcgccagcgaaaccggctgaagagccaaaagcagcgcagtaa

SEQ ID NO: 255821 - DNA, 594 bp, Klebsiella pneumoniae; identical to SEQ ID NO: 175793

SEQ ID NO: 255822 - DNA, 858 bp, Klebsiella pneumoniae
atggaagatttgaacgttgtcgatagcataaataacgccggttcatggctggtgcgcaatcaggcattactgctgagctatgccgtcaacattgtcgcggccatcgcgattattattgttggtctgatcgtggcgcggattgtttccaacaccgtcaatcgcctgatgcgggctcgacatattgacgccaccgttgccgattttctttctgcgctggtacgctacgccgtcattgctttcacgctgatcgccgccctcggccgcgtgggtgtgcaaaccgcttcggttatcgcggtacttggcgccgcgggcttagccgtcggtctggcgctgcaggggtcgctgtctaaccttgccgctggggtcctgctggtcgttttccgcccattccgcgctggtgaatacgttgaccttggcggtatcgcgggtaccgtgctgaacgtgcagattttctccacgaccctgcgcagcgcagatggcaaaattgtggtggtaccgaacggtaaaatcattgccgggaatatcatcaacttctctcgcgagccggtacgtcgcaacgagtttattatcggcgtggcctacgatgcggacatcgacaaagtgaagcagctgctcaccaacatcatcgaatcggatgaacgtattctcaaagatcgtgaaatgaccgttcgcctgaatgaactgggcgcttcatctgtgaactacgtggtgcgcgtatggagtaagagcagcgatctgcaaagcgtgtactgggacgtcctggagcgtattaagcgcgattttgacgccaacggcatcagcttcccgtatccgcagatggacgttcatgtcatccgtccgcaggaaaaagcagaataa

SEQ ID NO: 255823 - DNA, 1080 bp, Klebsiella pneumoniae
atgtctaaaatttttgatttcgtaaaaccgggcgtcatcactggcgacgacgttcagaaagtgttccaggtagctaaagaaaacaactttgctctgccagcggtaaactgcgtgggtactgattccatcaacgccgttctggaagcagctgcaaaagttcgttctccggttatcgttcagttctctaacggcggcgcagcgttcatcgcgggcaaaggcgtgaaaactgacgttcctcagggcgcagccatcctgggcgctatctctggcgcgcatcacgttcatcagatggctgaacactacggtgttccggttatcctgcacactgaccactgcgctaagaaactgctgccgtggatcgacggtctgctggacgcgggtgaaaaacacttcgccgcgaccggtaaaccgctgttctcttctcacatgattgacctgtctgaagagtccctgcacgaaaacatcgagatctgttctaagtacctggcgcgtatggccaaaatggacatgactctggaaatcgaactgggctgcaccggcggcgaagaagacggcgtggacaacagccacatggacgcttccgctctgtatacccagccggaagacgttgattacgcctacactgagctgagcaaaatcagcccgcgtttcaccatcgccgcttccttcggtaacgtacacggcgtttacaagccgggcaacgtggtgctgaccccgactatcctgcgcgactctcaggaatacgtttctaagaaacataacctgccgcacaacagcctgaacttcgtcttccacggcggttccggttcttccgctcaggaaatcaaagactccgtaagctacggcgtgatcaaaatgaacatcgataccgatacccaatgggcaacctgggacggtatcctgcagtactacaaagctaacgaagcttacctgcagggtcagctgggcaacccgaaaggcgaagaccagccgaacaagaaatactacgatccgcgcgtatggctgcgcgctgcacagacgtccatggtgactcgtctggagcaggcatttaaagagctgaacgcgatcgacgttctgtaa

SEQ ID NO: 255824 - DNA, 231 bp, Klebsiella pneumoniae
gtgttcgaattcccgaacttccgcaaagggactgaaatcgtggctaacgccatcgcagatagcgaagcgttctccatcgcaggcggcggcgacaccctggcagcaatcgacctgttcggcattgctgacaaaatctcctacatctccaccggcggcggcgcattcctcgaattcgtggaaggtaaagttctgccggcagtagccatgctcgaagagcgcgctaagcagtaa

SEQ ID NO: 255825 - DNA, 444 bp, Klebsiella pneumoniae; identical to SEQ ID NO: 174616

SEQ ID NO: 255826 - DNA, 561 bp, Klebsiella pneumoniae; identical to SEQ ID NO: 174615

SEQ ID NO: 255827 - DNA, 732 bp, Klebsiella pneumoniae
atgagaccttcatctctcatccgaacactctcaacggtagcctgcctcgctgcggcggtaacgtcatggtcatccctggccagcgttatcgttaacgggacgcgcgtgatctacaacggaaatgaaaaggaagtgtctgtcagactgacgaataccggcacgcttccggttctggtacaaagctggattgatgaaggtgatatgaatgccaggccggatcgcatccgtacgccctttactctgacgccgccgatcaaccgtattaatgccgataaaagtcagactctcagaatcagctataccggctcaccggccctgccgcaaaacaaggagtccgtttactggctgaatcttcttgaggtgccggcatccaaaaaagacgacagtttaaataaactgcaggtggcttttcgtacccgaataaaactgttttaccgcccggccggcctcactgacagagcaaaagtcaccgaagcggctgaaaaaattaagtggaccgtatccgggggaaaactgattgcatccaactcctcgccctattttatttcgctggtgtccgtttcgctgaaaaacgccggcaaaaatggctcggttgaaggcgaaatggttcctccaatgggcagctatacctttaatttgccgaaatccgtaaacgccggtgcaggttcattactgatttatgaatatgtgaatgactggggcgcactcagaaaagtcgaatacaccttataa

SEQ ID NO: 255828 - DNA, 2535 bp, Klebsiella pneumoniae
atgcgtcttcagtttggatattcattgattgccatcgctgtcatggctgcaattatgaccccgcggcaggtcgttgcaacatcgctttcatcgtctcccgcgaatgaagacaatcttacttttgaccccattttcctgaatacctcgggtgaagaaaaaatcgatttatcgcgctttgaaaatggcggctccgccacgcccggaacatggtcaacggatattttcgttaacggtgaatcagtcactcagagcccggttttatttgccgagcaggcggataaaaaagtgcgcccgtgtatcactgccggcctgattaaaaatctcaatctgaatttcgataaggtcccggcctcttttaccaccgctctgcgggagaaccgtgcgtgctataaccttgaagaattattacccggggtcagcatcatctatgactcctccacgcagcggctggatgtcgaaatcccacaggccctgttgcgtaacacggctcgcggttatgtcagcccggcattatgggataccggtattcctgcggccctactgggctataacgccagcacttacaccacccgctcacacggaagggattacacatcctcctatattggcctcaacggcggactgaatattggtggctggtatttccgccatgatggtaactacagctggcagcaaagcaacggcggccagtatcagtccatcaataattacgtacaaaaagatatctcatccatcctcggccgggtgctgcttggcgaaacctccaccggggggcagctctttgataccctccctttccggggcgttgagctggtcagcgacgacaggatgctgccgcagtcccgccgcggctatgcgcctgatatccgcggtatcgcgcgtaccaatgccagggtaaccgtacggcagaacgatcgcatcatttatgaaaccacagtaccgcccggagctttcgtgattgaggatttgtatcccaccggttacggcggcaatcttgacgtgaaggtcacggaagccgacggcagcgtgcagagcttccaggtgccttacgcgtcggtgacccagcttctgcgcccgggcgcgcaccgctatgatgtggtggcaggacgactgaacgatcccagcctttcctttaacccaacgctgtatcaggcgacctatcagcgcggcctgtcgaatatcctgaccggatacaccgggatccagggcagcggcgccgcctactatgcggtgcagctaggtatggctattagcacggctatcggcgctttttctgtcgatgtcacccaggcgcgcgtacacctgaaaactacagacgatactgcgaatagcggccagagctaccaggtaagctacagcaagtatttaccggatacggacagtaacctgactatcgcagcgtaccgattctccacgtccggatattacgacttccagaccgcaatgcgcgccattgatgaagaaaaacgcggcggtctggcctccggaatatggcgtcccaaaaatcgcctgaatattacgatgaaccaggggcttggcccgggatggggacagctgtatgtcaccgggtacacccaggattactggaacaacggtaagtctgacattcagtatcaaatgggctacagcaataacttcggccgggttaactataacctcagcgcaggacgcgtcagaaactacagcggaaaaatggaaaacaactttctgctgaacatttccaccccgctgggtggatacgataagaagcatgtgccgatgctcaccgccagtctgaacaaaagcggcaatggtcgcatgggtgaacagctgggcctttccggcacctacggggaggataaccagtataactacgggatgacggcggcgaactataaccagggcaccggcagcagcatgaccgcgagcggcggatggcgcacgccttacagccatctgacggccagctatggcgccggcaagcattaccagaacaccagcctggccgccagcgggacggtgattgcctggcagaacggcgtggtggccacgccttatacgggagacacctttgccgtggtcgaggcgaaggatgcgaaaggcgccaaagtcggcggctatccggggctgaaaattgaccgctttggacacgcggctattccgtacctgacaccgtatgaaatgaacgaggtcagtattgacccgaaagggctgtcacaggaagtcgagctgagcaataccaccgagaaggtcgcacctcactggggcgcagtcagcaaggttgttttcaatacccgtaaagggatcccgctgcttatcagtgcgaaaaatttgcaaggcgagcccttacctttcggcgcggaagtatttgatgcatccggagccagcgtcggcaacgttgggcagatgggacaaatatatgcgctgaccgaagccgccgccggccagctgaccgtgaagtggggcagcaaggataatgaacagtgccggataacctatcgggtcaacgatgagaaaccgtcagggttcagaaagttgaccgaaacgtgcaaataa

SEQ ID NO: 255829 - DNA, 699 bp, Klebsiella pneumoniae
atgattatcaatcaccttacacagaccaccgaagtcaacgttctgacccagaatgtatacctgaaaaaggccctcgagtcgttaatagtggaatgtacggcgggcgataagaaggtgcgctcagggtatcaccctgcttttattaacaagcctgaacatttcagagtggcacttatcgataccgaatacatttatcaccaaagaggtgcctggtataaaatttacaaagaaattatcagggcagattattacgttttcatttccttaaccgatatgaagtttggccgggtccccttcctgccgctgtgcggctcggtcagtaaaataaagaaagcgctgctgcatattatcaacagcgtcgggcagaaaaagcactcgttaacaaggagtaacccgctgtcctctctgagcttttccgaaaaggagctgttcttttttttaatttcgggatacggcatggatgaaatttttctcgcactgggtaaaagcaaaaaaacggtatatcagtcgagaaccaatttaatgaagaagatgagattaacgaataaaaaagatttgcatatgatgctgaagttttgtgaattcgttgagtattacactttcagggaaagcactcaagccaccggcgataacgcctctctggttaacaatggacgtttaccgtttctcccgaatccggttgaacatgatatgcactga

SEQ ID NO: 255830 - DNA, 1173 bp, Klebsiella pneumoniae
atgaaagtgttattaactgtcgttcgtttttttaaaacacaattccggccggtaaaatacctgagcctcggtctggcctgcatattcacatctcaggcccaggctcttcattgtgaattcacagagttatataccgataacatttcaatccccgttgttggtctcggaatatccaccgtcggtgaagacgttccggtaggtaaaattttatatcgccaggactatcgaactgccagcagaactacatcattcgcatgtaccgttgagcttgaagatattgcatccgggccatacacaatgaacgcatatacaaaaactgaggttatatccgcaccatcgggtccggcagtgcggtcaggtggtaaagatatattcccaaccaacgtttccggtattggagctattttttatctttccgggatagaggtagattatacttctttccctcacatttgggagagaagtcaaagtataggctatggcactcttacccaaggtatgggccaattttggaaagtaaccatagaacttatcaagactggtcctattgcaggaggtactcagcaggttgatggttcatcctttccaacatttcagattacctctggctcaaactcccctttcattataaacaatgtttttgtcaatttgaatttcgtgggttcaacaatgatccacaccaaaacatgccagctggtaacgtccaatattgatgtgaatcttgacaatcatgcggtcggtgattttaccagcccgggaacggttaccgagtggaaggattttgatatcgtcctgcagggctgcccaccattctatggttatggcaattacacctataatgaaaacacggacaaacttaccggttccaatgccgaaaacgttgtctctattacctttaaaagcgctaacggcgtcatcgagggcaacccttcactggccaaactggattctggagccaatgcagccaccggtgtcggcattgaattatcacaaagaaatatatccggcagcataccgctggatggttccggcggctttaacctgaccaatcttacacaacaagataacgccacctataccatcccgctaaaagctcgctatgttcagtctgataccaacgtcacggcagggccagctaatggttccgtcatttttactattacctatttgtga

SEQ ID NO: 255831 - DNA, 705 bp, Klebsiella pneumoniae
atgcctcgaaaaataatttacagtcatatcatgataatcatcttcgctttttgcgggataagttctgctttagccgatattgtcatcaccggaacccgcttcgtctatccagaaaaagagcatgaagtgacggtgaaaattgataatgtcggagagaaacccgctctcgctcaggtatggatagattcaggcgatcctaatgccacgccggaaacggcaagagcgccctttactattacccctccgattaaccgcatcaacgggggcaaaggccagacgctgcgcatgatatatacgggagaaaagctgcccggtgataaagaatccttattctggctaaacgtgctggaaattccggcgacgaaaaaagacaataaaaaccagctaaaaatagcggttcgttcaagaattaaaattttttaccgcccgcagggattagccggcagcgccaatcaggcaggaaagtcaatcatctggaaaaaggtcaatggtggaattgaaggttcaaatcctaccccgtactttgtctccctggcgaatatcaccgaggataaagaagggaaaacagtggttgccaacggagggatgattgcaccgggaggaaagagcgttttccccatgaagaagcacctcgcgacgatttatccatcttatattagtgatgagggagcgattaattcctttgcgcagcagatcatcccctaa

SEQ ID NO: 255832 - DNA, 1578 bp, Klebsiella pneumoniae
atgacggataacattcataaacatcgtattcttatcctggacttcggttctcaatacacccagctggttgcgcgtcgcgttcgtgaattaggtgtctactgtgaactgtgggcatgggacgtgacggaagctcaaattcgtgagttcaatcctaacggcatcattctttccggcggcccggaaagcactaccgaagataacagcccgcgcgccccgcagtatgtcttcgaagctggcgtgccggtctttggcatctgctacggtatgcagactatggcgatgcagctgggcggccacgttgaagcctctaatgagcgtgaatttggctacgcgcaggttgaagttcagaccgatagcgcgctgatccacggcattgaagatgcgctgagcgcggacggcaacgctatgctggacgtctggatgagccacggcgacaaagtcaccgccatcccgtctgacttcgttaccgttgccagcaccgaaacctgcccgttcgccattatggccaacgaagagaagcgcttctacggcgtgcagttccacccggaagtgacccacacccgtcagggcctgcgcatgctggagcgttttgttcgcgagatttgccagtgtgaagcgctgtggaccccggccaaaattatcgacgacgccatcgaacgtattcgtcagcaagtgggcgacgataaagtcattctcggcctctccggcggcgtggactcgtctgttaccgcaatgctgctgcatcgcgctatcggcaaaaacctgacctgcgtcttcgtggataacggtctgctgcgtcttaatgaagctcagcaggttatggatatgttcggcgatcgtttcggtctgaacatcgttcacgtcgaaggcgaggcgcgtttcctggctgcgctggcgggcgaaaacgatccggaagcgaagcgtaaaatcatcggccgcgtgtttgttgaagtgtttgacgaagaagcgctgaagctggaagaagtgaaatggctggcgcaggggactatctaccctgacgtgatcgagtctgcggcttccgcaaccggcaaagcgcacgttatcaaatctcaccacaacgtgggcggcctgccgaaagagatgaagatgggcctcgttgaaccgctgcgcgagctgttcaaagatgaagtgcgtaagattggcctcgagctgggcctgccgtacgacatgctgtaccgtcacccgttcccgggaccgggtctgggcgtgcgcgtgctgggcgaagtgaagaaagagtactgcgacctgctgcgtcgcgcggacgccatcttcattgaagagctgcacaaagctgacctgtacaacaaagtgagccaggcgttcaccgtattcctgccggtgcgttccgtcggcgtaatgggcgatggccgtaagtacgactgggtggtctccctgcgcgcagttgaaaccatcgactttatgaccgctcactgggcgcacctgccgtacgatttcctcggccgcgtgtccaaccgcatcatcaatgaagtcaacggtatctcccgcgtggtgtatgacatcagcggtaagccgccggctaccattgagtgggaataa

SEQ ID NO: 255833 - DNA, 1467 bp, Klebsiella pneumoniae
atgctacgtatcgctaaagaagctctgacgtttgacgacgtcctcctcgttcccgctcattcaaccgttctgccaaacaccgccgatctcagcacccagctgacgagaaccattcgcctgaatattcctatgctctccgcagcaatggataccgtgacggaagcgcgtctggcaattgccctggcacaggaaggcggcatcggttttattcataaaaacatgtctatcgagcgtcaggcggaagaagttaagcgcgtgaagaagcatgagtccggcgtggttaccgacccgcagaccgttctgccgactacgactctgcgcgaagttaaagagctgactgaacgcaacggttttgctggctatccggttgtgaccgaagacaatgagctggtcggcatcattaccggccgcgatgtgcgtttcgtcaccgacctgaaccagccggttagcgtatatatgacgccgaaagagcgtctggttaccgttcgcgaaggtgaaagccgcgaagtggtctttgctaaaatgcatgaaaaacgcgttgagaaagccctggttgtggatgacagcttccatcttctcggcatgatcaccgttaaagatttccagaaagcggaacgtaaaccgaacgcctgtaaagatgagcagggtcgcctgcgcgttggcgcagcggttggcgcgggcgcgggtaacgaagagcgcgttgatgcgctggttgccgcgggcgtcgatattctgctgatcgactcttctcacggtcactctgagggcgtattgcagcgtattcgcgatacccgcgcaaaatatcctgacctgcaaatcatcggcggcaacgtggcgaccggcgcgggcgcacgtgcgctggcggaagccggctgcagcgcggtgaaagtgggtatcggtcctggctccatctgtacgacgcgtatcgtgaccggcgtgggtgttccgcagatcaccgccgtttctgacgcggttgaagcgctggaaggcaccggtattccggttatcgccgacggcggtattcgtttctccggcgatatcgccaaagctatcgccgctggtgcttcagccgtcatggttggctcgatgctggcgggtaccgaagagtccccgggcgaaatcgaactctaccaggggcgttcttacaaatcttaccgcggtatgggttcccttggcgcgatgtctaaaggctcctccgatcgctacttccagaccgataacgccgccgacaaactggtaccggaaggtatcgaaggtcgcgtcgcctataaaggccgtctgaaagagattattcaccagcagatgggcggactgcgctcctgtatgggtctgaccggttgtggtaccatcgacaccctgcggaccaaagcggaattcgtgcgcatcagcggcgcgggtatccaggagagtcacgttcacgacgtgaccattaccaaggaatccccgaactaccgcatgggctcctga

SEQ ID NO: 255834 - DNA, 1374 bp, Klebsiella pneumoniae
atgttgccatctcaatccccctcaatttacacggttagccgcctcaatcagtcggtccggctgctgctggaacgtgaaatgggccaggtatggatcagcggcgagatttccaatttcagccagccctcttccggtcactggtactttaccttaaaagacgataacgcccaggtgcgctgcgcaatgtttcgcaacagcaaccgccgggtgaccttccgtccgcagcacgggcagcaggtgctggttcgcgccaacattaccctttacgagccgcgcggcgattatcagattatcgtggagagcatgcagcctgcgggcgaaggactgcttcagcagaagtatgaacagctgaaggccgccctggcggcggaaggcttgttcgatcagcagcataaaaaagcgcttccctcccctgcgcactgcgtaggcgtcattacctctaaaaccggcgccgcgctgcatgatattttacaggtgctcaagcgtcgcgacccttccctgccggtgattatttatccgaccgccgttcagggcgaagacgcaccggggcagattgttcgcgcaattgaactggccaacgcgcgccgcgaatgcgacgtacttatcgtcggacgcggcggcggttcgctggaagatttatggagttttaacgacgagcgggtggcgcgggcgatatttaccagtccgattgccatcgtcagcgccgtgggccatgaaactgacgtcactattgccgatttcgtcgccgacctgcgcgcgccaacgccttccgcggcagcagaaatggtcagccgtaaccagctggagctgctgcgccagctccagtcaggacagcagcgtcttgagatggcgatggactacttccttgccaaccgccatcgtcgctttacccagatatttcaccgcctgcagcagcagcatcctcagctgcgccttgctcgccagcaaacggagctggaaaggttgcgtcagcgcatgcgtttcgctcttgagacgcagatgaagcgcgccgatcagcgccagcagcgcgctacgcagcgtctgaatcagcaaaatccgcagccgcgtattcaccgcgcccagagccgtattcaacagctggaatatcgcctggcggaaaatatccgcagccgcctcggcgagcagcgcgagcgcttcggcaatatggtcacgcatctggaggccgtcagcccgctggcgacgctcgcccgcggctatagcgtgacttccgccagcgacggcaaagtgctgaagcagaccaaacaggtacgcgagggagaccttctcactacccgcctgaacgatggctgggtggagagcgaagtgaaaaacatcacgccggcgaagaaaacgcgctcccgtaaaaaagcctga

SEQ ID NO: 255835 - DNA, 1029 bp, Klebsiella pneumoniae
atgcctgttgcttatcctcgttatgtgattccgccctatattttacgccgcattgtcgaccatggctcgcttcagcagcagcgctgcgcgcagaataccctcagccatgttcagtccctgatggcgcatgttcccggacgccccgctgctccccatgtcaccacgccgggccagcttgagcgcgacatttacgatgccgggcaaacccaggaactaccgggaacgcaggtccgttttgaggggcagccctccaacggtgatgtggccgttgatgaagcctatgactatctcggcatcacccatgagtttttctggaagagctaccagcgcgattctctggataaccgcgggctaaagctcaccggcagcgtccactatggccacgaatatcaaaatgcgttctggaacggccagcaaatggtatttggcgacggtgatggcgagatttttaatcgctttactatcgccattgacgtcgtcgcgcacgagctaagccatggcgtgacggagagcgaagccggtcttatctacttcgaacaatccggcgcgcttaacgaatcactctcggacgtctttggctcgctggtcaaacaatatcagcgccagcaaacggcggacaaggcggactggctaataggtgagggactgctcgcgaaaggcattcacggcaaaggtctgcgctctatgtctcagcccggctccgcttacgatgaccccatccttggcaaagatccgcagcccgctcacatgaaagattttgtgcatacccagcaggataacggcggcgtacatatcaattccggcattcctaatcacgccttttatctcgccgcccgcgccatcggcggttttgcgtggcaaaaagcgggccacgcctggtatgacgcagtgtgtgataactctctggcaaaagacgctgatttttcaacctttgccaggctcacggttcgccatggcgaaaaacgttttggcaaagagatcgctgatgccattactcaagcctgggggcgcgtcggagtggtgctatga

SEQ ID NO: 255836 - DNA, 345 bp, Klebsiella pneumoniae
atgaatcttgccgatcttagcgatgatgcgattattgagctggctcgcgaggggggcgtcgcctggatcccggcgctcagtggaatgcgtaagattgtggttgcgaagctcaacgagcaacagaagcagcggatcgcttcaattcttcaacaatcgctaccgctgggcaagccgccagggcagcccgactcgccgggcagcggcgaccagcgtttttttcgcattcagatcgtcagcgagcagcactaccacagcctgattattctcatcccggaggagcgtgcgccagaatcactggttgaactctggcgcgacggtgaaagctgcgtcagcgataaaaattaa

SEQ ID NO: 255837 - DNA, 216 bp, Klebsiella pneumoniae
atggaatttgattgccccgtgtgccatgcgcaggttgctgtgcagggcaatagcgcccactgcgcgcattgcgcgaaagagtatgttgttgaagcccgctgcccggactgccacaagccgctggaagtattaaaagcctgcggcgcggtagattatttttgtcagaatggccacgggctgatttcaaaaaaacgcgtcgagtttgtgccggtttaa

SEQ ID NO: 255838 - DNA, 393 bp, Klebsiella pneumoniae; identical to SEQ ID NO: 174603

SEQ ID NO: 255839 - DNA, 738 bp, Klebsiella pneumoniae
atgtcttttacctcccgcttactgagcactatccccggcatccggtatgcctttctcgacgtccatgaaaccgccgcctttccctatagcgaaatggcgccggttaaactggttcacagcaacatcgtgcatgagtatctggcgccgcaggcggagcgaccccatgccgatgcgatgtttaccgccgtcagcggacaaaagataggggtagtgaccgccgactgtctgccgctgctgatggcgtcgcgcgatgggcgctatatttgtagcgtccacgcaggctggcgcggcgcggccagcggaattattgaaaatagcctggcgttgtttcagcgttatcacgtcgccccgcaagatctggtggtagtgagcgggccgcatattcacgcctgctgctacgaagtcaccgccgacttctatcaggctctgctggcaatgcccgcaggcgagctggcaaagcgccatcgggagcagctcttcctgccccatcaggcggcgtcagtgggggagcaggcgcaagcgaccgctgacgacaatgtctggttcgatctgcgggcctttgcccatctcctgctgcgcagcgcgggggtgccggaagaaaacatggagtggctggggagctgtacctactgcacgccgcagctgctggggtcgtttcgtcggcgcacgcatttcccggcgccgaagtcatttcagtactcatggatcatgcgcgaacctgatagtgcgggccgatga

SEQ ID NO: 255840 - DNA, 1404 bp, Klebsiella pneumoniae
atgaaattgaacccgttcgctttaactcttgcgccgctgctggccgccggcgcgttttctgctcatgccggcccgcaggcccacgtggtctgcgcttatcaccatacgttgggcgatgacgccattatgatgttcggcaaaccgaatcaggctatgtggcatgatttttttggcaacacccatactgacgcagtgtcgacctatcagacgctgcgcgaccagccggaaaccacctgcgataacaaagccgacagctccgcctactgggcgccatcgctgaagctgcctgacggtcaggtggtcgcgccggcttatcaaaaaacctactaccagaccagcaaagtcgaacagcatccgctgcatccgttcccggccggtctcgaactgctggcgggcgatcatcacggttctgctcccagttcgcgcattacctttctctgcgccaacggcaatggctataccaataaggccgatcagatttgcgggctgcgcaaagcgggggatgcggtacagtttaatatcggtatccagttccccaactgctgggatggcgtcaacctgaaaccgacgcacggccacagtaacgcgacatacgacgtcaatggcgcctgtccaggcgattacccggtgaaaattccgaccgtaaacatgaacgtggcatacgttctgccgcagataaaaacgctggatacggcaaaaattcagctttcaatggatccggtcatggacggcgacaagcgtcaagagcgctggggcagcatctatacggcgcacgcggatttcatgaacggctggacggttgaggcagcgcactatatgaccgagcgctgcatgaataaggggatcgactgcggtagcgcggtgccttatggcttctccacggtagaggagaacgcgctggtggacagcaccgagccgacggtgacccatgccgctccggaaaatctggtggtcagcgataactggaaaaacggcgggcgcacgcataacccggaaaccatgacgctggtgaaattcccgatcccgccgctgccgcagggtcaggacgcttcgctgtttaaatatcagttgcggatctacggtggaaaagtggaaaccaacggcgcggatcagattttcctctatccggcgagcaacgactggagcgcaaacagcgtgacctggaatcatcgtccgtcctgcaactacagctctgatggggttctgtatcttaattcaaagcgtgaataccggacgatcgatgttgataaagcggtgcgcaaggcgctggctgagggcaaaaccgagatctcgtggtatatcggcggagaccgtcagggcaaccgctatcatttcgatcccgcggggtcgcagcaggagccgatgctgatgctgatgggctttaaaaatacgccggagatctga

SEQ ID NO: 255841 - DNA, 1581 bp, Klebsiella pneumoniae
atgcccatctgttcttatcgcccgaccgctcagctgcgccaggcgctgcttgacggcgcggagctggcgctgatcgatgttcgcgaagaggccgactttgcccgcagccatccgctgtttgccgctaatctgccgctcagcaaactggagctggatgtttttcgacgcgtgccgcgcctgacgacgccgattaccgtctatgacggcggcgaaggtctggcggagcgggccgtcgagcgcctgcagagctggggttatcaggatgtcgcgctgctggaaggcggcctctcggggtggcaacgcagcggcggggagctgtttcaggacgtgaattcgccgagtaaagcgttcggcgagctggtagagagcgagcggcataccccctcgctgagcgccggggaagtgaaggcgctgctcgagggtcaacaggaggtggtggtcgtcgacgcgcgccgtttcgatgagtatcacaccatgaatattcccggcagcatcagcgtgcccggcggggagctggcgctgcgcatcgagggcctgattccgtcaccgcaggcgacggtgatcgtcaactgcgcggggcgcacgcgcagtattatcggcacgcagtcgctgcgcaacgccggtttgcccaatccggtctacgcgctgcgcaacggcaccatcggctggaccttagccgggcttgaccttgagcgcggccagcagcgccgctacgatgccgattttcgcgcctcagtcgaacgcgcgacggcggtgagacagctggcggagcgcgccgacgtcgcctttatagacaccccaacccttcagcgctggctgcggcagcccgcgcgtacgacttacctgtttgacgttcgcagcccggaggagtacgccgcaggccatctgccgctgagcgttagcgcgcccggcgggcagctggtgcaggaaaccgaccatttcgccagcgtgcgcggagcgcggattgtgctgattgccgatgacgcgatacgcgcaccgataacggcgtcctggctggcgcagatggggtgggaagtggcggtgttaaatgatgcgcgccctgaagactttagcgagcgcggtacccccgcagccaaagtaccgccggggccgcaggcggaggagatttcgccacagcagttagcggaacagctgcgggtacccggcaccgtggtgctggacttcaccaccagcgccaactatgtcgcccggcatatcccgggcgcttactggctggttcgttcgcagctgcgccaggcgctggaggtgataccgcagggagaacgttacgttgtcacctgcggcagcagcctgctggcccgctacgcggtgccggaggtagcggctttaaccggtaaaccggtgcagctgctgagcggcggcaccctggcgtggattgatgccggactggcgttggagcatggcgagacgcatctggcgacgccgcgtagcgatcgctatcagcgcccatatgaaggtaccgataactccccggcggcaatgcaggcctacctcgactgggagttcggcctggttgaacagctggcgcgcgatggtacgcacgggtttaaggtattgtga

SEQ ID NO: 255842 - DNA, 597 bp, Klebsiella pneumoniae; identical to SEQ ID NO: 174527

SEQ ID NO: 255843 - DNA, 894 bp, Klebsiella pneumoniae
atgcgcatcgacgacattgacgcactgctggccaccgtgcagttctcctcgcttaatcaggccgcggaatatctcggtattacccaatcggcgataacccgccgacttcagcgactggagcaaaccctcaacgtgacgctgcttgagcgtcagacccggccgctcaccctgaccgccgccgggcaccgggtttacgagcagtgcctgagcatcaagcgggagaccaaaaagctgtacggcctgctcgaccccgaggccgagccgcacggcatcctgcgtctcggggttccgcagagcgtggcggaaattgcgctgcagccggcgctgactgcgctgcgccagcagtttcccgccctgagaccgcaggtgacctgcggctggagcgggctgctgcaaaagcgccttgaaagcgtcgagctggacggcgtgctggcgatggggccggaacagcaacgctttgctgagggctacggcgggcgcctgctgtgcccgctggatattgcggtgattgcggccaaaagctggcgtcttcacgccggggcgctgcgcgactgcgcggaaaaaggctgggtgcttaatcccgacggctgcggcctgcgggccgggctgattcgcgagctgcagtcccaggggctgcgtctggcgctgaatgttgagaccgcgggtgcccagctgcaaatcagcctcgtggcgcaggggctggggcttggcctggtcccgcgcgccgcgctggccgccagcccgtggcgcgatgaggtgacaatattgacgctggcggatttccagcccgaggtgcatctgtggctggttcacgcgcagaatctggctaatctgagccagccgctgacttttttcgccggcaaagtcgttcagcagctaaacgtatctggctga

SEQ ID NO: 255844 - DNA, 1086 bp, Klebsiella pneumoniae
atgagcattcaatttctcggcatgatcggccaccgcctgtcgtcggaaaccatcgccccggtcggccccatttttgaccgcgattacatcgtgcgtttcgcgcaaacccacgaggccgccgggtttgaccgcctgctggtgggccactggtccgatcaacccgacggattcctggtgaccgcgctggcgggtctgtcgacgcaaaagatcggctttctgttggctcatcgtcccggttttgtctcgccgaccctcgccgcgcgtaagttcgctacccttgaacatctgctgggcggacggctggcggtgcatatcatcagcggcggcaatgacgccgaacaacgccgcgacggcgattatctcgatcacgaccagcgctatgcgcgcaccgatgccttccttgagacccttcgcacggtgtggaccgccgaacagccggtggatatcgccaatgacttttatcaggcggaacaggcgtggtcggcgatacgcccgctgcaaaaaccgcatatccctctctacttcggcggctcgtcggaagccgctatcgccgtggccggcaagcatgccaatgttttcgctctgtggggcgagtcgctggcgcaaacggaggaaaccatccagcgcgtgcgggccgaggcggcgaaacatcagcgagaaatcgacttcagcgtctcgttccggccgattatcgccgcgaccgaagctgaggcctgggaaaaagccgagcatattctgcacgtcgccaccgaacgggcggcgcagagcggggacggcttcaaagccaagcctgacagcgtcggggcgcagcgtctacgggccaccgcagcgcagggcaaggtggtagataaacgtctgtggaccggaattgcgcagctggtgggcggcggccacaactctaccgcgctggtaggcactccggaacaggttgctgacgcgctgctcgattattacgacctcggcgtgcgcaacttcctgatccgcggattcgatccgctcaacgatgcccaggagtacggtaaagcgctgctgccgatcgcccgcgaaaaagcggccctgcgcgccgcggcggagcgcgcatcgtga

SEQ ID NO: 255845 - DNA, 1146 bp, Klebsiella pneumoniae
gtgaaccatccggctaccgatgagtgggcgcgacggctcgcggagattcgccacctgatggcggagcaggcggccagcctcgacgccagcggcgactttccccgcgacaatatcgaccgtctgcgccagcgcggctttttaagcctcgccgtaccgctgcagtacggcggggcaggtgccgatcttcccaggctccagcaggctattgccgctattgcctggggcgaaccggcgacggcgctgatcgtctgcatgcagtacctgcatcatctgcggctggcggaaaacgagaactggtccgagccgctgcgccagcgggtttttcacgatgccgttgagcggggaggattgatcaacagcctgcgcgtggagccggaactgggctccccggcgcgcggcggcctgccgcaaaccgtggcgacccgccgcgcggaagggtggcagattaatggccataaaatttataccaccggtattgaggggctgagctggctggccatctggggccgcagcgacgacgctccgccgctggtcggcacctggctggtgccgcgcgaaagtgacggtattagcgtcgtcaaaagctgggaccacggcggaatgcgggcaaccggcagccatgaagtggtgctcaacaacgtgcaggtagccgccgatcacgcggtggatgtatgggctgccgatgcgcctcccgcgccggatgctgaacagtttcgcctgtttgccaaccgccacacggcgctactggcggcaatttacgacagcatcgcgcgggcggcccgcgactggctggtgtcctggctgggtacgcgtatcccggggagccttgggcaaccgctttccagcctgccgcgggtgcaggaaaaagtcggccagattgacggctggctactggtcaatcgcagtctgctggaaaaggccgcgcagctgggcttttccgccattgaggcgaatctcgcgaaagtcacgattaccgacaatgccattcaggcggtaaacctggcgctggagctcaccggcaaccatggcctgagtcggcaaaatcctctggaacgccactatcgtaacgtgctgtgcggacgggtacacaccccgcagagcgacagcgcgtggctggcggccggcaaacacgcttttcaaaaataa

SEQ ID NO: 255846 - DNA, 975 bp, Klebsiella pneumoniae
atgcgcagatttaatgttaccgctttaggcggcgcgatcatgctgctgatcctcagcggctatgcggcggctcaggagcgaatcaccctgcgaattgccgatcaaaaaggcggcatgcgttcgcagctggaggccgccaacgccctgcagaatctcccatatgagattaaatgggccgagtttccggccgccgcgccgctggcggaagcgcttaacgccggggcggtggatgcggggataatcggcgatgcgccgctgctgttcgcgctggctaacggcgcgccggttaaagccatcgccgtcgctaaaagcaacccggccggcaccgcggtgctggtctcgcccggtagcgcgttgaaaagcgccgcggatttaaaaggcaaacgcatcgctaccggtaaaggatcgattggccactttgtggcgctgaaagcgctggagcaggcgggaatttcgccaaaggatgtgcagtgggtgtttctcggtccggtggacgccaaagtggcgctgctcaacggttcggttgatgcctgggcgacctgggagccgtacaccacgcagctggtgaagaccgccgaggggcagatcctggtcagcggcaaagggttgctgccgggcaacaccttcctggcggcaaccgatgatgccctgaaggacccgcagaagcgcgcggcgctgcaggattacctcaatcgcctggccggcgccgagcgctgggcgtatgccaatctcgatagctacggtaaaaccctgggggagattattcgcttcccggcggatatcgcccgcgcgcagtttgccaatcgccagtcgcagtggcagcctctgaacgcgaagacggtcgcccagcagcagtcgacggcggatttttatctcgccaacgggctgatccgcgcgaagctggacgtgacgccgacgtttgataacggctttagcgtgcctgccgcgcaggcccatgcggaggcgacgccatga

SEQ ID NO: 255847 - DNA, 1038 bp, Klebsiella pneumoniae
atgataacctctgctttttcccgccgtcgtttcttacgcttgaccggcagccttgcgctggccggcgcatccctgccgctttgggctcacgatatggcggccatggcgagcggtgaggaacacccggccctgcgcctggcgcagccgtacaaaatcaagctggcgattaacaaaagcgcggtgtgcctggcgccagtcgccgtcgccgagcagcagaagatcttcagtaaatacaatctcgacgtggagttcgttaacttcggcaactcgacggacgtgctgctggaggcgattgccaccggcaaggccgacgctggcgtcgggatggcgctgcgctggctgaaggcgctggagcagggcttcgacgtgaagctcaccgccggaacccacggcggctgcctgaacctgctgacggcgaaaaactcgccgttcggcggcctggagagcctgaaggggcaaaccatcggcgtcaccgatatggccgggccggataaaaactttttcgccatcttgcttaagcgccacggtatcgatccgataagcgatgtgcagtggaaagtctatccggcggatttgctcagcgtggcgctggataaacgcgaaatcgccgccatcagcggtagcgaaccctttagctatcgtctgctggacaccggtaaatatcagcttatcgccagcaatatgaccggcgattatgccaggctgagctgctgcgtactgggggtcagcggtagcctggcgcgcgatcataaaccggccgctgccgcgctcacccaggcgattcttgaggcgcacagctatgccgccgcgcacccggagagcgtggcgcaatccttcctcgcccatgcgctgaataccaatgaggcggaggtcagcggcattctccacggccaggggcacggtcatcacgcggtgggcgaagcgtttgttaaagagctgacccagtacgcggtggatcttcagcgggtgcaggtcattaaaccgggaaccgatccccatcagtttgcggagagcatttatgtcaacgttttcgcctga

SEQ ID NO: 255848 - DNA, 891 bp, Klebsiella pneumoniae
atgtcaacgttttcgcctgaacgggcgctggcgcgcccggcaagcggcaggccgcggtggacggaaggctggctggccgccgcgctgtggctgctgggcggcttgtatacgcactggcggcagcgggggacgcgtctgcagcatgccggaaagtggctggcgctgctgccgctgctctttgcgctgtgggaagggctgacggcaaagacggcatttttgccggtgccgtttttcgcaccgccgcaggcgctgattgaggtgctgcacgatgactggccgcgcctgctcgatagccttctgcattcgctggggctgctcgggctcggggtgctgctgggcaccagttgcggttttatcagcgggctggcgatcggctggtcccagcggatcggctactgggtgcatccggtgttacgtctgctggggccggtgccgtccaccgcgctgctgccgctgtgcctgtttatcttcccttccagctttggcgccagcgtgtttctgatcgcgctcagcacctggttcccggtgaccgtgctgacctggtccggggttatcggcatcgataaggcgtggtatgacgtggcgcgcaccctgggcgccagccagcgtttcctgatcctgcgcgtggcgatccccgccgcgttgccgaacgtttttgtcggcctgtttatggggctgggcgcgtcgttttcggtgctgattgtcgccgaaatggtcggcgtgaaatccgggatcggcttttatctgcagtgggcgcagggctgggcggcctatcccaatatgtacgcggcgctgctggtgatggcgctgctttgctccggcctgattagcgggctgtttatggtgcgcgaccggctgctgagctggcagcggggagggatgcaatggtaa

SEQ ID NO: 255849 - DNA, 789 bp, Klebsiella pneumoniae
atggtaaccgcgaacgccacttctcaggcggcatcgaccggcgcggcggtgtcgataagccatctgcatcatgcttttatcctcggcaaacggacggtgccggtgctggagaatatcagcctgcagctgcggcccggagaaagcgtcgcgctgctcggcccttcaggctgcggtaaatccactctgctgcggctgctggctggcctggagccgcagcaggccgggcaaattcagattgatgaggcggcgatgggcgggccggggcccgagcggatactggtgtttcaggacccgaccctttatccgtggctggcggtgcggcaaaatgtgctgctggggccgcaggcgcaggggaaaaaggggcttgagccaaaggccgacgcgctgattgcgcgaatgggtctgcaggcgtttagtgaggcgttgccgcgccagctttccggcgggatggcgcagcgtgcggcgctggcgcgcgcgctgctgaatgaaccgcgtctgctgctgctcgacgaaccgttgggcaagctggattcgcttacccgcatcagcatgcagcgggagctgatcgccctgtggcagcagcagggctataccagcctgctggtcactcacgatatcgaagaggcgctgctactgtgcgatcgggtgttaattatgtcgccgcggccggggcggattatcgccgagtttgcgctgccgctggcgtatcctcgccatcgcgacaatccgctgctgctgcagcatcgtcaggatattctgcgtattcttggccagggagaggattggtaa

SEQ ID NO: 255850 - DNA, 186 bp, Klebsiella pneumoniae
atgcgcttctgcggcgttaccgcccatcactacgaccaggttggcgtttttaatatccacccagtggttggtcatcgcaccgcgaccaaatgttggagcaagacttgctaccgttggtccgtgtcagacacgcgcctggttatccaccgccagcatcccgagggcgcgggtgaatttttgcgttaa

SEQ ID NO: 255851 - DNA, 3111 bp, Klebsiella pneumoniae
atgtctaagttttttatccatcgcccggttttcgcctgggtgctggcaatcatcatgatgattgccggcggcctcgcgattatgcagctcccgatagcacaatacccgaccatcgcaccgcctgcggtcgctatctccgccacctaccctggcgcggatgcccaaaccgtacaggatacggtgactcaggttatcgaacagaacatgaacggcattgataacctgatgtatatgtcctcaaccagcgattccgccggcggcgtgaccattacgctgacctttacctcgggtacggatccggatattgcgcaagttcaggtacagaataaactccagctggcaacgccgctactgcctcaggaagtacagcagcaggggattagcgtcgagaaatcaagcagtagcttcttaatggtcgctggtttcatctccgataaccccagcaccactcaggatgatatctctgactatgtggcctcgaacgtcaaagataccatcagccgccttaacggcgtgggtgatgtacagctcttcggcgcacagtatgcaatgcgcatctggctggatggaaacctgctgaataagtacaatttgacgcctgttgacgtcataaaccagcttaaaatccaaaacgatcagattgctgcagggcagcttggcggcactccggcccttaaaggccagcagctaaatgcatccatcattgcccagacgcgactgaaggaccccgcagaatttggcaaagtaactctgcgagtgaacgccgacgggtcagtcgtgcatctgaaagatgtggcacgcattgagctgggcggagaaaactataacgtcgtcgcaagaatcaatggcaagccagcttcaggcctgggaattaaacttgcgaccggtgccaatgcccttgataccgccgcggcgataaaagcgaagcttgccgaactgcagccgtacttcccacaggggatgaaggtcgtctatccttacgacaccacgccgtttgtgaaaatctctatccacgaggtggtgaagacgctatttgaagccatcatcctcgtcttcctggtgatgtatctgttcttacagaatatccgggctactctgatccccactatcgcagttccggtcgttctgcttggcacctttgccgtgctggcaaccttcggttactccatcaatacgctaacgatgtttggcatggtgctggcaataggcctgctggtcgacgatgctatcgtggtagtggaaaacgtcgaacgcgtgatggtagaagagaagctctccccaaaagaggcgacggaaaagtcgatgtcgcaaatccagggggcattggtgggtattgccatggtgctatcggcggtgtttgtcccgatggccttctttggcggctctacgggggcgatttatcggcagttttctatcaccatcgtctccgcgatggcgctgtccgtactggtggcgctgatcctgacccccgcgctttgtgccaccttactgaaacccgcatcagccgatcatcatgagaaaaaaggattttttggctggtttaatgcgaaattcgatcgtagcgtgaatcactacaccaacagcgtgagtgggatcctgcgctgtaccgggcgctatctgatcatctatttgctaatcgttgtgggtatggcggtattgtttatgcgcctgcccacctctttcttgccggatgaggatcagggggtatttatgaccatgatccagctcccttcaggcgcaacgcaggaacgcacgcagaaggttcttgatacggttaccgattactatctgcataaagagaaggcgaacgttgaaagcgtctttaccgttaacggctttagctttagcggccagggccaaaactccggtatggcgtttgtcagcctgaagccatgggaagagcgcagcggcgcagagaatggtgttgaggcaatcatcaaacgggctaccgttgcctttagtcagattaaagatgctatggtctttcctttcaacctgccggcaattatcgagctgggtacggctaccggttttgattttgagcttatcgatcagggtaacctgggccatagcgcattaacccaggcccgtaatcaacttctgggtatggtgagagaataccctgaccagctggtacgcgttcgccccaacgggctcgaagacacgccgcaattcaagcttgatgtcgatcaggagaaagctcaggctctgggtatttcgctatccgatatcaatgagaccatttccgcggcgctagggggctactacgttaacgactttattgaccatggacgcgtgaaaaaagtctacgttcaggccgatgctaaattccgtatgctgcctagcgatatcaataatatgtacgttcgcagcgcgaacggcgagatggtcccgttctccgcattcgtgacctcgcgctgggtttatggttcaccgcgcctggagcgctacaatggtttaccctctatggaagttttgggggaagcggcaccggggaaaagtaccggtgatgcgatgattttaatggaacagctagccagcaagcttcctgccggtattggttacgactggacgggaatgtcctatcaagaacgtttatcgggtaatcaggcgccagccctgtatgccatttcgctgattgtcgtctttctgtgtcttgcggcgctttatgaaagctggtcgatccccttctctgtcatgctcgtcgtaccattaggcgttgttggagcattactcgcggcgtcgttacgcgggcttaataatgacgtttatttccaggtaggcttattaaccactattggcctctctgcgaaaaacgcgattcttatcgttgagtttgccaaagacctgatggataaagaaggcaagggcattatcgaagccacactggaagcatcccgtatgcgtctacgtcctatcctgatgacttcccttgcttttattttgggtgttctgcctctggttattagccatggcgcaggcagcggagctcaaaatgcagtaggtaccggagttatgggcggaatgttgacggcaacattgctggctatattctttgtcccggtcttctttgtggtagtaaggcgacgctttaccaggcacatagactaa

SEQ ID NO: 255852 - DNA, 1140 bp, Klebsiella pneumoniae
atgacacgtcacgtcagggttacacttttatccagcctcatcatcccggccctcctgctcagcggctgtgatgattcaggcgatcggcaaccgcatgcgcagatacctcaggtctccgtttatgtggtgaacagcgcgccgctgtccgtgaccacggagctacctggccggacatcagcttaccgcgtagcggaagttcgcccgcaggttagcggcattatcctgcatcgtaactttgtcgaaggtagcgatgtcgccgctggacagtctctctatcaaatcgatccggcgacctatcaggcagcttataacagcgcaaagggtgatgaagcgaaagcagaggccgcagcggctatcgcccatttaacggtcaaacgttatgcgcctcttctcggcacaaaatatatcagtcaacaggaatacgatcaggcagtagcgacggcccgccaggcggatgccgatgttatcgcaacaaaagccgccgttgaaagcgcgcgcattgatttggcgtacaccaaagtgacttcacctatcggcggtcgcatcggcaaatccagcgtaaccgaaggcgcactggtgacaaatggtcaggctgatgcaatggcgacggtacagcagctcgatcctatttatgtcgatgttaccgagtccagtaatgatttcatgcgcctgaagcaggagagtctgcagcagggcagtggcactaaaagcgtgcagctgattatggaaaacggtcaaccttatgcgctgcggggcaccctgcagttctccgatgttacggtagatgagagcaccggctctattacgctgcgcgcgatcttccccaacccacagcatgctctgctgccaggaatgtttgttcgcgctcgcatcgacgaaggtatttcaccagacgctattctcgttcctcagcagggggtaacccgtacgccgcgcggcgatgccagcgtgatgctcgtcaatgacaaaaaccaggttgaaacgcggccagtcaccgcctcgcaggcgattggcgataagtggttaattacgagcggtctgaaagccggtgaaaaggtcatcgtcagcggtctgcagaaagtgcgtcccggcgtcacggtgaaggccgaagaggataccgcgacgactgtcgcgcaataa

SEQ ID NO: 255853 - DNA, 642 bp, Klebsiella pneumoniae
atgcctagaagaacgaaagaagatgcgctaaagacgcggcagcttttgattgagtcagccattcaacaatttgccctacgcggcgtgaccggtacaacgttagccgatatcgctgatgctgctggcgtgacgcggggagcagtctactggcacttttccagcaaagcggaactctttaatgaaatgtggcaacagcagcttccgttacgtgatctgcttaaacatgaatttacctcttcacatgctcaggacccgctcagcaggctacgagaaaaatttattatcggtctgcaatatatcgccattaatccccgtcaacgtgcgctaatgcaaattctgtatcagaagtgtgagttttccagcgagatgatatccgaggctgagattcgcaaaaaaattggttttagctatcccgttattcgcagtgttttacagctctgcattcgtaacggattattaccagaggaaaccaacgttgaaatttcattaatcgtattacatagcgcatttgtcggtattattaaaaactggctcgtagagcccggaaaattcgacctgtatcatcaggctcccgctttggttgataatattatgtcggtcctttgcggaacccgcgggctacaggcgatagtcaatcattaa

SEQ ID NO: 255854 - DNA, 297 bp, Klebsiella pneumoniae; identical to SEQ ID NO: 176920

SEQ ID NO: 255855 - DNA, 918 bp, Klebsiella pneumoniae
atggctggcattactgacagaccattccggacgctgtgttacgagatgggagcagggttgaccgtatccgagatgatgtcctccaacccgcaggtctgggagagcgacaagtcccgcttacggatggtgcacgttgatgagcccggtattcgtaccgtgcaaatcgccggcagcgtgccggaagagatggctgcagccgcccgtattaacgtggaaagcggcgcccaaattattgatatcaatatggggtgtccggctaaaaaagtgaatcgtaagcttgcaggttcagccctcttgcagtaccccgaccaggtgaagtcgatcctgacggcggtcgtcaaagcagtggacgttcccgtaactctcaagattcgcaccggttgggaaccggaacaccgtaactgtgtagaaattgcccaactggctgaagaatgtggcattcaggctctgactattcacggacgcacccgcgcctgcttgtttaacggagacgctgagtacgacagtattcgggcagttaagcagaaagtttccattccggttatcgcgaatggcgacattactgacccgcttaaagccagagccgtgctcgactatacgggggctgatgcccttatgataggccgtgcggctcagggaagaccctggatctttcgggaaatccagcactatctggacactggagagctgctgcccccgctgcccctggcagaggttaagcgcttgctttgtgcacacgttcgggaactgcatggcttttacggccacgcaaaagggtaccgaatcgcacgcaaacacgtatcctggtatctgcaggaacacgctccagatgaccagtttcggcgcacattcaacgccatagaagattccagcgaacagctggaggcgttggaggcatacttcgaaaattttgcgtaa

SEQ ID NO: 255856 - DNA, 741 bp, Klebsiella pneumoniae
atgaaaacatctttaggcaaggcggcattgttggtgttaagcatgatgcccattacggtttttgcttcccactggggctatgaaggcgaaggttcgccggagcactggggagcgctcagtgaagagtacaaaacctgcctgagcggcatgaaccaatctcccatcaacatcgataccacgttcaaagcgcacctgacaccgctggaaacccactacattgatggcccaattacgctcatcaacaatggtcacaccattcaggccgggttaaaaactaccacagcggacaccattacaattgacggtacgccatttacccttcagcagttccatttccatgctccgagcgaaaataccgttcacggtaagcactatgcgatggagatgcacctggtccataccaacgctcaaggagccatcactgtcgtagcggtgatgtttgaccagggggcggaaaatagcgagctgaacaaactgtgggccactatgccggaaaaagcggagcagaatgcgaagatcagcacgcaaatggacctcaacgccctgcttcctgcggacaagacatactggcgattcagcggctctctgactactccgccctgctctgaaggggtaacctggattgtccttaagcatccgctaacgttgtctgccgcgcagctggcaaaatttagccacaccatgcatcacgataataatcgtccggtgcagccgctgaatggtcgcgtcgtcattgagtaa

SEQ ID NO: 255857 - DNA, 882 bp, Klebsiella pneumoniae
atgccatggatccaactgaaactgaacactaccggcgcgaacgcggaagaactgagcgatgcgctgatggaagcgggttccgtttccattactttccaggatacgcacgacacgccggtattcgaacctctgccgggcgagacccgtctgtggggcgatactgatgttatcggcctgtttgacgctgaaacagacatgcaagaagtggtcgcgattctggagcagcatccgctgctgggcgccggtttcgtgcataaaatcgaacaactggaagataaagactgggagcgcgaatggatggataacttccaccctatgtgcttcggtaaacgcctgtggatctgcccgagctggcgcgatgtgccggatgaaaacgccgttaacgtgatgctcgatccgggcctggcgtttggtaccggtacgcatcccacaacggcaatgtgcctcgaatggctggatggactcgatctcgcaggcaaaacgatcatcgattttggctgcggctcaggcattctggccattgcggccttaaagctgggcgcagcgaaagcgattggtattgatatcgatccgcaggcaattcaggccagccgcgataacgccgagcgcaacggggtctctgaacgcctggaactgtatctgcctaaagatcagccagaggcgatgaaagccgatgtcgtggtcgcaaacattctggctggcccattacgcgagctagctccgcttatcagcgtgctgccggttacaggcggtctgctggggctttccggcatccttgccagccaggcggaaagcgtttgtgaggcatacgccgacctctttaatctcgatcccgtcgtggagaaagaggagtggtgccggattaccggtattaaaaagtaa

SEQ ID NO: 255858 - DNA, 1452 bp, Klebsiella pneumoniae
atgcagcttgaagtcatactgccgcttgtcgcctacctgctggtggtgtttgctctctccatctatgcgatgcgtaagcgcgtaacgggttccttcctgaacgagtatttcctcggtagccgctcgatgggcggcattgtattagccatgacgcttacggctacctatatcagcgcaagctcgtttataggcggccccggcgcggcctataaatatggtctcggctgggtactgctggcgatgatccagcttcctgctatctggctctcgctgggaattttgggtaagaaattcgccattctggcgcgacgttataatgccgtaacgctgaacgatatgctctttgcccgctatcaaagccgcctgctggtctggcttgcgagcctgagcctactggttgcttttgttggggcaatgacggtgcagttcatcggcggggcgcgcctgctggaaaccgcggcgggcatcccctacgaaaccggcctgctgatttttggcgtcagtatcgcactttataccgcgttcggcggttttcgtgccagcgttctcaatgacaccctccaggggatggtaatgctgataggaacgattgttctgctggttggcgtcgtgcatgcggctggcgggctacataatgcggtagaaacgctgcaaactatcgatcctaagctggtctctccgcagggggctgatgatattctttctcccacctttatgacctctttttgggtgctggtctgcttcggggtgattggccttccgcacaccgccgttcgctgcatctcctataaagacagcaaagcggttcaccggggaattatcattggcacagtagtcgtcgcgatcctgatgtttggtatgcaccttgccggagcgctcggccgcgcggtgatcccggatctgacggtgccggatctggtcatccctaccctcatggtgaaagtattgccgccatttgccgccgggatcttcctcgctgcgccaatggccgccattatgtcgacgatcaacgctcaactgctgcaaagttccgctacgatcattaaagatctgtatctgaatctgcgccccgagcagataacaaatgaaacccggttgaaacggatgtcggcaacgatcacccttctgttgggcgctttactgctgctggcagcctggcgtccgcctgagatgattatctggctcaacctgctggcgttcggcggcctggaggccgtgttcttatggccgctggtgctgggcctgtactgggaacgagcgaacgcgaaaggcgcattgagcgcgatgatcgtcggcggcgtactctatgccatactcgccacttttaatcttcagtatctgggcttccatccgatagtgccctcgttactgttaagcttattggctttcctggtcggaaaccgcttcggaacctccgccccgcaagccgccgtattgactactgataaataa

SEQ ID NO: 255859 - DNA, 243 bp, Klebsiella pneumoniae; identical to SEQ ID NO: 176925

SEQ ID NO: 255860 - DNA, 1350 bp, Klebsiella pneumoniae
atgctggataaaattgttatcgccaaccgcggcgagattgcattgcgtatcctgcgtgcctgtaaagaactgggcatcaagaccgttgctgtgcactcaacggcggatcgcgatttaaaacacgtattgttagcggatgagacggtctgtattggcccggctccgtccgtaaaaagttacctcaatatcccggctatcattagcgcagctgaaatcaccggcgcggtggctattcacccgggttatggttttctgtccgaaaacgctaacttcgctgagcaggttgagcgttccggctttatctttatcggtccgaaagcagacactatccgcctgatgggcgacaaagtctctgccattaccgcaatgaagaaagcgggcgttccaaccgtaccgggctctgacggcccgctgggtgaagatatggacgttaaccgcgcccatgccaaacgcattggctacccggtgattatcaaagcctccggcggcggcggcggtcgcggtatgcgcgtcgtgcgcagcgatgctgagctggctcaatccatctccatgaccaaagcggaagcaaaagccgcttttaacaacgacatggtgtatatggagaaatacctggagaatcctcgccacatcgagatccaggtactggctgacggtcagggcaacgctatctatctggctgagcgcgactgctccatgcagcgtcgtcaccagaaggtcgtcgaagaggcaccggcgccgggcattactccggaactgcgtcgctatatcggcgagcgttgctccaaagcgtgcgtcgatatcggctatcgcggggcgggtacttttgagttcctgttcgaaaacggcgagttctatttcatcgaaatgaatacccgtattcaggtagaacacccggtaaccgagatgatcaccggcgtcgatctgattaaagaacagctgcgcatcgctgctggtcagccgctgtccatcaagcaggaagaagttatggttaaaggccatgcggtggaatgccgtatcaacgctgaagacccgaataccttcctgccgagcccgggtaaaattacccgcttccacgcgccgggcggttttggcgtacgctgggagtctcatatctacgcaggctacaccgtacctccgtactatgactcaatgatcggcaagctgatctgctatggtgaaaaccgtgatgtcgcgattgcccgcatgaaaaatgcgctgcaggagctgattatcgatggcatcaaaaccaacgtagatctgcagatccgcatcatgaacgacgaacatttccagaatggtggcaccaatatccactatctggagaaaaaactcggattgcaggagaagtaa

SEQ ID NO: 255861 - DNA, 474 bp, Klebsiella pneumoniae; identical to SEQ ID NO: 176927

SEQ ID NO: 255862 - DNA, 600 bp, Klebsiella pneumoniae
gtgcgcctgaacgtaaagcagataacctggctgaaagtgcttctccatctggctggctttttgcccgttgtctggctgttctgggccgggcagcagggctatttcagcgccgacccggcaaaggatattcagcactttaccggtaggatggctcttaaattcctgctggctaccttgcttgtttcgccgctagcgcgctacgctaaacagccgttattgatacgcacccggcgcttacttggcttatggtgctttgcctgggcaacgctgcatttaaccagctatacgctgctcgaactcgggattaacaatctggcgcttttgggttcagaagttatcagcaggccttacctgacgctgggtttactcagctggctgattctgctggcgctggcggcgacctccacccaggcgatgcagcggaaattaggccgccgttggcaaacattacataacttcgtctatgttgtcgcgatccttgcgccgattcactacctgtggtcggtgaagattttatccccgcagccgatcatttatgcgctgctggcactgctgcttttagcatggcgatacaagaagtttcgccagtggtggcgctga

SEQ ID NO: 255863 - DNA, 1002 bp, Klebsiella pneumoniae
atgaaacccaaaaaactgacagaagccgacgttacggcagaatccgtttttatgctgcaacgtcgccaggtcctaaaaatgctgggcatcagcgcgaccgccctttcccttaccccctccgcgcaagccgatctgttggattggtttaaaggcaacgatcgcccgccggccccggcgggcaaagcgctaacgttcgaaaaaccggcgcaatggcaaaataacctgccgctcacgccggaggataaagttgctggttacaacaacttttatgagttcggtctggataaagccgatccggcggcgaatgccggcagcctgcgcaccgatccctggacgctgacgatcggtggcgaagtggctaaaccgctcacgctcgatcatgacgacctgaccagccgattcccgctggaagaacgaatttatcgaatgcgctgcgtagaagcctggtcgatggtggttccgtgggtcggtttcccgctccataagctgctgtcgctggtcgaacccaccagcaatgctcgctacgttgcatttaaaacgctttatgctcctgagcagatgccgggtcaaaaggaccgttttatcggcggcggtctggcgtatccctacgttgaaggactgcggctcgatgaagcaatgcatcctctgacgctgctcagcgtgggcgtgtatggcaaggcgctgcccccgcagaacggtgcgccggttcggctcaccgtgccctggaagtacggcttcaaagggattaagtccatcgtcagtattgagctcacccgtgagcgtccgcccaccacctggaatctggccgggcccgaagagtatggcttctacgccaacgttaatccgcatgtcgatcatccccgctggtcgcaggcgactgagcgttttatcggcgccggcggcgtactcgacgttaaacgccagccaacgctgctgttcaacggctatgccgaagaagtggcgtcgctctatcggggcctgaatttgcgggagaactactag

SEQ ID NO: 255864 - DNA, 219 bp, Klebsiella pneumoniae
atgccgtttattctgcgcaatgtacgcctgcagggcgttgactcggtgatgaccccgcccgcccgccgggctgaagcctggcaaaggctggtccgcgatctaccggaatcgttctatgcgcacagcgcaaccgaaatcaccctcgccgaagcccctgagtttgctgaaaagattatgaccaataagattcagggccgcacgctggttaaaatcgcctaa

SEQ ID NO: 255865 - DNA, 651 bp, Klebsiella pneumoniae
atgcaaacggaatgcccgaaacaatatctctctatcggtaacaaaacgattctcgaacacgcggtcgccgcgctgttggcaaactcgcgtatacagcgggtggtgattgccgtcagcccgggagacgagcgctttagccagctgccgttggcgaatcatcctcagatcaccgttgttgatggcggtagagaacgtgcggactccgtccttgcgggcctgaaggctcttagcgaggccgattgggtgctggtacacgatgccgcgcgcccctgcctgcaccaggacgatctcagccgcctgcttcaactctgtgagaccagccgaacgggcggcattctggccgctccggttcgcgataccatgaaacgcgcggagccgggcagggcggctattgcccataccgtcgaacgcaacgatttatggcatgcgctgacgccacaatttttccctcgcgaactgcttgttgattgcctgacgcgggcgcttaatgaaggggcgaccatcaccgatgaagcctcggcgctggagtactgcggctttcatcctgagctggtcgccggacgagctgataatattaaagtgacgcgcccggaagacctggcgctggccgaattttaccttacccgttcccgacaccaggagaaggcttaa

SEQ ID NO: 255866 - DNA, 480 bp, Klebsiella pneumoniae
atgcgaattggacacggttttgacgtacacgcttttggcggtgaaggcccaatcatcatcggcggcgtgcgcgtaccttatgaaaaagggctgctggcgcattccgacggcgacgtcgcgctgcacgcgctgaccgatgcgctgttgggcgcggcggcgctgggcgacatcggcaagctgttcccggataccgacccggcctttaagggggccgatagccgcgaactgctgcgcgaagcgtggcggcgcatccaggcaaaaggctttacccttggcaacgttgacgtcaccatcatcgcccaggcgccgaaaatgctgccgcatattccccagatgcgcatctttattgctgaagacctcggctgccatatggacgatgttaacgtcaaagccaccaccactgaaaagctgggctttaccggccgtggcgaaggcatcgcctgtgaagcggtggcgctgctgcgtaaggcggagaaatga

SEQ ID NO: 255867 - DNA, 1050 bp, Klebsiella pneumoniae
atgatcgcttttgacgaactcacttatctgcatggaaaaccgctgagccaggggctgctaaaagccaatccggaagactttgtggtggttgaggatctcggctttgcgcccgatggcgaaggcgaacatgtgctggtgcgtattctgaaaaacggctgtaatacccgttttgtcgctgacgcgttggccaaattccttaaaattcatgcgcgcgaagtgagctttgccgggcagaaagacaaacatgcggtgactgaacagtggctgtgcgcccgagtgccgggcaaagagatgcccgacctgagcaaattccagcttgaaggctgtcaggtactggagtacgcgcgccataagcgcaagctgcgcctcggggcgctgaaggggaaccagtttacgctggtgctgcgcgaaatcagcgatcgcgacgatgtcgaaacgcgtttacaggcgattgctgagcatggcgtacccaactattttggcgcccagcgcttcggtatcggcggcagtaacctgctgggggcgctgcgctgggccgagagcggcgcgccggtgcgcgatcgcaataaacgcagtttttggttgtcggcggcccgcagcgcattgtttaatcaacaggttggtattagattaaaaaaaccggaatttaatcaggttgttgatggcgatgcgctacaattagcggggcgcggaagctggttcgttgcgacctctgaagaactgacggagctccaggcgcgggtaaataatcgcgaactgatgattaccgctgcgcttgtaggtagcggcgactggggcagccagcgggacgcgctggccgccgaacaggcggccgtcgttgaagagacgcagctacagacgctgctggtgcgtgaaaaagtagaggccgcccgccgggcgatgctgctttatccccagcagatgagctggaactggtgggatgacgttaccgttgaactgcgtttctggctgcccgcaggcagcttcgccaccagcgtagtaagggagcttatcaatacaacgggtgactatgcgaatattgctgagtaa

SEQ ID NO: 255868 - DNA, 762 bp, Klebsiella pneumoniae
atgcgaatattgctgagtaacgatgacgggatccacgcgccgggcattcagaccctggcgaaggccttacgggaattcgctgaggttcagatagttgcacccgatcgtaaccgcagcggggcgtcgaattccctgacgctggagtcttcgctacgcactttcactttcgacaacggcgatatcgccgtgcaaatgggcacgccgacggactgtgtctacctcggcgtcaacgccctgatgcggccgcgtccggatattgtggtctctggcattaacgccgggcccaaccttggcgacgacgtcatctattccggcaccgttgccgccgccatggaaggccgtcatctgggctttccggcgctggccgtttcgctaaatggctaccaacactatgagaccgccgctgcggtcaccagctcgattctccgggcattaagccgcgaaccgctgcgtaccgggcgcattctcaatatcaacgtgccggatcttccgcttgatcagataaaaggtattcgcgttacccgctgcggcagccgccatccttccgatcaggtcattccgcagaaagatccgcgcggcaatacgctgtactggatcggtcctccgggggaaaagtacgacgccggtccggataccgactttgccgcggtggatgaaggctatgtctcggtcacgccgctccatgtcgatttaaccgcccacagcgcgcatgaggtggttagcggctggctcgatcgcgttggggttgatacacaatggtaa

SEQ ID NO: 255869 - DNA, 627 bp, Klebsiella pneumoniae
atggtaagcaaacgtgttgaaagtcttctcaatcagcttcgcactcagggcattgtcgacgagcgcgtgctggacgctatcgcgcaggtgccgcgagaaaagtttgttgatgaagcctttgaacataaggcgtgggaaaacacggcattgccgattggccaggggcaaactatttcgcagccctatatggtggcgaggatgaccgagcttctgacgcttacgccggagtcaagggtgctggaaatcggcaccggctctggttatcagacggcaattctggcgcacctcgtgcaccacgtctgctcggtcgagcgtattaagagcctgcagtggcacgcgcgccgtcgtctgaaacaacttgatttacataatgtttcaacccgtcacggagatggatggcagggttggcaggcacgcgcgccgtttgacgcgattatcgtgaccgcagcgccgccggaaatcccggccgcactgctggcgcaattagacgatggcggcgtgctggtgctgccggtaggcgaagagcaccagtttttaaagcgcatccgtcgacgcggcaatgagtttgtcattgataccgtcgaggccgtgcgctttgttcccctcgttaaaggggagctggcctga

SEQ ID NO: 255870 - DNA, 1119 bp, Klebsiella pneumoniae
atgagcgcgggaagcccaaaatttaccttaagccgcattgcggctttgtcactggtgtcactctggctggcaggctgcagcagttccaacaatccgcctgcgccggtcagcacggctggcggggcttcgtcttcgggcaccaattccgggatgctgattacgcctccgaccaataccgcgccgcaggctcgtccggtacaaactcagccggtacagacgcagcctgtgcagatccagccgatggctcaggagccggtgcaaacggtaaacggcaaaatcgtctacaaccgtaagtatggggatattccgaaaggtagctataccggcggcagcacctatactgttaaacgcggcgacacgctattctacattgcgtgggttaccgggaacgatttccgcgacctggcgcagcgcaataatatcccggcaccgtacgctttgaacgtcggtcagacgttgcaggttggcaatgcatccggccagccgattaccggtgataatcctgttgcccaggcgagcgtgaaggccagtaatggtggaatgttgagcgcaaattctgcacaaaaatccaccgcggtagttgcgtcacaaccaactattacgtattctgaatcttcaggtgaacagagtgctaataagatgttgccgaacaacaagcccgcgacgacgacaaccgtcgcgccagttacggctccagctgtcagcaccacccaatcgactgcaagcagtacgtctaccagttcgccgatctcttcatggcgctggccgactgatggcaaggttatcgagaactttagtggggccgaaggtggcaataaaggtattgatattgcaggcagtaaaggacaggctattgtcgcgaccgcagatgggcgcgtcgtctatgccggtaacgcactgcgcggttacggtaatcttattatcatcaaacataacgatgattacctgagcgcctacgcccataacgatacgatgctggtaaaagagcaacaagatatcaaggcggggcagaagatcgctaccatgggtagcacaggtactagttcgacacgattgcattttgaaattcgttacaaggggaaatccgtcaacccgctgcagtatttaccgcagcgataa

SEQ ID NO: 255871 - DNA, 378 bp, Klebsiella pneumoniae
atgagtcgctatattgaagaagtcattgccgcccatgtggccattgaagcctggctgaatcagggaactggcagcatcgaagggttaatgcagcgcttcagcgcggaatttaccatgatcccgattaacgggacacgcatggaccagcaggcggtcagcgctttttttcaaggggctcgcgccagccgccccggcttaaaaatcgtcattgatagcgccgcgatgcttgccgaatggcacgatggggccgcggtgatatatcgggaaacgcacgttttacccggcaaagcggatacggcgcgctggtcaacggcgcttttccgccagcaggagggggagataagctggctgcatctccacgaaacggcccggatatag

SEQ ID NO: 255872 - DNA, 1215 bp, Klebsiella pneumoniae
atgacgtatcgcaacaaggtcgcaaccctttttctgctgggtttctttctcgacttaatcaatatgtttatcgccagcgtcgcttttccggcgatgagccggacgctgcacgcgtcgccaggcgaactggcgtgggtcagcaatggctatattgcaggactcaccctggtgctgccgtttagcgccaggctcagccagcggtttggcgcccgacgggtgtttctgctttcgctcagcctgtttagcatcggcgcgctggcaacagggatggccgactcattgctaaatctggttctgtggcgcgtcctgcagggaatgggcggtggactgttgattccaataggtcaggcattaacctggcagcagtttaagactcacgagcgggcaaagctctctgccgcggtgatgctggtcgggctactggcgccggcgtgctccccggcgctgggaggttttctggtgcaatcacttagctggcgctgggtcttccttgccagcctgccgatagcccttctgacgttagcgctggcagcgttgtggctaaaagaagagagaagcgttgtgcgagcgggaggtttattaccgctcgctttactgcgtgacccgctgctgcgtttttctatgctggtgtatctctgcgtgccggggacgtttatcggaattaacgtcgtcgggatgttttatttgcaaagcgtaacggggttgtcaccctccgctatcggcgccctgatgctgccctggtcgctggcctctttcgtggcgatcgtcacgaccggtcgctattttaatcgtctcggcccccgccctctgattgcggccggctgcctgcttcaggccgccgggatcgtcgcgctggccagcgttaattcaccaaccgccagcagcacgctgatcgcggcatttgtcttaatgggcgcaggcggcagtctgtgcagcagtacggcccaaagcagcgcgtttcttaatgtggctaactgcgatatgccggacgccagcgcgctgtggaatctcaatcgtcagctgagtttcctgattggcgctgcgctgctggcggggttattgagcgcatttttgctttactggccagcaccgcaggcctggcgtggcgtgtttatcgccgccgctatttttacgctgctgccgctgctgcgctgccttacatttaataaccgggcgataatcatgcgcctgcacggtaaaacggagaacaaatga

SEQ ID NO: 255873 - DNA, 888 bp, Klebsiella pneumoniae
atgctgaacctgcagcggatgaccatgtttgtggcggtggtggagagcggcagttttaccgcggcggcggcggccctcgggcaaaccaaggccgtggtcagttttaacgtcaggcagctggagagcgagctgggcgttacgctgctgttgcgatcgacccgacggcttacgctgactgaagccgggtcgctgttttatcagcgtggcctcgcgctgctgaaggcagcggaaaatctgcaggacgacgtccggggcagccatgtgggattgagcggcgaattgcgggttgcgaccacggcagaatatggtgcccaggtgattgttccggcgctggcggcgttcagcctgcggcatccagcgctccgcgcgcggcacgtttcttcttctcaccacgcggatttaatctcagatcgtgttgatgtggcgattcgtctcgggacgctggcggattcacgttaccgcgcggcgctgatctcgcgctttgctatcgtaccagtcgcctctccggcgtggctggcgcagcatccggtgaagacgctagaggatctggcccattccgcgtggattattcatgaacgtttgacgacgccgctgcgctggcagctcagcgggccgcaggaacggtgtatcccgtttgaaattaaaaaggcgccaaggatatcggcggatagcgccagcgcgctgatggcttttgcgttggcggggagcggcgtcgcgctgctccccgaatggctggcggccgctgcgctggcggataacgccctcgtgcggattatgccagaattccgcttcccgtctcagggagtgtatgcggtttatccggacgcgcagcatgttcccgccagggttcgggcgtttattgattttctccgcgagcgtttgggttag

SEQ ID NO: 255874 - DNA, 414 bp, Klebsiella pneumoniae
atggagttaagaaacgaggcgttccacctgttgcgccagctttttcagcagcacaccgctcgctggcagcacgaactgccggacctgaccaaaccgcagtatgcggtaatgcgttcaattgccgagcatcccggcatcgaacaggtgacgttaacggaagcggcggtcagcaccaaagcgacgctggcggaaatgctgagccgtatggaaagccgggggctggttcgtcgcgaacacgatccggcggacaaacgccggcggtttgtctatttaaccgccgaaggcgaagcgctgctggcaagctctatgccgttgggtaacgccgttgatgaagagtttttaggccgtctcagtgatgaagagcgccgccagttttcgcaactcatccataagctgatggcgcaagagcgctaa

SEQ ID NO: 255875 - DNA, 237 bp, Klebsiella pneumoniae
atgatttgtccacgttgcgccgatgaacatattgaagtgctggcaaaatcgccggtaaaagatgtctggacggtatttcagtgccagcactgtttctatacctggcgcgatactgaaccgctacgccgcaccagccgcgaacattacccggaagcgtttcgcatgacgcagaaggatattgatgaatcgccgatggtgccgagtattccgccgctgctggcggaagataaacgataa

SEQ ID NO: 255876 - DNA, 204 bp, Klebsiella pneumoniae
atgaacctgaacaattcagatgttagtctcttctttgcagggaggcaagacatgctgacaaaatatgcccttgtggcaatcgtcgtactgtgtattacggtactgggatttacgcttttggtgcgcagctcgctgtgcgaactcagtattaaagagcgtagtatggagtttaaagctgttctcgcttacgaatcgaagaagtag

SEQ ID NO: 255877 - DNA, 2562 bp, Klebsiella pneumoniae
atgagtacactagagaatcttgacgcccatacgcccatgatgcagcagtatctcaagctgaaagcccagcatccggagatcctgctgttttaccggatgggtgatttttacgaactcttctatgacgatgcgaaacgcgcatcgcagctgcttgatatctcgctgaccaaacgcggcgcttccgcaggcgaaccgattccgatggccgggatcccgcatcatgcggtggagaactatctcgccaagctggttaatcagggggagtcggtggccatttgcgaacagattggcgatccggcgaccactaaagggccggttgaacgcaaagtcgttcgcattgtgacccccggaactatcagcgatgaagcgctgctgcaggaacgtcaggataatctgctggccgccatctggcaggatagtaaaggttttggctacgccaccctcgatattagctccggacgttttcgcctgagcgaacccgctgaccgcgagacgatggcggcggagctccagcgcaccaatcccgccgaactgctgtacgcggaagactttgccgaatcctcgttgattgaggggcgccgaggcttgcgccgtcgtccgctgtgggaattcgaaatcgacaccgcgcgccagcagctcaatctccagttcggtacgcgcgatctggtcggattcggcgttgaaaacgccccgcgcggcctgtgtgccgccggctgcctgctgcaatacgtcaaagacacccagcgtacgtcattgccgcacatccgttccatcaccatggaacgccagcaggacagcatcattatggatgccgctactcgccgcaacctggagataacccagagcctggccggcggctttgataatactctggcttcggtactcgactgcaccgtcactccgatgggcagccgtatgcttaagcgctggctgcatatgccggcgcgcgacaccgcagtactggtagagcgccagcagaccattggcgcgctgcaggagcattacactgaactgcagccgatactccgtcaggttggcgaccttgaacgtatactggctcgcctggcgctgcgcaccgctcgtccacgagatttagcccgtatgcgtcacgcattccagcagctgcctgcgctgcgtgcgatgctggcagacgtcgactgcgcgccggtacagcggcttcgcgagaaaatgggcgagtttaacgaactacgcgacctgcttgaacgggcgattatcgatgcgccgccggtgctggttcgcgacggcggcgttatcgcccccggctacaacgcggagctggatgagtggcgtggtctggccgatggcgcgaccgattacctcgacaagctggaaattcgcgagcgcgagcgtctggggctggatacgctgaaggtcggctacaacgccgttcacggctactacatccagattagccgcggtcagagccagcatgcgccgatccattacgtccgtcgccagacccttaagaacgccgagcgctatattattcctgagctgaaggagtatgaagataaggttctgacctccaaagggaaagcgctggcgctggaaaagcagctgtacgatgagcttttcgatttactgctaccgcatcttggcgacctgcagcaaagcgccagcgcgctggcggagctcgatgtgctggtgaaccttgccgagcgcgccgagaccctcaactactgctgcccgaccttcagcgataaaccgggcattcgtattagcgaaggccgccatccggtggttgagcaggtactgaaagagccctttatcgctaacccgctgcacctcgctccgcagcggagaatgttgataatcaccggcccgaatatgggcggtaaaagtacctatatgcgtcagaccgcgctgatcgccctgctggcgtatatcggcagctacgttccggcggataaagtcgaaatcggccctatcgatcgtattttcacccgtgtcggtgcggcggatgacctggccagcggccgctcaacctttatggtagagatgaccgaaaccgccaatattctgcataacgccaccgagcatagtctggtgctgatggatgaaatcggtcgtggcacctcgacctacgatggcctgtcgctggcgtgggcctgcgcggaaaatctggcgaataagatcaaggccttgaccctgtttgccacccactacttcgagctaacccagctgccggagaaaatggaaggcgtggccaacgtccatcttgatgcgctggagcacggcgataccattgcctttatgcacagcgtgcaggatggtgcggcgagtaagagctatggcctggcggttgccgcgctggccggtgtgccgaaagaggtgattaaacgcgcgcggcagaagctgcgcgaactggagagcatcgcgccgagcgctgccgccacgcaggtggacggtacccagatgtcgctgctttctgctccggaagagacctcgcccgcggttgaagcgctggagaatcttgacccggactcgctgactccgcgccaggcgctggagtggatctatcgtctgaaaagcctggtgtag

SEQ ID NO: 255878 - DNA, 522 bp, Klebsiella pneumoniae
gtgcgcgaagtcagcgccgacgagtacgcggcggtgccgatccgtaccgggcaccctgataatgaagtgcgtctgattgacgtcctgctgcgcccggaagtgttagtcttcgagccgctgtggacggttatccccggcaacaaggcgattttgccggtgctttggtcgctgttccctaatcatcgctatctcctggataccgattttgtggtcaacgagcagctggcggaaagcggctatgcggttaagcctatctcaggccgctgcggcagcaatatcgatctgattggcccgcaggatgaagtgctggataaaaccagcggccagtttttcgatcgcaaaaatatttaccagcagctgtggtgcctgccgaaggtggatggcaaatacatccaggtttgcacctttacggttggcggtaactatggcggtacctgcctgcgcggagacgattctctggtggtcaaaaaagagagcgatattgagccgctaatcgtgctaaaagacaacgatagccgttaa

SEQ ID NO: 255879 - DNA, 1182 bp, Klebsiella pneumoniae
atgcacgatcggcgactcgccgcccgcgcgggtgaacttaagccctccgccgtccgcgaactcctcaagcacagtaaactgcccggcgtgatctccctgggcggcggcattccggctccggagctttttgataccgaaggcctgaacctggcggtgcagcaggtgatgaacgggcgctttaacgatgcgttccagtacggtttgaccgaaggttatccgccgctgcgtcaggccgtcagcgaactgtgtcaggcgcgcggcgtggactgcccggcaagccacgtttatatcacttccggttcgcagcagtcgctggatatcgtcgcccgcacgctcctcgatccgggcgatgcgattgtcgttgagcgcccgacctatctggcggcgctgcaggtcttccagctggcgcaggccaatattctcagcgtggataccgatgatgacggcatgctggtggaacagctggccgatctgctggaaaccacgcgcgtgaaagccgtttacctggtgccgacgtttggcaacccaggcgggaagaccctcagcgaagcgcgccgtcgtcgcctggttgagctggcgaaaaagcacgacttcgtgatcattgaagacgatccgtacggtgaaatcagcttcaccgatgaagtgcgccgtccgctgtatcagcacgcggttgaactgggctgtgtcgatcaggtggtgtatacctccaccttctccaagatcctcgcgccggggatgcgtattggctggatcgtgatgccggactggctggcgcagcagacggtgatcgtcaagcaggcggcggatctgcacaccaacatgctatcgcaggtcatcactgcggaatacctgagcatgaaccgtctggaaaagcagattgccctgatccgcgaagattaccgcaagaagtgcgtggcgctggccgacgcgctggaatcgcagcttggcgagcatctggagttcagccgtcctaaaggcggtatgttcctgtgggctcgcttccgctatccgttcgataccatggaatggatgaagaaaacgctggaaaacggcgtggtctacgtgcctggggaagcgttctataacgacaacccggatacccgcacgctgcgtctctcctactctacggtgtcggctgacggtctgatgaccgccgtcgagcgcctggcgaaatcgctgtaa

SEQ ID NO: 255880 - DNA, 189 bp, Klebsiella pneumoniae; identical to SEQ ID NO: 172876

SEQ ID NO: 255881 - DNA, 339 bp, Klebsiella pneumoniae
atgctgaagaaactcgcttttattatcccgcttatcgcgcttatcgccctgcttatctggtggttcacgccgcgctactccgcagaggacgaagcgtactaccgctccgttttctgcgtgatcgaccaccaggatagccagacatttctccgcgatatggaaaatatcattgaaggcggcaattcagattatgcgctgcataaagcccattacgttcccgcgctgggccagcggatgttggacacctggcagcagctcactccggaagagcagaaaagcctcggccaggatcagcagcgctgccgccagctgatgagcgaaaaacagcgttcacgctaa

SEQ ID NO: 255882 - DNA, 603 bp, Klebsiella pneumoniae
atgaaaatcatcgttattggcgccagcggtactgttggccgcgcggttgcgcaagaattaaaccagcgtcatgaagttattcgcgtcggccgcactcagggcgactatcaggttgatatcacctcacagcagagcgtgcagagcctgtttgagaaaatcggtcaggtagacgcgattgtttccgccaccggtaatctgttctttggcccgctggcgaccatgaccgatcgcgatttcaaccagggcttacaggataagctcctggggcagattcgcctgacgcttaccggccagcattatcttaacgatggcggctcgattacgctgattagcgggatcgtggcgcatgagcccatcgctcagggcgtcaatgccaccaccgtgaacgccgggctggaggggtttgttcgcgccgccgcttgtgaactgccgcgcgggatccgtattaacctgattagccccactgtattaacggaatcggcggcagcctacgacggtttcttccccggctttgccagcgtccctgccgccagcgtggctcaggcctaccgccgcagcgtggaaggcgttcagagcgggcggatctatcgggtcggctattga

SEQ ID NO: 255883 - DNA, 900 bp, Klebsiella pneumoniae
atggataagctacgggcgatggagacctttattgcggtcgtggagtgcggcagctttaccgacgccgcggcgcggcttgagatgtcggcggtgatggtcgggaaatatatcgcgctgatcgaacggcagcttaatacccgtcttcttgagcgcaatacccgccgccagagcctcaccgacgccgggcgggtctattttgacgaggcgaaacgcgtcctggagcaggtttcaatcgctgaaagcgcggtggagaggctgcggatcgcgcccgcgggcacgctgcgggtaagcgcgccgacgtcgtttggcgcctgcgtcattgctccgctgaccgccacgtttctgcaggcatggcccgacgtgcgcgtggagctggatctgactaaccggatggtcgatctggtggatgaggggttcgatttggcgatccgcatcggcgagatccgcaatagcgatctggtggcaaaatatctcgcgccctaccggatgacgatctgcgccgcgcccgggtatttagcccgctacggtacgccgacgacgcctgctgacctggccgatcacctctgtttgtcgcatacggtgtggaccgcgcgcaatgagtggaagctgcctggcgccgaggagggcgtccgctggaagcgcgatgccgtcctgcgctgcaatgacggctatgcgctgcgaacggcggcgatcgccggggccggactggtgttgcagccggaagtcctgctggccgatgcgctggagagcggtaaactggtgcgcgtgctggaggcgtataccccgcagccgaggccggttcacctgctctggcggcaggatctgcggccgctgccgaagctgacgcgctttgttgaacatcttctgcaggggcaacgccagaacgggcggaccgcttaa

SEQ ID NO: 255884 - DNA, 1146 bp, Klebsiella pneumoniae
atgacaaatttgcataccctgagcgtacatagcggcacatttaccgatgaacacggcgcggtgatgccgcctatttatgccacctccacctttgcccagcccgcgccgggccagcataccgggtacgaatattcgcgcagcggcaacccgacgcgccacgcgctggagacggcgattgccgacctggaaagcggcacgcgcggctacgcctttgcttccggccttgcggccatctcaaccgtgctggagctgctggataaagacagccacctggtcgccgtcgacgatgtttacggcggcacataccggctgattgaaaacgttcgccgccgcagcgccggcctgcgggtgagctgggtgaagcccgacgatctggcggccatcgaagcggctattcaacccgatacgcgcatgatttgggttgaaacgccgaccaacccgctgcttaagctggccgaccttagcgccatcgccgccattgcgcggcggcacaatattatcagcgttaccgacaacaccttcgcctcgccggccatccatcgtccgcttgagctgggctttgatatcgtggtgcattcggcgaccaagtaccttaacggccactcagatgtcgtcgccggactggcggtggtcggcgacaacgccgcgctggcggaaaagctgggctatctacaaaacgcggttggcggcgtgctcgatccgttcagcagtttcctgacgctgcgcggtattcgtaccctggcgctgcgtatggagcgccacagcagcaatgcgctgctgcttgccgagtggctggagcagcagccgcaggtcgaaagggtctggttcccgtggctggcctcgcatccgcatcatcagctggcgcgcaggcagatggcgcttcccggcgggatgatttccgtggtggtcaaaggcgacgatggctacgccgagcggatcatacgcaagctgaagctgtttacgctcgcagagagcctcggcggcgtggaaagcctggtgagccagccgttttgcatgacccacgcatcgatcccgctggagcagcgtttagccaacggcattactccccagctgattcgtctgtcggtagggatagaagatccgcaggatctgatcgccgactggcgccacgcgctgcgcgactaa

SEQ ID NO: 255885 - DNA, 1371 bp, Klebsiella pneumoniae
atgacagtttttcattccgttagcgacctgattggtcatactcccctgctgcagcttcataagctggataccggcccctgcagcctgtttctgaaactggaaaatcaaaatcccggcggctcgataaaagaccgcgtcgcgctatccatgattacgcaggcagagcgcgaaggaaaattaaaacccggcggcacgattatcgaagccaccgccggcaataccggcctcgggctggcgctgatcgccgcgcagaaaaattatcgcctgatcctggtggtgccggacaaaatgagccgcgagaagattttccacctgcgcgcgctgggagcgcaggtacagcttacccgctcggacgttaacaaaggccatcccgcctactatcaggactacgcccggcgtcttgccgacgaaacgccaggcgccttttatatcgaccagtttaataacgaggctaacccgctggcgcatgccaccaccactgccccggaaatcttccggcagctggagggcgatatcgacgcgattgtcgtcggcgtcggctccggcggaaccctcggtgggctacaggcctggtttgctgaacactccccgaaaacggaatttatcctcgccgatccggcgggctccattctggcggaccaggtcgaaaccgggcgctacggtgaaaccggctcctggctggttgaagggatcggcgaagactttattccgccgctggcccatcttgacggcgtccgcagcgcataccgcgtcaccgatagcgaagctttcgcaactgcccgccagctgctgcaggttgaaggcattctggcaggctcctctaccggaacgctgctcaccgccgccctgcgctactgccggtcgcagacatcccctaaacgcgtggtgactttcgcctgcgacagcggcaataaatatttatcaaagatgtttaacgatgactggatgcgccagcagggctttttaagccgcccttcgcgcggcgatctcagcgattttatcgctctgcgccacgacgaaggagcaaccgttaccgccgcgccggacgataccctggcggccatcctcgcgcgtatgcgtctctacgacatctcacaactaccggtgctggaaaacggccgcgtcgtcggcatcgtcgacgaatgggatctgattagccacgtccagggtgacagtcagcgcttttctctgccggtcagggaagcgatgacccgtaacgtggagaccctggataagcacgcgccggaaagcgcgctgaaggccattttcgatcgcggtctggtggccgttatcgccgacaacgatcgttttcttggcctcattacccgcagcgatgtgctgaccacctggcgtaaccgactcgaacagtaa

SEQ ID NO: 255886 - DNA, 279 bp, Klebsiella pneumoniae
atgctttttagccgtccggagggaaaggttgttagccgcctgggcgtgtcgatttccagaatagcgcgcttttgcccggtttttcgccgaattatccgtttttacgcgctgctttatctctatttcagaaaaggattgccaaaaatattcgatagtttccagcggcaattttcaggtgccagcgaaaatatcagcgccggtataccgggacattgttcaacggaacaaattcagatggatgaattattcctgataagacgctccttctcgtttcaataa

SEQ ID NO: 255887 - DNA, 1164 bp, Klebsiella pneumoniae
atgaagtggtttgtttttatgttcgttgccatcgcggcaacgctgatggtcccccctgaggccaatagcggatcgtttgatccggtaaccggcgcttatactacggatccgataaccgtcacgctgacgccaaagaccgttacggccagcgcggcgataatcgcgaatggtgaaagggtttactggaccggcaataattatactcaacgtggaggaccattttactgggggccgcatactcacacaatgagcagtgccgctattgccacaaccgccgcaacaaaaattaacgcaactggggtatgctcggcagccgccagcggtacatcgcttaccataagcggatgcttctcctttatggagtcttatatgatctacatgggcaaaagcgcctcttgtaaatcattttatagtaatctggttaatatcagttcattaaccaatttcggagaattcgtcaatgtgaactttaatttaggacttaatcaacgaccatacgcattgagcaagtcagcaatatcaagcgtgaataccacttctattacctatccgcgccagacggttggaccatttcaaatatcgtcttctccctatgacgccgacttgaaggcgacgcttaccgccaaaacaccaccctatgtttattttaactgttccgtaccacaaggtgcgagcatgactctgagcacagcgggagtcgtcgcccaggcttttgagatggtaaccacggtcaacaaacccgcctatgccccgacgattagttactcgccggcgctccctatcaccaacaatatcaccgtaaatatccgcaatattgctgcgatagaaattctccccagcacggtattcaacaccgggactatctccgcctggcgcacaacctatatggaacaaccgcttaccgtaaccgggcagggcaatataacccgcaattttggcgcatcccagaactttaacgttcttgaatcctggacctgcgcgacaacagggcaaatcgactttcgaataatgcgcgacaataccaacgccaacgtctgttcgggcgccacctatacccaccccgtgcagacgccacagtcgttgacggcacagtggaaagcgcaaagttcgagcgcctcaggcgcctggagcgctagggctacagtgacctttacgctgccctag

SEQ ID NO: 255888 - DNA, 2193 bp, Klebsiella pneumoniae
ttgccgggcgcctcatttccggcggtgccaatggacgtttcttacctgctcgacagcctcaatgacaaacagcgtgaagccgttgcggcatcacgtactaatatgctggttctggcaggagcgggcagcggcaagacgcgcgtcctggtacaccgcatcgcctggctgctgagcgttgagaactgttccccttactccatcatggcggtgacctttaccaacaaagcggcggcggaaatgcgtcatcgtattggtcaactgatgggcaccactcagggcggtatgtgggtcggcactttccatggtctggcgcaccgtctgctgcgcgcccatcaccttgacgccgggctgccgcaggacttccagatcctcgacagcgaagatcagctgcgcctgcttaagcgcctgattaaggcgatgaatctcgatgagaagcagtggccgccgcggcaggcgatgtggtacatcaacggccaaaaagatgaagggctgcgcccgcatcatattcagagctacggtaatccggttgagcagacctggcagaaggtttaccaggcctatcaggaagcctgcgatcgcgcggggctggtggacttcgccgagctgctgctgcgcgcccacgagctgtggcttaacaagccgcatatccttcagcactaccgcgagcgctttaccaatatcctggtggatgaattccaggataccaacaatattcagtacgcgtggatccgactgctggcgggcgataccggtaaggtaatgatcgttggcgatgacgatcagtcgatttacggctggcgcggcgcgcaggtagaaaacatccagcgcttcctcaacgacttccccggcgcggaaactatccgtctggagcagaactatcgctcgaccagcaatattctcagcgcggcgaacgccctgattgagaacaacagcggacggctggggaaaaagctgtggaccgatggcgccgacggcgagccgatttcgctctactgcgcgtttaacgatcttgatgaggcgcgttttgtcgtcaatcgtatcaaaacctggcaggaaaacggcggggcgctggagcagtgcgcgatcttgtatcgtagcaacgcccaatcgcgcgtgctggaagaggcgctgctgcaggccagcatgccttatcgtatttatggcggcatgcgcttcttcgaacgtcaggagatcaaagatgcgctctcctatctgcgcctgatcgccaaccgtaacgacgatgcggcgtttgagcgcgtggtcaataccccgacgcgcggcattggcgatcgcacgctggacgtggtgcgccagacctcgcgcgaccggcagctgacgctgtggcaggcctgtcgcgagctgttaaaagagaaagttctcgccgggcgcgctgccagcgctctgcagcgttttatggagcttattgacgccatggcgcaggagacagccgacatgccgctgcacgtgcagaccgaccgggtcattaaagattccggcctgcgcatgatgtacgagcaggagaaaggcgagaagggccagacgcgtatcgaaaacttagaggagctggtgacggcgacgcgccagtttagctacaacgaagaagatgaagatttaatgccgctgcaggcgttcctctcgcatgcggcgctggaagcgggagaagggcaggcggacacctggcaggatgcggtacagctgatgaccctgcactcggcgaaagggctggagtttccgcaggtatttatcgttggcgtggaagaagggatgttcccgagccagatggcgcttgatgagggcggccgcctggaggaagaacgccgcctggcctacgtcggcgtgactcgtgccatgcaaaaactcacgctgacctacgcggaaacccgtcgcctgtacggtaaagaggtttatcatcgcccctcgcgctttatcggcgagctgccggagtcgtgcgtggaagaggtgcggctgcgcgccacggtgagccggccggtcagccatcagcgcatggggacgccgatggcggaaaacgacaccggctataagctgggccagcgcgtccgccacgccaaattcggtgaaggcaccattgtgaacctcgaaggcagcggcgaacacagtcgcctgcaggttgcctttcaggggcaggggatcaaatggctggtcgcggcgtacgcccggctggaaacagtgtaa

SEQ ID NO: 255889 - DNA, 708 bp, Klebsiella pneumoniae
atgaaacaagtcggggaagaacaacaggaacttgccagcgagctaaacgatcgcgcagtggtggactatctgttgcaacatcctgaattctttattcgtaatgcggcgctggtggaacacatgtcagtgccgcatccggtgcgtagttcggtctcgctggtggagtggcacatggcgcgggcgcggaaccatatcaacgtgctggaagaaaatatgacgctgctgatggagcaggcgacggctaacgaaagcctgtttcagcgcctgtttcacctgcaaacgcggctggcggcggccgacagccttgacgaaatgctgaaccgctttcatcgctgggcgcgcgagctgggtctggcgggcgccacggtgcgcctgtttcccgaccgctggcggctcggcgcgccttccaaattcacccatctggcgataagccgtcaggcgtttgagcctattcgcattcagcgtcttggacaacagcgccattatcttggcgctttaaacggccccgagctgctggtagtgctgccggaagctaaagccatcggatcggtggcgatgtcgctgctggggggagacgacgcccctggagtgatgatattcagcagtcgcgacccccagcactatcagcaagggcagggaacgcagctattgcaggaaatcgcgtcgatgctcccgggattgctggagcgctggattgaacgcgcatga

SEQ ID NO: 255890 - DNA, 825 bp, Klebsiella pneumoniae
atgcagttctctaaaatgcatggcctgggtaacgactttatggtcgttgacgcagtaacgcagaatgtttttttctcacctgaactgatccgtcgtctggcggatcggcatcttggcgtgggtttcgatcagctgctggtggtggagccgccttacgatccggagctcgacttccactatcgtatcttcaatgccgacggtagcgaagtggcgcaatgcggcaacggcgcgcgctgtttcgcccgctttgtgcgtctgaaaggcctgaccaataaacgtgatatccgcgtcagtacctcgaatggccgtatggtattaagcgtcacggaagacgatctggtgcgcgtcaatatgggtgagccaaacttcgaaccgtcccaggtgccgttccgcgccaacaaagcggaaaagacctatattatgcgcgccgctgaacagacagtattgtgcggcgtggtgtcgatgggtaacccgcactgcgttatccaggttgatgatgtggaaaccgcgacggtggaaacgctcggcccggtgatggaaaaccacgagcgcttcccggagcgggcgaacatcggctttatgcaggtgatcagccgctctcatattcgcctgcgcgtgtatgaacgcggtgcgggggaaactcaggcctgcggcagcggcgcctgtgcggcggcggcagtcggtatccagcagggattactgggcgaggaggtccgcgtggaattacccggcgggcgtctggatatcgcctggaaaggtccgggccaaccgttgtatatgactggcccggcggcacatgtctatgacggatttattcatttatga

SEQ ID NO: 255891 - DNA, 2628 bp, Klebsiella pneumoniae
atggtgacggtttttgttgaaatactgaaactctccgtactattgtacgtcgggtttttgaacatcaggcgatatgtcttgtacctctatattgagacactgaaacagagactggatgccatcaaccaattgcgcgtggatcgcgcccttgctgccatgggacccgctttccagcaggtttacagtctactgccgacattactacattatcatcatccgctgatgccgggttaccttgacggtaacgttccccgtggcatttgcctctacacgcctgatgaaacccaacgtcactatcttgatgagctcgagctcaaccgtggcatgctggccaaggagccgccgaaaggcgagctgccgatcaccggcctttactctatgggcagcacatcttccgtcggccaaagctgttcgtctgacctggatatctgggtttgccaccagtcctggcttgacactgaagagcgtcagctgctgcagcgtaaatgtagcctgctggagagctgggcggcatcgctgggcgtcgaggtcagcttcttcctgatcgacgaaaaccgcttccgccataacgaaagcggtagcctgggcggcgaagactgcggctccacccagcatatcctgctgctggatgagttttaccgtaccgcggtgcgccttgccggcaaacgtattctgtggaatatggtgccgtgcgatgaagaagagcattacgacgattacgtcatgagcctctacgcgcagggcgtactgacgccgaatgaatggctggatcttggcggcctgagttctctgtcggccgaagagtacttcggcgccagcctctggcagctgtataaaagcatcgactcgccctataaggccgtgctgaaaacgctgctgctggaagcgtactcctgggagtaccccaataaccgcctgctggcgaaagatatcaaacagcgtctgcatgacggtgagatcgtttcgtttggcctcgatccttactgcatgatgctggagcgcgtgacgctctatctgcaggccatcgaagatgaaacgcgcctcgatctggtgcgtcgatgtttctatttaaaagtctgcgagaagctgagccgcgagcgcgcctgcgtcggctggcgtcgcgaagtcgtcagtcacctggtgaaagagtggggctgggatgaaaagcgtctgatgatgctcgacaatcgggccaactggaagattgacgaagtccgtaaagcgcacaacgaactgcttgatgcgatgatgcagagctatcgcaacctgattcgttttgcgcggcgcaataacctgagcgtttccgccagcccgcaggatattggcgtgctgacgcgtaagctgtacgccgcctttgaagcgctgccggggaaagtcaccctggtaaacccgcaaatttcaccggatctgtctgagccgaatctgacctttatccacgtgccgccgggccgtgccaaccgtaccggttggtatgtctataaccgggcgccggacatggaatcgatcatcagccatcagccgctggaatataaccgttatcttaataagctggtggcctgggcctggtttaacggcctgttgacgtcacgtacgcgcctgtttattaagggcaacggcattgtcgatctggcgaagctgcaggagatggtggccgatgtggcgcatcacttcccgctgcgcctgccttctccgacgccgaaagcgctgtacagtccgtgcgaaatccgccatctggcgattatcgtcaacctggaatatgacccgacggcggccttccgcaatcaggtggtgcattttgacttccgcaagctggatgttttcagcttcggcgaagagcaaaagtgcctgattggcagcatcgacctgctgtaccgcaactcgtggaacgaggtgcgtacgctgcactttaacggcgagcaggcgatgatcgaagcgctgaaaaccattcttggcaagatgcaccaggacgccgcgccgccggatagcgtggaggttttctgctatagccagcatctgcgcggtctgatccgcactcgcgtgcagcagctggtgtctgaatgcgttgagctgcgtctttccagcacccgtcaggataccggccgctttaaagcgctacgcgtttccgggcagacctgggggttgttcttcgagcgtcttaacgtttcggttcagaaactggaaaatgccatcgaattctatggcgcgatttcccataacaaattgcacgggctgtcggtgcaggtggaaactaaccacgtcaggctgccgcaggtagtggacggctttgccagcgaagggattattcagttcttcttcgaagatgcggataacgataacggttttaacatctatatcctcgatgagagcaaccgcgccgaggtgtatcaccactgcgaaggtagcaaagaggagctggtgcgcgacgtcagccgcttctactcttcatcccatgaccgttttacctacggttccagctttatcaactttaacctgccgcagttttatcaaatcgtcgacgttgacggtcgcgagcaggtgattccgttccgcagccaggtgattgccgctgccaccgcttcagccggtcaggatgctgcttcatcgccgatgctacagcactactcctga

SEQ ID NO: 255892 - DNA, 957 bp, Klebsiella pneumoniae
atgacggtaacaagcatgttagacaaagttttgagaattgccacacggcaaagcccgcttgcgctatggcaggcacattatgtgaaagagcgtctggagtcctgccacccggggctttccgttgaactggtacctatggtcacccgcggcgacgtgatccttgatacaccccttgcaaaagtgggcggtaagggtctgtttgtgaaagagttagagctggcgatgctggaaggccgcgccgacatcgccgtccattcgatgaaagacgtaccggtggagtttcccgcagggcttgggctggtgaccatctgcgagcgtgaagatccgcgcgatgcgtttgtctcaaaccactacgcttccattgatgaactgccgcacggcagcatcgttggcacgtcaagtttacgccgtcagtgtcagctggccgcagcgcggccggatctcacgatccgctccctgcgcggcaacgtaggcacgcgtctgggcaagcttgatagcggcgagtatgacgccattattcttgccgccgcagggcttaaacgcctgaacctggaggcgcgtattcgtcaaccgctatcgccggagcaatcgctgcccgccgttggccagggcgcggtcggcatcgagtgtcgtcttgacgacgaatggaccaaagcgctactggccccgttaaatcatacggaaacggccatacgcgtacgcgctgaacgggcgatgaacacccggctggaaggcggctgtcaggtgccaatcggcagctatgccgaactgatcgacggtgagctatggctgcgcgcgctggttggcgcgccggatggctcacaaatggtgcgcggcgagcggcgcggccgtgcggaagaggcagaaacgctcggcgtctctctcgccgaagagcttctgaataacggcgcacgtgacattcttgccgtcgtctatgcaggagaaggtccacaatga

SEQ ID NO: 255893 - DNA, 741 bp, Klebsiella pneumoniae
atgagtatcctggtcacccgtccgctgccgcaaggcgaagagttagtcagccgcctgcgcgcgctggggcgcgtggcctggagctttccgctcattgaatttacccctggacgtcagcttcctgagctgggcggccagctggaaaacctcgcggctggcgatttgctcttcgcactgtcccagcacgccgttgagtttgcccactctcgcctccagcagcaaaggctgcgctggccttcggcgcctgactattttgccattggccgcaccaccgcgctggccctgcataaagtcagcaatcgtcatgttcgctatccgttagatcgggaaatcagcgaagtcttgctacaattacctgaattacaaaacattgcggggaaaagagcgctcatcctgcgcggtaacggcgggcgggaattactcggtgatacgcttcgcgaacgcggtgctgatgtcactttttgtgaatgttatcaacgtagtgcaaggcactatgatggcgcagaagaagcaatgcgctggcagtctcgcggtatttcaacgctggtcattaccagcggcgagatgctgcagcagctctggacgctgataccacagtggtatcgcgaacgttggctcctgagctgtcgcattttagttgtcagtgaacgtctggccgagcaggccagagaattgggctggcaggatatccaggttgccgatagcgccgacaacgatgcgctgctacgcgcattacaataa

SEQ ID NO: 255894 - DNA, 1191 bp, Klebsiella pneumoniae
atgacggaacaacagaatcaatccgccgtggttgaagagaccagggaggccgtggacacgacgtcacagccagaaaataacgtagaaaagaaaaacggcggcagtaaaaccagcctcgcgctgagcgcaatagctattgctatcgccctcgccgctggcataggtctttatggcctgacgaagacccaggcaacccgccagagcgaagccagcgccgggctatccagccagatcgccgcgctgcaaaaagcccaggaaagccaaaaaagcgaactcgaaggcattattaagcagcaggccgaccagttgacggaagcgcagcgtcagcaggaggctctggcgaagaagctggaagaagttcaggagaaggttgcggttatttccggcagcgacgcaaaaacctggctgctcgcgcaggcggatttcctcgtgaaactggccggacgtaagctgtggagcgatcaggacgtaacgaccgctgccgcgctgctgaaaagcgccgacgccagcctcgccgatatgaacgatccgagcctgatcgccgcgcgtcgcgccattaccgacgatattgcctcgctttctgccgtgagtcaggtcgactacgacggcatcattctgaaggtgaaccagctcgccaaccagatcgataatctccgtctggcggacaacaacgatgacgacacgccgatggattccgatagcgatgagctatccagctccattaccgaatggcgtgtaaacctgcaaaaaagctggcagaactttatggacagctttattaccgttcgccgccgcgatgaaaccgccgtgccgctgctggcgccgaaccaggacgtctacctgcgcgaaaatattcgctcccgtctgctggtcgcagcgcaggccgtccctcgccatcaggaagaaacctacaaacaggctctggataacgtctcgacctgggttcgcgcttactacgacacggaagacgccaccaccaaagccttccttgaggatgtggataagctcagccagcaaagcatcaccatgaacgtaccggaaaacctgcaaagccaggcgctgcttgagaaactaatgcagacgcgagtgcgtaatctgatggcgcagccggctgaaccccagaccagcgcgccggcacctgcccctgcacctgcagcccacgcgccaacgcctgcgccacaaggagagtaa

SEQ ID NO: 255895 - DNA, 1197 bp, Klebsiella pneumoniae
atgttgaaaattctcttactcttcgcgctgctgcttgccgggattgtggtcgggccgatgatcgcgggtcatcagggctacgtgctaatccagaccgataactacaatattgaaaccagcgtgaccgggcttgcgatcatcctgatcctcaccatggtggtactgtttgccattgagtggctactgcggcggattttccgcaccggcgcgcacacccgcggctggttcgttggccgtaagcgtcgtcgcgcccgtaagcaaaccgagcaggcgctgctgaagctggcggaaggtgattaccagcaggttgagaagctgatggcgaaaaatgccgatcacgctgaacagcccgttgtgaactacctgctggcagcggaagccgcccagcagcgtggagatgaagctcgcgctaaccaacatctggagcgcgctgctgaattagccggtgacgatctgatccctgtcgaaataacccgcgtacgtctgcagctggcgcgtaatgaaaaccacgccgcccgccacggtatcgataggctgctggagatcacaccgcgtcatccggaggttctgcgccttgccgagcaggcctacatccgtaccggcgcctggaattcgctgctggatatcattccgtcaatggcgaaagccaacgtcagcgatgaagagcatcgcgctgagctggaacagctggcgtggattggtctgatggataaaacgctggccgacggcggcagcgaaggtttgcgcgactggtggaaaagccagagccgtaaaacccgcagccaggtggcgctacaggtggcgatggcgaatcgtcttatcgaaagcgacgatcatgataccgcgcagcagattattatcgaaggtctgaaaaagcactatgacgaccgtctggttatgccgattccgcggctgaaaaccaataaccctgagcagctggaaaaagtgctgcgtcagcagcttaaaacggtcggcgatcgcccgctgctgtggagtacgctggggcaatcgctgatgcgccacggtgagtggcaggaggccagcatcgcgttccgcgcagccctcaagcagcgcccggatgcgtttgactacgcatggctggcggatactcttgaccgcctgcatcagccggaagaagcggcgacgatgcgtcgcgacggcctgctgttaaccctgcaaaacaatccgcagcagtaa

SEQ ID NO: 255896 - DNA, 1494 bp, Klebsiella pneumoniae
atgattcaggcgatcaagcaggatctggggatgaacgtgatcatggacgtggtatataaccacaccaatgccgcgggtccgaccgaccgcacgtcggtgctggataagatagtgccctggtactatcagcgtctgaatgaaaccaccggcagcgttgaatccgccacctgctgttccgactctgcgccggagcatcggatgttcgccaggctgattgccgactcgctggcggtatggaccaaggattataaaatcgatggtttccgcttcgatctgatgggctatcatccgaaagcgcaaattctctcggcgtgggagcgcattaaagccctgaatccggatatctacttctttggtgaaggctgggattcaaaccagagcgaccgctttgaaatcgcctcgcagatcaatctgaaaggcaccggtatcgggacgttctccgatcgtctgcgcgactccgtgcgcggcggcggcccgtttgattccggcgatgcgctgcgtcaaaaccagggcgttggcagcggcgctggcgtattaccaaacgagctcaccagcctgaacgatgatcaggttcgtcatctggccgatctgacccgtctggggatggccggtaaccttgctgactttgtgatgatcgacaaagacggcgcggtgaagaaaggcagcgaaattgactataacggcgcgcctggcggctatgccgcagatccgacggaagtcgtcaactatgtttcgaagcacgacaaccagacgctgtgggatatgatcagctataaagcgtcccaggaagccgacctggcgacccgcgttcgcatgcaggccgtttcgctggcaacggtgatgctcgggcaggggatcgctttcgaccagcagggttctgaactgctgcgctcgaaatcctttacccgcgattcctacgactccggcgactggttcaaccgcgtggattattccctgcaggacaataactacaacgttggtatgccgcgcatcagcgatgacggcagtaactatgacgtgatttcgcgcgtcaaagatatggttgccgctccgggcgaagcggagctgaagcagatgaccgccttctaccaggagctgaccgagctgcgtaaatcctcgccgctgttcaccttaggtgagggcagcgcggtgatgaagcgcgttgatttccgtaataccggttcagaccagcaggccggtctgctgattatgaccgtggatgacggggtgaaagcgggcgccagtctggatagccgtcttgacggcctggtggtggcgatcaacgctgcgccggaaagccgtacgctgaatgagtttgccggtgagacgctgcagctgagcgcgatccagcaggcggcgggcgaaaattcgctggctcacggcgtgcagattgccgcagacggcacggtcaccctgccggcatggtcggtggcggtgctggaaatgccgcagggcgatgctcagggcgcggggctgccggtcagcagcaagtaa

SEQ ID NO: 255897 - DNA, 525 bp, Klebsiella pneumoniae
gtgcttgttcgtgaacaagaaccgtacccgccgtccagtcccccggcggggggcgggaaaatggtgcaaatcccctacgtgaccgtaccgctgtatgccgcgctgctgattgcgctcggctggtttggcggcgagcagtggcggaataaacccgtcccgcagccgataacgcagccggtagcccatgcggcgttagtgccgctgaatcaaccggcggtcaaaactgccgtcaagccggttaaagccgggccagaaacgcaggcccttgcggaggcgccgatcgatgaagatcatctgccgcctctgcgctacagcgcgcacgtctacgccaccctggcggagaaacgcagcattgtattaaacggacaatcctggaaggagggcgactcgccgctggcgaatctggttatcgagcagatccagcaggatctcaccgtctttagctttaacggtaaaacgtttaccctcgcggcgctggatgactggccgggcgggacgattgaggagagtccgcagggagaataa

SEQ ID NO: 255898 - DNA, 378 bp, Klebsiella pneumoniae
atgcgcaactttattatatttccgcttatggcggttgccctgctctcaggctgtcagcaaaatcgtcagacaaccctgagtcctgcggttagcggtgaggctcagcttgagcagcttgcctccgtcgccgccggggcgcgctatctgaagaataaatgcaaccgcagcgatctgcctgccgatgacgcaattaaccgtgcggcaataaacgtcggtaaaaaacgcggatgggcaaatattgatgataatctgctgagccagcgcagcgcgcagctatatcaacagctccagcaggatagtaccccggaagccacaaaatgcagccagtttaatcgccagctggcgccatttattgatagcctgcgcggcaataaatag

SEQ ID NO: 255899 - DNA, 2553 bp, Klebsiella pneumoniae
atggcgggagatgaccgcgagccgatcggacgtaaggggagaccctcgcgcccggcaaaacaaaaggtaactcgccgtcgggttcgggaagaggactacgacgacgattacgatgatgactatgaggatgaaaaaccgatgccgaggaaaggaaaaggcaaaggcggtaaaccccctcgtcgtaaacgcacctggctgtggctgctgattaaaattggggtcgtctgtgcggtattgattgccgcctatggcgtctaccttgaccagaaaatccgcagccgcattgacgggaaagtctgggatctgcccgcggcggtttatggccggatggtcaaccttgagccggatatgcagatcagcaaaaacgaaatggtgcgcctgctcaacgcgacgcagtatcgccaggtgagcgcgatgacgcgtccgggggaatatacggtacaggccaacagtatcgagatgatccgccgtccgttcgatttcccggacagtaaagaaggccaggtgcgcgcgcgtctgacctttaatggcgatcgtctcgacaccatcgagaacatggataataaccgccagttcggtttcttccgtctcgatccgcgcctgattaccatgctgcaatcggctaacggcgaacagcgtctgtttgtgaagcgcaacggcttcccggatctgctggtggatactctgctggcgacggaagaccgccatttctacgaacacgacggcatcagcctttactccattggccgtgcggtgctggctaacctgaccgccggtcgtacggtgcagggggcgagtacgctgacccagcagctggtgaagaacctgttcctctccagcgaacgttcgtactggcgcaagattaacgaagcctatatggcgctgatcgtcgatgcccgctacagcaaggatcgtatccttgagctgtacatgaacgaggtgtacctcggtcagagcggcgataacgagatccgcggcttcccgctggcgagcctctattactttggtcgtccggtggaagagctcagcctcgatcagcaggcgctgctggtggggatggtaaaaggcgcgtcggtttacaacccgtggcgtaacccgaagctggcgctggagcgccgcaacctcgtgctgcgtcttctgcagcagcagcaggttatcgatcaggagctgtatgacatgctcagcgcgcgtccgctgggcgtacagccgcgcggtggggtgatctctccgcagccggcgtttatgcagatggtgcgtcaggagctgcaggcgaaactgggcgataaagtcaaagatctctccggcgtgaagatctttaccaccttcgattccgtggcgcaggatgcggcggaaaaagcggcgatagagggtattccggcgctgaagaaacagcgtaagctaccggatctggaaaccgcgatggtggttgtcgaccgcttcaccggcgaagtacgggcgatggtcggcggggcggagccgcagtttgctggctataaccgcgcaatgcaggcgcgccgttcgattggctcgctggcaaaaccggcgacctatctgaccgcgctaagtcagccgaatcagtatcgtctcaatacctggatcgccgatgcgcctatctcgattcgtctgtctaacggtcagacgtggtcgccgcagaacgacgatcgtcgctacagcgagagcgggaaggtgatgctggttgacgcgctgacgcgttcaatgaacgtgccgacggtgaatctcgggatggcgctgggcctgccggcggtggttgatacctggactaagctgggcgcgcccaggaatcagctgaatgcggttccttctatgctgctgggggcgctgaacctgacgccgattgaagtggcgcaggcgttccagaccattgccagcggtggcaaccgcgcaccgctgtcagcgctgcgttcggtgatcgctgaagatggtaccgtactctatcaaagctatccgcaggcggaacgggcggtaccggcgcaggcggcttatatgacgctctggactatgcagcaggtggtgcaacgcggtaccggtcgtcagctgggcgcgaagtatccgggcctgcatctggcgggtaaaaccgggaccaccaacaacaacgttgatacctggtttgccggtattgacggcggtcaggtgaccattacctgggtgggacgcgataataaccagccgactaagctgtacggcgccagcggcgcaatgtcgatttaccagcgctatctggctaaccagacgccgactccgctggtcctgactccgccggaagatgtggtggatatgggcgtcgatagcagcggtaactttgtctgtagcggcggcatgcgttcgcttccggtatggacgacctcgccggacgcgctttgtcgccagggcgaactgattcaacagcagcagctccagcagcagcaggcgaataatccgttcaatcagtccgggcaacagccgcaacagcagcaaaatcagcagcaaccgccgaagcaggagaagagcgatggcgtagcgggctggattaaagatatgttcggcggtaattaa

SEQ ID NO: 255900 - DNA, 891 bp, Klebsiella pneumoniae
atggaaaacctcacactcatcacgcggcggcgcctgctgaccgcgatggcgctgtcgccgctgctgtggcagatgcgcggcgcgcgggcggcggaagttgatccgcagcgtattgtcgcgctcgaatggctgccggtagagctgctgctggcgctgggcgtcacgccctacggcgttgccgatatccctaactacaggctgtgggtcaatgaaccggcgctgcctgattcggtgattgatgttgggctgcgcaccgaacccaatctggagctgctgacgcagatgaagccgtcgtttctggtctggtcggcagggtacggcccggcggcggaaaagctggcgcgtattgcgcccggacgaggattcaccttcagcgacggcaagcgtccgctgatgatggctcagcagtcgcttagcgaaatggctgacctgatcggcaggcagcaggaagcgaagcgccatctggcggaatttgacgcgctgatggagagcctgcgtccgcgctttgcccgccgcggcgatcgcccgctgctgatgattaccctgcttgatacccgccacgtgctggtctttgcgcagaactgtctgttccaggaagtgctcgaccgctttgccatcaaaaatgcctggcagggcgagaccaccttctggggcagcgtcaccgtcggtattgaccggctggcggcctacagagatgccgacgttatctgcttcgatcacggcaatgcgcgggagatggcgcagctcacggcgacgccgctgtggcaagcgatgccgtttgttcgcgcagggcgttttcagcgcgtcccggcggtgtggttctatggcgcgacgctatcggcgatgcattttgcccgcgtgctggccgacgctcaggggggcccggtgtga

SEQ ID NO: 255901 - DNA, 1983 bp, Klebsiella pneumoniae
gtgagatcgcgtatttcgcctttggcgacatctctgctgttaactctgcttatcgtcgctgctgcgctgacgctgttcaacctcaacatggtgctgccgcgaagcgaatgggggcaggcgctgtggcagcctaatatcgataatatcgctcagatgctgttccactacagcctgctgccgcggctggttatatcgttgctcgtcggcgccgggctgggactggtgggcgtgctgttccagcaggtgctacgtaacccgttggcggaaccgacgacgctcggcgtagcgaccggggcgcagctgggcatgacggtcaccacgctgtgggcgatccctggcgtgctggcgtcgcagttcgccgcgcttgccggggcgtgcattgtcggcgcgctggtgtttggtgtgtcgtggggcaaacgcctctcgccggtgacgttgattctggctgggctggtagtcagcctgtactgcggcgcgcttaatcaactgatggcgatcttccatcacgatcagctgcaaagtatgttcctgtggagcaccggaaccctgacccagaccgactggagcgtggcacagcgactgtggccgcagctgctgggcggagccattttaacgctgctgctgctgcgtccgctgaccttgatggggctggacgacggcgtggcgcgcaacctcggactggcgctctcgctggcacggctgggggcgttgactctggcgattgtcatcagcgccctgttggtgaatgcggtggggattattggctttatcggcctgttcgcgccactgctggcgaagatgctgggcgctcgtcgtctgctatcgcgcctgctgttggcggcgctgattggcgcgctgctgctgtggctctccgatgaggttatcctctggctggcccgggtgtggatggaagtctccaccggttcggtaaccgccctgattggcgcgccgctgctgctatggctgctgccgcgcctgcgcagcattagcgcgccggtgatgaacggcggcgccagggtgcaggctgaacggcaacatgtgctgtggtttgcgctgggcgggctggcgctgctgctgctggccatcgtcgctgcgctggctttcggccgcgatgcgcagggctggcactgggccagcggtacgctactggatgagctaatgccctggcgctggccgcgcattctggcggcgctgttcgctggcgtaatgctggcggtagcgggctgcattatccagcgtttgaccggtaatccgatggccagtccggaagtgctcggcatcagctcaggcgcggcgtttggcgtggtggtgatgctgttctttgtgccggggaatgcctttggctggctgctgcccgccggtagcctcggagcggcggcgacgctgctgatcatcctgattgccgccggacgcggcgggttctcgccgcatcgcatgctgctggcagggatggcgctgagcacggcgtttaccatgctgctgatgatgctgcaggccagcggcgatccgcgaatggcgcagatcctgacgtggatttccggctcaacctacagcgccacgccggaactcgtgatgcgcagcggcgcggtgatgcttgttctgcttacgctgacgccattttgccgacgctggctgacgattctgccgctgggcggcgaggcggcgagggcggtcggcatggcgctgacgccgtcacgtatcgggctactgctgctggcggcatgtttgaccgcggccgcaacgctaacgattggccccctcagcttcgtggggttaatggcaccgcatattgcgcgtatgatgggattccggcgtacgatgccgcatatggcgatctccggcctgattggcggggtgctgctggtgttcgccgactggtgtggccggatgctgatgtttccgtatcagatcccggcgggattgctgtcgacgtttatcggcgcgccgtactttatctatctgttgagaaagcagagtcggtag

SEQ ID NO: 255902 - DNA, 153 bp, Klebsiella pneumoniae
atgacaacacaatcgtcccctacaccacatgacgccatttttaaacagctactggtccataccaatatgcagcaccggcgtattgcgatcctggagctcctgcagaagcatattcgccagcgggatctcatgttgctgctcgagcatgcttaa

SEQ ID NO: 255903 - DNA, 1281 bp, Klebsiella pneumoniae
atgagcaaatctgaaaatctgtataatgctgcgcgtgaacttatccccggcggcgtgaactctccggtacgcgccttcaccggcgtcggcggcacaccgctgtttattgagcgcgccgacggcgcatatctctacgacgtcgatggtaaagcgtatatcgattatgtcggctcctggggcccaatggtgctgggccataaccatccggcaatccgcaatgcggttattgaagctgctgagcgcggcctgagctttggcgcgccaacggagatggaagttaaaatggcggcgctggtcaccgaactggtcccgaccatggatatggtccggatggtgaactccggtaccgaagccactatgagcgccatccgcctggcgcgtggctttaccggtcgcgacaaaattatcaagttcgaaggctgctaccacggccatgccgactgcctgctggtgaaggccggttcaggcgcgctgacgcttggccagccgaactcgccgggcgtgccggcggatttcgccaaacacaccctgacctgcacctataacgatctggcctcggtccgcgctgcgttcgaacagtatccacaggatattgcctgcatcatcgttgagccggtggccggtaatatgaactgtattccaccgctgccggagtttctgccgggcctgcgcgcgctgtgcgacgaattcggcgcgctgctgattattgatgaagtcatgaccggcttccgcgtggcgctggcgggcgcgcaggattactacggcgtggtgccggatttgacctgccttggcaaaatcatcggcggcggtatgccggttggcgcattcggcggtcgccgcgaggtgatggatgcccttgctccgaccggcccggtttaccaggcaggtaccctctccggcaaccccatcgccatggcggcaggtttcgcctgcttaagcgaagtggcgcagcccggcgtacatgagacgctaactgaactcaccaaccagctggcacagggcctgctggacgccgctcgcgataccggtattccgctggtggtgaataacgtcggcggcatgttcggcattttctttaccgatgcgccaagcgtgacctgctaccaggacgtggtgaagtgcgatgtagaacggtttaaacgcttcttccacctgatgctggaagagggcgtctacctggcgccgtcggcgtttgaagcgggctttatgtctatcgctcatagcgaagaggatatcgacaataccgtcgccgcagcgcgtaacgccttcgcgaagctgtaa

SEQ ID NO: 255904 - DNA, 1203 bp, Klebsiella pneumoniae
atgacagactccattttcccccgcttagtgttaaccaaaggacgcgagaaatccctgctgcgtcgccatccgtggattttctccggcgccgtcgcccggatggaaggtaaagcccgttcaggtgaaaccatcgatattgtggatgcacagggaaaatggctggcccgcggcgcctattcgccttcgtcgcagatccgcgcccgcgtctggagcttcgatcgcactgaagccattgataacgcctttttcgagcgtcgcctgcagcaggcgcacacctggcgtgagtggctggcggcccgcgacgggctcgatagctaccgcctgattgccggagaatccgacggcctgccgggcgttaccatcgatcgttttggcgacttttttgtgctgcagctgctgagcgccggcgctgaatatcagcgcgcgtcaattgtcagcgcgctgcaaacgctgttcccgaactgcgccatctacgatcgtagcgatgtcgcggtacgtaaaaaagagggcctggagctggcgcaggggccggtgatcggtgaactgccgcctgccctgctgccgattaccgagcacggtatgcagctgctggtcgacattcagggcggccacaaaaccggctattaccttgaccagcgcgacagccgcctggcgacgcgtcgctatgttgcggataaacgtgtgctgaactgcttctcctataccggcggttttgccatctctgcgctgatgggcggctgccgtcaggttgtcagcgtcgatacgtcgcaggaagcgctggacgtcgccagacagaacgttgagctgaataagctggatttatcgaaagcggaattcgtccgtgacgatgtgttcaagctgttgcgtaaatatcgcgattcaggcgaaaagtttgatgtcatcgtgatggacccgccaaagtttgtcgaaaacaaaagccagctgatgggcgcctgccgcggctataaagatatcaatatgctggcgatccagctcctgaaccccggcggcattctgttgaccttctcctgctccggcctgatgaccaccgatttatttcagaaaatcatcgccgatgccgccctggatgccggacgtgatgtacaatttatagaacagttccgtcaggctgccgatcacccggtgattgcaacctatccggaagggctgtatctgaaagggtttgcttgtcgcattatgtaa

SEQ ID NO: 255905 - DNA, 318 bp, Klebsiella pneumoniae; identical to SEQ ID NO: 174343

SEQ ID NO: 255906 - DNA, 930 bp, Klebsiella pneumoniae
atgaggcgagtcgtcgcgctgctgctggcctgcggcggctgtgcgccgctgctggcccgtgacgtggtgcaggttgcccgctgcgtgccaggatcgctgctgcacaatcatcatctggaaaaagcgcacgttgtcgatgagtttcatatttattacagcctgcagggtaaggacgccctgcaatatccgcaggatagtaccggcgatggcgtgccggatgtcgtgaaagacatcgcgagccagcttcaggctgcaaaatatctttacacctcgctgctggatctacgaccgccgctgcagcagaaaatttatacccaggcccgacaaattaatatctacctgctgacgcttcctaaaggtcacggcctggcctttgaccgcgtggcggcggaaaccatgaacgatggcgcgacgctcccctgcggtttaaaaattgtcctcaatgcggcccggcggccggcgcgcaacgttacgcccgcccatgaattgttccatttgtatcagtacggctacgcggtttttaaacagaaatggtatctggaaggcatggcgcgctggatggaaaatgcattcaggcccgcggagcaaagcatcttgccgttagccgccccgcccgtttgcgaaaattatttctcgcgcggctacggcgcggcaagcttttgggccagctacgcgcagcagtcgtttgccgctaccatattgccggaccacgcgctggcgtatcgctacatcgacggtagcccggtgtttaaaattcaggttttaccgggtggggcgatgctcgcgccgttttttcaacagcttgcgcttaatagcgagggtatttcacgtgagatgaagctggctaatacccgctggagtgaaaaacagcagcgtgacggacggtttaataaccagatatgccaggcgctggcagcgactgcaaaatga

SEQ ID NO: 255907 - DNA, 3144 bp, Klebsiella pneumoniae
atggcgctaagtgacttactgcaacaagcttgctttcaggccaaaaaattgaaatccaccgtgttgccctctgactatccggcatgggtgatcttctttagcgtcagcgatggcaaagagcgggcgcatatgcatatcgccagcggaaccagcttcgatctcgcctggctggcgggggccagagcgctgcaggagtggcgtaaaaagcaggccaatgaaccgcagtggctgcgtatcgacgttgtggacagcgtggaaaagctcagctggcactccctcaatgagaaattcagggtcaccaagcgcaactattttcgctttggactcgcgtttgacccgcagtttagctgtgcgatgctagagcaggaaatcgccggcaacgcgctgctctacgacggcgacaatggcgtcgtcgcgccgaatagcgtcaatttgcaaaactacggccagcggcggtttaagcagacgcttagctggccggaggatccgcagcagcctctgtggcgttttaaaacccaggcggtcttttgcgatcgctttggcgtaaaagtcattgaacatgccgggaggggctccggctatcgcgccattggggaaaactggcaggaagcgtgcctggctgaggtgattaaaaaaggcagcgattatctggcccgtcaggtcaggaaagacgggctgtatcattatggctggttcccctgtttcgatcgcccggtccgttcctataacgcgctgcgccacgccagctcgacctattcgctgatcgaaggctgggaagcgacgcgcctgccgtcggttcgccaggccatagaccgggcgattgcgtatctggtaagcacgctgattgaggtgcggacgttggatgatgggcgcgaggcagcgttcctctgcgacgttggcgaggagatcaagcttggcggtaatgccgtcagcatcctggcgctggtaaaatataccgaaacgaccggagaccggcagtacctgccgctgatggcgcagctggcgaccggtattgcctggatgcaggatccgcaaagcggccaatttgttcatgtattaaatagccacgatctgtcgttgaaggccaaattccgcattatctactacgatggcgaagcggcgtttgccttgatgcgcctgtacggcctgaccaaagagccgttgtggctggacgtggtggaaaaagccttcgcctatttcattcaaaacaaacactggcagcatcacgaccactggctgagctactgcgtaaatgaattaacccgcttccgcccggaggagaagtactttcgttttggtctcaataatgtgcgcgatcatcttgatttcgtactgcatcgtgtgacgacctatcccacgctgctggagctaatgatggcggcgtcggaaatggtcacccggctgggcgcctcgcccgagcaccgccacctgctggatgattttgaccagcaaaaattctggcaggcgctggaaacccgcgcccgctatttgctgaacggcttcttctggcccgagctggcgatgttctttaaaaatcccgcgcggatcgttaacagcttctttatacgccaccacagctaccgcgtacgtatcgatgacgtcgaacactatctctccggctttatcgcctatcagaaataccacttagcggcaaaaaagccgtcgctccagcaggacaacgcgccgtcgtcgattgatgcgacgcccgtttttctgctggagacgctacgcgatgtcggtaacggtatcgaggtggccgccatgcggcgggcgaagctgttcaccgaacatctgcgcgccgtaccctggctgattaccgcgacgtggaatcccgaattacccacggtggtcaaggcgctgaaggcgcggggggcgctgcccaaagaggtaccggtttataacctttaccagtggttaagcgactgcctggagatgaacgcgattgcgacgctggagccgctggtggggagtattgaactcaggcatgtcgtcaatcccgacgcggacctgccggtgggaaaacagaacttcctgctacgcccgcaggggaaaattatcgaagattatatcgatagcgccggcaatattctgctgcgtaaaagctttgatgagaagaaaggcaacctgcggctcagcgctctggaaattgccctcgccgggggcgacgtcaaacgctttactctggaggaggactttttttcgtggatgctggaaaccatgctggcggggaaagggcgttggcactttatcgtggataaaaataaaacgtggaaaaacttcgtctgttcacggccagctcagcgtatggcctgctcattaagcgccattattcactcccatcatcagctctctaacggcgcgctgaaaagctcatatcgacacctcctggagcagccggatctcgtcgaccagttgattatcctcaccgatgagcagtggcaggatttgcagcaggagggattcccggctacgcagatggcggtgatccccaaccatctcgataacggcaatattccggcgaacccgcagaaagtgccgtcacaaacggttatctacctcgcgcgttactcggaggagaagcagcacgccttactgctgagcgcctttcgtaaagtgctggcggttatccccgatgcgcagctgcacacttatggcgtagggccgctgcggcgcagcctgagcgcgcaggtggcggagtgggggctggcgcaggcgatccatatcaatggcttcacgtccgacatcgcccaggcgcataaaacggcctgctgtacggtgctttgttccactcaggaagggcagtctatttccgccgtggaggcgatggcctacggtaccccgctgattagctttgctatcaaatacggtccgcgcgacatcctgcaggacaggcaagcggggatgctggttccctgcggcgatgaagaagctctggcggcggcgttgatcaaggttatcgcggacaaaacgctacagcaaagtatgcggcaagccgcgctgcgcaacgctcaacgctattatgccagcgccatcgccgaacattgggcggcgtggctgcaggccagcgagcggctgatggcagcgcaggcgaaggcggatttcggcctggccagcaagagtccacaggcggctagcgttgggtaa

SEQ ID NO: 255908 - DNA, 1206 bp, Klebsiella pneumoniae
atgaataagcttcccctgatggcggatcatgacccggtggcgctgctgccggataacgaacaagacgaagcgaagatcgtaaaatcgcggcggctgatactgctgctggccggtatgctgctggtgggcgctgtctgggcctggttcgccgtgctggatgaagtctctacgggcaccggaaaagtgatccccagctcccgggagcaggtgattcagaccctcgatggcggcatcttaaccgagctgaacgtgcaggagggcagcaaagtgcaagccggacaggtcgtggcgcgcctcgaccccacccgcagcgaatctaacgtgggggaaagccaggcgaagtatcgcgcctctctggcggcgagcattcgcttaactgctgaggtcaacaatcagccgctggtgtttcccgacaccctgaaagcctggcccgcgctgttggcggaggagacccgcctttaccatagccgcaaggagcaactgagcaaatcgacgcgtcagctggatgagtcgttaaagctggtcaatagcgaactggccattactgaaaaactggcgaaaaccggggcggcgagcaacgtcgaagtgctgcgtcttcgtcagcaggtcgcggatattagttttaaaaaaatcgatctcaatacgcgttattttgttgacgcgcgtgaacagctgtcaaaagccaatgccgatgtagccagcctggcggaagtgattaaagggcgcgccgattcggtgacgcgtttaaccgtccgctcgccggtacagggaattgttaaaaatattaaggtcaatactattggtggggttattgcgcccaatggcgaattgatggaaatcgtgcctgtagacggccgtttattaatcgaagcgcggatctcccctcgcgatattgcttttatccatcccgaccagcaggcgctggtcaaaattaccgcctatgattatgccatctatggcgcacttaacggcgtggtggaaaccatatcgccggataccactcaggatgaagctaaacccgatatttactactaccgggtatttatccgtactgataatgattacctggagaataagagcggcaagcgctttttaattggcccggggatgatcgctaccgttgatattaagaccggtgaaaaaacggttatggattatctggtaaaaccatttaatcgggccaaagaagcattacgggagcgctaa

SEQ ID NO: 255909 - DNA, 2148 bp, Klebsiella pneumoniae
atgaccccacaagatgaacgtgccggaataccgcacttgtccgattggtcgaatgcgattgcctttattgccaaccactatcgacaaagtttttctcccggaacgctacatgcggctgccgaatgggcgacgcagaaaaccctgcccgaagcgctccggcacctggcgcgccacgccggattaaactgtcagtttttatccgccaccgatcagaaaatgtcggcctggcggctaccgctcgttatccagctgcgcgatggccaggtggcgatagttgaaagctttgacgtcaataatgccgtcggggtgcggttcgtgaaggagctgtcgctgctcagctactgcccgctggaaaccctgttgccggaaattgacaacaccgttgcttttcgcccgtcgtctccggaaagggatattcgcacagaaagctatctgacccgctttcagccggactggctgcgtaaaattgtgctgaaagatcttcgcccctatatgcacgtcatgctggcttcgttcgccattaacgttctggcgctgagcgggattctgttttcgatgcaggtatacgatcgggtgatcccggcccagtcttatcccactctttatgtcctgttcagcggcgtattgctggcggcggtatttgcttttgcgctgaaaattatgcgcggacacgtcacggatctgctcggcaaacgtggggatattcgcgtctcggaccgggttttcggccacgcgctgcgcctgaaaaacagcgcagtgccgcgctcaacggggagctttatttcgcaaatccgcgagctggagcaggtgcgcgaaatgatgacctcaaccatgatgaccatcgtggcggatttaccgttctttttgctgttccaggtggtgctgtttatcgtctcgccgtggctaagctggatagcgccggtggcgacggttctgatgatcctgcccggcctgctattgcagcgcaagctcgcggcgctggccaacaaaaatcagcacgaaaataccttacgaaacgccattctggtggaaagtattcagggtttgcaggacatcaaaatgatgcaggcggaaagccgctttttgcatcagtggaatagctatattgcgattaccgccgagtcgggggtcagaacgcgcaggctcactcacggcctggtcagctggggaatgtcggtacaaaacctgctgtacgccacggtagtggtggtcggcgcgccgctggtgattaatggcgacatcaccaccggggccatggtggcggcatcgatgctttcaacccgcatggtcgcgccgatgaccgcgctgtgcggcgtgcttgctcgctggcagcaggtgaaaacggcgaaggccagcctcgataatctgatggcgctaccggtcgaaggcggccaggacgaaccccgggttcaccgcgccgtgctgcacggtaactacgagttccgccaggcggaattccgctacggccttaacgacgccgcgattccgctgcgaattaaccagctatcgattaaagccggtgagagaatcgccatccttgggcgaatcggcgccggtaaatcgaccctattgcaggcgatgatgggcaacgtcgagctggtcgccggcgaactgcggctggatgatttaagcctgccgcagatcgaccttgcggatattcgccgcaacgccactttgctcacccaggaggcgcggctgtttcacggcaccctgcgcgagaatttaatccttgggcggccagcggcgacggatgatgaaatcttctcggtgcttaccctgtgcggcgctctggagtttgtacgcaaactgcccctcggcctcgaacatattgtcatggaaggcggggtggggctttcaggcggccagcgccagtcgctgctgctggccagaaccctgctgcgcgatccgaacatcgtcctgcttgatgaaccgacctcttatttcgacgagcgaacggaaaaggcctttgtggaacagctggcgctgtgggccggcgagcgaacgatgattatcgccacgcataaagcggcggtgctcaatatcgttgaccggattctggtcatccaggatggacagctggcgctggataaacctaaagccaccgtctttgaacaagagaaagcccgcggccaggtggtgaatatatga

SEQ ID NO: 255910 - DNA, 1437 bp, Klebsiella pneumoniae
atgcgtctatttatacaaaaaaggaatgtcataacctgtggctatacagctctattaatcacgttaaatccgtcgctttcagctcatgcggaaaattcatatttgctaccgaatgatattagcagccagcgtttaaccgataatcagcaggtcgccgggtataacgacgagattattaacagtcaaacccgaatatccagtccgctggatattaaaaaggcggtaaaaaacgcggtgaactggcatccctctattacgcaggaggtcagtaagcttcaggagatggcgcaaaaagttgatgtggccaaagcaaaatattacccgcaaataagtgcgggtatgaataatggttatacaaacacttattctgatgccggatatacgccatcgctggtcgtctcagtgtcgcaaatgctttacgacttcggcaaagtgtccagttcggtgagagcagcagactccggcgtggctcagcagcaggccaccgtgatgctgaatatcgatcaggtcgctcacgataccgccgcggcggtagtccaggtgcagggctatcaaaagctggttgaaatcgccaaagcgcaggttaactcgctacagcagatcggcgatcttattcgccagcgcaacgatgcgggggcatcttcattatcggacgttgtgcagaccgatacccgcgtggaaggcgcgcaatccacgctcctgcaatatcaggcggcccttgaacgctggaaagccacgctcgcgacctatatcggcatcggcggaatcgcgacggtaacggatgatgtcccgcagggaatggatgccgcctgcgcggtatccaaaatcgattaccgttccgttccagcggtactggcggcgctggcccaggccggtcaggcgcaggcgcagctggataacgccaacgcgcaaatgctgccgacgatttccctcgaaccggaggtgacccattatcttaacgataactacgccaacagcgcggtgctgaataaaacgcaatattccgcttgggtaaaagtgcaaatgcctatctaccagggcggggcgatgaccgcctcccgcgacgccgcccaacaaagtctggcggcggcgaatgcggcgatcaaaaccgcccagctggacgccagccagaagctgaacgcctctcgcgatgaagcggtcaatcttgcccagtcgctggggattcagaaacgacagcagcaactgggcgagcaaacccgggcgctgtaccaggatcagtatctccagctcggttcacggccgctgctggatctgctcaacgtcgatcaggaaatttaccaggccagatttagccaggtcctgacggaatcacaactgcgctcgctggagctggactgcctgttcagcaccggcaagatgcgcacggtgttcgcgctggaaaatcaaaatatccagggcgtggagatccgcccatga

SEQ ID NO: 255911 - DNA, 2850 bp, Klebsiella pneumoniae
ttgctcagcaccgtcgatgtctcgctgctggcgggcaataatctgcgctttagcgtgggatccggcaccgtggaggatatgacggtatcggtgaacggcaactcgctgctgacggcgagcggattgctgaccactatcgtcaatctgctgggggcaggaaataccctgaaggccgatctgtcggtggtgaatacggtcaccggtgaagttgtggcgatagcggaaaacagcgtctctatctcggcgagcctgcttggcgggctctcctataacggcacggtctccttcgccaatctgccggccggcgactacaccatggttatctctgcgccggaaagtaacggcaccctggtatcgttaatcaacgcgctggcagcggcccaggtggcaagcttcgtcaacgtggatgtgacggattcggttggctacagcgtcggcgccattgaaggtaacgtgctggatacaaccgccagcggcgatatgcaggatagcggtcagggcatctcggtcaccagtgcggtatcggattccgtcgacggatcgacaccggtcaatgtgaccagcgctggcgtcgatatcaccggagcttatggggtgctgacgattcactctgatggcagctatagctaccagttgaccaaaggcggggccgctatcggtaaatcggatgtctttagctataccattaccgatgaagcgggtaatacatcgacgacgaacctgacgattaatatcggcggcaatatcgaaccggcgcaggccaatccggatgctcaggaaacggatctgaccgcgacgttcgatactctcaacggagaaagcggtaccgtcgggcagctcgtcggcgtctcgttactcggtaacgtcaatgttgggttacttaacggtaatagctttgactttgatgtggccgccggcgcgaacgaaaaagtgctgctgacggtctcagggagcaccggtctgagtctgggcgcggcactgacgacgctgctgagcctgttgggcggcgcatcgtccttcacggcggatctctctatcatcgataaggctaccggagaagtcgtgcaggtcctgacaaacgccgtcaacattaacgttaacggcatcgggctcagcctcggctatagcggaggcggctggtcctcgatgttaccttcaggatcgtatacggcggtggtctcatcaccgaataccggaggcctgctgggggccctgctggacctgaacctggggacctttgtcaacgtctcggtcaccgattctgagggctatcacaccgacagcctgacgggcaacgtgctgcaaagcgatggtgcaggcgacgtagcggatacaggggtcaatattaaggtgaccagcgtcaccgccacctcggttaacggcgctgaacctaaggaggtcagcggcagcggaacgacgatagagggcgcatggggatcgttgaccatccacagcgacggtagctatacctatcagccttatggcggagtgaatagcgtcggtcaatcggaagtctttacttacaccattactgacagcctcggccacacggcgagcaccacgctgacgatcgatatcgatagcccggcttcgctggcggtcaatgaccaggtcacgctgaacgtagcaacggcgctggcaacggtgaatgttccggcgattgatactgcggggctgaatacaagcggtaaatcaaccacgggaggcgtatcagcaaccaggaccatcaacttcagcgttggggccgatcgcgaaatggatacgctctcggtgaaagtgaactacaccgcgagtggctcggtggtcaataccgtcagaattgacagcacggtcagcatttatcacgtgctcagcgatggcagtaaggttctggtatggcagggcacgccgacagagagcttgaccaccgttatcggcaccacaacaaatgctgcggatacgttaacgctgatgaatgtggcattgagcgaaggtaactacgagatggttctggtgtctaaggcgaccgccactcttgatactttcttaacgccggcaccgaattataccgtcggggcttcgataaccgggacgaccattgataccgcgacgcactacacggtagcgggaaccaacgtcagtggaaatatacagaacggaaataactcaggcggtacggaagatttccatggcgtactgtactcgtcttacagcgtctccggacacacttccagcggcgctgcggaaacctggactttccacagcaatggcagtatcacgaccagcaacgggagtaacgtaagcgcaaccagcgtcacaatttacggtgactatggcaccctgacgatggcgaataatggttcttacacctacagtctgaaggcaggaatggatgtgtcgaccatcacgcataaggaagtctttgcctactcggtgaacgacagcaatggcgcttcttccgcggcgacgctgactatcgatctgcatccgcagattaccggcagcgtgaacggcgacgacatccacagtaccgcttacgacgataccttcaccctgggcatcggggccgacacggtaatctacaacctgctggccgatgataataccggcggcaacggaagcgatacctggaaggacttctcggttgcgcaaggggatcatatcgacgtatcggcgctgctggtcggctgggatggtaacagcagtagcctgggcaattatgtcaccttgagctacgtgggcagtaatacggtggtatctatcgaccgcgacggtggcgcaggcggccatcaatcgacaaccttaatcacgctggaaggggtgcatatcaattcgctcaacgagctgcttgataccaataactccaattaa

SEQ ID NO: 255912 - DNA, 957 bp, Klebsiella pneumoniae
atgtggaagcgcttacttcttgtcaccgcagtttccgcagctatgtcgtctatggccatggctgcccctctgaccgtgggtttttcacaggtcggctctgaatccggctggcgtgcggcagaaaccaacgtcgcgaaggaggaagccgcgaagcgcggtatcactctgaagattgccgacgcgcagcaaaaacaggaaaaccagattaaagccgtccgctcttttatcgctcagggcgtcgatgccatcttcatcgctccggtggtggcgaccggctgggaaccggtactgaaagaagcgaaagaggccaaaatcccggtattcctgctcgaccgctccattgatgttaaagataaagacctctacatgaccaccgtgaccgccaacaacgtgctggaaggccagctgatcggcgagtggctggtgaaaaccgtcgatggcaaaccgtgtaacgttgttgagctgcaggggaccgtaggcgccagcgtggcgattgaccgtaagaaaggcttcgccgaagccatttctaaagcctctaatatcaaaattatccgttcccagtccggcgactttacccgcagtaagggcaaagaagtgatggaaagctttatcaaagcggagaacaacggcaagaacatctgcatggtttacgcccataacgacgacatggtgattggcgctattcaggcgattaaagaagccgggctgaagccgggcaaagatatcctcaccggctctatcgacggcgtgccggatatctataaagcgatgatggccggtgaagctaacgccagcgtcgagctgacgccgaatatggccggcccggcgttcgatgcgctggagaaatacaaaaaagacggcaccctgcctgaaaaagtcaccatcactcaatcgacgctctacctgccggatacggcgaaagaagagttagagaagaagaaaaatatgggctactga

SEQ ID NO: 255913 - DNA, 1503 bp, Klebsiella pneumoniae
atgaacggcgaatcgcatcaggaaatccttcgtacggaagggctcagcaagtttttccccggcgtgaaagcgctggataacgttaatttcagcctgcgccggggcgaaatcatggctctgctaggcgaaaacggcgcgggtaaatctaccctgattaaagcgctgaccggcgtctatcacgccgaccgcgggacaatctggctggaaggccaggcgatttcgccgaaaaacaccgcccatgcccaacaactggggattggtaccgtctatcaggaagtgaacctgctgcctaacatgtcggtggcggataatctgtttatcggccgtgagccccggcgttttggcctgctgcggcgtaaagagatggaaaagcgcgccaccgcgctgatggcatcctacggtttttcccttgatgtacgcgagccgctgaaccgcttttcggtggcgatgcagcagattgtcgccatctgccgggcgatcgacctgtcagcaaaagtgttaattcttgatgaaccgaccgccagcctggatacccaggaggtggagatgctcttcaccttgatgcgccagctgcgcgatagcggggtcagcctgattttcgtcacccatttcctcgaccaggtttacgccgtcagcgatcgtatcaccgtgttgcgcaacggcggttttgtcggctgccgggaaacccgcgagctgccgcaaattgagctggtgaagatgatgctgggccgcgagctggagcataacgccctgcagcgcgcgggccgcaccctgctcagcgataagccggtggccgccttcgaagattttggcaaaaaaggcaccattgcaccgtttagtctgcaggtccgtcccggtgaaatcgtcggcctggcgggtctgttaggctcggggcgcacggaaacggcggaggttatcttcggcattaaacccgccgacagcggcaaagcgtggatcaaatgcaagccgcagaccctgcgctcgccgcatcaggcatcctgcctcgggatcggcttctgcccggaggaccgcaaaaccgacggcattatcgccgccgcctcggtgcgggaaaatattgttctcgcgctacaggcgcagcgcggctggctgcggccgattgggcggcgcgaacaaaatgagattgccgaacgttttattcgtcagctgggtattcgtacccccagcgccgaacagccgatcgaatttctctccggcggtaatcagcaaaaggtactgctctcccgctggctgctgacgaaaccgcagttcctgatcctcgatgaacccacccgcggtattgacgtgggtgcccacgccgagatcatccgcctgatcgaaaccctgtgcgccgatggtctggcgctgctggttatttcttcagagctggaagagctggtgggttacgccgatcgggtgattatcatgcgcgatcgccagcaggtggcggagctggctctgagcgagctctccgtgccggcgatcatgaacgctattgcggcataa

SEQ ID NO: 255914 - DNA, 1023 bp, Klebsiella pneumoniae
atgcctcaatctgttccgaaaaccggccagccgaaacggcgcgttaactggcccaaagggatgccgcagatcgttgcgctgctgctggtgctggtggttgacagcctggtcgccccgcatttctaccagatcgtgctccaggaggggcgactgttcggcagcccgattgatattttgaaccgcgccgcgccggtggcgctgctggcgatcggcatgacgctggttatcgccaccggcgggattgacctctccgtcggggcggtgatggcgattgccggcgcaacggcggcgtcaatgaccgtggcgggacacagcctgccggttgtgctgctggcttcgctgggagccggcgcgctggcgggcctgtggaacggtatccttgtggcggtgctgaagatccagccgtttgtcgccacgctgatcctgatggtcgccggacgcggcgtggcgcagctgatcacctccgggcagatcgtcacttttgactccccgccgctggcctggctgggcagcggatcgctgctgctgttcccgacgccggtgataatcgccatcgtgacgctggtgctgttctggctgtttacccgcaaaaccgcgctggggatgtttatcgaagcggtggggattaacattcgtgcggcgaaaaacgccggggtaaatacccgcatcgtcgtgatgctggcctacgtgctgagcggagtatgcgcggccatcgccggcattatcgtcgcggcggatattcgcggcgcggatgccaataacgccgggctatggctggagctggatgccattctggcggtcgttatcggcggcggctcgctgatgggcgggcgctttaatctgctgctctcggttgtcggggcactgattatccagggcatgaataccgggatcctgctgtccggtttcccgccggagcttaatcaggtagtcaaagcggtggtggtgctgtgcgtactgatcgtccagtcgccgcgctttatcagcatactgaaggggatgcgtggccatgataaaacgtaa

SEQ ID NO: 255915 - DNA, 1002 bp, Klebsiella pneumoniae
atgataaaacgtaatttaccgttaatgattaccctcgcggtcttcgtactgggatacctttactgcctgacgcagtttcccggctttgcctcgacgcgggtgatctgcaatatcctgaccgacaatgcttttctcgggatcatcgccgtcggcatgacgttcgtgatcctctccggcgggatcgatctgtcggtggggtcggtgatcgccttcaccggggtattcctcgccaaagcgatcggtttctgggggatctcgccgctggtggcatttccgctagtgctggtgatgggctgcgcttttggcgcctttatggggctgctcatcgatgcgttgaagatcccggcgtttatcatcacgcttgccgggatgttttttctgcgcggcgtcagctatctggtttcggaggagtcgattcccatcaatcatccggtgtatgacgcgctttccggactggcatggaccatccccggcggcggtcgtctgagcgccatggggctgttgatgctgctggtggtgatcggtggcatttttatggcccaccgtacccgctttggcaatcaggtttacgccattggcggcaacgcgacgtcggccaatctgatggggatctccacgcggagtacgacgattcgcatctatatgctctctaccggtctggcgacgctggcggggatcgtcttctctatttatacccaggcgggttatgcgctggcaggggttggcgtcgagctggacgccattgcttcggtggtgatcggcggcacgctgttaagcggtggcgtgggcacggttctcggcaccctgtttggcgtggccattcaggggctgattcaaacctatatcaactttgacggtacgcttagttcatggtggaccaagatcgccatcggtattctgctgtttatctttatcgcgctgcagcgcggactgacggtgctgtgggagaatcgacagagttcgccagtgaaaagggtaaatgtgcgtgcgactgctgagtag

SEQ ID NO: 255916 - DNA, 513 bp, Klebsiella pneumoniae
atggatatggttgaaggtgaaggattatcaggcaagtgcgccagctgtgggcaaaaggtattgcctccggcgcgttattgtaaaacctgtaaggataaaaaatataccggtatcggcggctggctttatctgccggctttaaccctgacgctcagctcgcttttacagatcgtcgggatatgtaatacggtgacggtttttctggatgttgaagaggagtttagagcgtttgcgctgtttgaagcggctggggcactatttctttggttattggtagtttatacgacgatgttgtttttcaggaagaaacgtcagttgccaaattattatactgtctgggttctgttcaccacgattctctacgccatcgactgctggattgctgcgcatttttatggtttagggctggaggttgaagatataaaaattttggcctcatgcgcgctgcagataatcatctggataccttatttccgcctgtcgaaacgcgtcaaactcaccttcgtgaactaa

SEQ ID NO: 255917 - DNA, 999 bp, Klebsiella pneumoniae
atgaaaacgttaggtgaatttattgtcgaaaagcagcacgagttctctcacgcaacgggcgagctgactgctttgttgtcggcgataaagttaggcgccaagatcatccaccgcgatatcaacaaggccggtctggtcgatatcctgggtgccagcggtgctgaaaacgttcagggcgaggtgcagcaaaaactcgacctgtttgccaatgaaaagctgaaagccgcactgcgagcacgcgatattgttgccgggatcgcctctgaagaagaagatgaaatcgtcgtctttgaaggctgtgaacacgccaaatacgtggtgctgatggaccctctggatggctcctctaacatcgacgttaacgtctccgtcgggacgattttctctatctatcgccgcgtcacgccggtgggtactcccgtcaccgaagaagacttcctgcagccgggtaaccgccaggtcgccgccggctatgtggtttacggttcctcgacgatgctggtttataccaccggctgcggcgtccacgcctttacctacgacccgtcccttggcgtgttctgcctgtgccaggaacgcatgcgcttcccggaaaaggggaatacctactcgattaacgaaggtaactacatcaagttcccgatgggcgtgaagaagtacatcaagtactgccaggaagaagataaagagacccagcgcccgtatacctcgcgctatatcggctcgctggtagcggatttccaccgcaacctgctcaaaggcggcatttacctctacccgagcaccgccagccacccggatggtaaactgcgtctgctgtacgagtgcaacccgatggcgttcctcgctgaacaggcgggcggcaaggccagcgacggtaaagagcgcattctggatattatcccggaaagcctgcaccagcgccgctctttcttcgtcggcaataaccatatggtcgaagacgtcgagaactttattaaagagttcccggacgcgtaa

SEQ ID NO: 255918 - DNA, 1374 bp, Klebsiella pneumoniae
atgcgcattcatattttaggaatctgtggcacgtttatgggggggctggcgatgctggcgcgttccctcggtcatgaggtaacggggtcggatgcaaacgtctatccgccaatgagtaccctgctggaaacccagggaattgagttaattcaaggatatgatgccagccagctggatcctcagccggatctggtgatcatcggtaacgcgatgacgcgcggcaacccgtgcgtggaagcggtgctggaaaataacatcccgtatatgtccgggccgcagtggctgcacgactttgtcctgcgcgatcgctgggtgctggcggttgccgggacgcatggtaaaaccactactgccggaatggcgacctggatccttgaagcctgcggctacaagccgggctttgtcatcggcggcgtaccgggcaactttgaggtgtccgcgcgccttggcgacagcccgttcttcgtgattgaagccgatgaatacgactgcgctttcttcgataagcgctctaagttcgttcactactgcccgcgtacgttgattctcaataaccttgagttcgaccatgcggacatttttgacgacctgaaggccatccagaaacagttccatcatctggtgcgcattgtgccgggcaagggcaaaatcattctgcctgagaacgacatcaacctgaaacagacgatggcgatgggctgctggagcgagcaggaactggtcggcgaacagggccactggcaggcgaaaaagctgaccaccgatgcttcctcatgggaagtgtggctggacggcgagaaagtgggcgaggtgaagtgggcgctggtcggcgaacataatatgcataacggcctgatggccattgccgccgcccgtcatgtcggcgtgctgcctgccgatgcggccaatgcgctgggtagctttatcaacgcccgccgccgtctggaactacgcggcgaagccaacggcgtcaccgtatacgacgattttgcccaccacccgacggcgattctggcgactctgcaggcgctacgcggcaaagttggcggtaccgcgcgaattcttgccgtgcttgaaccccgttccaacaccatgaaaatgggcatttgcaaagacgacctggcgccgtctctcggtcgtgccgacgaggtcttcctgctgcagccgcagcatattccgtggcaggtagctgaagtagctgacgcctgcgtacagcccgcgcactggagcgccgatgtcgatacgctggtggatatgattgtgaagaccgcgcatcctggcgaccacattctggtcatgagcaacggtggttttggcggcattcatcagaagctgctcgataagctggcgaaaaaagccgaggcggccgaatag

SEQ ID NO: 255919 - DNA, 600 bp, Klebsiella pneumoniae
atgttgatttcacaaagagtgacctctaccgattccgcttattttcccgcgctggacgccctgtacggcagggccttcccgtggcacgaacagcgtgaagccgaggctaaacagcaggcgcttgataatccccattatgtactggaagcctggttcgatgatggtctgtttatcggcctgagcggctgctggcggtttgctgactatagttacattgaacatctggccatcgacgatacgttacgatcgcgtggctacggcaagcggctgttagctgaaatacttcagcgtgctccgctgaccattctcgaaatcgatccgctgaccagcgagattgcccataagcgtctgcgcttttatgaaaccatggggttttgcgcgaatccctgggcgcatcgccatccgacctatcatcagggtattgccgatcatgaattgatcgtgttgagctacccgcagccgattgatgaggcgcggtatcagcgctttgcgcgggatttgcgtttggtggtcatggctcaggctggtgcgatcgaggtattgtcgcccggacaaggtgcgccaggcgccgcctccgggaaaatccccggttgcggctga

SEQ ID NO: 255920 - DNA, 1209 bp, Klebsiella pneumoniae
atgaaaaagacattagctttgacggccattgccgcgcttatttctacgccggtaatggcaaaaacgtgggtgctgacaagcgctgaaagcggcatagataaaggaaactggcaaataaccagcgatcagctgaagataaaagagcataacttcagcattgagcaaaaagtccttcacggcggtaaacaagaaggcagtaaaatccttgtgatccatagtaaagacggtctgaccatcgcgcttagcccgacccgcggcatgaacctgctaaaaatcgaaggctttggatcgcgaatgggctgggattcgccggtcaaagaagtggttaatcccgcctttattaacctcgaaagccgtaacggactgggatggctggagggtttcaatgaaatgatggtacgctgcggctacgaatggacaggccacccggtgaccgccgatgggcagatttacaccctgcacggcaaagtcggcaacacgccggcttcccaggtagaagttgaagtggcggataccgcgccatatgaaattcgcgttcgtggactggtgaaggagagcaccttcaagaaagcagatttgcagaccatgaccgaactgcgctacgtgccaggcagcaatagctttagcctgcacgatgtcctgaccaaccatgccgactatccgcatgactatcaaattatctatcacagcaactttggcaagccgatcctcgaagaaggcgcccgcttcctggccccgatcgccagcatcagtccattcaacgactacgccaaagcgggcttaaaaagctggcaaacctacgccggaccaacgaaagatttcgatgaaatggtgtttaatatgcagcctctggcggatcaaaatcatcaaacgctggccgcagtggtcaacaaagccggcgataaaggggcatctattcagtttgatacccgccagctaccggtgctgaccctgtggaaaaataccgataccgagaaacagggttacgtcaccggtattgagccaggcaccagctacgcctatccggtcactatcgagcgggagcaaaaacgcgttaagcagcttcagcccggggaaagcgtccagtttgatctgacctatacgctgctgcacagcagcgagcaggttgccgaggtggagaagaaaatcgcggctattcagggcgatagcaaagtggcagaaaacgaaacgcctatcgcgaaagagtaa

SEQ ID NO: 255921 - DNA, 1143 bp, Klebsiella pneumoniae
atgacccaggccttctcaattcctcgcagtattatttatggcgaaaatgctttagagcatctttccaccctgagcggaaaaaaagccgcattagtcaccggcggcagttcaatgaagcgttttggctttctggataaagccgtcagcgaactcaataaagcgggtatagagtgcattattatcgataatgttgaacccaatccgtccattaaaaccgtctggcgcggagccaaagcgatgctggcctttgaacctgactggatagtggccattggcggcggttccgcgctggatgccgctaaagttatgtggtgtttctatgaacatccgcagctgaagtttgaggatattattcccgtcggtgccatgccgccgctgcgcagcaaagcacggtttgtggcgatcccctccaccagcggcagcgcgtccgaaatcaccgccttctcggtgatcaccgatacggcaaatcatatcaaatacccgattgttgccgccgatctggtgccggatatcgccattctcgaccccactattccggcaaaaatgccgcctcacgtgacggttcacaccggcatggacgttttgacccatgcgattgaagcctacgtctccactgcagccaactcgtttaccgacccttatgcggtagaggccattcggctggtatttaagcatctggaaaccgcctggcgctcacccgatgatttaaatgcccgcatgcatatgcataatgcttccgcgctggcgggaatcgccttcaccaatgcgtcactgggattagtgcattcgatggcgcataaaattggcggcgaatttggcattactcacggtctggcgaatgcgattatgttgccgtatatcattcaatataatgcgaagttcaccaaaaaatatcgtcagctggaagccgcattaggtatggataatttaattgccgcgatcaatgcgctgaatcaacggctgggcgtcccgaaaacgctgagccagtgtgacgaagtggaaatcaatgaagtgacctttgttaatgtgctcgaccgaatgagtcgccatgccgtcgacgatccctgtacgttaaccaatcctaactatccgtcagttcaggacgttaaagggttgtacaccctggcattctacggcgcttga

SEQ ID NO: 255922 - DNA, 1512 bp, Klebsiella pneumoniae
atgactactgtaccaagactgaaatatttcgttgatggtcaatggcgcgtttcgcagaccgaacgctatatggacgtctataacccaagtaccggggaagtcatggctcaggccccctgctgcaccgagcaagaagtgctggatgccgttgccgcggcgcgcaaagcctttccggcgtggtcagatactccggcgattaaacgctcgcaaattatgtttcgcgttcgtgaattattaatccagcatcaggatcgcttaaccgagctggtggcgaaagaaaacggtaaagcctggggagatgctcagggcgatgtattaaaagcgaaagagggcaccgagcttgcctgctctatcccgactctgctggcgggtgaaaatctgatggacgcttcagccgggatcgacaccaacctttaccgtgagccgattggcgtgttcgccggcattgtgccgtttaacttcccggcgatgattccgatgggatggatggcgccgctatgcgtcgcatccggtaacaccatggtgattaaagcggccagtatgacgccgatgacctgtatggaaatcaccaaactctatcaggaagcgggcgtaccggatggcgtgattaacatcgtgacctgttcacgtaacgaagccgatattctgctgacccatccggacgttaacggcgtctcattcgtcggctcgacgtccgtcggcctgcacgtatactccaaagccgccgcccacggcaaacgcgtccaggcgctgtgcgaagcaaaaaaccatgccctggtgctggccgatgcgccagttaaccgtaccgccgccggtattatcaacgccgcgttcggctgcgcgggcgaacgctgtatggcgctgccggtcgtcgtggtgcaggaagagattgccgataagctgattgccgccgtcgtcgaaaaagccaaacagctgaaaatcggccccggctatctgcgcgataccgacatgggtccggtgatttctaaagaccataaacaatccgtcatcaactggattaataaaggcatcgaagagggtgcgaagctggtgctcgatggtcgcgatattaaggtgccgggccaggaaaaaggcttctatgtcgggccgactatactcgatggcgtgaccgaggagatgagcgtcgggacgcaggaaattttcgggccggtcctgtgctttaagcgggtaaaaaccttcgaagaaggtctgaaattaatgaacaataacccgtttgccaacggctcggttattttcacccaaagcggctactacgcccgcgagttccagaaacgcacccacggcggtatggtcggtattaacgtcggcatcccggtgccggtcggcgtattccccttctcaggtcataaacagtcgttcttcggcgacctgcactgcctgggcaaagatggcgttcgtttctatacagagtccaaatgcgtgacttcgcgctggtttgatgaagaagaagcaaaacgcgaaaaagtcgactcctgggacggtacgatttaa

SEQ ID NO: 255923 - DNA, 1650 bp, Klebsiella pneumoniae
atgttgaatttaacgttacccgccgaagccgggcttattaccccgaagccaggcgaagtcttgatggtcaccaatgcggatctccgcgaaccggctaacgtcacctgctggcccacgcagaagctgtttgaacagcgtctggaaacggcgctggaaacattaggctaccgcctgcgccgcgcccatccggtcaacgaacgccgcggccacgggtttatcagcagccagaaagagggtagcgagctgttcgccgggatcgatccggatgcgccgattattgtcctgcttaccgcctggcaatactcccatcaccttgcgccttcgctggtacatcatcgcggccctattttgctgctcgccaattttgacggcacctggccgggcctcgtcggcatgctctgtatggcaggctgcctcaccagcctggagcgcaactactcgcggctgtggtcggaaaccttcgccgacgaggcgtttattcgcggcctggacacctggctgcgcgacggccatctcagccataagctcggctatctgcatccagttgcgcccagcgcgccgctgctggccagcgaagccggacagatcggcgtgaaggttgggcagtcgatcctcaaacacaaggccattgtcggcctgttcgataccttctgtatggggatgatcaacggcgtgttcccgcaaaaagcgatgatcgacgtagggatgccggtggagtcgctgtcgcaatcggcgctgctggttgaaatgaacaaagtgccgaccgacctgcgcgaagcctgtctcgactggtatgagacccgcggcatgcgcttccggttcggcgccgacgggacgaaggatctgacccgggagcaggtgctggaacagtgcgcgatgatgatcgccatggcgcgcttcgtgaagcgcttcggcctgacggcggtgggcgtgcagtatcagcaggggctcaaagacagctgcgccgcctcggattttgccgaaggcgccatcggcaacgcggaacgtttcccgatcccggatgagaacggcgagatcgtctgcccggacgcgccgatcccctgcatcaacgaggtggatatgggcagcgccatcccacaggtgatgctggcgaagctgctcggcgcactgggcatggcgagcgaaaccacccttcacgatatccgctggggtagcgaatacaacggcacgttctactgggatctggagatctccggcgcggtgccgttcgcccatctgaagggcgggatcgccggggccaccggctatcgccagccggcgatgttcttcccctacggcggctcgaccattgccggtcagggcaaagccggacgctttatctgggcgcgagcgcattacgaaggtacccaggtgatcctgcatatcggcaccggcaccgccgtcgaactgccgcatgacgaattcgaacgccgccgccgggcaaccaactacgagtggccattactcaacgccgttctcgacggagtttcgcgcgacgatttaatggcgggccaccagagcaaccatctcagtctggcttatgtagaagaggaggtattatccgaagtgctgaacgcctttattgcccaggcgctgacgcaaaatatgaaagtctttatcgcaggcgatgcgcatttattaatgaaataa

SEQ ID NO: 255924 - DNA, 1452 bp, Klebsiella pneumoniae
atgtatcagcagcaacatattgaatttattatccagaaggcaaagaaacggctcgatcagcaggaggcccccggctgcaccaaagcgggatggctaatgatcaccgcattattaattgagtcatgggatatttattccatggcgtttattttattcgccctgaaagatatttatgagcccagcagctggctgcttggttttaccgccgccggcacccagcttggcgcggtggtcggcgcgctgctcggcggctggctgaccgataagctcggacggcgtaaaattttcctctggtcgatgatcctgttcgcgatcttcgccgttcttcagggcctggcgcccaatatgtactggctggcgattattcgctgcctcgccgggatcccggtgggcgcggacgtggctaacggctttacctacatcatggaggtgatgccaaagggcaagcgcgaagtgatggctaaccgctggcagtttatgttcgcgctggggattatcgccgccattctgctggtcaccacgctggtggcgcttgatgttcacccggatatgatctggcgcatcgtgctggcggtcccggcgatcccggcctgcctgctgctgtttatgcgtcgggagctgccggagacgccggcgtggttcgtcgaacgcggccgctttatcgaagcgaaacaagcctcccgtgactattacggcgaacaggatggccgtctgctggacgacattctgcccaacgaaaacgtcaccatcgccgacccgacgctcaaagagacgctgcacgatctgttccgtcgtccctttacccgccgcaccaccctgttcggctggttctcctgcgccgtgcagtcgtttgaaaactacgccttctccttcttcctgccgctgatcctcgtcaccatcgggatttccgggcagatccagaataacctcgccctgctggcggtgaactgtatcgccgcgctctcggcgtttgtcggcccgctgctgttaccgaagctcgggcataaggggctgagcaaatacggcttcctgctggtcaccatcggcatctcaatttcggcgtggggcgtctacagcagcagctttggttttatcattttcggcgcggcgctgatgctgtggggccattactgggattccgaaagcggcatgacggtgatctcgctggtggcaaaaccgcgctatcgcggcgtggcctccggcatcggctataccatcgtcaaggtcaccgccttcgtcaccaccctggtctttccggccctgtttgaagcggtcggcgtaccggtcgcctcaatgattatcgcgatcgcgccgttctgcgccttcctcgcctctatcttcctgctgccggaagtcttcggccatgcggtgggcgacgagaacgatcgagaacatgatgccagcccggcaatcgccctggaggggcatgaatccccggcctccaaacattaa

SEQ ID NO: 255925 - DNA, 1104 bp, Klebsiella pneumoniae
atgaacagcacaaaaatgcccgtgattgaaaatatcgaactgatgaccgcccgcgttccgctgccggaaggcccgtggggagatcaaattcaccacgtcaccgatatcgaagtggcgatagttgacgtctacggttctaacggccacgtcggtaccggctttagccacacttccggctggtgcgggaaaaccatctctgcgttgattgccgagattatccctgacgttattggccagccgctctccccgcgcggcctgtggcatcgctcgtataaacacgtacacgacgtcggcggcgcgggcgtcactacccatgccctggcggcgctggatattgcctactgggatctgttaggtaaaaccctcaacgcgccgattatcgatattcttggccgcgtgcgcgatcgcgttccgttgtacggcagcggcatcaacctgcatctgtccattgaggaagtgatcgaccaggtcaagcgctggaaaagcaccggctatctggcggcgaaagtgaaagtgggcaaaccgacgctggaagaggacgtggagcggctgcgtaagattcaggaagcagtgccgggcttcccgctggcggtggacgccaaccagggctggaacttcccgcaggcgctgcgcgcgttcaagctgttcgaaccgcttaacctgctgtggattgaggagccgctgccctccgacgatatcgccggccacctgcggctgcgcgaacgcagcgccacgcccatcgcgctgggagaaaacgtctataacttaaatcagtttacgcagtacatcgagagcggcagcgcggattacatccaggcagatctcggccgcgtcggcgggatcaccggctatctggatatcgccgccgtcgcccgcgcgcacaacctgccgatgacgccgcattttgtcatggagctcagcgccagcctgctggctacggtgccgaatatctcatacgccgagatgaccgacggcgggcgctggaaagatctgcgcatcatcgccgaagcgggcgaagaggtggacggctactacgtaccgagcgaacggccgggccacggcattattctcgatcgtgattacctcgcaacccacaaaatctaa

SEQ ID NO: 255926 - DNA, 828 bp, Klebsiella pneumoniae
atggaagacacgttattctcggttaaagacaaggtcatcattgtgaccggcggccttggacagctgggggcgcagtacgtgaagacgttacacgaacgcggcgcgaaggtggcggcgctggccacccgcgtcgatgccgcgcgcgtcgaccgcgtgctggggacgattaaggactccgaccgcctgctgtgcgcggaagtgaatattaccgataaagccagcattaaccgggtgctggacagcattgaagcgaagtggggcgtaccggatggcctggtcaacaacgcgggcgtcgacacccagcccagcgcgccgccggaagtctccgggccgtttgaggatttcccggaagaggtgttccgcgaggtggtggaagtgaacctggtcggcaccttcctgatgacccagcaggtcggcaaacgcatgaagcaggccggcaaaggcggctcgatcatcaacgtcggttcgatctacggcgtggtctctccggtgcaggatatctacagctacaaaaaagaggacaccggcattccgttcgtcaaaccggtggcctattcggcggcaaagtccgggctgtataactttacccgctactgcgccacctactgggggcgcgacggcattcgcgtcaataccctgaccctctccggcgtcgagcgcagcgatcaggacccgcgctttcagaaaaactacacccaccgtattcccatcgggcggatggcgaaagcccacgagtacaacggcgcggtggtgtttttgctctccgatgcctcggtctatatgaccggttccaacgtggtggtggatggaggctggaccgcatggtaa

SEQ ID NO: 255927 - DNA, 912 bp, Klebsiella pneumoniae
atggtaagcgataaatggcagcgttttcgcggcattatctccgcggtggtgacgccgatgcacgccgatgagtcggtgaactacgcggcgctgaacgcgctcgcccgcgcccagctggcgcgcggggttgagggcttttactgctgcggctcctccggggagggaccgttgctgcgtttcgatgagcgtaggcaggtgctggcgacgctggtgcagtcggcgggcggtcaggtgccggtgatcgcccacgtcgggacgccacgcacccgggatgccgtcgagctggcgaagcacgccgagcaggacggcgccagcgcggtgtcgctggtgccgccctactactacaaatatagccgcgaggagattatcgcctactaccgtcgggtgctggacgccattacgattccggtgattttgtataatattccgcagtttaccggcgtcgagctggatgcccagagcgccgacgcgctgctcggcgaagagcaggttctgggggtgaagcatacttcgcataacctctattcgctggaacgcatgatcgcccgctacccggagaaagtcttttttaacggtttcgatgagatcttcctttccagcctcgcggcgggcgcgacggccacggttggcaccacggttaacctgcagccggagctgtttctcgccctgcgcagcgcttttcagcagggcgacatcgcccgggcgcagcgcctgcagcagcagatcaacgaggtggtggagcagctggtcgcgcgcggcgtgttccagtcggcgaagtatcttaccgcgaaagagaccgtcgataccggccccacccgcgagccgtttgtggcgctgacggcggcgcagaaaggcgagctggatgacctctatctgcgcttacggaggtatatcgccgatgccggacaatga

SEQ ID NO: 255928 - DNA, 432 bp, Klebsiella pneumoniae
atgccggacaatgacgcgctctgtccccagatccgtctgaacgatagcgttgtgtgccagcaggtctcgcggtttttacaggagacggaaagcgatgcgcgaacccgggggctggcagtggcggttgtcgggccggagggcgagctcatcgcctttggcgcgcacgttcgctgcccaccgctaccgcgccagctggcacagcgcaaggcctggagcgccctgcgctttcgccgtccgacggcaacgctggcgcaagaggtcagcgccggcgccctgcagctggcggtatttaacgacccgcagctgctggcgatgccgggcggcgagccggtgatagttgaagggctggctattggcggcgtcgggatcagcggcctgccaccggagctggacgccgggctggcggcgcggtttgttcagcgattgacttga

SEQ ID NO: 255929 - DNA, 1014 bp, Klebsiella pneumoniae
atggccaaaaccgttgagcaagtcgccagggcgctggaaatttcgattaccaccgtgcgcctggtgctgggtggcaaagctgagcagtatcgcatcagcgccaaaacgcagcagcgtattaatgattacatcgccgagaacgggctggtcgttaaccatatcgcccgcagcctgaagctcaataaaaccgagaccttagggctggtgatcccgcgtttatccaacctgtttttctccaccctggcggaaaagctcgaagcctgctgccgtcaggcggggtatcagctaatgattgcctgcacttacagcgacagcgagcatgaaaacagtctggttgaagggctgctggcgcgcaacgttgacgggctcttcgtggtgccctctacccgggaaacgcagctgcatcaccagaaggtggcgcgcaagcggccgctggtgctgctcgaccgcgattttggcgagagcgacgtgtcgctggtggtgagtgataactataacggcagcaaaaagctggtgcaggcgatgacccaggcggtggacgtctcgccgattttttttatcgccggagatacccagcagccgtcgatccagcgtcgtctgcagggctacctgagcgagctgcccgcggggaaggagtggatattgtccgccagccataaccgccaggaagagggcaagcagctgatgctcgattttctccgtcagcatcgcgagccgccgaaggcgtttatcgcctcctccctgcccattctggaagggacgctgagcgcgctgcgggaaacctacggctttattccgtcggatattcccatcggcaccttcgatgaacaccagatgctgggatttctgccgaacgcggtgtggtcgatgcgccaggatgaggacgcctgggcgcagcacgcgtttcatctgatgcagcagaagctgcagggggaaaatgccgatgtgaagatcactgtgccgatgaccctgattcatcgcccgctgtcggtagagaagcagcggagccagtaa

SEQ ID NO: 255930 - DNA, 1032 bp, Klebsiella pneumoniae
atgaaaaaggaacgctggagaggcgtgctggcactggccatacttagtctccctgcgctggcggaaacaggcgtttcattcagccacaaagactgggaagtggtgtgtgataacacgctgacctgccgggcggcgggatacagcgctgaagaaggaagcggaggttcggtgctgctgacccgccaggccggagcgggcactgctgtctcgggagagctgatgctggcggaggtgaccgacggcgacgttctgccgggcaaactgacgctgtggatcaacggccagccggcaggcgatgtgaagcccgtaaaagagagctggccgctgtcggagaatcaggcccgggcgatcgttaacgccatcaaaggcagcgggaaggtcgaatttacaggcgcggaggcgccgtttgagctttccggcgaaggtgcttacgcggtactgctgaaaatggacgatgttcaggggcgaatcggcacgccgggcgcgttgaccaaaaaaggcgacaggccggaaagcagcgtccgggcggcgattcctgccccgatcattcaccgggtcatgcctgagaaggcgcaggagagagcgttaaccgcgcctgagctggcggtgctcaagccgaagcttctggccacgctaaagaacgatgattggtgcgatcgccttcagcctgaggagggagagaaggctgaagctattagcctgacgccgctggataacgcgcattcacttatttcggccttgtgctggcgggcggcctataacgagggatatggctattgggttgtggatagcaaacttgagggcaatccgacgcttatcaccgtctccggttctgagtatggtgacggcgagatttttatgagccagaaagggcgagggctcggcgattgctgggggacggcaagctggctctgggatggcacaacgttccgtaaaagccgtgaagcgaccaccgggatgtgccgctatcttcgcctcggcgggacatgggatctccccacctgggtgaccgaggttaaaccggcaaaatga

SEQ ID NO: 255931 - DNA, 795 bp, Klebsiella pneumoniae
atgaagctattcagaatattcagcgtattgccgtcgttattttttgccgccgcgtgcgctgccgggttatcccacgtagataattgtgaagtgggctgcccgaccggtggaagcgaccagacgctggttcgcgaagcctatacgctcaataacaacaaccaccgcaaattcgccaattgggtggcgtataaaatcaccaaagccagcctggccagcgggcgttcgcgcagctggaagcgcgatccggatttacccgcggcggatactcttgcccccgcggcatacaaaggagccagcgctgcattggcggtcgatcgcgggcatcaggcgccgctcgccgggctcggcgccagcgcagactggcaggcgttaaactatctttccaatatcaccccgcaggcctccgacctgaatcagggggcgtgggcgcggctggaggataaggagcgcgccctcgccgagcgccgcgacgtggcggcggtgtggtccgttaccgggccgctgttcgaacgacatatcgccaccctgcccgccgcgcccgaggtggagcttcccagcggctactggaagattatttttatcggctccagtccggataaaggcgaatacgcggcgtttttgatggatcaggcaacgcccaaaagcgccagtttttgtgattatcaggttacggtggacgagattgagcggcggactcatccggcgctctcgttctggtccaccctgccggcaggtatcgcccgccgcctgaagtcccggaaggggacgctggcaaaagagatggggtgcccgtaa

SEQ ID NO: 255932 - DNA, 324 bp, Klebsiella pneumoniae
atgactaatgctgattgtattgtagattcgtttgatccagaagtgtcgccgaaaaataagcgtcagttgacggtgagttatgtgagacgtttgccagatcgtcgtcttgttccggcgctgatcatgaagggccagtggctggcggcggcagggttttcgaccggcacccgggtggaggtgcgggtgatggatggctgcattgtgctggcggcagttgagccggaaccggagctggaagccgcgatgcgcagggtggggaagctgtcggccaggaagcagaagcaggtcagagagtttatcggggtgattgggggacgaggttga

SEQ ID NO: 255933 - DNA, 435 bp, Klebsiella pneumoniae
atggagacttaccgattacatcgcggcaggcttatcgaccatatccagcttgtggtaaatgatttcgaggccagcaaagcgttttatacagccgtgctggcggtccttgagatccctgtcgtgaatacctacgatgattatttttgggctgatgagcttgttgtttcatccattaatagccccggttccacaggtaagccgacaggacggcatcacctggctttccaggccagggatcgtgagacggtggatgctttttaccaggcggcgctggcacacggcggcagtgataacggcgcccccggtgagcgaacttatcacccggggtactacgcggcctttgtactagatcccgatggtaacaatatcgaggcagtttaccatggcgagggggaacgcagtgcggcatcggtggagattggcttcagtctttaa

SEQ ID NO: 255934 - DNA, 126 bp, Klebsiella pneumoniae
atgtgcgagtccggccttcgcaccaaatcccccaatcagtccactaaaatacttttttgtatctgcatttcatcatttgaaaacctcctattgaggcctctgttcttctggctccgatgcggctag

SEQ ID NO: 255935 - DNA, 405 bp, Klebsiella pneumoniae
atgaaatcactgattcatatatcagcaggattatttttgagcgcaacgttagtcgcgtcggcgtccgctaacgatcataaaattttaggggttgtcgccatgccgcgaaatgagactaacgatctcaccctgaagctaccgatatgcagggtaattaagcgtatccagctgactgccgatcgcggcgatgtccagctgtccggcgcaacggtgtacttcaaagtcagcaacagcgccagccaaagcctcagcgtcccgtcaactataaaagaaggggaaacgaccggctggattaatattaatagcgacaacgacaacaaacgctgcgttaaaaaaatcgctttttctggtcacaccattaactcttccgatatggcctcgctaaaaattatcggcgacgattaa

SEQ ID NO: 255936 - DNA, 750 bp, Klebsiella pneumoniae
atgaagattaattatctggatgatgaagacctctcttttctgcatcgctgcagcgaagagcatctggaaacattcactcgaattctgactcacaatgagaatggaaaaccccggctttcaagtacgctattgcgtaatgaaacctttcaggcgatggaaggacaccctgagcgctatcgccgcaactggcagctcattgccggggaactccagcactttggcggtgatagcatcgccaacacgctgcgtcgtcatggcaagttctatcgcgaaattttgctggacgtctgcaagagactaaaaatcaaaaccgataaacaagcctctaccccggaaatagaacaacatctcctggaacactttctggagcatagctggaaaaagatggatgagcggcaaaaagccgacttctttagtgccgttgagtgtcgtgtcaaagagcagaaagagctgcttccccatctgcttcagacaaataagttagcgcagggagtctcgcatcttcttgaaacccgactgacgaagatcctccgcacccacgccgcggtgagcgtcatcggccacgggctggtacgcggagcagggcttggcggaccgctcggcgccgcgtttaatggggtaaaagccgtgagcggcagcgcatatcgggtgaccattccagccgtgttgcatattgcctgtttaaggcaaatgaccagacttcatcaggtaaaaaatgaaattggcgaaaaataccccgccagatcatag

SEQ ID NO: 255937 - DNA, 567 bp, Klebsiella pneumoniae
atgggcaacactaagttggctaatccggcaccgctgggccttatgggcttcggcatgaccactattctgcttaacctggcaaatagcggcctgttcgcgtttgatgtagctatcctggcgatgggcattttttatggcggcattgcgcagatttttgccggcctgttggaatttaaaaaaggcaacacttttggcttaaccgcatttacgtcttacggcgctttttggctgacgctggttgccattcttctgatgccgaaaatgggccttgctgaagcgcctgatgcacacttcctcggtatgtaccttggactgtggggcgttttcactctgttcatgttctttggcactctgaaagccgcacgtatgctgcagtttgttttcctcagcctgaccgtgttgttcgctctgctggcgattggccacctggctgataacgaaggcattgtgaagatcgctggctgggtgggtctggtctgcggcggcagcgccatctatctggcgatgggtgaagtgctgaacgagcagtttggccgcaccgttctgccaatcggcgaaaagcattaa

SEQ ID NO: 255938 - DNA, 1311 bp, Klebsiella pneumoniae
atgtcacactatacccgacccctgaaccgacaggattataaaaccctgacgcttgccgcgcttggcggcgcgctggagttttatgatttcatcatctttgttttctttgccgccgttgtcggcgagctgtttttcccggcggatattcctgagtggctgcgacaggtacaaaccttcggcatttttgcggcaggttatttagcgcgtcctcttggcggcatcattatggcccactttggcgatctggttgggcgtaagaaaatgtttactttgagcattctactgatggcgctgcctacgctggcgattggtctactgcctacctacgcatcgatgggcatcgtggcgccgattttgctgttgctgatgcgcattcttcagggcgcagcgattggcggtgaagttcccggcgcctgggtcttcgttgccgagcatgtaccggaaaaaagaataggtatcgcctgcggtacgctgactgccggtctgacggtgggtattttacttggttcggttgtcgcgacgctgattaatacgcacctcacctctcagggtatccacgatggcggctggcgtatcccgttcctgttaggcggcgcatttggcctcgtcgccatgtatctgcgccgttggcttcaggagacgccgattttcctcgaaatgcagcagcgtaaggcattagcgcaggagctgccggttaaagccgtcgcgctgaagcatcagaaggcggttgtggtctcaatgctgctgacgtggctgttatccgcaggcgtggtggtggtgatcctcatgtctccggtctggctacaaaaacactacggctttgctcccgccatcaccctgcaggcgaacagcatcgctaccatcatgctctgtatcggctgcctgctggcaggcctggccgccgatcgttttggcgccagtcgcacgtttattgtcggcagcttattcctcgctgcggcaagctgggctttctatcatctttccggtgatagcccgcagcgcctgttcctgctctacggtacggtggggttatgcgttggcgtggtcggggcggttccgtatgtgatggtgcgcgcgttcccggcggaggtccgatttaccggtatttcgttctcttataacgtctcttacgccatctttggcggcctgacgccgattgcggtgaccatgctgatgggcgtttcgccgatggcgcccgcgtggtacgtgctggcactgtcgtttatgggattggggttggggatctggctgcgtcagggactggatcagcaggttgcagcgccgaaagctgaactgcagcgtctgccttaa

SEQ ID NO: 255939 - DNA, 588 bp, Klebsiella pneumoniae
atgaacaccttacgaatcggcttagtttccatctccgatcgcgcctccagcggcgtctatcaggataaaggcatcccggcgctcgaagagtggctggcccgtgcgctatccacgcctttcgaattgcaaacccgcttgatcccggatgaacaggttattatcgagcaaacgctgtgcgaactggttgatgaaatgggctgtcatctggtcctgactaccggtggcacgggcccggctcgccgtgacgtgaccccggatgcgacgctggcgattgccgatcgggtgatgccaggctttggcgagcaaatgcgccaggtgagcctgcactttgtgccgacggccattctttctcgccaggttggcgttattcgcaagcaggcgctgatccttaacctgcccgggcagccgaaagcgattgaagaaaccctggaaggcgtaaaagatgctgagggtaacgtgctggtgcacggagtttttgcaagtgtaccgtattgtgtacagttgcttgaggggccatatgtcgaaacaaacggcaatgttgtagcagcttttcgccctaaaagcgcgagacgtgaaacattatcctga

SEQ ID NO: 255940 - DNA, 1431 bp, Klebsiella pneumoniae
atgcctgattttctgtcgtttatcaatgaaatactttggggctcggtaatgatctacctgttactgggcgctggcgtctggtttacctggcgaacaaaatatattcagttccgttatatccgccagttcagcaaaagtctgaaaaagagccttcagccgcagcccggcggcttaacgtcttttcaggcgctgtgcatgagcctggcggcgcgcgtgggcagcggcaatatggctggggttgcgctggccattgccgctggcggcccgggcgccgttttttggatgtggatctcggcgctgctcggcatggccagcagcttcgccgaatgctctctggcgcagctttataaagagcgcgactctcgcggccactttcgcggcggtccggcctggtatatggcccgggggcttggcatgcgctggatgggcgtgctgttctctattcttctcctgctggcctacggtgttatttttaacaccgtccaggccaactccgttgcccatgccatggagtatgcgtttcgtttacctgatgtcatcaccggcggcgtacttgcggccctgaccctgctggtcatcattcgcggtattcgcggcgtagcgcgcttgatgcagtggctcgtgccggctatggctttgctgtgggtgatggccagcctggtcattggcttgtggcatatcagcgccctgccgacgatttttgaaattattttccgctgcgctttcggttggcaggaggccgctgcgggcgcggtgggctataccatcagccaggcgctcaccagcggctttcagcgcgggatgttctccaatgaagcgggtatgggttcgacgccaaattctgccgccgccgctgcctcctggccacctcatcccgcagcgcaggggatcgtacaaatgatcggcgtctttattgataccatcgtcatctgtaccgccagcgccgtgatcattatgctggcgccgagagacggcaatgaaggggtggcaaacggtattcaggctatccagcattcgatgaacaatcttgtcggcgactggggtgccagctttgtcgcttgtatcgtgctgctgttcgccttcagttcgatcgtcgcaaactatatctatgccgaaaataacctcatctttctgcgcatggatagcccccgcaacatctggctgctgcgtctgctgacgctgtgcatggtcatcaccggagcggtagtcagcctgccggtagtctggcagatggcggatattatcatggcgctgatggcgataactaacctgacggctatcctgctgctgtcgccgacggtgcgcatcattgccagcgattacctgcggcagcgcaagctgggccagcggccggaatttgacgtcacccgctaccctgaaatccatcaacagctggtaccgggaacctgggataacctgccgcgcgaatag

SEQ ID NO: 255941 - DNA, 774 bp, Klebsiella pneumoniae
atgctcattctgatttcacctgccaaaacgcttgattatcaaagtccgctggcaacgacgcgttatactcagccagagctgctggaacactctcaggagcttatcggcattgcccgccagctgtcggcaccacagattgctaaactgatgggcatcagcgacaagctggccgatctgaacgcgacccgcttccacgactggcagccagacttcaccccggacaatgcccgtcaggcgatcctggcgtttaagggcgatgtctataccggcctgcaggcagagacctttagcgaagctgatttcgattttgcccagcagcatctgcggatgctttccggcctgtatggcgttctgcgcccgctggatctgatgcagccgtatcgcctggaaatgggtattaagcttgagaatgcgaggggtaaagacctgtatcactattggggagacgtcatcaccgataagctgaatcaggcactgaaagcccagggcgacgatatcgtggtcaaccttgcctctgatgaatacttcaggtcggtgaaagccaaacggcttgagggccagctgattaagccggtattccttgatgagaaaaacggcaagtttaaagtgatcagcttctacgctaaaaaagcgcgcggcttgatgagtcgttatatcattgagaatcgcttaacgaagcctgagcagttgacccgctttgatagtgaaggctatttctttgacgccgaggcttcggataacggagaactggtctttaaacgccacgagcagtaa

SEQ ID NO: 255942 - DNA, 1281 bp, Klebsiella pneumoniae
atgaaactctataacttaaaagatcataacgaacaggtcagctttgcgcaggccgttacgcaggggcttggcaagcatcaggggctgttcttcccgcacgatctgccggaattcagcctgactgaaatcgacgaaatgctgcagcaggacttcgtgtcgcgtagcgcaaaaattttgtcggcatttatcggcgacgagatcccgcaggaggttctgcaagaacgtatcggcgccgcctttaccttcccggcaccggtaagtaaagtgcaggacgacgtcggctgcctcgaactgtttcacggtccgactctggcgtttaaagacttcggcggccgctttatggcgcaaatgctgacccatatcgcaggcgacaaaccggtcactattctgacggccacctcgggtgataccggcgcggcggttgcgcatgcgttctatggtctgccaaacgtcaaagtcgtcattctctatccgcgcggcaaaatcagcccgctgcaggaaaagctgttctgcaccctgggcggcaacattgaaaccgtagcaatcgacggtgactttgatgcctgccaggcgctggttaagcaggcatttgatgatgaagagctgaaagccgcgctgggtcttaactcggctaactcaatcaatatcagccgcctgctggcgcagatttgctactactttgaagccgttgctcagctgcctcaggaagcccgtaatcagctggttatctcggtacccagcggtaactttggcgatctgaccgccggtctgctggctaaatctctggggctgccgatcaagcgttttatcgcggcgactaacgccaatgataccgtaccgcgcttcctgcaggacggtaactggtcgccaaaagcgactcaggccacgctgtctaacgcgatggacgtcagccagccgaacaactggccgcgtgtggaagagctgttccgtcgtaaaatctggcgtctgaacgagctgggctacgcggcggtggatgatgaaaccaccaaaaagaccatgcgtgagctgaaagccatcggctatacctctgaaccgcatgcggcgattgcctatcgcgcgctacgcgaccagctgcagcctggcgaatatggcctgttcctcggcacggcgcatccggcgaaatttaaagagagcgtggaagagattctgcaggagacgctgccgctgccgaaagagctggccgatcgtgccgatttgccgctgctgtcgcatgatctgccggctgattttgccgcgctgcgtaagctgatgatgggttaa

SEQ ID NO: 255943 - DNA, 930 bp, Klebsiella pneumoniae
atggtcaaagtatatgccccggcttccagtgccaacatgagcgtcgggtttgacgtgctgggcgcggcggtaacgccggtcgacggcacgctgctgggggacaacgtctcggttgaagcggcggcgagctttagcctgcaaaacgtgggtcgcttcgccagtaaactgccgacggctgcgcaggagaatatcgtctatcaatgctgggagcgtttttgccaggagattggcaaacaggtaccggtggcgatgacgctggaaaaaaacatgccgattggttccggcctgggctccagcgcctgttccgtggttgccgcgctggtagcgatgaatgaattctgcggtaagccgctcaataagagccgaatgctggcgctgatgggcgagatggaagggcggatttccggcagcattcactatgataacgtcgccccttgctatctgggcgggattcagctgatgcttgaggaaaacggcatcatcagccagcagataccggcatttgatgaatggctgtgggtgctggcctatccggggattaaagtctcaactgcggaagcacgggccattctcccggcgcagtatcgccgtcaggactgtattgcccacggtcgccatctggcgggctttattcacgcctgctatagccgtcagcctcagctggcggcgaagttgatgaaagatgtcattgccgaaccgtatcgtaccaaactactgccgggcttcagcgaagcgcgtcaggcagcaatggaaattggcgcgcaggcgtgcggcatttccggttccggtccaacgttgtttgcattatgcgataaaccggaaaccgcgcagcgcgtcgccgactggctggctacgcactatctgcaaaataaggaaggcttcgttcatatttgccggctggacacggcgggcgctcgagtagtgggataa

SEQ ID NO: 255944 - DNA, 687 bp, Klebsiella pneumoniae
atgcgtttatcaatagtattagtgtccccggcgcgggcagaaaacgtgggtgcggcagccagggcaatgaaaactatggggtttagcgatatgaggatcgtcgatagcgaggctcatttgcagcctgccgcgcgctgggtcgcgcacggctccggcgatattctcgataatattcagacttatgccactctggagcaggcgctacacgatgtcgattttaccgtcgccacgacggcccgcagtcgggctcgttttcactactacgcgacgccgcagcagcttttaccgctactggaagagaaagcgcagtggatgcatcatgccgcgctggtatttggccgtgaagattccggtctgaccaatgaagagctggcgcttgccgatgtgctgaccggcgtgccgatggcggcagactatccttcgctgaatctggggcagtcggtgatggtatattgctatcagctgacctctttgctgcaaaaaaccacgaccgtagccccaggcgtcgatgacaatcagctgcaggcgttacgtctgcgcacgctcgatctgctcaatcgcctcggcgtaggcgacgatataaaattgaccgactggcttcagcagcgaataggtctgctgcagcagcgagacaccgccatgctgcatcgtttactgcatgatattgaaaaaaaccttccagagtaa

SEQ ID NO: 255945 - DNA, 351 bp, Klebsiella pneumoniae
atggttattaacaccgccgagggcgtgcggcgtattcctgaggactacctcaacgtggcccgcgtgctgcagctttccgagtggacggtgatgcgcaagatcctctttccggcggtcttacccgcggtgctgaccggggttcgtctctcgattggtatcgcctggctggtgatcgtcgccgccgaaatgctcaccggcggcgtagggatcggcttctggatctggaacgagtggaacaacctcaacgttgaaaacatcatcattgccatcgtcattatcggcgtggtcgggttgctgctggaacaggggctgatgctgctcgcccgtcgttttagctggcaggataaataa

SEQ ID NO: 255946 - DNA, 789 bp, Klebsiella pneumoniae
atgaaaccactcattcaggtccagggcgtcagccagcgtttcaataccaccagcggcgaattcctcgcactgcagaatgtctcattcgatatttacgagggggagaccatcagcctgattggtcactcagggtgcggtaagtcaactctgctgaatctgattgccgggattaccttgccgacggagggcggcctgctgtgtgataaccgtgaaatcgccgggccgggcccggaacgcgcggtggtgtttcagaaccactctctgctgccgtggctgacctgcttcgataacgttgcgctggcggtggatcaggtcttccgccgcagcatgagcaaaggcgagcgcaaagagtggattgagcacaacctcgaacgggtccagatggggcacgccctgcacaagcgtccgggagaaatatccggcggtatgaagcagcgcgttggcattgcccgggcgctggcgatgaagccgaaagtgctgctgctggatgaaccctttggcgcccttgatgccctgacgcgggcgcatttacaggacgcggtgatgcagattcagcagtcgctgaatactaccatcgtgatgattacccatgatgttgatgaagcggtgctgctttccgaccgggtgctgatgatgaccaatggtccggcggcgacggtcggggagatcctcgatgttaacctgccgcgcccgcgcaatcgcgtgcagctggcggacgatagccgttatcaccatctgcgtcagcagatcctgcacttcctctatgaaaaacagccgaaagcggcatag

SEQ ID NO: 255947 - DNA, 3990 bp, Klebsiella pneumoniae
atgacgcggcaactggtgattattggtaacggtatggcggccacgcgcctggcgcaggcattggtagaacgggatgcgcagcggtttagcatcaccattatcggcgatgaacccggccaggcctataaccgcattcagctgtcgcctgtgctgggcgcagagaaaacagcaggcgagacgagactgctgcccgagacgtggtatcaacggcataacgttaaggtacgcgccggcgagacggttacggcggtggatattcatgcccgtacgctgcaaaccaccgcaggggtagttagctgggatgaactggtgttcgccacaggctcgctaccgtttgtgccgccgttaccgggcattacgcagccgcacgtttttgctttccgcactctggcggacgtcgagggcatcctggccatcgacggcccggcggtggttatcggcggtggcgtactcggcgtagaggccgccgcggcgctgcggcgttatggtgacagtgtcactttacttcatcgcggaagcgggctgatggagcagcaaatcgatgcttttgccggcgagcagctgcaaatgctgcttgccgagcgcgggattcgctgcgtgatggagagccgtatcgccgctattgatgcacatcaggtgcggctggaggacggccgcgcgtttgccgcctcgcgggtggtgctggcgaccggcgtgcagccgaacaaacggctggccgagcgcagcgggctggcctgcgcccgcggaatcctcgttgaccgccagctggcaaccgcgcagccgggcgtcagcgccatcggggagtgctgtgaaatcgacggtcggacctgggggctggtggcgccatgcctgcgccaggcggaggtgctggctgcccgcctgtgcgctaccccaggcgaagatttttgctggcaggatagcggcactcgtctgaaggtcagcggtatcgagttgttcagcgcgggcgagctgcgggccgcagaacaggatgaaagctgtatcagctgggacccgctggaccgccactaccggcgcctgctgctgcgcgacggtaagctgcgcggcgtactgctgctgggcgattgcagcagcgctgcgcccctcaccgctctgctgggggcggatgccccggcgccggcagagtggctcttcgatccctcttcaacgatgcagccgcgcgctgcgggaaaaattatgatgacaaaacctgttttagtgctggtcggacacggtatggtcggccaccattttcttgagcaatgcgtcgaccgtcgccttcatcaacggtatcggattgtggtgttctgcgaggaacgctatgccgcctacgaccgggttcatctgactgaatatttcaccggacgcagcgcagaatcgctgtcgctggttgagggcgattttttcgctcagcacggtattgagctgcgcctgagcgaatcggtcgccagcatcgaccgcgaagcgcgggtggtgcgcgatgccttcggccacgaaacccactgggataagctggtgctggcgacggggtcttacccgtttgttccgccggtgccgggtcatcatctcgagggctgttttgtttatcgtacgcttgacgacctcgaccagattgccgcccgcgccgcaaccgcccgacggggtgtggttatcggcggcgggctgctcgggctggaagcggccaacgcgctgaagcaattggggctggaaactcacgttgtcgagtttgcgccgaacctgatggcggtgcagctggacaacggcggcgcggtaatgctgcgagaaaaaatcagtcaactgggcgtcggggtgcataccagcaaggcgacgacggagattgttcgcaacgaacaggggctacagctgaactttgccgacggtagctcgctggcggccgatatgctggtgttctccgccggtattcgcccgcaggacgggctggcgcgcagcggcgggctggaagtgggcgaacgcggcgggatttgtatcgacaaccagtgtcgtacctccgacccggacgtgctggcaatcggcgaatgtgccctgtgggagaacaaaatttatggtctggtggcgcctggctatcagatggcgcgcgccgcagcggctaccctggcgggcgaggaaggctgctttagcggcgcggatatgagcactaagctgaagctgctgggcgttgatgtcgcctcgttcggcgacgcccaggggcgcaccccgggctgtcagagctatcagtggaccgatgggccgcagcagatctacaaaaaaattgtagtcagcgcggagggcaacaaactgctcggcggggtgctggtcggggatgccagcgactatgccacgctgctacagatgatgcttaacggtatggctttacccaatcacccggaaagcctgatccttccggcgctggagggcagcgcgccaaaagcgctcggcgtggcggcgttgccggacagcgcgcagatttgctcctgtcacaacgtcagcaaaggcgatatctgccaggcggtgaacggcggcgcgggcgatatggcggcgataaaaagctgcaccaaagcggcgaccggctgcggcggctgtagcgcgctggtaaaacaggtgatggagtatcagcttgccgagcagggcgttgaagtcaaaaaggatatctgcgagcattttgcgtggtcgcggcaggagatctatcacctggtacgcgtcaaccatattcgcaccttcgaacagcttattacccgctatggacgcggtcacggctgtgagatctgtaaacctctggcggcctcggtgctggcctcctgctggaatgaatatctgctgaagccggcgcatttgcctcttcaggacactaacgaccgctacttcgccaatattcagaaagatggcacctattcggtggtgccgcgtatggcggcgggagaggtgacgccggacgggctgattgcgatcggccagatcgccaaacgctatcagctgtacagtaaagtgaccggcggccagcgtatcgatctgttcggcgcgcgcctggagcagctcccggcaatctggcgcgagctggccgaggcgggatttgaaaccggccacgcctacggcaaatccctgcggacggtgaaatcctgcgtgggttcaacctggtgccgctatggcgtccaggattccaccggcctggcggtaaccctcgaacatcgctataaggggctgcgcgcgccgcacaaaattaaaatggcggtctccggctgtacccgcgaatgcgcggaggcccagagcaaggatattggcgtcatcgctacggagaagggctggaatctgtacgtttgcggcaacggcggtatgaagccgcgccatgccgacctgttcgccagcgatctggatgaagccacccttatccgcagtatcgaccggctgctgatgttctatattcgtaccgccgaccgtctgcagcgtaccagtacctggatggataatcttgagggaggcgtcgactatctgcgcgcggttatcctcgaagacagccttggcatcggcgaagagctggagcaggagatggcgcaggtggtcgagagctaccagtgcgaatggcaaaccacccttaacgatccgcagcggctggcgctgttccgctcgcaggccgaaccggcgctgccgtcccgcccgtggcaggccatttgcgatctcgacgccatcccgcagcaggcggggattggcgcgcggctcggcgagcggcagattgcgctgttccgctttggcgatcaggtatatgccctcgataatcttgaaccgggcagcgaggccaacgttctttcgcgcggcctgctgggcgatgcgggcggtgaaccgatcgtgatttcacctctgtataagcagcgtattcgcctgcgcgatggccgccagtgcgacgacggcgaactggcggtacgcgcatggccggtaaaagtggagaacggtaaagtatgggttggcaaccagcagctgctggcgcgcgcggaggcctcgtga

SEQ ID NO: 255948 - DNA, 2664 bp, Klebsiella pneumoniae
  misc_feature (2440)..(2449): n is a, c, g, or t
atgaatgaaaccaggaccacttgcccctattgcggggtcggctgcggcattatcgccagcctgaatgccgacggccaggttaccgtacgcggggatgaacaacatccggcaaactttggccgcctgtgcgtgaagggggcggcgctgggcgaaaccgtcgggctgacgggaagattgctcttcccggaagtcgatggcggtcgcgcgacctgggcccaggcgctggcagcggcgggttcgcgtctgcgggagattatcgacgagcacgggccgcaagcggtggcgttttatgcctccggccagctgctgaccgaggattactacgtggccaataagctgatgaaggggtttatcggcgcggcaaatatcgatactaattcacggctgtgcatgtcttcagcggtcactggctacaaacgggcgctgggcgctgatgtggtgccgtgcagctatgaggacgtggaaaacagcgatctggtggtgctggtcgggtcgaacgccgcctgggcgcatccggtactctatcagcggctggcgcaggcgaagcgcgacaatccgcaaatgcgggtggtggtcattgatccgcgtcggaccgccacctgcgatattgcggaccggcatctggcgctggctcccggcagcgacggcgggctatttgtcggcctgttgaacgccattgccgcccgcgacgacatctgcggcgattttagcgatgcgccgcaggcgctggccatcgcgcaggactgggatatcaaccacgtcgcgcagttctgcggcctgccgcgacagcagatcgccgatttctacagcgagtttatcgccgctccccgcgccatcacgctctataccatggggattaaccagtccgccagcggcagcgataaatgtaacgctatcattaacgttcacctggcgagcggtaaatatgggcgtccgggctgcgggcctttttcgctgaccggacaacctaacgccatgggcggacgcgaggtgggcggactggcgaccatgctggcgtcgcatatgaactttgaaaccgacgatttacggcgtctggcgcgcttctgggggaccgaacgtctggcgcaaacgccggggctggcggcggtggatctgttcgccgccattggccgcggcgaggtgaaagcggtgtggattatgggcaccaacccggtagtgtcgctgccggacagccatgcggtaagcaaagcgctggcggcctgtccgctggtcatcgtgtccgacgtcgccgccgctaccgataccggacgctttgcccatatccgctttcccgcgctggcgtggggagagaagagcggcacggtaaccaactccgaacgaaggatctcgcgccagcgcgctttcatggcgccaccgggggaggccagagccgactggtggatcgtcgcccgcgtggcccaggcgctgggcttcggctccgcttttgcctggcagcacccgcacgaggtgttcagcgaacacgccgcgctttcaggatatgaaaatgatggccagcgggcatttgatatcggcggactggcggatctcagccgcaaagcgtgggaggcgctggaaccggtgcgctggccggtgagccgcagtgaagcagcctggagtgtgcataagggctggcatcgcgacggtaaactgcggatggtgccggtcgcgccgcaacctacccgggcgaccaccgatgcgttctatccactgatcctcaacagcgggcggatccgcgatcagtggcacaccatgacccgcaccggcgcggtgccgcgtctgatgcagcatattaacgagccggtggtggaagtcgcgccagcggacgcgacgcgctatcagctgctggaaggcgaactggcgcgggtgcgctcaccgaatggggtgatggtagcaaaagtgattgtcagcaatggccagcgtcccgggtcgctgtttgtgccgatgcactggaatgatcagtttgctcgccagggacgggtgaataacctgctgtctgcagtcactgacccgcactccgggcagccggaaagtaaacaggcggcagtggcgatagctgcctggctaccagcgtggaaaggcgagcttttttctcgcttgtcggtgccgctacccgcttcactacactggcggcggcgggcagcgcagggaatcattcatctttcgctggcgggggatatcgcctcccgcgagtggcttattgagtggtgccagcgaaaagggtggcaactacagacagccaaaggcggtagcatctggaacctgctggcgtggcagggggaagagctgatgctcggctggtggagcgatgtcaacgaaccgcgcgtggatgccgagtggattagcgccgcgtttcgcagccctccgccgaatgctacccagcgtcacgcattattgagcggcagaaagggtagcgatgaggtaccgcgcggacgcattatcnnnnnnnnnntgatattcggtatattcctggaatcgtgcgggaggctgccagggcgggtaaaaaacgataaacttaacttttgccgccatcactttatgagtagacgtaaccgatttgagctccttgtcgttccgtataaccccttatttaccgcttctcctgctgctgacaggcgctcccgcccgcgcgctgcaggatactcaggccttttccagaggccctga

SEQ ID NO: 255949 - DNA, 1209 bp, Klebsiella pneumoniae
atggcgaaaaaatttggcgaagccagcatgagcgataatgggctgacaaccggcgaacaggcgcgtgtatttgctatgagccggctgggcaacgaagtcagccaccagctggaaagctggctttcgccgtggggcaacgccaacgtcgatttgctggtcgataaagagggcaattttaccggcagcaaggggagctggtttgttcctcttcaggataacggcgactatctcacctggaaccagtactcggtcacccagcgggataacggtctggtcggcaacgtcggcctcggccagcgctggcggatgggctcctggctgctgggctacaactccttctacgataaagtgcttgatgagcgcatggcgcgcggcagcgtcggggctgaagcctggggcgaatcgctgcgcctgtcggctaactactaccagccgctcggcggctggcagcaggggagtagcctgactcagcagcagcgtatggcgagcggctacgatgtgaccgctcaggcgcggctgccgttttatcagcacattaataccagcgtgagcgtggagcagtacttcggcgatagcgttgacctgttccattcgggcaccggctatcacaatccggtcgcggtgtcggtggggctgaattacacccccgttccgctggtcacggtgaccgccaaacataagcagggcgagagcggcgtcagccaaaacgatattgggttaaagctgaactatcgttttggcgttcctctgaaacagcagctggcggccgatgaagtcgccgttagccgatcgcttcgcggcagccgctacgatagcccggaacgcgataatctgccggtggttgaatatcgccagcgcaaaacgctgtcggtttatctggcgacgccgccctgggatcttcagcccggggagacggtgcagctgaaactacagattcgtagcctgcacggaattaagtcgctaagctggcagggcgatacccaggcgctgagcctgacctcgccgatagaggccaacagtacggacggctggaccgtgattatgccgcgctggaacagcgaagccggggcaagcaaccgctggcatctttcgctggtggtggaggataaaacgggtcagcgcgtctcatccaatgagatcgcactggcgctgactgagccgttggtacgcgtaccggccgatggcgtttcgtggcagcatctgccctag

SEQ ID NO: 255950 - DNA, 651 bp, Klebsiella pneumoniae
atgagtcaacaggaacgggcaaccatccttctcatcgacgatcacccgatgctgcgcaccggcgtcaaacagctgatcagcatggccccggatatccaggttatcggcgaagccagcaacggcgagcaaggtattgcgatggcggaatcattggatcctgatttgattctgctggatctcaatatgccgggcatgaacggtctggaaaccctcgacaagctgcgcgagaagtcgctgtccggccgcgtggtggtgtttagcgtctccaatcatgaagaagacgtggtgaccgctctgaaacgcggcgccgacggctatctgctgaaggatatggagccggaagatttgctgaaagcgctacagcaggcggcggcaggcgaaatggtgctcagcgaagcgttaaccccggtgctggctgccagcctgcgcgctaatcgcgctacctcagaccgcgacatcagccagctaaccccgcgcgagcgcgatattctcaagctgattgcccagggcctgccaaacaaaatgatcgcccgccgtctggatatcaccgaaagtaccgttaaagtgcacgtcaaacatatgttgaagaaaatgaagctgaaatcgcgcgtggaagcggcggtttgggtccatcaggagcgcgtattctag

SEQ ID NO: 255951 - DNA, 1779 bp, Klebsiella pneumoniae
atgttgaaacgactttttacgccgctgacgctggttaatcaactcgcgctgatcgttctgttggccacgatcatcggcgtcgccggaatggcgatctcttcccgcctggtgcacggcgttcagggcagcgcgcatgccatcaataaagccggttcgctgcgcatgcagagctatcgcctgctggcggcgataccgctgaccgacagcgatcaaaagctgctggatgaaatgacggcaaccgtctttagcccggaactgcagtacgccgctcgccatgacgatcagcagcggcagctccaggcgctgcagcactactggcagctggagctggcgccgggaatgcgcaaagcgcaaaatcaggcctcggtcgcgacggatgtcgccggctttgtcgaccgcattgaccagttggttaccgctttcgatcacaccaccgaggagcggattaaacacgttgtctggatccagcgcatcatggccgtggggatggcgctgctgctggtatttaccatcgtctggctgcgcgcccgcctgttacgtccgtggaaacagctgctcggtatggcccgagcggtgagccgacgtgatttcacccagcgggcgcagattaacgggcgcaacgagatggcgacgctcggcatggcgctgaacaacatgtccaaagagctggcggagagctattcggtgcttgaacgccgggtgcaggaaaaaaccgccggcctggagcaaaaaaacgagatcctcgcctttctgtggcaggccaaccgccgcctgcactcgaacgcaccgctctgtgaacgcatttcacccgttcttaatggtttacaggggctgaccctgctgcgcgatattgaagttcgcgtctacgaccttgaagacgaagacaaccatcaggagttttcctgccactccgatattcagtgcgacgacaggggctgctatctctgtccccgcgacctgccgccgctgcctgataccggcaccactttaaaatggcggctgtcggatgcccataatcagtacggtattttactggccaccctgcccgccgggcgtcatctgagccacgatcagcagcagctggttgacacgctggtggaacaacttaccggcaccctcgctctcgatcgtcatcaggagcgccagcagcagctaatcgtcatggaggagcgcgccactatcgcccgcgagctccacgactccatcgcccagtcgctctcctgtatgaaaatgcaggttagctgcctgcaaatgcagggcgatgacctgccggaagcgagccgccagctgctggggcaaatccgtaatgaactgaatacctcctgggctcagctgcgcgaactgctgacgaccttccggctacagctcaccgagccgggactacgtccggcgctggaggccagctgccaggaatacagcgcccacttcggttttacggtacgcctggactatcagctgccgccgcgttttgtgccgtcgcatcaggccatccatctgctgcaaatcgcccgggaagcgctcagcaacgcgctgaagcacgccaatgccaccgatgtcagcgttaccgtggcgttgcgggacaatcaggtccgtctgacggtggccgataacggtcgcggcgtaccggaccatgcggagcgcagcaaccactacggcctgattatcatgcgcgatcgcgctcagagcctgcgcggggactgccaggttcggcgccgggaaaccggcggtaccgaagtggtggtcacttttatccctgaaaaatcgttttcaatccaataa

SEQ ID NO: 255952 - DNA, 1389 bp, Klebsiella pneumoniae
atgagtcactcttcaatcccggagaagactaacagctcagtcattagcgactggcgtcctgaagatcctgaattctggcagcagcgcggtcatcgcgtcgccagccgcaatctgtggatctccgttccgtgtcttttactggcattctgcgtctggatgttgttcagcgccgttgccgtcaacctcaataaagtcggctttcagtttactaccgaccagttgtttatgctgaccgcgctcccggcgctgtccggcgcgctgctgcgcgtgccttacgcgtttatggtgccgctgttcggcggtcgtcgctggactgcgttcagtaccgggatcatgatcgtaccctgcgtatggttaggcttcgcggtgcaggatacctctacgccttttagcgttttcgtgatcatctctctgctgtgcggctttgcgggggcgaactttgcttccagtatggctaacatcagcttcttcttcccgaaacagaagcagggcggcgcgctgggtatcaacggcggcctcggtaatatgggcgtcagcgtgatgcagctggttgctcctctggtggtatccctgtctattttcgccgtctttggcggtaccggcagcgaacagccggatggttccatgctatatctggaaaacgccgcgtggatctgggtgccgttcctgattatcttcaccctggcggcgtggttcttcatgaacgacctgtcggcatcgaaggcgtcgctgagcgagcagctgccggtactgaagcgcgcgcatctgtggattatggcgctgctctatcttgccaccttcggctcgtttatcggcttctcggcgggcttcgccatgctgtccaagacccagttcccggatgtgcagattctgcactatgcgttcttcgggccgtttatcggcgcactggcacgctcgaccggcggggcgatctccgaccgactcggcgggactcgcgtgacgctggtgaactttgtggtcatggctatcttctgcggcctgctattcctgacgctgccgacccacggcgagggcggtaactttattgccttcttcgcggtatttatggtgctgttcctgaccgctggtctggggagcgcgtctactttccagatgatttcggttatcttccgtaaaatgacgatggatcgcgtcaaggcgcagggcggcagcgaagcgcaggccatgcgtgaagcggcgaccgatacggcggcggcgctgggctttatttcagcgattggcgccattggcggcttctttattccaaaagcgtttggtatctcgctggatttgaccggctcgccggccggagcaatgaaggtattcctggtgttctatatcgcctgcgtggtgattacctgggcaatctacggacgcaagcagaaataa

SEQ ID NO: 255953 - DNA, 492 bp, Klebsiella pneumoniae
atgtccggccgcggtccggaggctgcactcaccatcgccatccccgtctcaatgctggcgcaaacgctgggcattctggtacgcgtggtgaacgcccgcttcggtcatctggcggaccgctatgcggcgcaaggtaatacccggatggtcggcctgatgcacctcggcggtccgacgctgctctattttttaaacggatttctgccggtttttttcgccatcctgctcggctcttcggcggttagctggttccttgaggcgattccgccggtgatcaccaacggattgatcgtcgccagtaagatcctgccggcgctcggcttcgccctgctgatcagcatgatgctcagcagcaaacttatgccgtacctcggtctgggctttctgatagcggcatataccaaactggatatcatcgccatcgcgctattcgccgtggtgttggcttttatcatcagccagtttcttaatcttaagcagcaggagagctaa

SEQ ID NO: 255954 - DNA, 1062 bp, Klebsiella pneumoniae
atgcacgtagaagactatatgaatgaaacccccgctcgcctgctcgctatgctaacgcagacgcgggaagatctctggcaagcggcgaaagcgctggcggatcgcgggatctctcgaatcatcctgaccggttccggtacgtcttaccacggcgcgctgaccgcgcggtcgtttatgcagcaatggtgcggcatcccggtcgatgtatactggcccttcctgctggacgagatggcactttccctcagcggcaaagcgctggtcatcggaatttctcagggaggcggcagcctctccactctcgccgcaatggagcgcgcccgggcagccgggcaccttaccgcttccatggccggggaagcgccagctgccatcgaccaggcggcagatttgatcctgacggtcccctgtggagaagagcgcgccggcgccaaaaccaaaggttatcactgcaccatactcaacctgatactgcttgcgcttgccgtcgccagccgccagcagcgcctgagcgatgaggagcgcaaagcgctactcgtccgcatggagaggacgttcaatcatttgccgacgctcattgaggcctcgcaggcgtgggttctcaatcacgcccggccgcttatcgacagcgcagatattcgcctgaccggcccggcagggctgtttggcaccgttcaggaaggcgcgctaaagatgcttgaaacgctgcgctgcccggtggccggctatgaatttgaggaattcatccacgggatctataacgccttcgatgagcgttcaaccctgattatgctcgatccgcatcccgatgagcgccaggatcgtctggcggaaatactgtctggttggacgccgcatatttatcgcattggcccgcatgttgacaataacggtaagaacatgccctttacgtttattaacgatccagactttgcaatctttgaatatattattccattgcaaatggtttgcgccagactaccgccagtgaagggtgtcgatcccgcaatacctaaggatccgcagttccaccagaaaatgaaaagtaaaaaacttaattaa

SEQ ID NO: 255955 - DNA, 987 bp, Klebsiella pneumoniae
atgtctatagctcagaaaaacgcccaccatattattcgcgatattttaaccaggcaacgtattgaacgcgtgtggtttgttggctgcgggggttcgttgaccggcttctggccggggaaatattttctcgattgtgaagcaaaaaagctggccgtcggctatgtgaccagtaatgaatttgtccatgcgacgccgaacgcgttaggtaaaaacagcgtagtgatcctcgcctcgcagcagggcaacaccgctgaaacggtggaagccgcccgcatcgcgcgtcaaaaaggcgcggctacgattggactggtatatacccccggcacgccgctgtgcgaacacagcgattacactatcgaatactgctgggctcgctatcccgaaactgtcgatccgacacagcaaaaagcggcgtacagcctgtggctggcgctggagatcctggcgcaaacagaaggatacgaccattacgctgagatggtcagcgcctttgccagttttgaatccgtggtgcgcggcgctcagcagcaggtgcaagcggatgcgcagcattttgccgaagcctggaaaagtgaaaaggtcatttatatgatgggcagcggtccttcgttcggcgccgcgcatcaggaatccatctgtattctgttggagatgcagtggattaactccgccagcatccatagcggcgagtatttccacggcccctttgagattaccgaaccgggaacgccgttcattttattaaaaagcagcggccgcacccgtccgctggacgatcgcgcgatccgctttatcgaacgctatcagggaaaactgcagattattgacgtggaaaaagtgggaattgatgcgcttcacgccagcgtgcgcgaatatttctgcggcctgctgcacaactgcgttcttgatgtgtacaacctggcgctggccaccgcccgcaaccatcctctgaccacccgccgctatatgtggaaagtcgaatattaa

SEQ ID NO: 255956 - DNA, 1038 bp, Klebsiella pneumoniae
atgaatattacccgtaaagagcagcgcattattcagcgcgcgctaaaggcgtggcaggccagcggcgatttagcccctgaggatagccagcggctggcgcaaacgctgcgcgtctctcccttcgactggcagcggctgagccgctatgcgttctggaccgcgctggcctgcgtgctggtcgcgctgggcagcctgtttgccgacagcgccctgattgagcttctgctgagcctgttcagccgctcggcgctgacgcgaatcatcctgcccgcgctgctggcggtggcctgctacgcctggggttttcgccgccagcggcgggaaacgcagtggcactacagcaccgaggcgatcctctttctgggggttatttttaccgccgtggcgctgtggcagcttggcgaacgtctggataccggcagcggtcatatcgcgccgctgttcctggccggatgcctgatttacggcgcgattggcttttttgcccgctccgggctggtgtggctcttttttctgctgtcgctgggcaactggttcggtgcagaaaccggctacgtttcgggctggggcgcctactggctgggcatgaactacccgatccgcttcgtgctgttcggcggcgcgctgcttgcgctctgctacggcgcgcaacacgctttgcgccagcgccagctgtttaccgtcagtaaagcgatggggctgatctatctgtttatcgccctgtggatcctgtcgatttttggcaactatgacctggatagctggtccagcatagcgcaaaggcagctgctgccgtgggggctgctgttcgccgtggcggcggggatctgtatctatatcagcctgaaaaccgacgacggcatgctgcgcggcttcggtctgacgttcctggcgatcaacctctatacccgtttcttcgagttcttctgggatggcatgcacaaagtcgcatttttcctgatcctcgcagtctcgctggcggtaattggccgctatgcggagcgcatctggcatgcgggaagggtaacccatgaataa

SEQ ID NO: 255957 - DNA, 1428 bp, Klebsiella pneumoniae
atgaattcgtctgctgtttcacccggccgcgccggtttattccttctgttgaccggtcagatgctgccgctgatcgacacctcgatcgccaacgtcgcgctggactccatcacccaatcgctgaacgccagcgccacccagctggagctgattgtcgcgctgtacggcgtcgcctttgccgtctgcctggcgatgggcagcaaacttggcgataactatggccgccgccgtctgtttatgtggggcgtggcgatttttggcgtcgcctccctgctgtgcggaatggcaaactctatcaccacgctgctggcggcgcgcacggtccagggcgccggcgcggcgctaatcgtgccgcagatcctcgccacgctgcatatcaccctcaaaggcaacgcccacgcccgggccatcagcctgtacggcggcattggcggtatcgcctttatcgtcggtcagatgggcggcggctggctggtctcggcggatatcgccggtttaggctggcggaatgccttctttattaatgtgccgatctgcctgctggtgctggcctttagcccgcgatacgtcccggagacccggcgcgaagcgcattcgcgcatcgactggcagggcaccttcagccttgcgctgatcctctgctgcctgctgtttccgatggcgctggggccggagctgcactggccgtggacgctgcagctgatgttagctgcggtgctgccgctgctggtctggatgcgggccagcgcgctgagcaaacagcagcgcggcgagcagccgctattgccacctcgcctgctgaagctcaccagcattcgctttggcatggccatcgccctgctctttttcagcgcctggtccggatttatgttctgtatggcgttgaccatgcaggccggtctgggaatggcgccgtggcagtccgggaatagctttatcgcgctcggcgtggcctacttcatctccgcgctgtacgcgccgaagctgattgcccgctacagcatgggacgcattttgctgactggcctgtcggtgcagattgtcggcctgctgctgctgtgcgcgaccttttatcgcctcgctacccacaccagcaccctggcgctggtcccctccacggcgcttatcggctacgggcaggcgctgatcgtgaatagcttttatcgcatcgggatgcgcgacatcagcgcttctgacgccggggccgggagcgcaattctcagcaccctgcagcaggcgacgctgggcctgggcccggcaattctcgggtcgctattcttaactctcgcccagcgcagcggcggcgactatccccgggcgctgatcgatttcctggcggtggaagtggtgatgatgctggtactgggcgccatcgcgctgtggctacgccgacaccttaacgtccgtccggcggtagcgacgccataa

SEQ ID NO: 255958 - DNA, 312 bp, Klebsiella pneumoniae
atgcagcccggtggaaagcctgaaatcggggaaaccccggaagcggcgctgatccgcgagctcgaagaggagctcaactttagcgtttcacctgaagaactggttccggtcggccgtttcaccgatacggcggcaaacgagccgggccatacggtctctgcggatatctttcagatagccaccaacagagcgaactttacgccgacggccgaaatagaagaagttatctggtatacgccgggtcaggctcggcatattaagcttgctcctcttaccgagaatcacctgcttcctctgctgaaaggggcgtaa

SEQ ID NO: 255959 - DNA, 219 bp, Klebsiella pneumoniae
gtggcttacctgcagtccaaaggtaaagacctgggacgtggctacggcgacgaagatctgctgaaatatgttgatgtaggcgcgacctactacttcaacaaaaacatgtccacctacgttgactacaaaatcaacctgctggacgaaaacaacttcacccgtgctgccggtatctctaccgacgacatcgttgctctgggcctggtttaccagttctaa

SEQ ID NO: 255960 - DNA, 1053 bp, Klebsiella pneumoniae
atggacatgacatttttccgcgccgccctgttcggggccctggtattactttcaggttgtgattcagccacttctccccagacgccaaaatccgccgctaccgtactggacggtaaaaccatgggcacattctggcgggtcagcgtcatagaccttgatcaggcgaaggccgaggcgctgcgtcagaaagttcaggctcagctggatgctgacgatcgcctgctttctacctggaagaacgattcagcgttgatgcgctttaaccattcgccggagacatcgccctggccggtcagcgaggcgatggcggatatcgtgacgatgtccctgcgaattggcgctaaaactcacggcgctatggatattaccgtcgggccgctggtcaatttatggggctttggcccggacaaacagccggtaaaaacgccggatccgcagcagattgccgatgccaaagcgcgtagcggcttacagcatctgacggtgatcaaccgggccgacgggcagtatctgcaaaaagacattgcggatctgttcgtcgatctctccaccgtcggtgaaggctacgctgccgatcatctggcgcgcctgatggaacaggaggggatctcgcgctacctggtctcggtgggcggggcgctggtgagccggggcatgaatgccgaaggtcaaccgtggcgggtcgcgatccagaaaccgaccgatcgcgaaaatgcggtacaggcgatcgtcgatattaacggccacggtatcagtacctcgggcagctatcgcaactactatgagctggacggcaagcgcatctcgcacgtcatcgatccgcaaaccgggcgaccaatcgatcacaagctggtttcggtgaccgttatcgctccgacggcgctggaagccgatggctgggataccgggctgatggtactggggccggaaaaagcgcaggaggtggtgcgtgaacaggggctggcggtctatatgattgtcaaagagggggaggggtttaaaacctggatgtctccgcagttccgcgctttcctggttggcgagaaaaattaa

SEQ ID NO: 255961 - DNA, 1065 bp, Klebsiella pneumoniae
atgaaaccgataatgtttgataccgatgagcgccgctggcaggcagtatgcgaacgcgataccggcgccgatggtcagttcgtttttgccgtgctgactaccggcgtttgctgccgtccgtcctgccgctctcgtcgcgcgctgcgggaaaatgttcgcttctatcctgatgtcgataccgcgcaggcggcaggctttcgcccgtgcaaacgctgccagccggaaaacagcgatccgcagcagcagaaggtagataaagtcgctgccgcttgccgtctgctggagcaggagacgccgataacgctggaagcactggcacgccagcttgcggtcagcccctttcatttccaccgcctctttaaatccgtgactggtatgacccccaaagcctggcaacaggcctggcgcgctcgccgtttacgcgaagcgttagggcagggggcgaaaattaccgacgcggcgctatccgccggtttcccggataatagcagctactatcagcaggctgacgccgcgctggggatgaccggccgtcagtttcgccgcggcggtgagaatatggacattacctgggtatgcggcgacgggccgctggggcgctgccttgtggctgagagcgaacggggaatctgtgccgtgctaccgggagatagcgacagctcgctgtatgatcaattagccagcctgttccccaatgcgcgactgcatccaggcgatgaagtctttcgcctgcgggttgcgcaggtcttttctcatcttaacgatcatcgccagccgttttctttgccgctggatctgcgcggcacggcttttcagcttcaggtctggcaggcgctgcgccagatcccggcgggggagacccgcagctatcgccaggtggcgcaaagtatggggcgtccccgcgcggtgagggcggtggccagcgcctgtgccgccaataagctggcgctggttatcccgtgtcatcgtgtggttcgcgaggatggggcgctatccggctatcgttggggaacggcgcgtaaggcgctgctgctggcgcgagaagcgcaatacgaggagacataa

SEQ ID NO: 255962 - DNA, 651 bp, Klebsiella pneumoniae
atgctcgatctttttgccgatacgccgccctggcaggagcaactggctccgggggcgataattttgcgccgctacgcccgtgaacgcgcgccagcgcttttgcaggcaatcaccgatattgcccatcgttcgccttttcgtcagatggttacccccggcggctatacgatgtcggtggcgatgaccaactgtggcgagctgggctggaccacgaacgcgcgcggctatctctatgccagcgacgatccgctgacgggaaagcgctggccgcagatgccgccgcttttccgcgagctggcctcagaggcggcggcggcgggcggctatgcgcactttaccccggatgcgtgtcttattaatcgctatcagcccggcacaaagctgtcgctgcatcaggataaagacgagcgcgacctgcgggcgccgatcgtctccgtctcgctggggttgccggcgatattccagtttggcggcctgcggcgtagcgatccgctacagcgggtgctgctggagcacggcgatgtggtggtctggggcggcgaatcacggctgttttaccacggcattcagccgctaaaagagggtgttcatccggataccggctcctgtcgctacaatctcactttccgcctggcagggaataaagaataa

SEQ ID NO: 255963 - DNA, 1644 bp, Klebsiella pneumoniae
atggaacttcttcttcttgtctggcgtcagtaccgctggccgtttatctccgtcattgccctgagcctgctgagcgcggcgctgggtattgggcttatcgcctttattaacctgcgcctgataactatcgtcgatacctccctgacggtactgccggaatttctgggactattattgctgctgatggcggtcacccttggctcgcaactggcgcttactacgctcggccaccattttgtttatcgcctgcgcggggaatttattaagcgcattctggatacgcaaattgagaagatcgagaaaatcggcagcgcgtcgctgctggccgggttaaccagcgacatccgcaacattaccattgctttcgtgcgtctgccggagctggtacaggggattattctgacctttggttccgccgcttatctggcctggctgtccggaaaaatgatgctggttaccgcgctgtggctggcgttaaccatctggggcggatttgtgctggtgtcgcgggtctacaagcacatggcctcgctgcgcgaaaccgaagataagctgtatcacgattatcaaacggttctcgaaggacgcaaagagctcacccttaatcgcgagcgcgctgaatatgtatttaatcagctctatctcccggacgcgcgcgaataccgccaccatattgtccgcgccgataccttccatctgagcgcggtcaactggtcgaatattatgatgctgggcgcgattggcctggtcttctggatggctaacagcctgggctgggccgatacggcggtggcggccacctattcgttgacgctgctcttcctgcgcacgccgctgctctctgcggttggcgcgctgccgactctgctcagcgctcaggtggcattcaataagctgaataagttttcgctcgcgccctaccgcgctgaattcccgcaggcgcaggtgtacccccactggcagacgctcgagctgcgcgatattaccttccattatcccgacaacagctttgcggtcgggccgattaatctgactctcaggcgcggcgagctggtattcctgattggcggcaacgggagcggaaaatcgacgctggccatgctgctgaccggtttgtatcagccggtttctgggcagatcctggttgacgggaagccgatggcggcggataagccggaagattaccgcaagcttttctcggcggtctttaccgacgtctggctgttcgacaggctgctgggaccggaagggaaggcggccgatccggcgctggtggagaagtggctgggctatctgcaaatgaaccataagctacggctggacgatggcaaaattctcgacctgaagctgtcaaaagggcagaaaaagcgcgtggcgctgctgctggcgttagcggaagacagagatatcatcatgctggatgaatgggcggcagatcaggacccccatttccgccgcgaattctatcaggtgctgctgccgctgatgaaggagatgggcaaaaccctctttgccatcagccatgacgatcactactttcagcacgccgacaggctgctggaaatgcgcggcggccagctctcagagctgaccggaaatgagcgcgaactagcgacccgcgatgcggttgcccgtaccgcctga

SEQ ID NO: 255964 - DNA, 1248 bp, Klebsiella pneumoniae
atgccccctgtttccgattccgctacctccagcaatgctggcgcattaggccagatcctgcgctcgcccgcgctgctgacgcgtgaaacgctggcgggcgtactcaccgcactggcgctaatccccgagatcatctccttctcggttatcgctggcgttgatccgaaagtcagcctgattgcctccgtagtgctgtgcctggcgatgtcggttctcggcggcagaccggcgatggtcaccgccgccgccggttcggtagcgctggtgattggtccgatggtgcatcaatatggcgtcggctacattctcccggcggtcataatggccggcgttattcaaattttgtttggcatttgcggcatggcgcgcctgatgcgctttattccgcagccggtgatgaccggttttgttaacgcgctgggtattctcatcttttttgcccaggtaccgcatttctggagcaagcagccgctgattatcggcctgttcgtgttaacgctgctgattgtgctgtgggcgccgcgctatataaaggcaatcccttctccgctcatcgctatcgtactgctgacgctgtttaccgttttcagcggccagctgctgccgaccgtcggcgatgaaggctcaatgagcggcggactaccggggttaaccagcctgatagtgcctctgaatttaaccacgctgcacatcatctggccctgcgcgctgagtatcgcttttgtcggcctgatggagtcgcttctgacggcaaagctggtggatgatttaacccaaacgccttccagcaaagcgcgcgagagcgcgggtctgggcatcgccaacattctcgccgggttctatggcggtatcgccgggtgcgcgatgatcggccagaccatcgttaatgttgaaatgggtaaagcgcgcagccgcgtgtcgaccgttgccgcaggcctggtgctgctcctgctggtgactgccttaagcgaagtgatggcaaaaatcccgatggccgtgctcgccggggtgatggtgattgtcgcggtgaagacctttagctggcacagtattcgtccaactgagctggcgcgcaatccgtggccggaaacgctggtgatgctggtgaccgtcggcgcaaccgtcggcaccagcaatctggcaatcggcgttctggcagggctgatctcaatggcactaatcccccgccgtctgcggactcaagcgcaggctatatcagaaaaagcgtcgccagcccaagaaaaataa

SEQ ID NO: 255965 - DNA, 1635 bp, Klebsiella pneumoniae
atgaagaaaaagatggccgtacccagctcacaggcggttggttccaataacactcggaccaacacccgccatgagcaagagacggatgtattgttgattggcggcggcatcatgagcgccacgttgggaacctggctgcaggaactggagccggattggtctattaccatggtcgagcagatgtccagcgtggcggaagagagctcgaacggatggaacaacgcgggtaccggccacgcggcgttgatggagctgaactatacgccgcaaaccgctaacggtatcaacatcgataaagcggtcgacatcaacgaatccttccagatttctcgtcagttctgggcccatcaggtgacccggggcattctgaaaaagcctaaatcctttattaacagcgtgccgcacatgagcttcgtatggggcgaaaacaatgttaacttcctgcgcgctcgctatgcggctttacaacaaagcgagctgttccgcggtatccgctactctgaagatcatcaacaaataaaagagtgggctccgctggtgatggaaggacgcgatccgcagcagaaggtggccgcgacccgctcggaggtgggtaccgacgtgaattacggcgaaatcacccgtcagctgatcgccgggctgcaaacccatgataatttctctctccagctggggaccgtggtgcgccgttttaagcgcaacgccgacaaaagctggaccgttacgctggcggatgcgaacaaccgccaccagaaacgggttatcaaggctaaatttatctttatcggggccggcggcgccgcgctaaccctgctgcaggaaaccggtattccgcaggctaaagagtacgcgggcttcccggtcggcggacagttcctggtgtgtgagaacccggaagtggttaatcaccatctggccaaagtctacggtcaggccgaggttggcgcgccgccgatgtcggttccgcacatcgacacccgtattatcgacggcaagcgcgtggtgctgtttgggccgttcgcaaccttctcgacccgcttcctgaaaaacggttcgctttgggatctgctggcctcgaccaacacctcgaatatcatgccgatgctcaacgtggggctggataacttcgatctggtgaagtatttgattagccaggtgctgcaaaaggacaaagatcgtcacgcggcgctgtgtgaatactatccggaagcgcgcaaagatgactggcgcttatggcaggctggccagcgcgtgcagattatcaagcgcgatgagaagaagggcggcgttctgcgcctcggtaccgaggtcgtcagcgatgacgaaggcaccgtagccgcgctgctgggcgcctcgccgggagcttccactgcggcgccgattatgctgcagctcatggaaaaagtgttcaaagagaagatcaactcagcggagtggcaggcgaaactgaaagcgattataccaagctacggtacgcgtctggacggcaacgctgcggaaattgaaaaggcgctggcgtggaccagcgaagtgctggaactgcactacgagccggttacggtggctgatgaggttccgcaggcggagctgaagccgctgccggaaggtaaaccggtcgctgatattgcgctttaa

SEQ ID NO: 255966 - DNA, 492 bp, Klebsiella pneumoniae
gtgaaaaaaatcactacgtttgccgcttccatgctggctcttgcctgcgtttccgccagcgccgttgcagctgaacagccgctggaaaaaatcgctccctaccctaaagcggagcaagggatgaagcgtcaggtgattcagctgccgcagcagcaggatgagtcgacgttaaaagtggagctgatgattggccaaacgctggaagtcgactgcaatcgtcatcgtcttggcggtcagctggaaagcaaaacccttgaaggctggggctacgactactacgtatttgataaagtgacttctcccgtctcgaccatgatggcctgtccggatggtaaaaaagagaagcagtttgtgatggcaggtctgggcgatgcgggaatgctgcgttacaacagtaagctgccaatcgtggtttataccccggccaacatcgatgtgaaatatcgtatctggagagcggacgaaaccatcggcacggccgttgtgcgttaa

SEQ ID NO: 255967 - DNA, 1107 bp, Klebsiella pneumoniae
atgagagttaatggacttacgaagggatttttcatcctgatcgtgctgatcgtcaccctggcttttttcgacgttctctccccctattattcagccattttatgggcggccattctggcggtgatcttccacccggtgaaaaacaaactgcgcgatcggctcggcgagcgcaacggcctggcggcgctgctgaccatcgtcattatctgcctgattgtctttaccccgctggcgatcattctttcgtcgctggccttcgagctcaacgtggtttacaccaaactgcagcataatgacacccagttcccgaccgtggtagccagcctgtttgctcatctgccggaatgggccaggagcttcctttctgagcataatctcgatagcgcggaacagattcagcgccagctttcagacgtagcgctgaaaggaggccagtacctggccggtagcgcattcttgattgggaaagggaccttcggctttaccgtcagcttcggcatcatgctttatctgctgtttttcctgctcaaagatggcccgtatctggtcagactgatccttgaatccctgccgctatcgaatcacgtgaagcagcatctttttgctaaatttgccgccgtctcccgggcgacggtaaaaggcaccgtcgcggtggcgcttgcgcagggcgcgcttgggggactggggttctggatcgtggggattgatggcagcatcctgtggggcgcgctgatggcgtttctgtcgctgatcccggcggtgggctcggcgattatctgggttccagcggcaatctatctcttcgcgaccgggcagctctggcagggcgcgtttatcgtcggtttctttgtgatcatcgtagggctggtggataacattctgcgacctttactggttggtaaagataccaaaatgccggactacctgatcctgatcaccacgatcggcggaatggaaatttacggcatcaatggttttgtgatcggcccgctgatcgccgcgctgtttatcgcctgctggaaccttctctccggacgcgatcacgctggaaacatcgatgagcttgatgaagatttcctcgaagaaggtaaaaatcacgaagagtag

SEQ ID NO: 255968 - DNA, 1728 bp, Klebsiella pneumoniae
atgattcaggatgcgtttattcgactgcgggcaaaacagctctactggcagggatacccgccagccgaaatttcgcggctgatgggtatcagctctaatacggtgtattcgtggaagaagcgcgacgagtgggacgaaacgcccccgattcagcgcgtcacccaatccattgacgcccgcctttgtcagctgaatacaaaagacaacaagaccggcggcgacttcaaagagatagatctactcacccggcagctgaaaaagctggataccgggcaaaatgcggcggctaccgggagcaagaaaaccagtcgccgcaagaagaaaaatcactttactgatgagcagatagaagcgctgcgctcaaaaatactcgactccctcgcctggcatcagcgcggctggtacgaacagcgcgatcagcgtaaccgcatgatcctgaagtcacggcagattggggctacctggtactttgcccgcgaggcattgctgggcgcactgagaacggacgttaagcacgactaccagcgcaaccaaatctttctgtcagcgtcccgcaagcaggcgcttcagttccgaaacttcatccgtaaagcggctgaagaggtggacgtcgaactcaaaggcggcgagcaaatcacgctgtcaaacggcgcggagctgcattttctcgggacgtcggcggcgacggcgcagtcgtacaccgggcacctgcgatttgatgagtttttctggacaggaaactttatcaacctgcgcaaggtcgccggggccatggcaacgctcaaaggcttaacccgcacgtacttctcgacgccatcgagcgaaagccatgaagcctatcagttctggaccggggatcggtggaatgcgaaacggcctaaagcgcagcgcgttgattttgacgtgtcctggaagaaaacccatagcggcgtgctttacccggacaaaacgtggcggcagatcgtcactattcaggacgctatcaacaacggctgggattacaccgacattgacgaaatcagggacgaaaacagtcccgatgaatttgaaaacctgtacatgtgcgagtttgtcaaagacggtgagagcgcgtttaacctcagccagctgttaggttgtggcgctgacggttatgacgactggcccgactggaagccgttcgccggccgccccatggggcagcgcgaggtgtggctggggtacgacgccaacggcggcagtggtaatggtgatgcgggtgctttgtccgtgacggtcccgcctctggtcgccggaggacggttccgcacgattgaaatacagcagcttcaggggctggagtttgagcagcaggccgcagtcatcaaagaggcagcggagcgctacaacgtcacacacatcgctattgacgggcaaggcgtcggggaggcggtctggcagattgttaaaaactggttcccggcggctatttgctaccagatgagcctctcctccaagcgcgcccttgtcctcaaaatgttgcaggttatacgcgccggccgctgggaatatgaccgcagcgagcagggtctggtcagagccttcaacgctgttcgcaaagttgttacgcccggcggtttcatcacttacgaaacggaccgatcgcgcggcgtaagccatggtgatatggcgtgggcaaccatgctttcgattattaatgaaccgttgggccaggagagtggcggcggtggtttcgcaatgggatggtaa

SEQ ID NO: 255969 - DNA, 1053 bp, Klebsiella pneumoniae
gtgaaaaagaaatacggtaaaaaacaaatggccagcactgccggttctgacattgcggaatcactgaaggctgatcccgcgttgacagcattcagctttgacggcccttatcccgtgcgcgacatggctgacctgctggacaatctctattgcctggataacgggcgatactatgagacgccggtggatttttacggactggctaaagccccgcgccagagcgcctggcatgagtcggcgttgtactttaaacgcaatgtgctgaccgggtgctttattccgcataagctgcttaatcgccagaccttctccgcgtttgcgctcgactggttcacgttcggtaatgcttatcttgagcaaccgcgcaaccgtctgggcggcccgctacccttccggcattcactggcgaaatatacccggcgcgggagcgttgacctcgatcaatactggtttatcaggcgctggaaagaagagcatacgtttaaatcggggtcggtctgtcacgttctgaatcctgatatcaatcaggaggtctacggcatgccggaatatatggccgcactgctggccgccagcctggcccactctgccgacatgttccgcaagctgtattacgacaacggatctcacgccggatgcattgtctatattggcgccggacaggttgacgataaaagcatgaaggcagtcaaggagacgctgaccggcgcgcgcggtaagggggcatttaaaaacctgctgctgcatgcgccaggcggtggcaaagacggcgtgcaaatcctccctttccagcagatcacggcaaaagatgagtttattaatatcaagaatgccacccgggacgacatactcgcggcgcaccgtataccgccgcagctgatgggcgccatgccagagggaaacggatctttcggggatatcgagaaggctgcgcgggtctacgccatcaacgagctgacgcccgtcatggaagcgctgaaggtggttaatgagtgggcgggcgaagaagtgatccgctttaatccttacgcgctcctgtctgatatcaaataa

SEQ ID NO: 255970 - DNA, 2601 bp, Klebsiella pneumoniae
atgacagagattgcttactcatggaacgccgaacggcaggccattaaccccaacgacgccgaagatccagtaattgagtatctcaccccaaaaggcgagcgtaaggcgctcgcctatagcgatcttgttgacgtcgtttatcgggcgccaatgcgccctcgtgaaggcgaggcgcgcaaatcattcgatcgcgcaaagcacgctcgttaccttcgccgacgcgtgcaggcgctaccggcgtttatccgtaagcgcttttcccagcgcctggagtcactggagcgccaggatccaaagcaggctgtgcgctggttattcagtacgtttgagcgtcatgtactacgccgcgttgatgcggtaaatacgcaatacctgccacaaagcaacctaccggcaatcctgtttccgcttcgcgatgattttcatttgctgccctgggcagacaaaaagcgcctgaaacgactggcctataagctcgccaacctgatgaaaagcgagtttatgcgcgagtttgatttccagcacgataaaaccgccgatgtagagttttccactatctacgcgtatggcgcaattgccagcaaggcgacggctctcaatattgcgatcccgggctgggggcaatattgcgacgaaacgctgagtgctgatgatgcgttgcgcttttttgcaaggcttcaaaaggaaaagtggtggctgggtaaactccgcaaaatccatgaccgctggcgcgagcacctcatgatcgccacgacttacgtcagtaaagtgtcatcaccttactgctctgaaccctgtctcagagagtggacggctcaaaagaaggccaactttgaataccttcaggcgatggaactggaagaccaggacactggcgagcgtatctccttgctcgataaggtcatgggcagcgtttccaacccgaagaccgcccgtcatgaattgatggtgcgtatgcgtggctttgaggatatggctaacgagatgggactggttggcatgttctacacgttgaccgcaccgtcacgttatcacgctacgcatgtgcattccggcaagcgcaacgataaatactgcaatgcaagcccacgcaaaactcaaaagtacctttgcaacgtctggtcacgtgtacgcgccaaatggggaagggaaggcatccgcacatttggttttcgtgtcgctgaaccgcatcacgacggaacgccacactggcacctgctgttatttctccgacctgaagaggtagagcttgccactgatattttccacgagtacgccctccaggaagatggaagcgagccaggcgcagctgaatatcgttttactgccaaaccaattgatcaagagtttggatcggcaacgggatacatcgcgaagtacatctctaaaaatatcgacggctatggcatggatggcgagtttgatcacgaatcaggcaagcccgttaaagagatggcaatgcgcgtgcgggcttgggcttcacgctggagtattcgccagtttcagcagattggcggcgcgcctgtatctacctggcgggagctgcggcggctggggagtcgtgagcttgtcttacacccggaacttgaagctgcccgcgctgcggctgatgcgcccgactggccgggatatgtcaacgcccagggcggcccgtttgtaacccgtgattgcctgcgtgtgcgcctcaattatgaatacaccgaaaacggcaatgattatggtgacacggtcgccaaaatcaccggcgtttattgtccttttacgatcagtgaatcggtcatttatacccgcaccaacgattacaaaattgtaccgaagcgcaagccgtcgccggtcgagaatttgaccttagaaggccgcgacgcggcccctcggagttctgtcaataactgtacggggcgctccgcttcggatgaaaaaccaccgtcagaaacggcagtgccagctgataaaaccgcgcctgacaacagttcggtgacagaacttccgctgaatatcgaagatttaaggcgatattcacgccagcaaaggcaggagatcaccagcaggctaagaaaatccgcccgggaaagctcagatcaagccttcacgcgtaccgcgcgcgacctgcgcacgtctattgatgatgaaaccgcgctgacatggggaccaaaagtcaccgcaacgaaagatatgagcctgacgccggaagaagcagaccagcgctggcgcgaacagctgcgcatcgaggccgagcggcgcgcgaacaattacgccgctgcggctgcggaataccagaagaaaaaggccgaggccgcactgcgccaggctcagcaaaaagaagcgacgcaaaagcacggcacctccgaagaaatgatcgccagcatcggcgcgcagctgcgcgactgccgaattttcgtcagtgatgaagttgtgcggtcaatcaccgacggtgcccgcgttcgccacggtggcgggatgctggcggctgaaaacggccggttgcgtgaggtgagggtgtggcacgctggcgagaaagataaaccaacttccgaatatgtggcagtgcgtgacctggtcacgcgctggcggaaagcagctaaacggaaaaacaagaggtaa

SEQ ID NO: 255971 - DNA, 285 bp, Klebsiella pneumoniae
atgcttgacggcagagtcctgggtaactaccccttgtcctctgcggatagcacaaaccttgcctgcaacattcctaaattcaacgccaagtaccctgagttaaccaaaaacgttattgaggctgactattcaaaaggcttaagcgaagaggctttaaacctcctgataaaagaaagccgttgcgcggtacttaagggagcaatagagaaagtcgcccctccatcagtgcaggaatgggcagcaaagcccgccatgcctaagcaattttctctggaggggatatga

SEQ ID NO: 255972 - DNA, 150 bp, Klebsiella pneumoniae; identical to SEQ ID NO: 200508

SEQ ID NO: 255973 - DNA, 1017 bp, Klebsiella pneumoniae
gtggttgcttattacaacgaaatagacccctacgcagcccaatggctacgcaaccttatcgacgccggccatattgcgcctggcgtcgttgatacccgctcaattgaggatgtcaccccaaatgaccttaaaggattcacacagtgccatttcttcgccggaatcggcggctggtcgctcgcactgcgtcgggcaggctggccggatagccgcccggcatggtcagcatcatgcccatgccagcctttcagcgcggcaggcaaaaaaggcgggtttgctgacgagcggcacctatggccctccgcacattggcttattggtcaacgccgtcctgtcgtggtctttggcgagcaatctggaagtgctgacgcgaacgactggatcgaccttgtacaagctgacatggaagggttgggctatgccttcggggcgactgcgtttccgtctgcgagtgtcggcgcgccgcactggcgcgatcgcacttactggctggccgacgccaaccgcgaacgcctggaagcaaccctcgaatgctggccgacagggatcgcccaacttgcaaacagtagccgcattggctggttggccgaccccgaccgctacggacgggaagggcggctatcaggggggcagggtgcggaacgggaaactgtcaacggacaggctggacgtgacagcgcagcttgcagggtggccgacgccaacaacgagcaacgaccgttcaccatgtccgcaagaggctatgaggacgtatcgcgacaatggaacaaaaattcagaagcggttgcaggatgtggcggcgctatgcagcccggcccggttaacggtttttggcgagatgctgattggctttacagcagagatggaaagtggaggccagttagacccggatcattcccgctggctaatggggttcccggaagagtgggaaaaatccgcgcctacggaaacgccatcaacattgaagcggctacagcattcataaaaacctacatgatggcggtggattgtgactga

SEQ ID NO: 255974 - DNA, 156 bp, Klebsiella pneumoniae
atgaacaaagaaatcaattctcgccggttctggcgaaacctcgtgatctgctgcgtgctgtgctcgctgctgttctggttaccgatgggttatatcgctttccgtgtcggggcggtggtgtgggaggcgcagtggttgcttattacaacgaaatag

SEQ ID NO: 255975 - DNA, 270 bp, Klebsiella pneumoniae
atgaatgagcctgtctggttagctgtagatcccgccgatgaatcaggggatcgcaccacagtgacggcgctggtttaccgcataaccggttgtcagcaataccacacctgcaccctgattgatttcagggcgttcatccttgatgcgggtgtgccgctctctaagtcatgcgtatccggcataggtcacgatgatcagcatatcaggaggggcgggcttgtacgcctgcaactcccttcagaaaggcttaaggaggagttgccatcctga

SEQ ID NO: 255976 - DNA, 225 bp, Klebsiella pneumoniae
atgtcggttacgtcgataaagctggaaagcggaataagcgatccagagttcatgggaataagcaccaccgcgcgcaaaggcgagcgcgcccacttactcggattgctgcgcatccgcatgggtctgctgaaagagcaatgccttactcccgaagagatttattcagcacttgagcagtggattgccaaccacgaaacaatcaccagcgagggaagtaaacaatga

SEQ ID NO: 255977 - DNA, 273 bp, Klebsiella pneumoniae
atgttcaccgaagagaaaacgtcatgggaacaggagatgctgatccgcgaggcgatagaaaacgctgagcagggtttcactgtccacctgagaaatggtgcgcgtattacagtcagttctaacagcccgtcgattgatataattatttacggtctggagaaagcaattcgcggtaatcatgagcgcgcccgaatgacctttattgattatctgtatttttggcatgaaaggttattcaagctggctaaaagaaaaccgcgccccaaccactaa

SEQ ID NO: 255978 - DNA, 387 bp, Klebsiella pneumoniae
atgaaactcgaatacgcagacaaaataaactcgcttttacaatgcttccatttcaataaagagtttctggaatggaatcacgaatattctattcagcttttacgccacggcgtttcccacctttatcactttgctatgcttcagggcgagaatgatgaggccacgctggaagagctgcgcaatatcatcatttcgatcaccaatggtgatatcccgcagccatacgatctgttgtcaatggacgccgagcaaccggagacgacaaacaagaccgtgacgtttttaaagccgctggcggtaacggtggaacttacaccagacatgcttcacagcctgaaacggtccgccgctgtaccagtacagatgaagcgcccaagcctctattaa

SEQ ID NO: 255979 - DNA, 219 bp, Klebsiella pneumoniae
atgaagagtggggttggtaagggggtgttgcagttgaatagcaaaaccagtctttactgtggctttactattctgaaactcccacgcaaaaaaccgtacaaccgccagcgctatcaaattacgcacacaggccattattacggcattgactttgctttatcagaagcatgccgaacgattgacagaattatgagtaaaaagcgttttattgctttttaa

SEQ ID NO: 255980 - DNA, 216 bp, Klebsiella pneumoniae
atgtctagtaatgaagttcgtaaggatccctatgttatcgccaaacaatatggttacgtcgaaggcgaatctggtatggcttttattggctttggcttcccgcaaaaagtctccattccatccaccgaccgtttctttgttgggctcgccttggatgagatcgaagagttggccgccattctgcaagatcacgtcaacagaaatcgtggcaagtaa

SEQ ID NO: 255981 - DNA, 786 bp, Klebsiella pneumoniae
atgttttcagcgatctatcgctatcgtggttttatcattgacagcgttaaacgagacttccagtctcgttatcaaacgagttttttgggggccgcatggctgattttacagcctgttgccatgatttccgtctatacgctgatcttttcggagctgatgagggcacgtttggccggtatggatggcccctttgcttacagcatctatctctgttcgggagtattgacgtggggattgtttaccgaaacgcttaacaatctcgtcaacgtttttttgtcaaatgccaatattctcaaaaaactcagctttccgcgcatctgtttgccaattattatcactgcttctgcatttattaactttttgatcatatttggcctgtttgtactgtttctgcttattaccggtaattttccgggctggatctttttcgaaattattccggtgttgatgatacagatgctgtttactttgggcctgggcattatcctcggggtattgaatgtttttgtccgtgacgttgggcaatttgttaacattctgctccagttttggttctggttcactcccattgtttatgtctctaaaactttaccagagtgggtttcgggactgctggcgtataacccaatggcaacaattataacgtcttaccagaatgtgatgttgtaccatcaaagccctaactggatggctttgctaccggtaaccatactatcccttattctgttcttatttgcctggcgcctgtttaagaaacactcagctgatattgtggacgagatttga

SEQ ID NO: 255982 - DNA, 525 bp, Klebsiella pneumoniae
atggccggcgcgcggaaaaaccacgcacagcgggttcgtgccgaagcggctatctttgccgcggaacggggcgaccatcacgttgccaaccacgtttacgaaatggatagagatcattccggcggcggcgcactgttccgcccagtagccgatgcggccaatatgatgcgcattgcgcagcgccacggcggccataccgtgctgtttcgccttctcaataccgatctgcatggcttcatgggccacgacctggccgaagccgccgttgccgtccagcgtgacaaccgcccccgcgtccttcatcacgctggcgtggcggttgagctgcagatagccctgcgcgtgggatcgtacgtagctcgggatcatgcctacgccatgggagtcatgtccggccaggttggcggcaaccagatggtcggcgataagcgacgcttcggtgggggagcttcccatatgggcgaaaagggttttaacaaaatgatgcagatccgtggcctggaagcgatgtcctgtttgcactga

SEQ ID NO: 255983 - DNA, 807 bp, Klebsiella pneumoniae
ttgcactctgtattaaggatgccaaccgatgggaaaatgaagcgcatgcgtaaaggtaaaattattgttttaattttgatggtgttttgtattcttatttttgcaattgttgtcgcctggtttttactgtccaaagacaattatgccgtaccggaaaatgcggcgacagaaaatgcggtgctgcaggtggcgggtttaaccggcaacgaaccgcgcgatctgcaggcgctgaaatcgctctatgcaaaacgggtgatcgtccgtcaggttaatctggatagcggccagtttgttgcgccgggagaggataccgctgggcaaaaaggctgcggtgaaccggcagtagcgcagaacccgacgcccattcgccagcgctgcccgcgggcagtggtttatcttattcgcaataatgataatgaaattcagcaggttatactgcctttttacggtaaaggggcaaaatcgatgatgtatggcctgatcgcgctggctaccgatggtcgcacggtaaaagacctgctgtattatcagcaaaatgagacgccgctgctgggcgcgcgcgtgacagatcctgaatggcgtcgccaatggccgggcaaaaaaatacgcgataataacggccagccggcgctgaaggtcgtgcaaaatactcctggccagcacgatgattacaccgtagatggtatcagcggcgcgacgttaacctccgtcggcgtcgagaagagtattaattattgggtgggtgagcagggctacggcaattttctccggcagctacagcataaccctgagatattacgccgttaa

SEQ ID NO: 255984 - DNA, 1941 bp, Klebsiella pneumoniae
atgaccggccctcgttccttcctgctgctgatgctgttgagcctgttgtttggcagcgcgtgcgcgatggcgcagacccagtatgcgccttatatcgaagatatcgagcaacgtcttgataaaacggcagaactttatcagcagcaaaaaaataccgacgcgcggcgcgaagtgcaaatggcctactttgaagtgtttgaaaaccttgaagggccaattcggatcaatatctcggcgcgtaagagctacgagatggagagcactttcggtgagatccgccgcatgattggtgaaggcaaaccgatcggcgaggtgcaggcacgtatcgacgggctgaagcaggcgctgcgtgaagttgagccggtgctggacggcgggcatcggctggtggcggaagagcagcataccgcgcttacgcgcgatgacattgcgcagcactggcaggagagcttccgcacccttgacgacaggctggcgcaggcggtaacggagtatcaggccggcaactacgcgcaggccagccagcaggtgcagcaggcgcagtatcagggatttaaaaactccggaatggaaacctcggtgcggcaaaatcgctcggcgaaggaagcggccgccattaaccaacagtttagcgcgctgctgactctgaccgcccagcctgaccgcctgaacgaggtgtcgtatcaggtcaccacgctattacaggatctggaagatattctgccgggtctgccaaccacccgcgacgatcggccgatgggcgctccctctggtgccgataacgccgcgctggctgatgaaacgaccgcccgcgcggactgggcaagcgtcgcccaggggattaaccagagcatcaacgccgcgctaacgcgctatcaaaatggggaagggcaggaggcgatcctcgacgtacaggacacctatttcgaccgctttgaagccaccgggatggagaacaaaatcggttctcgcgatgcggcctttaaaacttctctggaggcccattttacccgtatggtcagcctgatgaaggccggacagccgcaggagaggctggccgcggaagccgccgcccttgaggcggatctgcaaaaagcggtcaccatgcttggcgaaggcgaagagacccagtggagcctgctgctctatagcctgatgatcatcgtgcgcgaagggctggaagcgctgctgattgtggcggctatcgtcgcgtatctggttaaaaacaaccatcacgacaaactaccgctgatccgccagtcggtgatggtggcgctggtcgccagcgtggcgacggcgtttatcttccagctgctgtttactcaatccggcgccagccgcgagctgctggaggggatcactatgctgattgcggtagtgatgctgttccttatgagctactggctactgtccaaagttgaagcccgccactggaaggcctggcttgagggcaaactctcccattcgctgtcgcgcggttcgctggtgggactgtggttaaccagcttccttgcggtctaccgcgagggggccgaaacggtgctgttctattacgccctgattggcgatgcccaggggctgccgggccatcttgccatcggcgccgggtttgttatcggctgtgtcgttctgctgatcgcctggctcgtcatgcgctactcggtggtccggctaccgctcaaacccttcttcctgttcaccggcggttttatgtacctgatggcgtttgtcttcgccggaaaaggggtactggaactggtggagggcaaactatttcagccaacgctgatcgccggaataccggaaatcagctggctgggaatttacccctatgtggaaacgctattgccgcagggcatattgctgctcgcggcgctggcggcgctatggatcatgcgccgtcgtcaggcacccgctgaaaccataaaaacgcattgctaa

SEQ ID NO: 255985 - DNA, 1380 bp, Klebsiella pneumoniae
atgagctattttttcgtcacgacgctacaggcctttttctgcattgcgctgctttccgccgtactctgggggcgcggcgcgcctcccgtcctgcgtccgctggtctggacgctgcttaccgcgctgggctgcggactactggccgggctgtatattcgcccgagccagacgctggagcttctgctggtcggcgctgaaatcctcgtatcgctgctgtttttactgagcttcagctggtcttcgccgcgcgttcgctatctgtggcaatggctcctcactttcggcgcagcccggcactgggcgctggacccgaacctgggcggattgacctccacgcacgttctgaacaccgatctgctgctgaatatcaccgcgctggctgcggcgttcgcgctgctgtgccttgcctgcgcgctctgcgccatgctgctgcgcagaatgcgcggcttctactggccgctggccctgctgctgttggtcctgctgtggctaccgctcggcggtaacctgctgctgctgttgatgaagctacaggtgctaccgctgctgaaaccgctgctgagctttgtcgccagggtgaccaacaacgcggcgatgtataactgggccgccgccgcgatactgctactgctgtgtctgtgctggatcccggcgctacgccgctattattgggcggttaaagccgcggaggaccccatctcccgccgccttgcgctggccgaacgccgtaaagccagccgtttgtggttgaccaccgtttgctgcgcgctggcgattatcggcggccagctatggtggaatctggtggcttcgcagccgccgcgcttgtccgaggcgcaggcggttacgctggccgccgacggccaggtgcatattccggtcgagcaggttcgagatggcaaactgcatcgcttcgtctgggtggcggacgacggcaaagcgattcgcttttttatcattaaccgctatcccgataagctgcgctttggcgtggtgtttgacgcctgcctgctgtgcggcgatcagggctacgttatggaaggcaatcaggtgatttgtgtcgcctgcggtgtgcacatttttatcccctcgattggcaagcccggcggctgtaacccggtgccgatcgacggctggcgcaacgatgacaaacagctgacgatacccggcgcggcgctggccggcggaggtaactatttctctaccgtcctgacgattaacgtcaccgacccggtggatggctccaccctgaccaacacccgcgccgactacaaatacagctatggcggtaaaacctggttcttctcctctgaagccaactatgaccgtttccgcaatgcgccagagcagtttgtgcccgacgcggtgaaggaggagtaa

SEQ ID NO: 255986 - DNA, 1086 bp, Klebsiella pneumoniae
  misc_feature (1035)..(1044): n is a, c, g, or t
atgctgtggcgaatgatctaccagtcgtgggggcgcaacctgcggcgcaaagcgctggcggtattgaccgtgtttctggcgaccagcctgatctcggcgctgctggcggtctctatcgatatcggcgacaaaatgtcccgcgagctgaaatcctacggcgccaatattttaattgagcccgccgggcaggcggcgctgcccgctctgttcagcgagcaaagcaacccgctggccagcgacgactttcttgatgaatccgagctgccgaacatcaaagatattttctggcgcaataacatcgttggctttgccccgatgctcggcggcgaggtaaacgtggcaggacaggatattcgcgtgctgggcactttttttagccagccggtcagtatcccggatgaagaggggtacgagaccggacagcggacggtcagccccttctggcaggtgaccggcgcatggccgcaggagccggtcggcgagacgccgcaaacgctggtcggtcacgcgctggcgcgaaactacggctggcagcccggcgatcgcctggtcctcaacgttgcggatagggtgctgaacgtccaggtgagcggtattttgtccagcggcggcgatgaggataaccaactggtgatgccgcttagcgtcgtgcagcagctgctcggtctaccgggaaaagtgcaggcgatccgcgtctcggcgctgacggtaccggagaacgagctgtcgcgccgtgcccgtgaggatctcgaggcgctgaatgccgaagagtacgatctctggtactgcaccgcctacgtatcgtccatcgcccaccagctggaagaggccatttccggcgccgaggtgcgtccggtctggcaggttgctgcttcggaaggtgtggttatcgacaaaattcagctgctgatgggggtggtgactctggccgcgctggctgcggcggcgatgggcatcgcctcgttgatgaccagtacgattatggagcgcgccaaagagattggtctcatgaaagcgctgggcgcccgccattgnnnnnnnnnngggcgcccgccagtggcaaatattgctgctgttttaccttga

SEQ ID NO: 255987 - DNA, 1131 bp, Klebsiella pneumoniae
atggccgctaagcgcgacatgctgtggctgctggtgtggcgagcgctgcggctgagaatgcagcgggtcagcgtggtgtttgccgcgctggcggtaggggcgaccatcgtgaccgcactctccgccgtgtggttcgatatcaatagcaaaatgagcgaagagctgcgcaccttcggcgccaatttttatattggtccgggccacggcgccagcatgccgcagccggagcttcaggccattcttgatggcgcgccggcgggcctgattcacggcgccagtccgtggctgtacggtacggcgcgtactgagctggagaaagtagtgatggtcggggtgtggtttgagtcgctgcaaaagctggtgccttactggcaggtcaacggcagctggatcggcgtcagctttgacgatcgcaacgcgatgattggcgtcaaactggcgcagcgcctggcactgaatgttggcgatagcgtgacgctggtagaccatagccggcgtaagacgctgctgattaaaggcatcgtagaggcgggggacgcgaccgacaatatgctgatcgtcagcctcgatgtggcgcagtcctggctgcaaaagcccggcgcgatcagtcacgggctgcttagcgtcagcaatgacctgggccaggtggagcgctatgccagccagctgcagcatcagtacccgaaccttgagattcgtccggtgcgcaaagtgtcggcttccgaggggcaggtgctggataaaattaaggggctgatggggctggtgtcgatggtgatcctcgcgctgtcgtccctgtgcgttaacaccaccctgatggcgattgtcggtgagcgggcgaaagagtttgcgctgcaaaaagcgctgggcgccagcaacggcgatattacccgccagatgctgctggagaccagcattattaccctcgcggcggtggtctgcggctgggtggtgggctatctgctggcgcagctgctgggattaacggtgtttaacgccagcatctcgctgcgtctgccggtgctgccgctgaccctgattctgtctttactggtcgccctgctggcggccattgttccggtgcggcgcgcggtgagcgtcgaaccggcgaaagtgctgaaaggagagtaa

SEQ ID NO: 255988 - DNA, 486 bp, Klebsiella pneumoniae; identical to SEQ ID NO: 174499

SEQ ID NO: 255989 - DNA, 1089 bp, Klebsiella pneumoniae
atgtgtatgaaaattagtggcttagtgatttcactgacggccatattctccggtcaggcctttgctgcgctccctcagggctatccggcggattatcaaaaggtcgtggatgcggggattaaagaaggcaaggtggtgatttactcaaccacggatactaaggccgcaggtccgttaattaaaggttttgaagcgcaatatcccggcattaaagttgaatataacgatatgaacagtaccgaattgtacaaccgttatatcagcgagcaggcagcgggcggcggaagcggcgatgtggtctggagctcttcaatggatacggcgctgaagcttgccaccgattatgcggaacagtatgcctccccggaacaagataagctgccgaaatgggcggtctggcagcaaaaagcctacggcaccacctatgaaccggtggtctttatctataataagcgcctgatcccgcaaggggatgttcctgattcgcacaccgcgctggcgaagctgatcgccagtcaggctgataagttcaagggcaaggtcactacctacgatattgaaaaatcgggcctgggttttatgctggcggttcaggacagtaaagccgatgctcactactttgacgacctggcgggaatggcgaaaggcgggctgaccgtgcaatcgtccaccgggacgatgatggagcgcgtctcctccggggaaaacctgattggctacaacatcctcggttcatacgcggaagcgcgggcgaaaaacgacccttcgctgggtatctcgtacccgaaagattatgtgctggtgctctcgcgggtctcgtttattaccgcagaagccgagcatctgaatgcggcgaagctgtggtttgattacgtgctctcggaaaaggggcaaagcatcctggcgaaccaggccgatattccctccctgcgcaatgatatcgaaggtaaaaatgatatcgacggtatgaccaaaatgctcggcagcgcgctgaagcccattccggtcgatgaaacgctgctggcgtatcttgagccgaaacaacgcctggaatttatcaaacagtggcgcaccgccgcggcgaaataa

SEQ ID NO: 255990 - DNA, 327 bp, Klebsiella pneumoniae
atggcgcgcagcaaattcggctgctgccagatgttgcggaacgtcgccagcgagagttcatcccacagcggaacgccaaccccccagttcgaaataaaggcccgcagcgcaacgccgatcagcggtacgccgatggtaaccgtcaaccaggccaccacgacgataccggcgacccagcgccatttccccagcggcagcgcccgggcctgcgatgctttccccttcatggtgacaaagcggttggcggtacgcatcaggcggcgctggagcatcaccagcggaatggtgatgcagatcagcaccaccgccaccgctgccatcagatga

SEQ ID NO: 255991 - DNA, 795 bp, Klebsiella pneumoniae
atggctatttctatcaagacatctgaagacatcgaaaaaatgcgcgttgccggccgcctggccgctgaagtgctggaaatgatcgagccctacgtgaaaccgggcgtcagcaccggcgaactggaccgcatctgcaacgattacatcgttaacgagcaaaaagccgtttctgcctgcctgggctatcacggttttcccaaatccgtctgcatctctattaatgaagtggtgtgccacgggatcccggacgacggcaagctgctgaaagatggcgatatcgtcaacattgacgtcaccgtcattaaagatgatttccacggcgatacgtcaaagatgtttatcgtcggcaagccgactattcttggcgagcgcctgtgccgcattacccaggaaagcctctatctggccctcaaaatggtcaaaccgggaatcaatctgcgcactatcggcgcagctattcagaaatacgttgaagccgaaggtttctccgtggtgcgcgagtattgcggacacggtatcggccgcggttttcatgaagagccgcaggtgttgcactacgattctccggaaaccaacgtggtgctcaagccaggcatgacctttaccattgagccgatggtcaacgccggcaaaaaagagatccgcagcatgaaagacggctggacggtaaaaaccaaagaccggagcttgtctgcacagtatgagcatactattgtggtgacagacaacggctgtgaaatactgacgttacgcaaggatgacaccatcccggcgataatctcgcacaacgattga

SEQ ID NO: 255992 - DNA, 2664 bp, Klebsiella pneumoniae
atgagcaactctttatctgatactgtctccccttccctggccggacagcccgctaatccgggccgctggccgcagagtgatttcaactgcgcggctatcaagacgcatatcgacgctttccagcgctggctgggcgaggcttttgaccagggcatcgtcgcagagaagttgattgaggcgcggaccgaatttatcgatcagctgctccagcggctgtggattgagtacggtttcgggtcaattaacgacatcgcgctggtcgccgtcggcggttacggtcgcggcgaactccacccgctgtcagatatcgatctgcttatcctgagtcgtaaaaagctgcccgatgagcaggctcagaaggtcggcgagctgctaacgctgctgtgggatattaaactggaagtcggccacagcgtgcgcaccctcgaagagtgcctgcttgaggggctatcagacctcagcgtcgccaccaacttgatcgaatcgcgtctgcttataggcgacgtcgcgctgttccttgaactgcaaaagcacatcttcagcgacggcttctggccatcggaaaaattctttgcggcaaaagttgaagaacagaatgtccgccatcagcgctatcacggaaccagctataacctggagccggatgtgaaaagcagccccggcggcctgcgcgatattcatactctgcagtggatcgcgcgccgccatttcggcgccacctcgcttgatgaaatggtcggtttcggcttcctgaccgaagccgagcgcaacgagcttaatgaatgcctgcatcagctgtggcggattcgttttgcgcttcatcttgagctcaaccgctacgataaccgcctgctgttcgacaggcaattcagcgtcgcccgtcgcctgcgctatgaaggcgaaggcaaccagccgatcgaacatatgatgaaggatttcttccgcgtcactcgtcgggtcagcgagctgaaccaaatgctgatccagctgtttgaagaagcgattctggcgctcaccgaagatgagaaaccgcggccgattgatgatgattttcaactgcgcggcacgcttatcgatctgcgcgacgacacgctgtttatccgcgaaccgcaggcgattctgcgcatgttctttatgatggtgcgcaacagcagcatcaccggtatctactccactacgcttcgccatctgcgccacgcccggcgccatctgacgcaaccgctttgctatattcccgaagcgcggaccctgttcctcagtatgctgcgccatcagggcgcggttagccggggactgctgccgatgcaccgccatagcgtgctgtgggcctatatgccgcaatggtcgcatattgttggtcagatgcagtttgacctgtttcacgcctataccgtcgatgaacacactatccgcgtactgctcaagctggagagcttcgccaaagaagagatccgcagccgtcacccgctgtgcgttgagctgtggccgcgcctgacgcatccggagctgatctttatcgccgccctcttccacgatatcgccaaagggcgcggcggcgaccattcaattctcggcgcgcaggatgtgttgaaattcgccgagctccacggtcttaactctcgcgaaacccagctggtcgcctggctggtgcgccatcatctgctgatgtcggtcaccgcccagcgccgtgatatccaggatccggaagtgatcaagcagtttgccgaagaggtacagacggagaatcgtctgcactatctggtctgcctgaccgttgccgatatctgcgccaccaacgaaaacctgtggaatagctggaagcaaagcctgctgcgcgagctctatttcgccaccgaaaagcagctgcgccggggaatgcaaaatacgccggatatgcgcgagcgggtgcgtcaccaccagctacaggcgctggcgctgctgcgaatggaaaatattaatgaacaggcgctgcatcaaatatggaaccgctgccgcgcgaactacttcgtgcgccatacgccaaaccagctcgcctggcatgcgcgcaatctgctgcagcacgatctcagtaagccgatgatcctgctcagttcccacgcctcgcgcggcggcaccgagatttttatctggagtccggaccgcccttatctctttgccgccgtttgcggcgagctggatcgacgtaatcttagcgttcacgatgcgcagatctttactacccgcgacggtatggcgatggatacctttattgttcttgagccggacggaagtccgctttccgccgacaggcacgaaatgatccgcgtgggcctggaacagaccatcacccagcgcagctggcagccgccggctccccgccgtcaggcggcaaaactgaggcatttctccgtcccaacggaggttaatttcctgccgacgcataccgaccgcaaatcttttctggaactgattgctctcgatcagccgggtctgttagcgcgcgttggccaggtgtttgccgacctcggaatttcgctccacggcgcgcgaattacgacaattggtgagcgagtagaagatttatttataatcgccaccgcagaccggcgtgcccttaataatgagctacagcaagaagtgcaacaacggttgacagaggccctcaatccaaacgataaagggtaa

SEQ ID NO: 255993 - DNA, 249 bp, Klebsiella pneumoniae
  misc_feature (212)..(221): n is a, c, g, or t
atgcagcaattacagaacgttattgagtccgcctttgagcgtcgcgccgacatcacgccggcaaacgtggataccgtaacccgcgaagcggttaaccaggtgatttctctgcttgattccggcgcgctgcgtgtcgctgaaaaagtcgacggccagtgggtcacccatcaatggctgaagaaagcggttctgctctctttccgtattaacannnnnnnnnnaagcggttctgctctctttccgtattaa

SEQ ID NO: 255994 - DNA, 564 bp, Klebsiella pneumoniae
atgaaattcgcggattatgatgaagcgcgcttccagaaagaaggcttccgcgtcgttccgccagcggccgttcgccagggagcgtttatcgctcgcaacacggttctgatgccgtcctatgtgaacatcggcgcgtacgttgacgaaggtaccatggttgatacctgggcgaccgtcggctcctgcgcgcagatcggtaaaaacgtgcacctgtccggcggcgtcggcatcggcggcgtgctggagccgctgcaggctaaccctactattatcgaagataactgctttatcggtgcgcgttctgaagtggttgaaggcgtgatcgttgaagagggttccgtgatctccatgggcgtctatctcggccagagcaccaaaatctacgatcgcgaaaccggtgaagtgttctacggccgcgtgccagcaggctccgttgtcgtctccggcaacctgccgtcgaaagatggcaagtacagcctgtactgcgcggtcatcgtgaagaaagttgatgccaaaacccgcggcaaagtcggaatcaacgaacttctgcgtactatcgactaa

SEQ ID NO: 255995 - DNA, 390 bp, Klebsiella pneumoniae
atgtacgataatctgaaaagtcttggtattaccaatcctgatgaaatcgatcgctatagcctgcggcaggaagccaataacgatattctgaaaatctactttcagaaggataaaggcgagttcttcgccaagagcgtcaagtttaaatatccgcgtcagcgcaaaaccgtggtcgccgacggcgtgggccagggctataaagaagttcaggagattagccctaatctacgctatatcatcgacgagctggatcaaatctgtcagcgcgatcgtaccgaaatcgatctgaaacgtaagatcctggacgacctgcgtcacctggaaagcgttgtcacgaataagatcagcgaaattgaatccgatctggaaaaactgacgcgaaataaataa

SEQ ID NO: 255996 - DNA, 2979 bp, Klebsiella pneumoniae
atgacactggaaattgaacaaacatgttatactctgcaatctgcgccctggctggatcgcgcagattttcaaaaaggacgcaagcacgatcgtcagcctctgggctttattctgcccgccaatacggtgctgcaaatccgccagccggatattagtaacggtaatgcgatcctacgcctgctgtgcgatgataccgcggtagagagcacctgcacgctggccacaggctggaaaacagtcagcgcagccgtcgataccgtcccttttgtcgatactctgtttactgaccagccctgcgagttcactatcgtctatcagcaacctgcggcaactaaacccctaccgagctggaaagcgggccaatccgaggatgaatttttcttcagttgggagaaaaataaatcgtcattcgcgctgcttgatttggatgttattaccctgctgctgccctatgccgaccgcgataatgcgatgaaagcgggcttaccggcactgcaccgtttttatacccacattttcaaatgttataacgagtgggctggtctaagcgataatccggatgcgccgtggaaccaggatgttgccaaccgctactttgtacgagctgataaacatggcgtcggcctggcttattatggttcagggtggtgcgcacaaaactccgcaaccattggcgaaggctggctggataacgtcgccacgcagtgggtaatcctgcatgagattggccacggttatcagggtaaatttatgcaggacaccactctgcccgttagtgaggtgtggaataatatttacgcctcgttctaccagcagctcacgctgaaccaggataatcatctctatgttgatggctggctttataactatggccagcaggccgtgcaagaagtccagctaatgaactatattaacgaccagacgccggtagccagctggggcctgcgcccgcgtctgcaatttttgatgctgatgctgctcaaagcgggaaccaaagcatttagcgccttcaaccaaaactatcgtgaactggccaatggggataacttctggccgtccgatcatcagcttgttgatatgctggcgaccgccattgctaccgccactgggtatgatgtgactccatttatcgagctaggcggcttaacgctggaaaatgctacccgaaaaaatatcgccgcgatgggcgcaaaaccgctctatccgctatatcttttacttccgcaaagcgaatgggatagcgcgcggcggcagctgggcctggattccttcgtctggctggtggataacagcgaactggcatcattaggcaaaacgggcacgctttccctaacgctcaatatcgaccagccggatcaaatctacggtcggacgctgactatcaaggataattgcggcacgcgttattccctgcttgtcgatgatgacaccttgcttctgaatgacattcccattggcatttatcagatcgatccaccgaagggccgttcacaaaaatatcgtccggacatcagctatcttattgtaaaagaaggtgccaatgccgctaccgtcaactatacccggctaagcgacaccagcgcgcacaacgtgagaatggactttttaggtcttagcgataagctatttgcctgtcttgatatcgattacgaaaatcagcaacttattttagacgttatcagcactacgccgcatagctactatcctgatacgctgtatgctagcgtaagcgttctttccgcgagcggtgaaaagatttttgagcgcaaaatgaacggcacgaactgcgccaccggtaaggagattgttcccttcggccctcactatcacttatatattactcacgtcgagccgggacgactgaaagcctcgccgggatatttaacgctgctctcaagtggaaaattccagctgatgcgcattgatgataatgggctttatagctttatcctcgacaataatccggcagaagacttacagactattttcgaacacaatgctctggcgatacgtagcaagccatggctgttagcacaggaagagagcgtaagtaaaaacgatctctggctgctgctctctcgtatggaagagcctcagcgcagcaaattgctcaaagagtatgccgacgtcctgccccaggataatagcgaaccgggcgaactgacgggcaaaagcgttaccctcaatctcagagggcaaggcaataaagatttctgccagatcgttatcgataatcagcagcacgcaatgacggtcgccacgcgtaccggcgcgccgcacccgtattatgtttcccatacctatgccagcattacggtaaccggagcagacgaaacggtggtttatcaccgcagctatgccggagcgaccaacagcctggcaaacagcgagactatcgcgctcgctgaaaacatgatcattgaggttttccatgatgagccattccgctccagcgcctgcaatgatacgactcatcgcgcagttacgctgaagcaacacaaccgctggcgggtagtgaaggatgggctgacgacctgttcgcttatacccgaagagcaggatgaggaaacccctgatgctgaggagggggcaacagagctttacggcgatctcttcacctggcaactgctcggcgaaaataatacccgtttcgcgacgatggagatggatattggcggcggcgcgctgacctttaccgccagccctggggtgccgaataagcaatttacgacgacctatgccacggtaaatgtctacaatacgcgcggctcggtggtttatcgccagtccattaaaggctcatcgcagcttggcgattatatagatacggcaatactcgatgagggctatatcgtcgaagtctttcatgccgaagccggagatcgctccgtcatcatcaatccgttaaatggtcattcctgggcacagcctaataccgtctcctggcaagtcacgacccgcggactgcagcgcctgtaa

SEQ ID NO: 255997 - DNA, 1158 bp, Klebsiella pneumoniae
atggctggctggcatcttgataccaaaatggcgcaggatatcgtggcgcgcacgatgcgcatcattgataccaatattaacgtgatggatgcccgagggcgcattatcggcagcggtgaccgcgagcgaattggtgaattgcacgaaggggcgctgctggtgctttctcagggacgggttgtcgacattgatgatgctgttgcccgccacctgcacggcgtgcgtcaggggatcaatctgccgctgcgtctggaaggggagatcgttggcgtaatcggtctgaccggagaaccggagtcgctgcgcaaatacggggaactggtttgtatgaccgccgagatgatgctggaacaatcgcggctgatgcatctcctggcccaggatagccgtttgcgtgaagagctggtcatgaacctgattcaggcggaagagaacacgccggcgctgactgagtgggcgcagcgtctggggatcgatctcaatcaaccgcgcgtcgtggcgatgattgaagtggatagcggccagctgggcgtcgatagcgcgatggcggaactgcagcagctgcaaaccgcgctgaccacgccggatcgtaataatctggtggccattgtctcgctgaccgagatggtggtgctgaagcccgcgctgaatgcctttgggcgctgggatgcagaagatcactgcaaacgcgttgagcagctaattagccggatgaaagagaacggtcagctgcgttttcgcgtggcgctgggcaatttctttaccgggccgggcagcattgctcgctcgtaccgcaccgcccgaaccacgatgatggtcggcaagcagcggatgcccgaaagccgtagctatttctaccaggatttgatgctgccggtcctgctggatagcctgcgcggtggctggcaggccaatgagctggcgcgcccgctggttcgcctgaaggcgatggataacaacggcctgctgcgccgtactttacaggcatggtttcgtcataacgtgcagccgttggcgacctccaaagcgctatttatccatcgtaatacgctggaatatcgcttgaaccgtatttctgaactgacggggctggatttaggaaattttgacgatcgtctgctgctgtatattgcgctccagctggatgagcagcgttaa

SEQ ID NO: 255998 - DNA, 1440 bp, Klebsiella pneumoniae
atgaaaaaaaccacgttagcaatgagtgccctggctctgagtttaggtctggcgttgtcccctctctctgcgagcgcggcggaaacagcttcttcggcaactaatgcgcagcagatgccaagcctggcgccgatgctggaaaaagtgatgccgtcggtcgtgagcattaacgttgaggggagcaccaccgttaatacgccgcggatgccgcgaaacttccagcagttctttggcgataattcaccattctgccaggatggttcaccgttccagagctctccgttctgtcagggcggcggacaaggcggcgcgccgggcggtaacggcggacagcagcagaaatttatggccctcggttccggggtcatcattgatgccgctaaaggctatgtcgtcaccaacaaccacgtcgtggataacgcgacaaccattaaagttcagctgagcgatggccgtaagttcgacgcgaaagtcgtcggcaaagacccgcgttctgatattgcgctgattcaaattcaggatccgaaaaacctgagcgcgattaaactggcggactctgacgctctgcgcgtcggcgattacaccgtagcgatcggtaacccgtttggtctgggcgaaaccgtgacctcggggatcgtctccgcgttaggtcgtagcggcctgaacgttgaaaactatgagaactttatccagaccgatgcggccattaaccgcggtaactccggcggcgcgttggttaacctgaacggcgagctgatcggtatcaacaccgcgattctggcgccggacggcggcaacattggtatcggcttcgctattccgagcaacatggtgaaaaacctgaccgatcagatggttaagtttggccaggtgaagcgcggtgagctgggtatcatgggtaccgagctgaattccgagctggcgaaagcgatgaaagttgatgcgcagcgcggcgcgttcgtcagccaggtcatgccaaactcggccgccgctaaggcgggcattaaagccggcgatgtgattaccacgctgaacggtaaatcgatcagcagcttcgccgctctgcgtgcccaggtgggtaccatgccgatcggcagcaaagtcgagcttggcctgctgcgcgacggtaagccggtgacggtgaccgttgagctgcagcagagcaaccagaatcaggttgattccagcacgatcttcaacggtattgaaggtgcggaaatgagcaacaaaggccaggacaaaggcgtcgtggtgagcaacgtgaaagcgggcactccggcggcgcagattggcttgaaaaaaggcgatatcatcgttggcgctaaccagcaaccggtgaaaaatattgccgacctgcgcaaaatctttgatgccaagccctctgttctggcgctgaacattcagcgcggcgatgcgactatttatctgctgatgcagtaa

SEQ ID NO: 255999 - DNA, 1026 bp, Klebsiella pneumoniae
atgtgtataagagacaggaatgagcttcgccgtaaggttcgccaggatttgtgctggtttgagggaaatgcgcagggcattcggttagtgcatacgctgatgcgaatgaatctgacctgggcgcaggtgggctgtattttaaaatatacccgtccggcatggtggcgcggggaaccgccggccagccacaattatttaatgaagaaacctggttattatttagccgaagaaggctatgttgcgaggttgcgtaaagaactggatctggctccttacaatcgattcccattaacgtggattatggaagccgcggatgatatctcatattgcgttgccgaccttgaggatgcggtagaaaaacgcatcttcagcgtagagcagctttatcagcatctctatgaggcctggggggttcacgaaaaaggctccttgtttaatcaagttgtcgaaaacgcctgggagaaatcgcgtgcgaattctctgagtcgcagcactgaagatcagttttttatgtatttacgggtgaatacgctcaataggctggtaccgtacgcggcgcgtcggtttattgataacctggagaagattttcagcggcgattttaatcacgcgctgcttgaagacgatagcgattgcagtcagctgcttgaactatacaaaaatgttgcggtaaaacatgtgtttagccatcctgacgttgagcagctggaactgcaaggttatcgcgtgattagtggtttgttagatatataccagccgttgctaaaattatcgctcgatgagtttagtctgctggtggaaaaagagcgggtgcggagtttaccgattgcttcgcgtctgttccagaaactttcgactcgccatcggctggcttacgtcgaggccgtaaataagatttcacgcagtaatccggaatttccggtgatggaatattattatcgctgtcgtctcattcaggactatatcagcggaatgaccgacttgtatgcatgggatgaatatcgtcgcctgatggccgtagaataa

SEQ ID NO: 256000 - DNA, 579 bp, Klebsiella pneumoniae
atgcaaccgatacggcagcggcagctgattgacgcgaccctggccgccatcaatgaagtgggaatgcacgatgccaccgtcgcgcagatcgcccgacgtgctggcgtatcgaccggcatcatcagccactatttcaaagataagaacggcctgctggaggcgacgatgcgcgatatcaccggccagctgcgccaggcggtgttgagccgcctgcacgccctgcccgatgccggcccgcgggaacgcctgcgcgccatcgtggccggcaacttcgacgagagtcagataagcagcgcggcaatgaaggcctggctcgccttttgggccagcagcatgcatcaaccgatgctctatcgcctgcagcaggtcagcagccgacgactgctgtcgaatatcgtctatgagtttcagcgcgccctgccgcgcgaagaggcgcaggaggccggatacggtctcgccgcgctgatcgacgggctgtggctacgcgcggcgctgagcggtaaaccgctcgataaagcccgcgccgaaacgctcgccgagcacttcatcagcaaatatctgccaccgacttctcaataa

SEQ ID NO: 256001 - DNA, 1473 bp, Klebsiella pneumoniae
atgtcccgaatggccgaacagcagctttacatcgacggtggttatgtttccgccaccagcggtaaaaccttcgagacgattaaccccgccaacggggaagtgctggcgaccgtccaggccgccggccgcgaagacgtcgaccgggcggtaaagagcgcccaaaaagggcaaaaaatctgggcggcgatgagcgccatggaacgttcgcgcattttgcgtaaagcggtcgacattctgcgcgagcgcaacgacgaactggcgcgtctggaaactctcgataccggcaaaccgctgagcgaaaccgccgccgtcgacatcgtcaccggcgctgatgtcctggagtactacgcgggcctgatcccggcgctggaagggagccagatcccgctacgcgaaagttcattcgtctatacccgccgggaaccgctgggcgtcgtcgccgggatcggtgcctggaactacccgatccagatcgccttatggaaatcagccccggcgctggcggccgggaacgcgatgatctttaagccgagtgaagtcaccccgctcaccgccctgaagctggcggaaatttaccacgaagcgggactaccggcgggcgtatttaacgtgctgccaggcaccggcgccgaaaccggccagtatctcaccgagcacccggacatcgccaaaatctccttcaccggcggcgtcgccagcggcaaaaaagtgatggccaactccgccgcctcctcactgaaggaagtgaccatggagctgggcggcaaatcaccgctgatcgtctgcgaagacgccaacctcgacctcgccgccgacatcgcgatgatggctaacttctacagttcaggccaggtctgcaccaacggcacccgggtattcgttccggcgcgcctgaaagcggtatttgaagagaaagtcctcgcccgcgtggcgcgtatccaccccggcgatctgtttgctgaaagcaccaacttcgggccgctggtgagcttcccgcaccgcgagaacgtgctgcgctacatcgagacgggtaaacaagaaggcgcgcgcctgctctgcggcggcgaagtgttgaaaggggaaggcttcgaccacggggcatgggtcgccccgacggtatttaccgactgcgatgaccagatgaccatcgtccgcgaagagatcttcggcccggtgatgtcgattctgagttacgacgatgaggaagaagcggttcgccgcgccaatgccaccgaatacggcctcgccgctggcgtcgtcacgccggatttaaaccgcgcccatcgtctgattcatcggctggaggccgggatctgctggatcaacacctggggcgaatcccctgcggagatgccggtcggcggctacaagcactccgggattggccgcgaaaacggcgtacagacgctgcacagctacacccagataaaatccatccaggttgagatgggtcagtttcaatccatattttaa

SEQ ID NO: 256002 - DNA, 1665 bp, Klebsiella pneumoniae
ttgcagtttgactacattattattggtgccggttccgccggcaacgtactggctacacgactgacggaagatcctgacaccaccgtcctgctgctggaagcgggcggcccggattaccgtttcgacttccgcacccagatgcccgccgcgctggcgtttcctctacaggggcgtcgctataactgggcctacgagaccgaacctgaaccgcatatgaaccatcgccgcatggagtgcggacgcggtaagggactcggcggatcctcgttaatcaacggcatgtgctatatccgcggcaacgctatggatcttgataactgggcctcggcgccggggcttgagcactggagctacctggactgcctgccctattaccgcaaagcagaatcccgcgatatcggcgccaacgattaccacggcggcgacggcccggtcagcgtcaccacgccaaagcagggcaataatccgctgttccacgcgatgattgaagccggcgtacaggctggctatccgcgcaccgacgatcttaacggctaccagcaggaggggtttggcccgatggatcgtaccgtgacgccgcagggacgccgcgccagcaccgcgcgcggctatctcgaccaggcgcgcgcgcgtcccaatctgactattcgcacccatgcgctgaccgatcatattatttttgccggcaagcgcgccgtcggcgtcgagtggcttgagggcgacagcaccgcgccgtcgaaagcgaccgccaataaagaagtgctgctctgcgcgggggctatcgcttcgccgcaaattctgcagcgatccggcgtcggcagcccggaactgttgcgccagttcgatattccgctggtacacgctctgccgggcgtcggggaaaacttgcaggatcatctggagatgtatctgcagtacgaatgcaaagagccggtgtcgctttacccggcgctgcagtggtggaaccagccgaaaatcggcgccgaatggctgttcggcggaaccggcatcggcgccagcaaccagtttgaagcgggcggatttattcgcagccgggaagcctttacgtggccgaatattcagtatcacttcctgccggtcgcgattaactacaacggctcaaacgcggtgaaagagcacggcttccagtgccacgttggctctatgcgctccccgagtcgcggccacgtgcggctgaaatcgcgcgatccgcacgaacatccggcgattctgtttaactatatgtccagcgaacaggactggcaggagtttcgcgatgcgattcggattacccgcgaaatcatgcatcagccggcgctggataactatcgcggccgggagatcagcccgggtgcggagtgccagagcgatgccgagctggatgagttcgtgcgcaatcatgcggaaaccgccttccatccgtgcggcacctgtaaaatgggctatgacgagatggcggtggtcgatggcgaaggtcgggttcacggactggaaggcctgcgcgtggtcgacgcctcgattatgccgcagattattaccggcaaccttaacgcgaccacaattatgattggcgaaaaaatggctgatgccattcgcggccgtcagccgctgccgaagagcacggcggcgtattacgtggcgaacggggcgccggttcgccggtaa

SEQ ID NO: 256003 - DNA, 696 bp, Klebsiella pneumoniae
gtgccggagattaatgaatttggtcagcaggtcaacgatcgcgtgcccgggtggcggggggcggggtttctgcgccgcacggcgttaaatggccgctattgccgactggagccgctggataccgaccggcacgcggcggatctgtttgctgcctatgctctcggcgacgacagtgactggacgtggctggcgagcacgcgtccgcagagcgttgagtcaacggcgaactggatcaccggcaaggttatggatgacggactggtgccctacgcggttgtcgatctgcgctgcgagcgagccgtcgggctggtcagctatatggcgattgagcgggcgatgggcacggtggagattggccacgtcacctggtcgcgggcgatgaaaaatacgccgctcggcaccgaggcggtctggctgctgctgcaaaatggttttgcccatggctatcgtcgactggagtggaagtgcgattcaatgaatattgcttcccgccgcgccgccgaccgactgggattcacctgggaaggacgacttcgccagaggatggtgcgtaaaggacgaacccgcgatagcgatatgctgtcgattatcgacagcgaatggcccgcgcgcgatgcggcgctgcgggcctggctggcgctggagaattttgatgctaatggacggcagataaagcggctggaagattttcgctag

SEQ ID NO: 256004 - DNA, 1569 bp, Klebsiella pneumoniae
atgactaaaaaactgctgccgctgctggcgctcgccgcgttatccgccgccgttcacgccgccacgccgccggggactctggtggtcgcccagggcctcgacgatatcgtcagcctcgacccggcggaagccaacgagctctccagcatccagacggtaccgagcctttatcagcgtctggtgcagccggaccgcgataaccctgaaaaaatcaccccgatcctggccgaaagctggcaggccgatccggcggcgaaaacgctgaccatcaagctaaagcccgacgccaaattcgcctccggtaacccgctacgcccggaagatgtcatttactcatacacccgcgcggtcaccctgaacaaatcgccggcgtttattcttaacgtcctcggctggcagccggataacatcgccagccagttgaagaaggtagacgaccataccctcacgctacgctggactgccgacgtcagcccggcggtggcgctgaatattctctccacgccgatcgcctctatcgtcgatgagaaacaggtcgccccgaacgccaaagataacgacttcggcaacggctggctgaaaatgcactcggcgggcagcggcgcgtataaaatgcgggtctatcagccgcatcaggccatcgtgctggaggccaacagcagcgcacccggcggcgcgccgaagctgaaaagcatcatcattaaaaacgttccggacccggcctcacgtcgtcttctcatccagcagggtgatgctgacgtggcgcgcgatctcggcgccgaccagattgcggctctgcagggtaaagcgggcgtcaaggttctcagcatcccctccgctgagcagaactatctggtctttaataccggcaacagcgctaacccgctgctgaaaaacccggccttctgggaagcggcgcgctggctggtggattacaacggcatcacgaaagatttgctgaaagggcaatatttcgtccatcagagcttcctgccggtcggcctgccgggcgcgctggagaataacccgtttacattcaacccgcaaaaagccaaagacatcctcgctaaagcgggcattaatgaggcgcatttcaccctcgacgtcgaaaacaagccgccgtttatcactattgctcagtcgatgcaggcgagcttcgcccagggcggcgtgaaggtggatttgctgccggccgcgggtagccaggtctatgctcgcgtgcgcgccaaacagcatcaggcggcgattcggctgtggatccctgactatttcgacgcccactctaacgccagcgcctttgcctacaacgacggtaaatccagtaccgtcgccgggctaaacggctggcagatcccggagctgaataaagcgaccctggcggcagtcgccgagccggacgcagcgaagcgccaggatctgtataaaaacatgcaggaggaactgcagcgcaattcgccttacgtgtttatcgatcagggtaaaacccagattgtggttcgcgataacgtgaagggttatcagcagggtctcaatgccgatatggtgtggtatgaccgggtaaccaaataa

SEQ ID NO: 256005 - DNA, 1050 bp, Klebsiella pneumoniae
atgtctgctgttttacctccccgagcagagcggcgcgcaaaacgccccctgctcgcgctgtttcagggactgctgacgctggccctgacgctgctcggcctgctgctggtgacctttgcgctctctgcgctgtcgccggttgatcgggtgctgcaaatcgtcggcgaccacgccagtcagtccacctatgaccaggtacgccaccagctcggcctcgaccagccgttgccgctgcagttctggcactatctgctgaatctcgcccacggcgatcttggaatcgccagctcaaccggccagccggtgctgcacgacctgctcgccgctttcccggcaaccctcgaactggccacgctagcgttgattatcggcgcgctgtcgggcgttatcgcaggcgttctctgcgcccgctacgtcggctcgccgtgggatctggcgatgcgcacctttacgctgctcggcaactcggtgccgatcttctggctcggcctgctgatgctggcgctgttttacgccaaactgcagtggacgccggggccggggcggctggacgatatttatcagtacaccgtcgaaccgcgcaccggctttgcgctcattgatacctggctctcggatgataaagaggcggttaaaaacgccgccgggcacctgctgctgccggtgctgctgctggcctattactctctggcgagcatcacccgcctgacccgttccgcctgcctgagcgaaatgaacaaagagtacatcctgctggcgcgcgccaaaggggccggtgagatgacgattctgctgcgtcacgtcctgcccaatatccgcggcaccctgctgacggtgaccgccctcgcctggacctccatgctggaaggggcggtgttgaccgaaaccgtcttctcctggccgggaattggccgctatctgaccaccgcgctctttgccggcgataccacggcgattatgggcggtacgctgctgatcggcgcgagctttgtgctgattaataacctcaccgacctgctggtgcggctgaccgatccgaggatacgctga

SEQ ID NO: 256006 - DNA, 834 bp, Klebsiella pneumoniae
atgcctggctacctttttttacgccgcctgcgccgttctcccgccgccttttgcggtctgatcatcattacgttactcctgctgactgcgctctttgcgccctggctggctccgctcgacccgaactggcaggacgccgccgcgcggctgcagggtccgggcgcgcggcactggctcggcaccgacagctacggtcgcgatcttctctcaaggctgattttcggcacccgtccggcgctggggctggttgcgctggtgacggcgattacgctccccgccggtctgctggtggggatcctgtccggctattacggcggctggctggagcgcgtgctgatgcgttttaccgacgtggtaatgtcgatgccgcggctgattctggccttcgcgtttgtcgcgatgctcggtccgggcctggtgaacggcgccctggcgctggcgctaacgacctggcccgcttacgcccgtcaggcgcgcagcgaaattcagcgcctgcgccacagcgactatctggcggcggcggagatgatgggcattcgcggctggcgtctgctgattggccatattctgccgctctgcctgccctcggcgatcgtccggctggcgctggatctagccgggattattctcgccgctgccggtctcggcttccttggcctcggcgcccgcccgccaatggcggaatggggcgcgatgatcgccgacggcatgcaggtcattttcgaccagtggtggatcgccgccgcccctggcgccgtcatcctgatcgccagcctggcgtttaacctgctgggcgatggcctgcgcgacgttctggagccgcaacatgactga

SEQ ID NO: 256007 - DNA, 837 bp, Klebsiella pneumoniae
atgactgatactcgtctgatcgttcagggactgaccatcgactatcccaccgccagagtggtggaccatttaagcttcacgctcggcaacgagcggctggcgctggtcggcgaatcgggctccggtaaatccatgaccgcacgcgccctgatggggctggtacgccggcccggcgtcgtcagcgccgatgcgctcaacgtgctggggcgcgacgcattaacccttcgcgagcgcggctggcgcgagctacgcggcaacgatattgcgatggtgctgcaggacccgcgctacgcgctcaatccggtaaaaagcattcaggcgcagctggaagaggcattaactctgcatcagcgccttagccgccgcgcgcggctggaggcggtcaaagccgccgttgccgccgtcggtctggatttaccggtactcaaccgctatcctggcgaactctccggcgggatgggccagcgggtgatgattgcccttgcgctgctcaataatccgcaggtgctgatcgccgatgagcccacttcagccctcgatgcccgactgcgcaatcagatccttgaactgctggtagagcagtgcgaacagcggcggatggcgatgctgttgattagccacgacctgccgctggtggccgagcactgccagcgggtgctggtcctgtatcaagggaaaaaggtcgatgagatggcggcgcgagatctgccgacggcgacgcatccctacacccgtacgctctggacctgtcgcccggccgcgcaaacttacggtcagatgctgccgaccctcgaccgaaccctgaacttgacggaggcggcgcatggcaatcgttaa

SEQ ID NO: 256008 - DNA, 705 bp, Klebsiella pneumoniae
atggcaatcgttaatctcaacaatctacaggtgaattttgctgaaaaaaccgcggtgtccgccgccagctttgccgttgatgcaggggaaacgttcagcctgatcggcgcatccggctgcggaaaatcaacgattctccgggtattagccgggctgcagcgggactggcgcggccgagttgaactgttcgataaggccattacgccgggcgcgcgttttcagggcgagctgcggcgcaacgtacagatggtgtttcaggacccgtacgcctcgctgcatcccaatcatacgctatggcgtacgctggcggagccgctgaaaattcacgctatcggcgagatcgagcagcgggtgtccaccgccctggaagaggtggggctgcctgccgacgccgcgcgccgctatccgcaccagctttccggcggccagcgccagcgggtggcgattgctcgcgcgctgctgctgcggccaaagattctgctgctggatgagccaacgtcggcgctggatatgtcggtgcaggcggaaatactgaatctgctcaatcggctaaagcaggagcacggaatgacctatctgctggtcagccacgatgccgatgtgattgcccatatgtcggaccgggcagcgtttatggcggagggcgtgattcagcgcttctttgaccgcgaagcgctggcgaacggcgaacatcggttagactga

SEQ ID NO: 256009 - DNA, 1338 bp, Klebsiella pneumoniae
atgaagctggcactacagaacgaggtagcgataagcaatgatgaagttcggcagctggatcgcgcttatgtgtttcattcatggtcgatgcagggcaatttacatccgctggtgatcgccggggctaaaggctgcgagctgtgggattacgaaggcaatacttacctggatttcagcagccagctggtcaacgtcaacattggctatcagcatccgcgcgtgctggcggcgatgaaagcccaactggaagagctggtgaccatcgcgcccgccactgccaacctcgcccgcggcgaagcggcgaagcgcatcgtcgatctggcgccggaaggctttagcaaagtgttcttcaccaacgccggcgccgacgccaacgagaacgccatccgcatggcgcggctctacaccgggcgcgataaagtgctctctgcctatcgctcctatcacggcaacaccggcagcgccattgccgccaccggcgactggcgccgggtgccgaacgaatattcccgcggccacgtacattttttcaatccctacctctatcgcagcgaatttaacgccgcgacggaagaggaggagtgccagcgcgcgctggcccatctgcggcggatgattgaatgcgaaggcccgaacgcgatagccgcgattctgctggagtcgattccgggcaccgccgggattcttgtcccgcccgagggctatatgcagggggtgcgggcgctggccgatgagttcggtattgtgctgatccttgatgaagtgatggccggttttggtcgtaccgggagttggttcgccttcgagcaggatggcgtggtgccggatctggtgactttcgccaaaggggtcaatgcgggctacgtcccggccggcggcgtgctgattagcgagccaatcgcccgctactttgatgaccatttctttgccggggggctgacctattccggccatccgctggcgatggcggcgattgtcgccaccattgacgcgatgaaggaagagaaggtggtggagaacgcggcgaccatcggcaacgaggtgctgcgtccggggctggaggcgctggcggagaagcacgcgattatcggcaacgtgcgcggccgcggtctgttccaggcgctggagctggtcagctgccgcgaacataaaacgccgctgggcgctgccgatatgacggccattaaaggcgcgttaaccgaagccggcctgctggcgtttgtggtggagaaccgcattcatgtggtgccgccgtgcaccatcagcgccgggcaggtggcaaaaggcctggcgatttttgatgcggtattcgcccgcttcgcgaacctggctcagtaa

SEQ ID NO: 256010 - DNA, 765 bp, Klebsiella pneumoniae
atggcaacgagcaaagtggtgtttattaccggggcgacctcgggttttggggaagcagcggcgcaggtcttcgccgatgcgggctggtcgctggtgctgagcggacgccgttttgagcggctgaaggcgctacaggataagctcgcctcgcaggtgccggtgcacattatcgaactcgatgtccgcgatagcgatgcggtcgccggggccgtggcggcgctgcccgctgaattcgccgatatcacgacgctgattaacaacgccgggctggcgctgtcgccgcagcccgcgcagaaagtggatctggacgactggaaaacgatgatcgacaccaatgtcaccgggctggtcaacgtgacccatgccctgctaccgacgctgattcgtcacggcgcgggggcgagcatcatcaatattggctctatcgccgggcagtggccctatcccggcagccacgtctacggcgccagtaaggctttcgtgaagcagttcagctataacctgcgctgcgatctgctcgggaccggggtgcgggtgaccgatctcgcgccgggtattgccgaaacggaatttaccctggtgcgcaccaaaggcgaccaggcggcgtcggacaatctgtatcgaggcaccacgccgctgagcgcgcgggatattgccgaacagatgttttatatcgccaccctgccggaccatatgaacattaaccgggtcgaggtaatgccggtacgtcaagcctggcagccgttcgcgatcgatcgggattga

SEQ ID NO: 256011 - DNA, 1245 bp, Klebsiella pneumoniae
atggccttcgccgaactcaagcactgggatgcgcgtcccggagaacagaacagcgctcaggcgatcattgcccgggcgaaccagtactttgttaaaacctcccggctggccagcatcagcgtgatgtcgccacccactgtgcgcgggctcgggcagtcgagcggctttgaactctggctacaggatagcgcgcaaaacggcagcccgtcgctcatcgaggcgcaaaacaccctgctcgctgccgccagacaacagccagaactggatgcggtgcgcattaacagcctggaggagaaggcgcagctgcaggtcgatgttgacagacagaaagcgcaggcccaggggttggatcaggccgcgataaacagcactctctctgcggcctggggcggcgtgtacattaacgactttatcgatcgcgggcgcgtcaagcgcgtgtacatgcagggagacgcagcctggcgttcgacgccggaaaacttatccgcctggtttgtccgcggcgacagcaacaacatggcctccttcgacagcttctcatcctggcgctggaccaccgggccgcagatgcttcagcgttttaacggactgtcagccgtgcagttccagggcaatgcggcatcgggcgtcagctccggttcggcgatggcggaaatggccgaactggtgggcacgctgagcgggtttgatctgcaatggagcggtttgtcctggcaggagcaggcctcttcagtgcaaacgctatgggtatatctggcgtcgctggcctttatgtttttgtgtctggccgccttgtatgaaagctggtcgattccggtcgccgtactgctgatcgtgccgttggggattctgggggccgtgagcgcgtcgctgctcgccggatatgaaaacgatatctacttccaggtcggtatgctgacgaccatggggctttctgccaaaaatgcgattctgatcgttgaattcgcgctggcgcagtttcagcaaggaaaaaccttatccgacgcggcgctggagggcgctcgtctgcgcttacgccccatcattatgacctcacttgcatttgttgtcggcgttatccctctggtactctctaccggtgccggcgcttccagccaacgggagattggcaccgcggtgatcggcggtatgctcaccgggacgctgctgaccttgctcttcgttccactctttttcctgctggtacagcaaggaatgatgcgccttaaagggcgcaaacggtaa

SEQ ID NO: 256012 - DNA, 618 bp, Klebsiella pneumoniae
atgggaaatcaacgcgggcggccaatgaaagcccgcccacgcattttacaaaccgcccgcgagctgtttctcaggcacgggcttgatgtgtcactggatacgattgccgccgaagcgggaacctcgcggccgacgctttacagtcatttccctggcggtaaagacgcgctgctgctggagacatttgcgtttctcaatgacaccatgcagccgcctctgcgccagcttttgcaggagcgtcagcaggattttcccgcgctgctgcgcgggtttgcgaaagtggtgcaagcgcacttttatgcgccggagaatattcactttcaacgcctgctgatccaggtgctggtgcaaaagcccgaactctacgtcacgctcgaacagcgcccctcagggcgcgttttgcaggcactgagcgagatactggcgcagaaaaaaaacgaaggtttgctgaccatcagcgatccggagctcgaagcaacggcgtttctcggcgcgattatgggctatccgctgccgggggccttaattgcgcaaaaagcggtggagccggagaagctggaacagctcgcggaatgcgcgattaccgtctttctcaaggcctggggctacgggccataa

SEQ ID NO: 256013 - DNA, 561 bp, Klebsiella pneumoniae
atgaaaaacggcatcgcgacgccatcgcggctgatttccgctctcgacgcctgccggacgaagctgaaggcgtttattcgcgcccggatcccgcaacgggatgaggcggacgatatcctgcaggaagtgacttatcagctgatccgcgtcgagcagccggtggagaatattgccgcctggctgttccgggccgcgcgaaacgagatgaccgacagggcgagaaaaaagcgtgagctgccgctggcaggcgatttcagcgaggaagaagaggggggctttcccgaggatgagctggccgagacgctgtttggcgttgcgcaaacgccggaggaggcgtatctgaaaacgctgctctgggaggcagtaaaccaggcgctcgcggaactgccgcccgcccagcgcgaagcattcgagaaaaccgaactgcagggctacagctatcgggagctggccgaagagaccggcgcaagcgagcaggcgctgctgtcgcgtaagcataaagcggtactttacctgcgaacccgcttgcgcgcgctgtatgacgatctgctcgccgattag

SEQ ID NO: 256014 - DNA, 426 bp, Klebsiella pneumoniae
atgagagatttcgacaggcgtgagcagcgccatcagcaccgttttggtgaccacagaatggcaaaaccgcttctcatcggcgcggcattaatcatcgttctcgggctgctggtcatgtcgctatggaatgcgctactgcccgctatccttggggtaaagagcatcggcttctggcaggcgttaggtcttctggcgctgtcgcggatcctgtttggcggtctcggttttcgcccgggaatgttcggtatgggacaggcgcggcgtcgaatgcatgaacgctggatgaagatgagtcccgagcagcgcgatgagtttgtacagcgctttggtcatcgcgggcatcgtggccactgcggctggcgcgatcgtcgtagcgaaaatgcgccgcagcaggagcctgcggtgaaaaatacggatcccgagtga

SEQ ID NO: 256015 - DNA, 1143 bp, Klebsiella pneumoniae
atgacttattccctctcaaaaaaattccttaccgccacctctgcgctgctattgctttccatgagcgctgttccggctagcgccgctaccgacagcaccgatgccgtctctccgctcagcgcggagaacgggttaagcgaagcggctaagcaatattttctgcgttatccttcccacagcggcgtgaacggtaaaaccgcgcgcgaagataccgcggcggtctttattccctttggcgccacgccggaagggggatggccggtggtggtctgggctcacggtaccgttggcgtggcgaatcactgcgcgccgtcgttaaacccgcgcagcgatcgcgataagcagtatctgaacacctggctgtcgctgggctatgcggtagtcgcgccggattatgccggtctgggctcgtccgggctgcaccactatctgaacgcccgcggcgaagcgtggagcgtacttgacagcgttcgcgccgccctgaaacagtttccgctcaaaaatgaacttattctggtaggacagtcgcagggggcgcatgccgccttcgccagcgccggctatcagccgcaatatgcacccgagcttaatattcgcgcaacggtgctgaccggtacgccttattttgaaaaagggaccaccgcagccgacattcttccgccggcaggcggcaaagcgccgagcggcggcgatccgaaaattccgtatattttctatatttatctttcagctgccgacagcaacccgcagctcaatcccgccgactatttccaggacaaagcgctaccgctgctgaaagaggcgaaccatttatgcattacaccgctcaacgatgaggtgatgaaggccggtctcaatgcggcgaatgccctcaagccgggagtggattcgctgttaaacgccagcgtagaaaccatgctctacccgacgctaaaaatcgatcatccggtatttatcggtataggcagcgtcgatatcaacgtaccgacggcgatgcaaaaacgctttgcggatgcggttaaaagcgcaggaacccgggcggacgtgcatatttatgaggggctggatcatagcggaacggttaacccgtcattgcgcgactcggtgccgtttttgattaagatgctcaacgataagcggtaa

SEQ ID NO: 256016 - DNA, 1035 bp, Klebsiella pneumoniae
atgtcagcgaaaaaagtcaccatgaaggatatagccagagacgccagagtcggtatcgcgacggtggacagagtgttgaataaacgaactcccgtgaaagagagcaccgaacgtaaagtgcttgagtccgccaggcgcttaggctttgcgctcgaacaatcgcagtatcggctggcagccggtcagtcggcgatcccgctgagaatggggttcatcctgctgcaggagtcgcactcgttttaccatcagctggcgcaggcgcttgagcaggcggcattgccctggcatagtccggcacaggcgccggtgtttctgcattatgacattaacgccattgacgacatggttgccgcaatcgcccgcctcagcgaagaggttgacgcaatcggtattgtggcgctggataatccgcttatccgccatgccgttgctcaggccgttgataaaggcgtgcgcgtctttaccctgctctccgatatgagcatcccgcaacgcaccggctacattgggctggataatcagaaagcgggccgcaccgccggttgggcggtggacaggctgtgtcatggaagcggcgaaatcggcattatcgtcggcgataaccgatttatttgtcaggaaagctgcgagataagtttccgttcctacctgcgcgaacatggcaaaggcgaccgggtgctggagcctgtacgcagccacgaacgcgccgatatcgcccgccgggtgacggaggagatgctgcagcgttatcccgatctggaggccatctacgcgccctgcggcggcgtggaagggattatcgccgcgctgcatgcgcatcagcgtcagcatcaggtcacgctgatttgtcatggcccggtagaccacggcgagctggcgctaatcgacgggacaatcgatctgatgctggctcatcggcttgccgaattcgcctcagcgaccgtcgacgcctttgtccagtgcgctcaccagccgcaggcgacgtttattaacgccctgcagccgtttgatttacttaccaaagaaaacctctga

SEQ ID NO: 256017 - DNA, 924 bp, Klebsiella pneumoniae
atgaccatacatattgccaacgcgccgtgcagctggggcgtcgatgatcccaaaaatccttacctgccgccgtggaccaaggtgctggaagaggcggcgacggccggttataaaagtattgaactggggccgtggagctatctgccgacccgagccgatgaactcagcgccgcgctgaataagcaggggctgtcgctggtggccggaacgatctttgacgatctggtcagcgaagagaactttgcgaacattgtcgcactgacgcataacatttgccgcaacctgtcgcaggttccatcggcggaaaagacgccgggcaacctcttccagccgccttatctggtgattattgattttggcaatccgctgcgggcgaaatacgccggacacagcgaactggcgccccgcctctctcccgacgactggcagcggatgatcggccatattattaccatcagccaactggcgtggcaggagtacggcgttcgtccggttatccatcctcacgccggcggctgcatcgagtttgccgacgaaatcgacctgctcgcggcgcaaatcccccatgatgttgccggattgtgtctcgacaccggccatctcttctattcgggtatggaccccatcagctggctggatcgccattttgatcgccttgactacctgcactttaaagatgtcgatccgcaggtattcaggagcgtaattttccgcggtatcgacttcttctctgcctgcgcggagggcgtgatgtgtccgctcggcagcggcgccattgattatccggcggtgcgcgcctttctcgacaaacgcggctatcaaggctggatcaccattgagcaagagcgcgacccgcgcaacgtcgagggcagccttaaggcggtcacggaaagcctgcgctacctgcattcggttggtttttaa

SEQ ID NO: 256018 - DNA, 1173 bp, Klebsiella pneumoniae
atgattaacggtattaaacctgttggccggtcgttacgctggggtatggtgggcggcggcggaagcagccagattggttatattcaccgctccgcggcgctgcgcgacggcacgtttaccctgctggccggggccttcgatattgacgctcagcgcgggcgtgagtttggccagcagctgggcgtggaggccgggcgctgttaccccgactacgaaacgctgtttcgcgaagaggccgcgcgggaggacggtattgaagccgtttccatcgctacgccgaacaatacccactacgccatttgccgcgcagcgctggaggccggattgcatgtggtctgcgaaaaaccgctctgttttaccggcgaagaggccgatgcgctggtggccctgagcgaaaaacagcgcaaaatcatcggcgtgacttacggctacgccggtcatcagctgattctgcaggcgcggcagatgattgagcaggggctgctgggcgagatccgcattatcaatatgcagttcgcccacggttttcataaccagcctgtggagcaggaaaaccccagtacccgctggcgagtggacccgaagtttgttggccccagctacgttctgggcgatctcgccactcacccgctgtttctggcggagaccatggcgccgaagctcaatatcactcgcctgatgtgctcccgccagagctttgtcaaaagccgcgcgccgctggaggataacgcgcatgtgctgatggagtacgacaacggggccgtgggttcgatgtggtgctcggcggtcaacagcggctcaatgcacgggcagaaagtccgtatcgtcggagaaaaagccagccttgagtggtgggatgaacagccgaatcagctgcgctatgagattcagggcgagccggtgcgcattctcgaacgcggtatgccctatctggacccgctggctctgcacgatgaccggatcggcggtggccatcccgaagggctgtttgaggcctggtcgaatttgtaccgccgcttcgccatcgccatggatgctaccgatcgttgcgacgcagctttgctggaaaacttctggtacccggatgccaaagccggtgcgctcggcgtgcattgggttgagaactgcgtacgttcagcagacagtggcgcccgctgggtcgatttccattaa

SEQ ID NO: 256019 - DNA, 696 bp, Klebsiella pneumoniae
gtgattcttcccgcatttactcagggtatttatggtcgtctgcgcctgcaggccggtgctgactggcagcgctatgtcgcccatcccttcctgcgccagcttgccgacggcacccttcccgaacccgctttccgtcgctatctgacgcaggactacctgttcctgatccactttgcccgcagctacgcgctgctggtgagcaagctgcgtaccctcgcggaaatgcgcgttgccgccgcgtccatgaacgccattctcgacgaactgccgctgcacgtcggctactgtacgggatgggggctggatgaagcgacgatggcggctgaagaggaagccgctgaaacggtaaattatacccgctacgtactggacattggccacgccggcgatgcgctggatctactggcggcgctgatgccctgcgtggccggctatgcggaaatcggcctcggtctgctgcacgacccggcgacccggctgactgccaacccgtatgcctcgtggatccgcaactacggtgatgagggctaccttaacggcgtcaatgcagccttaaacctgctggaaaccctctggcagcagcgcggcggcgaagcgcgttttgccgaactcagcgccattttcacgaccgctacgcgcctggaggctaacttctggcaaatgggccttaacgtcctcgcggagcgccaggcgtga

SEQ ID NO: 256020 - DNA, 1419 bp, Klebsiella pneumoniae
  misc_feature (651)..(660): n is a, c, g, or t
atggctcccggcatcgaagtacgcggactgagcctgcgctttggtttgcgaccgatcttcgacaatttgacgttttctattcccggcggccagtggagctcgctgctgggggccagcggcgccggtaaaaccagcctcctgcgcatcatctccgggctggcgaaagcctctgggggcgaagttcgcgccagcgatggcctgccgattgccggacgcctggcgtggatggggcaaaaagatctgctttacccgtggctaagcgtgcgcgacaacgtctcgctgggggcgcgcctgcgcggggagcgcatcgatcacctgcgcgtcaccacgctgctacagcaggttgggcttgaacactgcgccgatgaccgccctgccgctctctccggcggcatgcgacagcgtgcggcgctggcgcgtacgctctacgaagaccggcccatcgtgctgatggacgagcccttttccgcgctcgacacgattacccgcacgcgtattcagtccctggccgcccggctattggtgaaccggaccgttgtactgatcacccacgatccgatggaagcctgccgtctgagccaccgtctgctcgtcctttccccggcccccggcgggattgacgacacgcatcgcttgtccggcataccgccnnnnnnnnnntattattccgccggacattaccctctggcaggccgccgcgccgccgtggtgttctgcggcctgctcctgatttggtggctggtgacccgcagcggcattcccgcctttctgctgccttcaccttcggcggtggcaagcgccctgtgggtcaaccgcgcctacctcggtgggcacacgctgatcacattaagcgagatcctcagcggtctcgcgctcggcgttctgctcggcgtgatactggcgctgtgcatgattgtttcgccgcgccttcagcgttggctgatgccgttggtgctgaccagccaggcgatcccggtctttgcccttgccccgctgctggtgctgtggttcggcttcgggatgagcgccaaggttatgatggcggtgctggtgatcttctttcccgtcacctcggcgttttttgacggcctgcgccgggttaaccaggactatcttgacctcgcgcgtaccatgggcgcctcttttggcgcgcagctgcgccacatccgcatgatggctgcccttccggctctcggttccggtctgcggatggccgccgccgtcgcgcccatcggggcgattattggcgaatgggtcggttcagccgaaggactgggctacgtcatgcttaacgccaatgcccgtctgcaaaccgatatctgctttgcagccctgtttattctggtgctactgaccgtcctgctgtggctggcggtggatgcttttttacaccggctgattaactggacgccggaatga

SEQ ID NO: 256021 - DNA, 936 bp, Klebsiella pneumoniae
atgcgtaaacgtatttatgccggtatcacgcttgccgcactgttcagcgggcaggcgctggccaatgaaaaactcaccctggtgctggactggtatatcaatcccgaccacgcgccgatcgtggtggctgaacagattggcgcctttaaagaggcggggctggacgttaaaattgtgccaccgtccgacccggcgctgccgccgcgattagtcgccgcccgccaggcggacctggcgattacctaccagccgcaggtgcatttttttgccgatgaaggtctgccgctggtccgcgtcggcacgctgattaattcgccgctgaacacggtgatcgcactggataaaagcatcaaatctcccgccgatctgcagggcaaaaaagtggggtattcggtaagcggaatcgaacaggcgacgctggccactatggcacagcacgcgaaaatcgatcccaaaagcatcaagctcatcaatgttaactttcagctgaccagcgccctgctggccggacaggtcgatgcggtgattggcggctatcgtaatatcgaagcgctggaactgcagcttcaggggaaagatccgcaggtgatgaacgtcgaggattacggcgtcccggcctacgatgagctggtgattgtcgccaaccgggacgacgtcaacgcgccgaaaatcaggacgttcctgaaagcgctgcaaaaaggcgttgcttaccttcgcgctcatccgcaagaaacctggcaggcgtttgccgccgcgcatcctgaacttaacacggagctgaacaagcaggcctggctgaaaactcttcctctgtttgccagcgatccggcagcgctggataaacctcgttatgaagcttatgaacagtttttatataacaacaagttggtgaaaaaagtcacacctttaacgaattatgcggttgaactgcactaa

SEQ ID NO: 256022 - DNA, 1944 bp, Klebsiella pneumoniae
atgctgaatccgcaaaccccagccgccacgcccgcgctcatcgatccggcgtcaaaagcctttcagagcctgctggataaactggcccccaccgaagcgaccgtgctgatcgtcggcgaaaccggtactggtaaagaggttgtcgcccgctacctgcatcaccatagtccgcgtcgtcagcggccgtttctcgccgttaactgcggcgcgctcagcgaaagcctggcggaagcggagctgttcggccatgaaaaaggcgcgtttaccggcgcggtgcaaagccatcccggctggtttgaagcggcagacggcggcacgctgctgctggatgaaatcggcgaacttagcctggcgctccaggtgaagctcctgcgcgtcctgcaggaacgcgaaattacccgcgtcggctcgcgtaaagcgattaaggtcgatgtccgggtgatcgccgccacccacgtagacctgatgcaggctatccgcgagcgtcgtttccgcgaagacctctactatcgcctgaatatcgccatcgtcccgctgccgccgctgcgccagcgccgccaggatattcccgttctggcggaccatttccttacgctctacgcccgccgcctgggtcgaccggttcgtcgtctggccccggagacgctggcaaggctgatggagtacccctggccgggcaatattcgcgaacttgagaacactctgcataatgcggtattgctgagtaaagaagaggagatcgcccccgctcagctccggttaaccaccctaagcgacgcctcaccggcggtaagcgataacgaactggacgactttattcgtcatcaactctccctgccgggcgagccgctgtgggaaagggtcaccggggcgttgattcgcggcgcgatggcgcaatgcgacgataaccaaagccaggccgcagcgctgctcggcattagccgccacacgctgcgcacgcagctggccaattttggcatcattaaaagccgccgccgccaggaacccctcttcggagcggcggtcaataacgtttctcgcgatcgggaactgcgcatcggcttccagcgttttggcaatcttggcattctgaaggcgcggcaaagtctggagaaagcctttgccagccgcggcgtcagcgtgctgtggagcgagtttcccgccgggccgcagctcctgcacgcgctggcctgcgatgaaatcgactttggcaccaccggcgaagcgccgccggttttcgctcaggccaataatagcgagctggtctacgtcgcctgggaaccgcccgcgccgcaaagcgtggccatggtcgtcccacagcacagcgacattcgcaccattgccgacctgcgcggcaagcgtatcgcgctgaataaaggttcgaacgtgcactggctgctgctgcatattctggaagaggctgggctgggattaaacgacgttaaagtggtctatattccgccaaaatatccgctgaccgccagcgactacctggcggtagacgcctggatgatgtgggatccgctgcttagcgacgcggaagatagcggcgaattacgggtagtagccagcggcgaggggcgcgtcaacaaccatcagttctatctgtcgcgccgcgactacgccagccgcaatagcgatattatgcagcggctattcgccgagctggcgcagaccgggcagtttatcgaccagcatcgggaagaagccgcggagctgctctccgccgagctgggtcttaacgccgcttctctgacccgagccctggcgcgccgcagccatcgcccgcgcacaatggacctcaaggtgattcgcgcccagcaaagtatcgccgatcggttttacgcgctgggccttatcaacaaaccggtttcagtgcgcgaagccgtgtggtacggcgaagccaccaatagcgatctcggcctgctgatgcacgtcgattag

SEQ ID NO: 256023 - DNA, 756 bp, Klebsiella pneumoniae
gtggccgttcatttactcatcgtcgacgcacttaatctgattcgccgcatccacgcggtgcagggttcaccctgcgtcgatacctgcttacatgccctcgagcagctggtgctccacagccagccgacccacgtggtggcggtatttgatgacgaagatcgcggccacggctggcggcaccagcgcctgcccgattataaagccgggcgcgcgccgatgccggaaaccctcgaggcggaaatgccggcgctgcgggcggcatttgagcagcgcgggtttcgttgctgggagctcagcggcagcgaagccgacgatcttgccgcgactctggcggttaaggtggcgcaggccgggcaccaggcgaccatcgtttcaaccgacaaaggctactgccagctgctgtcgccgacgatccgcatccgcgactatttccagaagcgctggctcgacgcgccgtttatcgccaaagagttcggcgtgacgccggagcagctacccgactactgggggctggcgggcatcagcagctccaggattcccggcgtggcgggcattgggcccaaaagcgcagcccagttattaaccgattttcaggatctggaagggatctacgcccggctggcggacgtgccggagaagtggcgtaaaaagctggaagaacacaaagagatggccttcacctgccgggaaatcgcgcgcctgcaaaccgatttacagctggatggcaacctgcagcagctgcggctggcacgatag

SEQ ID NO: 256024 - DNA, 1311 bp, Klebsiella pneumoniae
atgggaaacacaacgatacaaacgcagagttttcatgcggtcgagacagggcaaagcaagcgctacattattccctttgccctgctgtgctcgctattttttctttgggcggtcgctaataatcttaacgatattttattaccacaatttcaacaagcctttaccttaactaacttccaggctggtttgattcaatccgctttttattttggctattttgttattccgatcccggccgggatcttgatgaaaaaactcagttacaaagccggcattattaccgggctattcttatacgcttttggcgccgcgctattctggcccgccgccgaggtcatgaattataccttattcctgatcggcctgtttattattgcggcggggttaggctgtttagaaactgcagcaaacccttttgttaccgtgttagggccagaaagcggcggccacttccggcttaatctggcgcagacctttaactcttttggcgccattattgcggtggtctttgggcaaagccttattttgtctaacgtgccgcatcaatcgcaggatgtactcgataaaatggctccggagcagcttagcgcttataagcacagcctagtgctctcggtgcaaaccccctatatgatcatcgtcgcggttgtcttactggtcgctctgttgattatgttgaccaaatttccggccctgcagagcgacgaccacagtgatgccaaccagagttccttctccgcttctcttgcccgcctggtgcgcgttcgccactggcgctgggcggtgctggcgcagttttgctacgtcggcgcacaaaccgcctgctggagctatctgattcgctacgccatcgaagagatccccggcatgacgcccggtttcgccgccaactatctgactggcactatggtgtgcttctttatcggccgtttctccggcacctggctcatcagccgcttcgcgccgcataaagtgctggcggcctatgccctgctcgccatgctcctgtgcctgatctccgctttcagcggcggccatgtgggcctgctggccttgacgctgtgcagcgcctttatgtcgattcagtatccgaccatcttctcgctgggcatcaagaatctggggcaggacaccaaatacggctcctcgtttatcgtcatgaccattattggtggcggcatcgtcactccggttatgggctttgtcagcgacgccgccggcaacatccctaccgccgagctggtaccggcgctgtgctttgccgtcatcttcatctttgcccgtttccgttcgcaaacggcagctaactaa

SEQ ID NO: 256025 - DNA, 1776 bp, Klebsiella pneumoniae
atgaaaaaaatcagtttaccgaaaattggcattcgcccggtgatcgatggacgccgcatgggggtacgcgagtcgctggaagagcaaaccatgaatatggcgaaggctaccgctgcgctgattacggaaaagctgcgccacgcctgcggcgcgcagatcgagtgcgtcatcgccgatagctgcattgcggggatggcagaatccgccgcctgcgaagagaaattcagcagccagaacgtcggcgtcaccatcaccgtcaccccctgctggtgctacggcagcgaaactatcgatatggacccaatgcggccaaaagctatctggggctttaacggcaccgagcgaccaggcgcggtttaccttgcggcagcgctggcagcccacagccagaagggcatcccggcgttctccatatacggccacgacgtacaggacgccgacgacacctccattccgtctgatgttgaagaaaaactgctgcgctttgcccgcgccggtttagcggtcgccagcatgaagggcaaaagctatctttccgtcggcggcgtatcgatgggaatcgccggttctatcgtcgatcacaacttcttcgagtcctggctcggtatgaaggtacaggcggtggatatgaccgaactgcgccgccgtatcgatcagaaaatctatgatgaaagcgagctggaaatggcgctggcgtgggcggataaaaccttccgctacggcgaagaccagaacgcgcagcagtataaacgtaatgccgagcagagccgcgcggtactcaaagagagcctgctgatggcgatgtgcattcgcgacatgatgcagggcaacaagaagctggcggaaaaaggactggtcgaagagtcgcttggctacaacgccattgccgcaggcttccagggccagcgtcactggaccgatcaataccctaacggcgacaccgccgaagcgctgcttaacagctcgttcgactggaatggcgtacgcgaacccttcgttgtcgccacggaaaacgacagcctcaacggcgtggcgatgctgatgggccatcagctgaccggtaccgcccaggtgtttgccgacgtgcgtacctactggtcgccggaagcggtagaacgcgtcaccggccagccgctcaccgggctggcggaacacggcattatccatctgatcaactccggatcggcggcgctggacggcgcctgcaaacagcgcgatgcggatggcaagccaaccatgaagccgcactgggaaatcagccagcaggaggccgacgcctgcctcgccgccaccgaatggtgcccggcgattcatgaatatttccgcggcggcggcttctcctcccgctttctgaccgaaggcggcgtgccctttaccatgactcgcgtgaatatcattaaaggccttggcccggttctgcaaatcgccgaaggctggagcgtggaactaccgaaagagatgcacgatcggctggatgcccgcaccaactccacctggcccaccacctggtttgcgccgcgcctgaccggtaagggcccgttctccgacgtctactcggtgatggcgaactggggcgctaaccacggcgtgctgaccatcggccacgttggcgccgactttatcactctggcgtctatgctgcggatcccggtatgcatgcataacgtagaagaggcgaaaatctaccgcccgtccagctgggctgcgcacgggatggatagcgaaggccaggattaccgcgcctgccagaactacggcccgctgtataaacgttaa

SEQ ID NO: 256026 - DNA, 1419 bp, Klebsiella pneumoniae
atgaagaatgaagtcatcctggttctcgactgcggcgccaccaacgtcagggcgattgccgttgatcgccaggggaatattatcgcccgcgccgcaacggctaacgccagcgatatcgccgcagagaacagcgcatggcaccagtggtcgctggaggccatcctgcaacgcttcgccgagtgctgtcggcagattggcgatgcgctctcatcctgcacggttcgcggcatcacggtcaccaccttcggcgtggacggcgcgctggtggatgaacagggcaagctgctctatccggtcatcagctggaaatgcccgcgaaccgcagcggtgatggacaatatcggccgctttatgcccgcgcagcagctccagcagatcgccggcgtcggcgcatttggttttaacaccctctataagctgatatggctgcaagaaaaccacccgcagctgctggagcaggcccatgcctggctattcatctcctcgctgatcaaccagcgcctgaccggggaattcacgaccgatatcaccatggcgggtaccagccagatgctggatatccaccagcgagatttcagcgcgcagattctgcaggcaacgggattgccgcgccgcctgtttccccggctggtggaggcgggccagcagattggtaccctgcaaaacgatgccgcgaagatgctgggattacccgccgggatcccggttatctccgccgggcacgatacccagttcgcgctgtttggcgccggcgcggagctggatgaaccggtgctctcttccggtacgtgggaaattttgatggtgcgtagcgttcaggtgaacacgccgctgctcagccactatgcgggatcgacctgcgaactggatagccagccggggtgctataaccccggtatgcagtggctggcttcaggcgtgctggagtgggtacgccagctgctgtggacggcagaaacgccgtggcgcacgctgattgaagaagcgcgcgtcattcccgccggttctgagggggtaaggatgcagtgcgatctgctctcctgccggaatgcgggctggcagggcgtcacgctgaataccactcgcggccatttctatcgcgccgcgctggaaggattagccgaacagctggcgcgtaacctgcaaacgctacaaaaaatcggccattttaacgccagcgaactgctgctggtcggcggtggtagccgcaacgcgctgtggaatcagatcaaagccaatacgctcgatatgcctgtcaaagtactggatgacgccgaaaccaccgtggctggcgcagccatgtttggctggtacggcgtcggtgaattccacagccctgaacaggccagagcgcaggtgagctatcagtatcgctatttttacccgcaaaccgaacccgaactgattgagggagtatga

SEQ ID NO: 256027 - DNA, 423 bp, Klebsiella pneumoniae; identical to SEQ ID NO: 177134

SEQ ID NO: 256028 - DNA, 711 bp, Klebsiella pneumoniae
atgaaagcggcacgacagcaagcgatactagacctgctcataaaccataatagtctgaccaccgaagccttatcgctacagcttaacgtcagcagagaaaccatccgccgcgatctcagcgagcttcagtcccagggaaaagtactgcgtaaccatggtcgggcaaaagtcattcaccggcaaagccaggacagcggcgacccttttcatattcgtttaaaaagccactatgcgcacaaagcggatatcgcccgcgaggcgctggcctggatagacgaagggatggttatcgccctcgatgccagttccacctgctggtacctggctcgccagctacctgatctcaaccttcacgtttttaccaacagtcagccgatatgccaggagctgagcaagcgagagaacatacagctcacctgctccggggggacgcttcagcgtaaatacggctgttacgtgagttcatcgcttatctcccagctcaaatcgctggagatcgatctgttcattttttcctgtgaaggtatcgacagcggcggcgcgctctgggattcaaatacagtcaacgccgagttcaaatcgctgctgcttaagcgcgcctcgcaatcgcttttgctgattgataagagcaagtttaatcgttcaggggaggcccgaattggccatctggatgatgtgacgcatattgtttcggacgtgtcgcagtcgtaa

SEQ ID NO: 256029 - DNA, 978 bp, Klebsiella pneumoniae
gtgatttttgagtgctatcaggctgaagatggcgaaaagctggtgcgcgaactgccgttcagctcgctggtatttgcccgccagatgtttgtggtcggcgaactgctgcgcgatctgccgccggaagaccggatttccccgatcgtcggtatgctgcagggcgttgtggaaaagggcggcgagctgcgcgtagaggtcgccgataccaacgaaagcaaagagctgatgaagttctgccgcaagtttacggtaccgctgcgcgctgcgctgcgcgaagcgggcgtgctgaccagctatgaaacgacaaaacgtccggtggtgcacgttttctttatcgcgccgggctgctgctacaccggctattcgttgtctaacaacaactcaccgttctatatgggcattccgcgcctcaagtttccggccgatgcgccgagccgctcgactctcaagctggaagaggcgtttcacgtctttattccggcggatgagtgggacgagcgcctggcgaacggtatgtacgccgtggatctcggcgcctgccccggcggctggacctatcagctggtgaaacgcaatatgtgggtctcctcggtggataacggcccgatggcgcaaagcctgatggataccggccaggtgacctggctgcgcgaagatggcttcaagtaccgcccaacgcgcaacaacatctcgtggatggtgtgcgatatggtggagaagccggcgaaagtggctgcgctgatggcgcagtggctggtgaacggctggtgccgtgaaaccatctttaaccttaagctgccgatgaaaaagcgctatgaagagctgtcgcgcaacctggcctatatccaggagcagctggatgagcacggcatcaacgcgcaaatccaggcgcgccagctgtatcacgatcgcgaagaagtgacggttcacgttcgtcgcctgtgggctgccgtcggcggtcgccgcgacgaacgctag

SEQ ID NO: 256030 - DNA, 795 bp, Klebsiella pneumoniae
atgtttttagtcgactcccattgccatctcgatggcctggattatcaaacgctgcataaaagcgtggacgatgtgctggctaaagccgccgcccgcgatgtgaaattttgcctggcggtggccacaacactgccgggatatcgcggtatgcgcgagctggtgggccagcgtaacgacgtcgttttctcctgcggcgtgcatccgttgaaccaggatgaagagtacgacgttgaggcgctgcgccagctcgccgcagaggatggcgtggtggcgatgggtgaaaccggactggattatttctacacgccggaaaccaaagcgcgccagcagacgtcgtttcgcgaccatatccggataggccgggagctgaataagccggttatcgtgcatacccgagatgcccgcgccgatacgctggaaattttacgcgaagaaaaagtgacggattgcggtggcgtactacactgtttcactgaggatagagagacagcgggtaagctgctggatatggggttctacatctcgttttccggcattgtgacgttccgtaatgcggagcagcttcgcgatgcagcgcgctatgtacctctcgatcgcctgttggtagagaccgattcgccgtatctggctccggtaccgcatcgtggtaaagagaaccaaccggcattggtcagggatgtcgccgagtatatggcggttcttaaaggcgtatcgctggagcaactggcacaacagaccacggaaaatttcgcgacgctttttcatatcgacccctcccggctgcaacctctctga

SEQ ID NO: 256031 - DNA, 1005 bp, Klebsiella pneumoniae
atgaaatggtatccgtggttacgtccgtcttttgaacagctcgtttccggctatcaggcgggacggggtcaccatgcgctactggttcaggcgctgccgggtatgggaagcgatgcgttaatttacgcgctgtgtcgttttctgatgtgccggcagccggaggggcataaaagctgcggtcgatgccatagctgtcagctgatgcaggccgggacgcatccggattattatgcgttgatcccggaaaaggggaagagctcgctcgggattgacgccgtgcgtgaagtgagcgaaaaactctatgaacgagcccgtctgggcggcgcaaaggtcgtctggatagacgatgccgctctgctgaccgacgcggcggccaacgccctgctgaaaaccctggaggagccgccggaaaatacatggttcttccttgcctgtcaggagcccgcacgactgctggccacgttgcgcagccgctgccggttacatcatcttgctccgccttctgaacagtatgcgctggcgtggttagagcgagaagtgacaatgtcacaagatgcattgctcgcggcactgcggcttagcgccaatgccccggcggcggcgctggatctgctgcaggacgctcactggagcgtgcggctgcagctttgccagaccctgggtgctgttttaacccacggcgactggctgtctctgctgccggtattgaatcatgagcaggccgcgattcgtctgcattggctggcatcactgctggtcgatgcacaaaaaaggcagcagggaattacgcttatcagcaatcccgatgcctggcctctggtgaatcaactggccgctgcgctgccggccgcgcgtttacaggcgatcgcgcgcgacgttaacgcctgccgcgagcagttgctgagcgttgtcggtatcaatcgcgaactgctgcttaccgagcgccttctgcgctgggaacattacctgcaacctggggcggtccttcccgtatcccacctctga

SEQ ID NO: 256032 - DNA, 642 bp, Klebsiella pneumoniae
atgcgcagtaactatatcgtcatcgagggcctggagggcgcagggaaaaccactgcacgtaatcttgtggtagagacgctaaaacagctgggcattagcgacatggtgtttacccgcgagccgggtggcactatcctggccgagaagctgcgcagcctggtgctggatatacagtccaccggcgatgaagttatcaatgataaagccgaagtactgatgttttacgcggcgcgcgtgcagctggttgagacggtgattaaacccgcgctggcccgcggccagtgggtcattggcgatcgtcacgatctctcgacccaggcctatcagggcggcggccgcggtatcgaccaaacgatgctggcaaccctgcgcgatgcggtactgggcgattttcgtcccaatctgacgctctacctggatgtgactcccgaggtagggctgaagcgcgcccgcgctcgcggcgaactcgaccgtatcgaacaggagtcgctcgatttctttaaccgcacgcgcgcgcgctaccttgagctggcggcgcaggacgacaccatacgcaccgttgacgccacccagccgcttgaggccgttgagcgcgatatccgcgcggtggtgaatcagtgggtcgcggagcagcgcgcatga

SEQ ID NO: 256033 - DNA, 1023 bp, Klebsiella pneumoniae
atgaagaaaatgttacgtttcatcctgctattggtggtggtgctgggcatcgccgccggcgtcggtatgtggaaagttcgccagctggcggacagcaaattactgattaaagaagagaccatctttacgctcgagaccggcacaggtcgccaggcgcttgggcagcagctctatagcgataaagtgatcaaccgacctcgggtgtttcagtggctgctgcgcattgagcccgagctatcccactttaaagccggaacctatcgcttcacgcctgaaatgacggtacgtcaaatgctgcagctgttagccagcggcaaagaggcccagtttccgctacgtttcgtggaagggatgcgggtgagcgactacctgcgccagctgcgcgatgcgccctacgtaaagcatacgctggcggacgatcgctatgaaaccgtcgcaaaggctctcgatctggagcatcctgattgggtcgaaggatggttctggccggatacctggatgtataccgccaacaccagcgatgtggcgatccttaagcgcgcgcatcagaagatggttgccgcggtcgataaagcctgggaagggcggatggataatctgccgtacaaagataaaaatcagctgctgaccatggcctcgatcattgagaaagagaccgcagtggccgaagagcgcgaccgcgtagcctcggtgtttatcaaccgcttacgtatcggcatgcgtctgcaaaccgatccgaccgtgatttacggcatgggtgcgggttataatggtaagttgacgcgtaaagacctggaaaccccaaccgcttacaacacctatgtcattaacggcatgccgcccggcccgatagccgcgccgggggaagcctcgctcaacgccgccgcgcatccggcaaaaacgccgtacctctattttgtcgcggacgggaagggcggacatacgtttaataccaacctgatcggccataaccgctcggttcaggactatctgaaagtacttaaggaaaaaaatgcgcagtaa

SEQ ID NO: 256034 - DNA, 810 bp, Klebsiella pneumoniae
atgtatctactgaatggcgcatgggcgaatgtgttaccggtgaacgatcgcggcgtgcagtttggcgatggctgttttaccaccgcgcgaattgtggcgggacaggttcagttcctcaacgcacacctgactcggttacaaacgacctgcaaaaagctctttatcccctttaacgactgggaattgttggccggggagatggcacgccttgcgcagccccattctgatggcgtgctgaaagcgatcatcacgcgcggagtgggcggtcgaggctatagcgccgcaggctgcgtaaatcccagccgcatcctcagcgtatcgccttacccggctcactaccaccgctggcgtaaagaagggatctccgtctcgctgagcccggttcagctgggatgcaaccctttacttgccggactcaaacaccttaatcgccttgagcaggtgctgattcgttctcatcttgagcagacggacgccgatgaggcgctggtccttgacagcgaagggtggcttacggaatgctgtgccgcgaacatattctggcgtacaggctttgacgtctttaccccgcgcctcgatcgggcgggagtcaacggcattatgcgtcagcacattctcgctaagctggcaccatcgccgtttcgcgttgtcgaagtcaccatgcgccccgatgcgttgcgcgaagccgacgaggtcattgtctgtaacgcattgatgccgctggtgccggttcgccgctgggacgataaatgctggtccgcgcgcgagctttaccattttttagcccccttgtgtgagctgtctgattag

SEQ ID NO: 256035 - DNA, 543 bp, Klebsiella pneumoniae; identical to SEQ ID NO: 174194

SEQ ID NO: 256036 - DNA, 675 bp, Klebsiella pneumoniae
atgaaaaaaagcttagtattaattgccacaacgctattaatgatgacagtatcagctcaagccggcgttattatcggtggaacgcgcgttatttataacggtgataaaaaggagacttcaattagcgtaaaaaatcctgacaaatcatcatatctgatacaatcctggagcgatagcggcgaaaaaaacaacgataaatccccctttatggttactccaccgctctttcgtctcgggcctggacaagagaacacgctaagaataattcgcaccggcggtaacttacctgaggaccgggagtctctgtactggatgaatattaaatctattccttcgacggagaagcaggataatgtaaatagcctgcaaatagccataaaaacgcgcatcaagttaatatatcgcccccaggcgcttatcaaaatgccggaagatattgccgaaaaattaacctggcagcgtaacggtaatactctgatcgttagcaatcctacagcgtactacatgaacttcagtaccatcaaaatgggcaatacttcggtaaaaaatgccgcctgggttgcaccgaagagctcggttagctttgccattcctgccggcgcgagcggcgatgtggtatggacgctgattactgattatggctccgtcggaaaagagcatcgagcacgtttataa

SEQ ID NO: 256037 - DNA, 2553 bp, Klebsiella pneumoniae
atgaatgtagacgcctacaaaaagaaaataacgctcagtcgtatcgcctgctttattgccctgcagagtgccttaactgttcataataccgcacctgctcgcgagtattttaatccggcctttctcgggatcgatgggccgggaaaggatttgaccgacctctctgcttttgaagaaggcgtcggccagatgccgggaaactatcatgttgacgttatcgtcaataaaacatcagtcggtctatatgatattgactttgtaatgcaaaaagatagccagggtaactctacgctccagccctgtcttagccttgaggcattacaaaaatttggtatccgtacacagtcatttcctcagcttgctgacgataaagattgtgccaatatccaggttattcccctggccagcgcggaatttgtcttcgatcggcagcagctacgtctctctattccacaagctgcattaaacaaccatgcccgcggctatgtggctccggagcggcttgatgaaggaattaatgcgctactactgaactatgactttagcggtgccaataccgaagctcgtcaacgcggcgctgaggactcgaacagctattatctgaacttaagacccggttttaatatcggcccctggcgaatccgcaactatacgacctggaaccgtaacagcagcggtgggcaagcacaggggagctgggattcactctatacctatgcacagcgcaatatcatcgccctgaaaagccagctcacaattggcgacagcaccgcgccgtcagacatcttcgatagcgtccccttccgcggtgcgcagctcgcttcagatgacgatatgcttcccgatagcctccgcggctatgcgcctgtggttcgcggtattgcccgtactaacgctcaggtaatcgttaaacagaacggctataccatctatcagagctacgtatctccgggagcgtttgagattaccgacatgtaccccacaggcagcagcggcgactttgacgtcaccattaaagaagctgacggcagcgaacaacatcagaaaatcgcgtttgcctcccttcccgtactgcagcgtgaaggccggttgaaatatagtctgaccagcggccagtaccgcccttatgacagcgatattaataaagaaacgtttacgcaagggacagtcatttacggtctaccggcaggctttaccgtttatagcggcggtcagttctctcaacattaccagtccgttcttctgggggcaggtaagaattttggaatgctgggagcgctatcgatagacagcgcgcaggcatggtcgagaaaacaggacgaaagcaaagaaagcggtcaatcatggcgcgtacgctacagtaaaaacattattgaaacgggaaccaatttctcaattgctggctatcggtactcaacctcgggctactatagcctgtcagaggtgctggatacgtggcgcgataacgactggaaaagtcaaaacgatcgccgtcgcaatcgcgccgaacttcagcttaaccagaatatcagccaaaacctgggttcgctcaccctcaacatgatgagtgaggattactggaatagcgagcgtaaaatgcgctccatcagcgtgggatacagtaacaactgggcaggagtaacttacaacctcaactatagctataacgaaaacaccaccgataccgacaataaaaaagtttatgacaaagatcagatcttctcatttaacatcaatgttcctttcgatctctggtcaggtaataactacgctacctacagtctgaacaccagtaagcacggcagcaccagccataatctggggatgaatggctctacgctggcagacaacaatctgaactggaatatccagcaaagccagacaaatcacggtgaaggcaatggtggttatgccagtcttgactatcagggcacctatgcacgggtcaattcggcgtacagctatgaccgcgatcagcgccgagtcaactatggcattgatggcggacttgtcgcccatgctaacggcctgacgttcagtcaggagttgggcgaaaccgctgccctggtcgaagcgcccggcgctgacggcgtaacggtaatgaatcaaacgggtgtaaaaacggattttcgtggctataccatagttccgtatatatccccctatcgtgaaagcgtaatttccctggatacggcgacgctcccgggtaacgccgacgttgagctgacctcacaaaccgttacacctactcgtggagccatcgtccgcacccactttgcgactcacgtcggcaaacgagtattaatgacgcttattcgccgcagcggtggcatcgtcccctttggcgctatggtctcaatcaacggcgtcgacaagccgtccggttctatcgtcggcgacggcgggcaagtttatcttaccggcatgccgacaaaaggtaccgccacggcaaaatgggggcaaacagcttcagaacagtgcgagtttctctggcagctacctgacgtcgtccccgcaagcggggtcgctgaactaacatcctcctgccaatag

SEQ ID NO: 256038 - DNA, 978 bp, Klebsiella pneumoniae
atgaaagcaaaactctatttacccatcgcggcaatcaatttttttgccctctttcccgcgcatgcagactattttgatgccgtcaggggaagcgtaatgaactataaatttgatgatttcacgctgccagctaaccctggagaaacgacccactgggaagaagcgggatcgctaccgacaacgatatccaggagtgatacaactggctcttatattgccctttcaattaacggaaccctggttggtgacaatatctacgcaaccagcaatccgggtattggcattcaatataaaacgagcgttgatacactgactgacgcgggtggaggcacagaatcgactctgaatagtcgcttcaatttaggacagcaggtcgctgcagatataagcacttacgtccacgtaaaataccgacttgtcaggctggcaaataagatccctgccggcaaaattaccagcgcaccgcaggtaactaccactttttacaacccagatggaaggggtaccgctgtattcactcacggtatttatagctcaacgattgcctcgcaacctaaaacaacttcctgcacggtagacgcgccgacggagataaagcttccggcgctttacggtaataagctgaaaaatggtgcgcaaactattactgaagctccgaccatcaaattaatcaactgtcccggcgctattgacggtatttcttataactttagtgcagtttacggcgcgcgcgatgcctcaaatggaatactcaacgccgttaatggcgatggctacgcgcaaaacgtttacattcaggtccagaatgccgacggaacgccccatacggttaatagctcaatagcactcagtgattacacgggatcaggtgaatatgaaatccctgaatttaaagttgcttattatattgagaatactgcaagcgtgacggctggcgaagtgaagtcagctatcgaactcaaattaacctataactaa

SEQ ID NO: 256039 - DNA, 510 bp, Klebsiella pneumoniae
atgaaaattaaacaaggacttctggcaaccttagttaccgccagctgcggattattcacgcctttaagtcacgcggtcaatatcgatatcacgggaaaagttatcgcctctccttgccaggtcaatgacggtaatgactccctttctattgatctgggcgattccattcgggctggcgatatctttgagcctggcagtggcagtgaatggaaacaggctgagcttgtgctgatttgcccaccttcggccagactttttaatgtgacatttacgggcattagcgatgatgacgagccggcttattacaagaataccggtaccgcccaacgcgtcatggttgaattaaccgatacggtgtcagaaacggccttcaaaaatggggcaactctggaaaatctggaagtaggaggcgcctacattatcgtcatgcgcgcccgtgcggtatctaaatggaatcctatgccgggcaccatttcagcgcaggtacaggctaccattacctatccgtag

SEQ ID NO: 256040 - DNA, 525 bp, Klebsiella pneumoniae
atgagactgcgaataatagaggttatctcatggcttacgcccgcgctcgggataatgatgaccgccgttccggcatttgcgacagacatcaatctaacgggtacggtggtcgcctctgcctgcacggtagatactgcacattcgctcaatcagacaattacattcccggattcaaagacatctgattttaccagggcaggtgatgccagcgaatggcagaattacgccatcgtattcacctcttgcccaccgtcaacaacggacataattgttgacttctccggtacgccagatccatccaataaatgtctggcaaaaaatgacgggagtgccacaggtattgcactacaatcggcctttggcaaagatggtggttatttgcaaaattgctttggtggaatgactggaactgcttatgaaacaggaagaaccatcgagttatcctctcgaatgtatgccacctccgatcgcgtcaccggagggagttttcattcaaccctgttacttactgtgacctacaaataa

SEQ ID NO: 256041 - DNA, 1032 bp, Klebsiella pneumoniae
atggacgccttcattcaatatggaattgtcgctggcattcaggccatgcaggattctggccttgaagtgacggaagagaatgctacccgcatcggtgccgctattggttccggtattggcggacttggcctgatcgaagaaaaccacagttcgctggtaaaaggcggaccgcgtaagatcagcccgttctttgttccttccacaatcgttaacatggtggccgggcatctgaccatcatgtttggtctgcgtggaccaagcatttccatcgcgaccgcctgcacctctggcgtccacaatattggtcacgcagcgcgcgttatcgcttatggcgatgctgacgcaatggttgccggtggcgcagaaaaagccagtacccctctgggcgtaggcggcttcggtgcagcgcgcgcgctctccacgcgcaatgacaacccgcaggcggcaagccgtccatgggataaagagcgtgatggtttcgtactgggcgacggcgcaggcatggtcgtgctggaagagtacgaacacgcgaaaaaacgcggtgcgaaaatctatgcggaaatcgtcggttttggtatgagcagcgatgcctaccatatgacttcaccaccggaagatggcgctggcgcagcgctggcgatggttaacgctattcgcgacgcgggcattgaagcaagccagattggctacgtcaacgctcacgggacttctacgccggcaggcgataaagcagaagcgcaggcggtgaaatccgtcttcggcgacgctgccagccgcgtaatggtcagctcgactaaatctatgaccggccacctgctgggcgcggcgggcgcagtagagtctatctactccatccttgcgctgcgcgatcaggccgttccgccaaccattaacctggataacccggatgaaggttgcgacctggacttcgttccgcacgaagcgcgccaggttagcggaatggagtataccctgtgtaactcctttggcttcggtggtaccaacggctcgctgattttcaagcgcgtctag

SEQ ID NO: 256042 - DNA, 684 bp, Klebsiella pneumoniae
atgacgggactgccagtgccaggtgtcctgcgccatttcgtcaaggttgcgcgtcacgcgccagttcagctcgcggtcggccttttcagcgtccgcccagtaggccgggaggtcgccttcgcggcgcggcgcgaagtggtagttaatcggtttgccgcaggctttgctaaaggcattgaccacgtcgagtacgctgctgccgacgcctgcgccaaggttatagatatgcacgccggctttgtcggccagtttttccatcgccgcgacgtgaccgtcggcaaggtccatgacgtgaatatagtcacgtacgccggtgccgtcttcggttgggtagtcgttgccaaataccgccagcgattcacggcgcccaaccgcgacctgcgcgatatacggcatcaggttgttcggaatgccctgcgggtcttcgcccatatcgcccgatggatgggcgccgaccgggttgaagtagcgcagcagtgcgatgctccagtccggctgcgctttttgcaggtcagtcaggatctgctcaaccatcagcttgcttttgccgtacgggctctgcggagtaccggtcgggaagctctcgacataaggaattttgggctggtcgccgtagacggtggcggaggagctgaaaataaagtttttcacgcccgcagcgcgcatagcggaaacgagttttag

SEQ ID NO: 256043 - DNA, 177 bp, Klebsiella pneumoniae
atggatcaccgcttcaatggcgtgatcgtgaagaatttccgtcatcagcgcttcattacgaatatcgccttcaacaaaggtggcgcttttgccgccgagacgttcaatgattggcaatacgctgcgcttactgttgcagagattgtcgagaataatcacgtcgtgtccctgcagtag

SEQ ID NO: 256044 - DNA, 1476 bp, Klebsiella pneumoniae
atgtcatcattgcaaatttcgcaaggcacgtttcgcctgagcgacaccaaaacgttaaatattgaacaactctgcgtgcaggctggcgagagctgggctttcgtcggcagcaacggcagcgggaagtcggcccttgcgcgggcgctatccggagagctgacgctgctcagcggacagcgcgagaatacgttcgcacgcgttacccgcctctcttttgaacagctgcagaagctggtcagcgatgagtggcagcgcaacaacacggacttgctcagccccggagaagaagataccggacgcacgacagcggaaattatccaggatgagattaaagacccctcccgctgcgcccgccttgcagaacagttcgctatcagccacctgcttgagcgccgctttaaatatctctctaccggagaaacgcgtaagactctgctgtgccaggcgctgatgggcgaccccgacctgcttatccttgatgagccgttcgacggtcttgatgtcgcctcacgccagcagcttggggcgctgctggccacgctcaacggcgaagggatcgccctggtgctggttcttaatcgtttcgatgaaatcccggagttcgttcagtttgccggcgtgctggcggagtgtcttctgagcgaaaccggcgaaaagcaggccctgctgcagcaggcgctcattgcccagctggcccacagcgaaaggcttgatggcatgacgctgccggagcccgatgccccggccgcgcgtcttgggctggacgacgatgaacctctcatcgtgctcaacgacggcagggtttcctacaatgaccgccccatcattaatcatctgaactggacggtaaatcccggcgaacactggcagatagtcggccccaacggcgccggtaaatcgacgctactcagcctggtcaccggcgaccatccccagggctatagtaacgacctgaccctgtttggccgccgccgcggcagcggggaaacgatctgggatattaagaagcatatcggttacgtcagcagcagcctgcaccttgaataccgcgtcagcaccaacgtacgtaacgtgattctctcgggctatttcgactcgattggcatctatcaggccgtttccgacaaacagcataagctggtgcagaactggctggatattctggggattgataaacgcaccgccgatgcgccgttccatagcctctcctgggggcagcagcggctggcgctgatcgtccgcgcgctggtcaagcaccctaccctgctgatcctcgatgaaccgctgcaggggctggatccgctcaaccgccagctggtgcgccgctttgttgatgtgctcattagcgaaggggcgacgcagctgctgtttgtctcccaccatgcggaagacgctcccgactgcatcacccatcgcctggcgttcgtgagcagtggagacggttacacctaccgggtcggcccgctggaaaattaa

SEQ ID NO: 256045 - DNA, 213 bp, Klebsiella pneumoniae; identical to SEQ ID NO: 177008

SEQ ID NO: 256046 - DNA, 774 bp, Klebsiella pneumoniae
atggcaggtcaatggttacgcttttttgccggaacaacgttaacgctctgcgttgccggtcacgcgctggcggatgagggcaaagtgacggtttttgccgcagcatcgctcactaacgccatgcaggatatcgctaaagagtataagaaagagaagaacgttgaggttgtctcttcatttgcttcttcatccacgctggcgcgccagattgaagcgggcgcgccggcggatctgtttatctccgccgatcaaaaatggatggattacgcggccgggaaaaagagcattgattctgcttctcggacgacccttctcggtaacagcctggttgtcgtggcgccaaaagccagcgcgcagggcgagataaacatcaatgataaaaccgactggaccagcctgctgaaaggcggccgcctggccgtaggtgacccggaacacgtgcctgctggcatctatgcgaaagaggcgctgcaaaagctgggagcctgggaaaccctgtcgccgaagctggcgccggcagaggacgtgcgcggcgcgctggccctggttgaacgcagcgaagccccgctggggatcgtgtacggctctgatgcggtcgccagcaaaggcgtaaaagtcgtcggaaccttcccggaagattcccataagaaggtggaatatccgctggctatcgtcgacgggcataacagtgcgacggttagcgcgttttatgactatttaaaagggccggaagcttccgccatctttaaacgttacggattcactacccactaa

SEQ ID NO: 256047 - DNA, 690 bp, Klebsiella pneumoniae
atgttcttaagcgatcctgaatggcaggcggtactgctgagcctgaaagtctcctccctggcggtggtagttagcttacctttcggcatctttttttcctggctgctggttcgtcgggattttcccggcaaagcgctgctcgatagcattatccacctgccgctggtgctgccgccggtggtggtgggctatctgttgctgattgcgatggggcgccgcggctttatcggcagctggctatatgactggtttgggctgagctttgcgtttagctggcgcggcgcggtgctggcggcggcggtcatgtcctttccgttgatggtgcgggccattcgcctcgcgctggaaggggtggacatcaagcttgagcaggcggcgcgtaccctgggcgctgggcgctggcgcgtatttttcactattacgctaccgttgacgctacccggtattatcgtcggcaccgtgctggcttttgcccgttcgctgggcgagtttggcgccactatcacttttgtttccaatattcccggtgaaacgcgtaccatcccttcggcaatgtataccctgattcagactcccggcggcgagggcgcagccgcgcgtttatgcttgatttcgattgtgctggcgctggtatcgctgctgatttccgaatggctggcccgcctcagccgtcagcggatggggaaataa

SEQ ID NO: 256048 - DNA, 1059 bp, Klebsiella pneumoniae
atgcttgaactcgattttacccagacgctgggaacccactgtctgcaaatccgcgagacgctccctgccagcggcattacggcggtattcggcgtctctggcgcgggaaaaacctcgctgatcaacgctattagcggcctgacccgcccgcagcaggggcgcattgtccttaacggcagagtgctaaacgatgttgaaaaacgtatctgcctggcgccggaaaaacgccgcattggctatgtttttcaggacgcgcgcctgtttccgcactataaagtgcgcggcaatctgcaatatggcatggcaaaaaatatggccggacagttcgataagctggtcgatctgctcggcattgcgccactgcttgatcggctaccgggaggactctccggcggagaaaaacagcgggtcgcgattggccgggcgctgcttaccgcgccggagctgctgctgttagatgaaccgctggcatcgttggatattccgcgcaagcgcgagctgttgccctatctgcagcggctggcgcgcgaaattaacatcccgatgctgtacgtcagccactctcttgatgagatccagcacctggcggataacgtgctggtgctggaggcggggaaggtgaaagcctttggctgcctggaagaggtgtggagcagtagcgtgatgcacccctggctgcccgaggatcagcaaagtaccattctgagcgcgattgttgccgcccagcatccgcagtatacgatgaccgccctggcgatcggcgaccagcagatatgggtcaaccggcttgacaggccgctgggcgaaaccgcgcgcatccgcattcaggcctcggacgtgtctctggtactgcagcccgctcagcaaaccagtattcgcaatattttgcccgcggaggttatgcagtgtattgaaagccatgggcaggttgaggtcaggctggagataagcggccgcacgctgtgggcgcgcatcagcccctgggctcgcgatgatctgggcgttgccccgggccagcggctgtatgcgcagataaaaagcgtgtcgatagccgcctga

SEQ ID NO: 256049 - DNA, 819 bp, Klebsiella pneumoniae
atgacctcacgcgtgattgccctggatttagacggcacggtcttaaccggcaaaaagaccatcctccccgcctcgctcgacgcgctggctcgcgccaaagatgctggataccagatcattgtcgtcaccggacgacatcacgtcgctatccatcctttttatcaggcactggctctcgatacacctgcaatttgctgcaatggtacttatttgtatgattatcatgcaaaaaaggtgcttgagtccgatccgatgccggtcgataaagccctgagcctgacggagctgctgaaccagcatgatattcacggcctgatgtacgttgatgacgccatgctctacgagcggccgaccgggcacgtcatccgcactgccacctgggcccagtctctgcccgtcgagcagcgcccggtatttactcaggtcgactctctggcgcaggcggcgcgcgaagttaacgccgtgtggaaattcgccctgaccgatgaagataccgccaaactgcagcgctttgccctgcacgttggccagacgctgggcctggagtgcgaatggtcgtggcacgatcaggtggatattgcccgggaaggcaacagtaaaggtaaacgcctggcgcagtgggtggcgtcccggggactgtcaatgcaggatgttatcgctttcggcgacaactataacgacctcagcatgctggaggccgccggcaccggcgtagcgatgggcaacgcggtagaggaagtgaaagcgcgcgccaacgtggtgatcggtgaaaacgaaaccaccagcatcgccgactacatctatcgccacctgctgtaa

SEQ ID NO: 256050 - DNA, 996 bp, Klebsiella pneumoniae
atgaaacaaaccgtttataccgccagcccggaaagccagcagattcacgtctgggatctggatcctgaggggaaactgaccctggtgcaggttgttgatgccccggggcaggtgcagccgatggtggtgagcccgaacaaagagtatctctacgtcggcgtgcgtccggagtttcgcgtactggcctaccgcattgcgcccgataatggcgccctgaccttcgctggcgaagccgcgctgcccggtagcccaacgcacatctctaccgatcatcaaggccgctttgtgttcagcgcatcctataacgcgggctgcgtaagcgttacgccgctggtggacggcctgccgcgggaagcggtggcggtggtggaagggctggaaggctgccactcggcaaatatttccccggacaatcgcaccctgtgggttccggcgctgaaacaggatcgtatctgcctgtttaccctgagcgacgacggtttcctggctgcccaggaaccggctgaggtgaccaccgttgaaggcgcgggcccgcgtcatatggtcttccatccgaaccagcaatacggctactgcgttaacgaactgaacagctccgttgacgtctgggagctgaaggacccgcacggcaaaatcgagtgcgtgcagacgctggacatgatgccgcctgatttcaccggcgttcgctgggcggcggatattcacctgacgcccgatggccgtcacctctacgcctgcgatcgcaccgccagcgttattaccatctttagcgtttcggaagacggcagcgtactgtccatcgagggctatcaaaataccgaaacccagccgcgcggctttaatctcgatcatagcggcaaattcctcatcgctgccggtcagaaatcgcatcatattgcggtgtatgaaatcgaaggcaagcaggggctgctgcaggaaaaagggcgctatgccgtaggccagggcccgatgtgggtggtggtcaacgctcgttaa

SEQ ID NO: 256051 - DNA, 477 bp, Klebsiella pneumoniae; identical to SEQ ID NO: 177002

SEQ ID NO: 256052 - DNA, 1485 bp, Klebsiella pneumoniae
atgccgctgccgctcatgccaaaacccattgcccctctgttccaggaactgttattaacgcgcggcgtgattaaagaccaggtctatcacgccctgcgccacgcgattctggatggccggttatcggcgggtgcaaaaataccctccagccgggcgctggctgagatgatggcgatctcccgcaactcggtcattgccgggtttgagcgcctgattgatgaaggctatctgctgacgcgcaagggggcaggcacctttgtctgcgaccatattccggatcacgtcattagcgagtacgggtcgccgacggcgccggaaacggcaatagccagcgttgggccgctgaaccctgatgtgtcagccctggtaccctcatggacggaaagcgaagatagcggagagatgggcgcggttttcgccgtcggtatcggctgtaccgatcttttccctcatgctttgtgggggcgattgctggggcgcgtctggcggcaatcgcgccgtgaactcgcatcgcacgcctcctcctggggattcctgccgctgcgtcaggcaatcagcgactatatacaggcgacgcgcggcgtaaattgccatgaagatcgggtgattattgttaacggcattcagcaagcgttgacgatcgccgcgcaggctttactggaaaagggcgatgaagtctggctggacgatcccggatataacggcgctcgcggcgcattcgccgccaggggagccgttgttcggcccgttcgggttgacgatgagggcatggatattcaggatggaatagaccattatcccggggctaagctggtctataccgcgccgtcgcatcagtttccgctcagcggcacgctgagtctgccgcggaggcttgctctgctggagtgggcggaagctaaccgcgcctggatattcgaagatgattacaatagcgaatttcgctatgccgcccgctctctgcaggcgttacaggggctggataaacatcagcgggtcatctatgcgggtacattctctaagatgatgtatccggcatttcgtctgggctttttagttgtccccgagcatttgcgcgaacagtttgccatcaccaaatattatactgacctctgtagcggatatctggaacaggccgttctggcgcgtttcatccgcgaggggcactatgccagccacgttcgtcggatccgtaaagcctgttttgagcgaaaaagcgcgctggaggcggcgattaaattctatttttccgggcgcatgctggtgcatcctacggattccggcgtgcatttagtctgctggctgctggatggcttacgggcacaggaggtggtgcggaaggcgcgccagataggcttaggtgtacaaacttttgcgcgctattgccagcggccaatgtcacgtgagggaatattgcttggctttgcaaaccatccgccagaggttttggcagaggggattcgccgtctggcggcggtcatataa

SEQ ID NO: 256053 - DNA, 267 bp, Klebsiella pneumoniae
atgcatcagcaaccggatatttacgcaggcctgaacgataccgcactctctgaatatttccgcaacgcaggagacaggctgatcgatgaatcagcggtgatgtcactggctatcagtagcatcctggagtctgaggggcatctcaacaataaagcgattattctgtggttaattacggcgctggagactaccagcgatatcgtaaccgccgacgttatccgcaaaacgctggaaatcgtcgtaagctacaccatggatgatatctga

SEQ ID NO: 256054 - DNA, 324 bp, Klebsiella pneumoniae
atgatcagagataccgttatgaatcacaatgattatgatccattaaccgatgtattgattggagaggctgtcctctcgctactcaaaagcaaggggcctattagtaaacaagcactgatcggtaaactccaggccatgcaggccggagaacaagataacaagcggcggaatgcaattgggcgtattatcgatgaaatcagtaatatggtagctcgccgtggaaacaacaaaactgtgggtacttcaggcgctaaacataattgggataagccgaattcattattaggctcccctcagcagccaggtactaataaaatacactga

SEQ ID NO: 256055 - DNA, 246 bp, Klebsiella pneumoniae; identical to SEQ ID NO: 176998

SEQ ID NO: 256056 - DNA, 2121 bp, Klebsiella pneumoniae
ttgtatctgtttgaaagcctgaatcagctgattcaaaactacctgcccgaagagcaaatcaaacgccttcggcaggcttatctcgttgcacgtgacgctcacgagggccagacacgttcaagcggtgaaccctatatcacgcacccggtagcggtagcctgtatcctggccgagatgaagctcgaccatgaaacgctgatggctgccctgctgcacgacgtgatagaagatacccccgccacctatcaggatatggagcagctttttggcaaaagcgttgcagaactggtagagggggtgtcaaaacttgataagctaaagtttcgcgacaagaaagaggctcaggccgaaaactttcgcaaaatgattatggcgatggtgcaggatattcgcgtcatccttatcaagctcgctgaccgcacccacaacatgcgtacgctgggctcattgcgcccggataagcgccgccgcatcgcccgcgaaacgctggaaatctacagccctctggcgcaccgtttaggtattcatcacatcaaaaccgagctcgaagagctgggctttgaggcgctgtatcctaaccgctaccgcgttattaaagaggtagttaaagcggcgcgcggcaaccgtaaagagatgattcaaaaaatcctctccgaaatcgaagggcgtttgcaggaagcgggaataccctgtcgcgttagcggtcgcgaaaagcatttgtactccatctactgcaagatggtgctcaaagagcagcgttttcactcgattatggatatctacgccttccgcgtgattgtccatgattctgacacctgctatcgcgtgctaggccagatgcacagcctttacaagccgcgtccaggccgcgtcaaagactacattgccattccaaaggcgaacggctatcaatctttgcacacctcgatgatcggcccgcacggcgtcccggttgaggtacaaattcgtaccgaagacatggaccagatggcggaaatgggggttgcggcgcactgggcttataaagagcacggcggcgaaagcagtaccacggcgcaaatccgcgctcagcgctggatgcagagtctgctggagctccagcagagcgccggtagctcatttgaatttattgagagcgtgaaatccgatctgttcccggatgagatttacgttttcaccccggaagggcgcatcgtcgaactgcccgctggcgcgacgccggtggacttcgcctacgcggtgcataccgatatcggccatgcctgcgtcggcgcgcgcgtcgaccgccagccatatcccctgtcgcagtcgctctccagcggccagacggtggagatcatcaccgcgccgggcgctcgtccgaacgccgcgtggctgaactttgtcgtcagctctaaagcgcgcgccaaaattcgccaactgctgaaaaacctcaagcgcgacgattccgttagcctcgggcgacgcctgcttaatcacgcgctcggcggcagccgcaagctggccgaaattccgccagagaacattcagcgcgaacttgaccgtatgaagctggcaacgcttgacgatctgctggccgaaattggcctcggtaacgccatgagcgtcgtcgtagcaaaaaacctgcagcagggtgaaaccacagccgtgcctgtacagccggcgcctgtcggccataaccatctgccgattaaaggcgcggatggcgtgctgatcacctttgccaagtgctgccgtccgattcccggcgacccgattattgcgcacgtcagcccgggcaaaggcctggttattcaccacgagtcctgtcgtaacattcgcggttaccagaaagagccggagaaatttatggcggttgagtgggacaaagagacggcgcaggaatttatcaccgaaattaaggtggatatgttcaaccatcagggtgccctggcgaatcttaccgccgcaatcaacaccgcctcttccaatattcaaagcctgaatacggaagagaaagatggccgcgtttacagcgcctttattcgcctcaccgcgcgcgaccgcgtgcatctggcgaatattatgcgcaaaattcgcgtcatgccggatgtgataaaagtcacccgtaaccgaaattag

SEQ ID NO: 256057 - DNA, 276 bp, Klebsiella pneumoniae; identical to SEQ ID NO: 174115

SEQ ID NO: 256058 - DNA, 624 bp, Klebsiella pneumoniae
atggctcaaggcacgctttatattgtttccgcccctagcggcgcgggtaaatccagcctgattcaggctttattaaaaacccaaccgttgtacgactctcaggtttctgtttcgcataccacacgcgctccgcgcccgggtgaagtgcacggtgaacactatttctttgtcaatcacgacgaattcaggacgatgattggcgaagacgcttttcttgaacatgcagaagtctttggcaactattacggcacctcgcgcgaagctatcgagcaggtactggcgaccggcgtcgacgtcttccttgatatcgactggcagggcgcacagcaaatccgcaacagaatgcccggcgcacgcagcatttttattctgccgccgtcaaaagatgagcttgatcgtcgcctgcgcggccgcggtcaggatagcgaagaggttatcgcgaaacgtatggcgcaggcagttgcagaaatgagccattacgcggaatatgattacctgattgtgaatgatgattttgataccgcgctgagcgatctgaaaattattattcgcgccgaacgtctgcgcatgagccgccaaaagcagcgacatggcgctttaatcaccaaactgttggcagactga

SEQ ID NO: 256059 - DNA, 1686 bp, Klebsiella pneumoniae
  misc_feature (1050)..(1059): n is a, c, g, or t
atgcaaaaaggaatccaggcgctggtgctgtggatgctggtgggatacgcgcaggcagcctgccccacgtggccgcaggcgagggccgaacaggaaatggaacgcctcagccagcagataacggaatggaaaaacgcctactggcagcaggggaacagtgcggttagcgatgaagtctatgaccaactggcggagcggctggcgttctggcggcgctgcttcaccggcgaggctcccgctcacgatgctcttccgctgctgaggggggatgtcaggcatccggtcgcacacaccggcgtgcgtaaactgccggaccgcgctgcggtggcgcgctggatgcgcggtcaatccggcctgtgggtacagcctaaagtcgatggcgtcgcagtgactctggtctatcgacaggggcgcctggtgcaggcaataagccgggggaatggtctggccggagaagactggacggccagggttttacagatcccctccgtgcctaaagtctctgacggtgcactggccaatagcgttctgcagggagaactgttcctgcttcgcgcggggcatgtgcaaaagcagatggggggcatgaacgcgcgcgcaaaggtggccggcatgatgatgcgccagcaggctgcggcggaacttaatcaactgggcatctttatctgggcatggcccgatggtccgcaggatatgcaacagcggctgacgctgctgcggcagggcggctttgtttacagcgcgcgcttttcgcatcctgtcgcgaatgcgcagcaggtggaacagtggcgccagcgttggtttacttcgccgctgccttttgccagcgatggcgtagtggtgcggcggggaaaagagtcagccgggcgcttctgggtaccgggacagggtgattgggttatcgcctggaaatatcctcctgcctcacgggttatggaggttcgcggtatcagcttcagcatcgggcgtagcggtaaaatagcggtggtggcgcatctggagccgcagctgctggacgataagcgcgtgcagcgggtgaacgtcggctcnnnnnnnnnngtatcccgctggtccactctggatatcggtattggcgatcagctgcaaatcagccttgccgggcagggaattccgcgcatcgattcggtcgtctggcgcacggcgcagcgtaataaaccccagccgccggcggcacggtacaatgccttaacctgctatttcgccacgccagagtgcgcggagcagtttctctcgcggctggtctggctctcatcccgatcgattctcaacattgacggcgcgggagagacgctgtggcggacactgcacgatgcccgcggcatggagcatctcttttcatggctggcttttacgccggaacagctgcaagccataccaggtatctccgcgcagcgcgggcagcggctgtggcatcagttcaatcttgcgcgcgaacggccttttctacgctggatccaggcgatgggagtgcccataccgaagacggcttttgtcagactggaggaggacagctggcggcagatgcaggatcgaaacgaagagcagtggcaacggctgccgggcgtcggggctgaaagggcgcggcagctggtgacgttcttacatcacccggatgttgccgcgctggcgaagtggctgagcgggcaacgcattccggggttctga

SEQ ID NO: 256060 - DNA, 1275 bp, Klebsiella pneumoniae
  misc_feature (761)..(770): n is a, c, g, or t
atgactgccgccgctgacaataaaaactatctcatccgcctgcttgccgttgtgctgacggggatactggctggcctgtcaggcatggttctggcgctgattttacacgcgattcagcacctggcgtttggctacagccacggccagctcgttggctcagagtcatttttacagggcgtcacggattcgtcctggtcgcgtcggatcatggcaatcgtcgccggcggtgcagtcgccgggtttggctggtggctgcttgggcgatatgggcagaagcgggtttcaattgcgtcagcggtggccaatccttccgtgccaatgcctgcgggtaccaccacgattcatgccctgttgcagatcgtcaccgtggcgctgggctcaccccttggtcgcgaagtcgcgccgcgggaaatgggcgcgctgggggcagggatggtggcgcgtaagctgggtctgctggaagatgaaagccgaacgctgattgcctgcggcgcaggtgcgggtctggcggcggtgtataacgtcccgctggccggcgcgttattcagccttgaggtgatgctgctgtcgtttagctgggaaaaaacgctggcggctatcatcacatcggcgattgccgcgtggacggctaccctcggcttaggcgatgagtcgcaataccattttacttccgacatcctgccgcattcatttctctggtgggcgattatctctggccccattctcggcgccggggcctggctctttcgcaaagcgaccannnnnnnnnngaccagtaccgctcgttcgcacgtccgaagcaactggcagatgccggttttctgtctgctggcgttttctctgcttgccgccctcagcctctatttcccccagcttccgggaaacggtaaaggacctatgcagctggctctcagcgatgaactgggtttccccggggcggcgatgctgctggtgctgaagatggtggtgattctggcggtgctacgcggcggtgcggaaggcggcctgctgacgccggggctggcggtaggcggcttggccagcctgctgctgtgtatgctctggcaacagctgcttcccggcggagattacggcagttttgcgctggttggcgcggcggcgtttctcgccgcatccatgcagatgccgataacggcggtggcgctggtgatggaattcacccatatggatcacagctatctggcccccacgctgctgtgcgcggcaggggcatttttaacctgccggatattggataagaacgactccttctga

SEQ ID NO: 256061 - DNA, 717 bp, Klebsiella pneumoniae
atgcgtccagcaggccgtagcgctaatcaagtgcgtccagtaaccctgacccgtaactacacaaaacacgcagaaggctccgtgctggtcgaatttggtgacacgaaagtattgtgcaccgcttctattgatgaaggcgtgccgcgctttctgaaaggccaggggcagggatggatcactgccgaatacggcatgctgccgcgttctacacacacgcgtaacgcgcgtgaagccgccaaaggtaaacagggcggccgcaccatggaaatccagcgcctgatcgcgcgtgcgctgcgcgcggcagttgacctgaaagcgctgggcgaattcaccattactctggactgcgacgtgctgcaggccgacggcggcacccgtactgcatcgattaccggagcctgcgtggcgctggcggatgcgctgaataagctggttgcggccggtaagctgaaaactaacccgatgaaaggaatggtggcggcagtctccgtagggatcgtgaatggcgaagcgatttgcgatctggaatacgttgaggattccgcagcggaaaccgatatgaacgtggtgatgaccgaagatggtcgcatcattgaggtgcagggtacggcagaaggcgaaccgttcacccatgaagagctccttaccctgctggcattggcccgagggggcatcgaatccattgtcacgacgcagaaggcggcgttgcaaaactag

SEQ ID NO: 256062 - DNA, 642 bp, Klebsiella pneumoniae; identical to SEQ ID NO: 174122

SEQ ID NO: 256063 - DNA, 1017 bp, Klebsiella pneumoniae
atggcgacatcacgacgggaattgctcaaactgggcggtctggcaaccgcatcactcgtgcttagtcaaaaaagcttcgcggcctgggcgccatctgcacgttatcccgatccgcgtattatggcggtggatgatagctttcgccgctatatgcttgccagcgcaaaagtggagcagatcgccaccggctttcgttgggcggaagggccggtatggtttggcgatacgcgtatgctgctctggagcgatattcctgacaacgtcattatgcgctgggatgaggccaccggcgctaccagcgtatttcgccaaccggcaaactacgcgaacggccacgcccgcgatcggcagggacggctcatcagctgcgaacacgatacccgacgaattacccgcactgaatatgacggtagcatcaccgtactggcggataacttcgaaggcaaaccgctgaactcgccaaacgacatcgtcgtgaggtcagacggcagcatctggttcaccgatccgcctttcggtatcagcggattctatgaagggcataaggccacgccgcagctgccgcaaaacgtttatcgactggacttggaaagccgtaaactgagcgtcgtgctgggcgacgtcaaggggccaaacggcctctgtttttccgccgatgaaaaaacgctctacgtggtggaaagccgcgctaccccaaaccggcttatcctggcgtgggatgttgtcgataacacattgaaaaacaaaagagtgcatattgactgcggtaacggaaccgctgacggcatcgcctgcgacatggacgggaacctgtggtgcgggtggggtacgggcagcgaagagctggacggcgtccgcgtcttcaatccgcaggggaaaaacatcggtattattcagttaccggaacgctgcgccaacctgtgcttcggcggtgaacagcgcaaccgcctgtttatggcatccagcacgtccatctattcgctctacgtcaatgcgcaaggcgcaaagctggtctga

SEQ ID NO: 256064 - DNA, 534 bp, Klebsiella pneumoniae
atgctcgaatccagcgacgggagtcagcgtatcaccacggcgaagctggcggcctccgttggcgtatccgaagcggctctgtatcggcatttcccgagcaagacccgcatgtttgatagcctgattgagtttatcgaagacagcctgattacgcgcatcaatttgattttaaaagatgaaaaagacaccaccgcgcgcctgcgtctgattgtgttgttgattctggggtttggcgagcgtaatcctgggctgacaagaattctgaccggccacgcgctgatgtttgaacaggaccggcttcaggatcgcataaaccagcttttcgagcgtattgaagtccagctgcgtcaggtgatgcgtgaaaagaaaatgcgtgaaggtgaaggctactccgtcgatgaagccctgctggccagccagctgttggcattctgcgaagggatgctgtcgcgctttgtgcgcagcgagtttaaatatcgcccgacggacgattttgacgcccgctggccgctggtcgccgcccagctgaagtaa

SEQ ID NO: 256065 - DNA, 987 bp, Klebsiella pneumoniae
atgaaaacaaagacaagcttgatcctcaccgttgccatcctggcgttgtccggttccgctttagccgaagtcaaaatcgccctcgtggcgaaatcattgggaaatggattcttcgaagcagcgaacgtcggcgcgcaggaagcggccaaagagttaggcgatgtcaaagtgatctataccggcccgaccaccaccaccgccgaagcacagatcgaagtgctgaatggtttgatcgcccaaggggtggatgcgatcgccatttccgctaacgatcccgatgccgtggtgccggtgctgaagaaagcgatgcagcgcggcattaaggtggtctcctgggactccggcgtcgcgccggcgggacgccagatccatcttaatccgtccaataacgccttgattggcgaaaccaacgttaagctcgccgccaatgcgctgaaggcgctgaacgtggaaaaaggcgaggtggcgattttaagcgccaccccaacctccaccaaccagaacatctggattgaggagatgaaaaaggtgctgccgcagtatccgtccgtcaatctggtgaccgtcgcctacggtgacgatctgtcggataaaagctaccgcgaagcggtgggcctgctgaagtcatatcctgacctgaaagtaattgtttcgccttcgtcggtggggatcgttgccgctgcgcaggcggtgaaagatcagggcaaaatcggcaaggtctacgtgactggcctggggctgccatcggaaatggcgggggcgattaagtccggcgccagcaaaagctttgctatctggaatccgatcgaccttggctatgccgccacgtatctggccgacgatttagtcaaaggcacggcgaccaaaaccgaagccaatatgggcaagctgggcaaagtgaagctcgacgccgacggtagcggcgcgatggccgaaccgttcgtctacgatgcgagcaatatcgataagttctcgaagattttctaa

SEQ ID NO: 256066 - DNA, 831 bp, Klebsiella pneumoniae
atgcagaccattatcgacgcctggttcgtccagggaatgattaaagccacttccgacgcctggctgaaaggctgggacgagcgcaacggcggcaacctgacgctgcgcctcgacgaagcggatattgaaccctacgcggcggatttccatgctaaaccgcgctatatcgccctgagccagccgatgccaacgctggccaaccagccgtttatcgtcaccggttccggtaaattcttccgtaacgtccagctcgacccggcggcgaacctcggcgtggtgaaagtcgacagcgacggcgcgggataccatattctttggggtctgaccaacgatgcggtaccaacatccgagctaccggcgcacttcctgtcgcacagcgagcgtatccgcctgaccaacggcaaagaccgggtgatcatgcactgccacgccactaacctgattgccctgacctacgtgctggagaacaacagcgatctgttcacccgtaagctctgggaaggcagcaccgaatgcctggtggtcttcccggacggcgtcggcattctgccgtggatggtgccgggcaccgacgaaatcggccaggccaccgctgaggcgatgcagaaacactcgctggtgctgtggccgttccacggcgttttcggcagcggccccaatctggatgaaaccttcggcctgatcgataccgccgagaaatccgctgaggtgctggtgaaagtctattcaatgggcgggatgaaacaaaccatcacccgcgaagagctggtcgctcttggcaaacgcttcaacgttcaaccgatgcagtccgcgttagacctttatcaataa

SEQ ID NO: 256067 - DNA, 1260 bp, Klebsiella pneumoniae
atgaccactcaacttgaacaagcctgggaaattgccaaacagcgctacgccagcgtcggcgtggatgtcgaggaggccttgcgccagctggaccgcctgcccgtttccatgcactgctggcaaggcgatgacgtcgtcggtttcgaaaacccggaaggaagcctgaccggcggtattcaggccaccggcaactacccgggaaaagcgcgtaacgccaacgagctgcgcgccgaccttgagcaggcgttgagcctgatccccgggccaaaacgcctgaacctgcacgccctctatctggaatccgacgcgccggtagcgcgtaatgaaattaagccagagcactttaaaaactgggttgagtgggcgaaagccaacaagctggggctggattttaacccctcctgcttctcgcatccgctgagcgctgacggctttacgctgtcgcacgccaacgatgaaatccgccagttctggatcgatcactgcaaggccagccgccgcatttccgcttacttcggcgagcagctgggcacgccgtcggtgatgaatatctggatcccggacggcatgaaggatattaccgttgaccgcttcgcgccgcgccagcgcctgctgaacgcgcttgatgaagtgatcagcgagaagctggacccggcgcaccatattgacgccgtagagagcaaactgttcggtatcggcgcggaaagctacaccgtcggttccaatgagttctatatgggctacgccaccagccgccagactgccctgtgcctggatgccggccacttccatccgacggaggtcatctccgataagatttccgccgccatgctctatatcccgcgtctgctgctgcacgtaagccgtccggtacgctgggacagcgaccacgtggtgctgctggatgatgaaacccaggccatcgccagcgaaatcatccgccacgatctgttcgaccgcgtgcatatcggtctcgatttcttcgacgcctcgatcaaccgcatcgcggcgtgggtgattggtacccgcaatatgaagaaagcgctgctgcgcgctctgctggaaccaaccgagcagctgcgtcagctggagctcgacggcgattacaccgcccgtctggcgctgctggaagagcagaagtgcctgccgtggcaggccatctgggaaatgtactgtcagcgtcacgatacgccggcaggcagccagtggctggataacgtacgcgcttatgaaaatgcggttctgagccagcgcgggtaa

SEQ ID NO: 256068 - DNA, 1467 bp, Klebsiella pneumoniae
atgagttttcgtcattgtgtcgccgttgatttaggcgcctccagcgggcgggtgatgctcgccggttatcaacccgggcagcaaacgctggcgctgcgtgaaattcaccgttttaccaatagcctgcagaaggtggatggtttcgactgctgggatctcgatagcctggaaggggaaattcgccgcggtctggagaaggtctgcgaacagggcatcctgatcgacagcatcggcatcgatacctggggcgtggattatgtcctgctggataaagcgggccagcgcgtcggcctgccggtttcctatcgcgattctcgtacccaggggctgatgcgccatgccgaagagcagctgggccgggcggagatctaccgccgcagcggcattcagtttctgccgtttaacaccctttaccagctccgcgcgctggttgaacaacagccggaactggtcagccaggccgcgcatgcgctgctgatcccggactactttagcttccgcctgaccggcaacatgaactgggagtacaccaacgccaccaccacgcagctggtcaacattaacagcgataactgggatgaagagctgctgaactggagcggcgcgccgcgcgaatggttcggtacgccgacgcaccccggcaacgttatcggccactggatatgtccgcagggcaataacatcccggtggtcgccgtcgccagtcacgataccgccagcgcggttatcgcctcgccgctggccagcaaaaacgccgcgtatctctcttccggcacctggtcgctgatgggctttgaaagcaaaaccccctgcaccagcgatgcggcgctaaaggccaatatcaccaacgaaggcggggccgaaggccgctatcgggtactgaaaaatattatgggtctttggctgctgcagcgggtgctcaaggagcaaaacgtcagcgacctgccgacgctgatcgcacgcaccgctgcgcttccggcctgccgctgcgttatcgactgtaacgatgaccgctttatcaacccggacaacatgagtgcggaaatccaggccgcctgccgcgaatccgggcagccggttcctgccggcgacgccgagctggcccgctgcattttcgacagcctggcgctgctctacgctcgggtgctcaacgaactggcggcgctgcgcggtcagccgttcagccagctgcatattgtcggcggcggctgccagaacgaactgctcaatcagctttgcgccgacgcctgcggcatcaccgtggtcgctggcccggttgaggcctccaccctgggcaatatcggcattcagctgatgaccctggacgagctgcacaacgtcgatgaattccgtcaggtcgtgcggcaaaactacgccctcaccacctttacccccaatcatgaaagtgaaattgcccgctttagcgcgcagtttcagccacaacagaccaaggagctttgcgcatga

SEQ ID NO: 256069 - DNA, 837 bp, Klebsiella pneumoniae
atgactatgttgcacagtgtggatttctttaagtccggcgtttcagctgtcgccattgagccgcggctcccgcaatccgcttttcctgagcatcatcatgattttcatgagattgttattgtggagcacggcaccgggattcacgttttcaacggccagccctataccatcagtggcggatcggtgtgctttatccgcgatcacgatcgtcatctctacgagcacacggataatttatgcctgactaatgtgctctatcgcgcgccggacgcatttcgctttttgtccggcctgaacgaactgttgccgcaggagcaggaggggaactatctctcacactggcgggtgaatcagaatgcattgcagcaggtgcggcagattgtggagcagatggagaacgttggcgcggatgcggatatgcatgccatcgccagccgcgagattttatttatgcaactgctggtgcacctgcgtaaaagcagcctcgccgaaggcgcagccaacaatgacgcgcggctcaaccatttaatggcctggctggaagatcattttgctgaagatatctgctgggaagaggtggcggcgcggttttcgctctctttgcgaactctgcatcgtcagttaaaacagcaaaccggactgacgccgcagcgctacctgaatcgggtgcggttgatgaaagcgcgccatctgctgcgccacagcgatgacagcgtgaccgatatcgcctatcgctgcggattcggcgacagtaaccacttttcgacgctttttcgccgtgaatttgactggtctccgcgcgatattcgccaggggcgcgacgccattcttcagtaa

SEQ ID NO: 256070 - DNA, 849 bp, Klebsiella pneumoniae
gtggcaggtcagctgattcttcgcaaagatgaattttttgcctcccccgctcaggcggtggcggtagcggatcgctatccgcaaaacgtcttcgccgagcacacccatgagttctgcgaactggtgctggtgtggcggggaaacggcctgcacgttcttaacgatcgcccgtggcgcattacccgcggcgatctgttctatatccgcgcggaagataagcactcctacgcctcggtaaacgatctcgtcctgcaaaacgtcatttattgcccggatcggctgcggcttaactttgactgggcggcgcacattccgggcctgttcggcaccccgtgggttccgcactggcgaatcggcagcagcggtatggcccaggtcagacaggtgattacccagctggagcatgagagctgtcgtagcgatgcccaggccaataatatggccgaactgctgtttgcgcagctggtgcttattcttcagcgctatcgctacgccaccgataatctggcggcaactcaaagcgaagcgctgctcgataagctgctcaccgagctggcgggcagcctcaatcgtcccttctttcttgaccgtttttgcgagcgggaagggtgcagcgagcgcgcgctgcgccagcagtttcgtcagcagacggggatgactatcaaccactacctgcgccagctgcgtatttgccacgcgcagtatctgctgcagcataccgaacggctgattggcgaagtggcgatgcagtgcgggtttgaagacagtaattacttttcggtggtgtttaaccgcgagataggcatgacgccggggcagtggcggcagcgcagtcgcgccgccgcctga

SEQ ID NO: 256071 - DNA, 1035 bp, Klebsiella pneumoniae
atgaatcacgcgattacgatgggtattttttggcatttgataggtgcggccagtgcagcctgtttctatgccccgttcaagaaagttaaacattggtcctgggaaaccatgtggtctatcggcggtattgtctcctggctgatcctcccctgggccatcagcgccatgctgctgcccgacttctgggcctattacggttcttttaacgcctccacgcttctgcccgttttcctgttcggtgccatgtggggcatcggtaatattaactacggcctgacgatgcgctatctcggcatgtcgatggggatcggcatcgccattggtattacgttgattgtcggtacgctcatgaccccgattctcaatggtcagtttgatgttctcattaacactaaaggcggccagatgacgctgctcggcgtgctggttgcgctgattggcgtgggcatcgtcacccgtgcaggccagttgaaagaacgcaaaatgggcatcaaggccgaagacttcaatctgaaaaagggcctgctgctggcggtaatgtgcggcatcttctccgcaggtatgtcgttcgccatgaacgccgccaagccgatgcacgaagccgccgccgcgctcggcgtcgacccgctttacaccgcgctgccaagctatgtggtgatcatgggcggcggcgcgctggttaacctcggcttctgctttatccggctggcaaaagtgaaaaatttgtcgataaaagccgacttctcactggcaaaaccgctcatcatcagcaatatcctgctttccgcgttaggcggcctgatgtggtatctccagttcttcttctacgcctggggccacgccagcatcccggcgcagtacgactacatgagctggatgctgcatatgagcttctatgtgctgtgcggcgggcttgtaggcctgatcctcaaagagtggaacaacgccggtcgtcgtcctgtgggcgtcctcagcctcggctgcgtggtgattatcatcgccgccaatatcgtcggtctgggaatggcgaactag

SEQ ID NO: 256072 - DNA, 621 bp, Klebsiella pneumoniae
atgagttatacactgcctgccctgccgtacgcttatgacgccctggaaccgcattttgacaagcagacgatggaaatccatcacactaaacaccaccagacctacgttaataatgccaacgcagcgctggaaagcctgcctgaattcgcgaacctgtccgcagaagagctgattaccaaactggatcagctgccggcagacaaaaaaaccgtgctgcgtaacaacgctggcggccacgctaaccacagcctgttctggaaaggcctgaaaaccggtaccaccctgcagggcgacctgaaagcggctatcgagcgtgatttcggttccgttgataactttaaagcggaatttgaaaaagcggctgctacccgtttcggctccggctgggcgtggctggtgctgaaaggcgacaagctggcggtggtttctaccgctaaccaggactccccgctgatgggcgaagcaatctccggcacttccggcttcccgattctgggcctggacgtatgggaacacgcttactacctgaaattccagaaccgtcgtccggactacattaaagcgttctgggacgtggtgaactgggacgaagccgcagcgcgttttgccgccaaaaaataa

SEQ ID NO: 256073 - DNA, 675 bp, Klebsiella pneumoniae
atgcactatccggtgaatgtctttgtgggcaaggtaagggattacgacggcagccgtccaagcgccatcggtaaaattcagatcgacggtgaactgaccctcggcgatttggggctggagggcgatgagcaggcggagaagaaaattcacggcgggccggaccgcgcgctgtgccactatccccgtgaacactatgcccactgggcccgtgaacttccgcagcaggcggatcttttctgcgccccggcgtttggcgaaaatctctcgaccgaagggctgacggaaaaaaatgtctatattggcgatatcttccgctggggagaggcgctgattcaggtgacgcagccgcgatcgccgtgcttcaagcttaactaccattttgccgtcagcgacatggcgcagcttatgcagaatagcggcaaaaccggctggctgtatcgggtagtggcgggcggacgagtgtccggcgatgcgccgctggcgctggtttcccgcctcagcgacgttagcgttcacgaggcgggagctattgcctggcaaatgccgttcgatgacgaacagtatcaccgcctgctatcggcggcggggctgtcggtaagctggagccgtaccatgcagaaacggcgcctgagcgggaagatcgaaaataattcgcggagattgtgggggaaatag

SEQ ID NO: 256074 - DNA, 1374 bp, Klebsiella pneumoniae
atgattggaagtttaaccgcacgcatcttcgctattttctggctcacgctggcgctggtgttgatgctggttctgatgctgcccaagctggactcgcgccagatgaccgagctgctggagagcgagcaacgtcagggcatcatgattgaacagcacgtcgaggccgaactggcgaacgatccgccgaacgacctgatgtggtggcgtcgtctgtttcgcgctatcgataagtgggctccgccgggccagcgtttgctgctggtcaccagcgagggtcgcgtcatcggcgcggaacgcaacgaaatgcagattatccgcaactttatcggccaggcggataacgccgaccatccgcagaaaaaacgctatggtcgtctggaaatggtcgggcctttttccgtcagggatggagaagataactaccagctctatctgattcgccctgctaatacctcacaatcagacttcatcaatctgctgttcgaccggcctttgttgctgctcatcgtcacgatgttagtcagcgccccgctgctgctatggctggcgtggagcctggcgaaacccgcgcgtaagctcaaaaatgccgccgatgaagtcgcccagggcaacctgcgtcagcatccggagctggaagccggtccgcaggagtttttagccgcagggaccagttttaaccagatggtgaccgcgctggagcgcatgatgtccagccagcatcgtctgctgtccgatatctcgcacgaactgcgcacgccgctgacccgcctgcagttaggcaccgcattgctgcgccgccgcagcggggaaagcaaagagctggagcggattgagatggaagcgcaccggctggatagcatgatcaacgacctgctggtgatgtcgcgcaatcaggcgaaaaccgcgctggtcagcgagacggtgaaagccaaccagctgtggggcgaggtgctggataacgccgcctttgaagccgaacagatggggaaatcgttcaccgtcgagtatccgccggggccctggccgctgtacggtaaccccaatgcgctggaaagcgcgctggagaatatcgtgcgtaacgcgctgcgctactcgcataccaaaatttcggtaagcttctcggtggataaagatggcatcacggttaacgtcgatgatgacggcccgggcgtaagtccggaggatcgcgagcagattttccgtccgttctaccgtaccgatgaggcgcgcgatcgcgagtctggcggtaccgggctggggctggcgattgtcgaagcggcaatccagcagcatcgcggttgggtgaaagccgacgacagcccgctgggcggcttgcgcttaaccctgtggctgccgctgtacaagcgtacctga

SEQ ID NO: 256075 - DNA, 633 bp, Klebsiella pneumoniae
atggaaggttttaatgtgctcgtagcccatgacggggaacaggcgctggcccttctggacgacagcatcgatttacttttgcttgatgtgatgatgccgaagaaaaacggtatcgatacactcaaagagttgcgtcagacgcaccagaccccggttatcatgctaacggcccgcgggagcgagctggatcgcgttctcggcctcgagctgggcgcggacgattatctgcctaagccgttcaacgatcgtgagctggtagcgcgtatacgcgctattctgcgccgatcgcactggagcgagcagcagcagacaaccgaagccggttcaccgacgctggaagtggatgcgctaagccttaaccccggtcgccaggaagccagcttcgatggcgtgaccctggaactgaccggcaccgagttcaccctgctctatcttctggcgcagcatcttggccaggtggtatcgcgtgaacatcttagccaggaagtattaggtaaacgcctgacgccattcgaccgcgcaatcgatatgcacatctccaacctgcggcgtaagctgccggagcgcaaggacggccatccgtggtttaaaacgctgcgcggacgcggctatctgatggtatcggcttcatga

SEQ ID NO: 256076 - DNA, 2682 bp, Klebsiella pneumoniae
atgaagctggataaaccggcctataaacccggcgatacgatcaagctgcatattgccgctccggctgccggtaaaggctacgcgctggtggaatcaagcgaagggccgctgtggtggcaggagattgacgtcccggcggaagggatggagttatctatcccggtggataaagcctggaatcgtcacgacctgtacctcagcaccctggtgattcgcccgggggataaatcccagtccgcaacgccaaaacgggccgtggggctgctgcacctgccgcttggcgatgataaccgtcgcctgaatctggcgctggaagcaccggataaaatgcgtcctgaccagccgttgaaagtgaagattaaggccagcctcaaagaaggcgagacgccgaaacaggttaacgttctgctctctgccgtcgatagcggcgtactcaatattaccgactacgccacgccggatccctggaacgcgttctttggccagaaacgctacggcgccgatatttacgatatctatggtcaggtcattgaaggacaggggaggctcgccagcctgcgcttcggcggcgacggcgatgaactgaaacgcggcggtaagccgccggttaatcacgtgacgattatcgcccagcaggcgcagccggttatgctggatgagaaaggcgaagggacggtgaccctgccaatcggcgactttaacggcgaactgcggatcatggcgcaggcgtggacggctgatgatttcggcagcagcgaagaaaaaacgatcgtggcggcgccggtgattgcggagctgaatatgccgcgtttcctcgccagcggagataccactcgcctggcgctggatctcagcaacctgaccgataagccgcagactctcaacgttgcgctggcagccagcggtctgctgcagcttgcagggggagaaataccgccggtgcatctggcgcccggcgcgcgcagcaccctgtttgtgcccgttcgcgccctacaaggctttggcgatggtgaggtaaatgccaccatcagcggcctgaacctgccgggtgaaactttcacgccaatgcagaagcagtggaagctgggcgtgcgtcccgccttcccggcgcaaaccgtgaattccggcgctgtcctccagccgggggaaagctggcaggctccggcggcgcaaagcgagggtttctcgccggccacgttgcaggggcagctggtgtttagcggtaagccgccgctgaacctggcgcgctatattcgcgacctgaaggcctatccttacggctgcctggagcagaccaccagcgggctattcccgtcgctctataccaacgccgcccagcttaaagccctggggatcggcggcgatagcgatgaaaaacgacgcgcggcggtggatatcggcatttctcgcctgctgcagatgcagcgcgatgacggcggtttcgccctgtgggacagagaggggccggaagagtactggctaaccgcctacacgatggacttcctcgtccgggcgggcgagcagggctatagcgtaccaaccaatgccgtcaataacggcaaccagcgcctgctgcgttatttacaggagccggggctgatcgccgtccgctacagcgatgatgcccaggccagccgttttgccgctcaggcctacgccgcgctggtgctggcacggcagcagaaagcgccgctcggcgcgctgcgtgaaatctggagccgtcacgaccaggcgcgttccggtctgccgctactgcagctgggcgtggccctgaaattgatgggcgatgcgccgcgcggcgacgaagccctgaagctggcgatgaccacgccgcggcaggaggcgaaccgctggctcggcgattacggcagcgagctgcgcgacgatgcgctgaagctggcgctgctggaggagaacaaactgctgccggaagcgcaaaatacgctgctcagcaatctggcggaagaagcctacggccagcgctggctctcgacgcaggagagtaatgccctgttcctggccggacgtacgttgcaggatcttcccggcagctggcaggcgcaaacctccgtgcaggccgaaccgctctccggcgagaaagcgcaaacccgtaacctgaccggcgatcagctggcggccttgcaggtgaccaataccggtcagcagccgctgtggctccgtctcgacagcagcggctatccgcagaacgcgccgcagccggggggcaacgtgctgggcattgaacggcaagttttcgatacccagggtcagcagaaatcgctctcttcgctgcgcagcggcgaactggttttggtgaagctggaggtgacggctaagcgtaacgtcccggacgcgctggtggtggatttactcccggcggggctggagctggaaaaccagaatctggccaacagcagcgccagtctgcaggagaacggcgaggtggtgcaaaatctgcttaaccagatgcagcaggccgatatccagcatattgagtttcgcgacgatcgctttgtggccgcggtagctatcaatgaaggccagccggtgacgctggtttatctggcgcgcgcggtgacgccgggcacctatcaggtaccgcagccgcaggttgagtcgatgtacgtgccgcagtggcgggcaactggcgcagccagcggaccgctaaccgttgcgccataa

SEQ ID NO: 256077 - DNA, 2325 bp, Klebsiella pneumoniae
atgcgggtgctgaggcgtatcaaacgccgctggcgctggctggcggcgtttatttttttgctgtggctattactgctggcggcagaccggctgtggccgctgccgctgcgtgaggttacccctgccagagtagtggtggcggaagacgggacgccgctgtggcgctttgccgatgcgcagggcgtctggcgctatccggtaacgctggctgacgtttcgccgcgctatttgcaggcgctgatccactatgaagatcgctggttctgggagcatcccggcgttaacccgttggcgatcgctcgcgccgcctggcaggatctcacttccgggagagtgatctccggagggagcaccctgaccatgcaggtggcgcgcctgctcgatcctcatccccgcaccttcggcggcaagctgcgtcagctatggcgggcgctgcagctggagtggcatctgtcaaaaagcgagatcctcacgctctatctcaatcgggcgccgttcggcggcacgctgcaggggattggcgcggccagctgggcttatctcggtaaaccgcccgcacagctaagctacggcgaagcggcgctgctggccgttctgccgcaggcgccaagcaggctgcgcccggaccgctggccggaacgtgcgcaggcggcgcgcgataaagtgctgctgagaatggaaaatcagggcgtgtggccgccgcagccggtgcgagaagctatcgaagagcccgtctggctgtttccgcggcagatgccgcagctggcgccgcttttctcccgccgcgcgctggcgagcagccggtctgagaaggtagtaacgacgctggatgccgggctgcagcggcagctggaggatctggcgctgaactggaaatcgcgcctgccgccgcgcagctctttagcgatggtggtggtcgaccataccaatatgaaggtgcgcggctgggtaggatcggcggatatcagtgatgatagccgctttggccacattgatatggtatcggcgatccgctccccgggttcggtactgaaaccgtttgtttatggcatggcactggatgaggggctgatccatccggcttcgctattacaggatgtcccgcgccggtttagcgactaccggccgggcaactttgacagcggttttcacgggccggtaagcgccagcgaagcgctggttcgctcgttgaaccttccggctgtgcaggtgctggaggcctacgggccgaagcgttttgccgccaggctgcgcaatgccggattgccgctgatgctgcccgccggcgcggagccgaatctatcgctgatcctcggcggcgccggcgcgcgtctggcggatatcgtggcggcgtacagcgcgttcgcccgtcacggtaaggcggggcaactgcgcatcactcctgattcaccgctggttgaacgaccgctgctgtcgccgggggccgcctggattgtgcggcgcattctggccggcgaagcgcagccggttcccgatgcatcgctggtacaggtggtgccgctggcgtggaaaaccggaaccagctacggctatcgcgatgcctgggcaatcggcgtgaacgcccgctatctgataggtatctggaccggaagacctgacggcacgccggttgtcggacagtttggtttcgccagcgcggtgccgctgctgaatcaggtcaataatatgctgctggcgcggccggcaatgagccgcggcggattgccgagcgacccgcgtccctcatcggtcagcgccggaacggtttgctggcccggcgggcagtatttacctgcgggggatgcgaactgtcgccgacggctggccacctggctacttgatgagagtcagccgccgaccttgctgctccctggacaggaaggtatgcgtgggatccgctttccggtctggctgaacgaaaaaggacagcgggtggcggcagattgccccggcgcggtagagaaaagcttcgacgtctggccgctgccgctcgaaccctggctacccgcaggcgaacgacgtcgggtcaggctgcctgcagtttcggcggcgtgtccgccggtccaaagcgctgatgccgcaccgctggtgctctcgggcatacgcgagggcgcagtcgttaaacgactgcccggcgagcaaaaggtgatgctgccgctgcaaacgaccggaggggaagggcggcgctggtggtttctgaacggcgagccgctgctggcggaagggggcagtgcgacgcttggcatcgatcgccctgaccgttatcaactggtggtgatggatgaggcggggcaaattgttgccgcgaacttcacggtgcaataa

SEQ ID NO: 256078 - DNA, 513 bp, Klebsiella pneumoniae
atgatgattataattcgcgccgtatttatcggtctcatctgctcatctgcaaaacagaacaacatatataaagaggttatcatggctattgaacgtactttttccatcatcaaaccaaacgcggtggcaaaaaacgttattggcggcatcttttctcgctttgaagctgcagggttcaaaatcgttggcactaaaatgctgcatctgaccgttgagcaggctcgcggcttctatgctgagcacgaaggtcgcccgttctttgacggtctggttgagttcatgacttccggtccgatcgtcgtttccgtgctggaaggcgaaaatgcggttcagcgtcatcgtgacctgctgggcgcaaccaacccggcgaacgcgctgacgggtacgctgcgcgcagactacgctgacagcttcaccgagaacggcacccacggttccgattccgttgaatccgctgcgcgcgaaatcgcgtttttctttgctgaaggcgaggtttgcccgcgcacccgctaa

SEQ ID NO: 256079 - DNA, 1167 bp, Klebsiella pneumoniae
atgtctgaacaaatagtcacacctgatagcgccgcactgacggtgccgaacaaagatgccaaaatcaacctgctggatctgaatcgtcagcagatgcgcgagtttttcaaaaacatgggcgaaaagcctttccgcgccgatcaggtgatgaaatggatgtatcactactgctgcgataactttgacgagatgaccgacatcaacaaagttctgcgcggcaaattaaaggaagtcgcggaaatccgcgccccggaagtcgtggaagaacagcgctccagcgacggcaccatcaaatgggcgattgccgttggcgatcagcgcgtcgaaaccgtgtatatcccggaagacgatcgcgccaccctgtgcgtttcttctcaggtgggctgtgcgctggagtgtaaattctgctccacggcgcagcagggctttaaccgcaacctgcgggtttcggaaattatcggccaggtctggcgcgcggcgaaaatcgtcggtgcggtgaagaccaccggcgtgcgtccgattaccaacgtggtaatgatgggcatgggcgagccgctgctgaacctgaccaacgtggttccggctatggaaatcatgctcgacgacttcggttttgggctctcaaaacgtcgcgtcacgctctccacttccggcgtggtgcctgcgcttgataagcttggcgatatgattgacgtcgcgctggctatctctctgcacgcgccgaacgataccattcgtgacgaaatcgtgccgatcaacaagaaatataatatcgagaccttcctgaactcggtacgtggttatatttcgaagtccaatgccaaccagggccgcgtgacgatcgaatacgtcatgctggatcacgtcaacgacggtaccgagcatgcccacgagctggcggcgctgttaaaagatacgccgtgcaagatcaacctcatcccgtggaaccccttcccgggagcgccgtatggccgcagctctaacagtcgcatcgaccgtttctccaaggtattgatggagtatggtttcaccactatcgtgcgtaaaactcgcggtgacgatatcgacgcagcctgcggccagctggccggcgacgttatcgaccgaaccaaacgtacgctgcgtaaacgtatgcagggcgaagcgatcgacgtgaaggcagtctga

SEQ ID NO: 256080 - DNA, 990 bp, Klebsiella pneumoniae
atgaatactgaagccactcaagaccatcaagaagcaaacactacgggcgcgcgtttgcgtaacgcccgcgaacaactcgggctcagccagcaagcggtggctgagcgcttatgcctgaaggtttccacggttcgtgatattgaagacgataaggcacccgccgatctggcttcaaccttcctgcgcggctatatccgctcttatgcccgcctcgtgcacatccctgaagaagaactgctgccgatgatggcgaagcaggctcccattcgtgcggcaaaagtggcgccaatgcagagcttctcgctgggtaaacgtcgcaaaaaacgcgacggctggctaatgagttttacctggctggtgctgttcgtggtgattggcctcagcggcgcgtggtggtggcaggaccacaaagcgcagcaggacgagatctccaccatggccgatcagtcctccgccgagctgaacgctggcgataacaacagccaaagcattcctctggacaatggttcggcgaattcttccgccgataccgctgctaacagcgcgccggcagagacctcttctgcgccagcaacctcggctccggctgcgactgcggccccggtcgataacaacgccgttgttgcgccttctcaggcgaacgttgatacggcggctaccccagcgcccgccagtccaacttcgccgctaccgaccgaccaggcaaacgtgaccgctgcgccggcctcggctcaggatctggtgctgaatttcaccgccgactgctggcttgaagtgagcgatgcgacgggtaaaaagctgttcagcgggttgcagcgtaaaggcggtaatctcaatctgagcggccaggcaccttataaactgaaaatcggtgcaccggcggcggtacagatacagtatctgggtaaaccagtcgatttgagtcgttttatcagaactaaccaggttgcacgtctgacccttaatgccgaacaatcaccggcgcagtaa

SEQ ID NO: 256081 - DNA, 1122 bp, Klebsiella pneumoniae
atgcataaccaggctccgattcaacgtagaaaatcaaagcgaatttacgttgggaatgtgccgattggcgatggcgcccccatcgccgtacagtcgatgacaaacacgcgcaccaccgatgtggcggcgacggtaaatcaaattaaagcccttgagcgcgttggcgcggatatcgttcgtgtttcggtgccaacgatggacgcggcagaagcctttaagcttatcaaacagcaggtgagcgtaccgctggttgccgatatccacttcgattaccgcattgcgctgaaggtagcggaatacggcgttgattgtctgcgtattaacccgggcaatatcggtaacgaagagcgtatccgcatggtggtggactgcgctcgcgataaaaatattcccatccgtatcggggtaaacgccggttctctggaaaaagatctccaggagaaatacggtgaaccgactccgcaggcgctgctggaatcggcaatgcgccatgtcgatcatctcgatcgtctcaatttcgatcagtttaaagtcagcgtaaaagcttccgatgtgttcctcgcggtcgaatcctatcgtctgctggcgaaacagatcgaccagcctctgcatctcgggattaccgaagcgggcggcgcgcgcagcggcgcggtgaagtccgcgatcggcctcggactgctgctgtctgaagggatcggcgataccttgcgcgtttctctggcggcggatccggttgaagagatcaaagttggcttcgatattctcaagtcgctgcgcattcgctctcgcgggatcaacttcattgcctgcccgacatgttcacgtcaggagtttgacgttatcggtaccgttaacgccctggagcagcgcctggaagacatcattacgccaatggacatttcgatcattggctgcgtggtgaatggcccaggtgaggcgctggtgtcgacgctcggcgtgaccggcggcaacaagaaaagcggcctgtacgaagacggcgtccgtaaagaccgactggataacgacgatatgatcgatcagctggaagcgcgtattcgcgctaaagcatcgatgctggatgaggcgcgtcgcatcgatattcagcaggttgaagcgaaataa

SEQ ID NO: 256082 - DNA, 1275 bp, Klebsiella pneumoniae
gtggcaaagaacattcaagccattcgcggcatgaacgattatctgccgggcgaaaccgctctctggcagcgcattgaaggctcactgaagcaggtgcttggtagctacggttacagcgaaatccgtatgccgattgtagagcagaccccgttattcaaacgcgctatcggcgaagtgaccgacgtggttgaaaaagagatgtatacctttgaggaccgtaacggcgatagcctgaccctgcgtccggaaggtacggcgggttgcgtacgcgccggcatcgaacatggtctcctgtacaatcaagaacagcgcctgtggtatatcgggccaatgttccgccacgagcgtccgcaaaaaggccgctatcgtcagttccaccagattggtgcggaagcgttcggtctgcaggggccggatatcgatgccgagctgatcatgctgaccgcccgctggtggcgtgaactggggatctccagccacgttgcccttgagctgaactctatcggttcactggaagctcgcgccagctatcgcgacgcgctggtggcttatcttgagcagtataaggataagctcgatgaagattgcaaacgccgcatgtacaccaacccgctgcgcgtgctggattctaaaaacccggaagttcaggcgctgctgaacgatgcgccgacgctgggtgattatcttgacgaagagtccaaagcgcacttcgccgggctttgcgcgctgctggacgatgccggtattcgctataccgtgaatcagcgtctggtgcgcggcctcgactattacaaccgcaccgtgtttgagtgggttaccaccagcctcggctcacagggaaccgtctgtgccggtgggcgttatgacggtctggttgagcagcttggcggtcgcgcaacgcctggcgtcggctttgcgatggggctggaacgtcttgttttactggttcaggcagtgaatccggaatttaaagccgatcctgttgtcgatatatacctggtagcctccggaactgacacccagtccgcagcaatgcgtctggctgaacaggtacgcgatgcgttacccggcgttaagctgatgaccaaccacggcggcggcaactttaagaagcagtttgctcgcgctgataaatggggcgctcgcgttgcgctggtgctgggcgaagcagaaatcgctgacggaaacgtggtagtgaaagatttacgctcaggtgagcaaactaccgtaacgcaggatagcgttgccgcgcatttgcgcacacttctgggttaa

SEQ ID NO: 256083 - DNA, 621 bp, Klebsiella pneumoniae; identical to SEQ ID NO: 174599

SEQ ID NO: 256084 - DNA, 552 bp, Klebsiella pneumoniae
atgggtaaatgcaaaaaaatcatgaaggtggcctacaccctcatctgcgccagcgtgctgtttttcgtcttcagctgcctgctgtcgataccggccacctatattcaaaccgcgcgtgatgaaggggtcacgattctttccgcgctatcgatgatgccgggttcaccggcgtggctggcggtcaccgggattattgtggcggtggtagcgatgtcaaaatcgttcctcggcacctattttggcgtgattgaaggcgccagcgaaatggtcaaaaccgctctcgcccaggcggggattcgtaaaagccgcgcctttaatcgggcgatgtcgatcctgctggtctcgacgctgaccttcgcggtgtgctttatcaatcccaacgccatctcaatgatttatgcgatcagcggcccgcttattgcgatgatcctgttcatcatgcccaccctgtccacgtatcttattccggcgctgaagccttaccgttcagtgggtaacttcatcaccctggtggtcggtttgctctgcgtatcggtgatgttttttagctag

SEQ ID NO: 256085 - DNA, 873 bp, Klebsiella pneumoniae
atgtccagcgtaaaattatccggtaccgcgacgttaggcgatcgtcaggtttatcgcctgggatacggggcgatgcagcttgcgggacccggcgtcttcggtccgccaaaagatccgcaaaccgctatccgcgtcctgcaggaagcggtcgagtcgggagttaatcatatcgatacctccgatttttacggcccccacatcactaatcagcttattcgccaggcgctgcatccctaccccgacgatctgtgtatcgtgaccaaagtcagcgcccgccgggacgataaaggcaactggctacccgccatgtcgcccgcggagctcactcaggcggtagaggataatctgcgcaatctgggtctcgacgtgctggaggtggtgaatctgcgcagtatgctcggcactcacggcccggttgaggggtcgctggaagggcctttaaccaccctgctggagctgaaagaacgcggactgattcgccatatcggactgagtaacgtcaccgccagacaggtaagcgatgcgcaaaaaatgacgcctgtcgcctgcgttcagaaccagtacaacgtggcaaaccgtcaggatgacccgcttatcgacgagctggcggcgcagaatatcgcctgggtcccttttttcccgctgggcggctttaccccgctccaggcccgggagcttaacgaggttgccgcttcgctggatgccacgccgatgcaggtagcgctggcctggctgctccagcgctcgccaaatattctgcttattccgggcacctcttcgctacagcacctgcacgaaaatcttgccgccgcggaattaacccttccggccgatgcgttagccattctggataacctccagcctcacacctga

SEQ ID NO: 256086 - DNA, 702 bp, Klebsiella pneumoniae
atgacagagggaacgataaagacgagtaagtatgaaatcattgctattttcagggaagagcttcgaaagcaggcggagatagaagtttttgttaataacaaaagcacgataacccagctgacgcgggtggattttgccgagtttcatatcaccaccacctgcaaaatccccgccgggcataaagttaaatttattctgcatagcgattcagggaaaatcgaattttgctctacgctaaagaaaatctatgccagcagcgaagggaaaggcaataaagttgcgtttaccctgcctgaatgtatccaggtggtccagcgccgccgcgatccccgattccgtctgcgccacgagcatgaattcttctgtcacggcaggcacaaaaatggagaaaattatcttttcgaaatcaaagacatttcggatggcggctgcgcgctgatgacccaaagccctaatctgaaattcctcagccataacgccattctcaagaatgcgatcctcgccctcgccgaatatggcgaagttaccgtagatttagtcataaaaaacgttgtcatggtgactttagatgataacgagaagccggacagctactaccagatttcttgtcagtttaaatttcgtaacctcgataacaagaagagaatagagaaagtgctgctcgacttgattatggaagccaaaagaaaaaagagagtctga

SEQ ID NO: 256087 - DNA, 585 bp, Klebsiella pneumoniae
ttggacagtatattactctacactgatgacaatatcattggacaagccattcacgattatatgatcgatcgcgccaggcgcatcacgaccctgaactttcaggatattgtcaaaggtatctgcgccccaccgaccgcgacggtcattatcaatatcattcacaaagatatctctgcggccaccacggtcgcattactcaacaccttacgaaagcgcctgacgcactgtgcgctgctggtgctgattgtaaaaagcgagctctccagcctgtttcgggaactgattgacatggacaaccttttgattcttacagaaaaatcttctttatcagactattcagctatcctcagcaaacccttgaccgccgaaggctgccaggcgttatgcacccaacgcaggctgaccgccagggagcttcaggtactggagttaatcatcgcctgcaacaacagcaaacgaatcgcagcgctccttgatattgaccacaaaacggtacacagccaccgggtacatattatgaaaaaattgggaatgaatagctcacgaataatgcataaaagcatagtcaatatgtatcactgctga

SEQ ID NO: 256088 - DNA, 996 bp, Klebsiella pneumoniae
atgtcgctaatgaaaaaactgacgctttttattggcttaatggcgatgggaaccacgtcggcatgggcgtactgtacgcgtctgtcgcagccgaccgttaacctcgacatggtggtggggagggtggtggttccaccggacctgccggtaggatcggtgatcgtttcccgtaactggactatgtcggcgccgggcggggccagctatagctgcagcagcggcaataaccgctttgcggccaaaatcgtttccaccggcgcgacggatctgggaaataaaatttactctaccaacgtgcccggtatcggcctgcgctttagccgcggcggggcgacggtgaatattatctacccggatgtttactcgagctacgccagcaggaccacgaattactcgctggaaggctcacgctttacgctggaagtgattaaaactgccagcgtgaccgggagcggtactctggcggcggggaaatatacctcttatgactgggagaacggtaacaacccgattctggtgacgtacctgagcgccaacgcgatcaccgtggtgtcgccctcatgcactatcctgagcggcaaaaatatgaacgttgatgttggcaccattaagcgcagcgatcttaacggcgtcggcactaccgccggaggtaaggattttaatattgagctgcagtgcagcggcggattaagcgagtcggggtatgccaatatccagacctctttttccggtacgctggcgaccggcaccacgaacgcccgaggcgcgctgctgaatgaaaaatccggtagctcgctggcgaaagggattggtattcaggttttgaaagatggcgtgccgctggagttcaacaaaaagtacagcgtcggtacgctgcgcacgcaggagacccgctatatcaccctgcctctgcatgcgcgtttctatcaatatgcgccgaccaccagtaccggtgaggtggagtcgcacatgatctttaacctgacgtacgattaa

SEQ ID NO: 256089 - DNA, 723 bp, Klebsiella pneumoniae
atgttaaaacctgttgagcggattgaagacgatgaatcgctggccctggcgatggcggcagtggcgtcggcaatggcggatgcctcgcggttgaagatactttgcgccttgatggatggccgggcgtggacggctaccgagctttccaccgtggccgacatttccccctccaccgccagcgcgcatcttagccggctggtcagcagcggtttgctgatgtgccttgcccagggccgccatcgctactaccgcctcgccggtagcgatgttgccggattgctggaaaatatgatgaccatggctggcaagcgtgcggtggcgctgtccaccgcaacgccggttaatttacgcgtcgcgcgtacctgttacgatcatctggccggcgaagtggcggtatcactgtatgattttctgctgcgcgaagcgtggatagcgcctgatggcactgctctgacgcccgtcggcgaagcgcagtttgcgcgcctggggataatgacgaagagcggctcccggcgcaaagcgtgctgcggctgcctggactggagcgaacgtcgctttcatctcgggggggcggcaggcgcggcgctgctgcagcacggtctgcagaaaggctggtttaccactaccccgggattccgcgaagtgacgattacgtcagcaggatggcgagcgctacatcagcattttcagctggcgaaaaatacccgatcagcgagtgattaa

SEQ ID NO: 256090 - DNA, 312 bp, Klebsiella pneumoniae
atgattgcagtactctttgaagctgaggttaccccggcgagccaggagcgctacttaaggctggcggcagagctgaagccgctgctgagcgatattgacggttttattgccattgagcgttttcaaagcctgactgcggcaggcaaaattctgtcgctctcctggtggcgggatgaggatgcggtactggcgtggaggcgcaacctttgccatcaggctgcgcagaaagagggacgggagagcatcttcgcctgctatcaaattcgggttgcccgggtgctgcgcgaatatcgttctcaacatgccgattaa

SEQ ID NO: 256091 - DNA, 1857 bp, Klebsiella pneumoniae
atgctgaaagcgcagcagatcggtatcaccccggaacagatgattggcgaaatgagtcaggagcatcagaccgattttgctggcttcgacatcagctacgacaactatcactccacgcacagcgacgaaaaccgcgagctgtcggagcttatctatacgcgtctgaaagagaacggttttatcaaaaaccgcaccatctcccagctctacgatccggaaaaaggcatgttcctgccggaccgttttgtgaaaggcacctgtccgaagtgtaaatcaccggatcagtacggcgataactgcgaagtatgcggcgcgacctacagcccaaccgagcttatcgaaccgaaatcggtcgtctccggcgcgacgccggtgatgcgcgagtccgaacacttcttcttcgacctgccgtcgttcagcgaaatgctgcaggcgtggacccgcagcggcgcgctgcaggagcaggtagcgaataaaatgcaggagtggtttgagtccggcctgcagcagtgggatatttcccgcgatgcgccgtacttcggctttgaaatcccgaacgcgccgggtaaatatttctacgtctggctggacgcgccgatcggctacatgggttcctttaagaacctgtgcgacaagcgcggcgacgccgccagcttcgatgagtactggaagaaagactccaccgccgagctgtatcattttatcggtaaagacatcgtttacttccacagcctgttctggccggccatgctggagggcagcaacttccgcaaaccaaccaatctgttcgttcacggctacgtgacggtcaacggcgcgaagatgtccaagtcgcgcggaacctttattaaggccagcacctggctgaaccactttgacgccgacagcctgcgctactactacaccgccaagctctcttcgcgtatcgatgatatcgatctgaacctggaagatttcgtgcagcgcgttaatgccgatatcgtcaacaaagtggtgaacctcgcctcgcgcaacgccggttttatcaataagcgtttcgacggcatgctgtccgccgagctggccgatccggcgctgtacaaaaccttcaccgatgccgcagcaagcattggcgaagcgtgggatagccgcgagttcggtaaagccatccgtgaaatcatggcgctggccgacgtggcgaaccgctacgttgacgagcaggcgccatgggtggttgccaaacaggaaggccgcgatgccgatctgcaggccatctgcaccatgggcctgaatatgttccgcgtgctgatgacctggctcaagccggttctgccgcagctggccgcccgcgccgaagcgttcctcaacagcgaactgagctgggaggccattcagcagccgctgctcggtcacaaggttaacgcctttaaagcgctgtataaccgcatcgaaatgaagcaggtggaagcgctggtcgaagcgtcgaaagaagaagtgaaagcgctgtcagcgccggtcaccggaccgctggcggacgatccgattcaggacaccatcacctttgacgatttcgccaaagtcgatatgcgcatcgcgctgattgaaaacgccgagttcgtggacggttccgacaagctgctgcgcctgacgctggatctcggcggcgagaagcgcaacgtcttctccggcatccgctccgcctacccggatccgcaggcgctgattggccgcctgacggttatggtcgccaacctggcgccgcgtaaaatgcgcttcggcatctcggaaggcatggtgatggccgcaggccctggcgggaaagatattttcctgttaagcccggacagcggcgcccagccaggccagcaggtcaagtaa

SEQ ID NO: 256092 - DNA, 3738 bp, Klebsiella pneumoniae
atgaaatcttttatttatcaggacgaaaaatcacataaattctgggcggtgaaacagcaagataacgagctgcatctgagctggggcaaggtcggcaccaacggccagagccagattaaaacctttgccgatagcgccactgctgcaaaagccaaacagaaactgattggtgagaaaacaagaaaaggctacgcagagaataccgcggcggaaaaacgcccgccccaggctgtcgctagccaatctaataaccgaccctggctcgctgatgatgcccatataccgctcacggaggagatcggctggtttgctttccctcaccgtaaccgttccagaccgtttaataccacaccggacggcaatcagatttggcaacgcattaccaggaatgataaagccgaattcaggccatccgactatcatttcacgtcaccggcctgggaacaggcctacgctgagctacaccaacggattaagcataatcaatccaccggaagcctgctttccgaagcggctcttctcgggaaaatgggctattattctggtgatttaatcgacctctttgtgacgcaatacgggcttgaaaccacggttgagatcgcctgtcataccctacaagtggcatgcaagtacgatgatgatcttaagaaaattgtcgtatgtagcgaccttcctgttaacgaaacagaatatctgcccgactggctcccgcgcttgtgtcatcatctttcattagcgccagaggaagagtggctacgctgtgtcaaaaaactgattgctgctattcctgagctttctcccgctatgcagccgtttgtcgcactgatgttgccagagcgtccggatatcgccaatgagatagcattgcgtttcgccgcagaagagattccggcaatggcgtggttgaaaatggtcgtcgatgccccttctgcactgattacgctagaaaaatatccgttgcctccactttactctcactttctcccctatgttgccacattgatagccaaccaaggcatgatcggggtaagtcaactcgtcaacgatttggacgaaaaggaagcaagcacccaattacctgagcttgaagctactgactatttcactaagtggttagctaagacgaaccatccggatgcgcttaagatattaattcttggtgccggtaacaaaaataagcgtctgggatatttaagtaaggccagtcaaaaatatcctcatgcagccattgccgcttatgcgtcgctgctgacgagctatgaagatccgatctggcgcaaagcgctaacggtactcatcagcgctgaaccagctcgggtagagcaagttctgccatggattgacgcacacgccgcagaaacgttaaccgcgacgcggccgcatagcgactcatcagcagaatatgccagcccggagaccctaccagaaatactggtatccccgccgtggctaaagcaaaatcaaaaaagcacatcaccagtattcaaactatcaatactccccgtcacttctacgctaagcctgacgccggcaataacggaagagctaactggctacgattacagtgattaccactgccaattcagttacgcggacctgccgccatttgaaagctatcattgggaaaaagtgacggagccattcaccccggaacaaaactttctgtggcgtctggggtttgaaaagtggcaacagttaacccctggcacatcgcaaaaagtccccattccgcaaagcgccgtcacagccctgcaatgtgcagactatgccaccttgataaatgagttccatcagtatacgggtaagcagtattcgcaatggaagctgtatctgctggcctggatgccgcgcgagcaagcattagccctgctggatgctctggctgatgaacctcacaaaggcgaagaggggatcttacccatttttggcatcgatgccctgccgatatttgtccgttatcttaaacacgatcgccagtcgctgtggccgtttaccccctattgcggcacaaccgatttggcactgccgatggcacaaaacttcagccgcaaaaaaacgctgcgcgaagatgcccgaagctggttacttgagtatcccgaacatgccattgccgggttattgcccgcagcgctaggaaaagcgtgcaaagacagggacgacgctcaacaagctttgcgattactggccgaaaataatcaccgttctctgataacccaaatagcacagcgctatcaacaaccggagattatcgctgcactgggagcctttctcgacgcaggagactttcacgatttcccgacgaaaattcagcctttgcctgaattttatcaatttgcactgtggcgcagaccacagctcaaaagctcggggttgccgttgccggataacgccatgcgttacctcggcgatatgttgaatttcccacgcgaagtgaaactttataccggactgaataccgtaaaaagcatctgcactccaacatctctggctaactttgcctgggatctttttaacgcctggattgaagccggaggcccttcaaaagcgaactgggccttcacgacattagcctttttcggtaatgacgataccgcgcgagcgctgacgccgctcatccgtgcctggcctggagaatcacaacatcaacgcgcagcgcttgggttggatattctggcagaaatcggcagcgacatcgctttgatgttgctaaacggcattgcgaaaaaaatcaaatttgcggcgctacaggagaatgcacagaacaaaatcaagcaaattgccgaacagcgtgaactgaccattgccgagctggaagaccgcctcgccccggatctcgggctggacgacaacggcactctggttctcgacttcggcccccgccgctttacagtcagcttcgatgaaaccctcaaaccctttgtgcgcgatgaaagcggtcgccgcctgaaagacttgccaaagcccaacaaaagcgatgatgaaacgctggcggccgcagcggtcaatcgctataaatcgctgaaaaaggacgcccgcaccgtcgccacccagcaaatcatgcgccttgaaaccgccatgtgcctgcgccgccgctggaccgccgaacagttccgcctgttcctcgtcgaccatccgctggtgcgccatctcacccgccgcctggtttggggggtctatagccaggaaaacgtcctgctggcctgcttccgcgtcgccgaagataacagctacagtgacgcgcaagataacccgttcagcctgcctgaagggcaaattggccttccgcatgtgctggaaatctccgcggaagacgccgccgccttcggccagctgtatgccgactatgaactgctgccgccgttccgccagctcgatcgcaaccactatcgcctgacggaaagcgaaaactgggccacagaattaacgcgctggcgcggacgccagagccaggccgggcgcatcgtcggactggagcgcaaaggctggcagcgaatagaagatggcggcagcatctgcggcatgtacaaatctgctgccagcggcgacatggtgctggaaatggaacctttttcgctgctgtatggtgaaacaggatatgacgaattgatcccgcttgataacgtgaaaatcgttcctgcgggcgatatttacttcggaaagccgactttcgccttctccaccctcgacgccatagccgccagcgaactgattaacgatatcgaatcgctattcgattaa

SEQ ID NO: 256093 - DNA, 3738 bp, Klebsiella pneumoniae
atgaaaacgtttatttatcacgacgacaaatcgcataagttctgggcggttgagcagcaggataacgaactgcatctgagctgggggaaggtgggtaccagcggccagaagcagattaaaacctttgccgacgcggcagcggccagtaaggccgggcagaagctgattaatgaaaaaacccgcaaaggctacgttgagcaaggcgaaaccacgccgtctgcggcagccagcctgccggaggaaccggcatctaccccagctgcgccgccgcccgcatgcgccaccgtgcctgcagacatagctcgtccgtggctggcggacgatgccgaactggctttgtcagatgagctgctgcaagatgtgctcccttcacgccgctttcccggtcaaccgatcgccgcgcccgcagatagcgaactgatgaatctcggcaaagagatccaccagcagtccgggaaagccgtgacctttgactatgccgactgttccgcctactggcagcaaaccatcaacgaagcccttagcgatggcccgctctctcctgctgcgctggcggtgcagctcgccctcgccacgcgtcgcggctggcgcagcagcgacaatgccgacctgatggacgaaattgtttacgtctacggactggaatacgccgtcgagacgtttattgccctgcagcacattgcttttgattacaattaccagaccctgcaggtgaccttcctttcagaacccaccagcgcgcgcgggcccgggatgctcgacgtgcgcctgcgcgcgcatctggctcaggccgatgaaccgctctggcagcgctgcgtgaataaactgatcgccgcgctggcggatatgcccatcgggcagcagccgctggtggcgctattgctgcccgatcgcccggatatcgtccacgaaatcacccgccgggtgctggcgcataaaaatatcagaacggcggaatggctgaaggtggtggttcgcgacccgcagctcgtcaaagcgctggagccttatcgggcggagaacctgtttaacgactactaccacggcagcgtctggaacgcgacggtgatgcgcgaacagggcgttgccggcatcgcccgcttcgcaccctacgttcatgacgatctgtgcggtaagctggtcagccaaattaaccatccgcaggcgctgagccagctaatcctcgcaagcgagcagggtaagcgttgtcacgaacggatgacccaggccagcgcgcgcttcccgcacgccgcgctggcggcgctggctgaactgctgacgcagaaagaagagaaacgctggcgcattatgctgatgaccctgctcagcgggcagccggggctagtcggagaaattgtgccgtggatctctgaacaggccgcgacgctactggaagcctgccagcagcagttaagccagcaggccgagtgcgcccgcgacgatatgctcccgccggtgctggtcaccccaccctgggcggcgaaaaagaaaaaatcccccattgcacagctgaatctgccgccgctcccattagagccggtctgtatgctgacggaagaggcaagcaaacagcttctcgaacagcgtagctggtatgcccgccaactcgataatggcaaagaaaaagatgaaaaggagctcctgtcccgcttaggtttccacagctggaaccggagccaaaatcgctatgaagatgtctccaataccgctatcgatgcctggcaacgacaggattatccggcgctgattgcggaatttaagaatacccatacctatcgccaggaagagtggaagctgtacatgctcgccgccctgcccgccggacgggcgctacaggcctggaacgcgctcagccaggagccccacaccggcgcagactttgtgatggcgcacctgcgtcttgccggtttgccgggctttatccactccttctcacgctatccgcaggaaaacctgtcggttgcgatctggtttgccgccagcgaactggcccccatcatcgcccgcgcttttaacaagcttaaatcgctgcgtgaaggcgcgcgcgaatggctgctggcctatcctgaacatgcgattaccggcctgctgcccgccgccctcggcaaagcgggcgaagcgcaggacagcgcgcgcctggcgatacgtatgctggtggataacggccatcagccgctgcttgaagaggtcgcccggcgctacaatcagccggcggtaacggaggccgttagcgccctgctcgccctcgatccgctggataaccatccgaccaaaattccgccgctgcccgcgttttaccagcctgcgctgtggacgcgtccgctgctgcgggaaaatggcctggcccttccggatggccccttaaaagcgctcggcgaaatgctgcgcttcccgtcagaggaggggatttatcccggcttgcagcgggttaaagatctctgtactgccgaatcacttgccgcctttgcctgggatctgttcagcgcctggcaaaccgccggagcgccatcgaaagagagctgggcgtttaccgcgctcgggattttcggcaacgatgataccgcccgggccctgacgccgctgatccgcacctggcccggcgaatctcagcataagcgcgccaccgtcggattagatattctcgccgccatcggcacggatatcgccctgatgcagcttaacggcatcgcccagaagctaaaattcaaagctctgcaggaacgcgccagagagaaaatcggcgatatcgctgaaagccgcgggctgaccgtggaagaactggaagaccgcctggcgcccgatctgggtctgaatgaggatggtaagctcaccctcgattttggcccacggcgctttatcgtgagctttgatgaagcgctcaaaccgtacgtccgagatgaaaacggcagccgtctgaaagatctgccgaagccgaataaaagcgacgataacgcgctcgccgccgaggccgtcaatcgctacaaggccctgaaaaaagatgcccgcacgattgccgcccagcaaatcgcccgaatggagtcggccatgtgccagcgccgccgctggacgccggagaacttccacctgttcctggtcaaccatccgctggtacgccatctcacccgtcgcctggtatggggcgtatacggtgaggacaatcgcctgcaggcctgtttccgcgtggcggaagacaacagctacagcaatgccgatgacgatctctttcctctgccggacggcgacattcgtatcggccttccgcatctgctggaaatgacgccgcaggatgccgccgcttttggtcagctatttgccgattacgaactgctgccgccgttccgtcagctcgatcgcaactgctacaccctgacgcccgccgagctggcgactacagagctgacgcgctgggcaggacgcaagtgcccgagcggccgggtcatcgggctggcgaacaaaggctggctacgcggcgagccgcaggacgctggctggatcggctggatgctaaaaccgctgggacagcgggcgctggtaatggaaatcgacgaaggcttcgccgtgggcatgctgccggatgagctcagcgccgagcagctattaagcaaagtctggctgtacgccggaaatgcccggcagtacggctggggcggcaacgctccgcagcaggcccgattttcggagctggataaagtcgccctcagcgaactgatcaacgatattgaagggctatttgaataa

SEQ ID NO: 256094 - DNA, 213 bp, Klebsiella pneumoniae; identical to SEQ ID NO: 196007

SEQ ID NO: 256095 - DNA, 630 bp, Klebsiella pneumoniae
gtgagcaatgtttatccattccagaaaatgtcggggaataccgaactattccgtgctgagcctacgcctgaaggggtgaagatcaccaactctggtgacgatggtcgtgaaacagttcagcttattggctatgaggatgctgtgaaccgtcttgacgctggcgattatgacggctccagcagcgctggttatgacattcaccttgccgtagctgagggcggaaactgtgggtatttcgactttaccgcgcagcataacgtcaccatgtggcgctggctgattgctgcgacgttcgtttctgagatgaagcgcgagaacggcaccaccacggttactgaacctgacggcacatcatcgcaggtggcgatttattccaatggtaaagcgggaattgtggtttatccatttgctgaacggttgtcgctggcgaacaacattgagggggcgcttatcgagcgttacggccctgaacagggtacggaaaaagccattgtgttttatcagtccgtgctggatgtagacgccggggaactcacgcccgccgggcgcgagatattggcagagctacatgatggttttattgatgatatagaacaaaacggccttcccgaagcgccggtggcgcactaa

SEQ ID NO: 256096 - DNA, 180 bp, Klebsiella pneumoniae; identical to SEQ ID NO: 196005

SEQ ID NO: 256097 - DNA, 435 bp, Klebsiella pneumoniae; identical to SEQ ID NO: 196004

SEQ ID NO: 256098 - DNA, 456 bp, Klebsiella pneumoniae; identical to SEQ ID NO: 196002

SEQ ID NO: 256099 - DNA, 354 bp, Klebsiella pneumoniae; identical to SEQ ID NO: 196001

SEQ ID NO: 256100 - DNA, 2661 bp, Klebsiella pneumoniae
atgaccccgaaaaaattttccctgatacccggcaacattacccgcttctttattctcatggtcatcgtcctgctggcgacgatgggggtcatgatccaaagcgccgttaacgcctggctaaaagataaaagctaccaggttgtcgatgtcagctacgacttgcataaacgcatcgatacctggcgctacgccacctggcaaatctatgacaacatcgccgcaacctctgccagctcagcctccgaaaccgggttgcaggaaacgcgtttaaagcaggatgtttactatctggagaaaccgcggcgcaaaaccgaagcgctgatttttggctctcatgacggctcaacgctggaaatgacgcaaaaaatctccaactatctcgatatcctgtggggcgccgagacgattccctggtcaatgtattatctcaacggcctggataacagcctgatactggtttcaacgctgccgttaaaagatctctcttccagtttcaaagaatcgacgataagcagcgtcgttgaatcacgccgggctgagatgctgctgcaggccaatacccttgatgaacgcgagacgttttcgtcgctgcgccacctcgcctggcaaaacggctactacttcaccttacgcaccacctttaaccagcccggtcatctggcgacggtagtggccttcgatctgcccattaacgatctcattccgccgagtatgtctcttgagagtttccgtctggagcccgatccctcgcagaacggaaccagcaatccggataaagaagctgccgacatcgtcagcattaactttaacggcccgcagattgaaatcattacgaccattaataccaccggtatgcgcctggtctggatggtgccctttagcgagctgattctggaatcgctgcaaaatattttactgccgctgttgctgaacattggtctgctggcgctggcgctgttcggatttaccaccttccgtcactacagcggacgtaaaagcgtcgcgggaacggctatctcctcggcagccaatagtgaactacgcgctcagcgcgccattcacgaagagatcgtttccctgctgccgctcgggctgctggtgcacgatctggaggctaaccgtacggtgatcagcaatccgatcgccgatcatctgctgccgcatctgaacctgcaaaacatcattaatatggccgatcagcatcagggcgtgatccaggcgacggtgaacaatgaactgtatgaaatccgtcagttccgcagtcaggtttcgccacgaacgcaaatttttattattcgcgatcaggaccgtgaggtgatggtgaataagaaacttaagcaggcccagcgtctgtatgagaaaaatcagcagggccgcacggcgtttatgcagcatatcggcgcggcgctcaggcagccggcgcaaacgctggcggaagaagccgcggcgctcggcatggctgaaagccgcaggctggcccagcatgcggacgaactggtgcaattggtagatgaaatcgagctggcaaacctgctggagagcgatagctggaagagcgctcagggtctattctcgattcaggaactgatagatgaagtggtgcctgaagtgctacctatcatcaaacgtaagggtctacagctgctgattaacaacgccttgccggccaatgagcaacgctacggcgatcgcgacgccctgcgccgtacgcttttactgcttatccagtattcggttaccaccacgcctattggcaaaatcactctggaagtgagtaaagatgaatcagcggacgatcgtctgaccttccgtattctcgataccggcaacggcgtttccgcaaacgaaattgacaatatgcacttcccgttcctcaacgatacgcaggcagacctctacggcaaggccaacgccctcaccttctggctctgcgatcgcctgacgcgcaagctcggcgggcagctcaatatcaaagcacgcgagtcgctgggtacccgctactccctgcatttaaaaatggccgccagcgcagaggagagtgagtcaggggaacatctgctggatgacgtggtgatattgcttgatgtgactgccaatgaagtccgccgtattgtgactcgccagctggagagctggggagccacctgcatcacgccggatgacagaatcacaagtcaacaatatgatctctttttaacggataatccgtctaatcttactgcttcgggcttgcttttaagcgatgatgaagcccgggttcataagattggtcctggtcagctccgcgtaaactttaatatcagcgctgcgctgcaggaagctatcctgcaattgattgagcagcagcttgcagaggaagaggagcagccttcctctgccggtagcgaaagtaacgccgaactgcatgccagcggctattacacgctgtttgctgacacggtaccagatgatgttaagaggctgtataatgaacgggcaacgggcgatttcgccgcgctggcgcagaccgctcaccgcctcaaaggggcgtttgctatgctaaatctggtacccggcaagcagttatgtgaaacgcttgagcatctgatccgagaaaaagatgcgcaaggcatagaaaaatatatcagcgacattgacgactacgtcaagagcttgctgtag

SEQ ID NO: 256101 - DNA, 651 bp, Klebsiella pneumoniae
atgaacaatatgaacgtaattattgccgatgaccatccgatcgtactgttcggtattcgtaagtcacttgaacaaattgagtgggtgaacgttgtcggcgagtttgaagactccaccgcattaatcaacaatctgccaaaactggacgcacatgtcctgattaccgatttatccatgcccggtgataaatacggcgatggcattacgcttatcaaatacatcaagcgtcatttcccggacctgtcaatcattgtactgacgatgaataacaacccggcgatccttagcgcggttctggatctggacatagaagggattgtcctgaaacagggggcgccaaccgacctgcctaaagcgctggccgcgctgcaaaaaggcaaaaaattcactccggagagcgtttcgcgcctgctggaaaaaatcagcgccggcggttacggcgacaaacgtttgtcgccgaaagagagtgaagtgctgcgcctgttcgccgaaggcttcctggtcaccgagatagccaaaaagctcaaccgcagcatcaaaaccatcagtagccagaaaaaatcggcgatgatgaagctcggcgtggaaaacgacatcgccctgctgaactacctctcttccgtttccctgagctccaccgacaaagattaa

SEQ ID NO: 256102 - DNA, 2847 bp, Klebsiella pneumoniae
ttgaaatatctagcttctttccataacacgttaaaagtttcacgctatctgttcagagcgctggcggtactgctgtgggtgctggtcgcttttgtttcggtgttttacatcgtcaacgctttgcacgatcgggaatcggaaattcgccaggaatttaacctcaatgccgatcaggcgcagcgctatatacagcgtacggccgacgtgattaaggagctgaaatatgttgccggtaatcggccgatagatggcggcgaaggcggcgatacgccggcccagcgcggcaatatttcaattcctgattttgaaccgctctatccggattccgactgtgcgctgatgagttccacctggcgtaattcgctgcagtcattggcgtggtttatgcgctactggcgcgacaatttctccacggcctacgacctcaatcgtatttttttgattggtagcgacaatctgtgcatggccaacttcggcctgcgtgacatcccgctggagcgggaccaggcgcttaaagtactgcatcagcgcattgagcagtatcgcgacgcgccgcaaaacgagcgcggcaataatctgttctggataagccagggcgtgcgcccgggcgttggctatttctatgcgctcacgcccatctatgtggcgaatcgtctgcaggcgatgcttggcgtagagcaaaccatccgtatggaaagtttctttaccccaggcagtttgccgatgaacgtgacgatccttgacgataatggacagtcgctgatttcacttgccgggtcgaatagcaatatcaaaccggacgcgaagtggatgcaggaacgtctgtggtttggctataccgcgggttttcgcgagctggcgatgaaaaaaagcctgccgccgtcatccttaagtattgtctattcggtgccggtagatcaggtgctggaacgcattcggatgctgatactgaacgcggtggtactcaatctgctcaccggcgcgctccttttcgccctcgcccgaatgtatgaacgacggatttttattccggccgaaaatgatgcccagcgcctggaagagcatgagcagttcaaccgcaaaatcgttgcctccgcgccggtggggatctgtattttacgtaccctcgacggcaccaatatcctgagtaacgagctggcgcataactatctcaacatgttaactcatgaggaccggcagcggctgacgcaaattatctgcggccagcaggtaaactttgtcgatgtgctgaccagcaataataccaacctgcaaatcagctttgtccattcgcgctatcgcaacgagaacgtggcgatctgcgtactggtggacgtatcggcgcgcgtcaaaatggaagagtctctgcaggagatggcccaggccgccgagcaggccagccagtcgaaatcgatgttcctcgccaccgtcagccacgaactgcgtacgccgctgtacgggattatcggcaacctcgatctcttgcagaccaaggagctaccgaagggcgtcgatcgtctggtgacagcgatgaacaactcttccagcctgctgctgaaaatcattagcgatattctcgatttctctaaaattgagtccgagcagcttaaaattgagccgcgggagttttcgccacgtgaggtaatgaaccatatctccgccaactatctgccgctggtggtgcgtaaacatcttgggctgtactgctttattgagccagacgttccgcaactgatgtccggcgatccgatgcgcctgcagcaggttatttcaaacctgttgagtaatgcgattaagtttaccgataccggctgtattgtcctgcacgtagagcgggcggatgattatctgcgcatcagcgtacgcgacaccggcgaagggatcccggcgaaagaggtgctacgcctgttcgatccgttcttccaggtcggtaccggcgtgcagcgcaacttccagggaaccgggctcggcctggcgatttgtgaaaagcttatcagcatgatggatggcgatatcgccgtcgaaaccgaaccgggtatgggcagtcgattcactattcgtatcccgctttatggcgtgcaaaatacgccgccgctgaatattgatggcctggctgaaaaatgctgctggctggcgattgataacagctcgctggcggtgttcgtcgagcagttgctgaccttccacggcgttcctgtccgtcgttttgacgggcaaacgccgggagcggaagatattctgttaaccgatagcgagacgtatgaagcctgggctggctgcgcgatggtgatcttctctcgtcggcatatcggtattccgcaagagcgggcacccggcgagtggctgcatagcgtcgccacgccgcacgagctcctgccgctgctgggacgcatcttccatattgccgtagccagtgcggataacggccctgcgctagctgccgcggatgcgcaaaacgccagcaatgatgacatgatgattctggtggttgacgatcatccgatcaaccgtcgcctgctggccgatcagcttggatcgctgggctatcagtgcgtgacggcaaatgatggggtcgatgcgctgaatgtcctgagcaaacagcatattgatatcgtgctcagcgacgtcaacatgccgaacatggacggctatcgcctgactcagcgtattcgccagctggggctcacgctgccggtgattggcgtcaccgccaacgcgctggcggaagagaagcagcgctgcctggaatccggtatggacagctgtctttctaagccggtcacgctggatatcattaagcagacgttaacgctctatgctacgcgggtacgtaagggaagggagtag

SEQ ID NO: 256103 - DNA, 2634 bp, Klebsiella pneumoniae
atgagcgaccttgcgagagaaattacaccggtcaacattgaggaagagctgaagagctcctatctggattatgcgatgtcggtcattgttggccgtgcgctgccggatgtccgagatggcctgaagccggtacaccgtcgcgtactatacgccatgaacgtattgggcaatgactggaacaaagcctataaaaaatctgcccgtgtcgtgggtgacgtcatcggtaaataccaccctcatggtgatactgccgtatacgacaccattgtacgtatggcgcagccattctccctgcgttacatgctggtagatggccagggtaactttggttcggtcgacggagactccgccgcagcgatgcgttatacggaaatccgtatgtcgaagatcgcccatgaactgatggccgacctcgaaaaagagacggtggatttcgtcgataactatgacggcacggagaaaatccctgacgttatgccgaccaaaatcccgaacctgctagtcaacggttcgtccggtatcgcggtaggtatggcgaccaatattccgccgcacaacctgaccgaagtgatcaacggctgtctggcctacgttgaaaacgaagacatcagcattgaagggctgatggaacatattcccggcccggacttcccgaccgctgcgatcatcaacggtcgccgcggcattgaagaggcctatcgtacgggtcgcggaaaagtgtacattcgcgctcgcgcggaagtggaagctgacgcgaagaccggccgcgaaaccatcatcgtgcatgaaattccgtatcaggtgaacaaagcgcgcctgattgagaaaatcgccgagctggtcaaagacaaacgcgttgaaggcatcagcgcgctgcgcgacgagtctgataaagatggcatgcgcatcgtgattgaagtgaagcgcgatgcggtgggtgaggtggtgcttaacaacctctattcgcagactcagctccaggtctccttcggtatcaacatggttgccctgcaccatggtcagccgaagatcatgaacctgaaagaaattattgccgcgttcgtgcgccaccgccgcgaagtggtgacccgtcgtactatttttgaactgcgtaaagcccgcgatcgcgcgcatatcctcgaagcgctggcgattgccctggccaacatcgatccgattatcgaactgattcgccgcgcgccgactccggcggaagcgaaagcagcattaatcgcgcgttcatgggatctgggcaacgtttccgctatgctggaacgcgcaggcgatgacgccgctcgtccggagtggctggagcctgagttcggcgtacgcgacggtcagtactacctgaccgaacagcaggcgcaggcgattctggatctgcgtttgcagaaactgaccggtcttgagcatgaaaaactgctcgatgaatacaaagagctgctggaacagattgcggaactgctgcacattctgggcagcgccgatcgcctgatggaagttatccgtgaagagctggagctggtccgtgaacagttcggcgacgcgcgtcgtaccgagatcaccgctaacagcgcggatatcaacatcgaagacctgatcaaccaggaagatgttgtcgtgaccctttcgcatcagggctacgtgaagtaccagccgttaaccgattacgaagcacagcgtcgtggcggtaaaggtaaatctgcggcgcgtataaaagaagaagactttatcgaccgcctgctggtggccaacacccacgacacgatcctctgcttctccagccgcgggcgtctctactggatgaaggtttatcagttgccggaagccagccgcggcgcgcgcgggcgtccgatcgtcaacctgctgccgcttgaagccaacgaacgtatcactgcgattctgccggtacgtgagtacgaagagggcgtgaacgtctttatggctaccgccagcggtaccgtgaagaaaacggcgctgaccgaattcagccgtccgcgttctgccggtattatcgcggttaacctcaacgaaggcgacgagctgattggcgtcgatctgacctccggtcaggacgaagttatgctgttctccgccgccggtaaagtggtgcgctttaaagaggacgccgtccgcgcaatgggccgtaccgctaccggcgtacgcggcatcaagctggccggcgaagataaagtggtttcgttgatcattccgcgcggtgaaggggccatcctgaccgttacgcagaatggctacggtaaacgtaccgcggctgatgagtatccaaccaagtcgcgtgcgacccagggcgtaatctcaatcaaagtgaccgaacgcaacggttccgtggtgggtgcggtgcaagttgatgactgcgaccagattatgatgatcaccgatgcgggcacgctggtacgaacccgcgtttccgaggtgagcattgtcggccgtaacactcagggtgtgatcctgattcgtaccgcggaagatgaaaatgtggtcggtctgcagcgcgttgctgagccggttgatgacgaagagctggatgccatcgacggcagcgcggcggaaggcgatgaagatatcgcgccggaagcggacactgacgatgacatcgccgaagatgaagagtaa

SEQ ID NO: 256104 - DNA, 729 bp, Klebsiella pneumoniae
atgaatgccgaaaaaccgtcggtggcccacaatgttgatcataatgaaatcgctaaatttgaagccgtcgcatcgcgctggtgggatttagagggcgaattcaaaccgttacatcgcattaatcctttgcgtcttggctatattgcggagcgctcaggcggcctgtttggtaagaaagtgctggatgtcggctgcggcggcggcatcctggcagaaagcatggcccgggaaggcgctacggtcaccggtctggatatggggtttgaaccgcttcaggtcgcgaaactgcatgccctggagagcggtattcaggtcgactatgtccaggaaaccgtggaagaacacgcggcgaagcacgccggggagtacgatgtcgtcacctgcatggagatgctggagcacgtgccggacccgcagtcggtcgttcacgcctgcgcgcgtctggtcaagcctggcggccaggtattcttctcaaccattaaccgtaacggtaaagcctggctgatggcggttgtcggcgccgagtacgtcatgaagatggtgccgaagggaacccacgatgtgaagaaattcattaaaccagcggagctgctcggctgggtggatgagacaattctgaaagagcagcacattaccggtcttcattacaatccgctgaccaataccttcaagctggcgccgggggtggatgttaactatatgttgcatacaacggcgaaaaaagcataa

SEQ ID NO: 256105 - DNA, 432 bp, Klebsiella pneumoniae
gtgctcgatgaacgaatccatctgcttgaactcttcttccgtgtagtcttccagcagatgagtatcgtatttgccgtttttcaccattttcgacacgtggtcgaacagcgctggcggctcaaactggccgtaggcttttttgcgcaggtggaaaatcgccagacgagcggcgagatactggtagtccggcgcgtcgcgggagatcagatccgcagcggctttgataatggtttcgtgaatatcggcggttttaatgccgtcatagaactgaatgtgggaacgcagttctacctgggagatggatacgttattcagcccttctgccgcccaatccagcacgcggtggattttgtcgagattgatgcgctcggtgctaccgtcgcgctttgtcaccagcagactctgattcatgtggtttatacctgtccgtga

SEQ ID NO: 256106 - DNA, 360 bp, Klebsiella pneumoniae
atgaaacgcatagcctttattttttcgtccgcaccccatggctcagcatcgggcagggaagggctggatgccctgctggcgacatccgcactgacggaagagattggcgtcttcttcgtcggagatggcgtatttcagctccttccggatcagcggccagccgcagtgctggcgcgcgattatatctctacctttaaactcctgtcgctatacgatattgaacagtgctggatttgcgcggcttcagcgcgcgagcgcggcctgacttccgccacgccgtgggtcgtggacggtgaatggctggagccagaggctctgcgcgcccggctggacgattttaacgtgatactgcgtttctga

SEQ ID NO: 256107 - DNA, 387 bp, Klebsiella pneumoniae
atgcgttttgccattacggtgacggggccggcttatggtacgcagcaggccagcagcgcactgcagtttgcccgagccgtgttgcaggaaggccacgaattgctcagtatctttttctatcgtgaaggcgtctacaatgcgaatcagctaactgcccccgccagcgatgagtttgatctggtccgggcctggcaggcattacatgatgaacacggcgtctccttacatatctgtgtagccgcagctttacgccgtggcataaccgatgcacaggaggcgcagcagctgagtttgccagcgcataatttgcagccgggctttacgctgagtggattaggtgcgttggcggaagctgccttaacctgcgaccggatggtgcagttctga

SEQ ID NO: 256108 - DNA, 723 bp, Klebsiella pneumoniae
atgtccaggtcgcttttaaccaacgagaccagcgagcttgatttgctggatcaacgtccttttgaccagaccgacttcgatatccttaaatcctatgaagcggtagtggacgggttagcgatgctcatcggctcccactgtgaaatcgtactgcactcattgcaggacttaaaatgttccgctattcgtatcgccaacggtgaacataccggccgtcagatcggctcgccaattaccgaccttgcgttgcgcatgttgcacgatatgactggggccgatagcagcgtttccaaatgctattttactcgcgccaaaagcggcgtactgatgaaatcagtgaccatcgctatccgcaaccgtgaccatcgggttattggcctgctgtgcatcaacatgaaccttgacgtgccgttctcgcaaataatgagcacctttattccgccagaaacgacagaagtgaattcacaggtcaactttgcttcatcggttgacgacctggttgcacagacgcttgagttcactattgaagaggtgaatgccgaccgcaacgtttctaacaacgccaaaaatcgtcagatcgttctgaacctctatgagaaagggatctttgatatcaaagacgccattaatcaggtagcggatcggctgaacatctctaagcacacggtatatctctatattcgtcagttcaaaagcggagatttccaggggctggataaataa

SEQ ID NO: 256109 - DNA, 837 bp, Klebsiella pneumoniae
atgaaatcactgtttaaagtaacgctgctggcgaccacaatggccgtcgccctgaatgcaccgctgacctttgctgctgaaactgtgaccaaagcagccaccgaagcgaaagcggcacctgcaacggacagcaaatcggcattcaaaaatgacgatcagaaatctgcatatgcgctgggtgcatcgctgggacgttacatggaaaactccctgaaagaacaagaaaaactgggcatcaaattagataaagctcagctgattgccggcgttcaggacgcttttgccgataagagcaagctgtccgatcaggagatcgaacagactctgcaggcgtttgaaactcgcgtaaaaacagctgcccagcagaaaatggaaaaagatgctgctgagaatgaggcaaaaggtaaagcttatcgcgatgcctatgcgaaaaagcagggtgtgaaaaaagcgaattccggtctgctgtacaaagtagagaaagcgggtacgggcgaagcgccgaaagacagcgataccgttgttgttaactacaaaggtacgctgatcgatggtaaagagtttgataactcttacacccgtggcgaaccgctgtccttccgtctggacggcgtaatccctggctggactgaaggcctgaagaacatcaagaaaggcggtaaaattcagctggtcattccaccggatctggcttacggcaaaaccggcgtaccgggtatcccggctaactccactctggtatttgatgtagagctgttggacatcaaaccggctccgaaagcggacgccaagcctgaagccgcggccgaagcgccagccgctgacgcgaagaagtaa
